United States Patent Application Publication US 2018/0305689 A1 - sequence listing, part 160

SEQ ID NO: 2320124 - RNA, 19 nt, Artificial Sequence
  Description of Artificial Sequence: Synthetic oligonucleotide
  Sense strand starting at position 3827 of SEQ ID NO: 1885150
ucugcacucguagagcuaa

SEQ ID NO: 2320125 - RNA, 19 nt, Artificial Sequence
  Description of Artificial Sequence: Synthetic oligonucleotide
  Antisense strand to SEQ ID NO: 2320124
uuagcucuacgagugcaga

SEQ ID NO: 2320126 - RNA, 19 nt, Artificial Sequence
  Description of Artificial Sequence: Synthetic oligonucleotide
  Sense strand starting at position 3982 of SEQ ID NO: 1885150
uuuaaaggauucuggaaac

SEQ ID NO: 2320127 - RNA, 19 nt, Artificial Sequence
  Description of Artificial Sequence: Synthetic oligonucleotide
  Antisense strand to SEQ ID NO: 2320126
guuuccagaauccuuuaaa

SEQ ID NO: 2320128 - RNA, 19 nt, Artificial Sequence
  Description of Artificial Sequence: Synthetic oligonucleotide
  Sense strand starting at position 14 of SEQ ID NO: 1885151
gccugccuguuuccagaau

SEQ ID NO: 2320129 - RNA, 19 nt, Artificial Sequence
  Description of Artificial Sequence: Synthetic oligonucleotide
  Antisense strand to SEQ ID NO: 2320128
auucuggaaacaggcaggc

SEQ ID NO: 2320130 - RNA, 19 nt, Artificial Sequence
  Description of Artificial Sequence: Synthetic oligonucleotide
  Sense strand starting at position 172 of SEQ ID NO: 1885151
cugccuuagcucuacgagu

SEQ ID NO: 2320131 - RNA, 19 nt, Artificial Sequence
  Description of Artificial Sequence: Synthetic oligonucleotide
  Antisense strand to SEQ ID NO: 2320130
acucguagagcuaaggcag

SEQ ID NO: 2320132 - RNA, 19 nt, Artificial Sequence
  Description of Artificial Sequence: Synthetic oligonucleotide
  Sense strand starting at position 548 of SEQ ID NO: 1885151
ugauucugaugcucuagga

SEQ ID NO: 2320133 - RNA, 19 nt, Artificial Sequence
  Description of Artificial Sequence: Synthetic oligonucleotide
  Antisense strand to SEQ ID NO: 2320132
uccuagagcaucagaauca

SEQ ID NO: 2320134 - RNA, 19 nt, Artificial Sequence
  Description of Artificial Sequence: Synthetic oligonucleotide
  Sense strand starting at position 651 of SEQ ID NO: 1885151
gccuguagucugcaggaau

SEQ ID NO: 2320135 - RNA, 19 nt, Artificial Sequence
  Description of Artificial Sequence: Synthetic oligonucleotide
  Antisense strand to SEQ ID NO: 2320134
auuccugcagacuacaggc

SEQ ID NO: 2320136 - RNA, 19 nt, Artificial Sequence
  Description of Artificial Sequence: Synthetic oligonucleotide
  Sense strand starting at position 654 of SEQ ID NO: 1885151
uguagucugcaggaaugaa

SEQ ID NO: 2320137 - RNA, 19 nt, Artificial Sequence
  Description of Artificial Sequence: Synthetic oligonucleotide
  Antisense strand to SEQ ID NO: 2320136
uucauuccugcagacuaca

SEQ ID NO: 2320138 - RNA, 19 nt, Artificial Sequence
  Description of Artificial Sequence: Synthetic oligonucleotide
  Sense strand starting at position 694 of SEQ ID NO: 1885151
uucccagcagccugugaaa

SEQ ID NO: 2320139 - RNA, 19 nt, Artificial Sequence
  Description of Artificial Sequence: Synthetic oligonucleotide
  Antisense strand to SEQ ID NO: 2320138
uuucacaggcugcugggaa

SEQ ID NO: 2320140 - RNA, 19 nt, Artificial Sequence
  Description of Artificial Sequence: Synthetic oligonucleotide
  Sense strand starting at position 706 of SEQ ID NO: 1885151
ugugaaacugauggaggua

SEQ ID NO: 2320141 - RNA, 19 nt, Artificial Sequence
  Description of Artificial Sequence: Synthetic oligonucleotide
  Antisense strand to SEQ ID NO: 2320140
uaccuccaucaguuucaca

SEQ ID NO: 2320142 - RNA, 19 nt, Artificial Sequence
  Description of Artificial Sequence: Synthetic oligonucleotide
  Sense strand starting at position 1158 of SEQ ID NO: 1885151
uccagcaguuugucccaaa

SEQ ID NO: 2320143 - RNA, 19 nt, Artificial Sequence
  Description of Artificial Sequence: Synthetic oligonucleotide
  Antisense strand to SEQ ID NO: 2320142
uuugggacaaacugcugga

SEQ ID NO: 2320144 - RNA, 19 nt, Artificial Sequence
  Description of Artificial Sequence: Synthetic oligonucleotide
  Sense strand starting at position 1159 of SEQ ID NO: 1885151
ccagcaguuugucccaaau

SEQ ID NO: 2320145 - RNA, 19 nt, Artificial Sequence
  Description of Artificial Sequence: Synthetic oligonucleotide
  Antisense strand to SEQ ID NO: 2320144
auuugggacaaacugcugg

SEQ ID NO: 2320146 - RNA, 19 nt, Artificial Sequence
  Description of Artificial Sequence: Synthetic oligonucleotide
  Sense strand starting at position 1646 of SEQ ID NO: 1885151
ggauuauuauuacuguugu

SEQ ID NO: 2320147 - RNA, 19 nt, Artificial Sequence
  Description of Artificial Sequence: Synthetic oligonucleotide
  Antisense strand to SEQ ID NO: 2320146
acaacaguaauaauaaucc

SEQ ID NO: 2320148 - RNA, 19 nt, Artificial Sequence
  Description of Artificial Sequence: Synthetic oligonucleotide
  Sense strand starting at position 1657 of SEQ ID NO: 1885151
acuguuguucuccauagag

SEQ ID NO: 2320149 - RNA, 19 nt, Artificial Sequence
  Description of Artificial Sequence: Synthetic oligonucleotide
  Antisense strand to SEQ ID NO: 2320148
cucuauggagaacaacagu

SEQ ID NO: 2320150 - RNA, 19 nt, Artificial Sequence
  Description of Artificial Sequence: Synthetic oligonucleotide
  Sense strand starting at position 1659 of SEQ ID NO: 1885151
uguuguucuccauagagcu

SEQ ID NO: 2320151 - RNA, 19 nt, Artificial Sequence
  Description of Artificial Sequence: Synthetic oligonucleotide
  Antisense strand to SEQ ID NO: 2320150
agcucuauggagaacaaca

SEQ ID NO: 2320152 - RNA, 19 nt, Artificial Sequence
  Description of Artificial Sequence: Synthetic oligonucleotide
  Sense strand starting at position 1699 of SEQ ID NO: 1885151
uugacuaucucaguggagu

SEQ ID NO: 2320153 - RNA, 19 nt, Artificial Sequence
  Description of Artificial Sequence: Synthetic oligonucleotide
  Antisense strand to SEQ ID NO: 2320152
acuccacugagauagucaa

SEQ ID NO: 2320154 - RNA, 19 nt, Artificial Sequence
  Description of Artificial Sequence: Synthetic oligonucleotide
  Sense strand starting at position 1700 of SEQ ID NO: 1885151
ugacuaucucaguggaguu

SEQ ID NO: 2320155 - RNA, 19 nt, Artificial Sequence
  Description of Artificial Sequence: Synthetic oligonucleotide
  Antisense strand to SEQ ID NO: 2320154
aacuccacugagauaguca

SEQ ID NO: 2320156 - RNA, 19 nt, Artificial Sequence
  Description of Artificial Sequence: Synthetic oligonucleotide
  Sense strand starting at position 1710 of SEQ ID NO: 1885151
aguggaguuucccuccuaa

SEQ ID NO: 2320157 - RNA, 19 nt, Artificial Sequence
  Description of Artificial Sequence: Synthetic oligonucleotide
  Antisense strand to SEQ ID NO: 2320156
uuaggagggaaacuccacu

SEQ ID NO: 2320158 - RNA, 19 nt, Artificial Sequence
  Description of Artificial Sequence: Synthetic oligonucleotide
  Sense strand starting at position 1722 of SEQ ID NO: 1885151
cuccuaagaucuggaggau

SEQ ID NO: 2320159 - RNA, 19 nt, Artificial Sequence
  Description of Artificial Sequence: Synthetic oligonucleotide
  Antisense strand to SEQ ID NO: 2320158
auccuccagaucuuaggag

SEQ ID NO: 2320160 - RNA, 19 nt, Artificial Sequence
  Description of Artificial Sequence: Synthetic oligonucleotide
  Sense strand starting at position 2601 of SEQ ID NO: 1885151
accugagagucguuugcau

SEQ ID NO: 2320161 - RNA, 19 nt, Artificial Sequence
  Description of Artificial Sequence: Synthetic oligonucleotide
  Antisense strand to SEQ ID NO: 2320160
augcaaacgacucucaggu

SEQ ID NO: 2320162 - RNA, 19 nt, Artificial Sequence
  Description of Artificial Sequence: Synthetic oligonucleotide
  Sense strand starting at position 2603 of SEQ ID NO: 1885151
cugagagucguuugcauuc

SEQ ID NO: 2320163 - RNA, 19 nt, Artificial Sequence
  Description of Artificial Sequence: Synthetic oligonucleotide
  Antisense strand to SEQ ID NO: 2320162
gaaugcaaacgacucucag

SEQ ID NO: 2320164 - RNA, 19 nt, Artificial Sequence
  Description of Artificial Sequence: Synthetic oligonucleotide
  Sense strand starting at position 2613 of SEQ ID NO: 1885151
uuugcauucgugagcgcga

SEQ ID NO: 2320165 - RNA, 19 nt, Artificial Sequence
  Description of Artificial Sequence: Synthetic oligonucleotide
  Antisense strand to SEQ ID NO: 2320164
ucgcgcucacgaaugcaaa

SEQ ID NO: 2320166 - RNA, 19 nt, Artificial Sequence
  Description of Artificial Sequence: Synthetic oligonucleotide
  Sense strand starting at position 2626 of SEQ ID NO: 1885151
gcgcgagagcggaaaguuu

SEQ ID NO: 2320167 - RNA, 19 nt, Artificial Sequence
  Description of Artificial Sequence: Synthetic oligonucleotide
  Antisense strand to SEQ ID NO: 2320166
aaacuuuccgcucucgcgc

SEQ ID NO: 2320168 - RNA, 19 nt, Artificial Sequence
  Description of Artificial Sequence: Synthetic oligonucleotide
  Sense strand starting at position 2733 of SEQ ID NO: 1885151
uucguccucgcaucuguaa

SEQ ID NO: 2320169 - RNA, 19 nt, Artificial Sequence
  Description of Artificial Sequence: Synthetic oligonucleotide
  Antisense strand to SEQ ID NO: 2320168
uuacagaugcgaggacgaa

SEQ ID NO: 2320170 - RNA, 19 nt, Artificial Sequence
  Description of Artificial Sequence: Synthetic oligonucleotide
  Sense strand starting at position 2734 of SEQ ID NO: 1885151
ucguccucgcaucuguaaa

SEQ ID NO: 2320171 - RNA, 19 nt, Artificial Sequence
  Description of Artificial Sequence: Synthetic oligonucleotide
  Antisense strand to SEQ ID NO: 2320170
uuuacagaugcgaggacga

SEQ ID NO: 2320172 - RNA, 19 nt, Artificial Sequence
  Description of Artificial Sequence: Synthetic oligonucleotide
  Sense strand starting at position 2843 of SEQ ID NO: 1885151
cccugaguucgcugagucu

SEQ ID NO: 2320173 - RNA, 19 nt, Artificial Sequence
  Description of Artificial Sequence: Synthetic oligonucleotide
  Antisense strand to SEQ ID NO: 2320172
agacucagcgaacucaggg

SEQ ID NO: 2320174 - RNA, 19 nt, Artificial Sequence
  Description of Artificial Sequence: Synthetic oligonucleotide
  Sense strand starting at position 3186 of SEQ ID NO: 1885151
cuuuccuucucuguuguaa

SEQ ID NO: 2320175 - RNA, 19 nt, Artificial Sequence
  Description of Artificial Sequence: Synthetic oligonucleotide
  Antisense strand to SEQ ID NO: 2320174
uuacaacagagaaggaaag

SEQ ID NO: 2320176 - RNA, 19 nt, Artificial Sequence
  Description of Artificial Sequence: Synthetic oligonucleotide
  Sense strand starting at position 3199 of SEQ ID NO: 1885151
uuguaagaguucuccuagu

SEQ ID NO: 2320177 - RNA, 19 nt, Artificial Sequence
  Description of Artificial Sequence: Synthetic oligonucleotide
  Antisense strand to SEQ ID NO: 2320176
acuaggagaacucuuacaa

SEQ ID NO: 2320178 - RNA, 19 nt, Artificial Sequence
  Description of Artificial Sequence: Synthetic oligonucleotide
  Sense strand starting at position 3220 of SEQ ID NO: 1885151
cugguagacgcucaggaaa

SEQ ID NO: 2320179 - RNA, 19 nt, Artificial Sequence
  Description of Artificial Sequence: Synthetic oligonucleotide
  Antisense strand to SEQ ID NO: 2320178
uuuccugagcgucuaccag

SEQ ID NO: 2320180 - RNA, 19 nt, Artificial Sequence
  Description of Artificial Sequence: Synthetic oligonucleotide
  Sense strand starting at position 3299 of SEQ ID NO: 1885151
accagcguccaguauugau

SEQ ID NO: 2320181 - RNA, 19 nt, Artificial Sequence
  Description of Artificial Sequence: Synthetic oligonucleotide
  Antisense strand to SEQ ID NO: 2320180
aucaauacuggacgcuggu

SEQ ID NO: 2320182 - RNA, 19 nt, Artificial Sequence
  Description of Artificial Sequence: Synthetic oligonucleotide
  Sense strand starting at position 3308 of SEQ ID NO: 1885151
caguauugaucaccaagag

SEQ ID NO: 2320183 - RNA, 19 nt, Artificial Sequence
  Description of Artificial Sequence: Synthetic oligonucleotide
  Antisense strand to SEQ ID NO: 2320182
cucuuggugaucaauacug

SEQ ID NO: 2320184 - RNA, 19 nt, Artificial Sequence
  Description of Artificial Sequence: Synthetic oligonucleotide
  Sense strand starting at position 3341 of SEQ ID NO: 1885151
guuugugugucagcugaaa

SEQ ID NO: 2320185 - RNA, 19 nt, Artificial Sequence
  Description of Artificial Sequence: Synthetic oligonucleotide
  Antisense strand to SEQ ID NO: 2320184
uuucagcugacacacaaac

SEQ ID NO: 2320186 - RNA, 19 nt, Artificial Sequence
  Description of Artificial Sequence: Synthetic oligonucleotide
  Sense strand starting at position 3442 of SEQ ID NO: 1885151
guguguaugcacgcacuua

SEQ ID NO: 2320187 - RNA, 19 nt, Artificial Sequence
  Description of Artificial Sequence: Synthetic oligonucleotide
  Antisense strand to SEQ ID NO: 2320186
uaagugcgugcauacacac

SEQ ID NO: 2320188 - RNA, 19 nt, Artificial Sequence
  Description of Artificial Sequence: Synthetic oligonucleotide
  Sense strand starting at position 3443 of SEQ ID NO: 1885151
uguguaugcacgcacuuau

SEQ ID NO: 2320189 - RNA, 19 nt, Artificial Sequence
  Description of Artificial Sequence: Synthetic oligonucleotide
  Antisense strand to SEQ ID NO: 2320188
auaagugcgugcauacaca

SEQ ID NO: 2320190 - RNA, 19 nt, Artificial Sequence
  Description of Artificial Sequence: Synthetic oligonucleotide
  Sense strand starting at position 3452 of SEQ ID NO: 1885151
acgcacuuauacgucuaua

SEQ ID NO: 2320191 - RNA, 19 nt, Artificial Sequence
  Description of Artificial Sequence: Synthetic oligonucleotide
  Antisense strand to SEQ ID NO: 2320190
uauagacguauaagugcgu

SEQ ID NO: 2320192 - RNA, 19 nt, Artificial Sequence
  Description of Artificial Sequence: Synthetic oligonucleotide
  Sense strand starting at position 3521 of SEQ ID NO: 1885151
aaagguguggcucagcaua

SEQ ID NO: 2320193 - RNA, 19 nt, Artificial Sequence
  Description of Artificial Sequence: Synthetic oligonucleotide
  Antisense strand to SEQ ID NO: 2320192
uaugcugagccacaccuuu

SEQ ID NO: 2320194 - RNA, 19 nt, Artificial Sequence
  Description of Artificial Sequence: Synthetic oligonucleotide
  Sense strand starting at position 3523 of SEQ ID NO: 1885151
agguguggcucagcauaua

SEQ ID NO: 2320195 - RNA, 19 nt, Artificial Sequence
  Description of Artificial Sequence: Synthetic oligonucleotide
  Antisense strand to SEQ ID NO: 2320194
uauaugcugagccacaccu

SEQ ID NO: 2320196 - RNA, 19 nt, Artificial Sequence
  Description of Artificial Sequence: Synthetic oligonucleotide
  Sense strand starting at position 3526 of SEQ ID NO: 1885151
uguggcucagcauauauaa

SEQ ID NO: 2320197 - RNA, 19 nt, Artificial Sequence
  Description of Artificial Sequence: Synthetic oligonucleotide
  Antisense strand to SEQ ID NO: 2320196
uuauauaugcugagccaca

SEQ ID NO: 2320198 - RNA, 19 nt, Artificial Sequence
  Description of Artificial Sequence: Synthetic oligonucleotide
  Sense strand starting at position 3785 of SEQ ID NO: 1885151
uugaacuauguuggauauu

SEQ ID NO: 2320199 - RNA, 19 nt, Artificial Sequence
  Description of Artificial Sequence: Synthetic oligonucleotide
  Antisense strand to SEQ ID NO: 2320198
aauauccaacauaguucaa

SEQ ID NO: 2320200 - RNA, 19 nt, Artificial Sequence
  Description of Artificial Sequence: Synthetic oligonucleotide
  Sense strand starting at position 3786 of SEQ ID NO: 1885151
ugaacuauguuggauauuu

SEQ ID NO: 2320201 - RNA, 19 nt, Artificial Sequence
  Description of Artificial Sequence: Synthetic oligonucleotide
  Antisense strand to SEQ ID NO: 2320200
aaauauccaacauaguuca

SEQ ID NO: 2320202 - RNA, 19 nt, Artificial Sequence
  Description of Artificial Sequence: Synthetic oligonucleotide
  Sense strand starting at position 3835 of SEQ ID NO: 1885151
uccgaagacuaauaugaga

SEQ ID NO: 2320203 - RNA, 19 nt, Artificial Sequence
  Description of Artificial Sequence: Synthetic oligonucleotide
  Antisense strand to SEQ ID NO: 2320202
ucucauauuagucuucgga

SEQ ID NO: 2320204 - RNA, 19 nt, Artificial Sequence
  Description of Artificial Sequence: Synthetic oligonucleotide
  Sense strand starting at position 3861 of SEQ ID NO: 1885151
gagggauuccucuagcucu

SEQ ID NO: 2320205 - RNA, 19 nt, Artificial Sequence
  Description of Artificial Sequence: Synthetic oligonucleotide
  Antisense strand to SEQ ID NO: 2320204
agagcuagaggaaucccuc

SEQ ID NO: 2320206 - RNA, 19 nt, Artificial Sequence
  Description of Artificial Sequence: Synthetic oligonucleotide
  Sense strand starting at position 3931 of SEQ ID NO: 1885151
gccucccacugcuuugaau

SEQ ID NO: 2320207 - RNA, 19 nt, Artificial Sequence
  Description of Artificial Sequence: Synthetic oligonucleotide
  Antisense strand to SEQ ID NO: 2320206
auucaaagcagugggaggc

SEQ ID NO: 2320208 - RNA, 19 nt, Artificial Sequence
  Description of Artificial Sequence: Synthetic oligonucleotide
  Sense strand starting at position 402 of SEQ ID NO: 1885152
ggaagaauaugcuaauuug

SEQ ID NO: 2320209 - RNA, 19 nt, Artificial Sequence
  Description of Artificial Sequence: Synthetic oligonucleotide
  Antisense strand to SEQ ID NO: 2320208
caaauuagcauauucuucc

SEQ ID NO: 2320210 - RNA, 19 nt, Artificial Sequence
  Description of Artificial Sequence: Synthetic oligonucleotide
  Sense strand starting at position 434 of SEQ ID NO: 1885152
guuuaaaugcgagcguuug

SEQ ID NO: 2320211 - RNA, 19 nt, Artificial Sequence
  Description of Artificial Sequence: Synthetic oligonucleotide
  Antisense strand to SEQ ID NO: 2320210
caaacgcucgcauuuaaac

SEQ ID NO: 2320212 - RNA, 19 nt, Artificial Sequence
  Description of Artificial Sequence: Synthetic oligonucleotide
  Sense strand starting at position 480 of SEQ ID NO: 1885152
aggucugugugcguuauuu

SEQ ID NO: 2320213 - RNA, 19 nt, Artificial Sequence
  Description of Artificial Sequence: Synthetic oligonucleotide
  Antisense strand to SEQ ID NO: 2320212
aaauaacgcacacagaccu

SEQ ID NO: 2320214 - RNA, 19 nt, Artificial Sequence
  Description of Artificial Sequence: Synthetic oligonucleotide
  Sense strand starting at position 506 of SEQ ID NO: 1885152
cccaaacugugagcuuuau

SEQ ID NO: 2320215 - RNA, 19 nt, Artificial Sequence
  Description of Artificial Sequence: Synthetic oligonucleotide
  Antisense strand to SEQ ID NO: 2320214
auaaagcucacaguuuggg

SEQ ID NO: 2320216 - RNA, 19 nt, Artificial Sequence
  Description of Artificial Sequence: Synthetic oligonucleotide
  Sense strand starting at position 801 of SEQ ID NO: 1885152
ccugguaaggauuggagau

SEQ ID NO: 2320217 - RNA, 19 nt, Artificial Sequence
  Description of Artificial Sequence: Synthetic oligonucleotide
  Antisense strand to SEQ ID NO: 2320216
aucuccaauccuuaccagg

SEQ ID NO: 2320218 - RNA, 19 nt, Artificial Sequence
  Description of Artificial Sequence: Synthetic oligonucleotide
  Sense strand starting at position 802 of SEQ ID NO: 1885152
cugguaaggauuggagauu

SEQ ID NO: 2320219 - RNA, 19 nt, Artificial Sequence
  Description of Artificial Sequence: Synthetic oligonucleotide
  Antisense strand to SEQ ID NO: 2320218
aaucuccaauccuuaccag

SEQ ID NO: 2320220 - RNA, 19 nt, Artificial Sequence
  Description of Artificial Sequence: Synthetic oligonucleotide
  Sense strand starting at position 811 of SEQ ID NO: 1885152
auuggagauugcuccagaa

SEQ ID NO: 2320221 - RNA, 19 nt, Artificial Sequence
  Description of Artificial Sequence: Synthetic oligonucleotide
  Antisense strand to SEQ ID NO: 2320220
uucuggagcaaucuccaau

SEQ ID NO: 2320222 - RNA, 19 nt, Artificial Sequence
  Description of Artificial Sequence: Synthetic oligonucleotide
  Sense strand starting at position 878 of SEQ ID NO: 1885152
aagcuauacccuugagggu

SEQ ID NO: 2320223 - RNA, 19 nt, Artificial Sequence
  Description of Artificial Sequence: Synthetic oligonucleotide
  Antisense strand to SEQ ID NO: 2320222
acccucaaggguauagcuu

SEQ ID NO: 2320224 - RNA, 19 nt, Artificial Sequence
  Description of Artificial Sequence: Synthetic oligonucleotide
  Sense strand starting at position 912 of SEQ ID NO: 1885152
uugauuuccucaggaccuu

SEQ ID NO: 2320225 - RNA, 19 nt, Artificial Sequence
  Description of Artificial Sequence: Synthetic oligonucleotide
  Antisense strand to SEQ ID NO: 2320224
aagguccugaggaaaucaa

SEQ ID NO: 2320226 - RNA, 19 nt, Artificial Sequence
  Description of Artificial Sequence: Synthetic oligonucleotide
  Sense strand starting at position 963 of SEQ ID NO: 1885152
ucaaguauauugcugcuua

SEQ ID NO: 2320227 - RNA, 19 nt, Artificial Sequence
  Description of Artificial Sequence: Synthetic oligonucleotide
  Antisense strand to SEQ ID NO: 2320226
uaagcagcaauauacuuga

SEQ ID NO: 2320228 - RNA, 19 nt, Artificial Sequence
  Description of Artificial Sequence: Synthetic oligonucleotide
  Sense strand starting at position 967 of SEQ ID NO: 1885152
guauauugcugcuuagaaa

SEQ ID NO: 2320229 - RNA, 19 nt, Artificial Sequence
  Description of Artificial Sequence: Synthetic oligonucleotide
  Antisense strand to SEQ ID NO: 2320228
uuucuaagcagcaauauac

SEQ ID NO: 2320230 - RNA, 19 nt, Artificial Sequence
  Description of Artificial Sequence: Synthetic oligonucleotide
  Sense strand starting at position 1046 of SEQ ID NO: 1885152
cugaaauauuuacgauaca

SEQ ID NO: 2320231 - RNA, 19 nt, Artificial Sequence
  Description of Artificial Sequence: Synthetic oligonucleotide
  Antisense strand to SEQ ID NO: 2320230
uguaucguaaauauuucag

SEQ ID NO: 2320232 - RNA, 19 nt, Artificial Sequence
  Description of Artificial Sequence: Synthetic oligonucleotide
  Sense strand starting at position 1047 of SEQ ID NO: 1885152
ugaaauauuuacgauacac

SEQ ID NO: 2320233 - RNA, 19 nt, Artificial Sequence
  Description of Artificial Sequence: Synthetic oligonucleotide
  Antisense strand to SEQ ID NO: 2320232
guguaucguaaauauuuca

SEQ ID NO: 2320234 - RNA, 19 nt, Artificial Sequence
  Description of Artificial Sequence: Synthetic oligonucleotide
  Sense strand starting at position 1641 of SEQ ID NO: 1885152
cccugcgugcagguuuaua

SEQ ID NO: 2320235 - RNA, 19 nt, Artificial Sequence
  Description of Artificial Sequence: Synthetic oligonucleotide
  Antisense strand to SEQ ID NO: 2320234
uauaaaccugcacgcaggg

SEQ ID NO: 2320236 - RNA, 19 nt, Artificial Sequence
  Description of Artificial Sequence: Synthetic oligonucleotide
  Sense strand starting at position 1702 of SEQ ID NO: 1885152
caggucucaguuuggagaa

SEQ ID NO: 2320237 - RNA, 19 nt, Artificial Sequence
  Description of Artificial Sequence: Synthetic oligonucleotide
  Antisense strand to SEQ ID NO: 2320236
uucuccaaacugagaccug

SEQ ID NO: 2320238 - RNA, 19 nt, Artificial Sequence
  Description of Artificial Sequence: Synthetic oligonucleotide
  Sense strand starting at position 1735 of SEQ ID NO: 1885152
ccacuucuuguguaguguu

SEQ ID NO: 2320239 - RNA, 19 nt, Artificial Sequence
  Description of Artificial Sequence: Synthetic oligonucleotide
  Antisense strand to SEQ ID NO: 2320238
aacacuacacaagaagugg

SEQ ID NO: 2320240 - RNA, 19 nt, Artificial Sequence
  Description of Artificial Sequence: Synthetic oligonucleotide
  Sense strand starting at position 1742 of SEQ ID NO: 1885152
uuguguaguguuccuguga

SEQ ID NO: 2320241 - RNA, 19 nt, Artificial Sequence
  Description of Artificial Sequence: Synthetic oligonucleotide
  Antisense strand to SEQ ID NO: 2320240
ucacaggaacacuacacaa

SEQ ID NO: 2320242 - RNA, 19 nt, Artificial Sequence
  Description of Artificial Sequence: Synthetic oligonucleotide
  Sense strand starting at position 1773 of SEQ ID NO: 1885152
gguugcaaguaucuggaaa

SEQ ID NO: 2320243 - RNA, 19 nt, Artificial Sequence
  Description of Artificial Sequence: Synthetic oligonucleotide
  Antisense strand to SEQ ID NO: 2320242
uuuccagauacuugcaacc

SEQ ID NO: 2320244 - RNA, 19 nt, Artificial Sequence
  Description of Artificial Sequence: Synthetic oligonucleotide
  Sense strand starting at position 1810 of SEQ ID NO: 1885152
guggauguuguugagacuu

SEQ ID NO: 2320245 - RNA, 19 nt, Artificial Sequence
  Description of Artificial Sequence: Synthetic oligonucleotide
  Antisense strand to SEQ ID NO: 2320244
aagucucaacaacauccac

SEQ ID NO: 2320246 - RNA, 19 nt, Artificial Sequence
  Description of Artificial Sequence: Synthetic oligonucleotide
  Sense strand starting at position 1830 of SEQ ID NO: 1885152
ugagacuucuguuucuaag

SEQ ID NO: 2320247 - RNA, 19 nt, Artificial Sequence
  Description of Artificial Sequence: Synthetic oligonucleotide
  Antisense strand to SEQ ID NO: 2320246
cuuagaaacagaagucuca

SEQ ID NO: 2320248 - RNA, 19 nt, Artificial Sequence
  Description of Artificial Sequence: Synthetic oligonucleotide
  Sense strand starting at position 1832 of SEQ ID NO: 1885152
agacuucuguuucuaaggu

SEQ ID NO: 2320249 - RNA, 19 nt, Artificial Sequence
  Description of Artificial Sequence: Synthetic oligonucleotide
  Antisense strand to SEQ ID NO: 2320248
accuuagaaacagaagucu

SEQ ID NO: 2320250 - RNA, 19 nt, Artificial Sequence
  Description of Artificial Sequence: Synthetic oligonucleotide
  Sense strand starting at position 1865 of SEQ ID NO: 1885152
ccaaacucuccuggagagu

SEQ ID NO: 2320251 - RNA, 19 nt, Artificial Sequence
  Description of Artificial Sequence: Synthetic oligonucleotide
  Antisense strand to SEQ ID NO: 2320250
acucuccaggagaguuugg

SEQ ID NO: 2320252 - RNA, 19 nt, Artificial Sequence
  Description of Artificial Sequence: Synthetic oligonucleotide
  Sense strand starting at position 2599 of SEQ ID NO: 1885152
ggauuacuggguugaaauc

SEQ ID NO: 2320253 - RNA, 19 nt, Artificial Sequence
  Description of Artificial Sequence: Synthetic oligonucleotide
  Antisense strand to SEQ ID NO: 2320252
gauuucaacccaguaaucc

SEQ ID NO: 2320254 - RNA, 19 nt, Artificial Sequence
  Description of Artificial Sequence: Synthetic oligonucleotide
  Sense strand starting at position 2686 of SEQ ID NO: 1885152
ggucaucucuaucuucuuu

SEQ ID NO: 2320255 - RNA, 19 nt, Artificial Sequence
  Description of Artificial Sequence: Synthetic oligonucleotide
  Antisense strand to SEQ ID NO: 2320254
aaagaagauagagaugacc

SEQ ID NO: 2320256 - RNA, 19 nt, Artificial Sequence
  Description of Artificial Sequence: Synthetic oligonucleotide
  Sense strand starting at position 2827 of SEQ ID NO: 1885152
cuuguuuauggucauugua

SEQ ID NO: 2320257 - RNA, 19 nt, Artificial Sequence
  Description of Artificial Sequence: Synthetic oligonucleotide
  Antisense strand to SEQ ID NO: 2320256
uacaaugaccauaaacaag

SEQ ID NO: 2320258 - RNA, 19 nt, Artificial Sequence
  Description of Artificial Sequence: Synthetic oligonucleotide
  Sense strand starting at position 2829 of SEQ ID NO: 1885152
uguuuauggucauuguaag

SEQ ID NO: 2320259 - RNA, 19 nt, Artificial Sequence
  Description of Artificial Sequence: Synthetic oligonucleotide
  Antisense strand to SEQ ID NO: 2320258
cuuacaaugaccauaaaca

SEQ ID NO: 2320260 - RNA, 19 nt, Artificial Sequence
  Description of Artificial Sequence: Synthetic oligonucleotide
  Sense strand starting at position 2830 of SEQ ID NO: 1885152
guuuauggucauuguaaga

SEQ ID NO: 2320261 - RNA, 19 nt, Artificial Sequence
  Description of Artificial Sequence: Synthetic oligonucleotide
  Antisense strand to SEQ ID NO: 2320260
ucuuacaaugaccauaaac

SEQ ID NO: 2320262 - RNA, 19 nt, Artificial Sequence
  Description of Artificial Sequence: Synthetic oligonucleotide
  Sense strand starting at position 2843 of SEQ ID NO: 1885152
guaagaugcccgcauguua

SEQ ID NO: 2320263 - RNA, 19 nt, Artificial Sequence
  Description of Artificial Sequence: Synthetic oligonucleotide
  Antisense strand to SEQ ID NO: 2320262
uaacaugcgggcaucuuac

SEQ ID NO: 2320264 - RNA, 19 nt, Artificial Sequence
  Description of Artificial Sequence: Synthetic oligonucleotide
  Sense strand starting at position 2937 of SEQ ID NO: 1885152
ggcacugugcucuauugag

SEQ ID NO: 2320265 - RNA, 19 nt, Artificial Sequence
  Description of Artificial Sequence: Synthetic oligonucleotide
  Antisense strand to SEQ ID NO: 2320264
cucaauagagcacagugcc

SEQ ID NO: 2320266 - RNA, 19 nt, Artificial Sequence
  Description of Artificial Sequence: Synthetic oligonucleotide
  Sense strand starting at position 3184 of SEQ ID NO: 1885152
gugucaccucaggguagaa

SEQ ID NO: 2320267 - RNA, 19 nt, Artificial Sequence
  Description of Artificial Sequence: Synthetic oligonucleotide
  Antisense strand to SEQ ID NO: 2320266
uucuacccugaggugacac

SEQ ID NO: 2320268 - RNA, 19 nt, Artificial Sequence
  Description of Artificial Sequence: Synthetic oligonucleotide
  Sense strand starting at position 3224 of SEQ ID NO: 1885152
auuugaaacucugauagaa

SEQ ID NO: 2320269 - RNA, 19 nt, Artificial Sequence
  Description of Artificial Sequence: Synthetic oligonucleotide
  Antisense strand to SEQ ID NO: 2320268
uucuaucagaguuucaaau

SEQ ID NO: 2320270 - RNA, 19 nt, Artificial Sequence
  Description of Artificial Sequence: Synthetic oligonucleotide
  Sense strand starting at position 3226 of SEQ ID NO: 1885152
uugaaacucugauagaaau

SEQ ID NO: 2320271 - RNA, 19 nt, Artificial Sequence
  Description of Artificial Sequence: Synthetic oligonucleotide
  Antisense strand to SEQ ID NO: 2320270
auuucuaucagaguuucaa

SEQ ID NO: 2320272 - RNA, 19 nt, Artificial Sequence
  Description of Artificial Sequence: Synthetic oligonucleotide
  Sense strand starting at position 3249 of SEQ ID NO: 1885152
gaugcuagauuugaagaaa

SEQ ID NO: 2320273 - RNA, 19 nt, Artificial Sequence
  Description of Artificial Sequence: Synthetic oligonucleotide
  Antisense strand to SEQ ID NO: 2320272
uuucuucaaaucuagcauc

SEQ ID NO: 2320274 - RNA, 19 nt, Artificial Sequence
  Description of Artificial Sequence: Synthetic oligonucleotide
  Sense strand starting at position 3598 of SEQ ID NO: 1885152
cuuaaucaguguuaauuuc

SEQ ID NO: 2320275 - RNA, 19 nt, Artificial Sequence
  Description of Artificial Sequence: Synthetic oligonucleotide
  Antisense strand to SEQ ID NO: 2320274
gaaauuaacacugauuaag

SEQ ID NO: 2320276 - RNA, 19 nt, Artificial Sequence
  Description of Artificial Sequence: Synthetic oligonucleotide
  Sense strand starting at position 3605 of SEQ ID NO: 1885152
aguguuaauuucccagugu

SEQ ID NO: 2320277 - RNA, 19 nt, Artificial Sequence
  Description of Artificial Sequence: Synthetic oligonucleotide
  Antisense strand to SEQ ID NO: 2320276
acacugggaaauuaacacu

SEQ ID NO: 2320278 - RNA, 19 nt, Artificial Sequence
  Description of Artificial Sequence: Synthetic oligonucleotide
  Sense strand starting at position 3693 of SEQ ID NO: 1885152
cucucuagauugcuggaau

SEQ ID NO: 2320279 - RNA, 19 nt, Artificial Sequence
  Description of Artificial Sequence: Synthetic oligonucleotide
  Antisense strand to SEQ ID NO: 2320278
auuccagcaaucuagagag

SEQ ID NO: 2320280 - RNA, 19 nt, Artificial Sequence
  Description of Artificial Sequence: Synthetic oligonucleotide
  Sense strand starting at position 3704 of SEQ ID NO: 1885152
gcuggaauuguauggaugu

SEQ ID NO: 2320281 - RNA, 19 nt, Artificial Sequence
  Description of Artificial Sequence: Synthetic oligonucleotide
  Antisense strand to SEQ ID NO: 2320280
acauccauacaauuccagc

SEQ ID NO: 2320282 - RNA, 19 nt, Artificial Sequence
  Description of Artificial Sequence: Synthetic oligonucleotide
  Sense strand starting at position 3730 of SEQ ID NO: 1885152
uugguuuagugaucucuuc

SEQ ID NO: 2320283 - RNA, 19 nt, Artificial Sequence
  Description of Artificial Sequence: Synthetic oligonucleotide
  Antisense strand to SEQ ID NO: 2320282
gaagagaucacuaaaccaa

SEQ ID NO: 2320284 - RNA, 19 nt, Artificial Sequence
  Description of Artificial Sequence: Synthetic oligonucleotide
  Sense strand starting at position 3737 of SEQ ID NO: 1885152
agugaucucuuccuugaca

SEQ ID NO: 2320285 - RNA, 19 nt, Artificial Sequence
  Description of Artificial Sequence: Synthetic oligonucleotide
  Antisense strand to SEQ ID NO: 2320284
ugucaaggaagagaucacu

SEQ ID NO: 2320286 - RNA, 19 nt, Artificial Sequence
  Description of Artificial Sequence: Synthetic oligonucleotide
  Sense strand starting at position 3738 of SEQ ID NO: 1885152
gugaucucuuccuugacac

SEQ ID NO: 2320287 - RNA, 19 nt, Artificial Sequence
  Description of Artificial Sequence: Synthetic oligonucleotide
  Antisense strand to SEQ ID NO: 2320286
gugucaaggaagagaucac

SEQ ID NO: 2320288 - RNA, 19 nt, Artificial Sequence
  Description of Artificial Sequence: Synthetic oligonucleotide
  Sense strand starting at position 170 of SEQ ID NO: 1885153
caaacugguuguccaugau

SEQ ID NO: 2320289 - RNA, 19 nt, Artificial Sequence
  Description of Artificial Sequence: Synthetic oligonucleotide
  Antisense strand to SEQ ID NO: 2320288
aucauggacaaccaguuug

SEQ ID NO: 2320290 - RNA, 19 nt, Artificial Sequence
  Description of Artificial Sequence: Synthetic oligonucleotide
  Sense strand starting at position 174 of SEQ ID NO: 1885153
cugguuguccaugauugga

SEQ ID NO: 2320291 - RNA, 19 nt, Artificial Sequence
  Description of Artificial Sequence: Synthetic oligonucleotide
  Antisense strand to SEQ ID NO: 2320290
uccaaucauggacaaccag

SEQ ID NO: 2320292 - RNA, 19 nt, Artificial Sequence
  Description of Artificial Sequence: Synthetic oligonucleotide
  Sense strand starting at position 193 of SEQ ID NO: 1885153
uccuguuaucacuguugac

SEQ ID NO: 2320293 - RNA, 19 nt, Artificial Sequence
  Description of Artificial Sequence: Synthetic oligonucleotide
  Antisense strand to SEQ ID NO: 2320292
gucaacagugauaacagga

SEQ ID NO: 2320294 - RNA, 19 nt, Artificial Sequence
  Description of Artificial Sequence: Synthetic oligonucleotide
  Sense strand starting at position 197 of SEQ ID NO: 1885153
guuaucacuguugacuauu

SEQ ID NO: 2320295 - RNA, 19 nt, Artificial Sequence
  Description of Artificial Sequence: Synthetic oligonucleotide
  Antisense strand to SEQ ID NO: 2320294
aauagucaacagugauaac

SEQ ID NO: 2320296 - RNA, 19 nt, Artificial Sequence
  Description of Artificial Sequence: Synthetic oligonucleotide
  Sense strand starting at position 206 of SEQ ID NO: 1885153
guugacuauuuauacacau

SEQ ID NO: 2320297 - RNA, 19 nt, Artificial Sequence
  Description of Artificial Sequence: Synthetic oligonucleotide
  Antisense strand to SEQ ID NO: 2320296
auguguauaaauagucaac

SEQ ID NO: 2320298 - RNA, 19 nt, Artificial Sequence
  Description of Artificial Sequence: Synthetic oligonucleotide
  Sense strand starting at position 278 of SEQ ID NO: 1885153
uuguauauguucucuuaca

SEQ ID NO: 2320299 - RNA, 19 nt, Artificial Sequence
  Description of Artificial Sequence: Synthetic oligonucleotide
  Antisense strand to SEQ ID NO: 2320298
uguaagagaacauauacaa

SEQ ID NO: 2320300 - RNA, 19 nt, Artificial Sequence
  Description of Artificial Sequence: Synthetic oligonucleotide
  Sense strand starting at position 279 of SEQ ID NO: 1885153
uguauauguucucuuacau

SEQ ID NO: 2320301 - RNA, 19 nt, Artificial Sequence
  Description of Artificial Sequence: Synthetic oligonucleotide
  Antisense strand to SEQ ID NO: 2320300
auguaagagaacauauaca

SEQ ID NO: 2320302 - RNA, 19 nt, Artificial Sequence
  Description of Artificial Sequence: Synthetic oligonucleotide
  Sense strand starting at position 423 of SEQ ID NO: 1885153
cccauuaauuggcuuuagu

SEQ ID NO: 2320303 - RNA, 19 nt, Artificial Sequence
  Description of Artificial Sequence: Synthetic oligonucleotide
  Antisense strand to SEQ ID NO: 2320302
acuaaagccaauuaauggg

SEQ ID NO: 2320304 - RNA, 19 nt, Artificial Sequence
  Description of Artificial Sequence: Synthetic oligonucleotide
  Sense strand starting at position 500 of SEQ ID NO: 1885153
gagacagucuucucuguug

SEQ ID NO: 2320305 - RNA, 19 nt, Artificial Sequence
  Description of Artificial Sequence: Synthetic oligonucleotide
  Antisense strand to SEQ ID NO: 2320304
caacagagaagacugucuc

SEQ ID NO: 2320306 - RNA, 19 nt, Artificial Sequence
  Description of Artificial Sequence: Synthetic oligonucleotide
  Sense strand starting at position 652 of SEQ ID NO: 1885153
cuacuuauuguagagacga

SEQ ID NO: 2320307 - RNA, 19 nt, Artificial Sequence
  Description of Artificial Sequence: Synthetic oligonucleotide
  Antisense strand to SEQ ID NO: 2320306
ucgucucuacaauaaguag

SEQ ID NO: 2320308 - RNA, 19 nt, Artificial Sequence
  Description of Artificial Sequence: Synthetic oligonucleotide
  Sense strand starting at position 762 of SEQ ID NO: 1885153
acccuuuagcuuggugaga

SEQ ID NO: 2320309 - RNA, 19 nt, Artificial Sequence
  Description of Artificial Sequence: Synthetic oligonucleotide
  Antisense strand to SEQ ID NO: 2320308
ucucaccaagcuaaagggu

SEQ ID NO: 2320310 - RNA, 19 nt, Artificial Sequence
  Description of Artificial Sequence: Synthetic oligonucleotide
  Sense strand starting at position 851 of SEQ ID NO: 1885153
gcgccaguucgccuuuaca

SEQ ID NO: 2320311 - RNA, 19 nt, Artificial Sequence
  Description of Artificial Sequence: Synthetic oligonucleotide
  Antisense strand to SEQ ID NO: 2320310
uguaaaggcgaacuggcgc

SEQ ID NO: 2320312 - RNA, 19 nt, Artificial Sequence
  Description of Artificial Sequence: Synthetic oligonucleotide
  Sense strand starting at position 892 of SEQ ID NO: 1885153
ccaacaugccugugcauaa

SEQ ID NO: 2320313 - RNA, 19 nt, Artificial Sequence
  Description of Artificial Sequence: Synthetic oligonucleotide
  Antisense strand to SEQ ID NO: 2320312
uuaugcacaggcauguugg

SEQ ID NO: 2320314 - RNA, 19 nt, Artificial Sequence
  Description of Artificial Sequence: Synthetic oligonucleotide
  Sense strand starting at position 922 of SEQ ID NO: 1885153
uuagaaaugcccuguuucu

SEQ ID NO: 2320315 - RNA, 19 nt, Artificial Sequence
  Description of Artificial Sequence: Synthetic oligonucleotide
  Antisense strand to SEQ ID NO: 2320314
agaaacagggcauuucuaa

SEQ ID NO: 2320316 - RNA, 19 nt, Artificial Sequence
  Description of Artificial Sequence: Synthetic oligonucleotide
  Sense strand starting at position 1032 of SEQ ID NO: 1885153
ggcugaaucucugucucuu

SEQ ID NO: 2320317 - RNA, 19 nt, Artificial Sequence
  Description of Artificial Sequence: Synthetic oligonucleotide
  Antisense strand to SEQ ID NO: 2320316
aagagacagagauucagcc

SEQ ID NO: 2320318 - RNA, 19 nt, Artificial Sequence
  Description of Artificial Sequence: Synthetic oligonucleotide
  Sense strand starting at position 1330 of SEQ ID NO: 1885153
gauuacagacgugagucaa

SEQ ID NO: 2320319 - RNA, 19 nt, Artificial Sequence
  Description of Artificial Sequence: Synthetic oligonucleotide
  Antisense strand to SEQ ID NO: 2320318
uugacucacgucuguaauc

SEQ ID NO: 2320320 - RNA, 19 nt, Artificial Sequence
  Description of Artificial Sequence: Synthetic oligonucleotide
  Sense strand starting at position 1391 of SEQ ID NO: 1885153
uguuuagaucauuauuccu

SEQ ID NO: 2320321 - RNA, 19 nt, Artificial Sequence
  Description of Artificial Sequence: Synthetic oligonucleotide
  Antisense strand to SEQ ID NO: 2320320
aggaauaaugaucuaaaca

SEQ ID NO: 2320322 - RNA, 19 nt, Artificial Sequence
  Description of Artificial Sequence: Synthetic oligonucleotide
  Sense strand starting at position 1749 of SEQ ID NO: 1885153
gagaauaacggcugaacuu

SEQ ID NO: 2320323 - RNA, 19 nt, Artificial Sequence
  Description of Artificial Sequence: Synthetic oligonucleotide
  Antisense strand to SEQ ID NO: 2320322
aaguucagccguuauucuc

SEQ ID NO: 2320324 - RNA, 19 nt, Artificial Sequence
  Description of Artificial Sequence: Synthetic oligonucleotide
  Sense strand starting at position 1756 of SEQ ID NO: 1885153
acggcugaacuugacuaau

SEQ ID NO: 2320325 - RNA, 19 nt, Artificial Sequence
  Description of Artificial Sequence: Synthetic oligonucleotide
  Antisense strand to SEQ ID NO: 2320324
auuagucaaguucagccgu

SEQ ID NO: 2320326 - RNA, 19 nt, Artificial Sequence
  Description of Artificial Sequence: Synthetic oligonucleotide
  Sense strand starting at position 1758 of SEQ ID NO: 1885153
ggcugaacuugacuaauag

SEQ ID NO: 2320327 - RNA, 19 nt, Artificial Sequence
  Description of Artificial Sequence: Synthetic oligonucleotide
  Antisense strand to SEQ ID NO: 2320326
cuauuagucaaguucagcc

SEQ ID NO: 2320328 - RNA, 19 nt, Artificial Sequence
  Description of Artificial Sequence: Synthetic oligonucleotide
  Sense strand starting at position 1839 of SEQ ID NO: 1885153
gaugguaggccuugucauc

SEQ ID NO: 2320329 - RNA, 19 nt, Artificial Sequence
  Description of Artificial Sequence: Synthetic oligonucleotide
  Antisense strand to SEQ ID NO: 2320328
gaugacaaggccuaccauc

SEQ ID NO: 2320330 - RNA, 19 nt, Artificial Sequence
  Description of Artificial Sequence: Synthetic oligonucleotide
  Sense strand starting at position 1848 of SEQ ID NO: 1885153
ccuugucaucuucgaagga

SEQ ID NO: 2320331 - RNA, 19 nt, Artificial Sequence
  Description of Artificial Sequence: Synthetic oligonucleotide
  Antisense strand to SEQ ID NO: 2320330
uccuucgaagaugacaagg

SEQ ID NO: 2320332 - RNA, 19 nt, Artificial Sequence
  Description of Artificial Sequence: Synthetic oligonucleotide
  Sense strand starting at position 2463 of SEQ ID NO: 1885153
gcuggauuccgggagcuga

SEQ ID NO: 2320333 - RNA, 19 nt, Artificial Sequence
  Description of Artificial Sequence: Synthetic oligonucleotide
  Antisense strand to SEQ ID NO: 2320332
ucagcucccggaauccagc

SEQ ID NO: 2320334 - RNA, 19 nt, Artificial Sequence
  Description of Artificial Sequence: Synthetic oligonucleotide
  Sense strand starting at position 2483 of SEQ ID NO: 1885153
gggagguggucuguagcaa

SEQ ID NO: 2320335 - RNA, 19 nt, Artificial Sequence
  Description of Artificial Sequence: Synthetic oligonucleotide
  Antisense strand to SEQ ID NO: 2320334
uugcuacagaccaccuccc

SEQ ID NO: 2320336 - RNA, 19 nt, Artificial Sequence
  Description of Artificial Sequence: Synthetic oligonucleotide
  Sense strand starting at position 2537 of SEQ ID NO: 1885153
uggacucugagcggagaau

SEQ ID NO: 2320337 - RNA, 19 nt, Artificial Sequence
  Description of Artificial Sequence: Synthetic oligonucleotide
  Antisense strand to SEQ ID NO: 2320336
auucuccgcucagagucca

SEQ ID NO: 2320338 - RNA, 19 nt, Artificial Sequence
  Description of Artificial Sequence: Synthetic oligonucleotide
  Sense strand starting at position 2861 of SEQ ID NO: 1885153
cugcuuugcagugugcaaa

SEQ ID NO: 2320339 - RNA, 19 nt, Artificial Sequence
  Description of Artificial Sequence: Synthetic oligonucleotide
  Antisense strand to SEQ ID NO: 2320338
uuugcacacugcaaagcag

SEQ ID NO: 2320340 - RNA, 19 nt, Artificial Sequence
  Description of Artificial Sequence: Synthetic oligonucleotide
  Sense strand starting at position 2907 of SEQ ID NO: 1885153
uagugcaagcgugaagaau

SEQ ID NO: 2320341 - RNA, 19 nt, Artificial Sequence
  Description of Artificial Sequence: Synthetic oligonucleotide
  Antisense strand to SEQ ID NO: 2320340
auucuucacgcuugcacua

SEQ ID NO: 2320342 - RNA, 19 nt, Artificial Sequence
  Description of Artificial Sequence: Synthetic oligonucleotide
  Sense strand starting at position 2976 of SEQ ID NO: 1885153
cgucgguggccuguuagaa

SEQ ID NO: 2320343 - RNA, 19 nt, Artificial Sequence
  Description of Artificial Sequence: Synthetic oligonucleotide
  Antisense strand to SEQ ID NO: 2320342
uucuaacaggccaccgacg

SEQ ID NO: 2320344 - RNA, 19 nt, Artificial Sequence
  Description of Artificial Sequence: Synthetic oligonucleotide
  Sense strand starting at position 3094 of SEQ ID NO: 1885153
gcacgaccuuuauugugaa

SEQ ID NO: 2320345 - RNA, 19 nt, Artificial Sequence
  Description of Artificial Sequence: Synthetic oligonucleotide
  Antisense strand to SEQ ID NO: 2320344
uucacaauaaaggucgugc

SEQ ID NO: 2320346 - RNA, 19 nt, Artificial Sequence
  Description of Artificial Sequence: Synthetic oligonucleotide
  Sense strand starting at position 3137 of SEQ ID NO: 1885153
gugugcuucuuaucagaau

SEQ ID NO: 2320347 - RNA, 19 nt, Artificial Sequence
  Description of Artificial Sequence: Synthetic oligonucleotide
  Antisense strand to SEQ ID NO: 2320346
auucugauaagaagcacac

SEQ ID NO: 2320348 - RNA, 19 nt, Artificial Sequence
  Description of Artificial Sequence: Synthetic oligonucleotide
  Sense strand starting at position 3262 of SEQ ID NO: 1885153
auagcuguuguaggaaaca

SEQ ID NO: 2320349 - RNA, 19 nt, Artificial Sequence
  Description of Artificial Sequence: Synthetic oligonucleotide
  Antisense strand to SEQ ID NO: 2320348
uguuuccuacaacagcuau

SEQ ID NO: 2320350 - RNA, 19 nt, Artificial Sequence
  Description of Artificial Sequence: Synthetic oligonucleotide
  Sense strand starting at position 3375 of SEQ ID NO: 1885153
uagggauccuggccugagu

SEQ ID NO: 2320351 - RNA, 19 nt, Artificial Sequence
  Description of Artificial Sequence: Synthetic oligonucleotide
  Antisense strand to SEQ ID NO: 2320350
acucaggccaggaucccua

SEQ ID NO: 2320352 - RNA, 19 nt, Artificial Sequence
  Description of Artificial Sequence: Synthetic oligonucleotide
  Sense strand starting at position 3377 of SEQ ID NO: 1885153
gggauccuggccugaguaa

SEQ ID NO: 2320353 - RNA, 19 nt, Artificial Sequence
  Description of Artificial Sequence: Synthetic oligonucleotide
  Antisense strand to SEQ ID NO: 2320352
uuacucaggccaggauccc

SEQ ID NO: 2320354 - RNA, 19 nt, Artificial Sequence
  Description of Artificial Sequence: Synthetic oligonucleotide
  Sense strand starting at position 3378 of SEQ ID NO: 1885153
ggauccuggccugaguaaa

SEQ ID NO: 2320355 - RNA, 19 nt, Artificial Sequence
  Description of Artificial Sequence: Synthetic oligonucleotide
  Antisense strand to SEQ ID NO: 2320354
uuuacucaggccaggaucc

SEQ ID NO: 2320356 - RNA, 19 nt, Artificial Sequence
  Description of Artificial Sequence: Synthetic oligonucleotide
  Sense strand starting at position 3403 of SEQ ID NO: 1885153
guuggaaaugguggcugaa

SEQ ID NO: 2320357 - RNA, 19 nt, Artificial Sequence
  Description of Artificial Sequence: Synthetic oligonucleotide
  Antisense strand to SEQ ID NO: 2320356
uucagccaccauuuccaac

SEQ ID NO: 2320358 - RNA, 19 nt, Artificial Sequence
  Description of Artificial Sequence: Synthetic oligonucleotide
  Sense strand starting at position 3574 of SEQ ID NO: 1885153
agaaguaguugucuccagu

SEQ ID NO: 2320359 - RNA, 19 nt, Artificial Sequence
  Description of Artificial Sequence: Synthetic oligonucleotide
  Antisense strand to SEQ ID NO: 2320358
acuggagacaacuacuucu

SEQ ID NO: 2320360 - RNA, 19 nt, Artificial Sequence
  Description of Artificial Sequence: Synthetic oligonucleotide
  Sense strand starting at position 3580 of SEQ ID NO: 1885153
aguugucuccagugguuga

SEQ ID NO: 2320361 - RNA, 19 nt, Artificial Sequence
  Description of Artificial Sequence: Synthetic oligonucleotide
  Antisense strand to SEQ ID NO: 2320360
ucaaccacuggagacaacu

SEQ ID NO: 2320362 - RNA, 19 nt, Artificial Sequence
  Description of Artificial Sequence: Synthetic oligonucleotide
  Sense strand starting at position 3581 of SEQ ID NO: 1885153
guugucuccagugguugaa

SEQ ID NO: 2320363 - RNA, 19 nt, Artificial Sequence
  Description of Artificial Sequence: Synthetic oligonucleotide
  Antisense strand to SEQ ID NO: 2320362
uucaaccacuggagacaac

SEQ ID NO: 2320364 - RNA, 19 nt, Artificial Sequence
  Description of Artificial Sequence: Synthetic oligonucleotide
  Sense strand starting at position 3948 of SEQ ID NO: 1885153
gagcaaauacuccgucuca

SEQ ID NO: 2320365 - RNA, 19 nt, Artificial Sequence
  Description of Artificial Sequence: Synthetic oligonucleotide
  Antisense strand to SEQ ID NO: 2320364
ugagacggaguauuugcuc

SEQ ID NO: 2320366 - RNA, 19 nt, Artificial Sequence
  Description of Artificial Sequence: Synthetic oligonucleotide
  Sense strand starting at position 3949 of SEQ ID NO: 1885153
agcaaauacuccgucucaa

SEQ ID NO: 2320367 - RNA, 19 nt, Artificial Sequence
  Description of Artificial Sequence: Synthetic oligonucleotide
  Antisense strand to SEQ ID NO: 2320366
uugagacggaguauuugcu

SEQ ID NO: 2320368 - RNA, 19 nt, Artificial Sequence
  Description of Artificial Sequence: Synthetic oligonucleotide
  Sense strand starting at position 110 of SEQ ID NO: 1885154
cugagauggaguuguugga

SEQ ID NO: 2320369 - RNA, 19 nt, Artificial Sequence
  Description of Artificial Sequence: Synthetic oligonucleotide
  Antisense strand to SEQ ID NO: 2320368
uccaacaacuccaucucag

SEQ ID NO: 2320370 - RNA, 19 nt, Artificial Sequence
  Description of Artificial Sequence: Synthetic oligonucleotide
  Sense strand starting at position 113 of SEQ ID NO: 1885154
agauggaguuguuggagga

SEQ ID NO: 2320371 - RNA, 19 nt, Artificial Sequence
  Description of Artificial Sequence: Synthetic oligonucleotide
  Antisense strand to SEQ ID NO: 2320370
uccuccaacaacuccaucu

SEQ ID NO: 2320372 - RNA, 19 nt, Artificial Sequence
  Description of Artificial Sequence: Synthetic oligonucleotide
  Sense strand starting at position 114 of SEQ ID NO: 1885154
gauggaguuguuggaggaa

SEQ ID NO: 2320373 - RNA, 19 nt, Artificial Sequence
  Description of Artificial Sequence: Synthetic oligonucleotide
  Antisense strand to SEQ ID NO: 2320372
uuccuccaacaacuccauc

SEQ ID NO: 2320374 - RNA, 19 nt, Artificial Sequence
  Description of Artificial Sequence: Synthetic oligonucleotide
  Sense strand starting at position 183 of SEQ ID NO: 1885154
ggacuuugcccacagacau

SEQ ID NO: 2320375 - RNA, 19 nt, Artificial Sequence
  Description of Artificial Sequence: Synthetic oligonucleotide
  Antisense strand to SEQ ID NO: 2320374
augucugugggcaaagucc

SEQ ID NO: 2320376 - RNA, 19 nt, Artificial Sequence
  Description of Artificial Sequence: Synthetic oligonucleotide
  Sense strand starting at position 234 of SEQ ID NO: 1885154
uaggauauuggugggacuu

SEQ ID NO: 2320377 - RNA, 19 nt, Artificial Sequence
  Description of Artificial Sequence: Synthetic oligonucleotide
  Antisense strand to SEQ ID NO: 2320376
aagucccaccaauauccua

SEQ ID NO: 2320378 - RNA, 19 nt, Artificial Sequence
  Description of Artificial Sequence: Synthetic oligonucleotide
  Sense strand starting at position 235 of SEQ ID NO: 1885154
aggauauuggugggacuuu

SEQ ID NO: 2320379 - RNA, 19 nt, Artificial Sequence
  Description of Artificial Sequence: Synthetic oligonucleotide
  Antisense strand to SEQ ID NO: 2320378
aaagucccaccaauauccu

SEQ ID NO: 2320380 - RNA, 19 nt, Artificial Sequence
  Description of Artificial Sequence: Synthetic oligonucleotide
  Sense strand starting at position 355 of SEQ ID NO: 1885154
gugggaaugaaguggcaaa

SEQ ID NO: 2320381 - RNA, 19 nt, Artificial Sequence
  Description of Artificial Sequence: Synthetic oligonucleotide
  Antisense strand to SEQ ID NO: 2320380
uuugccacuucauucccac

SEQ ID NO: 2320382 - RNA, 19 nt, Artificial Sequence
  Description of Artificial Sequence: Synthetic oligonucleotide
  Sense strand starting at position 395 of SEQ ID NO: 1885154
ucagcuguccuuuggauau

SEQ ID NO: 2320383 - RNA, 19 nt, Artificial Sequence
  Description of Artificial Sequence: Synthetic oligonucleotide
  Antisense strand to SEQ ID NO: 2320382
auauccaaaggacagcuga

SEQ ID NO: 2320384 - RNA, 19 nt, Artificial Sequence
  Description of Artificial Sequence: Synthetic oligonucleotide
  Sense strand starting at position 445 of SEQ ID NO: 1885154
cggagcuccucuccucaau

SEQ ID NO: 2320385 - RNA, 19 nt, Artificial Sequence
  Description of Artificial Sequence: Synthetic oligonucleotide
  Antisense strand to SEQ ID NO: 2320384
auugaggagaggagcuccg

SEQ ID NO: 2320386 - RNA, 19 nt, Artificial Sequence
  Description of Artificial Sequence: Synthetic oligonucleotide
  Sense strand starting at position 456 of SEQ ID NO: 1885154
uccucaaucugcuuggaag

SEQ ID NO: 2320387 - RNA, 19 nt, Artificial Sequence
  Description of Artificial Sequence: Synthetic oligonucleotide
  Antisense strand to SEQ ID NO: 2320386
cuuccaagcagauugagga

SEQ ID NO: 2320388 - RNA, 19 nt, Artificial Sequence
  Description of Artificial Sequence: Synthetic oligonucleotide
  Sense strand starting at position 457 of SEQ ID NO: 1885154
ccucaaucugcuuggaagu

SEQ ID NO: 2320389 - RNA, 19 nt, Artificial Sequence
  Description of Artificial Sequence: Synthetic oligonucleotide
  Antisense strand to SEQ ID NO: 2320388
acuuccaagcagauugagg

SEQ ID NO: 2320390 - RNA, 19 nt, Artificial Sequence
  Description of Artificial Sequence: Synthetic oligonucleotide
  Sense strand starting at position 1734 of SEQ ID NO: 1885154
uccugagagucugcccuua

SEQ ID NO: 2320391 - RNA, 19 nt, Artificial Sequence
  Description of Artificial Sequence: Synthetic oligonucleotide
  Antisense strand to SEQ ID NO: 2320390
uaagggcagacucucagga

SEQ ID NO: 2320392 - RNA, 19 nt, Artificial Sequence
  Description of Artificial Sequence: Synthetic oligonucleotide
  Sense strand starting at position 1736 of SEQ ID NO: 1885154
cugagagucugcccuuagu

SEQ ID NO: 2320393 - RNA, 19 nt, Artificial Sequence
  Description of Artificial Sequence: Synthetic oligonucleotide
  Antisense strand to SEQ ID NO: 2320392
acuaagggcagacucucag

SEQ ID NO: 2320394 - RNA, 19 nt, Artificial Sequence
  Description of Artificial Sequence: Synthetic oligonucleotide
  Sense strand starting at position 1746 of SEQ ID NO: 1885154
gcccuuagucugcaggcau

SEQ ID NO: 2320395 - RNA, 19 nt, Artificial Sequence
  Description of Artificial Sequence: Synthetic oligonucleotide
  Antisense strand to SEQ ID NO: 2320394
augccugcagacuaagggc

SEQ ID NO: 2320396 - RNA, 19 nt, Artificial Sequence
  Description of Artificial Sequence: Synthetic oligonucleotide
  Sense strand starting at position 2100 of SEQ ID NO: 1885154
aggaguuaccgccguucuu

SEQ ID NO: 2320397 - RNA, 19 nt, Artificial Sequence
  Description of Artificial Sequence: Synthetic oligonucleotide
  Antisense strand to SEQ ID NO: 2320396
aagaacggcgguaacuccu

SEQ ID NO: 2320398 - RNA, 19 nt, Artificial Sequence
  Description of Artificial Sequence: Synthetic oligonucleotide
  Sense strand starting at position 2476 of SEQ ID NO: 1885154
cccuguuagucuuucuuag

SEQ ID NO: 2320399 - RNA, 19 nt, Artificial Sequence
  Description of Artificial Sequence: Synthetic oligonucleotide
  Antisense strand to SEQ ID NO: 2320398
cuaagaaagacuaacaggg

SEQ ID NO: 2320400 - RNA, 19 nt, Artificial Sequence
  Description of Artificial Sequence: Synthetic oligonucleotide
  Sense strand starting at position 2643 of SEQ ID NO: 1885154
cccuguuucccugauugaa

SEQ ID NO: 2320401 - RNA, 19 nt, Artificial Sequence
  Description of Artificial Sequence: Synthetic oligonucleotide
  Antisense strand to SEQ ID NO: 2320400
uucaaucagggaaacaggg

SEQ ID NO: 2320402 - RNA, 19 nt, Artificial Sequence
  Description of Artificial Sequence: Synthetic oligonucleotide
  Sense strand starting at position 2653 of SEQ ID NO: 1885154
cugauugaagguuauaguu

SEQ ID NO: 2320403 - RNA, 19 nt, Artificial Sequence
  Description of Artificial Sequence: Synthetic oligonucleotide
  Antisense strand to SEQ ID NO: 2320402
aacuauaaccuucaaucag

SEQ ID NO: 2320404 - RNA, 19 nt, Artificial Sequence
  Description of Artificial Sequence: Synthetic oligonucleotide
  Sense strand starting at position 2726 of SEQ ID NO: 1885154
caggguuguggugagucua

SEQ ID NO: 2320405 - RNA, 19 nt, Artificial Sequence
  Description of Artificial Sequence: Synthetic oligonucleotide
  Antisense strand to SEQ ID NO: 2320404
uagacucaccacaacccug

SEQ ID NO: 2320406 - RNA, 19 nt, Artificial Sequence
  Description of Artificial Sequence: Synthetic oligonucleotide
  Sense strand starting at position 2728 of SEQ ID NO: 1885154
ggguuguggugagucuagu

SEQ ID NO: 2320407 - RNA, 19 nt, Artificial Sequence
  Description of Artificial Sequence: Synthetic oligonucleotide
  Antisense strand to SEQ ID NO: 2320406
acuagacucaccacaaccc

SEQ ID NO: 2320408 - RNA, 19 nt, Artificial Sequence
  Description of Artificial Sequence: Synthetic oligonucleotide
  Sense strand starting at position 2747 of SEQ ID NO: 1885154
uuuggcuuauugcuaggaa

SEQ ID NO: 2320409 - RNA, 19 nt, Artificial Sequence
  Description of Artificial Sequence: Synthetic oligonucleotide
  Antisense strand to SEQ ID NO: 2320408
uuccuagcaauaagccaaa

SEQ ID NO: 2320410 - RNA, 19 nt, Artificial Sequence
  Description of Artificial Sequence: Synthetic oligonucleotide
  Sense strand starting at position 2750 of SEQ ID NO: 1885154
ggcuuauugcuaggaauag

SEQ ID NO: 2320411 - RNA, 19 nt, Artificial Sequence
  Description of Artificial Sequence: Synthetic oligonucleotide
  Antisense strand to SEQ ID NO: 2320410
cuauuccuagcaauaagcc

SEQ ID NO: 2320412 - RNA, 19 nt, Artificial Sequence
  Description of Artificial Sequence: Synthetic oligonucleotide
  Sense strand starting at position 2809 of SEQ ID NO: 1885154
ugaauuaaauguguccacu

SEQ ID NO: 2320413 - RNA, 19 nt, Artificial Sequence
  Description of Artificial Sequence: Synthetic oligonucleotide
  Antisense strand to SEQ ID NO: 2320412
aguggacacauuuaauuca

SEQ ID NO: 2320414 - RNA, 19 nt, Artificial Sequence
  Description of Artificial Sequence: Synthetic oligonucleotide
  Sense strand starting at position 2812 of SEQ ID NO: 1885154
auuaaauguguccacuauu

SEQ ID NO: 2320415 - RNA, 19 nt, Artificial Sequence
  Description of Artificial Sequence: Synthetic oligonucleotide
  Antisense strand to SEQ ID NO: 2320414
aauaguggacacauuuaau

SEQ ID NO: 2320416 - RNA, 19 nt, Artificial Sequence
  Description of Artificial Sequence: Synthetic oligonucleotide
  Sense strand starting at position 2822 of SEQ ID NO: 1885154
uccacuauuugagauuguu

SEQ ID NO: 2320417 - RNA, 19 nt, Artificial Sequence
  Description of Artificial Sequence: Synthetic oligonucleotide
  Antisense strand to SEQ ID NO: 2320416
aacaaucucaaauagugga

SEQ ID NO: 2320418 - RNA, 19 nt, Artificial Sequence
  Description of Artificial Sequence: Synthetic oligonucleotide
  Sense strand starting at position 2853 of SEQ ID NO: 1885154
uggucucauccuugacugu

SEQ ID NO: 2320419 - RNA, 19 nt, Artificial Sequence
  Description of Artificial Sequence: Synthetic oligonucleotide
  Antisense strand to SEQ ID NO: 2320418
acagucaaggaugagacca

SEQ ID NO: 2320420 - RNA, 19 nt, Artificial Sequence
  Description of Artificial Sequence: Synthetic oligonucleotide
  Sense strand starting at position 2908 of SEQ ID NO: 1885154
ccaugauggcugugaccua

SEQ ID NO: 2320421 - RNA, 19 nt, Artificial Sequence
  Description of Artificial Sequence: Synthetic oligonucleotide
  Antisense strand to SEQ ID NO: 2320420
uaggucacagccaucaugg

SEQ ID NO: 2320422 - RNA, 19 nt, Artificial Sequence
  Description of Artificial Sequence: Synthetic oligonucleotide
  Sense strand starting at position 3031 of SEQ ID NO: 1885154
cuccguggacccugaaaua

SEQ ID NO: 2320423 - RNA, 19 nt, Artificial Sequence
  Description of Artificial Sequence: Synthetic oligonucleotide
  Antisense strand to SEQ ID NO: 2320422
uauuucaggguccacggag

SEQ ID NO: 2320424 - RNA, 19 nt, Artificial Sequence
  Description of Artificial Sequence: Synthetic oligonucleotide
  Sense strand starting at position 3228 of SEQ ID NO: 1885154
gugagacgucuucagaaga

SEQ ID NO: 2320425 - RNA, 19 nt, Artificial Sequence
  Description of Artificial Sequence: Synthetic oligonucleotide
  Antisense strand to SEQ ID NO: 2320424
ucuucugaagacgucucac

SEQ ID NO: 2320426 - RNA, 19 nt, Artificial Sequence
  Description of Artificial Sequence: Synthetic oligonucleotide
  Sense strand starting at position 3386 of SEQ ID NO: 1885154
ggaaaugguucuucuagca

SEQ ID NO: 2320427 - RNA, 19 nt, Artificial Sequence
  Description of Artificial Sequence: Synthetic oligonucleotide
  Antisense strand to SEQ ID NO: 2320426
ugcuagaagaaccauuucc

SEQ ID NO: 2320428 - RNA, 19 nt, Artificial Sequence
  Description of Artificial Sequence: Synthetic oligonucleotide
  Sense strand starting at position 3454 of SEQ ID NO: 1885154
agaggaauaugaugaugaa

SEQ ID NO: 2320429 - RNA, 19 nt, Artificial Sequence
  Description of Artificial Sequence: Synthetic oligonucleotide
  Antisense strand to SEQ ID NO: 2320428
uucaucaucauauuccucu

SEQ ID NO: 2320430 - RNA, 19 nt, Artificial Sequence
  Description of Artificial Sequence: Synthetic oligonucleotide
  Sense strand starting at position 3457 of SEQ ID NO: 1885154
ggaauaugaugaugaagaa

SEQ ID NO: 2320431 - RNA, 19 nt, Artificial Sequence
  Description of Artificial Sequence: Synthetic oligonucleotide
  Antisense strand to SEQ ID NO: 2320430
uucuucaucaucauauucc

SEQ ID NO: 2320432 - RNA, 19 nt, Artificial Sequence
  Description of Artificial Sequence: Synthetic oligonucleotide
  Sense strand starting at position 3469 of SEQ ID NO: 1885154
ugaagaaucucucaaguuc

SEQ ID NO: 2320433 - RNA, 19 nt, Artificial Sequence
  Description of Artificial Sequence: Synthetic oligonucleotide
  Antisense strand to SEQ ID NO: 2320432
gaacuugagagauucuuca

SEQ ID NO: 2320434 - RNA, 19 nt, Artificial Sequence
  Description of Artificial Sequence: Synthetic oligonucleotide
  Sense strand starting at position 3502 of SEQ ID NO: 1885154
acguguguccagcggaaag

SEQ ID NO: 2320435 - RNA, 19 nt, Artificial Sequence
  Description of Artificial Sequence: Synthetic oligonucleotide
  Antisense strand to SEQ ID NO: 2320434
cuuuccgcuggacacacgu

SEQ ID NO: 2320436 - RNA, 19 nt, Artificial Sequence
  Description of Artificial Sequence: Synthetic oligonucleotide
  Sense strand starting at position 3504 of SEQ ID NO: 1885154
guguguccagcggaaagaa

SEQ ID NO: 2320437 - RNA, 19 nt, Artificial Sequence
  Description of Artificial Sequence: Synthetic oligonucleotide
  Antisense strand to SEQ ID NO: 2320436
uucuuuccgcuggacacac

SEQ ID NO: 2320438 - RNA, 19 nt, Artificial Sequence
  Description of Artificial Sequence: Synthetic oligonucleotide
  Sense strand starting at position 3674 of SEQ ID NO: 1885154
gaggaacuaugucaacuug

SEQ ID NO: 2320439 - RNA, 19 nt, Artificial Sequence
  Description of Artificial Sequence: Synthetic oligonucleotide
  Antisense strand to SEQ ID NO: 2320438
caaguugacauaguuccuc

SEQ ID NO: 2320440 - RNA, 19 nt, Artificial Sequence
  Description of Artificial Sequence: Synthetic oligonucleotide
  Sense strand starting at position 3725 of SEQ ID NO: 1885154
cugguauuggugggagagu

SEQ ID NO: 2320441 - RNA, 19 nt, Artificial Sequence
  Description of Artificial Sequence: Synthetic oligonucleotide
  Antisense strand to SEQ ID NO: 2320440
acucucccaccaauaccag

SEQ ID NO: 2320442 - RNA, 19 nt, Artificial Sequence
  Description of Artificial Sequence: Synthetic oligonucleotide
  Sense strand starting at position 3734 of SEQ ID NO: 1885154
gugggagaguacguagaaa

SEQ ID NO: 2320443 - RNA, 19 nt, Artificial Sequence
  Description of Artificial Sequence: Synthetic oligonucleotide
  Antisense strand to SEQ ID NO: 2320442
uuucuacguacucucccac

SEQ ID NO: 2320444 - RNA, 19 nt, Artificial Sequence
  Description of Artificial Sequence: Synthetic oligonucleotide
  Sense strand starting at position 3749 of SEQ ID NO: 1885154
gaaacuuguggccaucuca

SEQ ID NO: 2320445 - RNA, 19 nt, Artificial Sequence
  Description of Artificial Sequence: Synthetic oligonucleotide
  Antisense strand to SEQ ID NO: 2320444
ugagauggccacaaguuuc

SEQ ID NO: 2320446 - RNA, 19 nt, Artificial Sequence
  Description of Artificial Sequence: Synthetic oligonucleotide
  Sense strand starting at position 3791 of SEQ ID NO: 1885154
agcagugauuuggaccuuu

SEQ ID NO: 2320447 - RNA, 19 nt, Artificial Sequence
  Description of Artificial Sequence: Synthetic oligonucleotide
  Antisense strand to SEQ ID NO: 2320446
aaagguccaaaucacugcu

SEQ ID NO: 2320448 - RNA, 19 nt, Artificial Sequence
  Description of Artificial Sequence: Synthetic oligonucleotide
  Sense strand starting at position 96 of SEQ ID NO: 1885155
agaguagcuaaauggauaa

SEQ ID NO: 2320449 - RNA, 19 nt, Artificial Sequence
  Description of Artificial Sequence: Synthetic oligonucleotide
  Antisense strand to SEQ ID NO: 2320448
uuauccauuuagcuacucu

SEQ ID NO: 2320450 - RNA, 19 nt, Artificial Sequence
  Description of Artificial Sequence: Synthetic oligonucleotide
  Sense strand starting at position 128 of SEQ ID NO: 1885155
acugaucuguugcuuacaa

SEQ ID NO: 2320451 - RNA, 19 nt, Artificial Sequence
  Description of Artificial Sequence: Synthetic oligonucleotide
  Antisense strand to SEQ ID NO: 2320450
uuguaagcaacagaucagu

SEQ ID NO: 2320452 - RNA, 19 nt, Artificial Sequence
  Description of Artificial Sequence: Synthetic oligonucleotide
  Sense strand starting at position 291 of SEQ ID NO: 1885155
gaaggucacuauguaagga

SEQ ID NO: 2320453 - RNA, 19 nt, Artificial Sequence
  Description of Artificial Sequence: Synthetic oligonucleotide
  Antisense strand to SEQ ID NO: 2320452
uccuuacauagugaccuuc

SEQ ID NO: 2320454 - RNA, 19 nt, Artificial Sequence
  Description of Artificial Sequence: Synthetic oligonucleotide
  Sense strand starting at position 295 of SEQ ID NO: 1885155
gucacuauguaaggauaaa

SEQ ID NO: 2320455 - RNA, 19 nt, Artificial Sequence
  Description of Artificial Sequence: Synthetic oligonucleotide
  Antisense strand to SEQ ID NO: 2320454
uuuauccuuacauagugac

SEQ ID NO: 2320456 - RNA, 19 nt, Artificial Sequence
  Description of Artificial Sequence: Synthetic oligonucleotide
  Sense strand starting at position 350 of SEQ ID NO: 1885155
uguauaugugcccaacacu

SEQ ID NO: 2320457 - RNA, 19 nt, Artificial Sequence
  Description of Artificial Sequence: Synthetic oligonucleotide
  Antisense strand to SEQ ID NO: 2320456
aguguugggcacauauaca

SEQ ID NO: 2320458 - RNA, 19 nt, Artificial Sequence
  Description of Artificial Sequence: Synthetic oligonucleotide
  Sense strand starting at position 413 of SEQ ID NO: 1885155
agagauaguucccaauaug

SEQ ID NO: 2320459 - RNA, 19 nt, Artificial Sequence
  Description of Artificial Sequence: Synthetic oligonucleotide
  Antisense strand to SEQ ID NO: 2320458
cauauugggaacuaucucu

SEQ ID NO: 2320460 - RNA, 19 nt, Artificial Sequence
  Description of Artificial Sequence: Synthetic oligonucleotide
  Sense strand starting at position 502 of SEQ ID NO: 1885155
uggaccuaaucugcauuau

SEQ ID NO: 2320461 - RNA, 19 nt, Artificial Sequence
  Description of Artificial Sequence: Synthetic oligonucleotide
  Antisense strand to SEQ ID NO: 2320460
auaaugcagauuaggucca

SEQ ID NO: 2320462 - RNA, 19 nt, Artificial Sequence
  Description of Artificial Sequence: Synthetic oligonucleotide
  Sense strand starting at position 503 of SEQ ID NO: 1885155
ggaccuaaucugcauuaua

SEQ ID NO: 2320463 - RNA, 19 nt, Artificial Sequence
  Description of Artificial Sequence: Synthetic oligonucleotide
  Antisense strand to SEQ ID NO: 2320462
uauaaugcagauuaggucc

SEQ ID NO: 2320464 - RNA, 19 nt, Artificial Sequence
  Description of Artificial Sequence: Synthetic oligonucleotide
  Sense strand starting at position 1065 of SEQ ID NO: 1885155
acaauauacuccugaacga

SEQ ID NO: 2320465 - RNA, 19 nt, Artificial Sequence
  Description of Artificial Sequence: Synthetic oligonucleotide
  Antisense strand to SEQ ID NO: 2320464
ucguucaggaguauauugu

SEQ ID NO: 2320466 - RNA, 19 nt, Artificial Sequence
  Description of Artificial Sequence: Synthetic oligonucleotide
  Sense strand starting at position 1287 of SEQ ID NO: 1885155
gggcuaggcggacagauua

SEQ ID NO: 2320467 - RNA, 19 nt, Artificial Sequence
  Description of Artificial Sequence: Synthetic oligonucleotide
  Antisense strand to SEQ ID NO: 2320466
uaaucuguccgccuagccc

SEQ ID NO: 2320468 - RNA, 19 nt, Artificial Sequence
  Description of Artificial Sequence: Synthetic oligonucleotide
  Sense strand starting at position 1391 of SEQ ID NO: 1885155
ggcaguuagugcucagagu

SEQ ID NO: 2320469 - RNA, 19 nt, Artificial Sequence
  Description of Artificial Sequence: Synthetic oligonucleotide
  Antisense strand to SEQ ID NO: 2320468
acucugagcacuaacugcc

SEQ ID NO: 2320470 - RNA, 19 nt, Artificial Sequence
  Description of Artificial Sequence: Synthetic oligonucleotide
  Sense strand starting at position 1392 of SEQ ID NO: 1885155
gcaguuagugcucagagug

SEQ ID NO: 2320471 - RNA, 19 nt, Artificial Sequence
  Description of Artificial Sequence: Synthetic oligonucleotide
  Antisense strand to SEQ ID NO: 2320470
cacucugagcacuaacugc

SEQ ID NO: 2320472 - RNA, 19 nt, Artificial Sequence
  Description of Artificial Sequence: Synthetic oligonucleotide
  Sense strand starting at position 2054 of SEQ ID NO: 1885155
ggagcaugcugugaacacu

SEQ ID NO: 2320473 - RNA, 19 nt, Artificial Sequence
  Description of Artificial Sequence: Synthetic oligonucleotide
  Antisense strand to SEQ ID NO: 2320472
aguguucacagcaugcucc

SEQ ID NO: 2320474 - RNA, 19 nt, Artificial Sequence
  Description of Artificial Sequence: Synthetic oligonucleotide
  Sense strand starting at position 2060 of SEQ ID NO: 1885155
ugcugugaacacuaugaau

SEQ ID NO: 2320475 - RNA, 19 nt, Artificial Sequence
  Description of Artificial Sequence: Synthetic oligonucleotide
  Antisense strand to SEQ ID NO: 2320474
auucauaguguucacagca

SEQ ID NO: 2320476 - RNA, 19 nt, Artificial Sequence
  Description of Artificial Sequence: Synthetic oligonucleotide
  Sense strand starting at position 2110 of SEQ ID NO: 1885155
ucguguagucucagcguga

SEQ ID NO: 2320477 - RNA, 19 nt, Artificial Sequence
  Description of Artificial Sequence: Synthetic oligonucleotide
  Antisense strand to SEQ ID NO: 2320476
ucacgcugagacuacacga

SEQ ID NO: 2320478 - RNA, 19 nt, Artificial Sequence
  Description of Artificial Sequence: Synthetic oligonucleotide
  Sense strand starting at position 2111 of SEQ ID NO: 1885155
cguguagucucagcgugau

SEQ ID NO: 2320479 - RNA, 19 nt, Artificial Sequence
  Description of Artificial Sequence: Synthetic oligonucleotide
  Antisense strand to SEQ ID NO: 2320478
aucacgcugagacuacacg

SEQ ID NO: 2320480 - RNA, 19 nt, Artificial Sequence
  Description of Artificial Sequence: Synthetic oligonucleotide
  Sense strand starting at position 2244 of SEQ ID NO: 1885155
uaaggugggcugugaugaa

SEQ ID NO: 2320481 - RNA, 19 nt, Artificial Sequence
  Description of Artificial Sequence: Synthetic oligonucleotide
  Antisense strand to SEQ ID NO: 2320480
uucaucacagcccaccuua

SEQ ID NO: 2320482 - RNA, 19 nt, Artificial Sequence
  Description of Artificial Sequence: Synthetic oligonucleotide
  Sense strand starting at position 2374 of SEQ ID NO: 1885155
cgauuuaugucucauaaag

SEQ ID NO: 2320483 - RNA, 19 nt, Artificial Sequence
  Description of Artificial Sequence: Synthetic oligonucleotide
  Antisense strand to SEQ ID NO: 2320482
cuuuaugagacauaaaucg

SEQ ID NO: 2320484 - RNA, 19 nt, Artificial Sequence
  Description of Artificial Sequence: Synthetic oligonucleotide
  Sense strand starting at position 2407 of SEQ ID NO: 1885155
cuuggagcuacgugaaaga

SEQ ID NO: 2320485 - RNA, 19 nt, Artificial Sequence
  Description of Artificial Sequence: Synthetic oligonucleotide
  Antisense strand to SEQ ID NO: 2320484
ucuuucacguagcuccaag

SEQ ID NO: 2320486 - RNA, 19 nt, Artificial Sequence
  Description of Artificial Sequence: Synthetic oligonucleotide
  Sense strand starting at position 2410 of SEQ ID NO: 1885155
ggagcuacgugaaagaguu

SEQ ID NO: 2320487 - RNA, 19 nt, Artificial Sequence
  Description of Artificial Sequence: Synthetic oligonucleotide
  Antisense strand to SEQ ID NO: 2320486
aacucuuucacguagcucc

SEQ ID NO: 2320488 - RNA, 19 nt, Artificial Sequence
  Description of Artificial Sequence: Synthetic oligonucleotide
  Sense strand starting at position 2719 of SEQ ID NO: 1885155
accagauaccaccguguua

SEQ ID NO: 2320489 - RNA, 19 nt, Artificial Sequence
  Description of Artificial Sequence: Synthetic oligonucleotide
  Antisense strand to SEQ ID NO: 2320488
uaacacggugguaucuggu

SEQ ID NO: 2320490 - RNA, 19 nt, Artificial Sequence
  Description of Artificial Sequence: Synthetic oligonucleotide
  Sense strand starting at position 2721 of SEQ ID NO: 1885155
cagauaccaccguguuaau

SEQ ID NO: 2320491 - RNA, 19 nt, Artificial Sequence
  Description of Artificial Sequence: Synthetic oligonucleotide
  Antisense strand to SEQ ID NO: 2320490
auuaacacggugguaucug

SEQ ID NO: 2320492 - RNA, 19 nt, Artificial Sequence
  Description of Artificial Sequence: Synthetic oligonucleotide
  Sense strand starting at position 2724 of SEQ ID NO: 1885155
auaccaccguguuaaucuu

SEQ ID NO: 2320493 - RNA, 19 nt, Artificial Sequence
  Description of Artificial Sequence: Synthetic oligonucleotide
  Antisense strand to SEQ ID NO: 2320492
aagauuaacacggugguau

SEQ ID NO: 2320494 - RNA, 19 nt, Artificial Sequence
  Description of Artificial Sequence: Synthetic oligonucleotide
  Sense strand starting at position 2730 of SEQ ID NO: 1885155
ccguguuaaucuuuaugug

SEQ ID NO: 2320495 - RNA, 19 nt, Artificial Sequence
  Description of Artificial Sequence: Synthetic oligonucleotide
  Antisense strand to SEQ ID NO: 2320494
cacauaaagauuaacacgg

SEQ ID NO: 2320496 - RNA, 19 nt, Artificial Sequence
  Description of Artificial Sequence: Synthetic oligonucleotide
  Sense strand starting at position 2754 of SEQ ID NO: 1885155
ucuugaugauggcauuaau

SEQ ID NO: 2320497 - RNA, 19 nt, Artificial Sequence
  Description of Artificial Sequence: Synthetic oligonucleotide
  Antisense strand to SEQ ID NO: 2320496
auuaaugccaucaucaaga

SEQ ID NO: 2320498 - RNA, 19 nt, Artificial Sequence
  Description of Artificial Sequence: Synthetic oligonucleotide
  Sense strand starting at position 2772 of SEQ ID NO: 1885155
uaauuaacgucuccggaaa

SEQ ID NO: 2320499 - RNA, 19 nt, Artificial Sequence
  Description of Artificial Sequence: Synthetic oligonucleotide
  Antisense strand to SEQ ID NO: 2320498
uuuccggagacguuaauua

SEQ ID NO: 2320500 - RNA, 19 nt, Artificial Sequence
  Description of Artificial Sequence: Synthetic oligonucleotide
  Sense strand starting at position 2773 of SEQ ID NO: 1885155
aauuaacgucuccggaaag

SEQ ID NO: 2320501 - RNA, 19 nt, Artificial Sequence
  Description of Artificial Sequence: Synthetic oligonucleotide
  Antisense strand to SEQ ID NO: 2320500
cuuuccggagacguuaauu

SEQ ID NO: 2320502 - RNA, 19 nt, Artificial Sequence
  Description of Artificial Sequence: Synthetic oligonucleotide
  Sense strand starting at position 3021 of SEQ ID NO: 1885155
acgagcugugcccaaucuu

SEQ ID NO: 2320503 - RNA, 19 nt, Artificial Sequence
  Description of Artificial Sequence: Synthetic oligonucleotide
  Antisense strand to SEQ ID NO: 2320502
aagauugggcacagcucgu

SEQ ID NO: 2320504 - RNA, 19 nt, Artificial Sequence
  Description of Artificial Sequence: Synthetic oligonucleotide
  Sense strand starting at position 3028 of SEQ ID NO: 1885155
gugcccaaucuugaaauca

SEQ ID NO: 2320505 - RNA, 19 nt, Artificial Sequence
  Description of Artificial Sequence: Synthetic oligonucleotide
  Antisense strand to SEQ ID NO: 2320504
ugauuucaagauugggcac

SEQ ID NO: 2320506 - RNA, 19 nt, Artificial Sequence
  Description of Artificial Sequence: Synthetic oligonucleotide
  Sense strand starting at position 3268 of SEQ ID NO: 1885155
cagguuccaugaguuaugu

SEQ ID NO: 2320507 - RNA, 19 nt, Artificial Sequence
  Description of Artificial Sequence: Synthetic oligonucleotide
  Antisense strand to SEQ ID NO: 2320506
acauaacucauggaaccug

SEQ ID NO: 2320508 - RNA, 19 nt, Artificial Sequence
  Description of Artificial Sequence: Synthetic oligonucleotide
  Sense strand starting at position 3270 of SEQ ID NO: 1885155
gguuccaugaguuauguca

SEQ ID NO: 2320509 - RNA, 19 nt, Artificial Sequence
  Description of Artificial Sequence: Synthetic oligonucleotide
  Antisense strand to SEQ ID NO: 2320508
ugacauaacucauggaacc

SEQ ID NO: 2320510 - RNA, 19 nt, Artificial Sequence
  Description of Artificial Sequence: Synthetic oligonucleotide
  Sense strand starting at position 3272 of SEQ ID NO: 1885155
uuccaugaguuaugucaac

SEQ ID NO: 2320511 - RNA, 19 nt, Artificial Sequence
  Description of Artificial Sequence: Synthetic oligonucleotide
  Antisense strand to SEQ ID NO: 2320510
guugacauaacucauggaa

SEQ ID NO: 2320512 - RNA, 19 nt, Artificial Sequence
  Description of Artificial Sequence: Synthetic oligonucleotide
  Sense strand starting at position 3483 of SEQ ID NO: 1885155
gguaucugcccaugcucaa

SEQ ID NO: 2320513 - RNA, 19 nt, Artificial Sequence
  Description of Artificial Sequence: Synthetic oligonucleotide
  Antisense strand to SEQ ID NO: 2320512
uugagcaugggcagauacc

SEQ ID NO: 2320514 - RNA, 19 nt, Artificial Sequence
  Description of Artificial Sequence: Synthetic oligonucleotide
  Sense strand starting at position 3490 of SEQ ID NO: 1885155
gcccaugcucaagagcaaa

SEQ ID NO: 2320515 - RNA, 19 nt, Artificial Sequence
  Description of Artificial Sequence: Synthetic oligonucleotide
  Antisense strand to SEQ ID NO: 2320514
uuugcucuugagcaugggc

SEQ ID NO: 2320516 - RNA, 19 nt, Artificial Sequence
  Description of Artificial Sequence: Synthetic oligonucleotide
  Sense strand starting at position 3645 of SEQ ID NO: 1885155
uucuaagguuaaugaaacu

SEQ ID NO: 2320517 - RNA, 19 nt, Artificial Sequence
  Description of Artificial Sequence: Synthetic oligonucleotide
  Antisense strand to SEQ ID NO: 2320516
aguuucauuaaccuuagaa

SEQ ID NO: 2320518 - RNA, 19 nt, Artificial Sequence
  Description of Artificial Sequence: Synthetic oligonucleotide
  Sense strand starting at position 3651 of SEQ ID NO: 1885155
gguuaaugaaacuguagcu

SEQ ID NO: 2320519 - RNA, 19 nt, Artificial Sequence
  Description of Artificial Sequence: Synthetic oligonucleotide
  Antisense strand to SEQ ID NO: 2320518
agcuacaguuucauuaacc

SEQ ID NO: 2320520 - RNA, 19 nt, Artificial Sequence
  Description of Artificial Sequence: Synthetic oligonucleotide
  Sense strand starting at position 3690 of SEQ ID NO: 1885155
ugaaguggcugcccagaaa

SEQ ID NO: 2320521 - RNA, 19 nt, Artificial Sequence
  Description of Artificial Sequence: Synthetic oligonucleotide
  Antisense strand to SEQ ID NO: 2320520
uuucugggcagccacuuca

SEQ ID NO: 2320522 - RNA, 19 nt, Artificial Sequence
  Description of Artificial Sequence: Synthetic oligonucleotide
  Sense strand starting at position 36 of SEQ ID NO: 1885156
uugcauuauugagcuuaau

SEQ ID NO: 2320523 - RNA, 19 nt, Artificial Sequence
  Description of Artificial Sequence: Synthetic oligonucleotide
  Antisense strand to SEQ ID NO: 2320522
auuaagcucaauaaugcaa

SEQ ID NO: 2320524 - RNA, 19 nt, Artificial Sequence
  Description of Artificial Sequence: Synthetic oligonucleotide
  Sense strand starting at position 60 of SEQ ID NO: 1885156
ugcuuaaauguaugugaau

SEQ ID NO: 2320525 - RNA, 19 nt, Artificial Sequence
  Description of Artificial Sequence: Synthetic oligonucleotide
  Antisense strand to SEQ ID NO: 2320524
auucacauacauuuaagca

SEQ ID NO: 2320526 - RNA, 19 nt, Artificial Sequence
  Description of Artificial Sequence: Synthetic oligonucleotide
  Sense strand starting at position 61 of SEQ ID NO: 1885156
gcuuaaauguaugugaaua

SEQ ID NO: 2320527 - RNA, 19 nt, Artificial Sequence
  Description of Artificial Sequence: Synthetic oligonucleotide
  Antisense strand to SEQ ID NO: 2320526
uauucacauacauuuaagc

SEQ ID NO: 2320528 - RNA, 19 nt, Artificial Sequence
  Description of Artificial Sequence: Synthetic oligonucleotide
  Sense strand starting at position 158 of SEQ ID NO: 1885156
aaguaagucgcuuaaauca

SEQ ID NO: 2320529 - RNA, 19 nt, Artificial Sequence
  Description of Artificial Sequence: Synthetic oligonucleotide
  Antisense strand to SEQ ID NO: 2320528
ugauuuaagcgacuuacuu

SEQ ID NO: 2320530 - RNA, 19 nt, Artificial Sequence
  Description of Artificial Sequence: Synthetic oligonucleotide
  Sense strand starting at position 218 of SEQ ID NO: 1885156
cuaaccuagcaauguagaa

SEQ ID NO: 2320531 - RNA, 19 nt, Artificial Sequence
  Description of Artificial Sequence: Synthetic oligonucleotide
  Antisense strand to SEQ ID NO: 2320530
uucuacauugcuagguuag

SEQ ID NO: 2320532 - RNA, 19 nt, Artificial Sequence
  Description of Artificial Sequence: Synthetic oligonucleotide
  Sense strand starting at position 387 of SEQ ID NO: 1885156
acaaauauuugucaucagu

SEQ ID NO: 2320533 - RNA, 19 nt, Artificial Sequence
  Description of Artificial Sequence: Synthetic oligonucleotide
  Antisense strand to SEQ ID NO: 2320532
acugaugacaaauauuugu

SEQ ID NO: 2320534 - RNA, 19 nt, Artificial Sequence
  Description of Artificial Sequence: Synthetic oligonucleotide
  Sense strand starting at position 474 of SEQ ID NO: 1885156
aucgguaauacggguuuga

SEQ ID NO: 2320535 - RNA, 19 nt, Artificial Sequence
  Description of Artificial Sequence: Synthetic oligonucleotide
  Antisense strand to SEQ ID NO: 2320534
ucaaacccguauuaccgau

SEQ ID NO: 2320536 - RNA, 19 nt, Artificial Sequence
  Description of Artificial Sequence: Synthetic oligonucleotide
  Sense strand starting at position 478 of SEQ ID NO: 1885156
guaauacggguuugauuag

SEQ ID NO: 2320537 - RNA, 19 nt, Artificial Sequence
  Description of Artificial Sequence: Synthetic oligonucleotide
  Antisense strand to SEQ ID NO: 2320536
cuaaucaaacccguauuac

SEQ ID NO: 2320538 - RNA, 19 nt, Artificial Sequence
  Description of Artificial Sequence: Synthetic oligonucleotide
  Sense strand starting at position 496 of SEQ ID NO: 1885156
ggguucuaggccuaauuau

SEQ ID NO: 2320539 - RNA, 19 nt, Artificial Sequence
  Description of Artificial Sequence: Synthetic oligonucleotide
  Antisense strand to SEQ ID NO: 2320538
auaauuaggccuagaaccc

SEQ ID NO: 2320540 - RNA, 19 nt, Artificial Sequence
  Description of Artificial Sequence: Synthetic oligonucleotide
  Sense strand starting at position 505 of SEQ ID NO: 1885156
gccuaauuauaggucacua

SEQ ID NO: 2320541 - RNA, 19 nt, Artificial Sequence
  Description of Artificial Sequence: Synthetic oligonucleotide
  Antisense strand to SEQ ID NO: 2320540
uagugaccuauaauuaggc

SEQ ID NO: 2320542 - RNA, 19 nt, Artificial Sequence
  Description of Artificial Sequence: Synthetic oligonucleotide
  Sense strand starting at position 507 of SEQ ID NO: 1885156
cuaauuauaggucacuagu

SEQ ID NO: 2320543 - RNA, 19 nt, Artificial Sequence
  Description of Artificial Sequence: Synthetic oligonucleotide
  Antisense strand to SEQ ID NO: 2320542
acuagugaccuauaauuag

SEQ ID NO: 2320544 - RNA, 19 nt, Artificial Sequence
  Description of Artificial Sequence: Synthetic oligonucleotide
  Sense strand starting at position 510 of SEQ ID NO: 1885156
auuauaggucacuagucuu

SEQ ID NO: 2320545 - RNA, 19 nt, Artificial Sequence
  Description of Artificial Sequence: Synthetic oligonucleotide
  Antisense strand to SEQ ID NO: 2320544
aagacuagugaccuauaau

SEQ ID NO: 2320546 - RNA, 19 nt, Artificial Sequence
  Description of Artificial Sequence: Synthetic oligonucleotide
  Sense strand starting at position 516 of SEQ ID NO: 1885156
ggucacuagucuuccuuua

SEQ ID NO: 2320547 - RNA, 19 nt, Artificial Sequence
  Description of Artificial Sequence: Synthetic oligonucleotide
  Antisense strand to SEQ ID NO: 2320546
uaaaggaagacuagugacc

SEQ ID NO: 2320548 - RNA, 19 nt, Artificial Sequence
  Description of Artificial Sequence: Synthetic oligonucleotide
  Sense strand starting at position 521 of SEQ ID NO: 1885156
cuagucuuccuuuaggauu

SEQ ID NO: 2320549 - RNA, 19 nt, Artificial Sequence
  Description of Artificial Sequence: Synthetic oligonucleotide
  Antisense strand to SEQ ID NO: 2320548
aauccuaaaggaagacuag

SEQ ID NO: 2320550 - RNA, 19 nt, Artificial Sequence
  Description of Artificial Sequence: Synthetic oligonucleotide
  Sense strand starting at position 534 of SEQ ID NO: 1885156
aggauuaugcaccaucugu

SEQ ID NO: 2320551 - RNA, 19 nt, Artificial Sequence
  Description of Artificial Sequence: Synthetic oligonucleotide
  Antisense strand to SEQ ID NO: 2320550
acagauggugcauaauccu

SEQ ID NO: 2320552 - RNA, 19 nt, Artificial Sequence
  Description of Artificial Sequence: Synthetic oligonucleotide
  Sense strand starting at position 602 of SEQ ID NO: 1885156
guuaucaaacguuagguuu

SEQ ID NO: 2320553 - RNA, 19 nt, Artificial Sequence
  Description of Artificial Sequence: Synthetic oligonucleotide
  Antisense strand to SEQ ID NO: 2320552
aaaccuaacguuugauaac

SEQ ID NO: 2320554 - RNA, 19 nt, Artificial Sequence
  Description of Artificial Sequence: Synthetic oligonucleotide
  Sense strand starting at position 608 of SEQ ID NO: 1885156
aaacguuagguuuaggauu

SEQ ID NO: 2320555 - RNA, 19 nt, Artificial Sequence
  Description of Artificial Sequence: Synthetic oligonucleotide
  Antisense strand to SEQ ID NO: 2320554
aauccuaaaccuaacguuu

SEQ ID NO: 2320556 - RNA, 19 nt, Artificial Sequence
  Description of Artificial Sequence: Synthetic oligonucleotide
  Sense strand starting at position 746 of SEQ ID NO: 1885156
cuaagaagugaaugguaua

SEQ ID NO: 2320557 - RNA, 19 nt, Artificial Sequence
  Description of Artificial Sequence: Synthetic oligonucleotide
  Antisense strand to SEQ ID NO: 2320556
uauaccauucacuucuuag

SEQ ID NO: 2320558 - RNA, 19 nt, Artificial Sequence
  Description of Artificial Sequence: Synthetic oligonucleotide
  Sense strand starting at position 788 of SEQ ID NO: 1885156
ggguaauuuaagugcccga

SEQ ID NO: 2320559 - RNA, 19 nt, Artificial Sequence
  Description of Artificial Sequence: Synthetic oligonucleotide
  Antisense strand to SEQ ID NO: 2320558
ucgggcacuuaaauuaccc

SEQ ID NO: 2320560 - RNA, 19 nt, Artificial Sequence
  Description of Artificial Sequence: Synthetic oligonucleotide
  Sense strand starting at position 792 of SEQ ID NO: 1885156
aauuuaagugcccgauugu

SEQ ID NO: 2320561 - RNA, 19 nt, Artificial Sequence
  Description of Artificial Sequence: Synthetic oligonucleotide
  Antisense strand to SEQ ID NO: 2320560
acaaucgggcacuuaaauu

SEQ ID NO: 2320562 - RNA, 19 nt, Artificial Sequence
  Description of Artificial Sequence: Synthetic oligonucleotide
  Sense strand starting at position 845 of SEQ ID NO: 1885156
agaagcguucgcgaggaga

SEQ ID NO: 2320563 - RNA, 19 nt, Artificial Sequence
  Description of Artificial Sequence: Synthetic oligonucleotide
  Antisense strand to SEQ ID NO: 2320562
ucuccucgcgaacgcuucu

SEQ ID NO: 2320564 - RNA, 19 nt, Artificial Sequence
  Description of Artificial Sequence: Synthetic oligonucleotide
  Sense strand starting at position 909 of SEQ ID NO: 1885156
gaauaugagugccugcaga

SEQ ID NO: 2320565 - RNA, 19 nt, Artificial Sequence
  Description of Artificial Sequence: Synthetic oligonucleotide
  Antisense strand to SEQ ID NO: 2320564
ucugcaggcacucauauuc

SEQ ID NO: 2320566 - RNA, 19 nt, Artificial Sequence
  Description of Artificial Sequence: Synthetic oligonucleotide
  Sense strand starting at position 1000 of SEQ ID NO: 1885156
uucagugucccgggaggaa

SEQ ID NO: 2320567 - RNA, 19 nt, Artificial Sequence
  Description of Artificial Sequence: Synthetic oligonucleotide
  Antisense strand to SEQ ID NO: 2320566
uuccucccgggacacugaa

SEQ ID NO: 2320568 - RNA, 19 nt, Artificial Sequence
  Description of Artificial Sequence: Synthetic oligonucleotide
  Sense strand starting at position 1052 of SEQ ID NO: 1885156
ggaauucggcgcguucgua

SEQ ID NO: 2320569 - RNA, 19 nt, Artificial Sequence
  Description of Artificial Sequence: Synthetic oligonucleotide
  Antisense strand to SEQ ID NO: 2320568
uacgaacgcgccgaauucc

SEQ ID NO: 2320570 - RNA, 19 nt, Artificial Sequence
  Description of Artificial Sequence: Synthetic oligonucleotide
  Sense strand starting at position 1087 of SEQ ID NO: 1885156
gacgaaagcugcuucucaa

SEQ ID NO: 2320571 - RNA, 19 nt, Artificial Sequence
  Description of Artificial Sequence: Synthetic oligonucleotide
  Antisense strand to SEQ ID NO: 2320570
uugagaagcagcuuucguc

SEQ ID NO: 2320572 - RNA, 19 nt, Artificial Sequence
  Description of Artificial Sequence: Synthetic oligonucleotide
  Sense strand starting at position 2311 of SEQ ID NO: 1885156
ccgcuuuauuaacugaaau

SEQ ID NO: 2320573 - RNA, 19 nt, Artificial Sequence
  Description of Artificial Sequence: Synthetic oligonucleotide
  Antisense strand to SEQ ID NO: 2320572
auuucaguuaauaaagcgg

SEQ ID NO: 2320574 - RNA, 19 nt, Artificial Sequence
  Description of Artificial Sequence: Synthetic oligonucleotide
  Sense strand starting at position 3026 of SEQ ID NO: 1885156
augucugauccugguuaaa

SEQ ID NO: 2320575 - RNA, 19 nt, Artificial Sequence
  Description of Artificial Sequence: Synthetic oligonucleotide
  Antisense strand to SEQ ID NO: 2320574
uuuaaccaggaucagacau

SEQ ID NO: 2320576 - RNA, 19 nt, Artificial Sequence
  Description of Artificial Sequence: Synthetic oligonucleotide
  Sense strand starting at position 3028 of SEQ ID NO: 1885156
gucugauccugguuaaauc

SEQ ID NO: 2320577 - RNA, 19 nt, Artificial Sequence
  Description of Artificial Sequence: Synthetic oligonucleotide
  Antisense strand to SEQ ID NO: 2320576
gauuuaaccaggaucagac

SEQ ID NO: 2320578 - RNA, 19 nt, Artificial Sequence
  Description of Artificial Sequence: Synthetic oligonucleotide
  Sense strand starting at position 3029 of SEQ ID NO: 1885156
ucugauccugguuaaaucu

SEQ ID NO: 2320579 - RNA, 19 nt, Artificial Sequence
  Description of Artificial Sequence: Synthetic oligonucleotide
  Antisense strand to SEQ ID NO: 2320578
agauuuaaccaggaucaga

SEQ ID NO: 2320580 - RNA, 19 nt, Artificial Sequence
  Description of Artificial Sequence: Synthetic oligonucleotide
  Sense strand starting at position 3130 of SEQ ID NO: 1885156
ugcuuaugccugccgaguu

SEQ ID NO: 2320581 - RNA, 19 nt, Artificial Sequence
  Description of Artificial Sequence: Synthetic oligonucleotide
  Antisense strand to SEQ ID NO: 2320580
aacucggcaggcauaagca

SEQ ID NO: 2320582 - RNA, 19 nt, Artificial Sequence
  Description of Artificial Sequence: Synthetic oligonucleotide
  Sense strand starting at position 3162 of SEQ ID NO: 1885156
ucguaauaggaugaagcua

SEQ ID NO: 2320583 - RNA, 19 nt, Artificial Sequence
  Description of Artificial Sequence: Synthetic oligonucleotide
  Antisense strand to SEQ ID NO: 2320582
uagcuucauccuauuacga

SEQ ID NO: 2320584 - RNA, 19 nt, Artificial Sequence
  Description of Artificial Sequence: Synthetic oligonucleotide
  Sense strand starting at position 3185 of SEQ ID NO: 1885156
uaguaauugguguaacaua

SEQ ID NO: 2320585 - RNA, 19 nt, Artificial Sequence
  Description of Artificial Sequence: Synthetic oligonucleotide
  Antisense strand to SEQ ID NO: 2320584
uauguuacaccaauuacua

SEQ ID NO: 2320586 - RNA, 19 nt, Artificial Sequence
  Description of Artificial Sequence: Synthetic oligonucleotide
  Sense strand starting at position 3225 of SEQ ID NO: 1885156
gaaugugguguuuggaguu

SEQ ID NO: 2320587 - RNA, 19 nt, Artificial Sequence
  Description of Artificial Sequence: Synthetic oligonucleotide
  Antisense strand to SEQ ID NO: 2320586
aacuccaaacaccacauuc

SEQ ID NO: 2320588 - RNA, 19 nt, Artificial Sequence
  Description of Artificial Sequence: Synthetic oligonucleotide
  Sense strand starting at position 3241 of SEQ ID NO: 1885156
guuguugggaaugaucacu

SEQ ID NO: 2320589 - RNA, 19 nt, Artificial Sequence
  Description of Artificial Sequence: Synthetic oligonucleotide
  Antisense strand to SEQ ID NO: 2320588
agugaucauucccaacaac

SEQ ID NO: 2320590 - RNA, 19 nt, Artificial Sequence
  Description of Artificial Sequence: Synthetic oligonucleotide
  Sense strand starting at position 3246 of SEQ ID NO: 1885156
ugggaaugaucacuaguuu

SEQ ID NO: 2320591 - RNA, 19 nt, Artificial Sequence
  Description of Artificial Sequence: Synthetic oligonucleotide
  Antisense strand to SEQ ID NO: 2320590
aaacuagugaucauuccca

SEQ ID NO: 2320592 - RNA, 19 nt, Artificial Sequence
  Description of Artificial Sequence: Synthetic oligonucleotide
  Sense strand starting at position 3306 of SEQ ID NO: 1885156
uaaggaaccugucuaaugu

SEQ ID NO: 2320593 - RNA, 19 nt, Artificial Sequence
  Description of Artificial Sequence: Synthetic oligonucleotide
  Antisense strand to SEQ ID NO: 2320592
acauuagacagguuccuua

SEQ ID NO: 2320594 - RNA, 19 nt, Artificial Sequence
  Description of Artificial Sequence: Synthetic oligonucleotide
  Sense strand starting at position 3332 of SEQ ID NO: 1885156
cggcuacucaggcagaaau

SEQ ID NO: 2320595 - RNA, 19 nt, Artificial Sequence
  Description of Artificial Sequence: Synthetic oligonucleotide
  Antisense strand to SEQ ID NO: 2320594
auuucugccugaguagccg

SEQ ID NO: 2320596 - RNA, 19 nt, Artificial Sequence
  Description of Artificial Sequence: Synthetic oligonucleotide
  Sense strand starting at position 3334 of SEQ ID NO: 1885156
gcuacucaggcagaaauga

SEQ ID NO: 2320597 - RNA, 19 nt, Artificial Sequence
  Description of Artificial Sequence: Synthetic oligonucleotide
  Antisense strand to SEQ ID NO: 2320596
ucauuucugccugaguagc

SEQ ID NO: 2320598 - RNA, 19 nt, Artificial Sequence
  Description of Artificial Sequence: Synthetic oligonucleotide
  Sense strand starting at position 3526 of SEQ ID NO: 1885156
gcggaaagcuucuuuaauu

SEQ ID NO: 2320599 - RNA, 19 nt, Artificial Sequence
  Description of Artificial Sequence: Synthetic oligonucleotide
  Antisense strand to SEQ ID NO: 2320598
aauuaaagaagcuuuccgc

SEQ ID NO: 2320600 - RNA, 19 nt, Artificial Sequence
  Description of Artificial Sequence: Synthetic oligonucleotide
  Sense strand starting at position 3582 of SEQ ID NO: 1885156
cccgcuuacccguuauguu

SEQ ID NO: 2320601 - RNA, 19 nt, Artificial Sequence
  Description of Artificial Sequence: Synthetic oligonucleotide
  Antisense strand to SEQ ID NO: 2320600
aacauaacggguaagcggg

SEQ ID NO: 2320602 - RNA, 19 nt, Artificial Sequence
  Description of Artificial Sequence: Synthetic oligonucleotide
  Sense strand starting at position 20 of SEQ ID NO: 1885157
gggugucuggugugacaga

SEQ ID NO: 2320603 - RNA, 19 nt, Artificial Sequence
  Description of Artificial Sequence: Synthetic oligonucleotide
  Antisense strand to SEQ ID NO: 2320602
ucugucacaccagacaccc

SEQ ID NO: 2320604 - RNA, 19 nt, Artificial Sequence
  Description of Artificial Sequence: Synthetic oligonucleotide
  Sense strand starting at position 351 of SEQ ID NO: 1885157
uugucaucuccggagggca

SEQ ID NO: 2320605 - RNA, 19 nt, Artificial Sequence
  Description of Artificial Sequence: Synthetic oligonucleotide
  Antisense strand to SEQ ID NO: 2320604
ugcccuccggagaugacaa

SEQ ID NO: 2320606 - RNA, 19 nt, Artificial Sequence
  Description of Artificial Sequence: Synthetic oligonucleotide
  Sense strand starting at position 847 of SEQ ID NO: 1885157
ccgggugcucguccgagaa

SEQ ID NO: 2320607 - RNA, 19 nt, Artificial Sequence
  Description of Artificial Sequence: Synthetic oligonucleotide
  Antisense strand to SEQ ID NO: 2320606
uucucggacgagcacccgg

SEQ ID NO: 2320608 - RNA, 19 nt, Artificial Sequence
  Description of Artificial Sequence: Synthetic oligonucleotide
  Sense strand starting at position 850 of SEQ ID NO: 1885157
ggugcucguccgagaagua

SEQ ID NO: 2320609 - RNA, 19 nt, Artificial Sequence
  Description of Artificial Sequence: Synthetic oligonucleotide
  Antisense strand to SEQ ID NO: 2320608
uacuucucggacgagcacc

SEQ ID NO: 2320610 - RNA, 19 nt, Artificial Sequence
  Description of Artificial Sequence: Synthetic oligonucleotide
  Sense strand starting at position 2252 of SEQ ID NO: 1885157
cugacucaccggugccaaa

SEQ ID NO: 2320611 - RNA, 19 nt, Artificial Sequence
  Description of Artificial Sequence: Synthetic oligonucleotide
  Antisense strand to SEQ ID NO: 2320610
uuuggcaccggugagucag

SEQ ID NO: 2320612 - RNA, 19 nt, Artificial Sequence
  Description of Artificial Sequence: Synthetic oligonucleotide
  Sense strand starting at position 2316 of SEQ ID NO: 1885157
gucagaguuccuuagccau

SEQ ID NO: 2320613 - RNA, 19 nt, Artificial Sequence
  Description of Artificial Sequence: Synthetic oligonucleotide
  Antisense strand to SEQ ID NO: 2320612
auggcuaaggaacucugac

SEQ ID NO: 2320614 - RNA, 19 nt, Artificial Sequence
  Description of Artificial Sequence: Synthetic oligonucleotide
  Sense strand starting at position 2319 of SEQ ID NO: 1885157
agaguuccuuagccaucga

SEQ ID NO: 2320615 - RNA, 19 nt, Artificial Sequence
  Description of Artificial Sequence: Synthetic oligonucleotide
  Antisense strand to SEQ ID NO: 2320614
ucgauggcuaaggaacucu

SEQ ID NO: 2320616 - RNA, 19 nt, Artificial Sequence
  Description of Artificial Sequence: Synthetic oligonucleotide
  Sense strand starting at position 2370 of SEQ ID NO: 1885157
uaaucugagcgaugccaga

SEQ ID NO: 2320617 - RNA, 19 nt, Artificial Sequence
  Description of Artificial Sequence: Synthetic oligonucleotide
  Antisense strand to SEQ ID NO: 2320616
ucuggcaucgcucagauua

SEQ ID NO: 2320618 - RNA, 19 nt, Artificial Sequence
  Description of Artificial Sequence: Synthetic oligonucleotide
  Sense strand starting at position 2407 of SEQ ID NO: 1885157
caaguuacugucgagggaa

SEQ ID NO: 2320619 - RNA, 19 nt, Artificial Sequence
  Description of Artificial Sequence: Synthetic oligonucleotide
  Antisense strand to SEQ ID NO: 2320618
uucccucgacaguaacuug

SEQ ID NO: 2320620 - RNA, 19 nt, Artificial Sequence
  Description of Artificial Sequence: Synthetic oligonucleotide
  Sense strand starting at position 2680 of SEQ ID NO: 1885157
gccagagccagcgauaagu

SEQ ID NO: 2320621 - RNA, 19 nt, Artificial Sequence
  Description of Artificial Sequence: Synthetic oligonucleotide
  Antisense strand to SEQ ID NO: 2320620
acuuaucgcuggcucuggc

SEQ ID NO: 2320622 - RNA, 19 nt, Artificial Sequence
  Description of Artificial Sequence: Synthetic oligonucleotide
  Sense strand starting at position 2774 of SEQ ID NO: 1885157
agaugauuccaguggccaa

SEQ ID NO: 2320623 - RNA, 19 nt, Artificial Sequence
  Description of Artificial Sequence: Synthetic oligonucleotide
  Antisense strand to SEQ ID NO: 2320622
uuggccacuggaaucaucu

SEQ ID NO: 2320624 - RNA, 19 nt, Artificial Sequence
  Description of Artificial Sequence: Synthetic oligonucleotide
  Sense strand starting at position 2798 of SEQ ID NO: 1885157
gggaaagcuaguugucagu

SEQ ID NO: 2320625 - RNA, 19 nt, Artificial Sequence
  Description of Artificial Sequence: Synthetic oligonucleotide
  Antisense strand to SEQ ID NO: 2320624
acugacaacuagcuuuccc

SEQ ID NO: 2320626 - RNA, 19 nt, Artificial Sequence
  Description of Artificial Sequence: Synthetic oligonucleotide
  Sense strand starting at position 2985 of SEQ ID NO: 1885157
agguuugaggaagguaauu

SEQ ID NO: 2320627 - RNA, 19 nt, Artificial Sequence
  Description of Artificial Sequence: Synthetic oligonucleotide
  Antisense strand to SEQ ID NO: 2320626
aauuaccuuccucaaaccu

SEQ ID NO: 2320628 - RNA, 19 nt, Artificial Sequence
  Description of Artificial Sequence: Synthetic oligonucleotide
  Sense strand starting at position 3071 of SEQ ID NO: 1885157
cuaugagguagacgcuauu

SEQ ID NO: 2320629 - RNA, 19 nt, Artificial Sequence
  Description of Artificial Sequence: Synthetic oligonucleotide
  Antisense strand to SEQ ID NO: 2320628
aauagcgucuaccucauag

SEQ ID NO: 2320630 - RNA, 19 nt, Artificial Sequence
  Description of Artificial Sequence: Synthetic oligonucleotide
  Sense strand starting at position 3074 of SEQ ID NO: 1885157
ugagguagacgcuauuauc

SEQ ID NO: 2320631 - RNA, 19 nt, Artificial Sequence
  Description of Artificial Sequence: Synthetic oligonucleotide
  Antisense strand to SEQ ID NO: 2320630
gauaauagcgucuaccuca

SEQ ID NO: 2320632 - RNA, 19 nt, Artificial Sequence
  Description of Artificial Sequence: Synthetic oligonucleotide
  Sense strand starting at position 3135 of SEQ ID NO: 1885157
ugucacauagcuugaucaa

SEQ ID NO: 2320633 - RNA, 19 nt, Artificial Sequence
  Description of Artificial Sequence: Synthetic oligonucleotide
  Antisense strand to SEQ ID NO: 2320632
uugaucaagcuaugugaca

SEQ ID NO: 2320634 - RNA, 19 nt, Artificial Sequence
  Description of Artificial Sequence: Synthetic oligonucleotide
  Sense strand starting at position 3136 of SEQ ID NO: 1885157
gucacauagcuugaucaag

SEQ ID NO: 2320635 - RNA, 19 nt, Artificial Sequence
  Description of Artificial Sequence: Synthetic oligonucleotide
  Antisense strand to SEQ ID NO: 2320634
cuugaucaagcuaugugac

SEQ ID NO: 2320636 - RNA, 19 nt, Artificial Sequence
  Description of Artificial Sequence: Synthetic oligonucleotide
  Sense strand starting at position 3203 of SEQ ID NO: 1885157
ggcucuugagccuagacuu

SEQ ID NO: 2320637 - RNA, 19 nt, Artificial Sequence
  Description of Artificial Sequence: Synthetic oligonucleotide
  Antisense strand to SEQ ID NO: 2320636
aagucuaggcucaagagcc

SEQ ID NO: 2320638 - RNA, 19 nt, Artificial Sequence
  Description of Artificial Sequence: Synthetic oligonucleotide
  Sense strand starting at position 3259 of SEQ ID NO: 1885157
cuuguaggauugguguaga

SEQ ID NO: 2320639 - RNA, 19 nt, Artificial Sequence
  Description of Artificial Sequence: Synthetic oligonucleotide
  Antisense strand to SEQ ID NO: 2320638
ucuacaccaauccuacaag

SEQ ID NO: 2320640 - RNA, 19 nt, Artificial Sequence
  Description of Artificial Sequence: Synthetic oligonucleotide
  Sense strand starting at position 3262 of SEQ ID NO: 1885157
guaggauugguguagacgu

SEQ ID NO: 2320641 - RNA, 19 nt, Artificial Sequence
  Description of Artificial Sequence: Synthetic oligonucleotide
  Antisense strand to SEQ ID NO: 2320640
acgucuacaccaauccuac

SEQ ID NO: 2320642 - RNA, 19 nt, Artificial Sequence
  Description of Artificial Sequence: Synthetic oligonucleotide
  Sense strand starting at position 3270 of SEQ ID NO: 1885157
gguguagacgucuaugagu

SEQ ID NO: 2320643 - RNA, 19 nt, Artificial Sequence
  Description of Artificial Sequence: Synthetic oligonucleotide
  Antisense strand to SEQ ID NO: 2320642
acucauagacgucuacacc

SEQ ID NO: 2320644 - RNA, 19 nt, Artificial Sequence
  Description of Artificial Sequence: Synthetic oligonucleotide
  Sense strand starting at position 3272 of SEQ ID NO: 1885157
uguagacgucuaugaguga

SEQ ID NO: 2320645 - RNA, 19 nt, Artificial Sequence
  Description of Artificial Sequence: Synthetic oligonucleotide
  Antisense strand to SEQ ID NO: 2320644
ucacucauagacgucuaca

SEQ ID NO: 2320646 - RNA, 19 nt, Artificial Sequence
  Description of Artificial Sequence: Synthetic oligonucleotide
  Sense strand starting at position 3275 of SEQ ID NO: 1885157
agacgucuaugagugaaug

SEQ ID NO: 2320647 - RNA, 19 nt, Artificial Sequence
  Description of Artificial Sequence: Synthetic oligonucleotide
  Antisense strand to SEQ ID NO: 2320646
cauucacucauagacgucu

SEQ ID NO: 2320648 - RNA, 19 nt, Artificial Sequence
  Description of Artificial Sequence: Synthetic oligonucleotide
  Sense strand starting at position 3277 of SEQ ID NO: 1885157
acgucuaugagugaaugca

SEQ ID NO: 2320649 - RNA, 19 nt, Artificial Sequence
  Description of Artificial Sequence: Synthetic oligonucleotide
  Antisense strand to SEQ ID NO: 2320648
ugcauucacucauagacgu

SEQ ID NO: 2320650 - RNA, 19 nt, Artificial Sequence
  Description of Artificial Sequence: Synthetic oligonucleotide
  Sense strand starting at position 3315 of SEQ ID NO: 1885157
gugccuggcauauagagua

SEQ ID NO: 2320651 - RNA, 19 nt, Artificial Sequence
  Description of Artificial Sequence: Synthetic oligonucleotide
  Antisense strand to SEQ ID NO: 2320650
uacucuauaugccaggcac

SEQ ID NO: 2320652 - RNA, 19 nt, Artificial Sequence
  Description of Artificial Sequence: Synthetic oligonucleotide
  Sense strand starting at position 3381 of SEQ ID NO: 1885157
ucagguauauuguugaaug

SEQ ID NO: 2320653 - RNA, 19 nt, Artificial Sequence
  Description of Artificial Sequence: Synthetic oligonucleotide
  Antisense strand to SEQ ID NO: 2320652
cauucaacaauauaccuga

SEQ ID NO: 2320654 - RNA, 19 nt, Artificial Sequence
  Description of Artificial Sequence: Synthetic oligonucleotide
  Sense strand starting at position 3397 of SEQ ID NO: 1885157
augaauaagugauucuugu

SEQ ID NO: 2320655 - RNA, 19 nt, Artificial Sequence
  Description of Artificial Sequence: Synthetic oligonucleotide
  Antisense strand to SEQ ID NO: 2320654
acaagaaucacuuauucau

SEQ ID NO: 2320656 - RNA, 19 nt, Artificial Sequence
  Description of Artificial Sequence: Synthetic oligonucleotide
  Sense strand starting at position 3436 of SEQ ID NO: 1885157
uugcuaagauaacuuagau

SEQ ID NO: 2320657 - RNA, 19 nt, Artificial Sequence
  Description of Artificial Sequence: Synthetic oligonucleotide
  Antisense strand to SEQ ID NO: 2320656
aucuaaguuaucuuagcaa

SEQ ID NO: 2320658 - RNA, 19 nt, Artificial Sequence
  Description of Artificial Sequence: Synthetic oligonucleotide
  Sense strand starting at position 3531 of SEQ ID NO: 1885157
gguuacagaucaguaauga

SEQ ID NO: 2320659 - RNA, 19 nt, Artificial Sequence
  Description of Artificial Sequence: Synthetic oligonucleotide
  Antisense strand to SEQ ID NO: 2320658
ucauuacugaucuguaacc

SEQ ID NO: 2320660 - RNA, 19 nt, Artificial Sequence
  Description of Artificial Sequence: Synthetic oligonucleotide
  Sense strand starting at position 3631 of SEQ ID NO: 1885157
aggcuugucaguggagagu

SEQ ID NO: 2320661 - RNA, 19 nt, Artificial Sequence
  Description of Artificial Sequence: Synthetic oligonucleotide
  Antisense strand to SEQ ID NO: 2320660
acucuccacugacaagccu

SEQ ID NO: 2320662 - RNA, 19 nt, Artificial Sequence
  Description of Artificial Sequence: Synthetic oligonucleotide
  Sense strand starting at position 3645 of SEQ ID NO: 1885157
agaguuaggacuugaacuu

SEQ ID NO: 2320663 - RNA, 19 nt, Artificial Sequence
  Description of Artificial Sequence: Synthetic oligonucleotide
  Antisense strand to SEQ ID NO: 2320662
aaguucaaguccuaacucu

SEQ ID NO: 2320664 - RNA, 19 nt, Artificial Sequence
  Description of Artificial Sequence: Synthetic oligonucleotide
  Sense strand starting at position 3655 of SEQ ID NO: 1885157
cuugaacuuugguucucua

SEQ ID NO: 2320665 - RNA, 19 nt, Artificial Sequence
  Description of Artificial Sequence: Synthetic oligonucleotide
  Antisense strand to SEQ ID NO: 2320664
uagagaaccaaaguucaag

SEQ ID NO: 2320666 - RNA, 19 nt, Artificial Sequence
  Description of Artificial Sequence: Synthetic oligonucleotide
  Sense strand starting at position 3691 of SEQ ID NO: 1885157
agcuuaugguguuuggaaa

SEQ ID NO: 2320667 - RNA, 19 nt, Artificial Sequence
  Description of Artificial Sequence: Synthetic oligonucleotide
  Antisense strand to SEQ ID NO: 2320666
uuuccaaacaccauaagcu

SEQ ID NO: 2320668 - RNA, 19 nt, Artificial Sequence
  Description of Artificial Sequence: Synthetic oligonucleotide
  Sense strand starting at position 3692 of SEQ ID NO: 1885157
gcuuaugguguuuggaaac

SEQ ID NO: 2320669 - RNA, 19 nt, Artificial Sequence
  Description of Artificial Sequence: Synthetic oligonucleotide
  Antisense strand to SEQ ID NO: 2320668
guuuccaaacaccauaagc

SEQ ID NO: 2320670 - RNA, 19 nt, Artificial Sequence
  Description of Artificial Sequence: Synthetic oligonucleotide
  Sense strand starting at position 3702 of SEQ ID NO: 1885157
uuuggaaacucucagaaga

SEQ ID NO: 2320671 - RNA, 19 nt, Artificial Sequence
  Description of Artificial Sequence: Synthetic oligonucleotide
  Antisense strand to SEQ ID NO: 2320670
ucuucugagaguuuccaaa

SEQ ID NO: 2320672 - RNA, 19 nt, Artificial Sequence
  Description of Artificial Sequence: Synthetic oligonucleotide
  Sense strand starting at position 3704 of SEQ ID NO: 1885157
uggaaacucucagaagaag

SEQ ID NO: 2320673 - RNA, 19 nt, Artificial Sequence
  Description of Artificial Sequence: Synthetic oligonucleotide
  Antisense strand to SEQ ID NO: 2320672
cuucuucugagaguuucca

SEQ ID NO: 2320674 - RNA, 19 nt, Artificial Sequence
  Description of Artificial Sequence: Synthetic oligonucleotide
  Sense strand starting at position 3719 of SEQ ID NO: 1885157
gaaguuauuguguaagagg

SEQ ID NO: 2320675 - RNA, 19 nt, Artificial Sequence
  Description of Artificial Sequence: Synthetic oligonucleotide
  Antisense strand to SEQ ID NO: 2320674
ccucuuacacaauaacuuc

SEQ ID NO: 2320676 - RNA, 19 nt, Artificial Sequence
  Description of Artificial Sequence: Synthetic oligonucleotide
  Sense strand starting at position 3741 of SEQ ID NO: 1885157
gggaaauugcaauguguug

SEQ ID NO: 2320677 - RNA, 19 nt, Artificial Sequence
  Description of Artificial Sequence: Synthetic oligonucleotide
  Antisense strand to SEQ ID NO: 2320676
caacacauugcaauuuccc

SEQ ID NO: 2320678 - RNA, 19 nt, Artificial Sequence
  Description of Artificial Sequence: Synthetic oligonucleotide
  Sense strand starting at position 3786 of SEQ ID NO: 1885157
uauagaguucuaugaagua

SEQ ID NO: 2320679 - RNA, 19 nt, Artificial Sequence
  Description of Artificial Sequence: Synthetic oligonucleotide
  Antisense strand to SEQ ID NO: 2320678
uacuucauagaacucuaua

SEQ ID NO: 2320680 - RNA, 19 nt, Artificial Sequence
  Description of Artificial Sequence: Synthetic oligonucleotide
  Sense strand starting at position 3860 of SEQ ID NO: 1885157
ccuauaagugaauguauaa

SEQ ID NO: 2320681 - RNA, 19 nt, Artificial Sequence
  Description of Artificial Sequence: Synthetic oligonucleotide
  Antisense strand to SEQ ID NO: 2320680
uuauacauucacuuauagg

SEQ ID NO: 2320682 - RNA, 19 nt, Artificial Sequence
  Description of Artificial Sequence: Synthetic oligonucleotide
  Sense strand starting at position 424 of SEQ ID NO: 1885158
cuacauaauucugugcaga

SEQ ID NO: 2320683 - RNA, 19 nt, Artificial Sequence
  Description of Artificial Sequence: Synthetic oligonucleotide
  Antisense strand to SEQ ID NO: 2320682
ucugcacagaauuauguag

SEQ ID NO: 2320684 - RNA, 19 nt, Artificial Sequence
  Description of Artificial Sequence: Synthetic oligonucleotide
  Sense strand starting at position 426 of SEQ ID NO: 1885158
acauaauucugugcagaaa

SEQ ID NO: 2320685 - RNA, 19 nt, Artificial Sequence
  Description of Artificial Sequence: Synthetic oligonucleotide
  Antisense strand to SEQ ID NO: 2320684
uuucugcacagaauuaugu

SEQ ID NO: 2320686 - RNA, 19 nt, Artificial Sequence
  Description of Artificial Sequence: Synthetic oligonucleotide
  Sense strand starting at position 821 of SEQ ID NO: 1885158
gucuauuagcagcaagaac

SEQ ID NO: 2320687 - RNA, 19 nt, Artificial Sequence
  Description of Artificial Sequence: Synthetic oligonucleotide
  Antisense strand to SEQ ID NO: 2320686
guucuugcugcuaauagac

SEQ ID NO: 2320688 - RNA, 19 nt, Artificial Sequence
  Description of Artificial Sequence: Synthetic oligonucleotide
  Sense strand starting at position 908 of SEQ ID NO: 1885158
ucgaaauuaaugcggauaa

SEQ ID NO: 2320689 - RNA, 19 nt, Artificial Sequence
  Description of Artificial Sequence: Synthetic oligonucleotide
  Antisense strand to SEQ ID NO: 2320688
uuauccgcauuaauuucga

SEQ ID NO: 2320690 - RNA, 19 nt, Artificial Sequence
  Description of Artificial Sequence: Synthetic oligonucleotide
  Sense strand starting at position 1029 of SEQ ID NO: 1885158
aguguucaucugggagaaa

SEQ ID NO: 2320691 - RNA, 19 nt, Artificial Sequence
  Description of Artificial Sequence: Synthetic oligonucleotide
  Antisense strand to SEQ ID NO: 2320690
uuucucccagaugaacacu

SEQ ID NO: 2320692 - RNA, 19 nt, Artificial Sequence
  Description of Artificial Sequence: Synthetic oligonucleotide
  Sense strand starting at position 1040 of SEQ ID NO: 1885158
gggagaaagacucgcuauu

SEQ ID NO: 2320693 - RNA, 19 nt, Artificial Sequence
  Description of Artificial Sequence: Synthetic oligonucleotide
  Antisense strand to SEQ ID NO: 2320692
aauagcgagucuuucuccc

SEQ ID NO: 2320694 - RNA, 19 nt, Artificial Sequence
  Description of Artificial Sequence: Synthetic oligonucleotide
  Sense strand starting at position 1042 of SEQ ID NO: 1885158
gagaaagacucgcuauuaa

SEQ ID NO: 2320695 - RNA, 19 nt, Artificial Sequence
  Description of Artificial Sequence: Synthetic oligonucleotide
  Antisense strand to SEQ ID NO: 2320694
uuaauagcgagucuuucuc

SEQ ID NO: 2320696 - RNA, 19 nt, Artificial Sequence
  Description of Artificial Sequence: Synthetic oligonucleotide
  Sense strand starting at position 1061 of SEQ ID NO: 1885158
caguaagagcuugaguuua

SEQ ID NO: 2320697 - RNA, 19 nt, Artificial Sequence
  Description of Artificial Sequence: Synthetic oligonucleotide
  Antisense strand to SEQ ID NO: 2320696
uaaacucaagcucuuacug

SEQ ID NO: 2320698 - RNA, 19 nt, Artificial Sequence
  Description of Artificial Sequence: Synthetic oligonucleotide
  Sense strand starting at position 1066 of SEQ ID NO: 1885158
agagcuugaguuuacacua

SEQ ID NO: 2320699 - RNA, 19 nt, Artificial Sequence
  Description of Artificial Sequence: Synthetic oligonucleotide
  Antisense strand to SEQ ID NO: 2320698
uaguguaaacucaagcucu

SEQ ID NO: 2320700 - RNA, 19 nt, Artificial Sequence
  Description of Artificial Sequence: Synthetic oligonucleotide
  Sense strand starting at position 1081 of SEQ ID NO: 1885158
acuagaacucguuaaguga

SEQ ID NO: 2320701 - RNA, 19 nt, Artificial Sequence
  Description of Artificial Sequence: Synthetic oligonucleotide
  Antisense strand to SEQ ID NO: 2320700
ucacuuaacgaguucuagu

SEQ ID NO: 2320702 - RNA, 19 nt, Artificial Sequence
  Description of Artificial Sequence: Synthetic oligonucleotide
  Sense strand starting at position 1090 of SEQ ID NO: 1885158
cguuaagugaucgcgagua

SEQ ID NO: 2320703 - RNA, 19 nt, Artificial Sequence
  Description of Artificial Sequence: Synthetic oligonucleotide
  Antisense strand to SEQ ID NO: 2320702
uacucgcgaucacuuaacg

SEQ ID NO: 2320704 - RNA, 19 nt, Artificial Sequence
  Description of Artificial Sequence: Synthetic oligonucleotide
  Sense strand starting at position 1295 of SEQ ID NO: 1885158
cgagauuucucagaacaua

SEQ ID NO: 2320705 - RNA, 19 nt, Artificial Sequence
  Description of Artificial Sequence: Synthetic oligonucleotide
  Antisense strand to SEQ ID NO: 2320704
uauguucugagaaaucucg

SEQ ID NO: 2320706 - RNA, 19 nt, Artificial Sequence
  Description of Artificial Sequence: Synthetic oligonucleotide
  Sense strand starting at position 1407 of SEQ ID NO: 1885158
aucaaaguccuguaauauu

SEQ ID NO: 2320707 - RNA, 19 nt, Artificial Sequence
  Description of Artificial Sequence: Synthetic oligonucleotide
  Antisense strand to SEQ ID NO: 2320706
aauauuacaggacuuugau

SEQ ID NO: 2320708 - RNA, 19 nt, Artificial Sequence
  Description of Artificial Sequence: Synthetic oligonucleotide
  Sense strand starting at position 1418 of SEQ ID NO: 1885158
guaauauucuccuuuggac

SEQ ID NO: 2320709 - RNA, 19 nt, Artificial Sequence
  Description of Artificial Sequence: Synthetic oligonucleotide
  Antisense strand to SEQ ID NO: 2320708
guccaaaggagaauauuac

SEQ ID NO: 2320710 - RNA, 19 nt, Artificial Sequence
  Description of Artificial Sequence: Synthetic oligonucleotide
  Sense strand starting at position 2153 of SEQ ID NO: 1885158
ggacaugccgcagaaucua

SEQ ID NO: 2320711 - RNA, 19 nt, Artificial Sequence
  Description of Artificial Sequence: Synthetic oligonucleotide
  Antisense strand to SEQ ID NO: 2320710
uagauucugcggcaugucc

SEQ ID NO: 2320712 - RNA, 19 nt, Artificial Sequence
  Description of Artificial Sequence: Synthetic oligonucleotide
  Sense strand starting at position 2481 of SEQ ID NO: 1885158
uuuagagacucaguguauc

SEQ ID NO: 2320713 - RNA, 19 nt, Artificial Sequence
  Description of Artificial Sequence: Synthetic oligonucleotide
  Antisense strand to SEQ ID NO: 2320712
gauacacugagucucuaaa

SEQ ID NO: 2320714 - RNA, 19 nt, Artificial Sequence
  Description of Artificial Sequence: Synthetic oligonucleotide
  Sense strand starting at position 2484 of SEQ ID NO: 1885158
agagacucaguguaucuuu

SEQ ID NO: 2320715 - RNA, 19 nt, Artificial Sequence
  Description of Artificial Sequence: Synthetic oligonucleotide
  Antisense strand to SEQ ID NO: 2320714
aaagauacacugagucucu

SEQ ID NO: 2320716 - RNA, 19 nt, Artificial Sequence
  Description of Artificial Sequence: Synthetic oligonucleotide
  Sense strand starting at position 2565 of SEQ ID NO: 1885158
cgauuauaccauugcaaau

SEQ ID NO: 2320717 - RNA, 19 nt, Artificial Sequence
  Description of Artificial Sequence: Synthetic oligonucleotide
  Antisense strand to SEQ ID NO: 2320716
auuugcaaugguauaaucg

SEQ ID NO: 2320718 - RNA, 19 nt, Artificial Sequence
  Description of Artificial Sequence: Synthetic oligonucleotide
  Sense strand starting at position 2643 of SEQ ID NO: 1885158
uggacagauuuguaaggua

SEQ ID NO: 2320719 - RNA, 19 nt, Artificial Sequence
  Description of Artificial Sequence: Synthetic oligonucleotide
  Antisense strand to SEQ ID NO: 2320718
uaccuuacaaaucugucca

SEQ ID NO: 2320720 - RNA, 19 nt, Artificial Sequence
  Description of Artificial Sequence: Synthetic oligonucleotide
  Sense strand starting at position 2656 of SEQ ID NO: 1885158
aagguagcagcagauauua

SEQ ID NO: 2320721 - RNA, 19 nt, Artificial Sequence
  Description of Artificial Sequence: Synthetic oligonucleotide
  Antisense strand to SEQ ID NO: 2320720
uaauaucugcugcuaccuu

SEQ ID NO: 2320722 - RNA, 19 nt, Artificial Sequence
  Description of Artificial Sequence: Synthetic oligonucleotide
  Sense strand starting at position 2712 of SEQ ID NO: 1885158
uaguuccuuccugaaaggu

SEQ ID NO: 2320723 - RNA, 19 nt, Artificial Sequence
  Description of Artificial Sequence: Synthetic oligonucleotide
  Antisense strand to SEQ ID NO: 2320722
accuuucaggaaggaacua

SEQ ID NO: 2320724 - RNA, 19 nt, Artificial Sequence
  Description of Artificial Sequence: Synthetic oligonucleotide
  Sense strand starting at position 2937 of SEQ ID NO: 1885158
gaugaacaggccugcaauu

SEQ ID NO: 2320725 - RNA, 19 nt, Artificial Sequence
  Description of Artificial Sequence: Synthetic oligonucleotide
  Antisense strand to SEQ ID NO: 2320724
aauugcaggccuguucauc

SEQ ID NO: 2320726 - RNA, 19 nt, Artificial Sequence
  Description of Artificial Sequence: Synthetic oligonucleotide
  Sense strand starting at position 3159 of SEQ ID NO: 1885158
gacuacauugcugagcaga

SEQ ID NO: 2320727 - RNA, 19 nt, Artificial Sequence
  Description of Artificial Sequence: Synthetic oligonucleotide
  Antisense strand to SEQ ID NO: 2320726
ucugcucagcaauguaguc

SEQ ID NO: 2320728 - RNA, 19 nt, Artificial Sequence
  Description of Artificial Sequence: Synthetic oligonucleotide
  Sense strand starting at position 3161 of SEQ ID NO: 1885158
cuacauugcugagcagaga

SEQ ID NO: 2320729 - RNA, 19 nt, Artificial Sequence
  Description of Artificial Sequence: Synthetic oligonucleotide
  Antisense strand to SEQ ID NO: 2320728
ucucugcucagcaauguag

SEQ ID NO: 2320730 - RNA, 19 nt, Artificial Sequence
  Description of Artificial Sequence: Synthetic oligonucleotide
  Sense strand starting at position 3310 of SEQ ID NO: 1885158
gggaaaggccacuguauuc

SEQ ID NO: 2320731 - RNA, 19 nt, Artificial Sequence
  Description of Artificial Sequence: Synthetic oligonucleotide
  Antisense strand to SEQ ID NO: 2320730
gaauacaguggccuuuccc

SEQ ID NO: 2320732 - RNA, 19 nt, Artificial Sequence
  Description of Artificial Sequence: Synthetic oligonucleotide
  Sense strand starting at position 3344 of SEQ ID NO: 1885158
aggaaugucuaguuagguu

SEQ ID NO: 2320733 - RNA, 19 nt, Artificial Sequence
  Description of Artificial Sequence: Synthetic oligonucleotide
  Antisense strand to SEQ ID NO: 2320732
aaccuaacuagacauuccu

SEQ ID NO: 2320734 - RNA, 19 nt, Artificial Sequence
  Description of Artificial Sequence: Synthetic oligonucleotide
  Sense strand starting at position 3405 of SEQ ID NO: 1885158
aguacaauaguuugacuua

SEQ ID NO: 2320735 - RNA, 19 nt, Artificial Sequence
  Description of Artificial Sequence: Synthetic oligonucleotide
  Antisense strand to SEQ ID NO: 2320734
uaagucaaacuauuguacu

SEQ ID NO: 2320736 - RNA, 19 nt, Artificial Sequence
  Description of Artificial Sequence: Synthetic oligonucleotide
  Sense strand starting at position 3427 of SEQ ID NO: 1885158
gcugcaagcgucuugggua

SEQ ID NO: 2320737 - RNA, 19 nt, Artificial Sequence
  Description of Artificial Sequence: Synthetic oligonucleotide
  Antisense strand to SEQ ID NO: 2320736
uacccaagacgcuugcagc

SEQ ID NO: 2320738 - RNA, 19 nt, Artificial Sequence
  Description of Artificial Sequence: Synthetic oligonucleotide
  Sense strand starting at position 3489 of SEQ ID NO: 1885158
ucuauugugucuccauuua

SEQ ID NO: 2320739 - RNA, 19 nt, Artificial Sequence
  Description of Artificial Sequence: Synthetic oligonucleotide
  Antisense strand to SEQ ID NO: 2320738
uaaauggagacacaauaga

SEQ ID NO: 2320740 - RNA, 19 nt, Artificial Sequence
  Description of Artificial Sequence: Synthetic oligonucleotide
  Sense strand starting at position 3543 of SEQ ID NO: 1885158
cuuagauuuguaugguagu

SEQ ID NO: 2320741 - RNA, 19 nt, Artificial Sequence
  Description of Artificial Sequence: Synthetic oligonucleotide
  Antisense strand to SEQ ID NO: 2320740
acuaccauacaaaucuaag

SEQ ID NO: 2320742 - RNA, 19 nt, Artificial Sequence
  Description of Artificial Sequence: Synthetic oligonucleotide
  Sense strand starting at position 3653 of SEQ ID NO: 1885158
cuuuaagagguuuggaaau

SEQ ID NO: 2320743 - RNA, 19 nt, Artificial Sequence
  Description of Artificial Sequence: Synthetic oligonucleotide
  Antisense strand to SEQ ID NO: 2320742
auuuccaaaccucuuaaag

SEQ ID NO: 2320744 - RNA, 19 nt, Artificial Sequence
  Description of Artificial Sequence: Synthetic oligonucleotide
  Sense strand starting at position 3684 of SEQ ID NO: 1885158
uugggaagucagcagguuu

SEQ ID NO: 2320745 - RNA, 19 nt, Artificial Sequence
  Description of Artificial Sequence: Synthetic oligonucleotide
  Antisense strand to SEQ ID NO: 2320744
aaaccugcugacuucccaa

SEQ ID NO: 2320746 - RNA, 19 nt, Artificial Sequence
  Description of Artificial Sequence: Synthetic oligonucleotide
  Sense strand starting at position 3710 of SEQ ID NO: 1885158
aagacaagugucuguaaga

SEQ ID NO: 2320747 - RNA, 19 nt, Artificial Sequence
  Description of Artificial Sequence: Synthetic oligonucleotide
  Antisense strand to SEQ ID NO: 2320746
ucuuacagacacuugucuu

SEQ ID NO: 2320748 - RNA, 19 nt, Artificial Sequence
  Description of Artificial Sequence: Synthetic oligonucleotide
  Sense strand starting at position 3711 of SEQ ID NO: 1885158
agacaagugucuguaagaa

SEQ ID NO: 2320749 - RNA, 19 nt, Artificial Sequence
  Description of Artificial Sequence: Synthetic oligonucleotide
  Antisense strand to SEQ ID NO: 2320748
uucuuacagacacuugucu

SEQ ID NO: 2320750 - RNA, 19 nt, Artificial Sequence
  Description of Artificial Sequence: Synthetic oligonucleotide
  Sense strand starting at position 3753 of SEQ ID NO: 1885158
ugcagauaagaggguuuau

SEQ ID NO: 2320751 - RNA, 19 nt, Artificial Sequence
  Description of Artificial Sequence: Synthetic oligonucleotide
  Antisense strand to SEQ ID NO: 2320750
auaaacccucuuaucugca

SEQ ID NO: 2320752 - RNA, 19 nt, Artificial Sequence
  Description of Artificial Sequence: Synthetic oligonucleotide
  Sense strand starting at position 3878 of SEQ ID NO: 1885158
gcugaauauggcuacccua

SEQ ID NO: 2320753 - RNA, 19 nt, Artificial Sequence
  Description of Artificial Sequence: Synthetic oligonucleotide
  Antisense strand to SEQ ID NO: 2320752
uaggguagccauauucagc

SEQ ID NO: 2320754 - RNA, 19 nt, Artificial Sequence
  Description of Artificial Sequence: Synthetic oligonucleotide
  Sense strand starting at position 3903 of SEQ ID NO: 1885158
ccaaauugacaggguugua

SEQ ID NO: 2320755 - RNA, 19 nt, Artificial Sequence
  Description of Artificial Sequence: Synthetic oligonucleotide
  Antisense strand to SEQ ID NO: 2320754
uacaacccugucaauuugg

SEQ ID NO: 2320756 - RNA, 19 nt, Artificial Sequence
  Description of Artificial Sequence: Synthetic oligonucleotide
  Sense strand starting at position 3922 of SEQ ID NO: 1885158
gcugcaugcagagauuaca

SEQ ID NO: 2320757 - RNA, 19 nt, Artificial Sequence
  Description of Artificial Sequence: Synthetic oligonucleotide
  Antisense strand to SEQ ID NO: 2320756
uguaaucucugcaugcagc

SEQ ID NO: 2320758 - RNA, 19 nt, Artificial Sequence
  Description of Artificial Sequence: Synthetic oligonucleotide
  Sense strand starting at position 3958 of SEQ ID NO: 1885158
aguuuaaaguuccuaagag

SEQ ID NO: 2320759 - RNA, 19 nt, Artificial Sequence
  Description of Artificial Sequence: Synthetic oligonucleotide
  Antisense strand to SEQ ID NO: 2320758
cucuuaggaacuuuaaacu

SEQ ID NO: 2320760 - RNA, 19 nt, Artificial Sequence
  Description of Artificial Sequence: Synthetic oligonucleotide
  Sense strand starting at position 3973 of SEQ ID NO: 1885158
agagaaagcacgugaauga

SEQ ID NO: 2320761 - RNA, 19 nt, Artificial Sequence
  Description of Artificial Sequence: Synthetic oligonucleotide
  Antisense strand to SEQ ID NO: 2320760
ucauucacgugcuuucucu

SEQ ID NO: 2320762 - RNA, 19 nt, Artificial Sequence
  Description of Artificial Sequence: Synthetic oligonucleotide
  Sense strand starting at position 76 of SEQ ID NO: 1885159
cuggguucccugggaugua

SEQ ID NO: 2320763 - RNA, 19 nt, Artificial Sequence
  Description of Artificial Sequence: Synthetic oligonucleotide
  Antisense strand to SEQ ID NO: 2320762
uacaucccagggaacccag

SEQ ID NO: 2320764 - RNA, 19 nt, Artificial Sequence
  Description of Artificial Sequence: Synthetic oligonucleotide
  Sense strand starting at position 182 of SEQ ID NO: 1885159
acaauaaguuuguuggcua

SEQ ID NO: 2320765 - RNA, 19 nt, Artificial Sequence
  Description of Artificial Sequence: Synthetic oligonucleotide
  Antisense strand to SEQ ID NO: 2320764
uagccaacaaacuuauugu

SEQ ID NO: 2320766 - RNA, 19 nt, Artificial Sequence
  Description of Artificial Sequence: Synthetic oligonucleotide
  Sense strand starting at position 187 of SEQ ID NO: 1885159
aaguuuguuggcuauuaaa

SEQ ID NO: 2320767 - RNA, 19 nt, Artificial Sequence
  Description of Artificial Sequence: Synthetic oligonucleotide
  Antisense strand to SEQ ID NO: 2320766
uuuaauagccaacaaacuu

SEQ ID NO: 2320768 - RNA, 19 nt, Artificial Sequence
  Description of Artificial Sequence: Synthetic oligonucleotide
  Sense strand starting at position 196 of SEQ ID NO: 1885159
ggcuauuaaagacguugau

SEQ ID NO: 2320769 - RNA, 19 nt, Artificial Sequence
  Description of Artificial Sequence: Synthetic oligonucleotide
  Antisense strand to SEQ ID NO: 2320768
aucaacgucuuuaauagcc

SEQ ID NO: 2320770 - RNA, 19 nt, Artificial Sequence
  Description of Artificial Sequence: Synthetic oligonucleotide
  Sense strand starting at position 220 of SEQ ID NO: 1885159
uacugauaucgucagagau

SEQ ID NO: 2320771 - RNA, 19 nt, Artificial Sequence
  Description of Artificial Sequence: Synthetic oligonucleotide
  Antisense strand to SEQ ID NO: 2320770
aucucugacgauaucagua

SEQ ID NO: 2320772 - RNA, 19 nt, Artificial Sequence
  Description of Artificial Sequence: Synthetic oligonucleotide
  Sense strand starting at position 239 of SEQ ID NO: 1885159
gggccucaugcucauuaaa

SEQ ID NO: 2320773 - RNA, 19 nt, Artificial Sequence
  Description of Artificial Sequence: Synthetic oligonucleotide
  Antisense strand to SEQ ID NO: 2320772
uuuaaugagcaugaggccc

SEQ ID NO: 2320774 - RNA, 19 nt, Artificial Sequence
  Description of Artificial Sequence: Synthetic oligonucleotide
  Sense strand starting at position 381 of SEQ ID NO: 1885159
ggguccauccuagaagugu

SEQ ID NO: 2320775 - RNA, 19 nt, Artificial Sequence
  Description of Artificial Sequence: Synthetic oligonucleotide
  Antisense strand to SEQ ID NO: 2320774
acacuucuaggauggaccc

SEQ ID NO: 2320776 - RNA, 19 nt, Artificial Sequence
  Description of Artificial Sequence: Synthetic oligonucleotide
  Sense strand starting at position 396 of SEQ ID NO: 1885159
gugugccaucuguauuuau

SEQ ID NO: 2320777 - RNA, 19 nt, Artificial Sequence
  Description of Artificial Sequence: Synthetic oligonucleotide
  Antisense strand to SEQ ID NO: 2320776
auaaauacagauggcacac

SEQ ID NO: 2320778 - RNA, 19 nt, Artificial Sequence
  Description of Artificial Sequence: Synthetic oligonucleotide
  Sense strand starting at position 403 of SEQ ID NO: 1885159
aucuguauuuaugaaugga

SEQ ID NO: 2320779 - RNA, 19 nt, Artificial Sequence
  Description of Artificial Sequence: Synthetic oligonucleotide
  Antisense strand to SEQ ID NO: 2320778
uccauucauaaauacagau

SEQ ID NO: 2320780 - RNA, 19 nt, Artificial Sequence
  Description of Artificial Sequence: Synthetic oligonucleotide
  Sense strand starting at position 515 of SEQ ID NO: 1885159
ggacgugguccgucagcua

SEQ ID NO: 2320781 - RNA, 19 nt, Artificial Sequence
  Description of Artificial Sequence: Synthetic oligonucleotide
  Antisense strand to SEQ ID NO: 2320780
uagcugacggaccacgucc

SEQ ID NO: 2320782 - RNA, 19 nt, Artificial Sequence
  Description of Artificial Sequence: Synthetic oligonucleotide
  Sense strand starting at position 1349 of SEQ ID NO: 1885159
guuguuagugugaguaaag

SEQ ID NO: 2320783 - RNA, 19 nt, Artificial Sequence
  Description of Artificial Sequence: Synthetic oligonucleotide
  Antisense strand to SEQ ID NO: 2320782
cuuuacucacacuaacaac

SEQ ID NO: 2320784 - RNA, 19 nt, Artificial Sequence
  Description of Artificial Sequence: Synthetic oligonucleotide
  Sense strand starting at position 1377 of SEQ ID NO: 1885159
uugcaagggucucuaaauu

SEQ ID NO: 2320785 - RNA, 19 nt, Artificial Sequence
  Description of Artificial Sequence: Synthetic oligonucleotide
  Antisense strand to SEQ ID NO: 2320784
aauuuagagacccuugcaa

SEQ ID NO: 2320786 - RNA, 19 nt, Artificial Sequence
  Description of Artificial Sequence: Synthetic oligonucleotide
  Sense strand starting at position 1624 of SEQ ID NO: 1885159
guuuaaagagcuuauuauc

SEQ ID NO: 2320787 - RNA, 19 nt, Artificial Sequence
  Description of Artificial Sequence: Synthetic oligonucleotide
  Antisense strand to SEQ ID NO: 2320786
gauaauaagcucuuuaaac

SEQ ID NO: 2320788 - RNA, 19 nt, Artificial Sequence
  Description of Artificial Sequence: Synthetic oligonucleotide
  Sense strand starting at position 1634 of SEQ ID NO: 1885159
cuuauuaucccagggcuga

SEQ ID NO: 2320789 - RNA, 19 nt, Artificial Sequence
  Description of Artificial Sequence: Synthetic oligonucleotide
  Antisense strand to SEQ ID NO: 2320788
ucagcccugggauaauaag

SEQ ID NO: 2320790 - RNA, 19 nt, Artificial Sequence
  Description of Artificial Sequence: Synthetic oligonucleotide
  Sense strand starting at position 1635 of SEQ ID NO: 1885159
uuauuaucccagggcugaa

SEQ ID NO: 2320791 - RNA, 19 nt, Artificial Sequence
  Description of Artificial Sequence: Synthetic oligonucleotide
  Antisense strand to SEQ ID NO: 2320790
uucagcccugggauaauaa

SEQ ID NO: 2320792 - RNA, 19 nt, Artificial Sequence
  Description of Artificial Sequence: Synthetic oligonucleotide
  Sense strand starting at position 1649 of SEQ ID NO: 1885159
cugaaaguccucgauacuu

SEQ ID NO: 2320793 - RNA, 19 nt, Artificial Sequence
  Description of Artificial Sequence: Synthetic oligonucleotide
  Antisense strand to SEQ ID NO: 2320792
aaguaucgaggacuuucag

SEQ ID NO: 2320794 - RNA, 19 nt, Artificial Sequence
  Description of Artificial Sequence: Synthetic oligonucleotide
  Sense strand starting at position 1651 of SEQ ID NO: 1885159
gaaaguccucgauacuuau

SEQ ID NO: 2320795 - RNA, 19 nt, Artificial Sequence
  Description of Artificial Sequence: Synthetic oligonucleotide
  Antisense strand to SEQ ID NO: 2320794
auaaguaucgaggacuuuc

SEQ ID NO: 2320796 - RNA, 19 nt, Artificial Sequence
  Description of Artificial Sequence: Synthetic oligonucleotide
  Sense strand starting at position 1854 of SEQ ID NO: 1885159
gccaaagucauggacaagu

SEQ ID NO: 2320797 - RNA, 19 nt, Artificial Sequence
  Description of Artificial Sequence: Synthetic oligonucleotide
  Antisense strand to SEQ ID NO: 2320796
acuuguccaugacuuuggc

SEQ ID NO: 2320798 - RNA, 19 nt, Artificial Sequence
  Description of Artificial Sequence: Synthetic oligonucleotide
  Sense strand starting at position 2102 of SEQ ID NO: 1885159
gagaguauguacccuuaaa

SEQ ID NO: 2320799 - RNA, 19 nt, Artificial Sequence
  Description of Artificial Sequence: Synthetic oligonucleotide
  Antisense strand to SEQ ID NO: 2320798
uuuaaggguacauacucuc

SEQ ID NO: 2320800 - RNA, 19 nt, Artificial Sequence
  Description of Artificial Sequence: Synthetic oligonucleotide
  Sense strand starting at position 2165 of SEQ ID NO: 1885159
uuagcacuuccaugacagu

SEQ ID NO: 2320801 - RNA, 19 nt, Artificial Sequence
  Description of Artificial Sequence: Synthetic oligonucleotide
  Antisense strand to SEQ ID NO: 2320800
acugucauggaagugcuaa

SEQ ID NO: 2320802 - RNA, 19 nt, Artificial Sequence
  Description of Artificial Sequence: Synthetic oligonucleotide
  Sense strand starting at position 2232 of SEQ ID NO: 1885159
agcacagugauguauuaag

SEQ ID NO: 2320803 - RNA, 19 nt, Artificial Sequence
  Description of Artificial Sequence: Synthetic oligonucleotide
  Antisense strand to SEQ ID NO: 2320802
cuuaauacaucacugugcu

SEQ ID NO: 2320804 - RNA, 19 nt, Artificial Sequence
  Description of Artificial Sequence: Synthetic oligonucleotide
  Sense strand starting at position 2488 of SEQ ID NO: 1885159
gaagauuguguugagcuga

SEQ ID NO: 2320805 - RNA, 19 nt, Artificial Sequence
  Description of Artificial Sequence: Synthetic oligonucleotide
  Antisense strand to SEQ ID NO: 2320804
ucagcucaacacaaucuuc

SEQ ID NO: 2320806 - RNA, 19 nt, Artificial Sequence
  Description of Artificial Sequence: Synthetic oligonucleotide
  Sense strand starting at position 2843 of SEQ ID NO: 1885159
uaaccaaguuuggugcaua

SEQ ID NO: 2320807 - RNA, 19 nt, Artificial Sequence
  Description of Artificial Sequence: Synthetic oligonucleotide
  Antisense strand to SEQ ID NO: 2320806
uaugcaccaaacuugguua

SEQ ID NO: 2320808 - RNA, 19 nt, Artificial Sequence
  Description of Artificial Sequence: Synthetic oligonucleotide
  Sense strand starting at position 2865 of SEQ ID NO: 1885159
uguugacucugucuuggaa

SEQ ID NO: 2320809 - RNA, 19 nt, Artificial Sequence
  Description of Artificial Sequence: Synthetic oligonucleotide
  Antisense strand to SEQ ID NO: 2320808
uuccaagacagagucaaca

SEQ ID NO: 2320810 - RNA, 19 nt, Artificial Sequence
  Description of Artificial Sequence: Synthetic oligonucleotide
  Sense strand starting at position 2906 of SEQ ID NO: 1885159
agcuaucagcuaugauacu

SEQ ID NO: 2320811 - RNA, 19 nt, Artificial Sequence
  Description of Artificial Sequence: Synthetic oligonucleotide
  Antisense strand to SEQ ID NO: 2320810
aguaucauagcugauagcu

SEQ ID NO: 2320812 - RNA, 19 nt, Artificial Sequence
  Description of Artificial Sequence: Synthetic oligonucleotide
  Sense strand starting at position 2979 of SEQ ID NO: 1885159
ccaaguuaauguuuacuga

SEQ ID NO: 2320813 - RNA, 19 nt, Artificial Sequence
  Description of Artificial Sequence: Synthetic oligonucleotide
  Antisense strand to SEQ ID NO: 2320812
ucaguaaacauuaacuugg

SEQ ID NO: 2320814 - RNA, 19 nt, Artificial Sequence
  Description of Artificial Sequence: Synthetic oligonucleotide
  Sense strand starting at position 2982 of SEQ ID NO: 1885159
aguuaauguuuacugaacu

SEQ ID NO: 2320815 - RNA, 19 nt, Artificial Sequence
  Description of Artificial Sequence: Synthetic oligonucleotide
  Antisense strand to SEQ ID NO: 2320814
aguucaguaaacauuaacu

SEQ ID NO: 2320816 - RNA, 19 nt, Artificial Sequence
  Description of Artificial Sequence: Synthetic oligonucleotide
  Sense strand starting at position 3086 of SEQ ID NO: 1885159
uguaacauauaugcagaua

SEQ ID NO: 2320817 - RNA, 19 nt, Artificial Sequence
  Description of Artificial Sequence: Synthetic oligonucleotide
  Antisense strand to SEQ ID NO: 2320816
uaucugcauauauguuaca

SEQ ID NO: 2320818 - RNA, 19 nt, Artificial Sequence
  Description of Artificial Sequence: Synthetic oligonucleotide
  Sense strand starting at position 3126 of SEQ ID NO: 1885159
cauagaugguuugucuuau

SEQ ID NO: 2320819 - RNA, 19 nt, Artificial Sequence
  Description of Artificial Sequence: Synthetic oligonucleotide
  Antisense strand to SEQ ID NO: 2320818
auaagacaaaccaucuaug

SEQ ID NO: 2320820 - RNA, 19 nt, Artificial Sequence
  Description of Artificial Sequence: Synthetic oligonucleotide
  Sense strand starting at position 3127 of SEQ ID NO: 1885159
auagaugguuugucuuauu

SEQ ID NO: 2320821 - RNA, 19 nt, Artificial Sequence
  Description of Artificial Sequence: Synthetic oligonucleotide
  Antisense strand to SEQ ID NO: 2320820
aauaagacaaaccaucuau

SEQ ID NO: 2320822 - RNA, 19 nt, Artificial Sequence
  Description of Artificial Sequence: Synthetic oligonucleotide
  Sense strand starting at position 3232 of SEQ ID NO: 1885159
ucaagucaagccugaaguu

SEQ ID NO: 2320823 - RNA, 19 nt, Artificial Sequence
  Description of Artificial Sequence: Synthetic oligonucleotide
  Antisense strand to SEQ ID NO: 2320822
aacuucaggcuugacuuga

SEQ ID NO: 2320824 - RNA, 19 nt, Artificial Sequence
  Description of Artificial Sequence: Synthetic oligonucleotide
  Sense strand starting at position 3233 of SEQ ID NO: 1885159
caagucaagccugaaguua

SEQ ID NO: 2320825 - RNA, 19 nt, Artificial Sequence
  Description of Artificial Sequence: Synthetic oligonucleotide
  Antisense strand to SEQ ID NO: 2320824
uaacuucaggcuugacuug

SEQ ID NO: 2320826 - RNA, 19 nt, Artificial Sequence
  Description of Artificial Sequence: Synthetic oligonucleotide
  Sense strand starting at position 3761 of SEQ ID NO: 1885159
ugcuaaguaugaucuagac

SEQ ID NO: 2320827 - RNA, 19 nt, Artificial Sequence
  Description of Artificial Sequence: Synthetic oligonucleotide
  Antisense strand to SEQ ID NO: 2320826
gucuagaucauacuuagca

SEQ ID NO: 2320828 - RNA, 19 nt, Artificial Sequence
  Description of Artificial Sequence: Synthetic oligonucleotide
  Sense strand starting at position 3777 of SEQ ID NO: 1885159
gacacuugagcucauuagu

SEQ ID NO: 2320829 - RNA, 19 nt, Artificial Sequence
  Description of Artificial Sequence: Synthetic oligonucleotide
  Antisense strand to SEQ ID NO: 2320828
acuaaugagcucaaguguc

SEQ ID NO: 2320830 - RNA, 19 nt, Artificial Sequence
  Description of Artificial Sequence: Synthetic oligonucleotide
  Sense strand starting at position 3784 of SEQ ID NO: 1885159
gagcucauuaguggguaaa

SEQ ID NO: 2320831 - RNA, 19 nt, Artificial Sequence
  Description of Artificial Sequence: Synthetic oligonucleotide
  Antisense strand to SEQ ID NO: 2320830
uuuacccacuaaugagcuc

SEQ ID NO: 2320832 - RNA, 19 nt, Artificial Sequence
  Description of Artificial Sequence: Synthetic oligonucleotide
  Sense strand starting at position 3876 of SEQ ID NO: 1885159
aaacauagcgaauagguua

SEQ ID NO: 2320833 - RNA, 19 nt, Artificial Sequence
  Description of Artificial Sequence: Synthetic oligonucleotide
  Antisense strand to SEQ ID NO: 2320832
uaaccuauucgcuauguuu

SEQ ID NO: 2320834 - RNA, 19 nt, Artificial Sequence
  Description of Artificial Sequence: Synthetic oligonucleotide
  Sense strand starting at position 3899 of SEQ ID NO: 1885159
uauguuagaaggugguuaa

SEQ ID NO: 2320835 - RNA, 19 nt, Artificial Sequence
  Description of Artificial Sequence: Synthetic oligonucleotide
  Antisense strand to SEQ ID NO: 2320834
uuaaccaccuucuaacaua

SEQ ID NO: 2320836 - RNA, 19 nt, Artificial Sequence
  Description of Artificial Sequence: Synthetic oligonucleotide
  Sense strand starting at position 3902 of SEQ ID NO: 1885159
guuagaaggugguuaaguu

SEQ ID NO: 2320837 - RNA, 19 nt, Artificial Sequence
  Description of Artificial Sequence: Synthetic oligonucleotide
  Antisense strand to SEQ ID NO: 2320836
aacuuaaccaccuucuaac

SEQ ID NO: 2320838 - RNA, 19 nt, Artificial Sequence
  Description of Artificial Sequence: Synthetic oligonucleotide
  Sense strand starting at position 3906 of SEQ ID NO: 1885159
gaaggugguuaaguucuau

SEQ ID NO: 2320839 - RNA, 19 nt, Artificial Sequence
  Description of Artificial Sequence: Synthetic oligonucleotide
  Antisense strand to SEQ ID NO: 2320838
auagaacuuaaccaccuuc

SEQ ID NO: 2320840 - RNA, 19 nt, Artificial Sequence
  Description of Artificial Sequence: Synthetic oligonucleotide
  Sense strand starting at position 3912 of SEQ ID NO: 1885159
gguuaaguucuaugguaaa

SEQ ID NO: 2320841 - RNA, 19 nt, Artificial Sequence
  Description of Artificial Sequence: Synthetic oligonucleotide
  Antisense strand to SEQ ID NO: 2320840
uuuaccauagaacuuaacc

SEQ ID NO: 2320842 - RNA, 19 nt, Artificial Sequence
  Description of Artificial Sequence: Synthetic oligonucleotide
  Sense strand starting at position 161 of SEQ ID NO: 1885160
cgagaauagcagcaucuuu

SEQ ID NO: 2320843 - RNA, 19 nt, Artificial Sequence
  Description of Artificial Sequence: Synthetic oligonucleotide
  Antisense strand to SEQ ID NO: 2320842
aaagaugcugcuauucucg

SEQ ID NO: 2320844 - RNA, 19 nt, Artificial Sequence
  Description of Artificial Sequence: Synthetic oligonucleotide
  Sense strand starting at position 336 of SEQ ID NO: 1885160
gaaggaauugagugagcug

SEQ ID NO: 2320845 - RNA, 19 nt, Artificial Sequence
  Description of Artificial Sequence: Synthetic oligonucleotide
  Antisense strand to SEQ ID NO: 2320844
cagcucacucaauuccuuc

SEQ ID NO: 2320846 - RNA, 19 nt, Artificial Sequence
  Description of Artificial Sequence: Synthetic oligonucleotide
  Sense strand starting at position 339 of SEQ ID NO: 1885160
ggaauugagugagcugauu

SEQ ID NO: 2320847 - RNA, 19 nt, Artificial Sequence
  Description of Artificial Sequence: Synthetic oligonucleotide
  Antisense strand to SEQ ID NO: 2320846
aaucagcucacucaauucc

SEQ ID NO: 2320848 - RNA, 19 nt, Artificial Sequence
  Description of Artificial Sequence: Synthetic oligonucleotide
  Sense strand starting at position 507 of SEQ ID NO: 1885160
cuaagaaguuguccaugaa

SEQ ID NO: 2320849 - RNA, 19 nt, Artificial Sequence
  Description of Artificial Sequence: Synthetic oligonucleotide
  Antisense strand to SEQ ID NO: 2320848
uucauggacaacuucuuag

SEQ ID NO: 2320850 - RNA, 19 nt, Artificial Sequence
  Description of Artificial Sequence: Synthetic oligonucleotide
  Sense strand starting at position 544 of SEQ ID NO: 1885160
ucagaacuuguuugaugag

SEQ ID NO: 2320851 - RNA, 19 nt, Artificial Sequence
  Description of Artificial Sequence: Synthetic oligonucleotide
  Antisense strand to SEQ ID NO: 2320850
cucaucaaacaaguucuga

SEQ ID NO: 2320852 - RNA, 19 nt, Artificial Sequence
  Description of Artificial Sequence: Synthetic oligonucleotide
  Sense strand starting at position 554 of SEQ ID NO: 1885160
uuugaugaguuuccuuuga

SEQ ID NO: 2320853 - RNA, 19 nt, Artificial Sequence
  Description of Artificial Sequence: Synthetic oligonucleotide
  Antisense strand to SEQ ID NO: 2320852
ucaaaggaaacucaucaaa

SEQ ID NO: 2320854 - RNA, 19 nt, Artificial Sequence
  Description of Artificial Sequence: Synthetic oligonucleotide
  Sense strand starting at position 556 of SEQ ID NO: 1885160
ugaugaguuuccuuugaga

SEQ ID NO: 2320855 - RNA, 19 nt, Artificial Sequence
  Description of Artificial Sequence: Synthetic oligonucleotide
  Antisense strand to SEQ ID NO: 2320854
ucucaaaggaaacucauca

SEQ ID NO: 2320856 - RNA, 19 nt, Artificial Sequence
  Description of Artificial Sequence: Synthetic oligonucleotide
  Sense strand starting at position 558 of SEQ ID NO: 1885160
augaguuuccuuugagaag

SEQ ID NO: 2320857 - RNA, 19 nt, Artificial Sequence
  Description of Artificial Sequence: Synthetic oligonucleotide
  Antisense strand to SEQ ID NO: 2320856
cuucucaaaggaaacucau

SEQ ID NO: 2320858 - RNA, 19 nt, Artificial Sequence
  Description of Artificial Sequence: Synthetic oligonucleotide
  Sense strand starting at position 579 of SEQ ID NO: 1885160
gggauaagagcugguaaac

SEQ ID NO: 2320859 - RNA, 19 nt, Artificial Sequence
  Description of Artificial Sequence: Synthetic oligonucleotide
  Antisense strand to SEQ ID NO: 2320858
guuuaccagcucuuauccc

SEQ ID NO: 2320860 - RNA, 19 nt, Artificial Sequence
  Description of Artificial Sequence: Synthetic oligonucleotide
  Sense strand starting at position 646 of SEQ ID NO: 1885160
aaagaaauuccugagcguc

SEQ ID NO: 2320861 - RNA, 19 nt, Artificial Sequence
  Description of Artificial Sequence: Synthetic oligonucleotide
  Antisense strand to SEQ ID NO: 2320860
gacgcucaggaauuucuuu

SEQ ID NO: 2320862 - RNA, 19 nt, Artificial Sequence
  Description of Artificial Sequence: Synthetic oligonucleotide
  Sense strand starting at position 689 of SEQ ID NO: 1885160
aggaaugagucuccacacu

SEQ ID NO: 2320863 - RNA, 19 nt, Artificial Sequence
  Description of Artificial Sequence: Synthetic oligonucleotide
  Antisense strand to SEQ ID NO: 2320862
aguguggagacucauuccu

SEQ ID NO: 2320864 - RNA, 19 nt, Artificial Sequence
  Description of Artificial Sequence: Synthetic oligonucleotide
  Sense strand starting at position 701 of SEQ ID NO: 1885160
ccacacugaguguagcaua

SEQ ID NO: 2320865 - RNA, 19 nt, Artificial Sequence
  Description of Artificial Sequence: Synthetic oligonucleotide
  Antisense strand to SEQ ID NO: 2320864
uaugcuacacucagugugg

SEQ ID NO: 2320866 - RNA, 19 nt, Artificial Sequence
  Description of Artificial Sequence: Synthetic oligonucleotide
  Sense strand starting at position 706 of SEQ ID NO: 1885160
cugaguguagcauagcaaa

SEQ ID NO: 2320867 - RNA, 19 nt, Artificial Sequence
  Description of Artificial Sequence: Synthetic oligonucleotide
  Antisense strand to SEQ ID NO: 2320866
uuugcuaugcuacacucag

SEQ ID NO: 2320868 - RNA, 19 nt, Artificial Sequence
  Description of Artificial Sequence: Synthetic oligonucleotide
  Sense strand starting at position 791 of SEQ ID NO: 1885160
agaaauguacugugaaguu

SEQ ID NO: 2320869 - RNA, 19 nt, Artificial Sequence
  Description of Artificial Sequence: Synthetic oligonucleotide
  Antisense strand to SEQ ID NO: 2320868
aacuucacaguacauuucu

SEQ ID NO: 2320870 - RNA, 19 nt, Artificial Sequence
  Description of Artificial Sequence: Synthetic oligonucleotide
  Sense strand starting at position 811 of SEQ ID NO: 1885160
gcuccuuuggcugaauaag

SEQ ID NO: 2320871 - RNA, 19 nt, Artificial Sequence
  Description of Artificial Sequence: Synthetic oligonucleotide
  Antisense strand to SEQ ID NO: 2320870
cuuauucagccaaaggagc

SEQ ID NO: 2320872 - RNA, 19 nt, Artificial Sequence
  Description of Artificial Sequence: Synthetic oligonucleotide
  Sense strand starting at position 858 of SEQ ID NO: 1885160
ccacuuaguccugaugaca

SEQ ID NO: 2320873 - RNA, 19 nt, Artificial Sequence
  Description of Artificial Sequence: Synthetic oligonucleotide
  Antisense strand to SEQ ID NO: 2320872
ugucaucaggacuaagugg

SEQ ID NO: 2320874 - RNA, 19 nt, Artificial Sequence
  Description of Artificial Sequence: Synthetic oligonucleotide
  Sense strand starting at position 869 of SEQ ID NO: 1885160
ugaugacagacuugauugu

SEQ ID NO: 2320875 - RNA, 19 nt, Artificial Sequence
  Description of Artificial Sequence: Synthetic oligonucleotide
  Antisense strand to SEQ ID NO: 2320874
acaaucaagucugucauca

SEQ ID NO: 2320876 - RNA, 19 nt, Artificial Sequence
  Description of Artificial Sequence: Synthetic oligonucleotide
  Sense strand starting at position 879 of SEQ ID NO: 1885160
cuugauugucuggagcaaa

SEQ ID NO: 2320877 - RNA, 19 nt, Artificial Sequence
  Description of Artificial Sequence: Synthetic oligonucleotide
  Antisense strand to SEQ ID NO: 2320876
uuugcuccagacaaucaag

SEQ ID NO: 2320878 - RNA, 19 nt, Artificial Sequence
  Description of Artificial Sequence: Synthetic oligonucleotide
  Sense strand starting at position 974 of SEQ ID NO: 1885160
ucuugucuucucgcuagca

SEQ ID NO: 2320879 - RNA, 19 nt, Artificial Sequence
  Description of Artificial Sequence: Synthetic oligonucleotide
  Antisense strand to SEQ ID NO: 2320878
ugcuagcgagaagacaaga

SEQ ID NO: 2320880 - RNA, 19 nt, Artificial Sequence
  Description of Artificial Sequence: Synthetic oligonucleotide
  Sense strand starting at position 1110 of SEQ ID NO: 1885160
ccuguuacaccaggaguua

SEQ ID NO: 2320881 - RNA, 19 nt, Artificial Sequence
  Description of Artificial Sequence: Synthetic oligonucleotide
  Antisense strand to SEQ ID NO: 2320880
uaacuccugguguaacagg

SEQ ID NO: 2320882 - RNA, 19 nt, Artificial Sequence
  Description of Artificial Sequence: Synthetic oligonucleotide
  Sense strand starting at position 1137 of SEQ ID NO: 1885160
cuucguuuaacugaggagu

SEQ ID NO: 2320883 - RNA, 19 nt, Artificial Sequence
  Description of Artificial Sequence: Synthetic oligonucleotide
  Antisense strand to SEQ ID NO: 2320882
acuccucaguuaaacgaag

SEQ ID NO: 2320884 - RNA, 19 nt, Artificial Sequence
  Description of Artificial Sequence: Synthetic oligonucleotide
  Sense strand starting at position 1187 of SEQ ID NO: 1885160
gguagagaguacuuuaucu

SEQ ID NO: 2320885 - RNA, 19 nt, Artificial Sequence
  Description of Artificial Sequence: Synthetic oligonucleotide
  Antisense strand to SEQ ID NO: 2320884
agauaaaguacucucuacc

SEQ ID NO: 2320886 - RNA, 19 nt, Artificial Sequence
  Description of Artificial Sequence: Synthetic oligonucleotide
  Sense strand starting at position 1431 of SEQ ID NO: 1885160
ucaaaccauguucgaaaga

SEQ ID NO: 2320887 - RNA, 19 nt, Artificial Sequence
  Description of Artificial Sequence: Synthetic oligonucleotide
  Antisense strand to SEQ ID NO: 2320886
ucuuucgaacaugguuuga

SEQ ID NO: 2320888 - RNA, 19 nt, Artificial Sequence
  Description of Artificial Sequence: Synthetic oligonucleotide
  Sense strand starting at position 1523 of SEQ ID NO: 1885160
ggcaccgucauguaagaaa

SEQ ID NO: 2320889 - RNA, 19 nt, Artificial Sequence
  Description of Artificial Sequence: Synthetic oligonucleotide
  Antisense strand to SEQ ID NO: 2320888
uuucuuacaugacggugcc

SEQ ID NO: 2320890 - RNA, 19 nt, Artificial Sequence
  Description of Artificial Sequence: Synthetic oligonucleotide
  Sense strand starting at position 1622 of SEQ ID NO: 1885160
acuuaauguacgucguagu

SEQ ID NO: 2320891 - RNA, 19 nt, Artificial Sequence
  Description of Artificial Sequence: Synthetic oligonucleotide
  Antisense strand to SEQ ID NO: 2320890
acuacgacguacauuaagu

SEQ ID NO: 2320892 - RNA, 19 nt, Artificial Sequence
  Description of Artificial Sequence: Synthetic oligonucleotide
  Sense strand starting at position 1733 of SEQ ID NO: 1885160
augacugcuuucuugaaag

SEQ ID NO: 2320893 - RNA, 19 nt, Artificial Sequence
  Description of Artificial Sequence: Synthetic oligonucleotide
  Antisense strand to SEQ ID NO: 2320892
cuuucaagaaagcagucau

SEQ ID NO: 2320894 - RNA, 19 nt, Artificial Sequence
  Description of Artificial Sequence: Synthetic oligonucleotide
  Sense strand starting at position 1735 of SEQ ID NO: 1885160
gacugcuuucuugaaagug

SEQ ID NO: 2320895 - RNA, 19 nt, Artificial Sequence
  Description of Artificial Sequence: Synthetic oligonucleotide
  Antisense strand to SEQ ID NO: 2320894
cacuuucaagaaagcaguc

SEQ ID NO: 2320896 - RNA, 19 nt, Artificial Sequence
  Description of Artificial Sequence: Synthetic oligonucleotide
  Sense strand starting at position 1826 of SEQ ID NO: 1885160
ggucguguugcaguccaca

SEQ ID NO: 2320897 - RNA, 19 nt, Artificial Sequence
  Description of Artificial Sequence: Synthetic oligonucleotide
  Antisense strand to SEQ ID NO: 2320896
uguggacugcaacacgacc

SEQ ID NO: 2320898 - RNA, 19 nt, Artificial Sequence
  Description of Artificial Sequence: Synthetic oligonucleotide
  Sense strand starting at position 1828 of SEQ ID NO: 1885160
ucguguugcaguccacaca

SEQ ID NO: 2320899 - RNA, 19 nt, Artificial Sequence
  Description of Artificial Sequence: Synthetic oligonucleotide
  Antisense strand to SEQ ID NO: 2320898
uguguggacugcaacacga

SEQ ID NO: 2320900 - RNA, 19 nt, Artificial Sequence
  Description of Artificial Sequence: Synthetic oligonucleotide
  Sense strand starting at position 1870 of SEQ ID NO: 1885160
uggaauggucuugagcaag

SEQ ID NO: 2320901 - RNA, 19 nt, Artificial Sequence
  Description of Artificial Sequence: Synthetic oligonucleotide
  Antisense strand to SEQ ID NO: 2320900
cuugcucaagaccauucca

SEQ ID NO: 2320902 - RNA, 19 nt, Artificial Sequence
  Description of Artificial Sequence: Synthetic oligonucleotide
  Sense strand starting at position 1934 of SEQ ID NO: 1885160
uuuagucuagcugagaaau

SEQ ID NO: 2320903 - RNA, 19 nt, Artificial Sequence
  Description of Artificial Sequence: Synthetic oligonucleotide
  Antisense strand to SEQ ID NO: 2320902
auuucucagcuagacuaaa

SEQ ID NO: 2320904 - RNA, 19 nt, Artificial Sequence
  Description of Artificial Sequence: Synthetic oligonucleotide
  Sense strand starting at position 2021 of SEQ ID NO: 1885160
uguuaauaacaagaugcua

SEQ ID NO: 2320905 - RNA, 19 nt, Artificial Sequence
  Description of Artificial Sequence: Synthetic oligonucleotide
  Antisense strand to SEQ ID NO: 2320904
uagcaucuuguuauuaaca

SEQ ID NO: 2320906 - RNA, 19 nt, Artificial Sequence
  Description of Artificial Sequence: Synthetic oligonucleotide
  Sense strand starting at position 2719 of SEQ ID NO: 1885160
gagccuuauguggaguuaa

SEQ ID NO: 2320907 - RNA, 19 nt, Artificial Sequence
  Description of Artificial Sequence: Synthetic oligonucleotide
  Antisense strand to SEQ ID NO: 2320906
uuaacuccacauaaggcuc

SEQ ID NO: 2320908 - RNA, 19 nt, Artificial Sequence
  Description of Artificial Sequence: Synthetic oligonucleotide
  Sense strand starting at position 2889 of SEQ ID NO: 1885160
ucaauugaguuguugaaga

SEQ ID NO: 2320909 - RNA, 19 nt, Artificial Sequence
  Description of Artificial Sequence: Synthetic oligonucleotide
  Antisense strand to SEQ ID NO: 2320908
ucuucaacaacucaauuga

SEQ ID NO: 2320910 - RNA, 19 nt, Artificial Sequence
  Description of Artificial Sequence: Synthetic oligonucleotide
  Sense strand starting at position 2955 of SEQ ID NO: 1885160
uguaucuauagugaacgaa

SEQ ID NO: 2320911 - RNA, 19 nt, Artificial Sequence
  Description of Artificial Sequence: Synthetic oligonucleotide
  Antisense strand to SEQ ID NO: 2320910
uucguucacuauagauaca

SEQ ID NO: 2320912 - RNA, 19 nt, Artificial Sequence
  Description of Artificial Sequence: Synthetic oligonucleotide
  Sense strand starting at position 3092 of SEQ ID NO: 1885160
gacaguuggcuuuagggaa

SEQ ID NO: 2320913 - RNA, 19 nt, Artificial Sequence
  Description of Artificial Sequence: Synthetic oligonucleotide
  Antisense strand to SEQ ID NO: 2320912
uucccuaaagccaacuguc

SEQ ID NO: 2320914 - RNA, 19 nt, Artificial Sequence
  Description of Artificial Sequence: Synthetic oligonucleotide
  Sense strand starting at position 3327 of SEQ ID NO: 1885160
aggaacacuucugcuguaa

SEQ ID NO: 2320915 - RNA, 19 nt, Artificial Sequence
  Description of Artificial Sequence: Synthetic oligonucleotide
  Antisense strand to SEQ ID NO: 2320914
uuacagcagaaguguuccu

SEQ ID NO: 2320916 - RNA, 19 nt, Artificial Sequence
  Description of Artificial Sequence: Synthetic oligonucleotide
  Sense strand starting at position 3338 of SEQ ID NO: 1885160
ugcuguaaguuauuuacau

SEQ ID NO: 2320917 - RNA, 19 nt, Artificial Sequence
  Description of Artificial Sequence: Synthetic oligonucleotide
  Antisense strand to SEQ ID NO: 2320916
auguaaauaacuuacagca

SEQ ID NO: 2320918 - RNA, 19 nt, Artificial Sequence
  Description of Artificial Sequence: Synthetic oligonucleotide
  Sense strand starting at position 3339 of SEQ ID NO: 1885160
gcuguaaguuauuuacaug

SEQ ID NO: 2320919 - RNA, 19 nt, Artificial Sequence
  Description of Artificial Sequence: Synthetic oligonucleotide
  Antisense strand to SEQ ID NO: 2320918
cauguaaauaacuuacagc

SEQ ID NO: 2320920 - RNA, 19 nt, Artificial Sequence
  Description of Artificial Sequence: Synthetic oligonucleotide
  Sense strand starting at position 3514 of SEQ ID NO: 1885160
ggcaguugaaacugugaau

SEQ ID NO: 2320921 - RNA, 19 nt, Artificial Sequence
  Description of Artificial Sequence: Synthetic oligonucleotide
  Antisense strand to SEQ ID NO: 2320920
auucacaguuucaacugcc

SEQ ID NO: 2320922 - RNA, 19 nt, Artificial Sequence
  Description of Artificial Sequence: Synthetic oligonucleotide
  Sense strand starting at position 124 of SEQ ID NO: 1885161
cuccuugauuaagugaauu

SEQ ID NO: 2320923 - RNA, 19 nt, Artificial Sequence
  Description of Artificial Sequence: Synthetic oligonucleotide
  Antisense strand to SEQ ID NO: 2320922
aauucacuuaaucaaggag

SEQ ID NO: 2320924 - RNA, 19 nt, Artificial Sequence
  Description of Artificial Sequence: Synthetic oligonucleotide
  Sense strand starting at position 386 of SEQ ID NO: 1885161
gaagcaguccaggauggua

SEQ ID NO: 2320925 - RNA, 19 nt, Artificial Sequence
  Description of Artificial Sequence: Synthetic oligonucleotide
  Antisense strand to SEQ ID NO: 2320924
uaccauccuggacugcuuc

SEQ ID NO: 2320926 - RNA, 19 nt, Artificial Sequence
  Description of Artificial Sequence: Synthetic oligonucleotide
  Sense strand starting at position 488 of SEQ ID NO: 1885161
cguagauacuaucuggaag

SEQ ID NO: 2320927 - RNA, 19 nt, Artificial Sequence
  Description of Artificial Sequence: Synthetic oligonucleotide
  Antisense strand to SEQ ID NO: 2320926
cuuccagauaguaucuacg

SEQ ID NO: 2320928 - RNA, 19 nt, Artificial Sequence
  Description of Artificial Sequence: Synthetic oligonucleotide
  Sense strand starting at position 605 of SEQ ID NO: 1885161
gugaaauggcuaugaagua

SEQ ID NO: 2320929 - RNA, 19 nt, Artificial Sequence
  Description of Artificial Sequence: Synthetic oligonucleotide
  Antisense strand to SEQ ID NO: 2320928
uacuucauagccauuucac

SEQ ID NO: 2320930 - RNA, 19 nt, Artificial Sequence
  Description of Artificial Sequence: Synthetic oligonucleotide
  Sense strand starting at position 643 of SEQ ID NO: 1885161
uuacuacuuguugggaguu

SEQ ID NO: 2320931 - RNA, 19 nt, Artificial Sequence
  Description of Artificial Sequence: Synthetic oligonucleotide
  Antisense strand to SEQ ID NO: 2320930
aacucccaacaaguaguaa

SEQ ID NO: 2320932 - RNA, 19 nt, Artificial Sequence
  Description of Artificial Sequence: Synthetic oligonucleotide
  Sense strand starting at position 841 of SEQ ID NO: 1885161
guuuguuuagccguaguuu

SEQ ID NO: 2320933 - RNA, 19 nt, Artificial Sequence
  Description of Artificial Sequence: Synthetic oligonucleotide
  Antisense strand to SEQ ID NO: 2320932
aaacuacggcuaaacaaac

SEQ ID NO: 2320934 - RNA, 19 nt, Artificial Sequence
  Description of Artificial Sequence: Synthetic oligonucleotide
  Sense strand starting at position 961 of SEQ ID NO: 1885161
ccaacuauuugguaagacu

SEQ ID NO: 2320935 - RNA, 19 nt, Artificial Sequence
  Description of Artificial Sequence: Synthetic oligonucleotide
  Antisense strand to SEQ ID NO: 2320934
agucuuaccaaauaguugg

SEQ ID NO: 2320936 - RNA, 19 nt, Artificial Sequence
  Description of Artificial Sequence: Synthetic oligonucleotide
  Sense strand starting at position 968 of SEQ ID NO: 1885161
uuugguaagacucggugau

SEQ ID NO: 2320937 - RNA, 19 nt, Artificial Sequence
  Description of Artificial Sequence: Synthetic oligonucleotide
  Antisense strand to SEQ ID NO: 2320936
aucaccgagucuuaccaaa

SEQ ID NO: 2320938 - RNA, 19 nt, Artificial Sequence
  Description of Artificial Sequence: Synthetic oligonucleotide
  Sense strand starting at position 969 of SEQ ID NO: 1885161
uugguaagacucggugaua

SEQ ID NO: 2320939 - RNA, 19 nt, Artificial Sequence
  Description of Artificial Sequence: Synthetic oligonucleotide
  Antisense strand to SEQ ID NO: 2320938
uaucaccgagucuuaccaa

SEQ ID NO: 2320940 - RNA, 19 nt, Artificial Sequence
  Description of Artificial Sequence: Synthetic oligonucleotide
  Sense strand starting at position 970 of SEQ ID NO: 1885161
ugguaagacucggugauag

SEQ ID NO: 2320941 - RNA, 19 nt, Artificial Sequence
  Description of Artificial Sequence: Synthetic oligonucleotide
  Antisense strand to SEQ ID NO: 2320940
cuaucaccgagucuuacca

SEQ ID NO: 2320942 - RNA, 19 nt, Artificial Sequence
  Description of Artificial Sequence: Synthetic oligonucleotide
  Sense strand starting at position 972 of SEQ ID NO: 1885161
guaagacucggugauagaa

SEQ ID NO: 2320943 - RNA, 19 nt, Artificial Sequence
  Description of Artificial Sequence: Synthetic oligonucleotide
  Antisense strand to SEQ ID NO: 2320942
uucuaucaccgagucuuac

SEQ ID NO: 2320944 - RNA, 19 nt, Artificial Sequence
  Description of Artificial Sequence: Synthetic oligonucleotide
  Sense strand starting at position 1003 of SEQ ID NO: 1885161
uacgaauggccuugguaug

SEQ ID NO: 2320945 - RNA, 19 nt, Artificial Sequence
  Description of Artificial Sequence: Synthetic oligonucleotide
  Antisense strand to SEQ ID NO: 2320944
cauaccaaggccauucgua

SEQ ID NO: 2320946 - RNA, 19 nt, Artificial Sequence
  Description of Artificial Sequence: Synthetic oligonucleotide
  Sense strand starting at position 1004 of SEQ ID NO: 1885161
acgaauggccuugguauga

SEQ ID NO: 2320947 - RNA, 19 nt, Artificial Sequence
  Description of Artificial Sequence: Synthetic oligonucleotide
  Antisense strand to SEQ ID NO: 2320946
ucauaccaaggccauucgu

SEQ ID NO: 2320948 - RNA, 19 nt, Artificial Sequence
  Description of Artificial Sequence: Synthetic oligonucleotide
  Sense strand starting at position 1223 of SEQ ID NO: 1885161
ccaugacugucuuuccuga

SEQ ID NO: 2320949 - RNA, 19 nt, Artificial Sequence
  Description of Artificial Sequence: Synthetic oligonucleotide
  Antisense strand to SEQ ID NO: 2320948
ucaggaaagacagucaugg

SEQ ID NO: 2320950 - RNA, 19 nt, Artificial Sequence
  Description of Artificial Sequence: Synthetic oligonucleotide
  Sense strand starting at position 1334 of SEQ ID NO: 1885161
ccgagucuccacuauacca

SEQ ID NO: 2320951 - RNA, 19 nt, Artificial Sequence
  Description of Artificial Sequence: Synthetic oligonucleotide
  Antisense strand to SEQ ID NO: 2320950
ugguauaguggagacucgg

SEQ ID NO: 2320952 - RNA, 19 nt, Artificial Sequence
  Description of Artificial Sequence: Synthetic oligonucleotide
  Sense strand starting at position 1382 of SEQ ID NO: 1885161
aggagagggugcaaugauu

SEQ ID NO: 2320953 - RNA, 19 nt, Artificial Sequence
  Description of Artificial Sequence: Synthetic oligonucleotide
  Antisense strand to SEQ ID NO: 2320952
aaucauugcacccucuccu

SEQ ID NO: 2320954 - RNA, 19 nt, Artificial Sequence
  Description of Artificial Sequence: Synthetic oligonucleotide
  Sense strand starting at position 1580 of SEQ ID NO: 1885161
gggcgagaguugucaagga

SEQ ID NO: 2320955 - RNA, 19 nt, Artificial Sequence
  Description of Artificial Sequence: Synthetic oligonucleotide
  Antisense strand to SEQ ID NO: 2320954
uccuugacaacucucgccc

SEQ ID NO: 2320956 - RNA, 19 nt, Artificial Sequence
  Description of Artificial Sequence: Synthetic oligonucleotide
  Sense strand starting at position 1584 of SEQ ID NO: 1885161
gagaguugucaaggaggug

SEQ ID NO: 2320957 - RNA, 19 nt, Artificial Sequence
  Description of Artificial Sequence: Synthetic oligonucleotide
  Antisense strand to SEQ ID NO: 2320956
caccuccuugacaacucuc

SEQ ID NO: 2320958 - RNA, 19 nt, Artificial Sequence
  Description of Artificial Sequence: Synthetic oligonucleotide
  Sense strand starting at position 1791 of SEQ ID NO: 1885161
ccggccuccgccuuuauua

SEQ ID NO: 2320959 - RNA, 19 nt, Artificial Sequence
  Description of Artificial Sequence: Synthetic oligonucleotide
  Antisense strand to SEQ ID NO: 2320958
uaauaaaggcggaggccgg

SEQ ID NO: 2320960 - RNA, 19 nt, Artificial Sequence
  Description of Artificial Sequence: Synthetic oligonucleotide
  Sense strand starting at position 1979 of SEQ ID NO: 1885161
gaucaaugcgaccauaguu

SEQ ID NO: 2320961 - RNA, 19 nt, Artificial Sequence
  Description of Artificial Sequence: Synthetic oligonucleotide
  Antisense strand to SEQ ID NO: 2320960
aacuauggucgcauugauc

SEQ ID NO: 2320962 - RNA, 19 nt, Artificial Sequence
  Description of Artificial Sequence: Synthetic oligonucleotide
  Sense strand starting at position 2058 of SEQ ID NO: 1885161
gcgcuucagcaguuuguua

SEQ ID NO: 2320963 - RNA, 19 nt, Artificial Sequence
  Description of Artificial Sequence: Synthetic oligonucleotide
  Antisense strand to SEQ ID NO: 2320962
uaacaaacugcugaagcgc

SEQ ID NO: 2320964 - RNA, 19 nt, Artificial Sequence
  Description of Artificial Sequence: Synthetic oligonucleotide
  Sense strand starting at position 2458 of SEQ ID NO: 1885161
uggaaaccauccuagauuu

SEQ ID NO: 2320965 - RNA, 19 nt, Artificial Sequence
  Description of Artificial Sequence: Synthetic oligonucleotide
  Antisense strand to SEQ ID NO: 2320964
aaaucuaggaugguuucca

SEQ ID NO: 2320966 - RNA, 19 nt, Artificial Sequence
  Description of Artificial Sequence: Synthetic oligonucleotide
  Sense strand starting at position 2537 of SEQ ID NO: 1885161
uuggcauuccagugauuau

SEQ ID NO: 2320967 - RNA, 19 nt, Artificial Sequence
  Description of Artificial Sequence: Synthetic oligonucleotide
  Antisense strand to SEQ ID NO: 2320966
auaaucacuggaaugccaa

SEQ ID NO: 2320968 - RNA, 19 nt, Artificial Sequence
  Description of Artificial Sequence: Synthetic oligonucleotide
  Sense strand starting at position 2832 of SEQ ID NO: 1885161
auaagagaaucgcuugaag

SEQ ID NO: 2320969 - RNA, 19 nt, Artificial Sequence
  Description of Artificial Sequence: Synthetic oligonucleotide
  Antisense strand to SEQ ID NO: 2320968
cuucaagcgauucucuuau

SEQ ID NO: 2320970 - RNA, 19 nt, Artificial Sequence
  Description of Artificial Sequence: Synthetic oligonucleotide
  Sense strand starting at position 2946 of SEQ ID NO: 1885161
gguugcaaauuaucuguga

SEQ ID NO: 2320971 - RNA, 19 nt, Artificial Sequence
  Description of Artificial Sequence: Synthetic oligonucleotide
  Antisense strand to SEQ ID NO: 2320970
ucacagauaauuugcaacc

SEQ ID NO: 2320972 - RNA, 19 nt, Artificial Sequence
  Description of Artificial Sequence: Synthetic oligonucleotide
  Sense strand starting at position 2949 of SEQ ID NO: 1885161
ugcaaauuaucugugacaa

SEQ ID NO: 2320973 - RNA, 19 nt, Artificial Sequence
  Description of Artificial Sequence: Synthetic oligonucleotide
  Antisense strand to SEQ ID NO: 2320972
uugucacagauaauuugca

SEQ ID NO: 2320974 - RNA, 19 nt, Artificial Sequence
  Description of Artificial Sequence: Synthetic oligonucleotide
  Sense strand starting at position 2950 of SEQ ID NO: 1885161
gcaaauuaucugugacaaa

SEQ ID NO: 2320975 - RNA, 19 nt, Artificial Sequence
  Description of Artificial Sequence: Synthetic oligonucleotide
  Antisense strand to SEQ ID NO: 2320974
uuugucacagauaauuugc

SEQ ID NO: 2320976 - RNA, 19 nt, Artificial Sequence
  Description of Artificial Sequence: Synthetic oligonucleotide
  Sense strand starting at position 3111 of SEQ ID NO: 1885161
cacagagacugauuguuaa

SEQ ID NO: 2320977 - RNA, 19 nt, Artificial Sequence
  Description of Artificial Sequence: Synthetic oligonucleotide
  Antisense strand to SEQ ID NO: 2320976
uuaacaaucagucucugug

SEQ ID NO: 2320978 - RNA, 19 nt, Artificial Sequence
  Description of Artificial Sequence: Synthetic oligonucleotide
  Sense strand starting at position 3149 of SEQ ID NO: 1885161
agucuuggauguccacuaa

SEQ ID NO: 2320979 - RNA, 19 nt, Artificial Sequence
  Description of Artificial Sequence: Synthetic oligonucleotide
  Antisense strand to SEQ ID NO: 2320978
uuaguggacauccaagacu

SEQ ID NO: 2320980 - RNA, 19 nt, Artificial Sequence
  Description of Artificial Sequence: Synthetic oligonucleotide
  Sense strand starting at position 3179 of SEQ ID NO: 1885161
uguaguccucugugcauuu

SEQ ID NO: 2320981 - RNA, 19 nt, Artificial Sequence
  Description of Artificial Sequence: Synthetic oligonucleotide
  Antisense strand to SEQ ID NO: 2320980
aaaugcacagaggacuaca

SEQ ID NO: 2320982 - RNA, 19 nt, Artificial Sequence
  Description of Artificial Sequence: Synthetic oligonucleotide
  Sense strand starting at position 3197 of SEQ ID NO: 1885161
ucauaagggcuuuggugau

SEQ ID NO: 2320983 - RNA, 19 nt, Artificial Sequence
  Description of Artificial Sequence: Synthetic oligonucleotide
  Antisense strand to SEQ ID NO: 2320982
aucaccaaagcccuuauga

SEQ ID NO: 2320984 - RNA, 19 nt, Artificial Sequence
  Description of Artificial Sequence: Synthetic oligonucleotide
  Sense strand starting at position 3226 of SEQ ID NO: 1885161
cuaagaguguuccucucca

SEQ ID NO: 2320985 - RNA, 19 nt, Artificial Sequence
  Description of Artificial Sequence: Synthetic oligonucleotide
  Antisense strand to SEQ ID NO: 2320984
uggagaggaacacucuuag

SEQ ID NO: 2320986 - RNA, 19 nt, Artificial Sequence
  Description of Artificial Sequence: Synthetic oligonucleotide
  Sense strand starting at position 3295 of SEQ ID NO: 1885161
ugcucaugagcagguauga

SEQ ID NO: 2320987 - RNA, 19 nt, Artificial Sequence
  Description of Artificial Sequence: Synthetic oligonucleotide
  Antisense strand to SEQ ID NO: 2320986
ucauaccugcucaugagca

SEQ ID NO: 2320988 - RNA, 19 nt, Artificial Sequence
  Description of Artificial Sequence: Synthetic oligonucleotide
  Sense strand starting at position 3311 of SEQ ID NO: 1885161
ugacaaauauaguuugacu

SEQ ID NO: 2320989 - RNA, 19 nt, Artificial Sequence
  Description of Artificial Sequence: Synthetic oligonucleotide
  Antisense strand to SEQ ID NO: 2320988
agucaaacuauauuuguca

SEQ ID NO: 2320990 - RNA, 19 nt, Artificial Sequence
  Description of Artificial Sequence: Synthetic oligonucleotide
  Sense strand starting at position 3324 of SEQ ID NO: 1885161
uugacugcugucugacuaa

SEQ ID NO: 2320991 - RNA, 19 nt, Artificial Sequence
  Description of Artificial Sequence: Synthetic oligonucleotide
  Antisense strand to SEQ ID NO: 2320990
uuagucagacagcagucaa

SEQ ID NO: 2320992 - RNA, 19 nt, Artificial Sequence
  Description of Artificial Sequence: Synthetic oligonucleotide
  Sense strand starting at position 3423 of SEQ ID NO: 1885161
gccuccuaagaucaaugau

SEQ ID NO: 2320993 - RNA, 19 nt, Artificial Sequence
  Description of Artificial Sequence: Synthetic oligonucleotide
  Antisense strand to SEQ ID NO: 2320992
aucauugaucuuaggaggc

SEQ ID NO: 2320994 - RNA, 19 nt, Artificial Sequence
  Description of Artificial Sequence: Synthetic oligonucleotide
  Sense strand starting at position 3516 of SEQ ID NO: 1885161
ugucacaagucuucuuaag

SEQ ID NO: 2320995 - RNA, 19 nt, Artificial Sequence
  Description of Artificial Sequence: Synthetic oligonucleotide
  Antisense strand to SEQ ID NO: 2320994
cuuaagaagacuugugaca

SEQ ID NO: 2320996 - RNA, 19 nt, Artificial Sequence
  Description of Artificial Sequence: Synthetic oligonucleotide
  Sense strand starting at position 3518 of SEQ ID NO: 1885161
ucacaagucuucuuaagga

SEQ ID NO: 2320997 - RNA, 19 nt, Artificial Sequence
  Description of Artificial Sequence: Synthetic oligonucleotide
  Antisense strand to SEQ ID NO: 2320996
uccuuaagaagacuuguga

SEQ ID NO: 2320998 - RNA, 19 nt, Artificial Sequence
  Description of Artificial Sequence: Synthetic oligonucleotide
  Sense strand starting at position 3538 of SEQ ID NO: 1885161
acaauugcacuuggaaaca

SEQ ID NO: 2320999 - RNA, 19 nt, Artificial Sequence
  Description of Artificial Sequence: Synthetic oligonucleotide
  Antisense strand to SEQ ID NO: 2320998
uguuuccaagugcaauugu

SEQ ID NO: 2321000 - RNA, 19 nt, Artificial Sequence
  Description of Artificial Sequence: Synthetic oligonucleotide
  Sense strand starting at position 3567 of SEQ ID NO: 1885161
aucauauguguuuauccca

SEQ ID NO: 2321001 - RNA, 19 nt, Artificial Sequence
  Description of Artificial Sequence: Synthetic oligonucleotide
  Antisense strand to SEQ ID NO: 2321000
ugggauaaacacauaugau

SEQ ID NO: 2321002 - RNA, 19 nt, Artificial Sequence
  Description of Artificial Sequence: Synthetic oligonucleotide
  Sense strand starting at position 1 of SEQ ID NO: 1885162
ggaaaccggaauugguaua

SEQ ID NO: 2321003 - RNA, 19 nt, Artificial Sequence
  Description of Artificial Sequence: Synthetic oligonucleotide
  Antisense strand to SEQ ID NO: 2321002
uauaccaauuccgguuucc

SEQ ID NO: 2321004 - RNA, 19 nt, Artificial Sequence
  Description of Artificial Sequence: Synthetic oligonucleotide
  Sense strand starting at position 6 of SEQ ID NO: 1885162
ccggaauugguauaaccuu

SEQ ID NO: 2321005 - RNA, 19 nt, Artificial Sequence
  Description of Artificial Sequence: Synthetic oligonucleotide
  Antisense strand to SEQ ID NO: 2321004
aagguuauaccaauuccgg

SEQ ID NO: 2321006 - RNA, 19 nt, Artificial Sequence
  Description of Artificial Sequence: Synthetic oligonucleotide
  Sense strand starting at position 116 of SEQ ID NO: 1885162
aggcuuauaucacuguuga

SEQ ID NO: 2321007 - RNA, 19 nt, Artificial Sequence
  Description of Artificial Sequence: Synthetic oligonucleotide
  Antisense strand to SEQ ID NO: 2321006
ucaacagugauauaagccu

SEQ ID NO: 2321008 - RNA, 19 nt, Artificial Sequence
  Description of Artificial Sequence: Synthetic oligonucleotide
  Sense strand starting at position 117 of SEQ ID NO: 1885162
ggcuuauaucacuguugau

SEQ ID NO: 2321009 - RNA, 19 nt, Artificial Sequence
  Description of Artificial Sequence: Synthetic oligonucleotide
  Antisense strand to SEQ ID NO: 2321008
aucaacagugauauaagcc

SEQ ID NO: 2321010 - RNA, 19 nt, Artificial Sequence
  Description of Artificial Sequence: Synthetic oligonucleotide
  Sense strand starting at position 129 of SEQ ID NO: 1885162
uguugauuacaaugguauu

SEQ ID NO: 2321011 - RNA, 19 nt, Artificial Sequence
  Description of Artificial Sequence: Synthetic oligonucleotide
  Antisense strand to SEQ ID NO: 2321010
aauaccauuguaaucaaca

SEQ ID NO: 2321012 - RNA, 19 nt, Artificial Sequence
  Description of Artificial Sequence: Synthetic oligonucleotide
  Sense strand starting at position 232 of SEQ ID NO: 1885162
ucacgauaaagucaaguga

SEQ ID NO: 2321013 - RNA, 19 nt, Artificial Sequence
  Description of Artificial Sequence: Synthetic oligonucleotide
  Antisense strand to SEQ ID NO: 2321012
ucacuugacuuuaucguga

SEQ ID NO: 2321014 - RNA, 19 nt, Artificial Sequence
  Description of Artificial Sequence: Synthetic oligonucleotide
  Sense strand starting at position 397 of SEQ ID NO: 1885162
uguuaauaguuaccaucuu

SEQ ID NO: 2321015 - RNA, 19 nt, Artificial Sequence
  Description of Artificial Sequence: Synthetic oligonucleotide
  Antisense strand to SEQ ID NO: 2321014
aagaugguaacuauuaaca

SEQ ID NO: 2321016 - RNA, 19 nt, Artificial Sequence
  Description of Artificial Sequence: Synthetic oligonucleotide
  Sense strand starting at position 470 of SEQ ID NO: 1885162
auguuccuugagcauauau

SEQ ID NO: 2321017 - RNA, 19 nt, Artificial Sequence
  Description of Artificial Sequence: Synthetic oligonucleotide
  Antisense strand to SEQ ID NO: 2321016
auauaugcucaaggaacau

SEQ ID NO: 2321018 - RNA, 19 nt, Artificial Sequence
  Description of Artificial Sequence: Synthetic oligonucleotide
  Sense strand starting at position 472 of SEQ ID NO: 1885162
guuccuugagcauauauua

SEQ ID NO: 2321019 - RNA, 19 nt, Artificial Sequence
  Description of Artificial Sequence: Synthetic oligonucleotide
  Antisense strand to SEQ ID NO: 2321018
uaauauaugcucaaggaac

SEQ ID NO: 2321020 - RNA, 19 nt, Artificial Sequence
  Description of Artificial Sequence: Synthetic oligonucleotide
  Sense strand starting at position 593 of SEQ ID NO: 1885162
cuauaaacauugccucgau

SEQ ID NO: 2321021 - RNA, 19 nt, Artificial Sequence
  Description of Artificial Sequence: Synthetic oligonucleotide
  Antisense strand to SEQ ID NO: 2321020
aucgaggcaauguuuauag

SEQ ID NO: 2321022 - RNA, 19 nt, Artificial Sequence
  Description of Artificial Sequence: Synthetic oligonucleotide
  Sense strand starting at position 637 of SEQ ID NO: 1885162
ccauuauuccauuacgucu

SEQ ID NO: 2321023 - RNA, 19 nt, Artificial Sequence
  Description of Artificial Sequence: Synthetic oligonucleotide
  Antisense strand to SEQ ID NO: 2321022
agacguaauggaauaaugg

SEQ ID NO: 2321024 - RNA, 19 nt, Artificial Sequence
  Description of Artificial Sequence: Synthetic oligonucleotide
  Sense strand starting at position 644 of SEQ ID NO: 1885162
uccauuacgucucucauuu

SEQ ID NO: 2321025 - RNA, 19 nt, Artificial Sequence
  Description of Artificial Sequence: Synthetic oligonucleotide
  Antisense strand to SEQ ID NO: 2321024
aaaugagagacguaaugga

SEQ ID NO: 2321026 - RNA, 19 nt, Artificial Sequence
  Description of Artificial Sequence: Synthetic oligonucleotide
  Sense strand starting at position 830 of SEQ ID NO: 1885162
uucccaagcuuggcauaau

SEQ ID NO: 2321027 - RNA, 19 nt, Artificial Sequence
  Description of Artificial Sequence: Synthetic oligonucleotide
  Antisense strand to SEQ ID NO: 2321026
auuaugccaagcuugggaa

SEQ ID NO: 2321028 - RNA, 19 nt, Artificial Sequence
  Description of Artificial Sequence: Synthetic oligonucleotide
  Sense strand starting at position 1098 of SEQ ID NO: 1885162
gaaaguaaagcguauacau

SEQ ID NO: 2321029 - RNA, 19 nt, Artificial Sequence
  Description of Artificial Sequence: Synthetic oligonucleotide
  Antisense strand to SEQ ID NO: 2321028
auguauacgcuuuacuuuc

SEQ ID NO: 2321030 - RNA, 19 nt, Artificial Sequence
  Description of Artificial Sequence: Synthetic oligonucleotide
  Sense strand starting at position 1147 of SEQ ID NO: 1885162
uugaccugugucugaugga

SEQ ID NO: 2321031 - RNA, 19 nt, Artificial Sequence
  Description of Artificial Sequence: Synthetic oligonucleotide
  Antisense strand to SEQ ID NO: 2321030
uccaucagacacaggucaa

SEQ ID NO: 2321032 - RNA, 19 nt, Artificial Sequence
  Description of Artificial Sequence: Synthetic oligonucleotide
  Sense strand starting at position 1373 of SEQ ID NO: 1885162
gacuuuaaaccguguuaga

SEQ ID NO: 2321033 - RNA, 19 nt, Artificial Sequence
  Description of Artificial Sequence: Synthetic oligonucleotide
  Antisense strand to SEQ ID NO: 2321032
ucuaacacgguuuaaaguc

SEQ ID NO: 2321034 - RNA, 19 nt, Artificial Sequence
  Description of Artificial Sequence: Synthetic oligonucleotide
  Sense strand starting at position 1437 of SEQ ID NO: 1885162
ugaacagugaccugaagca

SEQ ID NO: 2321035 - RNA, 19 nt, Artificial Sequence
  Description of Artificial Sequence: Synthetic oligonucleotide
  Antisense strand to SEQ ID NO: 2321034
ugcuucaggucacuguuca

SEQ ID NO: 2321036 - RNA, 19 nt, Artificial Sequence
  Description of Artificial Sequence: Synthetic oligonucleotide
  Sense strand starting at position 1501 of SEQ ID NO: 1885162
cuaaguugugacuaucuaa

SEQ ID NO: 2321037 - RNA, 19 nt, Artificial Sequence
  Description of Artificial Sequence: Synthetic oligonucleotide
  Antisense strand to SEQ ID NO: 2321036
uuagauagucacaacuuag

SEQ ID NO: 2321038 - RNA, 19 nt, Artificial Sequence
  Description of Artificial Sequence: Synthetic oligonucleotide
  Sense strand starting at position 2765 of SEQ ID NO: 1885162
ggcucugcaccaggugaaa

SEQ ID NO: 2321039 - RNA, 19 nt, Artificial Sequence
  Description of Artificial Sequence: Synthetic oligonucleotide
  Antisense strand to SEQ ID NO: 2321038
uuucaccuggugcagagcc

SEQ ID NO: 2321040 - RNA, 19 nt, Artificial Sequence
  Description of Artificial Sequence: Synthetic oligonucleotide
  Sense strand starting at position 2779 of SEQ ID NO: 1885162
ugaaaugcgaugugugaag

SEQ ID NO: 2321041 - RNA, 19 nt, Artificial Sequence
  Description of Artificial Sequence: Synthetic oligonucleotide
  Antisense strand to SEQ ID NO: 2321040
cuucacacaucgcauuuca

SEQ ID NO: 2321042 - RNA, 19 nt, Artificial Sequence
  Description of Artificial Sequence: Synthetic oligonucleotide
  Sense strand starting at position 2851 of SEQ ID NO: 1885162
uaguguagauucccaaguu

SEQ ID NO: 2321043 - RNA, 19 nt, Artificial Sequence
  Description of Artificial Sequence: Synthetic oligonucleotide
  Antisense strand to SEQ ID NO: 2321042
aacuugggaaucuacacua

SEQ ID NO: 2321044 - RNA, 19 nt, Artificial Sequence
  Description of Artificial Sequence: Synthetic oligonucleotide
  Sense strand starting at position 2975 of SEQ ID NO: 1885162
uuuaaagaggcguagacau

SEQ ID NO: 2321045 - RNA, 19 nt, Artificial Sequence
  Description of Artificial Sequence: Synthetic oligonucleotide
  Antisense strand to SEQ ID NO: 2321044
augucuacgccucuuuaaa

SEQ ID NO: 2321046 - RNA, 19 nt, Artificial Sequence
  Description of Artificial Sequence: Synthetic oligonucleotide
  Sense strand starting at position 3107 of SEQ ID NO: 1885162
guuuguuucuaccugauua

SEQ ID NO: 2321047 - RNA, 19 nt, Artificial Sequence
  Description of Artificial Sequence: Synthetic oligonucleotide
  Antisense strand to SEQ ID NO: 2321046
uaaucagguagaaacaaac

SEQ ID NO: 2321048 - RNA, 19 nt, Artificial Sequence
  Description of Artificial Sequence: Synthetic oligonucleotide
  Sense strand starting at position 3111 of SEQ ID NO: 1885162
guuucuaccugauuagggu

SEQ ID NO: 2321049 - RNA, 19 nt, Artificial Sequence
  Description of Artificial Sequence: Synthetic oligonucleotide
  Antisense strand to SEQ ID NO: 2321048
acccuaaucagguagaaac

SEQ ID NO: 2321050 - RNA, 19 nt, Artificial Sequence
  Description of Artificial Sequence: Synthetic oligonucleotide
  Sense strand starting at position 3194 of SEQ ID NO: 1885162
ucuaucuuuguguggauuu

SEQ ID NO: 2321051 - RNA, 19 nt, Artificial Sequence
  Description of Artificial Sequence: Synthetic oligonucleotide
  Antisense strand to SEQ ID NO: 2321050
aaauccacacaaagauaga

SEQ ID NO: 2321052 - RNA, 19 nt, Artificial Sequence
  Description of Artificial Sequence: Synthetic oligonucleotide
  Sense strand starting at position 3230 of SEQ ID NO: 1885162
uguguuucugaacauucuu

SEQ ID NO: 2321053 - RNA, 19 nt, Artificial Sequence
  Description of Artificial Sequence: Synthetic oligonucleotide
  Antisense strand to SEQ ID NO: 2321052
aagaauguucagaaacaca

SEQ ID NO: 2321054 - RNA, 19 nt, Artificial Sequence
  Description of Artificial Sequence: Synthetic oligonucleotide
  Sense strand starting at position 3301 of SEQ ID NO: 1885162
uucguaaguacauagguua

SEQ ID NO: 2321055 - RNA, 19 nt, Artificial Sequence
  Description of Artificial Sequence: Synthetic oligonucleotide
  Antisense strand to SEQ ID NO: 2321054
uaaccuauguacuuacgaa

SEQ ID NO: 2321056 - RNA, 19 nt, Artificial Sequence
  Description of Artificial Sequence: Synthetic oligonucleotide
  Sense strand starting at position 3304 of SEQ ID NO: 1885162
guaaguacauagguuaauu

SEQ ID NO: 2321057 - RNA, 19 nt, Artificial Sequence
  Description of Artificial Sequence: Synthetic oligonucleotide
  Antisense strand to SEQ ID NO: 2321056
aauuaaccuauguacuuac

SEQ ID NO: 2321058 - RNA, 19 nt, Artificial Sequence
  Description of Artificial Sequence: Synthetic oligonucleotide
  Sense strand starting at position 3336 of SEQ ID NO: 1885162
uuauguauuaaguagagug

SEQ ID NO: 2321059 - RNA, 19 nt, Artificial Sequence
  Description of Artificial Sequence: Synthetic oligonucleotide
  Antisense strand to SEQ ID NO: 2321058
cacucuacuuaauacauaa

SEQ ID NO: 2321060 - RNA, 19 nt, Artificial Sequence
  Description of Artificial Sequence: Synthetic oligonucleotide
  Sense strand starting at position 3341 of SEQ ID NO: 1885162
uauuaaguagaguguuaug

SEQ ID NO: 2321061 - RNA, 19 nt, Artificial Sequence
  Description of Artificial Sequence: Synthetic oligonucleotide
  Antisense strand to SEQ ID NO: 2321060
cauaacacucuacuuaaua

SEQ ID NO: 2321062 - RNA, 19 nt, Artificial Sequence
  Description of Artificial Sequence: Synthetic oligonucleotide
  Sense strand starting at position 3348 of SEQ ID NO: 1885162
uagaguguuauggguuauu

SEQ ID NO: 2321063 - RNA, 19 nt, Artificial Sequence
  Description of Artificial Sequence: Synthetic oligonucleotide
  Antisense strand to SEQ ID NO: 2321062
aauaacccauaacacucua

SEQ ID NO: 2321064 - RNA, 19 nt, Artificial Sequence
  Description of Artificial Sequence: Synthetic oligonucleotide
  Sense strand starting at position 3409 of SEQ ID NO: 1885162
agugaaauaguuuaaagcu

SEQ ID NO: 2321065 - RNA, 19 nt, Artificial Sequence
  Description of Artificial Sequence: Synthetic oligonucleotide
  Antisense strand to SEQ ID NO: 2321064
agcuuuaaacuauuucacu

SEQ ID NO: 2321066 - RNA, 19 nt, Artificial Sequence
  Description of Artificial Sequence: Synthetic oligonucleotide
  Sense strand starting at position 3431 of SEQ ID NO: 1885162
ucucaagguuacuuccaga

SEQ ID NO: 2321067 - RNA, 19 nt, Artificial Sequence
  Description of Artificial Sequence: Synthetic oligonucleotide
  Antisense strand to SEQ ID NO: 2321066
ucuggaaguaaccuugaga

SEQ ID NO: 2321068 - RNA, 19 nt, Artificial Sequence
  Description of Artificial Sequence: Synthetic oligonucleotide
  Sense strand starting at position 3533 of SEQ ID NO: 1885162
gcacucaaauguucugauu

SEQ ID NO: 2321069 - RNA, 19 nt, Artificial Sequence
  Description of Artificial Sequence: Synthetic oligonucleotide
  Antisense strand to SEQ ID NO: 2321068
aaucagaacauuugagugc

SEQ ID NO: 2321070 - RNA, 19 nt, Artificial Sequence
  Description of Artificial Sequence: Synthetic oligonucleotide
  Sense strand starting at position 3585 of SEQ ID NO: 1885162
guugcauugcucccuguga

SEQ ID NO: 2321071 - RNA, 19 nt, Artificial Sequence
  Description of Artificial Sequence: Synthetic oligonucleotide
  Antisense strand to SEQ ID NO: 2321070
ucacagggagcaaugcaac

SEQ ID NO: 2321072 - RNA, 19 nt, Artificial Sequence
  Description of Artificial Sequence: Synthetic oligonucleotide
  Sense strand starting at position 3592 of SEQ ID NO: 1885162
ugcucccugugaucagauu

SEQ ID NO: 2321073 - RNA, 19 nt, Artificial Sequence
  Description of Artificial Sequence: Synthetic oligonucleotide
  Antisense strand to SEQ ID NO: 2321072
aaucugaucacagggagca

SEQ ID NO: 2321074 - RNA, 19 nt, Artificial Sequence
  Description of Artificial Sequence: Synthetic oligonucleotide
  Sense strand starting at position 3593 of SEQ ID NO: 1885162
gcucccugugaucagauua

SEQ ID NO: 2321075 - RNA, 19 nt, Artificial Sequence
  Description of Artificial Sequence: Synthetic oligonucleotide
  Antisense strand to SEQ ID NO: 2321074
uaaucugaucacagggagc

SEQ ID NO: 2321076 - RNA, 19 nt, Artificial Sequence
  Description of Artificial Sequence: Synthetic oligonucleotide
  Sense strand starting at position 3779 of SEQ ID NO: 1885162
ccuacauuucugugccuua

SEQ ID NO: 2321077 - RNA, 19 nt, Artificial Sequence
  Description of Artificial Sequence: Synthetic oligonucleotide
  Antisense strand to SEQ ID NO: 2321076
uaaggcacagaaauguagg

SEQ ID NO: 2321078 - RNA, 19 nt, Artificial Sequence
  Description of Artificial Sequence: Synthetic oligonucleotide
  Sense strand starting at position 3908 of SEQ ID NO: 1885162
gugucuuauauguaucagu

SEQ ID NO: 2321079 - RNA, 19 nt, Artificial Sequence
  Description of Artificial Sequence: Synthetic oligonucleotide
  Antisense strand to SEQ ID NO: 2321078
acugauacauauaagacac

SEQ ID NO: 2321080 - RNA, 19 nt, Artificial Sequence
  Description of Artificial Sequence: Synthetic oligonucleotide
  Sense strand starting at position 3961 of SEQ ID NO: 1885162
ggcacagaagcauguaauu

SEQ ID NO: 2321081 - RNA, 19 nt, Artificial Sequence
  Description of Artificial Sequence: Synthetic oligonucleotide
  Antisense strand to SEQ ID NO: 2321080
aauuacaugcuucugugcc

SEQ ID NO: 2321082 - RNA, 19 nt, Artificial Sequence
  Description of Artificial Sequence: Synthetic oligonucleotide
  Sense strand starting at position 142 of SEQ ID NO: 1885163
gaaagaacuggcuaaugcu

SEQ ID NO: 2321083 - RNA, 19 nt, Artificial Sequence
  Description of Artificial Sequence: Synthetic oligonucleotide
  Antisense strand to SEQ ID NO: 2321082
agcauuagccaguucuuuc

SEQ ID NO: 2321084 - RNA, 19 nt, Artificial Sequence
  Description of Artificial Sequence: Synthetic oligonucleotide
  Sense strand starting at position 284 of SEQ ID NO: 1885163
ugucuucucccauggauag

SEQ ID NO: 2321085 - RNA, 19 nt, Artificial Sequence
  Description of Artificial Sequence: Synthetic oligonucleotide
  Antisense strand to SEQ ID NO: 2321084
cuauccaugggagaagaca

SEQ ID NO: 2321086 - RNA, 19 nt, Artificial Sequence
  Description of Artificial Sequence: Synthetic oligonucleotide
  Sense strand starting at position 295 of SEQ ID NO: 1885163
auggauaggugucucgaaa

SEQ ID NO: 2321087 - RNA, 19 nt, Artificial Sequence
  Description of Artificial Sequence: Synthetic oligonucleotide
  Antisense strand to SEQ ID NO: 2321086
uuucgagacaccuauccau

SEQ ID NO: 2321088 - RNA, 19 nt, Artificial Sequence
  Description of Artificial Sequence: Synthetic oligonucleotide
  Sense strand starting at position 317 of SEQ ID NO: 1885163
cuguaaacggauuacuuua

SEQ ID NO: 2321089 - RNA, 19 nt, Artificial Sequence
  Description of Artificial Sequence: Synthetic oligonucleotide
  Antisense strand to SEQ ID NO: 2321088
uaaaguaauccguuuacag

SEQ ID NO: 2321090 - RNA, 19 nt, Artificial Sequence
  Description of Artificial Sequence: Synthetic oligonucleotide
  Sense strand starting at position 319 of SEQ ID NO: 1885163
guaaacggauuacuuuaaa

SEQ ID NO: 2321091 - RNA, 19 nt, Artificial Sequence
  Description of Artificial Sequence: Synthetic oligonucleotide
  Antisense strand to SEQ ID NO: 2321090
uuuaaaguaauccguuuac

SEQ ID NO: 2321092 - RNA, 19 nt, Artificial Sequence
  Description of Artificial Sequence: Synthetic oligonucleotide
  Sense strand starting at position 337 of SEQ ID NO: 1885163
auuggagucuguuuagaag

SEQ ID NO: 2321093 - RNA, 19 nt, Artificial Sequence
  Description of Artificial Sequence: Synthetic oligonucleotide
  Antisense strand to SEQ ID NO: 2321092
cuucuaaacagacuccaau

SEQ ID NO: 2321094 - RNA, 19 nt, Artificial Sequence
  Description of Artificial Sequence: Synthetic oligonucleotide
  Sense strand starting at position 448 of SEQ ID NO: 1885163
uuugucaugcaauaguaau

SEQ ID NO: 2321095 - RNA, 19 nt, Artificial Sequence
  Description of Artificial Sequence: Synthetic oligonucleotide
  Antisense strand to SEQ ID NO: 2321094
auuacuauugcaugacaaa

SEQ ID NO: 2321096 - RNA, 19 nt, Artificial Sequence
  Description of Artificial Sequence: Synthetic oligonucleotide
  Sense strand starting at position 1144 of SEQ ID NO: 1885163
gggugauugcuugaaggug

SEQ ID NO: 2321097 - RNA, 19 nt, Artificial Sequence
  Description of Artificial Sequence: Synthetic oligonucleotide
  Antisense strand to SEQ ID NO: 2321096
caccuucaagcaaucaccc

SEQ ID NO: 2321098 - RNA, 19 nt, Artificial Sequence
  Description of Artificial Sequence: Synthetic oligonucleotide
  Sense strand starting at position 1430 of SEQ ID NO: 1885163
aaguuaaacggguacgaaa

SEQ ID NO: 2321099 - RNA, 19 nt, Artificial Sequence
  Description of Artificial Sequence: Synthetic oligonucleotide
  Antisense strand to SEQ ID NO: 2321098
uuucguacccguuuaacuu

SEQ ID NO: 2321100 - RNA, 19 nt, Artificial Sequence
  Description of Artificial Sequence: Synthetic oligonucleotide
  Sense strand starting at position 1538 of SEQ ID NO: 1885163
guaggaaccgucuggaaac

SEQ ID NO: 2321101 - RNA, 19 nt, Artificial Sequence
  Description of Artificial Sequence: Synthetic oligonucleotide
  Antisense strand to SEQ ID NO: 2321100
guuuccagacgguuccuac

SEQ ID NO: 2321102 - RNA, 19 nt, Artificial Sequence
  Description of Artificial Sequence: Synthetic oligonucleotide
  Sense strand starting at position 1578 of SEQ ID NO: 1885163
cggaacauucgagguauag

SEQ ID NO: 2321103 - RNA, 19 nt, Artificial Sequence
  Description of Artificial Sequence: Synthetic oligonucleotide
  Antisense strand to SEQ ID NO: 2321102
cuauaccucgaauguuccg

SEQ ID NO: 2321104 - RNA, 19 nt, Artificial Sequence
  Description of Artificial Sequence: Synthetic oligonucleotide
  Sense strand starting at position 2016 of SEQ ID NO: 1885163
cagaaauugccguacggag

SEQ ID NO: 2321105 - RNA, 19 nt, Artificial Sequence
  Description of Artificial Sequence: Synthetic oligonucleotide
  Antisense strand to SEQ ID NO: 2321104
cuccguacggcaauuucug

SEQ ID NO: 2321106 - RNA, 19 nt, Artificial Sequence
  Description of Artificial Sequence: Synthetic oligonucleotide
  Sense strand starting at position 2055 of SEQ ID NO: 1885163
gccguaaagccguuuggga

SEQ ID NO: 2321107 - RNA, 19 nt, Artificial Sequence
  Description of Artificial Sequence: Synthetic oligonucleotide
  Antisense strand to SEQ ID NO: 2321106
ucccaaacggcuuuacggc

SEQ ID NO: 2321108 - RNA, 19 nt, Artificial Sequence
  Description of Artificial Sequence: Synthetic oligonucleotide
  Sense strand starting at position 2429 of SEQ ID NO: 1885163
gugugacuuagaggcagau

SEQ ID NO: 2321109 - RNA, 19 nt, Artificial Sequence
  Description of Artificial Sequence: Synthetic oligonucleotide
  Antisense strand to SEQ ID NO: 2321108
aucugccucuaagucacac

SEQ ID NO: 2321110 - RNA, 19 nt, Artificial Sequence
  Description of Artificial Sequence: Synthetic oligonucleotide
  Sense strand starting at position 2435 of SEQ ID NO: 1885163
cuuagaggcagauguaaua

SEQ ID NO: 2321111 - RNA, 19 nt, Artificial Sequence
  Description of Artificial Sequence: Synthetic oligonucleotide
  Antisense strand to SEQ ID NO: 2321110
uauuacaucugccucuaag

SEQ ID NO: 2321112 - RNA, 19 nt, Artificial Sequence
  Description of Artificial Sequence: Synthetic oligonucleotide
  Sense strand starting at position 2444 of SEQ ID NO: 1885163
agauguaauauggguggua

SEQ ID NO: 2321113 - RNA, 19 nt, Artificial Sequence
  Description of Artificial Sequence: Synthetic oligonucleotide
  Antisense strand to SEQ ID NO: 2321112
uaccacccauauuacaucu

SEQ ID NO: 2321114 - RNA, 19 nt, Artificial Sequence
  Description of Artificial Sequence: Synthetic oligonucleotide
  Sense strand starting at position 2445 of SEQ ID NO: 1885163
gauguaauaugggugguau

SEQ ID NO: 2321115 - RNA, 19 nt, Artificial Sequence
  Description of Artificial Sequence: Synthetic oligonucleotide
  Antisense strand to SEQ ID NO: 2321114
auaccacccauauuacauc

SEQ ID NO: 2321116 - RNA, 19 nt, Artificial Sequence
  Description of Artificial Sequence: Synthetic oligonucleotide
  Sense strand starting at position 2446 of SEQ ID NO: 1885163
auguaauaugggugguauc

SEQ ID NO: 2321117 - RNA, 19 nt, Artificial Sequence
  Description of Artificial Sequence: Synthetic oligonucleotide
  Antisense strand to SEQ ID NO: 2321116
gauaccacccauauuacau

SEQ ID NO: 2321118 - RNA, 19 nt, Artificial Sequence
  Description of Artificial Sequence: Synthetic oligonucleotide
  Sense strand starting at position 2453 of SEQ ID NO: 1885163
augggugguauccgggaaa

SEQ ID NO: 2321119 - RNA, 19 nt, Artificial Sequence
  Description of Artificial Sequence: Synthetic oligonucleotide
  Antisense strand to SEQ ID NO: 2321118
uuucccggauaccacccau

SEQ ID NO: 2321120 - RNA, 19 nt, Artificial Sequence
  Description of Artificial Sequence: Synthetic oligonucleotide
  Sense strand starting at position 2455 of SEQ ID NO: 1885163
gggugguauccgggaaaua

SEQ ID NO: 2321121 - RNA, 19 nt, Artificial Sequence
  Description of Artificial Sequence: Synthetic oligonucleotide
  Antisense strand to SEQ ID NO: 2321120
uauuucccggauaccaccc

SEQ ID NO: 2321122 - RNA, 19 nt, Artificial Sequence
  Description of Artificial Sequence: Synthetic oligonucleotide
  Sense strand starting at position 2456 of SEQ ID NO: 1885163
ggugguauccgggaaauag

SEQ ID NO: 2321123 - RNA, 19 nt, Artificial Sequence
  Description of Artificial Sequence: Synthetic oligonucleotide
  Antisense strand to SEQ ID NO: 2321122
cuauuucccggauaccacc

SEQ ID NO: 2321124 - RNA, 19 nt, Artificial Sequence
  Description of Artificial Sequence: Synthetic oligonucleotide
  Sense strand starting at position 2466 of SEQ ID NO: 1885163
gggaaauagaguuguacca

SEQ ID NO: 2321125 - RNA, 19 nt, Artificial Sequence
  Description of Artificial Sequence: Synthetic oligonucleotide
  Antisense strand to SEQ ID NO: 2321124
ugguacaacucuauuuccc

SEQ ID NO: 2321126 - RNA, 19 nt, Artificial Sequence
  Description of Artificial Sequence: Synthetic oligonucleotide
  Sense strand starting at position 2718 of SEQ ID NO: 1885163
uuuguuuggaggcaaugaa

SEQ ID NO: 2321127 - RNA, 19 nt, Artificial Sequence
  Description of Artificial Sequence: Synthetic oligonucleotide
  Antisense strand to SEQ ID NO: 2321126
uucauugccuccaaacaaa

SEQ ID NO: 2321128 - RNA, 19 nt, Artificial Sequence
  Description of Artificial Sequence: Synthetic oligonucleotide
  Sense strand starting at position 2736 of SEQ ID NO: 1885163
aauggaaaugcguguaaag

SEQ ID NO: 2321129 - RNA, 19 nt, Artificial Sequence
  Description of Artificial Sequence: Synthetic oligonucleotide
  Antisense strand to SEQ ID NO: 2321128
cuuuacacgcauuuccauu

SEQ ID NO: 2321130 - RNA, 19 nt, Artificial Sequence
  Description of Artificial Sequence: Synthetic oligonucleotide
  Sense strand starting at position 2738 of SEQ ID NO: 1885163
uggaaaugcguguaaagag

SEQ ID NO: 2321131 - RNA, 19 nt, Artificial Sequence
  Description of Artificial Sequence: Synthetic oligonucleotide
  Antisense strand to SEQ ID NO: 2321130
cucuuuacacgcauuucca

SEQ ID NO: 2321132 - RNA, 19 nt, Artificial Sequence
  Description of Artificial Sequence: Synthetic oligonucleotide
  Sense strand starting at position 2747 of SEQ ID NO: 1885163
guguaaagagcccaguaau

SEQ ID NO: 2321133 - RNA, 19 nt, Artificial Sequence
  Description of Artificial Sequence: Synthetic oligonucleotide
  Antisense strand to SEQ ID NO: 2321132
auuacugggcucuuuacac

SEQ ID NO: 2321134 - RNA, 19 nt, Artificial Sequence
  Description of Artificial Sequence: Synthetic oligonucleotide
  Sense strand starting at position 2758 of SEQ ID NO: 1885163
ccaguaauagauggaaugu

SEQ ID NO: 2321135 - RNA, 19 nt, Artificial Sequence
  Description of Artificial Sequence: Synthetic oligonucleotide
  Antisense strand to SEQ ID NO: 2321134
acauuccaucuauuacugg

SEQ ID NO: 2321136 - RNA, 19 nt, Artificial Sequence
  Description of Artificial Sequence: Synthetic oligonucleotide
  Sense strand starting at position 2793 of SEQ ID NO: 1885163
uuguaaacggcgcuuucaa

SEQ ID NO: 2321137 - RNA, 19 nt, Artificial Sequence
  Description of Artificial Sequence: Synthetic oligonucleotide
  Antisense strand to SEQ ID NO: 2321136
uugaaagcgccguuuacaa

SEQ ID NO: 2321138 - RNA, 19 nt, Artificial Sequence
  Description of Artificial Sequence: Synthetic oligonucleotide
  Sense strand starting at position 3127 of SEQ ID NO: 1885163
gaacauuaacaaugucgua

SEQ ID NO: 2321139 - RNA, 19 nt, Artificial Sequence
  Description of Artificial Sequence: Synthetic oligonucleotide
  Antisense strand to SEQ ID NO: 2321138
uacgacauuguuaauguuc

SEQ ID NO: 2321140 - RNA, 19 nt, Artificial Sequence
  Description of Artificial Sequence: Synthetic oligonucleotide
  Sense strand starting at position 3199 of SEQ ID NO: 1885163
ucuggcugcccucaaacau

SEQ ID NO: 2321141 - RNA, 19 nt, Artificial Sequence
  Description of Artificial Sequence: Synthetic oligonucleotide
  Antisense strand to SEQ ID NO: 2321140
auguuugagggcagccaga

SEQ ID NO: 2321142 - RNA, 19 nt, Artificial Sequence
  Description of Artificial Sequence: Synthetic oligonucleotide
  Sense strand starting at position 3216 of SEQ ID NO: 1885163
aucagagauguauguugga

SEQ ID NO: 2321143 - RNA, 19 nt, Artificial Sequence
  Description of Artificial Sequence: Synthetic oligonucleotide
  Antisense strand to SEQ ID NO: 2321142
uccaacauacaucucugau

SEQ ID NO: 2321144 - RNA, 19 nt, Artificial Sequence
  Description of Artificial Sequence: Synthetic oligonucleotide
  Sense strand starting at position 3262 of SEQ ID NO: 1885163
uugugacuuggcuaucaag

SEQ ID NO: 2321145 - RNA, 19 nt, Artificial Sequence
  Description of Artificial Sequence: Synthetic oligonucleotide
  Antisense strand to SEQ ID NO: 2321144
cuugauagccaagucacaa

SEQ ID NO: 2321146 - RNA, 19 nt, Artificial Sequence
  Description of Artificial Sequence: Synthetic oligonucleotide
  Sense strand starting at position 3472 of SEQ ID NO: 1885163
uuuauugagcccugacuau

SEQ ID NO: 2321147 - RNA, 19 nt, Artificial Sequence
  Description of Artificial Sequence: Synthetic oligonucleotide
  Antisense strand to SEQ ID NO: 2321146
auagucagggcucaauaaa

SEQ ID NO: 2321148 - RNA, 19 nt, Artificial Sequence
  Description of Artificial Sequence: Synthetic oligonucleotide
  Sense strand starting at position 3537 of SEQ ID NO: 1885163
agcauuagucuguaagaua

SEQ ID NO: 2321149 - RNA, 19 nt, Artificial Sequence
  Description of Artificial Sequence: Synthetic oligonucleotide
  Antisense strand to SEQ ID NO: 2321148
uaucuuacagacuaaugcu

SEQ ID NO: 2321150 - RNA, 19 nt, Artificial Sequence
  Description of Artificial Sequence: Synthetic oligonucleotide
  Sense strand starting at position 3572 of SEQ ID NO: 1885163
ucucuugaguccucugaau

SEQ ID NO: 2321151 - RNA, 19 nt, Artificial Sequence
  Description of Artificial Sequence: Synthetic oligonucleotide
  Antisense strand to SEQ ID NO: 2321150
auucagaggacucaagaga

SEQ ID NO: 2321152 - RNA, 19 nt, Artificial Sequence
  Description of Artificial Sequence: Synthetic oligonucleotide
  Sense strand starting at position 3578 of SEQ ID NO: 1885163
gaguccucugaaugcugaa

SEQ ID NO: 2321153 - RNA, 19 nt, Artificial Sequence
  Description of Artificial Sequence: Synthetic oligonucleotide
  Antisense strand to SEQ ID NO: 2321152
uucagcauucagaggacuc

SEQ ID NO: 2321154 - RNA, 19 nt, Artificial Sequence
  Description of Artificial Sequence: Synthetic oligonucleotide
  Sense strand starting at position 3597 of SEQ ID NO: 1885163
cuagucuugugauuuguuu

SEQ ID NO: 2321155 - RNA, 19 nt, Artificial Sequence
  Description of Artificial Sequence: Synthetic oligonucleotide
  Antisense strand to SEQ ID NO: 2321154
aaacaaaucacaagacuag

SEQ ID NO: 2321156 - RNA, 19 nt, Artificial Sequence
  Description of Artificial Sequence: Synthetic oligonucleotide
  Sense strand starting at position 3747 of SEQ ID NO: 1885163
aaguuaacagaucacguau

SEQ ID NO: 2321157 - RNA, 19 nt, Artificial Sequence
  Description of Artificial Sequence: Synthetic oligonucleotide
  Antisense strand to SEQ ID NO: 2321156
auacgugaucuguuaacuu

SEQ ID NO: 2321158 - RNA, 19 nt, Artificial Sequence
  Description of Artificial Sequence: Synthetic oligonucleotide
  Sense strand starting at position 3906 of SEQ ID NO: 1885163
ugcagauaagcuugauuga

SEQ ID NO: 2321159 - RNA, 19 nt, Artificial Sequence
  Description of Artificial Sequence: Synthetic oligonucleotide
  Antisense strand to SEQ ID NO: 2321158
ucaaucaagcuuaucugca

SEQ ID NO: 2321160 - RNA, 19 nt, Artificial Sequence
  Description of Artificial Sequence: Synthetic oligonucleotide
  Sense strand starting at position 3907 of SEQ ID NO: 1885163
gcagauaagcuugauugau

SEQ ID NO: 2321161 - RNA, 19 nt, Artificial Sequence
  Description of Artificial Sequence: Synthetic oligonucleotide
  Antisense strand to SEQ ID NO: 2321160
aucaaucaagcuuaucugc

SEQ ID NO: 2321162 - RNA, 19 nt, Artificial Sequence
  Description of Artificial Sequence: Synthetic oligonucleotide
  Sense strand starting at position 71 of SEQ ID NO: 1885164
uuaucaauugugggaauau

SEQ ID NO: 2321163 - RNA, 19 nt, Artificial Sequence
  Description of Artificial Sequence: Synthetic oligonucleotide
  Antisense strand to SEQ ID NO: 2321162
auauucccacaauugauaa

SEQ ID NO: 2321164 - RNA, 19 nt, Artificial Sequence
  Description of Artificial Sequence: Synthetic oligonucleotide
  Sense strand starting at position 158 of SEQ ID NO: 1885164
ucagauaaguuacugucaa

SEQ ID NO: 2321165 - RNA, 19 nt, Artificial Sequence
  Description of Artificial Sequence: Synthetic oligonucleotide
  Antisense strand to SEQ ID NO: 2321164
uugacaguaacuuaucuga

SEQ ID NO: 2321166 - RNA, 19 nt, Artificial Sequence
  Description of Artificial Sequence: Synthetic oligonucleotide
  Sense strand starting at position 432 of SEQ ID NO: 1885164
aaggguaccuucguauaag

SEQ ID NO: 2321167 - RNA, 19 nt, Artificial Sequence
  Description of Artificial Sequence: Synthetic oligonucleotide
  Antisense strand to SEQ ID NO: 2321166
cuuauacgaagguacccuu

SEQ ID NO: 2321168 - RNA, 19 nt, Artificial Sequence
  Description of Artificial Sequence: Synthetic oligonucleotide
  Sense strand starting at position 435 of SEQ ID NO: 1885164
gguaccuucguauaagaau

SEQ ID NO: 2321169 - RNA, 19 nt, Artificial Sequence
  Description of Artificial Sequence: Synthetic oligonucleotide
  Antisense strand to SEQ ID NO: 2321168
auucuuauacgaagguacc

SEQ ID NO: 2321170 - RNA, 19 nt, Artificial Sequence
  Description of Artificial Sequence: Synthetic oligonucleotide
  Sense strand starting at position 466 of SEQ ID NO: 1885164
uaacuaagugcugacagau

SEQ ID NO: 2321171 - RNA, 19 nt, Artificial Sequence
  Description of Artificial Sequence: Synthetic oligonucleotide
  Antisense strand to SEQ ID NO: 2321170
aucugucagcacuuaguua

SEQ ID NO: 2321172 - RNA, 19 nt, Artificial Sequence
  Description of Artificial Sequence: Synthetic oligonucleotide
  Sense strand starting at position 498 of SEQ ID NO: 1885164
gacugaauuuccuggauga

SEQ ID NO: 2321173 - RNA, 19 nt, Artificial Sequence
  Description of Artificial Sequence: Synthetic oligonucleotide
  Antisense strand to SEQ ID NO: 2321172
ucauccaggaaauucaguc

SEQ ID NO: 2321174 - RNA, 19 nt, Artificial Sequence
  Description of Artificial Sequence: Synthetic oligonucleotide
  Sense strand starting at position 621 of SEQ ID NO: 1885164
ucauuugucuaagagacug

SEQ ID NO: 2321175 - RNA, 19 nt, Artificial Sequence
  Description of Artificial Sequence: Synthetic oligonucleotide
  Antisense strand to SEQ ID NO: 2321174
cagucucuuagacaaauga

SEQ ID NO: 2321176 - RNA, 19 nt, Artificial Sequence
  Description of Artificial Sequence: Synthetic oligonucleotide
  Sense strand starting at position 626 of SEQ ID NO: 1885164
ugucuaagagacugccauu

SEQ ID NO: 2321177 - RNA, 19 nt, Artificial Sequence
  Description of Artificial Sequence: Synthetic oligonucleotide
  Antisense strand to SEQ ID NO: 2321176
aauggcagucucuuagaca

SEQ ID NO: 2321178 - RNA, 19 nt, Artificial Sequence
  Description of Artificial Sequence: Synthetic oligonucleotide
  Sense strand starting at position 629 of SEQ ID NO: 1885164
cuaagagacugccauuuaa

SEQ ID NO: 2321179 - RNA, 19 nt, Artificial Sequence
  Description of Artificial Sequence: Synthetic oligonucleotide
  Antisense strand to SEQ ID NO: 2321178
uuaaauggcagucucuuag

SEQ ID NO: 2321180 - RNA, 19 nt, Artificial Sequence
  Description of Artificial Sequence: Synthetic oligonucleotide
  Sense strand starting at position 813 of SEQ ID NO: 1885164
uuguguauucugcaaucag

SEQ ID NO: 2321181 - RNA, 19 nt, Artificial Sequence
  Description of Artificial Sequence: Synthetic oligonucleotide
  Antisense strand to SEQ ID NO: 2321180
cugauugcagaauacacaa

SEQ ID NO: 2321182 - RNA, 19 nt, Artificial Sequence
  Description of Artificial Sequence: Synthetic oligonucleotide
  Sense strand starting at position 841 of SEQ ID NO: 1885164
uuucuuuaggaacgaaauu

SEQ ID NO: 2321183 - RNA, 19 nt, Artificial Sequence
  Description of Artificial Sequence: Synthetic oligonucleotide
  Antisense strand to SEQ ID NO: 2321182
aauuucguuccuaaagaaa

SEQ ID NO: 2321184 - RNA, 19 nt, Artificial Sequence
  Description of Artificial Sequence: Synthetic oligonucleotide
  Sense strand starting at position 963 of SEQ ID NO: 1885164
gggcauuacacccagcgau

SEQ ID NO: 2321185 - RNA, 19 nt, Artificial Sequence
  Description of Artificial Sequence: Synthetic oligonucleotide
  Antisense strand to SEQ ID NO: 2321184
aucgcuggguguaaugccc

SEQ ID NO: 2321186 - RNA, 19 nt, Artificial Sequence
  Description of Artificial Sequence: Synthetic oligonucleotide
  Sense strand starting at position 986 of SEQ ID NO: 1885164
auuaaaucgcaguagcuaa

SEQ ID NO: 2321187 - RNA, 19 nt, Artificial Sequence
  Description of Artificial Sequence: Synthetic oligonucleotide
  Antisense strand to SEQ ID NO: 2321186
uuagcuacugcgauuuaau

SEQ ID NO: 2321188 - RNA, 19 nt, Artificial Sequence
  Description of Artificial Sequence: Synthetic oligonucleotide
  Sense strand starting at position 1875 of SEQ ID NO: 1885164
ucuguuugucaauaaggag

SEQ ID NO: 2321189 - RNA, 19 nt, Artificial Sequence
  Description of Artificial Sequence: Synthetic oligonucleotide
  Antisense strand to SEQ ID NO: 2321188
cuccuuauugacaaacaga

SEQ ID NO: 2321190 - RNA, 19 nt, Artificial Sequence
  Description of Artificial Sequence: Synthetic oligonucleotide
  Sense strand starting at position 2282 of SEQ ID NO: 1885164
cuccgucaucccgugcgaa

SEQ ID NO: 2321191 - RNA, 19 nt, Artificial Sequence
  Description of Artificial Sequence: Synthetic oligonucleotide
  Antisense strand to SEQ ID NO: 2321190
uucgcacgggaugacggag

SEQ ID NO: 2321192 - RNA, 19 nt, Artificial Sequence
  Description of Artificial Sequence: Synthetic oligonucleotide
  Sense strand starting at position 2366 of SEQ ID NO: 1885164
ccgggaucuccagguagaa

SEQ ID NO: 2321193 - RNA, 19 nt, Artificial Sequence
  Description of Artificial Sequence: Synthetic oligonucleotide
  Antisense strand to SEQ ID NO: 2321192
uucuaccuggagaucccgg

SEQ ID NO: 2321194 - RNA, 19 nt, Artificial Sequence
  Description of Artificial Sequence: Synthetic oligonucleotide
  Sense strand starting at position 2496 of SEQ ID NO: 1885164
cugguuuaugcacacagau

SEQ ID NO: 2321195 - RNA, 19 nt, Artificial Sequence
  Description of Artificial Sequence: Synthetic oligonucleotide
  Antisense strand to SEQ ID NO: 2321194
aucugugugcauaaaccag

SEQ ID NO: 2321196 - RNA, 19 nt, Artificial Sequence
  Description of Artificial Sequence: Synthetic oligonucleotide
  Sense strand starting at position 2505 of SEQ ID NO: 1885164
gcacacagaugcucuaaca

SEQ ID NO: 2321197 - RNA, 19 nt, Artificial Sequence
  Description of Artificial Sequence: Synthetic oligonucleotide
  Antisense strand to SEQ ID NO: 2321196
uguuagagcaucugugugc

SEQ ID NO: 2321198 - RNA, 19 nt, Artificial Sequence
  Description of Artificial Sequence: Synthetic oligonucleotide
  Sense strand starting at position 2514 of SEQ ID NO: 1885164
ugcucuaacaaguagggau

SEQ ID NO: 2321199 - RNA, 19 nt, Artificial Sequence
  Description of Artificial Sequence: Synthetic oligonucleotide
  Antisense strand to SEQ ID NO: 2321198
aucccuacuuguuagagca

SEQ ID NO: 2321200 - RNA, 19 nt, Artificial Sequence
  Description of Artificial Sequence: Synthetic oligonucleotide
  Sense strand starting at position 2521 of SEQ ID NO: 1885164
acaaguagggauugucaac

SEQ ID NO: 2321201 - RNA, 19 nt, Artificial Sequence
  Description of Artificial Sequence: Synthetic oligonucleotide
  Antisense strand to SEQ ID NO: 2321200
guugacaaucccuacuugu

SEQ ID NO: 2321202 - RNA, 19 nt, Artificial Sequence
  Description of Artificial Sequence: Synthetic oligonucleotide
  Sense strand starting at position 2581 of SEQ ID NO: 1885164
ggugacuuccucuaggcua

SEQ ID NO: 2321203 - RNA, 19 nt, Artificial Sequence
  Description of Artificial Sequence: Synthetic oligonucleotide
  Antisense strand to SEQ ID NO: 2321202
uagccuagaggaagucacc

SEQ ID NO: 2321204 - RNA, 19 nt, Artificial Sequence
  Description of Artificial Sequence: Synthetic oligonucleotide
  Sense strand starting at position 2583 of SEQ ID NO: 1885164
ugacuuccucuaggcuaua

SEQ ID NO: 2321205 - RNA, 19 nt, Artificial Sequence
  Description of Artificial Sequence: Synthetic oligonucleotide
  Antisense strand to SEQ ID NO: 2321204
uauagccuagaggaaguca

SEQ ID NO: 2321206 - RNA, 19 nt, Artificial Sequence
  Description of Artificial Sequence: Synthetic oligonucleotide
  Sense strand starting at position 2621 of SEQ ID NO: 1885164
ccaagagucuaacucuguu

SEQ ID NO: 2321207 - RNA, 19 nt, Artificial Sequence
  Description of Artificial Sequence: Synthetic oligonucleotide
  Antisense strand to SEQ ID NO: 2321206
aacagaguuagacucuugg

SEQ ID NO: 2321208 - RNA, 19 nt, Artificial Sequence
  Description of Artificial Sequence: Synthetic oligonucleotide
  Sense strand starting at position 2786 of SEQ ID NO: 1885164
aggucucuacgucaacaua

SEQ ID NO: 2321209 - RNA, 19 nt, Artificial Sequence
  Description of Artificial Sequence: Synthetic oligonucleotide
  Antisense strand to SEQ ID NO: 2321208
uauguugacguagagaccu

SEQ ID NO: 2321210 - RNA, 19 nt, Artificial Sequence
  Description of Artificial Sequence: Synthetic oligonucleotide
  Sense strand starting at position 2839 of SEQ ID NO: 1885164
ccaucuaacuggucuccga

SEQ ID NO: 2321211 - RNA, 19 nt, Artificial Sequence
  Description of Artificial Sequence: Synthetic oligonucleotide
  Antisense strand to SEQ ID NO: 2321210
ucggagaccaguuagaugg

SEQ ID NO: 2321212 - RNA, 19 nt, Artificial Sequence
  Description of Artificial Sequence: Synthetic oligonucleotide
  Sense strand starting at position 3104 of SEQ ID NO: 1885164
uggguuacuucugcauaaa

SEQ ID NO: 2321213 - RNA, 19 nt, Artificial Sequence
  Description of Artificial Sequence: Synthetic oligonucleotide
  Antisense strand to SEQ ID NO: 2321212
uuuaugcagaaguaaccca

SEQ ID NO: 2321214 - RNA, 19 nt, Artificial Sequence
  Description of Artificial Sequence: Synthetic oligonucleotide
  Sense strand starting at position 3105 of SEQ ID NO: 1885164
ggguuacuucugcauaaag

SEQ ID NO: 2321215 - RNA, 19 nt, Artificial Sequence
  Description of Artificial Sequence: Synthetic oligonucleotide
  Antisense strand to SEQ ID NO: 2321214
cuuuaugcagaaguaaccc

SEQ ID NO: 2321216 - RNA, 19 nt, Artificial Sequence
  Description of Artificial Sequence: Synthetic oligonucleotide
  Sense strand starting at position 3107 of SEQ ID NO: 1885164
guuacuucugcauaaagua

SEQ ID NO: 2321217 - RNA, 19 nt, Artificial Sequence
  Description of Artificial Sequence: Synthetic oligonucleotide
  Antisense strand to SEQ ID NO: 2321216
uacuuuaugcagaaguaac

SEQ ID NO: 2321218 - RNA, 19 nt, Artificial Sequence
  Description of Artificial Sequence: Synthetic oligonucleotide
  Sense strand starting at position 3154 of SEQ ID NO: 1885164
ccaucuuucuagguuuaca

SEQ ID NO: 2321219 - RNA, 19 nt, Artificial Sequence
  Description of Artificial Sequence: Synthetic oligonucleotide
  Antisense strand to SEQ ID NO: 2321218
uguaaaccuagaaagaugg

SEQ ID NO: 2321220 - RNA, 19 nt, Artificial Sequence
  Description of Artificial Sequence: Synthetic oligonucleotide
  Sense strand starting at position 3228 of SEQ ID NO: 1885164
cagucagaagcccaggauu

SEQ ID NO: 2321221 - RNA, 19 nt, Artificial Sequence
  Description of Artificial Sequence: Synthetic oligonucleotide
  Antisense strand to SEQ ID NO: 2321220
aauccugggcuucugacug

SEQ ID NO: 2321222 - RNA, 19 nt, Artificial Sequence
  Description of Artificial Sequence: Synthetic oligonucleotide
  Sense strand starting at position 3230 of SEQ ID NO: 1885164
gucagaagcccaggauucu

SEQ ID NO: 2321223 - RNA, 19 nt, Artificial Sequence
  Description of Artificial Sequence: Synthetic oligonucleotide
  Antisense strand to SEQ ID NO: 2321222
agaauccugggcuucugac

SEQ ID NO: 2321224 - RNA, 19 nt, Artificial Sequence
  Description of Artificial Sequence: Synthetic oligonucleotide
  Sense strand starting at position 3272 of SEQ ID NO: 1885164
gcugauagaccuuggaagu

SEQ ID NO: 2321225 - RNA, 19 nt, Artificial Sequence
  Description of Artificial Sequence: Synthetic oligonucleotide
  Antisense strand to SEQ ID NO: 2321224
acuuccaaggucuaucagc

SEQ ID NO: 2321226 - RNA, 19 nt, Artificial Sequence
  Description of Artificial Sequence: Synthetic oligonucleotide
  Sense strand starting at position 3273 of SEQ ID NO: 1885164
cugauagaccuuggaagua

SEQ ID NO: 2321227 - RNA, 19 nt, Artificial Sequence
  Description of Artificial Sequence: Synthetic oligonucleotide
  Antisense strand to SEQ ID NO: 2321226
uacuuccaaggucuaucag

SEQ ID NO: 2321228 - RNA, 19 nt, Artificial Sequence
  Description of Artificial Sequence: Synthetic oligonucleotide
  Sense strand starting at position 3283 of SEQ ID NO: 1885164
uuggaaguauugcuuaauu

SEQ ID NO: 2321229 - RNA, 19 nt, Artificial Sequence
  Description of Artificial Sequence: Synthetic oligonucleotide
  Antisense strand to SEQ ID NO: 2321228
aauuaagcaauacuuccaa

SEQ ID NO: 2321230 - RNA, 19 nt, Artificial Sequence
  Description of Artificial Sequence: Synthetic oligonucleotide
  Sense strand starting at position 3578 of SEQ ID NO: 1885164
gcuggaauccgagagugag

SEQ ID NO: 2321231 - RNA, 19 nt, Artificial Sequence
  Description of Artificial Sequence: Synthetic oligonucleotide
  Antisense strand to SEQ ID NO: 2321230
cucacucucggauuccagc

SEQ ID NO: 2321232 - RNA, 19 nt, Artificial Sequence
  Description of Artificial Sequence: Synthetic oligonucleotide
  Sense strand starting at position 3723 of SEQ ID NO: 1885164
ugcgcauagaugcauauuu

SEQ ID NO: 2321233 - RNA, 19 nt, Artificial Sequence
  Description of Artificial Sequence: Synthetic oligonucleotide
  Antisense strand to SEQ ID NO: 2321232
aaauaugcaucuaugcgca

SEQ ID NO: 2321234 - RNA, 19 nt, Artificial Sequence
  Description of Artificial Sequence: Synthetic oligonucleotide
  Sense strand starting at position 3871 of SEQ ID NO: 1885164
cgauaaauccaucguaaag

SEQ ID NO: 2321235 - RNA, 19 nt, Artificial Sequence
  Description of Artificial Sequence: Synthetic oligonucleotide
  Antisense strand to SEQ ID NO: 2321234
cuuuacgauggauuuaucg

SEQ ID NO: 2321236 - RNA, 19 nt, Artificial Sequence
  Description of Artificial Sequence: Synthetic oligonucleotide
  Sense strand starting at position 3898 of SEQ ID NO: 1885164
ucguaagucgagccauugu

SEQ ID NO: 2321237 - RNA, 19 nt, Artificial Sequence
  Description of Artificial Sequence: Synthetic oligonucleotide
  Antisense strand to SEQ ID NO: 2321236
acaauggcucgacuuacga

SEQ ID NO: 2321238 - RNA, 19 nt, Artificial Sequence
  Description of Artificial Sequence: Synthetic oligonucleotide
  Sense strand starting at position 3912 of SEQ ID NO: 1885164
auuguaaauccguagucua

SEQ ID NO: 2321239 - RNA, 19 nt, Artificial Sequence
  Description of Artificial Sequence: Synthetic oligonucleotide
  Antisense strand to SEQ ID NO: 2321238
uagacuacggauuuacaau

SEQ ID NO: 2321240 - RNA, 19 nt, Artificial Sequence
  Description of Artificial Sequence: Synthetic oligonucleotide
  Sense strand starting at position 3952 of SEQ ID NO: 1885164
gcaauuagggcccagguua

SEQ ID NO: 2321241 - RNA, 19 nt, Artificial Sequence
  Description of Artificial Sequence: Synthetic oligonucleotide
  Antisense strand to SEQ ID NO: 2321240
uaaccugggcccuaauugc

SEQ ID NO: 2321242 - RNA, 19 nt, Artificial Sequence
  Description of Artificial Sequence: Synthetic oligonucleotide
  Sense strand starting at position 139 of SEQ ID NO: 1885165
cuggcuuaacgugaaacca

SEQ ID NO: 2321243 - RNA, 19 nt, Artificial Sequence
  Description of Artificial Sequence: Synthetic oligonucleotide
  Antisense strand to SEQ ID NO: 2321242
ugguuucacguuaagccag

SEQ ID NO: 2321244 - RNA, 19 nt, Artificial Sequence
  Description of Artificial Sequence: Synthetic oligonucleotide
  Sense strand starting at position 236 of SEQ ID NO: 1885165
ggcuaacuuagacauguag

SEQ ID NO: 2321245 - RNA, 19 nt, Artificial Sequence
  Description of Artificial Sequence: Synthetic oligonucleotide
  Antisense strand to SEQ ID NO: 2321244
cuacaugucuaaguuagcc

SEQ ID NO: 2321246 - RNA, 19 nt, Artificial Sequence
  Description of Artificial Sequence: Synthetic oligonucleotide
  Sense strand starting at position 694 of SEQ ID NO: 1885165
aggacaguuugcuuucuca

SEQ ID NO: 2321247 - RNA, 19 nt, Artificial Sequence
  Description of Artificial Sequence: Synthetic oligonucleotide
  Antisense strand to SEQ ID NO: 2321246
ugagaaagcaaacuguccu

SEQ ID NO: 2321248 - RNA, 19 nt, Artificial Sequence
  Description of Artificial Sequence: Synthetic oligonucleotide
  Sense strand starting at position 742 of SEQ ID NO: 1885165
gcagcugacccauauaaug

SEQ ID NO: 2321249 - RNA, 19 nt, Artificial Sequence
  Description of Artificial Sequence: Synthetic oligonucleotide
  Antisense strand to SEQ ID NO: 2321248
cauuauaugggucagcugc

SEQ ID NO: 2321250 - RNA, 19 nt, Artificial Sequence
  Description of Artificial Sequence: Synthetic oligonucleotide
  Sense strand starting at position 784 of SEQ ID NO: 1885165
ucaaauaauuuagguggga

SEQ ID NO: 2321251 - RNA, 19 nt, Artificial Sequence
  Description of Artificial Sequence: Synthetic oligonucleotide
  Antisense strand to SEQ ID NO: 2321250
ucccaccuaaauuauuuga

SEQ ID NO: 2321252 - RNA, 19 nt, Artificial Sequence
  Description of Artificial Sequence: Synthetic oligonucleotide
  Sense strand starting at position 855 of SEQ ID NO: 1885165
gcugcauaauaacuaaagu

SEQ ID NO: 2321253 - RNA, 19 nt, Artificial Sequence
  Description of Artificial Sequence: Synthetic oligonucleotide
  Antisense strand to SEQ ID NO: 2321252
acuuuaguuauuaugcagc

SEQ ID NO: 2321254 - RNA, 19 nt, Artificial Sequence
  Description of Artificial Sequence: Synthetic oligonucleotide
  Sense strand starting at position 871 of SEQ ID NO: 1885165
aguuaaaccuguccuuuaa

SEQ ID NO: 2321255 - RNA, 19 nt, Artificial Sequence
  Description of Artificial Sequence: Synthetic oligonucleotide
  Antisense strand to SEQ ID NO: 2321254
uuaaaggacagguuuaacu

SEQ ID NO: 2321256 - RNA, 19 nt, Artificial Sequence
  Description of Artificial Sequence: Synthetic oligonucleotide
  Sense strand starting at position 873 of SEQ ID NO: 1885165
uuaaaccuguccuuuaagu

SEQ ID NO: 2321257 - RNA, 19 nt, Artificial Sequence
  Description of Artificial Sequence: Synthetic oligonucleotide
  Antisense strand to SEQ ID NO: 2321256
acuuaaaggacagguuuaa

SEQ ID NO: 2321258 - RNA, 19 nt, Artificial Sequence
  Description of Artificial Sequence: Synthetic oligonucleotide
  Sense strand starting at position 920 of SEQ ID NO: 1885165
aauguaaagcacugaggaa

SEQ ID NO: 2321259 - RNA, 19 nt, Artificial Sequence
  Description of Artificial Sequence: Synthetic oligonucleotide
  Antisense strand to SEQ ID NO: 2321258
uuccucagugcuuuacauu

SEQ ID NO: 2321260 - RNA, 19 nt, Artificial Sequence
  Description of Artificial Sequence: Synthetic oligonucleotide
  Sense strand starting at position 933 of SEQ ID NO: 1885165
gaggaauauuacguaugac

SEQ ID NO: 2321261 - RNA, 19 nt, Artificial Sequence
  Description of Artificial Sequence: Synthetic oligonucleotide
  Antisense strand to SEQ ID NO: 2321260
gucauacguaauauuccuc

SEQ ID NO: 2321262 - RNA, 19 nt, Artificial Sequence
  Description of Artificial Sequence: Synthetic oligonucleotide
  Sense strand starting at position 936 of SEQ ID NO: 1885165
gaauauuacguaugacagg

SEQ ID NO: 2321263 - RNA, 19 nt, Artificial Sequence
  Description of Artificial Sequence: Synthetic oligonucleotide
  Antisense strand to SEQ ID NO: 2321262
ccugucauacguaauauuc

SEQ ID NO: 2321264 - RNA, 19 nt, Artificial Sequence
  Description of Artificial Sequence: Synthetic oligonucleotide
  Sense strand starting at position 941 of SEQ ID NO: 1885165
uuacguaugacagggaaga

SEQ ID NO: 2321265 - RNA, 19 nt, Artificial Sequence
  Description of Artificial Sequence: Synthetic oligonucleotide
  Antisense strand to SEQ ID NO: 2321264
ucuucccugucauacguaa

SEQ ID NO: 2321266 - RNA, 19 nt, Artificial Sequence
  Description of Artificial Sequence: Synthetic oligonucleotide
  Sense strand starting at position 1045 of SEQ ID NO: 1885165
agaagaaaugccugaacuu

SEQ ID NO: 2321267 - RNA, 19 nt, Artificial Sequence
  Description of Artificial Sequence: Synthetic oligonucleotide
  Antisense strand to SEQ ID NO: 2321266
aaguucaggcauuucuucu

SEQ ID NO: 2321268 - RNA, 19 nt, Artificial Sequence
  Description of Artificial Sequence: Synthetic oligonucleotide
  Sense strand starting at position 1282 of SEQ ID NO: 1885165
uggcuaucuccggauggua

SEQ ID NO: 2321269 - RNA, 19 nt, Artificial Sequence
  Description of Artificial Sequence: Synthetic oligonucleotide
  Antisense strand to SEQ ID NO: 2321268
uaccauccggagauagcca

SEQ ID NO: 2321270 - RNA, 19 nt, Artificial Sequence
  Description of Artificial Sequence: Synthetic oligonucleotide
  Sense strand starting at position 1465 of SEQ ID NO: 1885165
auuuaagugacguguuaac

SEQ ID NO: 2321271 - RNA, 19 nt, Artificial Sequence
  Description of Artificial Sequence: Synthetic oligonucleotide
  Antisense strand to SEQ ID NO: 2321270
guuaacacgucacuuaaau

SEQ ID NO: 2321272 - RNA, 19 nt, Artificial Sequence
  Description of Artificial Sequence: Synthetic oligonucleotide
  Sense strand starting at position 1508 of SEQ ID NO: 1885165
aguagaaacuaagaugaga

SEQ ID NO: 2321273 - RNA, 19 nt, Artificial Sequence
  Description of Artificial Sequence: Synthetic oligonucleotide
  Antisense strand to SEQ ID NO: 2321272
ucucaucuuaguuucuacu

SEQ ID NO: 2321274 - RNA, 19 nt, Artificial Sequence
  Description of Artificial Sequence: Synthetic oligonucleotide
  Sense strand starting at position 1619 of SEQ ID NO: 1885165
ugaauaauuuaugacagac

SEQ ID NO: 2321275 - RNA, 19 nt, Artificial Sequence
  Description of Artificial Sequence: Synthetic oligonucleotide
  Antisense strand to SEQ ID NO: 2321274
gucugucauaaauuauuca

SEQ ID NO: 2321276 - RNA, 19 nt, Artificial Sequence
  Description of Artificial Sequence: Synthetic oligonucleotide
  Sense strand starting at position 1635 of SEQ ID NO: 1885165
gacuaacuggagugugaaa

SEQ ID NO: 2321277 - RNA, 19 nt, Artificial Sequence
  Description of Artificial Sequence: Synthetic oligonucleotide
  Antisense strand to SEQ ID NO: 2321276
uuucacacuccaguuaguc

SEQ ID NO: 2321278 - RNA, 19 nt, Artificial Sequence
  Description of Artificial Sequence: Synthetic oligonucleotide
  Sense strand starting at position 1791 of SEQ ID NO: 1885165
ugcucauuggccugagaaa

SEQ ID NO: 2321279 - RNA, 19 nt, Artificial Sequence
  Description of Artificial Sequence: Synthetic oligonucleotide
  Antisense strand to SEQ ID NO: 2321278
uuucucaggccaaugagca

SEQ ID NO: 2321280 - RNA, 19 nt, Artificial Sequence
  Description of Artificial Sequence: Synthetic oligonucleotide
  Sense strand starting at position 1792 of SEQ ID NO: 1885165
gcucauuggccugagaaau

SEQ ID NO: 2321281 - RNA, 19 nt, Artificial Sequence
  Description of Artificial Sequence: Synthetic oligonucleotide
  Antisense strand to SEQ ID NO: 2321280
auuucucaggccaaugagc

SEQ ID NO: 2321282 - RNA, 19 nt, Artificial Sequence
  Description of Artificial Sequence: Synthetic oligonucleotide
  Sense strand starting at position 2062 of SEQ ID NO: 1885165
gccaauugugcguuacuau

SEQ ID NO: 2321283 - RNA, 19 nt, Artificial Sequence
  Description of Artificial Sequence: Synthetic oligonucleotide
  Antisense strand to SEQ ID NO: 2321282
auaguaacgcacaauuggc

SEQ ID NO: 2321284 - RNA, 19 nt, Artificial Sequence
  Description of Artificial Sequence: Synthetic oligonucleotide
  Sense strand starting at position 2104 of SEQ ID NO: 1885165
cggccuuccagccaauaga

SEQ ID NO: 2321285 - RNA, 19 nt, Artificial Sequence
  Description of Artificial Sequence: Synthetic oligonucleotide
  Antisense strand to SEQ ID NO: 2321284
ucuauuggcuggaaggccg

SEQ ID NO: 2321286 - RNA, 19 nt, Artificial Sequence
  Description of Artificial Sequence: Synthetic oligonucleotide
  Sense strand starting at position 2575 of SEQ ID NO: 1885165
gugagaucccaguacagug

SEQ ID NO: 2321287 - RNA, 19 nt, Artificial Sequence
  Description of Artificial Sequence: Synthetic oligonucleotide
  Antisense strand to SEQ ID NO: 2321286
cacuguacugggaucucac

SEQ ID NO: 2321288 - RNA, 19 nt, Artificial Sequence
  Description of Artificial Sequence: Synthetic oligonucleotide
  Sense strand starting at position 2838 of SEQ ID NO: 1885165
uugaaucauccgugugaag

SEQ ID NO: 2321289 - RNA, 19 nt, Artificial Sequence
  Description of Artificial Sequence: Synthetic oligonucleotide
  Antisense strand to SEQ ID NO: 2321288
cuucacacggaugauucaa

SEQ ID NO: 2321290 - RNA, 19 nt, Artificial Sequence
  Description of Artificial Sequence: Synthetic oligonucleotide
  Sense strand starting at position 2840 of SEQ ID NO: 1885165
gaaucauccgugugaagag

SEQ ID NO: 2321291 - RNA, 19 nt, Artificial Sequence
  Description of Artificial Sequence: Synthetic oligonucleotide
  Antisense strand to SEQ ID NO: 2321290
cucuucacacggaugauuc

SEQ ID NO: 2321292 - RNA, 19 nt, Artificial Sequence
  Description of Artificial Sequence: Synthetic oligonucleotide
  Sense strand starting at position 3006 of SEQ ID NO: 1885165
ugcucugagccagaucaga

SEQ ID NO: 2321293 - RNA, 19 nt, Artificial Sequence
  Description of Artificial Sequence: Synthetic oligonucleotide
  Antisense strand to SEQ ID NO: 2321292
ucugaucuggcucagagca

SEQ ID NO: 2321294 - RNA, 19 nt, Artificial Sequence
  Description of Artificial Sequence: Synthetic oligonucleotide
  Sense strand starting at position 3408 of SEQ ID NO: 1885165
gaaguuaguuaccuggaga

SEQ ID NO: 2321295 - RNA, 19 nt, Artificial Sequence
  Description of Artificial Sequence: Synthetic oligonucleotide
  Antisense strand to SEQ ID NO: 2321294
ucuccagguaacuaacuuc

SEQ ID NO: 2321296 - RNA, 19 nt, Artificial Sequence
  Description of Artificial Sequence: Synthetic oligonucleotide
  Sense strand starting at position 3411 of SEQ ID NO: 1885165
guuaguuaccuggagaagu

SEQ ID NO: 2321297 - RNA, 19 nt, Artificial Sequence
  Description of Artificial Sequence: Synthetic oligonucleotide
  Antisense strand to SEQ ID NO: 2321296
acuucuccagguaacuaac

SEQ ID NO: 2321298 - RNA, 19 nt, Artificial Sequence
  Description of Artificial Sequence: Synthetic oligonucleotide
  Sense strand starting at position 3441 of SEQ ID NO: 1885165
uggugcuuggaccagauau

SEQ ID NO: 2321299 - RNA, 19 nt, Artificial Sequence
  Description of Artificial Sequence: Synthetic oligonucleotide
  Antisense strand to SEQ ID NO: 2321298
auaucugguccaagcacca

SEQ ID NO: 2321300 - RNA, 19 nt, Artificial Sequence
  Description of Artificial Sequence: Synthetic oligonucleotide
  Sense strand starting at position 3447 of SEQ ID NO: 1885165
uuggaccagauaugguaua

SEQ ID NO: 2321301 - RNA, 19 nt, Artificial Sequence
  Description of Artificial Sequence: Synthetic oligonucleotide
  Antisense strand to SEQ ID NO: 2321300
uauaccauaucugguccaa

SEQ ID NO: 2321302 - RNA, 19 nt, Artificial Sequence
  Description of Artificial Sequence: Synthetic oligonucleotide
  Sense strand starting at position 3464 of SEQ ID NO: 1885165
uaucgagguccuggaacuu

SEQ ID NO: 2321303 - RNA, 19 nt, Artificial Sequence
  Description of Artificial Sequence: Synthetic oligonucleotide
  Antisense strand to SEQ ID NO: 2321302
aaguuccaggaccucgaua

SEQ ID NO: 2321304 - RNA, 19 nt, Artificial Sequence
  Description of Artificial Sequence: Synthetic oligonucleotide
  Sense strand starting at position 3674 of SEQ ID NO: 1885165
aguugauacagugguuaac

SEQ ID NO: 2321305 - RNA, 19 nt, Artificial Sequence
  Description of Artificial Sequence: Synthetic oligonucleotide
  Antisense strand to SEQ ID NO: 2321304
guuaaccacuguaucaacu

SEQ ID NO: 2321306 - RNA, 19 nt, Artificial Sequence
  Description of Artificial Sequence: Synthetic oligonucleotide
  Sense strand starting at position 3676 of SEQ ID NO: 1885165
uugauacagugguuaacaa

SEQ ID NO: 2321307 - RNA, 19 nt, Artificial Sequence
  Description of Artificial Sequence: Synthetic oligonucleotide
  Antisense strand to SEQ ID NO: 2321306
uuguuaaccacuguaucaa

SEQ ID NO: 2321308 - RNA, 19 nt, Artificial Sequence
  Description of Artificial Sequence: Synthetic oligonucleotide
  Sense strand starting at position 3683 of SEQ ID NO: 1885165
agugguuaacaagacaugu

SEQ ID NO: 2321309 - RNA, 19 nt, Artificial Sequence
  Description of Artificial Sequence: Synthetic oligonucleotide
  Antisense strand to SEQ ID NO: 2321308
acaugucuuguuaaccacu

SEQ ID NO: 2321310 - RNA, 19 nt, Artificial Sequence
  Description of Artificial Sequence: Synthetic oligonucleotide
  Sense strand starting at position 3741 of SEQ ID NO: 1885165
guuucauuuguaugaggug

SEQ ID NO: 2321311 - RNA, 19 nt, Artificial Sequence
  Description of Artificial Sequence: Synthetic oligonucleotide
  Antisense strand to SEQ ID NO: 2321310
caccucauacaaaugaaac

SEQ ID NO: 2321312 - RNA, 19 nt, Artificial Sequence
  Description of Artificial Sequence: Synthetic oligonucleotide
  Sense strand starting at position 3780 of SEQ ID NO: 1885165
aaaugagaucacuguaugu

SEQ ID NO: 2321313 - RNA, 19 nt, Artificial Sequence
  Description of Artificial Sequence: Synthetic oligonucleotide
  Antisense strand to SEQ ID NO: 2321312
acauacagugaucucauuu

SEQ ID NO: 2321314 - RNA, 19 nt, Artificial Sequence
  Description of Artificial Sequence: Synthetic oligonucleotide
  Sense strand starting at position 3812 of SEQ ID NO: 1885165
ucaguuuaacgauauaucu

SEQ ID NO: 2321315 - RNA, 19 nt, Artificial Sequence
  Description of Artificial Sequence: Synthetic oligonucleotide
  Antisense strand to SEQ ID NO: 2321314
agauauaucguuaaacuga

SEQ ID NO: 2321316 - RNA, 19 nt, Artificial Sequence
  Description of Artificial Sequence: Synthetic oligonucleotide
  Sense strand starting at position 3874 of SEQ ID NO: 1885165
acaguuuggacgcaucaua

SEQ ID NO: 2321317 - RNA, 19 nt, Artificial Sequence
  Description of Artificial Sequence: Synthetic oligonucleotide
  Antisense strand to SEQ ID NO: 2321316
uaugaugcguccaaacugu

SEQ ID NO: 2321318 - RNA, 19 nt, Artificial Sequence
  Description of Artificial Sequence: Synthetic oligonucleotide
  Sense strand starting at position 3915 of SEQ ID NO: 1885165
guggacguucuguuugcua

SEQ ID NO: 2321319 - RNA, 19 nt, Artificial Sequence
  Description of Artificial Sequence: Synthetic oligonucleotide
  Antisense strand to SEQ ID NO: 2321318
uagcaaacagaacguccac

SEQ ID NO: 2321320 - RNA, 19 nt, Artificial Sequence
  Description of Artificial Sequence: Synthetic oligonucleotide
  Sense strand starting at position 3956 of SEQ ID NO: 1885165
agugaacaucuuuguacau

SEQ ID NO: 2321321 - RNA, 19 nt, Artificial Sequence
  Description of Artificial Sequence: Synthetic oligonucleotide
  Antisense strand to SEQ ID NO: 2321320
auguacaaagauguucacu

SEQ ID NO: 2321322 - RNA, 19 nt, Artificial Sequence
  Description of Artificial Sequence: Synthetic oligonucleotide
  Sense strand starting at position 12 of SEQ ID NO: 1885166
ggaggcaccacuggauuaa

SEQ ID NO: 2321323 - RNA, 19 nt, Artificial Sequence
  Description of Artificial Sequence: Synthetic oligonucleotide
  Antisense strand to SEQ ID NO: 2321322
uuaauccaguggugccucc

SEQ ID NO: 2321324 - RNA, 19 nt, Artificial Sequence
  Description of Artificial Sequence: Synthetic oligonucleotide
  Sense strand starting at position 38 of SEQ ID NO: 1885166
aagugaccaucuguaauga

SEQ ID NO: 2321325 - RNA, 19 nt, Artificial Sequence
  Description of Artificial Sequence: Synthetic oligonucleotide
  Antisense strand to SEQ ID NO: 2321324
ucauuacagauggucacuu

SEQ ID NO: 2321326 - RNA, 19 nt, Artificial Sequence
  Description of Artificial Sequence: Synthetic oligonucleotide
  Sense strand starting at position 97 of SEQ ID NO: 1885166
cccaguauugugucguucu

SEQ ID NO: 2321327 - RNA, 19 nt, Artificial Sequence
  Description of Artificial Sequence: Synthetic oligonucleotide
  Antisense strand to SEQ ID NO: 2321326
agaacgacacaauacuggg

SEQ ID NO: 2321328 - RNA, 19 nt, Artificial Sequence
  Description of Artificial Sequence: Synthetic oligonucleotide
  Sense strand starting at position 99 of SEQ ID NO: 1885166
caguauugugucguucuca

SEQ ID NO: 2321329 - RNA, 19 nt, Artificial Sequence
  Description of Artificial Sequence: Synthetic oligonucleotide
  Antisense strand to SEQ ID NO: 2321328
ugagaacgacacaauacug

SEQ ID NO: 2321330 - RNA, 19 nt, Artificial Sequence
  Description of Artificial Sequence: Synthetic oligonucleotide
  Sense strand starting at position 108 of SEQ ID NO: 1885166
gucguucucaaccagggua

SEQ ID NO: 2321331 - RNA, 19 nt, Artificial Sequence
  Description of Artificial Sequence: Synthetic oligonucleotide
  Antisense strand to SEQ ID NO: 2321330
uacccugguugagaacgac

SEQ ID NO: 2321332 - RNA, 19 nt, Artificial Sequence
  Description of Artificial Sequence: Synthetic oligonucleotide
  Sense strand starting at position 111 of SEQ ID NO: 1885166
guucucaaccaggguagaa

SEQ ID NO: 2321333 - RNA, 19 nt, Artificial Sequence
  Description of Artificial Sequence: Synthetic oligonucleotide
  Antisense strand to SEQ ID NO: 2321332
uucuacccugguugagaac

SEQ ID NO: 2321334 - RNA, 19 nt, Artificial Sequence
  Description of Artificial Sequence: Synthetic oligonucleotide
  Sense strand starting at position 139 of SEQ ID NO: 1885166
uccuaaaguuuaguguaaa

SEQ ID NO: 2321335 - RNA, 19 nt, Artificial Sequence
  Description of Artificial Sequence: Synthetic oligonucleotide
  Antisense strand to SEQ ID NO: 2321334
uuuacacuaaacuuuagga

SEQ ID NO: 2321336 - RNA, 19 nt, Artificial Sequence
  Description of Artificial Sequence: Synthetic oligonucleotide
  Sense strand starting at position 204 of SEQ ID NO: 1885166
uacugacugccucgggaaa

SEQ ID NO: 2321337 - RNA, 19 nt, Artificial Sequence
  Description of Artificial Sequence: Synthetic oligonucleotide
  Antisense strand to SEQ ID NO: 2321336
uuucccgaggcagucagua

SEQ ID NO: 2321338 - RNA, 19 nt, Artificial Sequence
  Description of Artificial Sequence: Synthetic oligonucleotide
  Sense strand starting at position 205 of SEQ ID NO: 1885166
acugacugccucgggaaau

SEQ ID NO: 2321339 - RNA, 19 nt, Artificial Sequence
  Description of Artificial Sequence: Synthetic oligonucleotide
  Antisense strand to SEQ ID NO: 2321338
auuucccgaggcagucagu

SEQ ID NO: 2321340 - RNA, 19 nt, Artificial Sequence
  Description of Artificial Sequence: Synthetic oligonucleotide
  Sense strand starting at position 367 of SEQ ID NO: 1885166
gcccuugaggacugauuaa

SEQ ID NO: 2321341 - RNA, 19 nt, Artificial Sequence
  Description of Artificial Sequence: Synthetic oligonucleotide
  Antisense strand to SEQ ID NO: 2321340
uuaaucaguccucaagggc

SEQ ID NO: 2321342 - RNA, 19 nt, Artificial Sequence
  Description of Artificial Sequence: Synthetic oligonucleotide
  Sense strand starting at position 714 of SEQ ID NO: 1885166
uucugaaaugcacggugaa

SEQ ID NO: 2321343 - RNA, 19 nt, Artificial Sequence
  Description of Artificial Sequence: Synthetic oligonucleotide
  Antisense strand to SEQ ID NO: 2321342
uucaccgugcauuucagaa

SEQ ID NO: 2321344 - RNA, 19 nt, Artificial Sequence
  Description of Artificial Sequence: Synthetic oligonucleotide
  Sense strand starting at position 715 of SEQ ID NO: 1885166
ucugaaaugcacggugaaa

SEQ ID NO: 2321345 - RNA, 19 nt, Artificial Sequence
  Description of Artificial Sequence: Synthetic oligonucleotide
  Antisense strand to SEQ ID NO: 2321344
uuucaccgugcauuucaga

SEQ ID NO: 2321346 - RNA, 19 nt, Artificial Sequence
  Description of Artificial Sequence: Synthetic oligonucleotide
  Sense strand starting at position 717 of SEQ ID NO: 1885166
ugaaaugcacggugaaauc

SEQ ID NO: 2321347 - RNA, 19 nt, Artificial Sequence
  Description of Artificial Sequence: Synthetic oligonucleotide
  Antisense strand to SEQ ID NO: 2321346
gauuucaccgugcauuuca

SEQ ID NO: 2321348 - RNA, 19 nt, Artificial Sequence
  Description of Artificial Sequence: Synthetic oligonucleotide
  Sense strand starting at position 738 of SEQ ID NO: 1885166
auuuaagauuucugagagc

SEQ ID NO: 2321349 - RNA, 19 nt, Artificial Sequence
  Description of Artificial Sequence: Synthetic oligonucleotide
  Antisense strand to SEQ ID NO: 2321348
gcucucagaaaucuuaaau

SEQ ID NO: 2321350 - RNA, 19 nt, Artificial Sequence
  Description of Artificial Sequence: Synthetic oligonucleotide
  Sense strand starting at position 741 of SEQ ID NO: 1885166
uaagauuucugagagcaag

SEQ ID NO: 2321351 - RNA, 19 nt, Artificial Sequence
  Description of Artificial Sequence: Synthetic oligonucleotide
  Antisense strand to SEQ ID NO: 2321350
cuugcucucagaaaucuua

SEQ ID NO: 2321352 - RNA, 19 nt, Artificial Sequence
  Description of Artificial Sequence: Synthetic oligonucleotide
  Sense strand starting at position 783 of SEQ ID NO: 1885166
ggaaacgguagcuauccaa

SEQ ID NO: 2321353 - RNA, 19 nt, Artificial Sequence
  Description of Artificial Sequence: Synthetic oligonucleotide
  Antisense strand to SEQ ID NO: 2321352
uuggauagcuaccguuucc

SEQ ID NO: 2321354 - RNA, 19 nt, Artificial Sequence
  Description of Artificial Sequence: Synthetic oligonucleotide
  Sense strand starting at position 914 of SEQ ID NO: 1885166
ugcaguaauuuagauccaa

SEQ ID NO: 2321355 - RNA, 19 nt, Artificial Sequence
  Description of Artificial Sequence: Synthetic oligonucleotide
  Antisense strand to SEQ ID NO: 2321354
uuggaucuaaauuacugca

SEQ ID NO: 2321356 - RNA, 19 nt, Artificial Sequence
  Description of Artificial Sequence: Synthetic oligonucleotide
  Sense strand starting at position 1193 of SEQ ID NO: 1885166
ggcgacuucgcggccuaau

SEQ ID NO: 2321357 - RNA, 19 nt, Artificial Sequence
  Description of Artificial Sequence: Synthetic oligonucleotide
  Antisense strand to SEQ ID NO: 2321356
auuaggccgcgaagucgcc

SEQ ID NO: 2321358 - RNA, 19 nt, Artificial Sequence
  Description of Artificial Sequence: Synthetic oligonucleotide
  Sense strand starting at position 1194 of SEQ ID NO: 1885166
gcgacuucgcggccuaaua

SEQ ID NO: 2321359 - RNA, 19 nt, Artificial Sequence
  Description of Artificial Sequence: Synthetic oligonucleotide
  Antisense strand to SEQ ID NO: 2321358
uauuaggccgcgaagucgc

SEQ ID NO: 2321360 - RNA, 19 nt, Artificial Sequence
  Description of Artificial Sequence: Synthetic oligonucleotide
  Sense strand starting at position 2764 of SEQ ID NO: 1885166
ggugaaguuguccaguaaa

SEQ ID NO: 2321361 - RNA, 19 nt, Artificial Sequence
  Description of Artificial Sequence: Synthetic oligonucleotide
  Antisense strand to SEQ ID NO: 2321360
uuuacuggacaacuucacc

SEQ ID NO: 2321362 - RNA, 19 nt, Artificial Sequence
  Description of Artificial Sequence: Synthetic oligonucleotide
  Sense strand starting at position 2839 of SEQ ID NO: 1885166
agcccuaguuccuuacaga

SEQ ID NO: 2321363 - RNA, 19 nt, Artificial Sequence
  Description of Artificial Sequence: Synthetic oligonucleotide
  Antisense strand to SEQ ID NO: 2321362
ucuguaaggaacuagggcu

SEQ ID NO: 2321364 - RNA, 19 nt, Artificial Sequence
  Description of Artificial Sequence: Synthetic oligonucleotide
  Sense strand starting at position 2840 of SEQ ID NO: 1885166
gcccuaguuccuuacagag

SEQ ID NO: 2321365 - RNA, 19 nt, Artificial Sequence
  Description of Artificial Sequence: Synthetic oligonucleotide
  Antisense strand to SEQ ID NO: 2321364
cucuguaaggaacuagggc

SEQ ID NO: 2321366 - RNA, 19 nt, Artificial Sequence
  Description of Artificial Sequence: Synthetic oligonucleotide
  Sense strand starting at position 2860 of SEQ ID NO: 1885166
aggacagauuccucgguuu

SEQ ID NO: 2321367 - RNA, 19 nt, Artificial Sequence
  Description of Artificial Sequence: Synthetic oligonucleotide
  Antisense strand to SEQ ID NO: 2321366
aaaccgaggaaucuguccu

SEQ ID NO: 2321368 - RNA, 19 nt, Artificial Sequence
  Description of Artificial Sequence: Synthetic oligonucleotide
  Sense strand starting at position 2915 of SEQ ID NO: 1885166
gggcuaggacuauacguuu

SEQ ID NO: 2321369 - RNA, 19 nt, Artificial Sequence
  Description of Artificial Sequence: Synthetic oligonucleotide
  Antisense strand to SEQ ID NO: 2321368
aaacguauaguccuagccc

SEQ ID NO: 2321370 - RNA, 19 nt, Artificial Sequence
  Description of Artificial Sequence: Synthetic oligonucleotide
  Sense strand starting at position 2934 of SEQ ID NO: 1885166
gcaaguuuaagagauaagc

SEQ ID NO: 2321371 - RNA, 19 nt, Artificial Sequence
  Description of Artificial Sequence: Synthetic oligonucleotide
  Antisense strand to SEQ ID NO: 2321370
gcuuaucucuuaaacuugc

SEQ ID NO: 2321372 - RNA, 19 nt, Artificial Sequence
  Description of Artificial Sequence: Synthetic oligonucleotide
  Sense strand starting at position 3081 of SEQ ID NO: 1885166
uuaugaaagcaucaguaau

SEQ ID NO: 2321373 - RNA, 19 nt, Artificial Sequence
  Description of Artificial Sequence: Synthetic oligonucleotide
  Antisense strand to SEQ ID NO: 2321372
auuacugaugcuuucauaa

SEQ ID NO: 2321374 - RNA, 19 nt, Artificial Sequence
  Description of Artificial Sequence: Synthetic oligonucleotide
  Sense strand starting at position 3255 of SEQ ID NO: 1885166
gcaauuagaugucuaggga

SEQ ID NO: 2321375 - RNA, 19 nt, Artificial Sequence
  Description of Artificial Sequence: Synthetic oligonucleotide
  Antisense strand to SEQ ID NO: 2321374
ucccuagacaucuaauugc

SEQ ID NO: 2321376 - RNA, 19 nt, Artificial Sequence
  Description of Artificial Sequence: Synthetic oligonucleotide
  Sense strand starting at position 3258 of SEQ ID NO: 1885166
auuagaugucuagggaagu

SEQ ID NO: 2321377 - RNA, 19 nt, Artificial Sequence
  Description of Artificial Sequence: Synthetic oligonucleotide
  Antisense strand to SEQ ID NO: 2321376
acuucccuagacaucuaau

SEQ ID NO: 2321378 - RNA, 19 nt, Artificial Sequence
  Description of Artificial Sequence: Synthetic oligonucleotide
  Sense strand starting at position 3274 of SEQ ID NO: 1885166
aguacugaugcacgagaaa

SEQ ID NO: 2321379 - RNA, 19 nt, Artificial Sequence
  Description of Artificial Sequence: Synthetic oligonucleotide
  Antisense strand to SEQ ID NO: 2321378
uuucucgugcaucaguacu

SEQ ID NO: 2321380 - RNA, 19 nt, Artificial Sequence
  Description of Artificial Sequence: Synthetic oligonucleotide
  Sense strand starting at position 3299 of SEQ ID NO: 1885166
ugcagcauugguuaauaaa

SEQ ID NO: 2321381 - RNA, 19 nt, Artificial Sequence
  Description of Artificial Sequence: Synthetic oligonucleotide
  Antisense strand to SEQ ID NO: 2321380
uuuauuaaccaaugcugca

SEQ ID NO: 2321382 - RNA, 19 nt, Artificial Sequence
  Description of Artificial Sequence: Synthetic oligonucleotide
  Sense strand starting at position 3411 of SEQ ID NO: 1885166
uguugaguacaaugcugaa

SEQ ID NO: 2321383 - RNA, 19 nt, Artificial Sequence
  Description of Artificial Sequence: Synthetic oligonucleotide
  Antisense strand to SEQ ID NO: 2321382
uucagcauuguacucaaca

SEQ ID NO: 2321384 - RNA, 19 nt, Artificial Sequence
  Description of Artificial Sequence: Synthetic oligonucleotide
  Sense strand starting at position 3526 of SEQ ID NO: 1885166
uaucuucucccagggaguu

SEQ ID NO: 2321385 - RNA, 19 nt, Artificial Sequence
  Description of Artificial Sequence: Synthetic oligonucleotide
  Antisense strand to SEQ ID NO: 2321384
aacucccugggagaagaua

SEQ ID NO: 2321386 - RNA, 19 nt, Artificial Sequence
  Description of Artificial Sequence: Synthetic oligonucleotide
  Sense strand starting at position 3527 of SEQ ID NO: 1885166
aucuucucccagggaguuu

SEQ ID NO: 2321387 - RNA, 19 nt, Artificial Sequence
  Description of Artificial Sequence: Synthetic oligonucleotide
  Antisense strand to SEQ ID NO: 2321386
aaacucccugggagaagau

SEQ ID NO: 2321388 - RNA, 19 nt, Artificial Sequence
  Description of Artificial Sequence: Synthetic oligonucleotide
  Sense strand starting at position 3538 of SEQ ID NO: 1885166
gggaguuuguaaucuguua

SEQ ID NO: 2321389 - RNA, 19 nt, Artificial Sequence
  Description of Artificial Sequence: Synthetic oligonucleotide
  Antisense strand to SEQ ID NO: 2321388
uaacagauuacaaacuccc

SEQ ID NO: 2321390 - RNA, 19 nt, Artificial Sequence
  Description of Artificial Sequence: Synthetic oligonucleotide
  Sense strand starting at position 3551 of SEQ ID NO: 1885166
cuguuagugaagcaggaaa

SEQ ID NO: 2321391 - RNA, 19 nt, Artificial Sequence
  Description of Artificial Sequence: Synthetic oligonucleotide
  Antisense strand to SEQ ID NO: 2321390
uuuccugcuucacuaacag

SEQ ID NO: 2321392 - RNA, 19 nt, Artificial Sequence
  Description of Artificial Sequence: Synthetic oligonucleotide
  Sense strand starting at position 3639 of SEQ ID NO: 1885166
uuguuuacucuagaacgua

SEQ ID NO: 2321393 - RNA, 19 nt, Artificial Sequence
  Description of Artificial Sequence: Synthetic oligonucleotide
  Antisense strand to SEQ ID NO: 2321392
uacguucuagaguaaacaa

SEQ ID NO: 2321394 - RNA, 19 nt, Artificial Sequence
  Description of Artificial Sequence: Synthetic oligonucleotide
  Sense strand starting at position 3820 of SEQ ID NO: 1885166
gcauucugggaauggugaa

SEQ ID NO: 2321395 - RNA, 19 nt, Artificial Sequence
  Description of Artificial Sequence: Synthetic oligonucleotide
  Antisense strand to SEQ ID NO: 2321394
uucaccauucccagaaugc

SEQ ID NO: 2321396 - RNA, 19 nt, Artificial Sequence
  Description of Artificial Sequence: Synthetic oligonucleotide
  Sense strand starting at position 3838 of SEQ ID NO: 1885166
aacagagauggugguaagu

SEQ ID NO: 2321397 - RNA, 19 nt, Artificial Sequence
  Description of Artificial Sequence: Synthetic oligonucleotide
  Antisense strand to SEQ ID NO: 2321396
acuuaccaccaucucuguu

SEQ ID NO: 2321398 - RNA, 19 nt, Artificial Sequence
  Description of Artificial Sequence: Synthetic oligonucleotide
  Sense strand starting at position 3889 of SEQ ID NO: 1885166
uguggcagagcuuagaaua

SEQ ID NO: 2321399 - RNA, 19 nt, Artificial Sequence
  Description of Artificial Sequence: Synthetic oligonucleotide
  Antisense strand to SEQ ID NO: 2321398
uauucuaagcucugccaca

SEQ ID NO: 2321400 - RNA, 19 nt, Artificial Sequence
  Description of Artificial Sequence: Synthetic oligonucleotide
  Sense strand starting at position 3922 of SEQ ID NO: 1885166
guuccaacccacuguuaga

SEQ ID NO: 2321401 - RNA, 19 nt, Artificial Sequence
  Description of Artificial Sequence: Synthetic oligonucleotide
  Antisense strand to SEQ ID NO: 2321400
ucuaacaguggguuggaac

SEQ ID NO: 2321402 - RNA, 19 nt, Artificial Sequence
  Description of Artificial Sequence: Synthetic oligonucleotide
  Sense strand starting at position 1 of SEQ ID NO: 1885167
ccaaacaucuuccauggga

SEQ ID NO: 2321403 - RNA, 19 nt, Artificial Sequence
  Description of Artificial Sequence: Synthetic oligonucleotide
  Antisense strand to SEQ ID NO: 2321402
ucccauggaagauguuugg

SEQ ID NO: 2321404 - RNA, 19 nt, Artificial Sequence
  Description of Artificial Sequence: Synthetic oligonucleotide
  Sense strand starting at position 16 of SEQ ID NO: 1885167
gggagaaauuggucacgug

SEQ ID NO: 2321405 - RNA, 19 nt, Artificial Sequence
  Description of Artificial Sequence: Synthetic oligonucleotide
  Antisense strand to SEQ ID NO: 2321404
cacgugaccaauuucuccc

SEQ ID NO: 2321406 - RNA, 19 nt, Artificial Sequence
  Description of Artificial Sequence: Synthetic oligonucleotide
  Sense strand starting at position 17 of SEQ ID NO: 1885167
ggagaaauuggucacguga

SEQ ID NO: 2321407 - RNA, 19 nt, Artificial Sequence
  Description of Artificial Sequence: Synthetic oligonucleotide
  Antisense strand to SEQ ID NO: 2321406
ucacgugaccaauuucucc

SEQ ID NO: 2321408 - RNA, 19 nt, Artificial Sequence
  Description of Artificial Sequence: Synthetic oligonucleotide
  Sense strand starting at position 197 of SEQ ID NO: 1885167
agcacuuuccuguagccau

SEQ ID NO: 2321409 - RNA, 19 nt, Artificial Sequence
  Description of Artificial Sequence: Synthetic oligonucleotide
  Antisense strand to SEQ ID NO: 2321408
auggcuacaggaaagugcu

SEQ ID NO: 2321410 - RNA, 19 nt, Artificial Sequence
  Description of Artificial Sequence: Synthetic oligonucleotide
  Sense strand starting at position 220 of SEQ ID NO: 1885167
augccauggccgugaguga

SEQ ID NO: 2321411 - RNA, 19 nt, Artificial Sequence
  Description of Artificial Sequence: Synthetic oligonucleotide
  Antisense strand to SEQ ID NO: 2321410
ucacucacggccauggcau

SEQ ID NO: 2321412 - RNA, 19 nt, Artificial Sequence
  Description of Artificial Sequence: Synthetic oligonucleotide
  Sense strand starting at position 541 of SEQ ID NO: 1885167
ggagaaaguucugcuggca

SEQ ID NO: 2321413 - RNA, 19 nt, Artificial Sequence
  Description of Artificial Sequence: Synthetic oligonucleotide
  Antisense strand to SEQ ID NO: 2321412
ugccagcagaacuuucucc

SEQ ID NO: 2321414 - RNA, 19 nt, Artificial Sequence
  Description of Artificial Sequence: Synthetic oligonucleotide
  Sense strand starting at position 544 of SEQ ID NO: 1885167
gaaaguucugcuggcauca

SEQ ID NO: 2321415 - RNA, 19 nt, Artificial Sequence
  Description of Artificial Sequence: Synthetic oligonucleotide
  Antisense strand to SEQ ID NO: 2321414
ugaugccagcagaacuuuc

SEQ ID NO: 2321416 - RNA, 19 nt, Artificial Sequence
  Description of Artificial Sequence: Synthetic oligonucleotide
  Sense strand starting at position 868 of SEQ ID NO: 1885167
gucugaguugugcagagcu

SEQ ID NO: 2321417 - RNA, 19 nt, Artificial Sequence
  Description of Artificial Sequence: Synthetic oligonucleotide
  Antisense strand to SEQ ID NO: 2321416
agcucugcacaacucagac

SEQ ID NO: 2321418 - RNA, 19 nt, Artificial Sequence
  Description of Artificial Sequence: Synthetic oligonucleotide
  Sense strand starting at position 969 of SEQ ID NO: 1885167
gaagacaacuguccucaga

SEQ ID NO: 2321419 - RNA, 19 nt, Artificial Sequence
  Description of Artificial Sequence: Synthetic oligonucleotide
  Antisense strand to SEQ ID NO: 2321418
ucugaggacaguugucuuc

SEQ ID NO: 2321420 - RNA, 19 nt, Artificial Sequence
  Description of Artificial Sequence: Synthetic oligonucleotide
  Sense strand starting at position 971 of SEQ ID NO: 1885167
agacaacuguccucagaug

SEQ ID NO: 2321421 - RNA, 19 nt, Artificial Sequence
  Description of Artificial Sequence: Synthetic oligonucleotide
  Antisense strand to SEQ ID NO: 2321420
caucugaggacaguugucu

SEQ ID NO: 2321422 - RNA, 19 nt, Artificial Sequence
  Description of Artificial Sequence: Synthetic oligonucleotide
  Sense strand starting at position 1185 of SEQ ID NO: 1885167
gagccauccugagauggaa

SEQ ID NO: 2321423 - RNA, 19 nt, Artificial Sequence
  Description of Artificial Sequence: Synthetic oligonucleotide
  Antisense strand to SEQ ID NO: 2321422
uuccaucucaggauggcuc

SEQ ID NO: 2321424 - RNA, 19 nt, Artificial Sequence
  Description of Artificial Sequence: Synthetic oligonucleotide
  Sense strand starting at position 1371 of SEQ ID NO: 1885167
gaggaauggccauguccuu

SEQ ID NO: 2321425 - RNA, 19 nt, Artificial Sequence
  Description of Artificial Sequence: Synthetic oligonucleotide
  Antisense strand to SEQ ID NO: 2321424
aaggacauggccauuccuc

SEQ ID NO: 2321426 - RNA, 19 nt, Artificial Sequence
  Description of Artificial Sequence: Synthetic oligonucleotide
  Sense strand starting at position 1552 of SEQ ID NO: 1885167
cccaguccuucugcugaaa

SEQ ID NO: 2321427 - RNA, 19 nt, Artificial Sequence
  Description of Artificial Sequence: Synthetic oligonucleotide
  Antisense strand to SEQ ID NO: 2321426
uuucagcagaaggacuggg

SEQ ID NO: 2321428 - RNA, 19 nt, Artificial Sequence
  Description of Artificial Sequence: Synthetic oligonucleotide
  Sense strand starting at position 1697 of SEQ ID NO: 1885167
cugugucaccaagaguguu

SEQ ID NO: 2321429 - RNA, 19 nt, Artificial Sequence
  Description of Artificial Sequence: Synthetic oligonucleotide
  Antisense strand to SEQ ID NO: 2321428
aacacucuuggugacacag

SEQ ID NO: 2321430 - RNA, 19 nt, Artificial Sequence
  Description of Artificial Sequence: Synthetic oligonucleotide
  Sense strand starting at position 1736 of SEQ ID NO: 1885167
gcagcaugauggcuuugau

SEQ ID NO: 2321431 - RNA, 19 nt, Artificial Sequence
  Description of Artificial Sequence: Synthetic oligonucleotide
  Antisense strand to SEQ ID NO: 2321430
aucaaagccaucaugcugc

SEQ ID NO: 2321432 - RNA, 19 nt, Artificial Sequence
  Description of Artificial Sequence: Synthetic oligonucleotide
  Sense strand starting at position 1739 of SEQ ID NO: 1885167
gcaugauggcuuugaucug

SEQ ID NO: 2321433 - RNA, 19 nt, Artificial Sequence
  Description of Artificial Sequence: Synthetic oligonucleotide
  Antisense strand to SEQ ID NO: 2321432
cagaucaaagccaucaugc

SEQ ID NO: 2321434 - RNA, 19 nt, Artificial Sequence
  Description of Artificial Sequence: Synthetic oligonucleotide
  Sense strand starting at position 1893 of SEQ ID NO: 1885167
ccgagugcuucuccaucaa

SEQ ID NO: 2321435 - RNA, 19 nt, Artificial Sequence
  Description of Artificial Sequence: Synthetic oligonucleotide
  Antisense strand to SEQ ID NO: 2321434
uugauggagaagcacucgg

SEQ ID NO: 2321436 - RNA, 19 nt, Artificial Sequence
  Description of Artificial Sequence: Synthetic oligonucleotide
  Sense strand starting at position 1897 of SEQ ID NO: 1885167
gugcuucuccaucaacagu

SEQ ID NO: 2321437 - RNA, 19 nt, Artificial Sequence
  Description of Artificial Sequence: Synthetic oligonucleotide
  Antisense strand to SEQ ID NO: 2321436
acuguugauggagaagcac

SEQ ID NO: 2321438 - RNA, 19 nt, Artificial Sequence
  Description of Artificial Sequence: Synthetic oligonucleotide
  Sense strand starting at position 2004 of SEQ ID NO: 1885167
uaauaugauuccuggguga

SEQ ID NO: 2321439 - RNA, 19 nt, Artificial Sequence
  Description of Artificial Sequence: Synthetic oligonucleotide
  Antisense strand to SEQ ID NO: 2321438
ucacccaggaaucauauua

SEQ ID NO: 2321440 - RNA, 19 nt, Artificial Sequence
  Description of Artificial Sequence: Synthetic oligonucleotide
  Sense strand starting at position 2006 of SEQ ID NO: 1885167
auaugauuccugggugagu

SEQ ID NO: 2321441 - RNA, 19 nt, Artificial Sequence
  Description of Artificial Sequence: Synthetic oligonucleotide
  Antisense strand to SEQ ID NO: 2321440
acucacccaggaaucauau

SEQ ID NO: 2321442 - RNA, 19 nt, Artificial Sequence
  Description of Artificial Sequence: Synthetic oligonucleotide
  Sense strand starting at position 2007 of SEQ ID NO: 1885167
uaugauuccugggugaguu

SEQ ID NO: 2321443 - RNA, 19 nt, Artificial Sequence
  Description of Artificial Sequence: Synthetic oligonucleotide
  Antisense strand to SEQ ID NO: 2321442
aacucacccaggaaucaua

SEQ ID NO: 2321444 - RNA, 19 nt, Artificial Sequence
  Description of Artificial Sequence: Synthetic oligonucleotide
  Sense strand starting at position 2100 of SEQ ID NO: 1885167
gaagaaaugccucggaugu

SEQ ID NO: 2321445 - RNA, 19 nt, Artificial Sequence
  Description of Artificial Sequence: Synthetic oligonucleotide
  Antisense strand to SEQ ID NO: 2321444
acauccgaggcauuucuuc

SEQ ID NO: 2321446 - RNA, 19 nt, Artificial Sequence
  Description of Artificial Sequence: Synthetic oligonucleotide
  Sense strand starting at position 2101 of SEQ ID NO: 1885167
aagaaaugccucggaugug

SEQ ID NO: 2321447 - RNA, 19 nt, Artificial Sequence
  Description of Artificial Sequence: Synthetic oligonucleotide
  Antisense strand to SEQ ID NO: 2321446
cacauccgaggcauuucuu

SEQ ID NO: 2321448 - RNA, 19 nt, Artificial Sequence
  Description of Artificial Sequence: Synthetic oligonucleotide
  Sense strand starting at position 2221 of SEQ ID NO: 1885167
gggcauuguucucugagug

SEQ ID NO: 2321449 - RNA, 19 nt, Artificial Sequence
  Description of Artificial Sequence: Synthetic oligonucleotide
  Antisense strand to SEQ ID NO: 2321448
cacucagagaacaaugccc

SEQ ID NO: 2321450 - RNA, 19 nt, Artificial Sequence
  Description of Artificial Sequence: Synthetic oligonucleotide
  Sense strand starting at position 2397 of SEQ ID NO: 1885167
cugggaacuuguucucuga

SEQ ID NO: 2321451 - RNA, 19 nt, Artificial Sequence
  Description of Artificial Sequence: Synthetic oligonucleotide
  Antisense strand to SEQ ID NO: 2321450
ucagagaacaaguucccag

SEQ ID NO: 2321452 - RNA, 19 nt, Artificial Sequence
  Description of Artificial Sequence: Synthetic oligonucleotide
  Sense strand starting at position 2399 of SEQ ID NO: 1885167
gggaacuuguucucugaag

SEQ ID NO: 2321453 - RNA, 19 nt, Artificial Sequence
  Description of Artificial Sequence: Synthetic oligonucleotide
  Antisense strand to SEQ ID NO: 2321452
cuucagagaacaaguuccc

SEQ ID NO: 2321454 - RNA, 19 nt, Artificial Sequence
  Description of Artificial Sequence: Synthetic oligonucleotide
  Sense strand starting at position 2401 of SEQ ID NO: 1885167
gaacuuguucucugaagga

SEQ ID NO: 2321455 - RNA, 19 nt, Artificial Sequence
  Description of Artificial Sequence: Synthetic oligonucleotide
  Antisense strand to SEQ ID NO: 2321454
uccuucagagaacaaguuc

SEQ ID NO: 2321456 - RNA, 19 nt, Artificial Sequence
  Description of Artificial Sequence: Synthetic oligonucleotide
  Sense strand starting at position 2406 of SEQ ID NO: 1885167
uguucucugaaggaugagu

SEQ ID NO: 2321457 - RNA, 19 nt, Artificial Sequence
  Description of Artificial Sequence: Synthetic oligonucleotide
  Antisense strand to SEQ ID NO: 2321456
acucauccuucagagaaca

SEQ ID NO: 2321458 - RNA, 19 nt, Artificial Sequence
  Description of Artificial Sequence: Synthetic oligonucleotide
  Sense strand starting at position 2901 of SEQ ID NO: 1885167
gaccuugagucacuuugga

SEQ ID NO: 2321459 - RNA, 19 nt, Artificial Sequence
  Description of Artificial Sequence: Synthetic oligonucleotide
  Antisense strand to SEQ ID NO: 2321458
uccaaagugacucaagguc

SEQ ID NO: 2321460 - RNA, 19 nt, Artificial Sequence
  Description of Artificial Sequence: Synthetic oligonucleotide
  Sense strand starting at position 3178 of SEQ ID NO: 1885167
gagagcugagcacacuuau

SEQ ID NO: 2321461 - RNA, 19 nt, Artificial Sequence
  Description of Artificial Sequence: Synthetic oligonucleotide
  Antisense strand to SEQ ID NO: 2321460
auaagugugcucagcucuc

SEQ ID NO: 2321462 - RNA, 19 nt, Artificial Sequence
  Description of Artificial Sequence: Synthetic oligonucleotide
  Sense strand starting at position 3363 of SEQ ID NO: 1885167
uaagauggcuuauugggaa

SEQ ID NO: 2321463 - RNA, 19 nt, Artificial Sequence
  Description of Artificial Sequence: Synthetic oligonucleotide
  Antisense strand to SEQ ID NO: 2321462
uucccaauaagccaucuua

SEQ ID NO: 2321464 - RNA, 19 nt, Artificial Sequence
  Description of Artificial Sequence: Synthetic oligonucleotide
  Sense strand starting at position 3410 of SEQ ID NO: 1885167
guggguacaagcuaggaua

SEQ ID NO: 2321465 - RNA, 19 nt, Artificial Sequence
  Description of Artificial Sequence: Synthetic oligonucleotide
  Antisense strand to SEQ ID NO: 2321464
uauccuagcuuguacccac

SEQ ID NO: 2321466 - RNA, 19 nt, Artificial Sequence
  Description of Artificial Sequence: Synthetic oligonucleotide
  Sense strand starting at position 3427 of SEQ ID NO: 1885167
uagggacccuagcuuuaua

SEQ ID NO: 2321467 - RNA, 19 nt, Artificial Sequence
  Description of Artificial Sequence: Synthetic oligonucleotide
  Antisense strand to SEQ ID NO: 2321466
uauaaagcuagggucccua

SEQ ID NO: 2321468 - RNA, 19 nt, Artificial Sequence
  Description of Artificial Sequence: Synthetic oligonucleotide
  Sense strand starting at position 3430 of SEQ ID NO: 1885167
ggacccuagcuuuauacua

SEQ ID NO: 2321469 - RNA, 19 nt, Artificial Sequence
  Description of Artificial Sequence: Synthetic oligonucleotide
  Antisense strand to SEQ ID NO: 2321468
uaguauaaagcuagggucc

SEQ ID NO: 2321470 - RNA, 19 nt, Artificial Sequence
  Description of Artificial Sequence: Synthetic oligonucleotide
  Sense strand starting at position 3435 of SEQ ID NO: 1885167
cuagcuuuauacuaggacu

SEQ ID NO: 2321471 - RNA, 19 nt, Artificial Sequence
  Description of Artificial Sequence: Synthetic oligonucleotide
  Antisense strand to SEQ ID NO: 2321470
aguccuaguauaaagcuag

SEQ ID NO: 2321472 - RNA, 19 nt, Artificial Sequence
  Description of Artificial Sequence: Synthetic oligonucleotide
  Sense strand starting at position 3438 of SEQ ID NO: 1885167
gcuuuauacuaggacuaga

SEQ ID NO: 2321473 - RNA, 19 nt, Artificial Sequence
  Description of Artificial Sequence: Synthetic oligonucleotide
  Antisense strand to SEQ ID NO: 2321472
ucuaguccuaguauaaagc

SEQ ID NO: 2321474 - RNA, 19 nt, Artificial Sequence
  Description of Artificial Sequence: Synthetic oligonucleotide
  Sense strand starting at position 3449 of SEQ ID NO: 1885167
ggacuagauuuaugcuucu

SEQ ID NO: 2321475 - RNA, 19 nt, Artificial Sequence
  Description of Artificial Sequence: Synthetic oligonucleotide
  Antisense strand to SEQ ID NO: 2321474
agaagcauaaaucuagucc

SEQ ID NO: 2321476 - RNA, 19 nt, Artificial Sequence
  Description of Artificial Sequence: Synthetic oligonucleotide
  Sense strand starting at position 3893 of SEQ ID NO: 1885167
cagggcagauccucugaga

SEQ ID NO: 2321477 - RNA, 19 nt, Artificial Sequence
  Description of Artificial Sequence: Synthetic oligonucleotide
  Antisense strand to SEQ ID NO: 2321476
ucucagaggaucugcccug

SEQ ID NO: 2321478 - RNA, 19 nt, Artificial Sequence
  Description of Artificial Sequence: Synthetic oligonucleotide
  Sense strand starting at position 3896 of SEQ ID NO: 1885167
ggcagauccucugagacau

SEQ ID NO: 2321479 - RNA, 19 nt, Artificial Sequence
  Description of Artificial Sequence: Synthetic oligonucleotide
  Antisense strand to SEQ ID NO: 2321478
augucucagaggaucugcc

SEQ ID NO: 2321480 - RNA, 19 nt, Artificial Sequence
  Description of Artificial Sequence: Synthetic oligonucleotide
  Sense strand starting at position 3968 of SEQ ID NO: 1885167
cugcauucucgugguuuau

SEQ ID NO: 2321481 - RNA, 19 nt, Artificial Sequence
  Description of Artificial Sequence: Synthetic oligonucleotide
  Antisense strand to SEQ ID NO: 2321480
auaaaccacgagaaugcag

SEQ ID NO: 2321482 - RNA, 19 nt, Artificial Sequence
  Description of Artificial Sequence: Synthetic oligonucleotide
  Sense strand starting at position 697 of SEQ ID NO: 1885168
uuugucaaacagcgagaaa

SEQ ID NO: 2321483 - RNA, 19 nt, Artificial Sequence
  Description of Artificial Sequence: Synthetic oligonucleotide
  Antisense strand to SEQ ID NO: 2321482
uuucucgcuguuugacaaa

SEQ ID NO: 2321484 - RNA, 19 nt, Artificial Sequence
  Description of Artificial Sequence: Synthetic oligonucleotide
  Sense strand starting at position 698 of SEQ ID NO: 1885168
uugucaaacagcgagaaau

SEQ ID NO: 2321485 - RNA, 19 nt, Artificial Sequence
  Description of Artificial Sequence: Synthetic oligonucleotide
  Antisense strand to SEQ ID NO: 2321484
auuucucgcuguuugacaa

SEQ ID NO: 2321486 - RNA, 19 nt, Artificial Sequence
  Description of Artificial Sequence: Synthetic oligonucleotide
  Sense strand starting at position 709 of SEQ ID NO: 1885168
cgagaaauagcguaaucuu

SEQ ID NO: 2321487 - RNA, 19 nt, Artificial Sequence
  Description of Artificial Sequence: Synthetic oligonucleotide
  Antisense strand to SEQ ID NO: 2321486
aagauuacgcuauuucucg

SEQ ID NO: 2321488 - RNA, 19 nt, Artificial Sequence
  Description of Artificial Sequence: Synthetic oligonucleotide
  Sense strand starting at position 737 of SEQ ID NO: 1885168
guccacacgucuugaguaa

SEQ ID NO: 2321489 - RNA, 19 nt, Artificial Sequence
  Description of Artificial Sequence: Synthetic oligonucleotide
  Antisense strand to SEQ ID NO: 2321488
uuacucaagacguguggac

SEQ ID NO: 2321490 - RNA, 19 nt, Artificial Sequence
  Description of Artificial Sequence: Synthetic oligonucleotide
  Sense strand starting at position 738 of SEQ ID NO: 1885168
uccacacgucuugaguaaa

SEQ ID NO: 2321491 - RNA, 19 nt, Artificial Sequence
  Description of Artificial Sequence: Synthetic oligonucleotide
  Antisense strand to SEQ ID NO: 2321490
uuuacucaagacgugugga

SEQ ID NO: 2321492 - RNA, 19 nt, Artificial Sequence
  Description of Artificial Sequence: Synthetic oligonucleotide
  Sense strand starting at position 741 of SEQ ID NO: 1885168
acacgucuugaguaaagac

SEQ ID NO: 2321493 - RNA, 19 nt, Artificial Sequence
  Description of Artificial Sequence: Synthetic oligonucleotide
  Antisense strand to SEQ ID NO: 2321492
gucuuuacucaagacgugu

SEQ ID NO: 2321494 - RNA, 19 nt, Artificial Sequence
  Description of Artificial Sequence: Synthetic oligonucleotide
  Sense strand starting at position 768 of SEQ ID NO: 1885168
uuuguuuaagaaggauguu

SEQ ID NO: 2321495 - RNA, 19 nt, Artificial Sequence
  Description of Artificial Sequence: Synthetic oligonucleotide
  Antisense strand to SEQ ID NO: 2321494
aacauccuucuuaaacaaa

SEQ ID NO: 2321496 - RNA, 19 nt, Artificial Sequence
  Description of Artificial Sequence: Synthetic oligonucleotide
  Sense strand starting at position 817 of SEQ ID NO: 1885168
aagcauaagggcuguucua

SEQ ID NO: 2321497 - RNA, 19 nt, Artificial Sequence
  Description of Artificial Sequence: Synthetic oligonucleotide
  Antisense strand to SEQ ID NO: 2321496
uagaacagcccuuaugcuu

SEQ ID NO: 2321498 - RNA, 19 nt, Artificial Sequence
  Description of Artificial Sequence: Synthetic oligonucleotide
  Sense strand starting at position 1005 of SEQ ID NO: 1885168
auaaauugucaccaagucu

SEQ ID NO: 2321499 - RNA, 19 nt, Artificial Sequence
  Description of Artificial Sequence: Synthetic oligonucleotide
  Antisense strand to SEQ ID NO: 2321498
agacuuggugacaauuuau

SEQ ID NO: 2321500 - RNA, 19 nt, Artificial Sequence
  Description of Artificial Sequence: Synthetic oligonucleotide
  Sense strand starting at position 1263 of SEQ ID NO: 1885168
ugaugauaauacuaguagu

SEQ ID NO: 2321501 - RNA, 19 nt, Artificial Sequence
  Description of Artificial Sequence: Synthetic oligonucleotide
  Antisense strand to SEQ ID NO: 2321500
acuacuaguauuaucauca

SEQ ID NO: 2321502 - RNA, 19 nt, Artificial Sequence
  Description of Artificial Sequence: Synthetic oligonucleotide
  Sense strand starting at position 1266 of SEQ ID NO: 1885168
ugauaauacuaguagucau

SEQ ID NO: 2321503 - RNA, 19 nt, Artificial Sequence
  Description of Artificial Sequence: Synthetic oligonucleotide
  Antisense strand to SEQ ID NO: 2321502
augacuacuaguauuauca

SEQ ID NO: 2321504 - RNA, 19 nt, Artificial Sequence
  Description of Artificial Sequence: Synthetic oligonucleotide
  Sense strand starting at position 1726 of SEQ ID NO: 1885168
ucuuuauguuacucagucu

SEQ ID NO: 2321505 - RNA, 19 nt, Artificial Sequence
  Description of Artificial Sequence: Synthetic oligonucleotide
  Antisense strand to SEQ ID NO: 2321504
agacugaguaacauaaaga

SEQ ID NO: 2321506 - RNA, 19 nt, Artificial Sequence
  Description of Artificial Sequence: Synthetic oligonucleotide
  Sense strand starting at position 1729 of SEQ ID NO: 1885168
uuauguuacucagucuaaa

SEQ ID NO: 2321507 - RNA, 19 nt, Artificial Sequence
  Description of Artificial Sequence: Synthetic oligonucleotide
  Antisense strand to SEQ ID NO: 2321506
uuuagacugaguaacauaa

SEQ ID NO: 2321508 - RNA, 19 nt, Artificial Sequence
  Description of Artificial Sequence: Synthetic oligonucleotide
  Sense strand starting at position 1732 of SEQ ID NO: 1885168
uguuacucagucuaaauau

SEQ ID NO: 2321509 - RNA, 19 nt, Artificial Sequence
  Description of Artificial Sequence: Synthetic oligonucleotide
  Antisense strand to SEQ ID NO: 2321508
auauuuagacugaguaaca

SEQ ID NO: 2321510 - RNA, 19 nt, Artificial Sequence
  Description of Artificial Sequence: Synthetic oligonucleotide
  Sense strand starting at position 1819 of SEQ ID NO: 1885168
auuaguauuucugacuuga

SEQ ID NO: 2321511 - RNA, 19 nt, Artificial Sequence
  Description of Artificial Sequence: Synthetic oligonucleotide
  Antisense strand to SEQ ID NO: 2321510
ucaagucagaaauacuaau

SEQ ID NO: 2321512 - RNA, 19 nt, Artificial Sequence
  Description of Artificial Sequence: Synthetic oligonucleotide
  Sense strand starting at position 2699 of SEQ ID NO: 1885168
gguacaaacuugccugauu

SEQ ID NO: 2321513 - RNA, 19 nt, Artificial Sequence
  Description of Artificial Sequence: Synthetic oligonucleotide
  Antisense strand to SEQ ID NO: 2321512
aaucaggcaaguuuguacc

SEQ ID NO: 2321514 - RNA, 19 nt, Artificial Sequence
  Description of Artificial Sequence: Synthetic oligonucleotide
  Sense strand starting at position 2892 of SEQ ID NO: 1885168
ucuuuacuguuugaaagcu

SEQ ID NO: 2321515 - RNA, 19 nt, Artificial Sequence
  Description of Artificial Sequence: Synthetic oligonucleotide
  Antisense strand to SEQ ID NO: 2321514
agcuuucaaacaguaaaga

SEQ ID NO: 2321516 - RNA, 19 nt, Artificial Sequence
  Description of Artificial Sequence: Synthetic oligonucleotide
  Sense strand starting at position 2901 of SEQ ID NO: 1885168
uuugaaagcucaguauguu

SEQ ID NO: 2321517 - RNA, 19 nt, Artificial Sequence
  Description of Artificial Sequence: Synthetic oligonucleotide
  Antisense strand to SEQ ID NO: 2321516
aacauacugagcuuucaaa

SEQ ID NO: 2321518 - RNA, 19 nt, Artificial Sequence
  Description of Artificial Sequence: Synthetic oligonucleotide
  Sense strand starting at position 2902 of SEQ ID NO: 1885168
uugaaagcucaguauguuc

SEQ ID NO: 2321519 - RNA, 19 nt, Artificial Sequence
  Description of Artificial Sequence: Synthetic oligonucleotide
  Antisense strand to SEQ ID NO: 2321518
gaacauacugagcuuucaa

SEQ ID NO: 2321520 - RNA, 19 nt, Artificial Sequence
  Description of Artificial Sequence: Synthetic oligonucleotide
  Sense strand starting at position 3164 of SEQ ID NO: 1885168
ugaauuauuucucgcauaa

SEQ ID NO: 2321521 - RNA, 19 nt, Artificial Sequence
  Description of Artificial Sequence: Synthetic oligonucleotide
  Antisense strand to SEQ ID NO: 2321520
uuaugcgagaaauaauuca

SEQ ID NO: 2321522 - RNA, 19 nt, Artificial Sequence
  Description of Artificial Sequence: Synthetic oligonucleotide
  Sense strand starting at position 3423 of SEQ ID NO: 1885168
acaaauacgugcugacuua

SEQ ID NO: 2321523 - RNA, 19 nt, Artificial Sequence
  Description of Artificial Sequence: Synthetic oligonucleotide
  Antisense strand to SEQ ID NO: 2321522
uaagucagcacguauuugu

SEQ ID NO: 2321524 - RNA, 19 nt, Artificial Sequence
  Description of Artificial Sequence: Synthetic oligonucleotide
  Sense strand starting at position 3424 of SEQ ID NO: 1885168
caaauacgugcugacuuaa

SEQ ID NO: 2321525 - RNA, 19 nt, Artificial Sequence
  Description of Artificial Sequence: Synthetic oligonucleotide
  Antisense strand to SEQ ID NO: 2321524
uuaagucagcacguauuug

SEQ ID NO: 2321526 - RNA, 19 nt, Artificial Sequence
  Description of Artificial Sequence: Synthetic oligonucleotide
  Sense strand starting at position 3650 of SEQ ID NO: 1885168
uuugaauaagccugaaguc

SEQ ID NO: 2321527 - RNA, 19 nt, Artificial Sequence
  Description of Artificial Sequence: Synthetic oligonucleotide
  Antisense strand to SEQ ID NO: 2321526
gacuucaggcuuauucaaa

SEQ ID NO: 2321528 - RNA, 19 nt, Artificial Sequence
  Description of Artificial Sequence: Synthetic oligonucleotide
  Sense strand starting at position 3770 of SEQ ID NO: 1885168
uauauucgcuauuaaagug

SEQ ID NO: 2321529 - RNA, 19 nt, Artificial Sequence
  Description of Artificial Sequence: Synthetic oligonucleotide
  Antisense strand to SEQ ID NO: 2321528
cacuuuaauagcgaauaua

SEQ ID NO: 2321530 - RNA, 19 nt, Artificial Sequence
  Description of Artificial Sequence: Synthetic oligonucleotide
  Sense strand starting at position 125 of SEQ ID NO: 1885169
auaggaaggucuuugucaa

SEQ ID NO: 2321531 - RNA, 19 nt, Artificial Sequence
  Description of Artificial Sequence: Synthetic oligonucleotide
  Antisense strand to SEQ ID NO: 2321530
uugacaaagaccuuccuau

SEQ ID NO: 2321532 - RNA, 19 nt, Artificial Sequence
  Description of Artificial Sequence: Synthetic oligonucleotide
  Sense strand starting at position 129 of SEQ ID NO: 1885169
gaaggucuuugucaacaua

SEQ ID NO: 2321533 - RNA, 19 nt, Artificial Sequence
  Description of Artificial Sequence: Synthetic oligonucleotide
  Antisense strand to SEQ ID NO: 2321532
uauguugacaaagaccuuc

SEQ ID NO: 2321534 - RNA, 19 nt, Artificial Sequence
  Description of Artificial Sequence: Synthetic oligonucleotide
  Sense strand starting at position 322 of SEQ ID NO: 1885169
uaugaaaugucaucaggau

SEQ ID NO: 2321535 - RNA, 19 nt, Artificial Sequence
  Description of Artificial Sequence: Synthetic oligonucleotide
  Antisense strand to SEQ ID NO: 2321534
auccugaugacauuucaua

SEQ ID NO: 2321536 - RNA, 19 nt, Artificial Sequence
  Description of Artificial Sequence: Synthetic oligonucleotide
  Sense strand starting at position 463 of SEQ ID NO: 1885169
gcaagucuuuacucuguua

SEQ ID NO: 2321537 - RNA, 19 nt, Artificial Sequence
  Description of Artificial Sequence: Synthetic oligonucleotide
  Antisense strand to SEQ ID NO: 2321536
uaacagaguaaagacuugc

SEQ ID NO: 2321538 - RNA, 19 nt, Artificial Sequence
  Description of Artificial Sequence: Synthetic oligonucleotide
  Sense strand starting at position 466 of SEQ ID NO: 1885169
agucuuuacucuguuauaa

SEQ ID NO: 2321539 - RNA, 19 nt, Artificial Sequence
  Description of Artificial Sequence: Synthetic oligonucleotide
  Antisense strand to SEQ ID NO: 2321538
uuauaacagaguaaagacu

SEQ ID NO: 2321540 - RNA, 19 nt, Artificial Sequence
  Description of Artificial Sequence: Synthetic oligonucleotide
  Sense strand starting at position 496 of SEQ ID NO: 1885169
augucaucauaagaguaaa

SEQ ID NO: 2321541 - RNA, 19 nt, Artificial Sequence
  Description of Artificial Sequence: Synthetic oligonucleotide
  Antisense strand to SEQ ID NO: 2321540
uuuacucuuaugaugacau

SEQ ID NO: 2321542 - RNA, 19 nt, Artificial Sequence
  Description of Artificial Sequence: Synthetic oligonucleotide
  Sense strand starting at position 518 of SEQ ID NO: 1885169
uagcauacguaaccuagaa

SEQ ID NO: 2321543 - RNA, 19 nt, Artificial Sequence
  Description of Artificial Sequence: Synthetic oligonucleotide
  Antisense strand to SEQ ID NO: 2321542
uucuagguuacguaugcua

SEQ ID NO: 2321544 - RNA, 19 nt, Artificial Sequence
  Description of Artificial Sequence: Synthetic oligonucleotide
  Sense strand starting at position 624 of SEQ ID NO: 1885169
guauguugacugcggcauu

SEQ ID NO: 2321545 - RNA, 19 nt, Artificial Sequence
  Description of Artificial Sequence: Synthetic oligonucleotide
  Antisense strand to SEQ ID NO: 2321544
aaugccgcagucaacauac

SEQ ID NO: 2321546 - RNA, 19 nt, Artificial Sequence
  Description of Artificial Sequence: Synthetic oligonucleotide
  Sense strand starting at position 627 of SEQ ID NO: 1885169
uguugacugcggcauuauu

SEQ ID NO: 2321547 - RNA, 19 nt, Artificial Sequence
  Description of Artificial Sequence: Synthetic oligonucleotide
  Antisense strand to SEQ ID NO: 2321546
aauaaugccgcagucaaca

SEQ ID NO: 2321548 - RNA, 19 nt, Artificial Sequence
  Description of Artificial Sequence: Synthetic oligonucleotide
  Sense strand starting at position 1039 of SEQ ID NO: 1885169
gcacguccugcgcauguaa

SEQ ID NO: 2321549 - RNA, 19 nt, Artificial Sequence
  Description of Artificial Sequence: Synthetic oligonucleotide
  Antisense strand to SEQ ID NO: 2321548
uuacaugcgcaggacgugc

SEQ ID NO: 2321550 - RNA, 19 nt, Artificial Sequence
  Description of Artificial Sequence: Synthetic oligonucleotide
  Sense strand starting at position 1046 of SEQ ID NO: 1885169
cugcgcauguaauccagaa

SEQ ID NO: 2321551 - RNA, 19 nt, Artificial Sequence
  Description of Artificial Sequence: Synthetic oligonucleotide
  Antisense strand to SEQ ID NO: 2321550
uucuggauuacaugcgcag

SEQ ID NO: 2321552 - RNA, 19 nt, Artificial Sequence
  Description of Artificial Sequence: Synthetic oligonucleotide
  Sense strand starting at position 1048 of SEQ ID NO: 1885169
gcgcauguaauccagaacu

SEQ ID NO: 2321553 - RNA, 19 nt, Artificial Sequence
  Description of Artificial Sequence: Synthetic oligonucleotide
  Antisense strand to SEQ ID NO: 2321552
aguucuggauuacaugcgc

SEQ ID NO: 2321554 - RNA, 19 nt, Artificial Sequence
  Description of Artificial Sequence: Synthetic oligonucleotide
  Sense strand starting at position 1050 of SEQ ID NO: 1885169
gcauguaauccagaacuua

SEQ ID NO: 2321555 - RNA, 19 nt, Artificial Sequence
  Description of Artificial Sequence: Synthetic oligonucleotide
  Antisense strand to SEQ ID NO: 2321554
uaaguucuggauuacaugc

SEQ ID NO: 2321556 - RNA, 19 nt, Artificial Sequence
  Description of Artificial Sequence: Synthetic oligonucleotide
  Sense strand starting at position 1157 of SEQ ID NO: 1885169
agauccuucugaggucauu

SEQ ID NO: 2321557 - RNA, 19 nt, Artificial Sequence
  Description of Artificial Sequence: Synthetic oligonucleotide
  Antisense strand to SEQ ID NO: 2321556
aaugaccucagaaggaucu

SEQ ID NO: 2321558 - RNA, 19 nt, Artificial Sequence
  Description of Artificial Sequence: Synthetic oligonucleotide
  Sense strand starting at position 1185 of SEQ ID NO: 1885169
acuuauuacucagguguag

SEQ ID NO: 2321559 - RNA, 19 nt, Artificial Sequence
  Description of Artificial Sequence: Synthetic oligonucleotide
  Antisense strand to SEQ ID NO: 2321558
cuacaccugaguaauaagu

SEQ ID NO: 2321560 - RNA, 19 nt, Artificial Sequence
  Description of Artificial Sequence: Synthetic oligonucleotide
  Sense strand starting at position 1187 of SEQ ID NO: 1885169
uuauuacucagguguaggu

SEQ ID NO: 2321561 - RNA, 19 nt, Artificial Sequence
  Description of Artificial Sequence: Synthetic oligonucleotide
  Antisense strand to SEQ ID NO: 2321560
accuacaccugaguaauaa

SEQ ID NO: 2321562 - RNA, 19 nt, Artificial Sequence
  Description of Artificial Sequence: Synthetic oligonucleotide
  Sense strand starting at position 1194 of SEQ ID NO: 1885169
ucagguguagguggauaua

SEQ ID NO: 2321563 - RNA, 19 nt, Artificial Sequence
  Description of Artificial Sequence: Synthetic oligonucleotide
  Antisense strand to SEQ ID NO: 2321562
uauauccaccuacaccuga

SEQ ID NO: 2321564 - RNA, 19 nt, Artificial Sequence
  Description of Artificial Sequence: Synthetic oligonucleotide
  Sense strand starting at position 1282 of SEQ ID NO: 1885169
ucaugaugcuuguuuccau

SEQ ID NO: 2321565 - RNA, 19 nt, Artificial Sequence
  Description of Artificial Sequence: Synthetic oligonucleotide
  Antisense strand to SEQ ID NO: 2321564
auggaaacaagcaucauga

SEQ ID NO: 2321566 - RNA, 19 nt, Artificial Sequence
  Description of Artificial Sequence: Synthetic oligonucleotide
  Sense strand starting at position 1285 of SEQ ID NO: 1885169
ugaugcuuguuuccauaac

SEQ ID NO: 2321567 - RNA, 19 nt, Artificial Sequence
  Description of Artificial Sequence: Synthetic oligonucleotide
  Antisense strand to SEQ ID NO: 2321566
guuauggaaacaagcauca

SEQ ID NO: 2321568 - RNA, 19 nt, Artificial Sequence
  Description of Artificial Sequence: Synthetic oligonucleotide
  Sense strand starting at position 1382 of SEQ ID NO: 1885169
ucaguaaaguaacgggaau

SEQ ID NO: 2321569 - RNA, 19 nt, Artificial Sequence
  Description of Artificial Sequence: Synthetic oligonucleotide
  Antisense strand to SEQ ID NO: 2321568
auucccguuacuuuacuga

SEQ ID NO: 2321570 - RNA, 19 nt, Artificial Sequence
  Description of Artificial Sequence: Synthetic oligonucleotide
  Sense strand starting at position 1384 of SEQ ID NO: 1885169
aguaaaguaacgggaauua

SEQ ID NO: 2321571 - RNA, 19 nt, Artificial Sequence
  Description of Artificial Sequence: Synthetic oligonucleotide
  Antisense strand to SEQ ID NO: 2321570
uaauucccguuacuuuacu

SEQ ID NO: 2321572 - RNA, 19 nt, Artificial Sequence
  Description of Artificial Sequence: Synthetic oligonucleotide
  Sense strand starting at position 1394 of SEQ ID NO: 1885169
cgggaauuaugagaggauc

SEQ ID NO: 2321573 - RNA, 19 nt, Artificial Sequence
  Description of Artificial Sequence: Synthetic oligonucleotide
  Antisense strand to SEQ ID NO: 2321572
gauccucucauaauucccg

SEQ ID NO: 2321574 - RNA, 19 nt, Artificial Sequence
  Description of Artificial Sequence: Synthetic oligonucleotide
  Sense strand starting at position 1430 of SEQ ID NO: 1885169
guuugucgcgcugcucaua

SEQ ID NO: 2321575 - RNA, 19 nt, Artificial Sequence
  Description of Artificial Sequence: Synthetic oligonucleotide
  Antisense strand to SEQ ID NO: 2321574
uaugagcagcgcgacaaac

SEQ ID NO: 2321576 - RNA, 19 nt, Artificial Sequence
  Description of Artificial Sequence: Synthetic oligonucleotide
  Sense strand starting at position 1441 of SEQ ID NO: 1885169
ugcucauauugaugaccuu

SEQ ID NO: 2321577 - RNA, 19 nt, Artificial Sequence
  Description of Artificial Sequence: Synthetic oligonucleotide
  Antisense strand to SEQ ID NO: 2321576
aaggucaucaauaugagca

SEQ ID NO: 2321578 - RNA, 19 nt, Artificial Sequence
  Description of Artificial Sequence: Synthetic oligonucleotide
  Sense strand starting at position 1447 of SEQ ID NO: 1885169
uauugaugaccuugagguu

SEQ ID NO: 2321579 - RNA, 19 nt, Artificial Sequence
  Description of Artificial Sequence: Synthetic oligonucleotide
  Antisense strand to SEQ ID NO: 2321578
aaccucaaggucaucaaua

SEQ ID NO: 2321580 - RNA, 19 nt, Artificial Sequence
  Description of Artificial Sequence: Synthetic oligonucleotide
  Sense strand starting at position 1627 of SEQ ID NO: 1885169
cgccacucuucggcagaga

SEQ ID NO: 2321581 - RNA, 19 nt, Artificial Sequence
  Description of Artificial Sequence: Synthetic oligonucleotide
  Antisense strand to SEQ ID NO: 2321580
ucucugccgaagaguggcg

SEQ ID NO: 2321582 - RNA, 19 nt, Artificial Sequence
  Description of Artificial Sequence: Synthetic oligonucleotide
  Sense strand starting at position 1628 of SEQ ID NO: 1885169
gccacucuucggcagagaa

SEQ ID NO: 2321583 - RNA, 19 nt, Artificial Sequence
  Description of Artificial Sequence: Synthetic oligonucleotide
  Antisense strand to SEQ ID NO: 2321582
uucucugccgaagaguggc

SEQ ID NO: 2321584 - RNA, 19 nt, Artificial Sequence
  Description of Artificial Sequence: Synthetic oligonucleotide
  Sense strand starting at position 1630 of SEQ ID NO: 1885169
cacucuucggcagagaaag

SEQ ID NO: 2321585 - RNA, 19 nt, Artificial Sequence
  Description of Artificial Sequence: Synthetic oligonucleotide
  Antisense strand to SEQ ID NO: 2321584
cuuucucugccgaagagug

SEQ ID NO: 2321586 - RNA, 19 nt, Artificial Sequence
  Description of Artificial Sequence: Synthetic oligonucleotide
  Sense strand starting at position 2074 of SEQ ID NO: 1885169
ccgugugcucagccucaga

SEQ ID NO: 2321587 - RNA, 19 nt, Artificial Sequence
  Description of Artificial Sequence: Synthetic oligonucleotide
  Antisense strand to SEQ ID NO: 2321586
ucugaggcugagcacacgg

SEQ ID NO: 2321588 - RNA, 19 nt, Artificial Sequence
  Description of Artificial Sequence: Synthetic oligonucleotide
  Sense strand starting at position 2415 of SEQ ID NO: 1885169
ugagaaggcucccgggauu

SEQ ID NO: 2321589 - RNA, 19 nt, Artificial Sequence
  Description of Artificial Sequence: Synthetic oligonucleotide
  Antisense strand to SEQ ID NO: 2321588
aaucccgggagccuucuca

SEQ ID NO: 2321590 - RNA, 19 nt, Artificial Sequence
  Description of Artificial Sequence: Synthetic oligonucleotide
  Sense strand starting at position 2575 of SEQ ID NO: 1885169
gguguucuuagagggaacu

SEQ ID NO: 2321591 - RNA, 19 nt, Artificial Sequence
  Description of Artificial Sequence: Synthetic oligonucleotide
  Antisense strand to SEQ ID NO: 2321590
aguucccucuaagaacacc

SEQ ID NO: 2321592 - RNA, 19 nt, Artificial Sequence
  Description of Artificial Sequence: Synthetic oligonucleotide
  Sense strand starting at position 2576 of SEQ ID NO: 1885169
guguucuuagagggaacua

SEQ ID NO: 2321593 - RNA, 19 nt, Artificial Sequence
  Description of Artificial Sequence: Synthetic oligonucleotide
  Antisense strand to SEQ ID NO: 2321592
uaguucccucuaagaacac

SEQ ID NO: 2321594 - RNA, 19 nt, Artificial Sequence
  Description of Artificial Sequence: Synthetic oligonucleotide
  Sense strand starting at position 3788 of SEQ ID NO: 1885169
ggaugccauuuauauccua

SEQ ID NO: 2321595 - RNA, 19 nt, Artificial Sequence
  Description of Artificial Sequence: Synthetic oligonucleotide
  Antisense strand to SEQ ID NO: 2321594
uaggauauaaauggcaucc

SEQ ID NO: 2321596 - RNA, 19 nt, Artificial Sequence
  Description of Artificial Sequence: Synthetic oligonucleotide
  Sense strand starting at position 3891 of SEQ ID NO: 1885169
cuguuauuccuucggagag

SEQ ID NO: 2321597 - RNA, 19 nt, Artificial Sequence
  Description of Artificial Sequence: Synthetic oligonucleotide
  Antisense strand to SEQ ID NO: 2321596
cucuccgaaggaauaacag

SEQ ID NO: 2321598 - RNA, 19 nt, Artificial Sequence
  Description of Artificial Sequence: Synthetic oligonucleotide
  Sense strand starting at position 3892 of SEQ ID NO: 1885169
uguuauuccuucggagagu

SEQ ID NO: 2321599 - RNA, 19 nt, Artificial Sequence
  Description of Artificial Sequence: Synthetic oligonucleotide
  Antisense strand to SEQ ID NO: 2321598
acucuccgaaggaauaaca

SEQ ID NO: 2321600 - RNA, 19 nt, Artificial Sequence
  Description of Artificial Sequence: Synthetic oligonucleotide
  Sense strand starting at position 3893 of SEQ ID NO: 1885169
guuauuccuucggagaguc

SEQ ID NO: 2321601 - RNA, 19 nt, Artificial Sequence
  Description of Artificial Sequence: Synthetic oligonucleotide
  Antisense strand to SEQ ID NO: 2321600
gacucuccgaaggaauaac

SEQ ID NO: 2321602 - RNA, 19 nt, Artificial Sequence
  Description of Artificial Sequence: Synthetic oligonucleotide
  Sense strand starting at position 3901 of SEQ ID NO: 1885169
uucggagaguccuagauuu

SEQ ID NO: 2321603 - RNA, 19 nt, Artificial Sequence
  Description of Artificial Sequence: Synthetic oligonucleotide
  Antisense strand to SEQ ID NO: 2321602
aaaucuaggacucuccgaa

SEQ ID NO: 2321604 - RNA, 19 nt, Artificial Sequence
  Description of Artificial Sequence: Synthetic oligonucleotide
  Sense strand starting at position 3921 of SEQ ID NO: 1885169
ugcucuuaguuguaacaca

SEQ ID NO: 2321605 - RNA, 19 nt, Artificial Sequence
  Description of Artificial Sequence: Synthetic oligonucleotide
  Antisense strand to SEQ ID NO: 2321604
uguguuacaacuaagagca

SEQ ID NO: 2321606 - RNA, 19 nt, Artificial Sequence
  Description of Artificial Sequence: Synthetic oligonucleotide
  Sense strand starting at position 3929 of SEQ ID NO: 1885169
guuguaacacaucaggagu

SEQ ID NO: 2321607 - RNA, 19 nt, Artificial Sequence
  Description of Artificial Sequence: Synthetic oligonucleotide
  Antisense strand to SEQ ID NO: 2321606
acuccugauguguuacaac

SEQ ID NO: 2321608 - RNA, 19 nt, Artificial Sequence
  Description of Artificial Sequence: Synthetic oligonucleotide
  Sense strand starting at position 3952 of SEQ ID NO: 1885169
uccugucuccacgauguuu

SEQ ID NO: 2321609 - RNA, 19 nt, Artificial Sequence
  Description of Artificial Sequence: Synthetic oligonucleotide
  Antisense strand to SEQ ID NO: 2321608
aaacaucguggagacagga

SEQ ID NO: 2321610 - RNA, 19 nt, Artificial Sequence
  Description of Artificial Sequence: Synthetic oligonucleotide
  Sense strand starting at position 4 of SEQ ID NO: 1885170
uucuacuggugaucuuaau

SEQ ID NO: 2321611 - RNA, 19 nt, Artificial Sequence
  Description of Artificial Sequence: Synthetic oligonucleotide
  Antisense strand to SEQ ID NO: 2321610
auuaagaucaccaguagaa

SEQ ID NO: 2321612 - RNA, 19 nt, Artificial Sequence
  Description of Artificial Sequence: Synthetic oligonucleotide
  Sense strand starting at position 13 of SEQ ID NO: 1885170
ugaucuuaauuguugagau

SEQ ID NO: 2321613 - RNA, 19 nt, Artificial Sequence
  Description of Artificial Sequence: Synthetic oligonucleotide
  Antisense strand to SEQ ID NO: 2321612
aucucaacaauuaagauca

SEQ ID NO: 2321614 - RNA, 19 nt, Artificial Sequence
  Description of Artificial Sequence: Synthetic oligonucleotide
  Sense strand starting at position 212 of SEQ ID NO: 1885170
uugguaaggacuugacaug

SEQ ID NO: 2321615 - RNA, 19 nt, Artificial Sequence
  Description of Artificial Sequence: Synthetic oligonucleotide
  Antisense strand to SEQ ID NO: 2321614
caugucaaguccuuaccaa

SEQ ID NO: 2321616 - RNA, 19 nt, Artificial Sequence
  Description of Artificial Sequence: Synthetic oligonucleotide
  Sense strand starting at position 254 of SEQ ID NO: 1885170
ucugaagucugaccuuaau

SEQ ID NO: 2321617 - RNA, 19 nt, Artificial Sequence
  Description of Artificial Sequence: Synthetic oligonucleotide
  Antisense strand to SEQ ID NO: 2321616
auuaaggucagacuucaga

SEQ ID NO: 2321618 - RNA, 19 nt, Artificial Sequence
  Description of Artificial Sequence: Synthetic oligonucleotide
  Sense strand starting at position 273 of SEQ ID NO: 1885170
guugcuuugugauuaauuu

SEQ ID NO: 2321619 - RNA, 19 nt, Artificial Sequence
  Description of Artificial Sequence: Synthetic oligonucleotide
  Antisense strand to SEQ ID NO: 2321618
aaauuaaucacaaagcaac

SEQ ID NO: 2321620 - RNA, 19 nt, Artificial Sequence
  Description of Artificial Sequence: Synthetic oligonucleotide
  Sense strand starting at position 280 of SEQ ID NO: 1885170
ugugauuaauuugcagcaa

SEQ ID NO: 2321621 - RNA, 19 nt, Artificial Sequence
  Description of Artificial Sequence: Synthetic oligonucleotide
  Antisense strand to SEQ ID NO: 2321620
uugcugcaaauuaaucaca

SEQ ID NO: 2321622 - RNA, 19 nt, Artificial Sequence
  Description of Artificial Sequence: Synthetic oligonucleotide
  Sense strand starting at position 394 of SEQ ID NO: 1885170
guuagaguucuugauggaa

SEQ ID NO: 2321623 - RNA, 19 nt, Artificial Sequence
  Description of Artificial Sequence: Synthetic oligonucleotide
  Antisense strand to SEQ ID NO: 2321622
uuccaucaagaacucuaac

SEQ ID NO: 2321624 - RNA, 19 nt, Artificial Sequence
  Description of Artificial Sequence: Synthetic oligonucleotide
  Sense strand starting at position 418 of SEQ ID NO: 1885170
uggaguuuauuaccacgga

SEQ ID NO: 2321625 - RNA, 19 nt, Artificial Sequence
  Description of Artificial Sequence: Synthetic oligonucleotide
  Antisense strand to SEQ ID NO: 2321624
uccgugguaauaaacucca

SEQ ID NO: 2321626 - RNA, 19 nt, Artificial Sequence
  Description of Artificial Sequence: Synthetic oligonucleotide
  Sense strand starting at position 421 of SEQ ID NO: 1885170
aguuuauuaccacggagaa

SEQ ID NO: 2321627 - RNA, 19 nt, Artificial Sequence
  Description of Artificial Sequence: Synthetic oligonucleotide
  Antisense strand to SEQ ID NO: 2321626
uucuccgugguaauaaacu

SEQ ID NO: 2321628 - RNA, 19 nt, Artificial Sequence
  Description of Artificial Sequence: Synthetic oligonucleotide
  Sense strand starting at position 422 of SEQ ID NO: 1885170
guuuauuaccacggagaau

SEQ ID NO: 2321629 - RNA, 19 nt, Artificial Sequence
  Description of Artificial Sequence: Synthetic oligonucleotide
  Antisense strand to SEQ ID NO: 2321628
auucuccgugguaauaaac

SEQ ID NO: 2321630 - RNA, 19 nt, Artificial Sequence
  Description of Artificial Sequence: Synthetic oligonucleotide
  Sense strand starting at position 460 of SEQ ID NO: 1885170
aagugaacugggcagaguu

SEQ ID NO: 2321631 - RNA, 19 nt, Artificial Sequence
  Description of Artificial Sequence: Synthetic oligonucleotide
  Antisense strand to SEQ ID NO: 2321630
aacucugcccaguucacuu

SEQ ID NO: 2321632 - RNA, 19 nt, Artificial Sequence
  Description of Artificial Sequence: Synthetic oligonucleotide
  Sense strand starting at position 473 of SEQ ID NO: 1885170
agaguuguuggucacuuga

SEQ ID NO: 2321633 - RNA, 19 nt, Artificial Sequence
  Description of Artificial Sequence: Synthetic oligonucleotide
  Antisense strand to SEQ ID NO: 2321632
ucaagugaccaacaacucu

SEQ ID NO: 2321634 - RNA, 19 nt, Artificial Sequence
  Description of Artificial Sequence: Synthetic oligonucleotide
  Sense strand starting at position 560 of SEQ ID NO: 1885170
gaaggcuuugcugauuaua

SEQ ID NO: 2321635 - RNA, 19 nt, Artificial Sequence
  Description of Artificial Sequence: Synthetic oligonucleotide
  Antisense strand to SEQ ID NO: 2321634
uauaaucagcaaagccuuc

SEQ ID NO: 2321636 - RNA, 19 nt, Artificial Sequence
  Description of Artificial Sequence: Synthetic oligonucleotide
  Sense strand starting at position 563 of SEQ ID NO: 1885170
ggcuuugcugauuauaaau

SEQ ID NO: 2321637 - RNA, 19 nt, Artificial Sequence
  Description of Artificial Sequence: Synthetic oligonucleotide
  Antisense strand to SEQ ID NO: 2321636
auuuauaaucagcaaagcc

SEQ ID NO: 2321638 - RNA, 19 nt, Artificial Sequence
  Description of Artificial Sequence: Synthetic oligonucleotide
  Sense strand starting at position 666 of SEQ ID NO: 1885170
ggucuuaggguagauguau

SEQ ID NO: 2321639 - RNA, 19 nt, Artificial Sequence
  Description of Artificial Sequence: Synthetic oligonucleotide
  Antisense strand to SEQ ID NO: 2321638
auacaucuacccuaagacc

SEQ ID NO: 2321640 - RNA, 19 nt, Artificial Sequence
  Description of Artificial Sequence: Synthetic oligonucleotide
  Sense strand starting at position 1031 of SEQ ID NO: 1885170
cucgccauccuugagaaca

SEQ ID NO: 2321641 - RNA, 19 nt, Artificial Sequence
  Description of Artificial Sequence: Synthetic oligonucleotide
  Antisense strand to SEQ ID NO: 2321640
uguucucaaggauggcgag

SEQ ID NO: 2321642 - RNA, 19 nt, Artificial Sequence
  Description of Artificial Sequence: Synthetic oligonucleotide
  Sense strand starting at position 1615 of SEQ ID NO: 1885170
ggagucuaagcccaauauu

SEQ ID NO: 2321643 - RNA, 19 nt, Artificial Sequence
  Description of Artificial Sequence: Synthetic oligonucleotide
  Antisense strand to SEQ ID NO: 2321642
aauauugggcuuagacucc

SEQ ID NO: 2321644 - RNA, 19 nt, Artificial Sequence
  Description of Artificial Sequence: Synthetic oligonucleotide
  Sense strand starting at position 1625 of SEQ ID NO: 1885170
cccaauauugcuggauuaa

SEQ ID NO: 2321645 - RNA, 19 nt, Artificial Sequence
  Description of Artificial Sequence: Synthetic oligonucleotide
  Antisense strand to SEQ ID NO: 2321644
uuaauccagcaauauuggg

SEQ ID NO: 2321646 - RNA, 19 nt, Artificial Sequence
  Description of Artificial Sequence: Synthetic oligonucleotide
  Sense strand starting at position 1626 of SEQ ID NO: 1885170
ccaauauugcuggauuaau

SEQ ID NO: 2321647 - RNA, 19 nt, Artificial Sequence
  Description of Artificial Sequence: Synthetic oligonucleotide
  Antisense strand to SEQ ID NO: 2321646
auuaauccagcaauauugg

SEQ ID NO: 2321648 - RNA, 19 nt, Artificial Sequence
  Description of Artificial Sequence: Synthetic oligonucleotide
  Sense strand starting at position 1694 of SEQ ID NO: 1885170
gccuuaaaucagggacaaa

SEQ ID NO: 2321649 - RNA, 19 nt, Artificial Sequence
  Description of Artificial Sequence: Synthetic oligonucleotide
  Antisense strand to SEQ ID NO: 2321648
uuugucccugauuuaaggc

SEQ ID NO: 2321650 - RNA, 19 nt, Artificial Sequence
  Description of Artificial Sequence: Synthetic oligonucleotide
  Sense strand starting at position 1800 of SEQ ID NO: 1885170
acucuuugacauuacaguu

SEQ ID NO: 2321651 - RNA, 19 nt, Artificial Sequence
  Description of Artificial Sequence: Synthetic oligonucleotide
  Antisense strand to SEQ ID NO: 2321650
aacuguaaugucaaagagu

SEQ ID NO: 2321652 - RNA, 19 nt, Artificial Sequence
  Description of Artificial Sequence: Synthetic oligonucleotide
  Sense strand starting at position 2178 of SEQ ID NO: 1885170
uuaagaagucaaugacuuu

SEQ ID NO: 2321653 - RNA, 19 nt, Artificial Sequence
  Description of Artificial Sequence: Synthetic oligonucleotide
  Antisense strand to SEQ ID NO: 2321652
aaagucauugacuucuuaa

SEQ ID NO: 2321654 - RNA, 19 nt, Artificial Sequence
  Description of Artificial Sequence: Synthetic oligonucleotide
  Sense strand starting at position 2191 of SEQ ID NO: 1885170
gacuuuaacgacugaaaug

SEQ ID NO: 2321655 - RNA, 19 nt, Artificial Sequence
  Description of Artificial Sequence: Synthetic oligonucleotide
  Antisense strand to SEQ ID NO: 2321654
cauuucagucguuaaaguc

SEQ ID NO: 2321656 - RNA, 19 nt, Artificial Sequence
  Description of Artificial Sequence: Synthetic oligonucleotide
  Sense strand starting at position 2317 of SEQ ID NO: 1885170
cuggacuuuguccauguaa

SEQ ID NO: 2321657 - RNA, 19 nt, Artificial Sequence
  Description of Artificial Sequence: Synthetic oligonucleotide
  Antisense strand to SEQ ID NO: 2321656
uuacauggacaaaguccag

SEQ ID NO: 2321658 - RNA, 19 nt, Artificial Sequence
  Description of Artificial Sequence: Synthetic oligonucleotide
  Sense strand starting at position 2839 of SEQ ID NO: 1885170
agauucuuauggcuuaaua

SEQ ID NO: 2321659 - RNA, 19 nt, Artificial Sequence
  Description of Artificial Sequence: Synthetic oligonucleotide
  Antisense strand to SEQ ID NO: 2321658
uauuaagccauaagaaucu

SEQ ID NO: 2321660 - RNA, 19 nt, Artificial Sequence
  Description of Artificial Sequence: Synthetic oligonucleotide
  Sense strand starting at position 2858 of SEQ ID NO: 1885170
cucuuaaauguagagucaa

SEQ ID NO: 2321661 - RNA, 19 nt, Artificial Sequence
  Description of Artificial Sequence: Synthetic oligonucleotide
  Antisense strand to SEQ ID NO: 2321660
uugacucuacauuuaagag

SEQ ID NO: 2321662 - RNA, 19 nt, Artificial Sequence
  Description of Artificial Sequence: Synthetic oligonucleotide
  Sense strand starting at position 2894 of SEQ ID NO: 1885170
aguuauguucuagaaaguu

SEQ ID NO: 2321663 - RNA, 19 nt, Artificial Sequence
  Description of Artificial Sequence: Synthetic oligonucleotide
  Antisense strand to SEQ ID NO: 2321662
aacuuucuagaacauaacu

SEQ ID NO: 2321664 - RNA, 19 nt, Artificial Sequence
  Description of Artificial Sequence: Synthetic oligonucleotide
  Sense strand starting at position 2958 of SEQ ID NO: 1885170
gaaauauagcguuaggauc

SEQ ID NO: 2321665 - RNA, 19 nt, Artificial Sequence
  Description of Artificial Sequence: Synthetic oligonucleotide
  Antisense strand to SEQ ID NO: 2321664
gauccuaacgcuauauuuc

SEQ ID NO: 2321666 - RNA, 19 nt, Artificial Sequence
  Description of Artificial Sequence: Synthetic oligonucleotide
  Sense strand starting at position 2979 of SEQ ID NO: 1885170
cgaagacucuggccagaac

SEQ ID NO: 2321667 - RNA, 19 nt, Artificial Sequence
  Description of Artificial Sequence: Synthetic oligonucleotide
  Antisense strand to SEQ ID NO: 2321666
guucuggccagagucuucg

SEQ ID NO: 2321668 - RNA, 19 nt, Artificial Sequence
  Description of Artificial Sequence: Synthetic oligonucleotide
  Sense strand starting at position 3140 of SEQ ID NO: 1885170
cuccuaugacuguacuagu

SEQ ID NO: 2321669 - RNA, 19 nt, Artificial Sequence
  Description of Artificial Sequence: Synthetic oligonucleotide
  Antisense strand to SEQ ID NO: 2321668
acuaguacagucauaggag

SEQ ID NO: 2321670 - RNA, 19 nt, Artificial Sequence
  Description of Artificial Sequence: Synthetic oligonucleotide
  Sense strand starting at position 3222 of SEQ ID NO: 1885170
cacggaauacugugaacau

SEQ ID NO: 2321671 - RNA, 19 nt, Artificial Sequence
  Description of Artificial Sequence: Synthetic oligonucleotide
  Antisense strand to SEQ ID NO: 2321670
auguucacaguauuccgug

SEQ ID NO: 2321672 - RNA, 19 nt, Artificial Sequence
  Description of Artificial Sequence: Synthetic oligonucleotide
  Sense strand starting at position 3250 of SEQ ID NO: 1885170
uguauagcacaguaauaac

SEQ ID NO: 2321673 - RNA, 19 nt, Artificial Sequence
  Description of Artificial Sequence: Synthetic oligonucleotide
  Antisense strand to SEQ ID NO: 2321672
guuauuacugugcuauaca

SEQ ID NO: 2321674 - RNA, 19 nt, Artificial Sequence
  Description of Artificial Sequence: Synthetic oligonucleotide
  Sense strand starting at position 3334 of SEQ ID NO: 1885170
acuaaagucuuacuguaau

SEQ ID NO: 2321675 - RNA, 19 nt, Artificial Sequence
  Description of Artificial Sequence: Synthetic oligonucleotide
  Antisense strand to SEQ ID NO: 2321674
auuacaguaagacuuuagu

SEQ ID NO: 2321676 - RNA, 19 nt, Artificial Sequence
  Description of Artificial Sequence: Synthetic oligonucleotide
  Sense strand starting at position 3388 of SEQ ID NO: 1885170
ugugguuuacccuaucaac

SEQ ID NO: 2321677 - RNA, 19 nt, Artificial Sequence
  Description of Artificial Sequence: Synthetic oligonucleotide
  Antisense strand to SEQ ID NO: 2321676
guugauaggguaaaccaca

SEQ ID NO: 2321678 - RNA, 19 nt, Artificial Sequence
  Description of Artificial Sequence: Synthetic oligonucleotide
  Sense strand starting at position 3462 of SEQ ID NO: 1885170
ggaagaugucaguaagagc

SEQ ID NO: 2321679 - RNA, 19 nt, Artificial Sequence
  Description of Artificial Sequence: Synthetic oligonucleotide
  Antisense strand to SEQ ID NO: 2321678
gcucuuacugacaucuucc

SEQ ID NO: 2321680 - RNA, 19 nt, Artificial Sequence
  Description of Artificial Sequence: Synthetic oligonucleotide
  Sense strand starting at position 3553 of SEQ ID NO: 1885170
cucucaaacuggcuagaaa

SEQ ID NO: 2321681 - RNA, 19 nt, Artificial Sequence
  Description of Artificial Sequence: Synthetic oligonucleotide
  Antisense strand to SEQ ID NO: 2321680
uuucuagccaguuugagag

SEQ ID NO: 2321682 - RNA, 19 nt, Artificial Sequence
  Description of Artificial Sequence: Synthetic oligonucleotide
  Sense strand starting at position 3633 of SEQ ID NO: 1885170
ggauaaaugcaguggaagu

SEQ ID NO: 2321683 - RNA, 19 nt, Artificial Sequence
  Description of Artificial Sequence: Synthetic oligonucleotide
  Antisense strand to SEQ ID NO: 2321682
acuuccacugcauuuaucc

SEQ ID NO: 2321684 - RNA, 19 nt, Artificial Sequence
  Description of Artificial Sequence: Synthetic oligonucleotide
  Sense strand starting at position 3648 of SEQ ID NO: 1885170
aagugaggugcuuaaaugu

SEQ ID NO: 2321685 - RNA, 19 nt, Artificial Sequence
  Description of Artificial Sequence: Synthetic oligonucleotide
  Antisense strand to SEQ ID NO: 2321684
acauuuaagcaccucacuu

SEQ ID NO: 2321686 - RNA, 19 nt, Artificial Sequence
  Description of Artificial Sequence: Synthetic oligonucleotide
  Sense strand starting at position 3725 of SEQ ID NO: 1885170
gcagaauucuauucugaua

SEQ ID NO: 2321687 - RNA, 19 nt, Artificial Sequence
  Description of Artificial Sequence: Synthetic oligonucleotide
  Antisense strand to SEQ ID NO: 2321686
uaucagaauagaauucugc

SEQ ID NO: 2321688 - RNA, 19 nt, Artificial Sequence
  Description of Artificial Sequence: Synthetic oligonucleotide
  Sense strand starting at position 3761 of SEQ ID NO: 1885170
aggacaauucuuggagucu

SEQ ID NO: 2321689 - RNA, 19 nt, Artificial Sequence
  Description of Artificial Sequence: Synthetic oligonucleotide
  Antisense strand to SEQ ID NO: 2321688
agacuccaagaauuguccu

SEQ ID NO: 2321690 - RNA, 19 nt, Artificial Sequence
  Description of Artificial Sequence: Synthetic oligonucleotide
  Sense strand starting at position 68 of SEQ ID NO: 1885171
ugcuaaagagaauguaguu

SEQ ID NO: 2321691 - RNA, 19 nt, Artificial Sequence
  Description of Artificial Sequence: Synthetic oligonucleotide
  Antisense strand to SEQ ID NO: 2321690
aacuacauucucuuuagca

SEQ ID NO: 2321692 - RNA, 19 nt, Artificial Sequence
  Description of Artificial Sequence: Synthetic oligonucleotide
  Sense strand starting at position 81 of SEQ ID NO: 1885171
guaguugucaguguagcau

SEQ ID NO: 2321693 - RNA, 19 nt, Artificial Sequence
  Description of Artificial Sequence: Synthetic oligonucleotide
  Antisense strand to SEQ ID NO: 2321692
augcuacacugacaacuac

SEQ ID NO: 2321694 - RNA, 19 nt, Artificial Sequence
  Description of Artificial Sequence: Synthetic oligonucleotide
  Sense strand starting at position 100 of SEQ ID NO: 1885171
cgggacuuuccaggaaagu

SEQ ID NO: 2321695 - RNA, 19 nt, Artificial Sequence
  Description of Artificial Sequence: Synthetic oligonucleotide
  Antisense strand to SEQ ID NO: 2321694
acuuuccuggaaagucccg

SEQ ID NO: 2321696 - RNA, 19 nt, Artificial Sequence
  Description of Artificial Sequence: Synthetic oligonucleotide
  Sense strand starting at position 184 of SEQ ID NO: 1885171
guccuuuggaguuaaugga

SEQ ID NO: 2321697 - RNA, 19 nt, Artificial Sequence
  Description of Artificial Sequence: Synthetic oligonucleotide
  Antisense strand to SEQ ID NO: 2321696
uccauuaacuccaaaggac

SEQ ID NO: 2321698 - RNA, 19 nt, Artificial Sequence
  Description of Artificial Sequence: Synthetic oligonucleotide
  Sense strand starting at position 230 of SEQ ID NO: 1885171
ugcuacauggucuacacau

SEQ ID NO: 2321699 - RNA, 19 nt, Artificial Sequence
  Description of Artificial Sequence: Synthetic oligonucleotide
  Antisense strand to SEQ ID NO: 2321698
auguguagaccauguagca

SEQ ID NO: 2321700 - RNA, 19 nt, Artificial Sequence
  Description of Artificial Sequence: Synthetic oligonucleotide
  Sense strand starting at position 262 of SEQ ID NO: 1885171
gaguuaacaggucaucuuu

SEQ ID NO: 2321701 - RNA, 19 nt, Artificial Sequence
  Description of Artificial Sequence: Synthetic oligonucleotide
  Antisense strand to SEQ ID NO: 2321700
aaagaugaccuguuaacuc

SEQ ID NO: 2321702 - RNA, 19 nt, Artificial Sequence
  Description of Artificial Sequence: Synthetic oligonucleotide
  Sense strand starting at position 311 of SEQ ID NO: 1885171
gguagaagucagugacauc

SEQ ID NO: 2321703 - RNA, 19 nt, Artificial Sequence
  Description of Artificial Sequence: Synthetic oligonucleotide
  Antisense strand to SEQ ID NO: 2321702
gaugucacugacuucuacc

SEQ ID NO: 2321704 - RNA, 19 nt, Artificial Sequence
  Description of Artificial Sequence: Synthetic oligonucleotide
  Sense strand starting at position 312 of SEQ ID NO: 1885171
guagaagucagugacauca

SEQ ID NO: 2321705 - RNA, 19 nt, Artificial Sequence
  Description of Artificial Sequence: Synthetic oligonucleotide
  Antisense strand to SEQ ID NO: 2321704
ugaugucacugacuucuac

SEQ ID NO: 2321706 - RNA, 19 nt, Artificial Sequence
  Description of Artificial Sequence: Synthetic oligonucleotide
  Sense strand starting at position 337 of SEQ ID NO: 1885171
ggguaaaugagucaguguu

SEQ ID NO: 2321707 - RNA, 19 nt, Artificial Sequence
  Description of Artificial Sequence: Synthetic oligonucleotide
  Antisense strand to SEQ ID NO: 2321706
aacacugacucauuuaccc

SEQ ID NO: 2321708 - RNA, 19 nt, Artificial Sequence
  Description of Artificial Sequence: Synthetic oligonucleotide
  Sense strand starting at position 571 of SEQ ID NO: 1885171
augccuugugaguacauca

SEQ ID NO: 2321709 - RNA, 19 nt, Artificial Sequence
  Description of Artificial Sequence: Synthetic oligonucleotide
  Antisense strand to SEQ ID NO: 2321708
ugauguacucacaaggcau

SEQ ID NO: 2321710 - RNA, 19 nt, Artificial Sequence
  Description of Artificial Sequence: Synthetic oligonucleotide
  Sense strand starting at position 576 of SEQ ID NO: 1885171
uugugaguacaucagcuau

SEQ ID NO: 2321711 - RNA, 19 nt, Artificial Sequence
  Description of Artificial Sequence: Synthetic oligonucleotide
  Antisense strand to SEQ ID NO: 2321710
auagcugauguacucacaa

SEQ ID NO: 2321712 - RNA, 19 nt, Artificial Sequence
  Description of Artificial Sequence: Synthetic oligonucleotide
  Sense strand starting at position 589 of SEQ ID NO: 1885171
agcuauauuucugcgagga

SEQ ID NO: 2321713 - RNA, 19 nt, Artificial Sequence
  Description of Artificial Sequence: Synthetic oligonucleotide
  Antisense strand to SEQ ID NO: 2321712
uccucgcagaaauauagcu

SEQ ID NO: 2321714 - RNA, 19 nt, Artificial Sequence
  Description of Artificial Sequence: Synthetic oligonucleotide
  Sense strand starting at position 590 of SEQ ID NO: 1885171
gcuauauuucugcgaggac

SEQ ID NO: 2321715 - RNA, 19 nt, Artificial Sequence
  Description of Artificial Sequence: Synthetic oligonucleotide
  Antisense strand to SEQ ID NO: 2321714
guccucgcagaaauauagc

SEQ ID NO: 2321716 - RNA, 19 nt, Artificial Sequence
  Description of Artificial Sequence: Synthetic oligonucleotide
  Sense strand starting at position 613 of SEQ ID NO: 1885171
uugggaucgcuuuggagaa

SEQ ID NO: 2321717 - RNA, 19 nt, Artificial Sequence
  Description of Artificial Sequence: Synthetic oligonucleotide
  Antisense strand to SEQ ID NO: 2321716
uucuccaaagcgaucccaa

SEQ ID NO: 2321718 - RNA, 19 nt, Artificial Sequence
  Description of Artificial Sequence: Synthetic oligonucleotide
  Sense strand starting at position 630 of SEQ ID NO: 1885171
aagggagauuucugagaag

SEQ ID NO: 2321719 - RNA, 19 nt, Artificial Sequence
  Description of Artificial Sequence: Synthetic oligonucleotide
  Antisense strand to SEQ ID NO: 2321718
cuucucagaaaucucccuu

SEQ ID NO: 2321720 - RNA, 19 nt, Artificial Sequence
  Description of Artificial Sequence: Synthetic oligonucleotide
  Sense strand starting at position 882 of SEQ ID NO: 1885171
agaacagcuuguuuauauc

SEQ ID NO: 2321721 - RNA, 19 nt, Artificial Sequence
  Description of Artificial Sequence: Synthetic oligonucleotide
  Antisense strand to SEQ ID NO: 2321720
gauauaaacaagcuguucu

SEQ ID NO: 2321722 - RNA, 19 nt, Artificial Sequence
  Description of Artificial Sequence: Synthetic oligonucleotide
  Sense strand starting at position 931 of SEQ ID NO: 1885171
ugaggagcucuuuauauac

SEQ ID NO: 2321723 - RNA, 19 nt, Artificial Sequence
  Description of Artificial Sequence: Synthetic oligonucleotide
  Antisense strand to SEQ ID NO: 2321722
guauauaaagagcuccuca

SEQ ID NO: 2321724 - RNA, 19 nt, Artificial Sequence
  Description of Artificial Sequence: Synthetic oligonucleotide
  Sense strand starting at position 1010 of SEQ ID NO: 1885171
ggagcaauaaagugaguca

SEQ ID NO: 2321725 - RNA, 19 nt, Artificial Sequence
  Description of Artificial Sequence: Synthetic oligonucleotide
  Antisense strand to SEQ ID NO: 2321724
ugacucacuuuauugcucc

SEQ ID NO: 2321726 - RNA, 19 nt, Artificial Sequence
  Description of Artificial Sequence: Synthetic oligonucleotide
  Sense strand starting at position 1049 of SEQ ID NO: 1885171
cagugauucccaggccaag

SEQ ID NO: 2321727 - RNA, 19 nt, Artificial Sequence
  Description of Artificial Sequence: Synthetic oligonucleotide
  Antisense strand to SEQ ID NO: 2321726
cuuggccugggaaucacug

SEQ ID NO: 2321728 - RNA, 19 nt, Artificial Sequence
  Description of Artificial Sequence: Synthetic oligonucleotide
  Sense strand starting at position 1092 of SEQ ID NO: 1885171
gucaaacaggcuuauguua

SEQ ID NO: 2321729 - RNA, 19 nt, Artificial Sequence
  Description of Artificial Sequence: Synthetic oligonucleotide
  Antisense strand to SEQ ID NO: 2321728
uaacauaagccuguuugac

SEQ ID NO: 2321730 - RNA, 19 nt, Artificial Sequence
  Description of Artificial Sequence: Synthetic oligonucleotide
  Sense strand starting at position 1126 of SEQ ID NO: 1885171
aaaugcaauguagaguuau

SEQ ID NO: 2321731 - RNA, 19 nt, Artificial Sequence
  Description of Artificial Sequence: Synthetic oligonucleotide
  Antisense strand to SEQ ID NO: 2321730
auaacucuacauugcauuu

SEQ ID NO: 2321732 - RNA, 19 nt, Artificial Sequence
  Description of Artificial Sequence: Synthetic oligonucleotide
  Sense strand starting at position 1202 of SEQ ID NO: 1885171
ggcaucauuugagcucauu

SEQ ID NO: 2321733 - RNA, 19 nt, Artificial Sequence
  Description of Artificial Sequence: Synthetic oligonucleotide
  Antisense strand to SEQ ID NO: 2321732
aaugagcucaaaugaugcc

SEQ ID NO: 2321734 - RNA, 19 nt, Artificial Sequence
  Description of Artificial Sequence: Synthetic oligonucleotide
  Sense strand starting at position 1481 of SEQ ID NO: 1885171
cagagaaggccguggaaua

SEQ ID NO: 2321735 - RNA, 19 nt, Artificial Sequence
  Description of Artificial Sequence: Synthetic oligonucleotide
  Antisense strand to SEQ ID NO: 2321734
uauuccacggccuucucug

SEQ ID NO: 2321736 - RNA, 19 nt, Artificial Sequence
  Description of Artificial Sequence: Synthetic oligonucleotide
  Sense strand starting at position 1482 of SEQ ID NO: 1885171
agagaaggccguggaauaa

SEQ ID NO: 2321737 - RNA, 19 nt, Artificial Sequence
  Description of Artificial Sequence: Synthetic oligonucleotide
  Antisense strand to SEQ ID NO: 2321736
uuauuccacggccuucucu

SEQ ID NO: 2321738 - RNA, 19 nt, Artificial Sequence
  Description of Artificial Sequence: Synthetic oligonucleotide
  Sense strand starting at position 1564 of SEQ ID NO: 1885171
gauucuuggucuuuggaga

SEQ ID NO: 2321739 - RNA, 19 nt, Artificial Sequence
  Description of Artificial Sequence: Synthetic oligonucleotide
  Antisense strand to SEQ ID NO: 2321738
ucuccaaagaccaagaauc

SEQ ID NO: 2321740 - RNA, 19 nt, Artificial Sequence
  Description of Artificial Sequence: Synthetic oligonucleotide
  Sense strand starting at position 1604 of SEQ ID NO: 1885171
ugcauaugccuccagauaa

SEQ ID NO: 2321741 - RNA, 19 nt, Artificial Sequence
  Description of Artificial Sequence: Synthetic oligonucleotide
  Antisense strand to SEQ ID NO: 2321740
uuaucuggaggcauaugca

SEQ ID NO: 2321742 - RNA, 19 nt, Artificial Sequence
  Description of Artificial Sequence: Synthetic oligonucleotide
  Sense strand starting at position 1740 of SEQ ID NO: 1885171
aacugaguacugggcuaau

SEQ ID NO: 2321743 - RNA, 19 nt, Artificial Sequence
  Description of Artificial Sequence: Synthetic oligonucleotide
  Antisense strand to SEQ ID NO: 2321742
auuagcccaguacucaguu

SEQ ID NO: 2321744 - RNA, 19 nt, Artificial Sequence
  Description of Artificial Sequence: Synthetic oligonucleotide
  Sense strand starting at position 1972 of SEQ ID NO: 1885171
gggucucauuggcuggaau

SEQ ID NO: 2321745 - RNA, 19 nt, Artificial Sequence
  Description of Artificial Sequence: Synthetic oligonucleotide
  Antisense strand to SEQ ID NO: 2321744
auuccagccaaugagaccc

SEQ ID NO: 2321746 - RNA, 19 nt, Artificial Sequence
  Description of Artificial Sequence: Synthetic oligonucleotide
  Sense strand starting at position 2358 of SEQ ID NO: 1885171
gacuguggacgaggaaauu

SEQ ID NO: 2321747 - RNA, 19 nt, Artificial Sequence
  Description of Artificial Sequence: Synthetic oligonucleotide
  Antisense strand to SEQ ID NO: 2321746
aauuuccucguccacaguc

SEQ ID NO: 2321748 - RNA, 19 nt, Artificial Sequence
  Description of Artificial Sequence: Synthetic oligonucleotide
  Sense strand starting at position 2364 of SEQ ID NO: 1885171
ggacgaggaaauuguacuu

SEQ ID NO: 2321749 - RNA, 19 nt, Artificial Sequence
  Description of Artificial Sequence: Synthetic oligonucleotide
  Antisense strand to SEQ ID NO: 2321748
aaguacaauuuccucgucc

SEQ ID NO: 2321750 - RNA, 19 nt, Artificial Sequence
  Description of Artificial Sequence: Synthetic oligonucleotide
  Sense strand starting at position 2369 of SEQ ID NO: 1885171
aggaaauuguacuuuccga

SEQ ID NO: 2321751 - RNA, 19 nt, Artificial Sequence
  Description of Artificial Sequence: Synthetic oligonucleotide
  Antisense strand to SEQ ID NO: 2321750
ucggaaaguacaauuuccu

SEQ ID NO: 2321752 - RNA, 19 nt, Artificial Sequence
  Description of Artificial Sequence: Synthetic oligonucleotide
  Sense strand starting at position 2558 of SEQ ID NO: 1885171
gugucuucugcuuuccauu

SEQ ID NO: 2321753 - RNA, 19 nt, Artificial Sequence
  Description of Artificial Sequence: Synthetic oligonucleotide
  Antisense strand to SEQ ID NO: 2321752
aauggaaagcagaagacac

SEQ ID NO: 2321754 - RNA, 19 nt, Artificial Sequence
  Description of Artificial Sequence: Synthetic oligonucleotide
  Sense strand starting at position 2809 of SEQ ID NO: 1885171
caagguuagccagaaccau

SEQ ID NO: 2321755 - RNA, 19 nt, Artificial Sequence
  Description of Artificial Sequence: Synthetic oligonucleotide
  Antisense strand to SEQ ID NO: 2321754
augguucuggcuaaccuug

SEQ ID NO: 2321756 - RNA, 19 nt, Artificial Sequence
  Description of Artificial Sequence: Synthetic oligonucleotide
  Sense strand starting at position 2913 of SEQ ID NO: 1885171
uuuccagucagggaagcau

SEQ ID NO: 2321757 - RNA, 19 nt, Artificial Sequence
  Description of Artificial Sequence: Synthetic oligonucleotide
  Antisense strand to SEQ ID NO: 2321756
augcuucccugacuggaaa

SEQ ID NO: 2321758 - RNA, 19 nt, Artificial Sequence
  Description of Artificial Sequence: Synthetic oligonucleotide
  Sense strand starting at position 3354 of SEQ ID NO: 1885171
ggaagcauuacuuagagca

SEQ ID NO: 2321759 - RNA, 19 nt, Artificial Sequence
  Description of Artificial Sequence: Synthetic oligonucleotide
  Antisense strand to SEQ ID NO: 2321758
ugcucuaaguaaugcuucc

SEQ ID NO: 2321760 - RNA, 19 nt, Artificial Sequence
  Description of Artificial Sequence: Synthetic oligonucleotide
  Sense strand starting at position 3371 of SEQ ID NO: 1885171
cagcguaaauuucuuagca

SEQ ID NO: 2321761 - RNA, 19 nt, Artificial Sequence
  Description of Artificial Sequence: Synthetic oligonucleotide
  Antisense strand to SEQ ID NO: 2321760
ugcuaagaaauuuacgcug

SEQ ID NO: 2321762 - RNA, 19 nt, Artificial Sequence
  Description of Artificial Sequence: Synthetic oligonucleotide
  Sense strand starting at position 3372 of SEQ ID NO: 1885171
agcguaaauuucuuagcaa

SEQ ID NO: 2321763 - RNA, 19 nt, Artificial Sequence
  Description of Artificial Sequence: Synthetic oligonucleotide
  Antisense strand to SEQ ID NO: 2321762
uugcuaagaaauuuacgcu

SEQ ID NO: 2321764 - RNA, 19 nt, Artificial Sequence
  Description of Artificial Sequence: Synthetic oligonucleotide
  Sense strand starting at position 3480 of SEQ ID NO: 1885171
gucugugaaacagguuaga

SEQ ID NO: 2321765 - RNA, 19 nt, Artificial Sequence
  Description of Artificial Sequence: Synthetic oligonucleotide
  Antisense strand to SEQ ID NO: 2321764
ucuaaccuguuucacagac

SEQ ID NO: 2321766 - RNA, 19 nt, Artificial Sequence
  Description of Artificial Sequence: Synthetic oligonucleotide
  Sense strand starting at position 3658 of SEQ ID NO: 1885171
gcguguugggcuucaggau

SEQ ID NO: 2321767 - RNA, 19 nt, Artificial Sequence
  Description of Artificial Sequence: Synthetic oligonucleotide
  Antisense strand to SEQ ID NO: 2321766
auccugaagcccaacacgc

SEQ ID NO: 2321768 - RNA, 19 nt, Artificial Sequence
  Description of Artificial Sequence: Synthetic oligonucleotide
  Sense strand starting at position 3785 of SEQ ID NO: 1885171
cccugucaccuagaccuua

SEQ ID NO: 2321769 - RNA, 19 nt, Artificial Sequence
  Description of Artificial Sequence: Synthetic oligonucleotide
  Antisense strand to SEQ ID NO: 2321768
uaaggucuaggugacaggg

SEQ ID NO: 2321770 - RNA, 19 nt, Artificial Sequence
  Description of Artificial Sequence: Synthetic oligonucleotide
  Sense strand starting at position 72 of SEQ ID NO: 1885172
caaaguacucuccggaaau

SEQ ID NO: 2321771 - RNA, 19 nt, Artificial Sequence
  Description of Artificial Sequence: Synthetic oligonucleotide
  Antisense strand to SEQ ID NO: 2321770
auuuccggagaguacuuug

SEQ ID NO: 2321772 - RNA, 19 nt, Artificial Sequence
  Description of Artificial Sequence: Synthetic oligonucleotide
  Sense strand starting at position 507 of SEQ ID NO: 1885172
ccugcuuucugacuagaag

SEQ ID NO: 2321773 - RNA, 19 nt, Artificial Sequence
  Description of Artificial Sequence: Synthetic oligonucleotide
  Antisense strand to SEQ ID NO: 2321772
cuucuagucagaaagcagg

SEQ ID NO: 2321774 - RNA, 19 nt, Artificial Sequence
  Description of Artificial Sequence: Synthetic oligonucleotide
  Sense strand starting at position 508 of SEQ ID NO: 1885172
cugcuuucugacuagaagu

SEQ ID NO: 2321775 - RNA, 19 nt, Artificial Sequence
  Description of Artificial Sequence: Synthetic oligonucleotide
  Antisense strand to SEQ ID NO: 2321774
acuucuagucagaaagcag

SEQ ID NO: 2321776 - RNA, 19 nt, Artificial Sequence
  Description of Artificial Sequence: Synthetic oligonucleotide
  Sense strand starting at position 510 of SEQ ID NO: 1885172
gcuuucugacuagaagucu

SEQ ID NO: 2321777 - RNA, 19 nt, Artificial Sequence
  Description of Artificial Sequence: Synthetic oligonucleotide
  Antisense strand to SEQ ID NO: 2321776
agacuucuagucagaaagc

SEQ ID NO: 2321778 - RNA, 19 nt, Artificial Sequence
  Description of Artificial Sequence: Synthetic oligonucleotide
  Sense strand starting at position 602 of SEQ ID NO: 1885172
ggguuucuuauguaucagu

SEQ ID NO: 2321779 - RNA, 19 nt, Artificial Sequence
  Description of Artificial Sequence: Synthetic oligonucleotide
  Antisense strand to SEQ ID NO: 2321778
acugauacauaagaaaccc

SEQ ID NO: 2321780 - RNA, 19 nt, Artificial Sequence
  Description of Artificial Sequence: Synthetic oligonucleotide
  Sense strand starting at position 701 of SEQ ID NO: 1885172
gaagcuguagugcaacaau

SEQ ID NO: 2321781 - RNA, 19 nt, Artificial Sequence
  Description of Artificial Sequence: Synthetic oligonucleotide
  Antisense strand to SEQ ID NO: 2321780
auuguugcacuacagcuuc

SEQ ID NO: 2321782 - RNA, 19 nt, Artificial Sequence
  Description of Artificial Sequence: Synthetic oligonucleotide
  Sense strand starting at position 751 of SEQ ID NO: 1885172
gacagaggcuguuugaaag

SEQ ID NO: 2321783 - RNA, 19 nt, Artificial Sequence
  Description of Artificial Sequence: Synthetic oligonucleotide
  Antisense strand to SEQ ID NO: 2321782
cuuucaaacagccucuguc

SEQ ID NO: 2321784 - RNA, 19 nt, Artificial Sequence
  Description of Artificial Sequence: Synthetic oligonucleotide
  Sense strand starting at position 773 of SEQ ID NO: 1885172
uccguagaauccuuaggag

SEQ ID NO: 2321785 - RNA, 19 nt, Artificial Sequence
  Description of Artificial Sequence: Synthetic oligonucleotide
  Antisense strand to SEQ ID NO: 2321784
cuccuaaggauucuacgga

SEQ ID NO: 2321786 - RNA, 19 nt, Artificial Sequence
  Description of Artificial Sequence: Synthetic oligonucleotide
  Sense strand starting at position 906 of SEQ ID NO: 1885172
ucuugacuguauccuagau

SEQ ID NO: 2321787 - RNA, 19 nt, Artificial Sequence
  Description of Artificial Sequence: Synthetic oligonucleotide
  Antisense strand to SEQ ID NO: 2321786
aucuaggauacagucaaga

SEQ ID NO: 2321788 - RNA, 19 nt, Artificial Sequence
  Description of Artificial Sequence: Synthetic oligonucleotide
  Sense strand starting at position 924 of SEQ ID NO: 1885172
uuugaucuucccuagaggu

SEQ ID NO: 2321789 - RNA, 19 nt, Artificial Sequence
  Description of Artificial Sequence: Synthetic oligonucleotide
  Antisense strand to SEQ ID NO: 2321788
accucuagggaagaucaaa

SEQ ID NO: 2321790 - RNA, 19 nt, Artificial Sequence
  Description of Artificial Sequence: Synthetic oligonucleotide
  Sense strand starting at position 926 of SEQ ID NO: 1885172
ugaucuucccuagaggucu

SEQ ID NO: 2321791 - RNA, 19 nt, Artificial Sequence
  Description of Artificial Sequence: Synthetic oligonucleotide
  Antisense strand to SEQ ID NO: 2321790
agaccucuagggaagauca

SEQ ID NO: 2321792 - RNA, 19 nt, Artificial Sequence
  Description of Artificial Sequence: Synthetic oligonucleotide
  Sense strand starting at position 982 of SEQ ID NO: 1885172
cugaaagcccucuaugugu

SEQ ID NO: 2321793 - RNA, 19 nt, Artificial Sequence
  Description of Artificial Sequence: Synthetic oligonucleotide
  Antisense strand to SEQ ID NO: 2321792
acacauagagggcuuucag

SEQ ID NO: 2321794 - RNA, 19 nt, Artificial Sequence
  Description of Artificial Sequence: Synthetic oligonucleotide
  Sense strand starting at position 1011 of SEQ ID NO: 1885172
ugacgugaaagcugaucau

SEQ ID NO: 2321795 - RNA, 19 nt, Artificial Sequence
  Description of Artificial Sequence: Synthetic oligonucleotide
  Antisense strand to SEQ ID NO: 2321794
augaucagcuuucacguca

SEQ ID NO: 2321796 - RNA, 19 nt, Artificial Sequence
  Description of Artificial Sequence: Synthetic oligonucleotide
  Sense strand starting at position 1014 of SEQ ID NO: 1885172
cgugaaagcugaucaucau

SEQ ID NO: 2321797 - RNA, 19 nt, Artificial Sequence
  Description of Artificial Sequence: Synthetic oligonucleotide
  Antisense strand to SEQ ID NO: 2321796
augaugaucagcuuucacg

SEQ ID NO: 2321798 - RNA, 19 nt, Artificial Sequence
  Description of Artificial Sequence: Synthetic oligonucleotide
  Sense strand starting at position 1015 of SEQ ID NO: 1885172
gugaaagcugaucaucaua

SEQ ID NO: 2321799 - RNA, 19 nt, Artificial Sequence
  Description of Artificial Sequence: Synthetic oligonucleotide
  Antisense strand to SEQ ID NO: 2321798
uaugaugaucagcuuucac

SEQ ID NO: 2321800 - RNA, 19 nt, Artificial Sequence
  Description of Artificial Sequence: Synthetic oligonucleotide
  Sense strand starting at position 1099 of SEQ ID NO: 1885172
uuaguauccugcccagaaa

SEQ ID NO: 2321801 - RNA, 19 nt, Artificial Sequence
  Description of Artificial Sequence: Synthetic oligonucleotide
  Antisense strand to SEQ ID NO: 2321800
uuucugggcaggauacuaa

SEQ ID NO: 2321802 - RNA, 19 nt, Artificial Sequence
  Description of Artificial Sequence: Synthetic oligonucleotide
  Sense strand starting at position 1102 of SEQ ID NO: 1885172
guauccugcccagaaaucu

SEQ ID NO: 2321803 - RNA, 19 nt, Artificial Sequence
  Description of Artificial Sequence: Synthetic oligonucleotide
  Antisense strand to SEQ ID NO: 2321802
agauuucugggcaggauac

SEQ ID NO: 2321804 - RNA, 19 nt, Artificial Sequence
  Description of Artificial Sequence: Synthetic oligonucleotide
  Sense strand starting at position 1111 of SEQ ID NO: 1885172
ccagaaaucuccuuggcug

SEQ ID NO: 2321805 - RNA, 19 nt, Artificial Sequence
  Description of Artificial Sequence: Synthetic oligonucleotide
  Antisense strand to SEQ ID NO: 2321804
cagccaaggagauuucugg

SEQ ID NO: 2321806 - RNA, 19 nt, Artificial Sequence
  Description of Artificial Sequence: Synthetic oligonucleotide
  Sense strand starting at position 1113 of SEQ ID NO: 1885172
agaaaucuccuuggcugga

SEQ ID NO: 2321807 - RNA, 19 nt, Artificial Sequence
  Description of Artificial Sequence: Synthetic oligonucleotide
  Antisense strand to SEQ ID NO: 2321806
uccagccaaggagauuucu

SEQ ID NO: 2321808 - RNA, 19 nt, Artificial Sequence
  Description of Artificial Sequence: Synthetic oligonucleotide
  Sense strand starting at position 1126 of SEQ ID NO: 1885172
gcuggacuacuugagcuua

SEQ ID NO: 2321809 - RNA, 19 nt, Artificial Sequence
  Description of Artificial Sequence: Synthetic oligonucleotide
  Antisense strand to SEQ ID NO: 2321808
uaagcucaaguaguccagc

SEQ ID NO: 2321810 - RNA, 19 nt, Artificial Sequence
  Description of Artificial Sequence: Synthetic oligonucleotide
  Sense strand starting at position 1128 of SEQ ID NO: 1885172
uggacuacuugagcuuauu

SEQ ID NO: 2321811 - RNA, 19 nt, Artificial Sequence
  Description of Artificial Sequence: Synthetic oligonucleotide
  Antisense strand to SEQ ID NO: 2321810
aauaagcucaaguagucca

SEQ ID NO: 2321812 - RNA, 19 nt, Artificial Sequence
  Description of Artificial Sequence: Synthetic oligonucleotide
  Sense strand starting at position 1179 of SEQ ID NO: 1885172
augacaguguugccaaauu

SEQ ID NO: 2321813 - RNA, 19 nt, Artificial Sequence
  Description of Artificial Sequence: Synthetic oligonucleotide
  Antisense strand to SEQ ID NO: 2321812
aauuuggcaacacugucau

SEQ ID NO: 2321814 - RNA, 19 nt, Artificial Sequence
  Description of Artificial Sequence: Synthetic oligonucleotide
  Sense strand starting at position 1352 of SEQ ID NO: 1885172
uaaauaugguagucauguu

SEQ ID NO: 2321815 - RNA, 19 nt, Artificial Sequence
  Description of Artificial Sequence: Synthetic oligonucleotide
  Antisense strand to SEQ ID NO: 2321814
aacaugacuaccauauuua

SEQ ID NO: 2321816 - RNA, 19 nt, Artificial Sequence
  Description of Artificial Sequence: Synthetic oligonucleotide
  Sense strand starting at position 2444 of SEQ ID NO: 1885172
cggcauuugugguaauuug

SEQ ID NO: 2321817 - RNA, 19 nt, Artificial Sequence
  Description of Artificial Sequence: Synthetic oligonucleotide
  Antisense strand to SEQ ID NO: 2321816
caaauuaccacaaaugccg

SEQ ID NO: 2321818 - RNA, 19 nt, Artificial Sequence
  Description of Artificial Sequence: Synthetic oligonucleotide
  Sense strand starting at position 2604 of SEQ ID NO: 1885172
acgagaaacucugcuaaga

SEQ ID NO: 2321819 - RNA, 19 nt, Artificial Sequence
  Description of Artificial Sequence: Synthetic oligonucleotide
  Antisense strand to SEQ ID NO: 2321818
ucuuagcagaguuucucgu

SEQ ID NO: 2321820 - RNA, 19 nt, Artificial Sequence
  Description of Artificial Sequence: Synthetic oligonucleotide
  Sense strand starting at position 2615 of SEQ ID NO: 1885172
ugcuaagacucacugaauc

SEQ ID NO: 2321821 - RNA, 19 nt, Artificial Sequence
  Description of Artificial Sequence: Synthetic oligonucleotide
  Antisense strand to SEQ ID NO: 2321820
gauucagugagucuuagca

SEQ ID NO: 2321822 - RNA, 19 nt, Artificial Sequence
  Description of Artificial Sequence: Synthetic oligonucleotide
  Sense strand starting at position 2661 of SEQ ID NO: 1885172
cguuccuugagaggaauaa

SEQ ID NO: 2321823 - RNA, 19 nt, Artificial Sequence
  Description of Artificial Sequence: Synthetic oligonucleotide
  Antisense strand to SEQ ID NO: 2321822
uuauuccucucaaggaacg

SEQ ID NO: 2321824 - RNA, 19 nt, Artificial Sequence
  Description of Artificial Sequence: Synthetic oligonucleotide
  Sense strand starting at position 2673 of SEQ ID NO: 1885172
ggaauaaaccuguguuaua

SEQ ID NO: 2321825 - RNA, 19 nt, Artificial Sequence
  Description of Artificial Sequence: Synthetic oligonucleotide
  Antisense strand to SEQ ID NO: 2321824
uauaacacagguuuauucc

SEQ ID NO: 2321826 - RNA, 19 nt, Artificial Sequence
  Description of Artificial Sequence: Synthetic oligonucleotide
  Sense strand starting at position 2694 of SEQ ID NO: 1885172
acuugucuugcuguguuau

SEQ ID NO: 2321827 - RNA, 19 nt, Artificial Sequence
  Description of Artificial Sequence: Synthetic oligonucleotide
  Antisense strand to SEQ ID NO: 2321826
auaacacagcaagacaagu

SEQ ID NO: 2321828 - RNA, 19 nt, Artificial Sequence
  Description of Artificial Sequence: Synthetic oligonucleotide
  Sense strand starting at position 2818 of SEQ ID NO: 1885172
gugcuugguaaauaauaag

SEQ ID NO: 2321829 - RNA, 19 nt, Artificial Sequence
  Description of Artificial Sequence: Synthetic oligonucleotide
  Antisense strand to SEQ ID NO: 2321828
cuuauuauuuaccaagcac

SEQ ID NO: 2321830 - RNA, 19 nt, Artificial Sequence
  Description of Artificial Sequence: Synthetic oligonucleotide
  Sense strand starting at position 3007 of SEQ ID NO: 1885172
cagucagucugaccuugaa

SEQ ID NO: 2321831 - RNA, 19 nt, Artificial Sequence
  Description of Artificial Sequence: Synthetic oligonucleotide
  Antisense strand to SEQ ID NO: 2321830
uucaaggucagacugacug

SEQ ID NO: 2321832 - RNA, 19 nt, Artificial Sequence
  Description of Artificial Sequence: Synthetic oligonucleotide
  Sense strand starting at position 3033 of SEQ ID NO: 1885172
gucugagggccugaaggau

SEQ ID NO: 2321833 - RNA, 19 nt, Artificial Sequence
  Description of Artificial Sequence: Synthetic oligonucleotide
  Antisense strand to SEQ ID NO: 2321832
auccuucaggcccucagac

SEQ ID NO: 2321834 - RNA, 19 nt, Artificial Sequence
  Description of Artificial Sequence: Synthetic oligonucleotide
  Sense strand starting at position 3041 of SEQ ID NO: 1885172
gccugaaggaucugaaguc

SEQ ID NO: 2321835 - RNA, 19 nt, Artificial Sequence
  Description of Artificial Sequence: Synthetic oligonucleotide
  Antisense strand to SEQ ID NO: 2321834
gacuucagauccuucaggc

SEQ ID NO: 2321836 - RNA, 19 nt, Artificial Sequence
  Description of Artificial Sequence: Synthetic oligonucleotide
  Sense strand starting at position 3099 of SEQ ID NO: 1885172
cuuuauuucugguugcuga

SEQ ID NO: 2321837 - RNA, 19 nt, Artificial Sequence
  Description of Artificial Sequence: Synthetic oligonucleotide
  Antisense strand to SEQ ID NO: 2321836
ucagcaaccagaaauaaag

SEQ ID NO: 2321838 - RNA, 19 nt, Artificial Sequence
  Description of Artificial Sequence: Synthetic oligonucleotide
  Sense strand starting at position 3118 of SEQ ID NO: 1885172
gucucuauaggucagccaa

SEQ ID NO: 2321839 - RNA, 19 nt, Artificial Sequence
  Description of Artificial Sequence: Synthetic oligonucleotide
  Antisense strand to SEQ ID NO: 2321838
uuggcugaccuauagagac

SEQ ID NO: 2321840 - RNA, 19 nt, Artificial Sequence
  Description of Artificial Sequence: Synthetic oligonucleotide
  Sense strand starting at position 3125 of SEQ ID NO: 1885172
uaggucagccaaugauuaa

SEQ ID NO: 2321841 - RNA, 19 nt, Artificial Sequence
  Description of Artificial Sequence: Synthetic oligonucleotide
  Antisense strand to SEQ ID NO: 2321840
uuaaucauuggcugaccua

SEQ ID NO: 2321842 - RNA, 19 nt, Artificial Sequence
  Description of Artificial Sequence: Synthetic oligonucleotide
  Sense strand starting at position 3947 of SEQ ID NO: 1885172
ugguuuaugaguggcuaaa

SEQ ID NO: 2321843 - RNA, 19 nt, Artificial Sequence
  Description of Artificial Sequence: Synthetic oligonucleotide
  Antisense strand to SEQ ID NO: 2321842
uuuagccacucauaaacca

SEQ ID NO: 2321844 - RNA, 19 nt, Artificial Sequence
  Description of Artificial Sequence: Synthetic oligonucleotide
  Sense strand starting at position 3949 of SEQ ID NO: 1885172
guuuaugaguggcuaaaug

SEQ ID NO: 2321845 - RNA, 19 nt, Artificial Sequence
  Description of Artificial Sequence: Synthetic oligonucleotide
  Antisense strand to SEQ ID NO: 2321844
cauuuagccacucauaaac

SEQ ID NO: 2321846 - RNA, 19 nt, Artificial Sequence
  Description of Artificial Sequence: Synthetic oligonucleotide
  Sense strand starting at position 3965 of SEQ ID NO: 1885172
auggauugugugggagaua

SEQ ID NO: 2321847 - RNA, 19 nt, Artificial Sequence
  Description of Artificial Sequence: Synthetic oligonucleotide
  Antisense strand to SEQ ID NO: 2321846
uaucucccacacaauccau

SEQ ID NO: 2321848 - RNA, 19 nt, Artificial Sequence
  Description of Artificial Sequence: Synthetic oligonucleotide
  Sense strand starting at position 3976 of SEQ ID NO: 1885172
gggagauaugcuuagcaag

SEQ ID NO: 2321849 - RNA, 19 nt, Artificial Sequence
  Description of Artificial Sequence: Synthetic oligonucleotide
  Antisense strand to SEQ ID NO: 2321848
cuugcuaagcauaucuccc

SEQ ID NO: 2321850 - RNA, 19 nt, Artificial Sequence
  Description of Artificial Sequence: Synthetic oligonucleotide
  Sense strand starting at position 56 of SEQ ID NO: 1885173
cggcuauucucauuuauug

SEQ ID NO: 2321851 - RNA, 19 nt, Artificial Sequence
  Description of Artificial Sequence: Synthetic oligonucleotide
  Antisense strand to SEQ ID NO: 2321850
caauaaaugagaauagccg

SEQ ID NO: 2321852 - RNA, 19 nt, Artificial Sequence
  Description of Artificial Sequence: Synthetic oligonucleotide
  Sense strand starting at position 81 of SEQ ID NO: 1885173
cucuuccaugcauaguaua

SEQ ID NO: 2321853 - RNA, 19 nt, Artificial Sequence
  Description of Artificial Sequence: Synthetic oligonucleotide
  Antisense strand to SEQ ID NO: 2321852
uauacuaugcauggaagag

SEQ ID NO: 2321854 - RNA, 19 nt, Artificial Sequence
  Description of Artificial Sequence: Synthetic oligonucleotide
  Sense strand starting at position 103 of SEQ ID NO: 1885173
ugauuuauguacuagaagg

SEQ ID NO: 2321855 - RNA, 19 nt, Artificial Sequence
  Description of Artificial Sequence: Synthetic oligonucleotide
  Antisense strand to SEQ ID NO: 2321854
ccuucuaguacauaaauca

SEQ ID NO: 2321856 - RNA, 19 nt, Artificial Sequence
  Description of Artificial Sequence: Synthetic oligonucleotide
  Sense strand starting at position 108 of SEQ ID NO: 1885173
uauguacuagaagguuaua

SEQ ID NO: 2321857 - RNA, 19 nt, Artificial Sequence
  Description of Artificial Sequence: Synthetic oligonucleotide
  Antisense strand to SEQ ID NO: 2321856
uauaaccuucuaguacaua

SEQ ID NO: 2321858 - RNA, 19 nt, Artificial Sequence
  Description of Artificial Sequence: Synthetic oligonucleotide
  Sense strand starting at position 111 of SEQ ID NO: 1885173
guacuagaagguuauaccu

SEQ ID NO: 2321859 - RNA, 19 nt, Artificial Sequence
  Description of Artificial Sequence: Synthetic oligonucleotide
  Antisense strand to SEQ ID NO: 2321858
agguauaaccuucuaguac

SEQ ID NO: 2321860 - RNA, 19 nt, Artificial Sequence
  Description of Artificial Sequence: Synthetic oligonucleotide
  Sense strand starting at position 304 of SEQ ID NO: 1885173
gccuuaauagcagaaucac

SEQ ID NO: 2321861 - RNA, 19 nt, Artificial Sequence
  Description of Artificial Sequence: Synthetic oligonucleotide
  Antisense strand to SEQ ID NO: 2321860
gugauucugcuauuaaggc

SEQ ID NO: 2321862 - RNA, 19 nt, Artificial Sequence
  Description of Artificial Sequence: Synthetic oligonucleotide
  Sense strand starting at position 313 of SEQ ID NO: 1885173
gcagaaucacaauguaagu

SEQ ID NO: 2321863 - RNA, 19 nt, Artificial Sequence
  Description of Artificial Sequence: Synthetic oligonucleotide
  Antisense strand to SEQ ID NO: 2321862
acuuacauugugauucugc

SEQ ID NO: 2321864 - RNA, 19 nt, Artificial Sequence
  Description of Artificial Sequence: Synthetic oligonucleotide
  Sense strand starting at position 380 of SEQ ID NO: 1885173
ugugucucacuacagagaa

SEQ ID NO: 2321865 - RNA, 19 nt, Artificial Sequence
  Description of Artificial Sequence: Synthetic oligonucleotide
  Antisense strand to SEQ ID NO: 2321864
uucucuguagugagacaca

SEQ ID NO: 2321866 - RNA, 19 nt, Artificial Sequence
  Description of Artificial Sequence: Synthetic oligonucleotide
  Sense strand starting at position 549 of SEQ ID NO: 1885173
cuuguauugcuacacagua

SEQ ID NO: 2321867 - RNA, 19 nt, Artificial Sequence
  Description of Artificial Sequence: Synthetic oligonucleotide
  Antisense strand to SEQ ID NO: 2321866
uacuguguagcaauacaag

SEQ ID NO: 2321868 - RNA, 19 nt, Artificial Sequence
  Description of Artificial Sequence: Synthetic oligonucleotide
  Sense strand starting at position 554 of SEQ ID NO: 1885173
auugcuacacaguaaugua

SEQ ID NO: 2321869 - RNA, 19 nt, Artificial Sequence
  Description of Artificial Sequence: Synthetic oligonucleotide
  Antisense strand to SEQ ID NO: 2321868
uacauuacuguguagcaau

SEQ ID NO: 2321870 - RNA, 19 nt, Artificial Sequence
  Description of Artificial Sequence: Synthetic oligonucleotide
  Sense strand starting at position 563 of SEQ ID NO: 1885173
caguaauguagcgaggaag

SEQ ID NO: 2321871 - RNA, 19 nt, Artificial Sequence
  Description of Artificial Sequence: Synthetic oligonucleotide
  Antisense strand to SEQ ID NO: 2321870
cuuccucgcuacauuacug

SEQ ID NO: 2321872 - RNA, 19 nt, Artificial Sequence
  Description of Artificial Sequence: Synthetic oligonucleotide
  Sense strand starting at position 633 of SEQ ID NO: 1885173
gucucacuugcauaaagaa

SEQ ID NO: 2321873 - RNA, 19 nt, Artificial Sequence
  Description of Artificial Sequence: Synthetic oligonucleotide
  Antisense strand to SEQ ID NO: 2321872
uucuuuaugcaagugagac

SEQ ID NO: 2321874 - RNA, 19 nt, Artificial Sequence
  Description of Artificial Sequence: Synthetic oligonucleotide
  Sense strand starting at position 811 of SEQ ID NO: 1885173
cccuauaugcgcuagaaua

SEQ ID NO: 2321875 - RNA, 19 nt, Artificial Sequence
  Description of Artificial Sequence: Synthetic oligonucleotide
  Antisense strand to SEQ ID NO: 2321874
uauucuagcgcauauaggg

SEQ ID NO: 2321876 - RNA, 19 nt, Artificial Sequence
  Description of Artificial Sequence: Synthetic oligonucleotide
  Sense strand starting at position 813 of SEQ ID NO: 1885173
cuauaugcgcuagaauauc

SEQ ID NO: 2321877 - RNA, 19 nt, Artificial Sequence
  Description of Artificial Sequence: Synthetic oligonucleotide
  Antisense strand to SEQ ID NO: 2321876
gauauucuagcgcauauag

SEQ ID NO: 2321878 - RNA, 19 nt, Artificial Sequence
  Description of Artificial Sequence: Synthetic oligonucleotide
  Sense strand starting at position 889 of SEQ ID NO: 1885173
gcaauugacuuucucagag

SEQ ID NO: 2321879 - RNA, 19 nt, Artificial Sequence
  Description of Artificial Sequence: Synthetic oligonucleotide
  Antisense strand to SEQ ID NO: 2321878
cucugagaaagucaauugc

SEQ ID NO: 2321880 - RNA, 19 nt, Artificial Sequence
  Description of Artificial Sequence: Synthetic oligonucleotide
  Sense strand starting at position 2068 of SEQ ID NO: 1885173
gcgugugcucauguggcua

SEQ ID NO: 2321881 - RNA, 19 nt, Artificial Sequence
  Description of Artificial Sequence: Synthetic oligonucleotide
  Antisense strand to SEQ ID NO: 2321880
uagccacaugagcacacgc

SEQ ID NO: 2321882 - RNA, 19 nt, Artificial Sequence
  Description of Artificial Sequence: Synthetic oligonucleotide
  Sense strand starting at position 2231 of SEQ ID NO: 1885173
aguuguagccaccaauuga

SEQ ID NO: 2321883 - RNA, 19 nt, Artificial Sequence
  Description of Artificial Sequence: Synthetic oligonucleotide
  Antisense strand to SEQ ID NO: 2321882
ucaauugguggcuacaacu

SEQ ID NO: 2321884 - RNA, 19 nt, Artificial Sequence
  Description of Artificial Sequence: Synthetic oligonucleotide
  Sense strand starting at position 2278 of SEQ ID NO: 1885173
guggaauaguucucauauu

SEQ ID NO: 2321885 - RNA, 19 nt, Artificial Sequence
  Description of Artificial Sequence: Synthetic oligonucleotide
  Antisense strand to SEQ ID NO: 2321884
aauaugagaacuauuccac

SEQ ID NO: 2321886 - RNA, 19 nt, Artificial Sequence
  Description of Artificial Sequence: Synthetic oligonucleotide
  Sense strand starting at position 2286 of SEQ ID NO: 1885173
guucucauauuccugagau

SEQ ID NO: 2321887 - RNA, 19 nt, Artificial Sequence
  Description of Artificial Sequence: Synthetic oligonucleotide
  Antisense strand to SEQ ID NO: 2321886
aucucaggaauaugagaac

SEQ ID NO: 2321888 - RNA, 19 nt, Artificial Sequence
  Description of Artificial Sequence: Synthetic oligonucleotide
  Sense strand starting at position 2319 of SEQ ID NO: 1885173
gucaucuaccgucauuaaa

SEQ ID NO: 2321889 - RNA, 19 nt, Artificial Sequence
  Description of Artificial Sequence: Synthetic oligonucleotide
  Antisense strand to SEQ ID NO: 2321888
uuuaaugacgguagaugac

SEQ ID NO: 2321890 - RNA, 19 nt, Artificial Sequence
  Description of Artificial Sequence: Synthetic oligonucleotide
  Sense strand starting at position 2347 of SEQ ID NO: 1885173
ucguuccauuaucugaaga

SEQ ID NO: 2321891 - RNA, 19 nt, Artificial Sequence
  Description of Artificial Sequence: Synthetic oligonucleotide
  Antisense strand to SEQ ID NO: 2321890
ucuucagauaauggaacga

SEQ ID NO: 2321892 - RNA, 19 nt, Artificial Sequence
  Description of Artificial Sequence: Synthetic oligonucleotide
  Sense strand starting at position 2399 of SEQ ID NO: 1885173
cucauauauuggccuagua

SEQ ID NO: 2321893 - RNA, 19 nt, Artificial Sequence
  Description of Artificial Sequence: Synthetic oligonucleotide
  Antisense strand to SEQ ID NO: 2321892
uacuaggccaauauaugag

SEQ ID NO: 2321894 - RNA, 19 nt, Artificial Sequence
  Description of Artificial Sequence: Synthetic oligonucleotide
  Sense strand starting at position 2411 of SEQ ID NO: 1885173
ccuaguaacugacuuagca

SEQ ID NO: 2321895 - RNA, 19 nt, Artificial Sequence
  Description of Artificial Sequence: Synthetic oligonucleotide
  Antisense strand to SEQ ID NO: 2321894
ugcuaagucaguuacuagg

SEQ ID NO: 2321896 - RNA, 19 nt, Artificial Sequence
  Description of Artificial Sequence: Synthetic oligonucleotide
  Sense strand starting at position 2415 of SEQ ID NO: 1885173
guaacugacuuagcauauu

SEQ ID NO: 2321897 - RNA, 19 nt, Artificial Sequence
  Description of Artificial Sequence: Synthetic oligonucleotide
  Antisense strand to SEQ ID NO: 2321896
aauaugcuaagucaguuac

SEQ ID NO: 2321898 - RNA, 19 nt, Artificial Sequence
  Description of Artificial Sequence: Synthetic oligonucleotide
  Sense strand starting at position 2454 of SEQ ID NO: 1885173
gaaucuauuccaggaguaa

SEQ ID NO: 2321899 - RNA, 19 nt, Artificial Sequence
  Description of Artificial Sequence: Synthetic oligonucleotide
  Antisense strand to SEQ ID NO: 2321898
uuacuccuggaauagauuc

SEQ ID NO: 2321900 - RNA, 19 nt, Artificial Sequence
  Description of Artificial Sequence: Synthetic oligonucleotide
  Sense strand starting at position 2611 of SEQ ID NO: 1885173
guaagucuuugaguuaaac

SEQ ID NO: 2321901 - RNA, 19 nt, Artificial Sequence
  Description of Artificial Sequence: Synthetic oligonucleotide
  Antisense strand to SEQ ID NO: 2321900
guuuaacucaaagacuuac

SEQ ID NO: 2321902 - RNA, 19 nt, Artificial Sequence
  Description of Artificial Sequence: Synthetic oligonucleotide
  Sense strand starting at position 2635 of SEQ ID NO: 1885173
uggagucccuuugcauuua

SEQ ID NO: 2321903 - RNA, 19 nt, Artificial Sequence
  Description of Artificial Sequence: Synthetic oligonucleotide
  Antisense strand to SEQ ID NO: 2321902
uaaaugcaaagggacucca

SEQ ID NO: 2321904 - RNA, 19 nt, Artificial Sequence
  Description of Artificial Sequence: Synthetic oligonucleotide
  Sense strand starting at position 2659 of SEQ ID NO: 1885173
ugugauuuguuggcucagu

SEQ ID NO: 2321905 - RNA, 19 nt, Artificial Sequence
  Description of Artificial Sequence: Synthetic oligonucleotide
  Antisense strand to SEQ ID NO: 2321904
acugagccaacaaaucaca

SEQ ID NO: 2321906 - RNA, 19 nt, Artificial Sequence
  Description of Artificial Sequence: Synthetic oligonucleotide
  Sense strand starting at position 2660 of SEQ ID NO: 1885173
gugauuuguuggcucagua

SEQ ID NO: 2321907 - RNA, 19 nt, Artificial Sequence
  Description of Artificial Sequence: Synthetic oligonucleotide
  Antisense strand to SEQ ID NO: 2321906
uacugagccaacaaaucac

SEQ ID NO: 2321908 - RNA, 19 nt, Artificial Sequence
  Description of Artificial Sequence: Synthetic oligonucleotide
  Sense strand starting at position 2696 of SEQ ID NO: 1885173
ugguaaacagcucaauauu

SEQ ID NO: 2321909 - RNA, 19 nt, Artificial Sequence
  Description of Artificial Sequence: Synthetic oligonucleotide
  Antisense strand to SEQ ID NO: 2321908
aauauugagcuguuuacca

SEQ ID NO: 2321910 - RNA, 19 nt, Artificial Sequence
  Description of Artificial Sequence: Synthetic oligonucleotide
  Sense strand starting at position 2754 of SEQ ID NO: 1885173
gaguucugcuacuuuaaag

SEQ ID NO: 2321911 - RNA, 19 nt, Artificial Sequence
  Description of Artificial Sequence: Synthetic oligonucleotide
  Antisense strand to SEQ ID NO: 2321910
cuuuaaaguagcagaacuc

SEQ ID NO: 2321912 - RNA, 19 nt, Artificial Sequence
  Description of Artificial Sequence: Synthetic oligonucleotide
  Sense strand starting at position 2866 of SEQ ID NO: 1885173
uuuggaauauagucaggau

SEQ ID NO: 2321913 - RNA, 19 nt, Artificial Sequence
  Description of Artificial Sequence: Synthetic oligonucleotide
  Antisense strand to SEQ ID NO: 2321912
auccugacuauauuccaaa

SEQ ID NO: 2321914 - RNA, 19 nt, Artificial Sequence
  Description of Artificial Sequence: Synthetic oligonucleotide
  Sense strand starting at position 3040 of SEQ ID NO: 1885173
gguugauugaaucaguuuc

SEQ ID NO: 2321915 - RNA, 19 nt, Artificial Sequence
  Description of Artificial Sequence: Synthetic oligonucleotide
  Antisense strand to SEQ ID NO: 2321914
gaaacugauucaaucaacc

SEQ ID NO: 2321916 - RNA, 19 nt, Artificial Sequence
  Description of Artificial Sequence: Synthetic oligonucleotide
  Sense strand starting at position 3042 of SEQ ID NO: 1885173
uugauugaaucaguuucuu

SEQ ID NO: 2321917 - RNA, 19 nt, Artificial Sequence
  Description of Artificial Sequence: Synthetic oligonucleotide
  Antisense strand to SEQ ID NO: 2321916
aagaaacugauucaaucaa

SEQ ID NO: 2321918 - RNA, 19 nt, Artificial Sequence
  Description of Artificial Sequence: Synthetic oligonucleotide
  Sense strand starting at position 3103 of SEQ ID NO: 1885173
auguauaaccuauaugugu

SEQ ID NO: 2321919 - RNA, 19 nt, Artificial Sequence
  Description of Artificial Sequence: Synthetic oligonucleotide
  Antisense strand to SEQ ID NO: 2321918
acacauauagguuauacau

SEQ ID NO: 2321920 - RNA, 19 nt, Artificial Sequence
  Description of Artificial Sequence: Synthetic oligonucleotide
  Sense strand starting at position 3163 of SEQ ID NO: 1885173
ugacauaugugguuauaga

SEQ ID NO: 2321921 - RNA, 19 nt, Artificial Sequence
  Description of Artificial Sequence: Synthetic oligonucleotide
  Antisense strand to SEQ ID NO: 2321920
ucuauaaccacauauguca

SEQ ID NO: 2321922 - RNA, 19 nt, Artificial Sequence
  Description of Artificial Sequence: Synthetic oligonucleotide
  Sense strand starting at position 3420 of SEQ ID NO: 1885173
gaauuauaacguuagguac

SEQ ID NO: 2321923 - RNA, 19 nt, Artificial Sequence
  Description of Artificial Sequence: Synthetic oligonucleotide
  Antisense strand to SEQ ID NO: 2321922
guaccuaacguuauaauuc

SEQ ID NO: 2321924 - RNA, 19 nt, Artificial Sequence
  Description of Artificial Sequence: Synthetic oligonucleotide
  Sense strand starting at position 3438 of SEQ ID NO: 1885173
cuaugaauacuaugaaguu

SEQ ID NO: 2321925 - RNA, 19 nt, Artificial Sequence
  Description of Artificial Sequence: Synthetic oligonucleotide
  Antisense strand to SEQ ID NO: 2321924
aacuucauaguauucauag

SEQ ID NO: 2321926 - RNA, 19 nt, Artificial Sequence
  Description of Artificial Sequence: Synthetic oligonucleotide
  Sense strand starting at position 3822 of SEQ ID NO: 1885173
gcauuaguaguuuauaaag

SEQ ID NO: 2321927 - RNA, 19 nt, Artificial Sequence
  Description of Artificial Sequence: Synthetic oligonucleotide
  Antisense strand to SEQ ID NO: 2321926
cuuuauaaacuacuaaugc

SEQ ID NO: 2321928 - RNA, 19 nt, Artificial Sequence
  Description of Artificial Sequence: Synthetic oligonucleotide
  Sense strand starting at position 3923 of SEQ ID NO: 1885173
caaacaguuuaguuaggga

SEQ ID NO: 2321929 - RNA, 19 nt, Artificial Sequence
  Description of Artificial Sequence: Synthetic oligonucleotide
  Antisense strand to SEQ ID NO: 2321928
ucccuaacuaaacuguuug

SEQ ID NO: 2321930 - RNA, 19 nt, Artificial Sequence
  Description of Artificial Sequence: Synthetic oligonucleotide
  Sense strand starting at position 397 of SEQ ID NO: 1885174
cuaccugugugucuaauac

SEQ ID NO: 2321931 - RNA, 19 nt, Artificial Sequence
  Description of Artificial Sequence: Synthetic oligonucleotide
  Antisense strand to SEQ ID NO: 2321930
guauuagacacacagguag

SEQ ID NO: 2321932 - RNA, 19 nt, Artificial Sequence
  Description of Artificial Sequence: Synthetic oligonucleotide
  Sense strand starting at position 408 of SEQ ID NO: 1885174
ucuaauacaugucuguauu

SEQ ID NO: 2321933 - RNA, 19 nt, Artificial Sequence
  Description of Artificial Sequence: Synthetic oligonucleotide
  Antisense strand to SEQ ID NO: 2321932
aauacagacauguauuaga

SEQ ID NO: 2321934 - RNA, 19 nt, Artificial Sequence
  Description of Artificial Sequence: Synthetic oligonucleotide
  Sense strand starting at position 418 of SEQ ID NO: 1885174
gucuguauuuaugugucau

SEQ ID NO: 2321935 - RNA, 19 nt, Artificial Sequence
  Description of Artificial Sequence: Synthetic oligonucleotide
  Antisense strand to SEQ ID NO: 2321934
augacacauaaauacagac

SEQ ID NO: 2321936 - RNA, 19 nt, Artificial Sequence
  Description of Artificial Sequence: Synthetic oligonucleotide
  Sense strand starting at position 426 of SEQ ID NO: 1885174
uuaugugucauguauaugu

SEQ ID NO: 2321937 - RNA, 19 nt, Artificial Sequence
  Description of Artificial Sequence: Synthetic oligonucleotide
  Antisense strand to SEQ ID NO: 2321936
acauauacaugacacauaa

SEQ ID NO: 2321938 - RNA, 19 nt, Artificial Sequence
  Description of Artificial Sequence: Synthetic oligonucleotide
  Sense strand starting at position 428 of SEQ ID NO: 1885174
augugucauguauauguuu

SEQ ID NO: 2321939 - RNA, 19 nt, Artificial Sequence
  Description of Artificial Sequence: Synthetic oligonucleotide
  Antisense strand to SEQ ID NO: 2321938
aaacauauacaugacacau

SEQ ID NO: 2321940 - RNA, 19 nt, Artificial Sequence
  Description of Artificial Sequence: Synthetic oligonucleotide
  Sense strand starting at position 646 of SEQ ID NO: 1885174
gucaauauacauuguuguu

SEQ ID NO: 2321941 - RNA, 19 nt, Artificial Sequence
  Description of Artificial Sequence: Synthetic oligonucleotide
  Antisense strand to SEQ ID NO: 2321940
aacaacaauguauauugac

SEQ ID NO: 2321942 - RNA, 19 nt, Artificial Sequence
  Description of Artificial Sequence: Synthetic oligonucleotide
  Sense strand starting at position 651 of SEQ ID NO: 1885174
uauacauuguuguuuagag

SEQ ID NO: 2321943 - RNA, 19 nt, Artificial Sequence
  Description of Artificial Sequence: Synthetic oligonucleotide
  Antisense strand to SEQ ID NO: 2321942
cucuaaacaacaauguaua

SEQ ID NO: 2321944 - RNA, 19 nt, Artificial Sequence
  Description of Artificial Sequence: Synthetic oligonucleotide
  Sense strand starting at position 652 of SEQ ID NO: 1885174
auacauuguuguuuagagu

SEQ ID NO: 2321945 - RNA, 19 nt, Artificial Sequence
  Description of Artificial Sequence: Synthetic oligonucleotide
  Antisense strand to SEQ ID NO: 2321944
acucuaaacaacaauguau

SEQ ID NO: 2321946 - RNA, 19 nt, Artificial Sequence
  Description of Artificial Sequence: Synthetic oligonucleotide
  Sense strand starting at position 659 of SEQ ID NO: 1885174
guuguuuagagucauuggu

SEQ ID NO: 2321947 - RNA, 19 nt, Artificial Sequence
  Description of Artificial Sequence: Synthetic oligonucleotide
  Antisense strand to SEQ ID NO: 2321946
accaaugacucuaaacaac

SEQ ID NO: 2321948 - RNA, 19 nt, Artificial Sequence
  Description of Artificial Sequence: Synthetic oligonucleotide
  Sense strand starting at position 661 of SEQ ID NO: 1885174
uguuuagagucauugguca

SEQ ID NO: 2321949 - RNA, 19 nt, Artificial Sequence
  Description of Artificial Sequence: Synthetic oligonucleotide
  Antisense strand to SEQ ID NO: 2321948
ugaccaaugacucuaaaca

SEQ ID NO: 2321950 - RNA, 19 nt, Artificial Sequence
  Description of Artificial Sequence: Synthetic oligonucleotide
  Sense strand starting at position 665 of SEQ ID NO: 1885174
uagagucauuggucaggca

SEQ ID NO: 2321951 - RNA, 19 nt, Artificial Sequence
  Description of Artificial Sequence: Synthetic oligonucleotide
  Antisense strand to SEQ ID NO: 2321950
ugccugaccaaugacucua

SEQ ID NO: 2321952 - RNA, 19 nt, Artificial Sequence
  Description of Artificial Sequence: Synthetic oligonucleotide
  Sense strand starting at position 767 of SEQ ID NO: 1885174
guacuauauuuguuggugu

SEQ ID NO: 2321953 - RNA, 19 nt, Artificial Sequence
  Description of Artificial Sequence: Synthetic oligonucleotide
  Antisense strand to SEQ ID NO: 2321952
acaccaacaaauauaguac

SEQ ID NO: 2321954 - RNA, 19 nt, Artificial Sequence
  Description of Artificial Sequence: Synthetic oligonucleotide
  Sense strand starting at position 770 of SEQ ID NO: 1885174
cuauauuuguugguguaau

SEQ ID NO: 2321955 - RNA, 19 nt, Artificial Sequence
  Description of Artificial Sequence: Synthetic oligonucleotide
  Antisense strand to SEQ ID NO: 2321954
auuacaccaacaaauauag

SEQ ID NO: 2321956 - RNA, 19 nt, Artificial Sequence
  Description of Artificial Sequence: Synthetic oligonucleotide
  Sense strand starting at position 778 of SEQ ID NO: 1885174
guugguguaauuuguugau

SEQ ID NO: 2321957 - RNA, 19 nt, Artificial Sequence
  Description of Artificial Sequence: Synthetic oligonucleotide
  Antisense strand to SEQ ID NO: 2321956
aucaacaaauuacaccaac

SEQ ID NO: 2321958 - RNA, 19 nt, Artificial Sequence
  Description of Artificial Sequence: Synthetic oligonucleotide
  Sense strand starting at position 790 of SEQ ID NO: 1885174
uguugauaaauagggcauu

SEQ ID NO: 2321959 - RNA, 19 nt, Artificial Sequence
  Description of Artificial Sequence: Synthetic oligonucleotide
  Antisense strand to SEQ ID NO: 2321958
aaugcccuauuuaucaaca

SEQ ID NO: 2321960 - RNA, 19 nt, Artificial Sequence
  Description of Artificial Sequence: Synthetic oligonucleotide
  Sense strand starting at position 834 of SEQ ID NO: 1885174
gcuaaauccugaguuaauc

SEQ ID NO: 2321961 - RNA, 19 nt, Artificial Sequence
  Description of Artificial Sequence: Synthetic oligonucleotide
  Antisense strand to SEQ ID NO: 2321960
gauuaacucaggauuuagc

SEQ ID NO: 2321962 - RNA, 19 nt, Artificial Sequence
  Description of Artificial Sequence: Synthetic oligonucleotide
  Sense strand starting at position 843 of SEQ ID NO: 1885174
ugaguuaauccaggacuuc

SEQ ID NO: 2321963 - RNA, 19 nt, Artificial Sequence
  Description of Artificial Sequence: Synthetic oligonucleotide
  Antisense strand to SEQ ID NO: 2321962
gaaguccuggauuaacuca

SEQ ID NO: 2321964 - RNA, 19 nt, Artificial Sequence
  Description of Artificial Sequence: Synthetic oligonucleotide
  Sense strand starting at position 852 of SEQ ID NO: 1885174
ccaggacuucuugguaaag

SEQ ID NO: 2321965 - RNA, 19 nt, Artificial Sequence
  Description of Artificial Sequence: Synthetic oligonucleotide
  Antisense strand to SEQ ID NO: 2321964
cuuuaccaagaaguccugg

SEQ ID NO: 2321966 - RNA, 19 nt, Artificial Sequence
  Description of Artificial Sequence: Synthetic oligonucleotide
  Sense strand starting at position 853 of SEQ ID NO: 1885174
caggacuucuugguaaagu

SEQ ID NO: 2321967 - RNA, 19 nt, Artificial Sequence
  Description of Artificial Sequence: Synthetic oligonucleotide
  Antisense strand to SEQ ID NO: 2321966
acuuuaccaagaaguccug

SEQ ID NO: 2321968 - RNA, 19 nt, Artificial Sequence
  Description of Artificial Sequence: Synthetic oligonucleotide
  Sense strand starting at position 864 of SEQ ID NO: 1885174
gguaaaguugacugaagcu

SEQ ID NO: 2321969 - RNA, 19 nt, Artificial Sequence
  Description of Artificial Sequence: Synthetic oligonucleotide
  Antisense strand to SEQ ID NO: 2321968
agcuucagucaacuuuacc

SEQ ID NO: 2321970 - RNA, 19 nt, Artificial Sequence
  Description of Artificial Sequence: Synthetic oligonucleotide
  Sense strand starting at position 962 of SEQ ID NO: 1885174
uuuccuugggcauacauau

SEQ ID NO: 2321971 - RNA, 19 nt, Artificial Sequence
  Description of Artificial Sequence: Synthetic oligonucleotide
  Antisense strand to SEQ ID NO: 2321970
auauguaugcccaaggaaa

SEQ ID NO: 2321972 - RNA, 19 nt, Artificial Sequence
  Description of Artificial Sequence: Synthetic oligonucleotide
  Sense strand starting at position 1173 of SEQ ID NO: 1885174
gcuacaguuugaucggaau

SEQ ID NO: 2321973 - RNA, 19 nt, Artificial Sequence
  Description of Artificial Sequence: Synthetic oligonucleotide
  Antisense strand to SEQ ID NO: 2321972
auuccgaucaaacuguagc

SEQ ID NO: 2321974 - RNA, 19 nt, Artificial Sequence
  Description of Artificial Sequence: Synthetic oligonucleotide
  Sense strand starting at position 1771 of SEQ ID NO: 1885174
ggcuuucucgucguucaca

SEQ ID NO: 2321975 - RNA, 19 nt, Artificial Sequence
  Description of Artificial Sequence: Synthetic oligonucleotide
  Antisense strand to SEQ ID NO: 2321974
ugugaacgacgagaaagcc

SEQ ID NO: 2321976 - RNA, 19 nt, Artificial Sequence
  Description of Artificial Sequence: Synthetic oligonucleotide
  Sense strand starting at position 1962 of SEQ ID NO: 1885174
gcgaggagccaguuguagu

SEQ ID NO: 2321977 - RNA, 19 nt, Artificial Sequence
  Description of Artificial Sequence: Synthetic oligonucleotide
  Antisense strand to SEQ ID NO: 2321976
acuacaacuggcuccucgc

SEQ ID NO: 2321978 - RNA, 19 nt, Artificial Sequence
  Description of Artificial Sequence: Synthetic oligonucleotide
  Sense strand starting at position 2415 of SEQ ID NO: 1885174
accaguaaauaggagagau

SEQ ID NO: 2321979 - RNA, 19 nt, Artificial Sequence
  Description of Artificial Sequence: Synthetic oligonucleotide
  Antisense strand to SEQ ID NO: 2321978
aucucuccuauuuacuggu

SEQ ID NO: 2321980 - RNA, 19 nt, Artificial Sequence
  Description of Artificial Sequence: Synthetic oligonucleotide
  Sense strand starting at position 2459 of SEQ ID NO: 1885174
gguauucugguguaaggaa

SEQ ID NO: 2321981 - RNA, 19 nt, Artificial Sequence
  Description of Artificial Sequence: Synthetic oligonucleotide
  Antisense strand to SEQ ID NO: 2321980
uuccuuacaccagaauacc

SEQ ID NO: 2321982 - RNA, 19 nt, Artificial Sequence
  Description of Artificial Sequence: Synthetic oligonucleotide
  Sense strand starting at position 2564 of SEQ ID NO: 1885174
gaaggauguuuagaauaaa

SEQ ID NO: 2321983 - RNA, 19 nt, Artificial Sequence
  Description of Artificial Sequence: Synthetic oligonucleotide
  Antisense strand to SEQ ID NO: 2321982
uuuauucuaaacauccuuc

SEQ ID NO: 2321984 - RNA, 19 nt, Artificial Sequence
  Description of Artificial Sequence: Synthetic oligonucleotide
  Sense strand starting at position 2667 of SEQ ID NO: 1885174
augugaucaaguugucuac

SEQ ID NO: 2321985 - RNA, 19 nt, Artificial Sequence
  Description of Artificial Sequence: Synthetic oligonucleotide
  Antisense strand to SEQ ID NO: 2321984
guagacaacuugaucacau

SEQ ID NO: 2321986 - RNA, 19 nt, Artificial Sequence
  Description of Artificial Sequence: Synthetic oligonucleotide
  Sense strand starting at position 2669 of SEQ ID NO: 1885174
gugaucaaguugucuacaa

SEQ ID NO: 2321987 - RNA, 19 nt, Artificial Sequence
  Description of Artificial Sequence: Synthetic oligonucleotide
  Antisense strand to SEQ ID NO: 2321986
uuguagacaacuugaucac

SEQ ID NO: 2321988 - RNA, 19 nt, Artificial Sequence
  Description of Artificial Sequence: Synthetic oligonucleotide
  Sense strand starting at position 2670 of SEQ ID NO: 1885174
ugaucaaguugucuacaau

SEQ ID NO: 2321989 - RNA, 19 nt, Artificial Sequence
  Description of Artificial Sequence: Synthetic oligonucleotide
  Antisense strand to SEQ ID NO: 2321988
auuguagacaacuugauca

SEQ ID NO: 2321990 - RNA, 19 nt, Artificial Sequence
  Description of Artificial Sequence: Synthetic oligonucleotide
  Sense strand starting at position 2673 of SEQ ID NO: 1885174
ucaaguugucuacaauuac

SEQ ID NO: 2321991 - RNA, 19 nt, Artificial Sequence
  Description of Artificial Sequence: Synthetic oligonucleotide
  Antisense strand to SEQ ID NO: 2321990
guaauuguagacaacuuga

SEQ ID NO: 2321992 - RNA, 19 nt, Artificial Sequence
  Description of Artificial Sequence: Synthetic oligonucleotide
  Sense strand starting at position 2752 of SEQ ID NO: 1885174
aggaauugguuagaacaac

SEQ ID NO: 2321993 - RNA, 19 nt, Artificial Sequence
  Description of Artificial Sequence: Synthetic oligonucleotide
  Antisense strand to SEQ ID NO: 2321992
guuguucuaaccaauuccu

SEQ ID NO: 2321994 - RNA, 19 nt, Artificial Sequence
  Description of Artificial Sequence: Synthetic oligonucleotide
  Sense strand starting at position 2865 of SEQ ID NO: 1885174
cuaucucaccuuugagaag

SEQ ID NO: 2321995 - RNA, 19 nt, Artificial Sequence
  Description of Artificial Sequence: Synthetic oligonucleotide
  Antisense strand to SEQ ID NO: 2321994
cuucucaaaggugagauag

SEQ ID NO: 2321996 - RNA, 19 nt, Artificial Sequence
  Description of Artificial Sequence: Synthetic oligonucleotide
  Sense strand starting at position 3027 of SEQ ID NO: 1885174
gugcuuuggcuuuaaauug

SEQ ID NO: 2321997 - RNA, 19 nt, Artificial Sequence
  Description of Artificial Sequence: Synthetic oligonucleotide
  Antisense strand to SEQ ID NO: 2321996
caauuuaaagccaaagcac

SEQ ID NO: 2321998 - RNA, 19 nt, Artificial Sequence
  Description of Artificial Sequence: Synthetic oligonucleotide
  Sense strand starting at position 3068 of SEQ ID NO: 1885174
acuuaauguuuccuguaac

SEQ ID NO: 2321999 - RNA, 19 nt, Artificial Sequence
  Description of Artificial Sequence: Synthetic oligonucleotide
  Antisense strand to SEQ ID NO: 2321998
guuacaggaaacauuaagu

SEQ ID NO: 2322000 - RNA, 19 nt, Artificial Sequence
  Description of Artificial Sequence: Synthetic oligonucleotide
  Sense strand starting at position 3078 of SEQ ID NO: 1885174
uccuguaacccaggaaaca

SEQ ID NO: 2322001 - RNA, 19 nt, Artificial Sequence
  Description of Artificial Sequence: Synthetic oligonucleotide
  Antisense strand to SEQ ID NO: 2322000
uguuuccuggguuacagga

SEQ ID NO: 2322002 - RNA, 19 nt, Artificial Sequence
  Description of Artificial Sequence: Synthetic oligonucleotide
  Sense strand starting at position 3337 of SEQ ID NO: 1885174
uaaaguuacugugucagga

SEQ ID NO: 2322003 - RNA, 19 nt, Artificial Sequence
  Description of Artificial Sequence: Synthetic oligonucleotide
  Antisense strand to SEQ ID NO: 2322002
uccugacacaguaacuuua

SEQ ID NO: 2322004 - RNA, 19 nt, Artificial Sequence
  Description of Artificial Sequence: Synthetic oligonucleotide
  Sense strand starting at position 3443 of SEQ ID NO: 1885174
agaguuuguucuuucugac

SEQ ID NO: 2322005 - RNA, 19 nt, Artificial Sequence
  Description of Artificial Sequence: Synthetic oligonucleotide
  Antisense strand to SEQ ID NO: 2322004
gucagaaagaacaaacucu

SEQ ID NO: 2322006 - RNA, 19 nt, Artificial Sequence
  Description of Artificial Sequence: Synthetic oligonucleotide
  Sense strand starting at position 3497 of SEQ ID NO: 1885174
guucguagucuugcuggau

SEQ ID NO: 2322007 - RNA, 19 nt, Artificial Sequence
  Description of Artificial Sequence: Synthetic oligonucleotide
  Antisense strand to SEQ ID NO: 2322006
auccagcaagacuacgaac

SEQ ID NO: 2322008 - RNA, 19 nt, Artificial Sequence
  Description of Artificial Sequence: Synthetic oligonucleotide
  Sense strand starting at position 3531 of SEQ ID NO: 1885174
agaccuucgcgggagugaa

SEQ ID NO: 2322009 - RNA, 19 nt, Artificial Sequence
  Description of Artificial Sequence: Synthetic oligonucleotide
  Antisense strand to SEQ ID NO: 2322008
uucacucccgcgaaggucu

SEQ ID NO: 2322010 - RNA, 19 nt, Artificial Sequence
  Description of Artificial Sequence: Synthetic oligonucleotide
  Sense strand starting at position 138 of SEQ ID NO: 1885175
ggacaucggugcuuggaga

SEQ ID NO: 2322011 - RNA, 19 nt, Artificial Sequence
  Description of Artificial Sequence: Synthetic oligonucleotide
  Antisense strand to SEQ ID NO: 2322010
ucuccaagcaccgaugucc

SEQ ID NO: 2322012 - RNA, 19 nt, Artificial Sequence
  Description of Artificial Sequence: Synthetic oligonucleotide
  Sense strand starting at position 139 of SEQ ID NO: 1885175
gacaucggugcuuggagau

SEQ ID NO: 2322013 - RNA, 19 nt, Artificial Sequence
  Description of Artificial Sequence: Synthetic oligonucleotide
  Antisense strand to SEQ ID NO: 2322012
aucuccaagcaccgauguc

SEQ ID NO: 2322014 - RNA, 19 nt, Artificial Sequence
  Description of Artificial Sequence: Synthetic oligonucleotide
  Sense strand starting at position 335 of SEQ ID NO: 1885175
gccagauuucuggguguca

SEQ ID NO: 2322015 - RNA, 19 nt, Artificial Sequence
  Description of Artificial Sequence: Synthetic oligonucleotide
  Antisense strand to SEQ ID NO: 2322014
ugacacccagaaaucuggc

SEQ ID NO: 2322016 - RNA, 19 nt, Artificial Sequence
  Description of Artificial Sequence: Synthetic oligonucleotide
  Sense strand starting at position 361 of SEQ ID NO: 1885175
guugaaacauucuuaaagg

SEQ ID NO: 2322017 - RNA, 19 nt, Artificial Sequence
  Description of Artificial Sequence: Synthetic oligonucleotide
  Antisense strand to SEQ ID NO: 2322016
ccuuuaagaauguuucaac

SEQ ID NO: 2322018 - RNA, 19 nt, Artificial Sequence
  Description of Artificial Sequence: Synthetic oligonucleotide
  Sense strand starting at position 418 of SEQ ID NO: 1885175
guuauuucccucugcuuga

SEQ ID NO: 2322019 - RNA, 19 nt, Artificial Sequence
  Description of Artificial Sequence: Synthetic oligonucleotide
  Antisense strand to SEQ ID NO: 2322018
ucaagcagagggaaauaac

SEQ ID NO: 2322020 - RNA, 19 nt, Artificial Sequence
  Description of Artificial Sequence: Synthetic oligonucleotide
  Sense strand starting at position 441 of SEQ ID NO: 1885175
gaaauaguacaucagcagu

SEQ ID NO: 2322021 - RNA, 19 nt, Artificial Sequence
  Description of Artificial Sequence: Synthetic oligonucleotide
  Antisense strand to SEQ ID NO: 2322020
acugcugauguacuauuuc

SEQ ID NO: 2322022 - RNA, 19 nt, Artificial Sequence
  Description of Artificial Sequence: Synthetic oligonucleotide
  Sense strand starting at position 444 of SEQ ID NO: 1885175
auaguacaucagcaguuua

SEQ ID NO: 2322023 - RNA, 19 nt, Artificial Sequence
  Description of Artificial Sequence: Synthetic oligonucleotide
  Antisense strand to SEQ ID NO: 2322022
uaaacugcugauguacuau

SEQ ID NO: 2322024 - RNA, 19 nt, Artificial Sequence
  Description of Artificial Sequence: Synthetic oligonucleotide
  Sense strand starting at position 507 of SEQ ID NO: 1885175
gguuaacaugugcaagcaa

SEQ ID NO: 2322025 - RNA, 19 nt, Artificial Sequence
  Description of Artificial Sequence: Synthetic oligonucleotide
  Antisense strand to SEQ ID NO: 2322024
uugcuugcacauguuaacc

SEQ ID NO: 2322026 - RNA, 19 nt, Artificial Sequence
  Description of Artificial Sequence: Synthetic oligonucleotide
  Sense strand starting at position 598 of SEQ ID NO: 1885175
ggccuaguuguagaaggau

SEQ ID NO: 2322027 - RNA, 19 nt, Artificial Sequence
  Description of Artificial Sequence: Synthetic oligonucleotide
  Antisense strand to SEQ ID NO: 2322026
auccuucuacaacuaggcc

SEQ ID NO: 2322028 - RNA, 19 nt, Artificial Sequence
  Description of Artificial Sequence: Synthetic oligonucleotide
  Sense strand starting at position 607 of SEQ ID NO: 1885175
guagaaggauuaguaccau

SEQ ID NO: 2322029 - RNA, 19 nt, Artificial Sequence
  Description of Artificial Sequence: Synthetic oligonucleotide
  Antisense strand to SEQ ID NO: 2322028
augguacuaauccuucuac

SEQ ID NO: 2322030 - RNA, 19 nt, Artificial Sequence
  Description of Artificial Sequence: Synthetic oligonucleotide
  Sense strand starting at position 719 of SEQ ID NO: 1885175
uggccaugucaccaugcaa

SEQ ID NO: 2322031 - RNA, 19 nt, Artificial Sequence
  Description of Artificial Sequence: Synthetic oligonucleotide
  Antisense strand to SEQ ID NO: 2322030
uugcauggugacauggcca

SEQ ID NO: 2322032 - RNA, 19 nt, Artificial Sequence
  Description of Artificial Sequence: Synthetic oligonucleotide
  Sense strand starting at position 1234 of SEQ ID NO: 1885175
ugaauacuauaugugugua

SEQ ID NO: 2322033 - RNA, 19 nt, Artificial Sequence
  Description of Artificial Sequence: Synthetic oligonucleotide
  Antisense strand to SEQ ID NO: 2322032
uacacacauauaguauuca

SEQ ID NO: 2322034 - RNA, 19 nt, Artificial Sequence
  Description of Artificial Sequence: Synthetic oligonucleotide
  Sense strand starting at position 1282 of SEQ ID NO: 1885175
gugugaauauaugcauaua

SEQ ID NO: 2322035 - RNA, 19 nt, Artificial Sequence
  Description of Artificial Sequence: Synthetic oligonucleotide
  Antisense strand to SEQ ID NO: 2322034
uauaugcauauauucacac

SEQ ID NO: 2322036 - RNA, 19 nt, Artificial Sequence
  Description of Artificial Sequence: Synthetic oligonucleotide
  Sense strand starting at position 1990 of SEQ ID NO: 1885175
cuagguuuaugaucaggac

SEQ ID NO: 2322037 - RNA, 19 nt, Artificial Sequence
  Description of Artificial Sequence: Synthetic oligonucleotide
  Antisense strand to SEQ ID NO: 2322036
guccugaucauaaaccuag

SEQ ID NO: 2322038 - RNA, 19 nt, Artificial Sequence
  Description of Artificial Sequence: Synthetic oligonucleotide
  Sense strand starting at position 2086 of SEQ ID NO: 1885175
accagaaggccuggacaau

SEQ ID NO: 2322039 - RNA, 19 nt, Artificial Sequence
  Description of Artificial Sequence: Synthetic oligonucleotide
  Antisense strand to SEQ ID NO: 2322038
auuguccaggccuucuggu

SEQ ID NO: 2322040 - RNA, 19 nt, Artificial Sequence
  Description of Artificial Sequence: Synthetic oligonucleotide
  Sense strand starting at position 2198 of SEQ ID NO: 1885175
ggccaaugucccuggacau

SEQ ID NO: 2322041 - RNA, 19 nt, Artificial Sequence
  Description of Artificial Sequence: Synthetic oligonucleotide
  Antisense strand to SEQ ID NO: 2322040
auguccagggacauuggcc

SEQ ID NO: 2322042 - RNA, 19 nt, Artificial Sequence
  Description of Artificial Sequence: Synthetic oligonucleotide
  Sense strand starting at position 2384 of SEQ ID NO: 1885175
caucuuaucugaguggaaa

SEQ ID NO: 2322043 - RNA, 19 nt, Artificial Sequence
  Description of Artificial Sequence: Synthetic oligonucleotide
  Antisense strand to SEQ ID NO: 2322042
uuuccacucagauaagaug

SEQ ID NO: 2322044 - RNA, 19 nt, Artificial Sequence
  Description of Artificial Sequence: Synthetic oligonucleotide
  Sense strand starting at position 2557 of SEQ ID NO: 1885175
guuaaucaacuguaugugu

SEQ ID NO: 2322045 - RNA, 19 nt, Artificial Sequence
  Description of Artificial Sequence: Synthetic oligonucleotide
  Antisense strand to SEQ ID NO: 2322044
acacauacaguugauuaac

SEQ ID NO: 2322046 - RNA, 19 nt, Artificial Sequence
  Description of Artificial Sequence: Synthetic oligonucleotide
  Sense strand starting at position 2728 of SEQ ID NO: 1885175
gaugaagaauguuuccuga

SEQ ID NO: 2322047 - RNA, 19 nt, Artificial Sequence
  Description of Artificial Sequence: Synthetic oligonucleotide
  Antisense strand to SEQ ID NO: 2322046
ucaggaaacauucuucauc

SEQ ID NO: 2322048 - RNA, 19 nt, Artificial Sequence
  Description of Artificial Sequence: Synthetic oligonucleotide
  Sense strand starting at position 2730 of SEQ ID NO: 1885175
ugaagaauguuuccugaga

SEQ ID NO: 2322049 - RNA, 19 nt, Artificial Sequence
  Description of Artificial Sequence: Synthetic oligonucleotide
  Antisense strand to SEQ ID NO: 2322048
ucucaggaaacauucuuca

SEQ ID NO: 2322050 - RNA, 19 nt, Artificial Sequence
  Description of Artificial Sequence: Synthetic oligonucleotide
  Sense strand starting at position 2731 of SEQ ID NO: 1885175
gaagaauguuuccugagac

SEQ ID NO: 2322051 - RNA, 19 nt, Artificial Sequence
  Description of Artificial Sequence: Synthetic oligonucleotide
  Antisense strand to SEQ ID NO: 2322050
gucucaggaaacauucuuc

SEQ ID NO: 2322052 - RNA, 19 nt, Artificial Sequence
  Description of Artificial Sequence: Synthetic oligonucleotide
  Sense strand starting at position 2758 of SEQ ID NO: 1885175
uugguuuggccaggacuga

SEQ ID NO: 2322053 - RNA, 19 nt, Artificial Sequence
  Description of Artificial Sequence: Synthetic oligonucleotide
  Antisense strand to SEQ ID NO: 2322052
ucaguccuggccaaaccaa

SEQ ID NO: 2322054 - RNA, 19 nt, Artificial Sequence
  Description of Artificial Sequence: Synthetic oligonucleotide
  Sense strand starting at position 2870 of SEQ ID NO: 1885175
aucagauagcuugagcuau

SEQ ID NO: 2322055 - RNA, 19 nt, Artificial Sequence
  Description of Artificial Sequence: Synthetic oligonucleotide
  Antisense strand to SEQ ID NO: 2322054
auagcucaagcuaucugau

SEQ ID NO: 2322056 - RNA, 19 nt, Artificial Sequence
  Description of Artificial Sequence: Synthetic oligonucleotide
  Sense strand starting at position 2872 of SEQ ID NO: 1885175
cagauagcuugagcuaucu

SEQ ID NO: 2322057 - RNA, 19 nt, Artificial Sequence
  Description of Artificial Sequence: Synthetic oligonucleotide
  Antisense strand to SEQ ID NO: 2322056
agauagcucaagcuaucug

SEQ ID NO: 2322058 - RNA, 19 nt, Artificial Sequence
  Description of Artificial Sequence: Synthetic oligonucleotide
  Sense strand starting at position 2946 of SEQ ID NO: 1885175
ugccuuaaggucuauucuu

SEQ ID NO: 2322059 - RNA, 19 nt, Artificial Sequence
  Description of Artificial Sequence: Synthetic oligonucleotide
  Antisense strand to SEQ ID NO: 2322058
aagaauagaccuuaaggca

SEQ ID NO: 2322060 - RNA, 19 nt, Artificial Sequence
  Description of Artificial Sequence: Synthetic oligonucleotide
  Sense strand starting at position 3125 of SEQ ID NO: 1885175
uuaacuauuugucaugaug

SEQ ID NO: 2322061 - RNA, 19 nt, Artificial Sequence
  Description of Artificial Sequence: Synthetic oligonucleotide
  Antisense strand to SEQ ID NO: 2322060
caucaugacaaauaguuaa

SEQ ID NO: 2322062 - RNA, 19 nt, Artificial Sequence
  Description of Artificial Sequence: Synthetic oligonucleotide
  Sense strand starting at position 3367 of SEQ ID NO: 1885175
uggauuaaugaaugcuaca

SEQ ID NO: 2322063 - RNA, 19 nt, Artificial Sequence
  Description of Artificial Sequence: Synthetic oligonucleotide
  Antisense strand to SEQ ID NO: 2322062
uguagcauucauuaaucca

SEQ ID NO: 2322064 - RNA, 19 nt, Artificial Sequence
  Description of Artificial Sequence: Synthetic oligonucleotide
  Sense strand starting at position 3456 of SEQ ID NO: 1885175
ugagaaucacagcgugaag

SEQ ID NO: 2322065 - RNA, 19 nt, Artificial Sequence
  Description of Artificial Sequence: Synthetic oligonucleotide
  Antisense strand to SEQ ID NO: 2322064
cuucacgcugugauucuca

SEQ ID NO: 2322066 - RNA, 19 nt, Artificial Sequence
  Description of Artificial Sequence: Synthetic oligonucleotide
  Sense strand starting at position 3497 of SEQ ID NO: 1885175
uugcccuaccuacgagaau

SEQ ID NO: 2322067 - RNA, 19 nt, Artificial Sequence
  Description of Artificial Sequence: Synthetic oligonucleotide
  Antisense strand to SEQ ID NO: 2322066
auucucguagguagggcaa

SEQ ID NO: 2322068 - RNA, 19 nt, Artificial Sequence
  Description of Artificial Sequence: Synthetic oligonucleotide
  Sense strand starting at position 3522 of SEQ ID NO: 1885175
aaggaaucagcuuguuuga

SEQ ID NO: 2322069 - RNA, 19 nt, Artificial Sequence
  Description of Artificial Sequence: Synthetic oligonucleotide
  Antisense strand to SEQ ID NO: 2322068
ucaaacaagcugauuccuu

SEQ ID NO: 2322070 - RNA, 19 nt, Artificial Sequence
  Description of Artificial Sequence: Synthetic oligonucleotide
  Sense strand starting at position 3524 of SEQ ID NO: 1885175
ggaaucagcuuguuugauu

SEQ ID NO: 2322071 - RNA, 19 nt, Artificial Sequence
  Description of Artificial Sequence: Synthetic oligonucleotide
  Antisense strand to SEQ ID NO: 2322070
aaucaaacaagcugauucc

SEQ ID NO: 2322072 - RNA, 19 nt, Artificial Sequence
  Description of Artificial Sequence: Synthetic oligonucleotide
  Sense strand starting at position 3525 of SEQ ID NO: 1885175
gaaucagcuuguuugauuc

SEQ ID NO: 2322073 - RNA, 19 nt, Artificial Sequence
  Description of Artificial Sequence: Synthetic oligonucleotide
  Antisense strand to SEQ ID NO: 2322072
gaaucaaacaagcugauuc

SEQ ID NO: 2322074 - RNA, 19 nt, Artificial Sequence
  Description of Artificial Sequence: Synthetic oligonucleotide
  Sense strand starting at position 3563 of SEQ ID NO: 1885175
cuuugugcaguuugaauuu

SEQ ID NO: 2322075 - RNA, 19 nt, Artificial Sequence
  Description of Artificial Sequence: Synthetic oligonucleotide
  Antisense strand to SEQ ID NO: 2322074
aaauucaaacugcacaaag

SEQ ID NO: 2322076 - RNA, 19 nt, Artificial Sequence
  Description of Artificial Sequence: Synthetic oligonucleotide
  Sense strand starting at position 3650 of SEQ ID NO: 1885175
gugagcuuaucuuuggaau

SEQ ID NO: 2322077 - RNA, 19 nt, Artificial Sequence
  Description of Artificial Sequence: Synthetic oligonucleotide
  Antisense strand to SEQ ID NO: 2322076
auuccaaagauaagcucac

SEQ ID NO: 2322078 - RNA, 19 nt, Artificial Sequence
  Description of Artificial Sequence: Synthetic oligonucleotide
  Sense strand starting at position 3651 of SEQ ID NO: 1885175
ugagcuuaucuuuggaaug

SEQ ID NO: 2322079 - RNA, 19 nt, Artificial Sequence
  Description of Artificial Sequence: Synthetic oligonucleotide
  Antisense strand to SEQ ID NO: 2322078
cauuccaaagauaagcuca

SEQ ID NO: 2322080 - RNA, 19 nt, Artificial Sequence
  Description of Artificial Sequence: Synthetic oligonucleotide
  Sense strand starting at position 3703 of SEQ ID NO: 1885175
gcuaauuucuguccuggua

SEQ ID NO: 2322081 - RNA, 19 nt, Artificial Sequence
  Description of Artificial Sequence: Synthetic oligonucleotide
  Antisense strand to SEQ ID NO: 2322080
uaccaggacagaaauuagc

SEQ ID NO: 2322082 - RNA, 19 nt, Artificial Sequence
  Description of Artificial Sequence: Synthetic oligonucleotide
  Sense strand starting at position 3749 of SEQ ID NO: 1885175
accauaaaucuguguaagg

SEQ ID NO: 2322083 - RNA, 19 nt, Artificial Sequence
  Description of Artificial Sequence: Synthetic oligonucleotide
  Antisense strand to SEQ ID NO: 2322082
ccuuacacagauuuauggu

SEQ ID NO: 2322084 - RNA, 19 nt, Artificial Sequence
  Description of Artificial Sequence: Synthetic oligonucleotide
  Sense strand starting at position 3751 of SEQ ID NO: 1885175
cauaaaucuguguaaggca

SEQ ID NO: 2322085 - RNA, 19 nt, Artificial Sequence
  Description of Artificial Sequence: Synthetic oligonucleotide
  Antisense strand to SEQ ID NO: 2322084
ugccuuacacagauuuaug

SEQ ID NO: 2322086 - RNA, 19 nt, Artificial Sequence
  Description of Artificial Sequence: Synthetic oligonucleotide
  Sense strand starting at position 3876 of SEQ ID NO: 1885175
gcugguugguggguaauuu

SEQ ID NO: 2322087 - RNA, 19 nt, Artificial Sequence
  Description of Artificial Sequence: Synthetic oligonucleotide
  Antisense strand to SEQ ID NO: 2322086
aaauuacccaccaaccagc

SEQ ID NO: 2322088 - RNA, 19 nt, Artificial Sequence
  Description of Artificial Sequence: Synthetic oligonucleotide
  Sense strand starting at position 3980 of SEQ ID NO: 1885175
ggagaaguauguuccagau

SEQ ID NO: 2322089 - RNA, 19 nt, Artificial Sequence
  Description of Artificial Sequence: Synthetic oligonucleotide
  Antisense strand to SEQ ID NO: 2322088
aucuggaacauacuucucc

SEQ ID NO: 2322090 - RNA, 19 nt, Artificial Sequence
  Description of Artificial Sequence: Synthetic oligonucleotide
  Sense strand starting at position 100 of SEQ ID NO: 1885176
agagaaauuugguauugaa

SEQ ID NO: 2322091 - RNA, 19 nt, Artificial Sequence
  Description of Artificial Sequence: Synthetic oligonucleotide
  Antisense strand to SEQ ID NO: 2322090
uucaauaccaaauuucucu

SEQ ID NO: 2322092 - RNA, 19 nt, Artificial Sequence
  Description of Artificial Sequence: Synthetic oligonucleotide
  Sense strand starting at position 115 of SEQ ID NO: 1885176
ugaauauagaaguguuugu

SEQ ID NO: 2322093 - RNA, 19 nt, Artificial Sequence
  Description of Artificial Sequence: Synthetic oligonucleotide
  Antisense strand to SEQ ID NO: 2322092
acaaacacuucuauauuca

SEQ ID NO: 2322094 - RNA, 19 nt, Artificial Sequence
  Description of Artificial Sequence: Synthetic oligonucleotide
  Sense strand starting at position 132 of SEQ ID NO: 1885176
gucuuaguucucuguauuu

SEQ ID NO: 2322095 - RNA, 19 nt, Artificial Sequence
  Description of Artificial Sequence: Synthetic oligonucleotide
  Antisense strand to SEQ ID NO: 2322094
aaauacagagaacuaagac

SEQ ID NO: 2322096 - RNA, 19 nt, Artificial Sequence
  Description of Artificial Sequence: Synthetic oligonucleotide
  Sense strand starting at position 436 of SEQ ID NO: 1885176
agaugugccgguuagaaag

SEQ ID NO: 2322097 - RNA, 19 nt, Artificial Sequence
  Description of Artificial Sequence: Synthetic oligonucleotide
  Antisense strand to SEQ ID NO: 2322096
cuuucuaaccggcacaucu

SEQ ID NO: 2322098 - RNA, 19 nt, Artificial Sequence
  Description of Artificial Sequence: Synthetic oligonucleotide
  Sense strand starting at position 627 of SEQ ID NO: 1885176
gugaaucauucugcauaag

SEQ ID NO: 2322099 - RNA, 19 nt, Artificial Sequence
  Description of Artificial Sequence: Synthetic oligonucleotide
  Antisense strand to SEQ ID NO: 2322098
cuuaugcagaaugauucac

SEQ ID NO: 2322100 - RNA, 19 nt, Artificial Sequence
  Description of Artificial Sequence: Synthetic oligonucleotide
  Sense strand starting at position 628 of SEQ ID NO: 1885176
ugaaucauucugcauaagu

SEQ ID NO: 2322101 - RNA, 19 nt, Artificial Sequence
  Description of Artificial Sequence: Synthetic oligonucleotide
  Antisense strand to SEQ ID NO: 2322100
acuuaugcagaaugauuca

SEQ ID NO: 2322102 - RNA, 19 nt, Artificial Sequence
  Description of Artificial Sequence: Synthetic oligonucleotide
  Sense strand starting at position 718 of SEQ ID NO: 1885176
guuguuguuauggaaagca

SEQ ID NO: 2322103 - RNA, 19 nt, Artificial Sequence
  Description of Artificial Sequence: Synthetic oligonucleotide
  Antisense strand to SEQ ID NO: 2322102
ugcuuuccauaacaacaac

SEQ ID NO: 2322104 - RNA, 19 nt, Artificial Sequence
  Description of Artificial Sequence: Synthetic oligonucleotide
  Sense strand starting at position 945 of SEQ ID NO: 1885176
ucucuauuggccucguguu

SEQ ID NO: 2322105 - RNA, 19 nt, Artificial Sequence
  Description of Artificial Sequence: Synthetic oligonucleotide
  Antisense strand to SEQ ID NO: 2322104
aacacgaggccaauagaga

SEQ ID NO: 2322106 - RNA, 19 nt, Artificial Sequence
  Description of Artificial Sequence: Synthetic oligonucleotide
  Sense strand starting at position 1034 of SEQ ID NO: 1885176
ugcggugucagagaugaga

SEQ ID NO: 2322107 - RNA, 19 nt, Artificial Sequence
  Description of Artificial Sequence: Synthetic oligonucleotide
  Antisense strand to SEQ ID NO: 2322106
ucucaucucugacaccgca

SEQ ID NO: 2322108 - RNA, 19 nt, Artificial Sequence
  Description of Artificial Sequence: Synthetic oligonucleotide
  Sense strand starting at position 1036 of SEQ ID NO: 1885176
cggugucagagaugagaga

SEQ ID NO: 2322109 - RNA, 19 nt, Artificial Sequence
  Description of Artificial Sequence: Synthetic oligonucleotide
  Antisense strand to SEQ ID NO: 2322108
ucucucaucucugacaccg

SEQ ID NO: 2322110 - RNA, 19 nt, Artificial Sequence
  Description of Artificial Sequence: Synthetic oligonucleotide
  Sense strand starting at position 1178 of SEQ ID NO: 1885176
ucaggcuccagugaauguu

SEQ ID NO: 2322111 - RNA, 19 nt, Artificial Sequence
  Description of Artificial Sequence: Synthetic oligonucleotide
  Antisense strand to SEQ ID NO: 2322110
aacauucacuggagccuga

SEQ ID NO: 2322112 - RNA, 19 nt, Artificial Sequence
  Description of Artificial Sequence: Synthetic oligonucleotide
  Sense strand starting at position 1208 of SEQ ID NO: 1885176
ggauggauggguugugagu

SEQ ID NO: 2322113 - RNA, 19 nt, Artificial Sequence
  Description of Artificial Sequence: Synthetic oligonucleotide
  Antisense strand to SEQ ID NO: 2322112
acucacaacccauccaucc

SEQ ID NO: 2322114 - RNA, 19 nt, Artificial Sequence
  Description of Artificial Sequence: Synthetic oligonucleotide
  Sense strand starting at position 1420 of SEQ ID NO: 1885176
guguccugugaguuuaugu

SEQ ID NO: 2322115 - RNA, 19 nt, Artificial Sequence
  Description of Artificial Sequence: Synthetic oligonucleotide
  Antisense strand to SEQ ID NO: 2322114
acauaaacucacaggacac

SEQ ID NO: 2322116 - RNA, 19 nt, Artificial Sequence
  Description of Artificial Sequence: Synthetic oligonucleotide
  Sense strand starting at position 1470 of SEQ ID NO: 1885176
ccaccagauccucaugguu

SEQ ID NO: 2322117 - RNA, 19 nt, Artificial Sequence
  Description of Artificial Sequence: Synthetic oligonucleotide
  Antisense strand to SEQ ID NO: 2322116
aaccaugaggaucuggugg

SEQ ID NO: 2322118 - RNA, 19 nt, Artificial Sequence
  Description of Artificial Sequence: Synthetic oligonucleotide
  Sense strand starting at position 1530 of SEQ ID NO: 1885176
aggagaaaccuuuguugcu

SEQ ID NO: 2322119 - RNA, 19 nt, Artificial Sequence
  Description of Artificial Sequence: Synthetic oligonucleotide
  Antisense strand to SEQ ID NO: 2322118
agcaacaaagguuucuccu

SEQ ID NO: 2322120 - RNA, 19 nt, Artificial Sequence
  Description of Artificial Sequence: Synthetic oligonucleotide
  Sense strand starting at position 1661 of SEQ ID NO: 1885176
ugguuauuaccaggaugac

SEQ ID NO: 2322121 - RNA, 19 nt, Artificial Sequence
  Description of Artificial Sequence: Synthetic oligonucleotide
  Antisense strand to SEQ ID NO: 2322120
gucauccugguaauaacca

SEQ ID NO: 2322122 - RNA, 19 nt, Artificial Sequence
  Description of Artificial Sequence: Synthetic oligonucleotide
  Sense strand starting at position 1664 of SEQ ID NO: 1885176
uuauuaccaggaugacauu

SEQ ID NO: 2322123 - RNA, 19 nt, Artificial Sequence
  Description of Artificial Sequence: Synthetic oligonucleotide
  Antisense strand to SEQ ID NO: 2322122
aaugucauccugguaauaa

SEQ ID NO: 2322124 - RNA, 19 nt, Artificial Sequence
  Description of Artificial Sequence: Synthetic oligonucleotide
  Sense strand starting at position 1670 of SEQ ID NO: 1885176
ccaggaugacauuguccuu

SEQ ID NO: 2322125 - RNA, 19 nt, Artificial Sequence
  Description of Artificial Sequence: Synthetic oligonucleotide
  Antisense strand to SEQ ID NO: 2322124
aaggacaaugucauccugg

SEQ ID NO: 2322126 - RNA, 19 nt, Artificial Sequence
  Description of Artificial Sequence: Synthetic oligonucleotide
  Sense strand starting at position 1675 of SEQ ID NO: 1885176
augacauuguccuuggaag

SEQ ID NO: 2322127 - RNA, 19 nt, Artificial Sequence
  Description of Artificial Sequence: Synthetic oligonucleotide
  Antisense strand to SEQ ID NO: 2322126
cuuccaaggacaaugucau

SEQ ID NO: 2322128 - RNA, 19 nt, Artificial Sequence
  Description of Artificial Sequence: Synthetic oligonucleotide
  Sense strand starting at position 1677 of SEQ ID NO: 1885176
gacauuguccuuggaaggu

SEQ ID NO: 2322129 - RNA, 19 nt, Artificial Sequence
  Description of Artificial Sequence: Synthetic oligonucleotide
  Antisense strand to SEQ ID NO: 2322128
accuuccaaggacaauguc

SEQ ID NO: 2322130 - RNA, 19 nt, Artificial Sequence
  Description of Artificial Sequence: Synthetic oligonucleotide
  Sense strand starting at position 2022 of SEQ ID NO: 1885176
aagggucccucaguggaua

SEQ ID NO: 2322131 - RNA, 19 nt, Artificial Sequence
  Description of Artificial Sequence: Synthetic oligonucleotide
  Antisense strand to SEQ ID NO: 2322130
uauccacugagggacccuu

SEQ ID NO: 2322132 - RNA, 19 nt, Artificial Sequence
  Description of Artificial Sequence: Synthetic oligonucleotide
  Sense strand starting at position 2023 of SEQ ID NO: 1885176
agggucccucaguggauaa

SEQ ID NO: 2322133 - RNA, 19 nt, Artificial Sequence
  Description of Artificial Sequence: Synthetic oligonucleotide
  Antisense strand to SEQ ID NO: 2322132
uuauccacugagggacccu

SEQ ID NO: 2322134 - RNA, 19 nt, Artificial Sequence
  Description of Artificial Sequence: Synthetic oligonucleotide
  Sense strand starting at position 2024 of SEQ ID NO: 1885176
gggucccucaguggauaaa

SEQ ID NO: 2322135 - RNA, 19 nt, Artificial Sequence
  Description of Artificial Sequence: Synthetic oligonucleotide
  Antisense strand to SEQ ID NO: 2322134
uuuauccacugagggaccc

SEQ ID NO: 2322136 - RNA, 19 nt, Artificial Sequence
  Description of Artificial Sequence: Synthetic oligonucleotide
  Sense strand starting at position 2044 of SEQ ID NO: 1885176
agauacaugcaauguggua

SEQ ID NO: 2322137 - RNA, 19 nt, Artificial Sequence
  Description of Artificial Sequence: Synthetic oligonucleotide
  Antisense strand to SEQ ID NO: 2322136
uaccacauugcauguaucu

SEQ ID NO: 2322138 - RNA, 19 nt, Artificial Sequence
  Description of Artificial Sequence: Synthetic oligonucleotide
  Sense strand starting at position 2150 of SEQ ID NO: 1885176
aagugaaacuagcuaguca

SEQ ID NO: 2322139 - RNA, 19 nt, Artificial Sequence
  Description of Artificial Sequence: Synthetic oligonucleotide
  Antisense strand to SEQ ID NO: 2322138
ugacuagcuaguuucacuu

SEQ ID NO: 2322140 - RNA, 19 nt, Artificial Sequence
  Description of Artificial Sequence: Synthetic oligonucleotide
  Sense strand starting at position 2240 of SEQ ID NO: 1885176
uaggaugaugguugccaga

SEQ ID NO: 2322141 - RNA, 19 nt, Artificial Sequence
  Description of Artificial Sequence: Synthetic oligonucleotide
  Antisense strand to SEQ ID NO: 2322140
ucuggcaaccaucauccua

SEQ ID NO: 2322142 - RNA, 19 nt, Artificial Sequence
  Description of Artificial Sequence: Synthetic oligonucleotide
  Sense strand starting at position 2272 of SEQ ID NO: 1885176
ggaaaugggaguuguuuga

SEQ ID NO: 2322143 - RNA, 19 nt, Artificial Sequence
  Description of Artificial Sequence: Synthetic oligonucleotide
  Antisense strand to SEQ ID NO: 2322142
ucaaacaacucccauuucc

SEQ ID NO: 2322144 - RNA, 19 nt, Artificial Sequence
  Description of Artificial Sequence: Synthetic oligonucleotide
  Sense strand starting at position 2389 of SEQ ID NO: 1885176
cccuuaagaugguuaagcu

SEQ ID NO: 2322145 - RNA, 19 nt, Artificial Sequence
  Description of Artificial Sequence: Synthetic oligonucleotide
  Antisense strand to SEQ ID NO: 2322144
agcuuaaccaucuuaaggg

SEQ ID NO: 2322146 - RNA, 19 nt, Artificial Sequence
  Description of Artificial Sequence: Synthetic oligonucleotide
  Sense strand starting at position 2493 of SEQ ID NO: 1885176
acuguaaugagagguauuc

SEQ ID NO: 2322147 - RNA, 19 nt, Artificial Sequence
  Description of Artificial Sequence: Synthetic oligonucleotide
  Antisense strand to SEQ ID NO: 2322146
gaauaccucucauuacagu

SEQ ID NO: 2322148 - RNA, 19 nt, Artificial Sequence
  Description of Artificial Sequence: Synthetic oligonucleotide
  Sense strand starting at position 2495 of SEQ ID NO: 1885176
uguaaugagagguauucuu

SEQ ID NO: 2322149 - RNA, 19 nt, Artificial Sequence
  Description of Artificial Sequence: Synthetic oligonucleotide
  Antisense strand to SEQ ID NO: 2322148
aagaauaccucucauuaca

SEQ ID NO: 2322150 - RNA, 19 nt, Artificial Sequence
  Description of Artificial Sequence: Synthetic oligonucleotide
  Sense strand starting at position 2502 of SEQ ID NO: 1885176
agagguauucuuugaguca

SEQ ID NO: 2322151 - RNA, 19 nt, Artificial Sequence
  Description of Artificial Sequence: Synthetic oligonucleotide
  Antisense strand to SEQ ID NO: 2322150
ugacucaaagaauaccucu

SEQ ID NO: 2322152 - RNA, 19 nt, Artificial Sequence
  Description of Artificial Sequence: Synthetic oligonucleotide
  Sense strand starting at position 2577 of SEQ ID NO: 1885176
caccuaguucgggagaagu

SEQ ID NO: 2322153 - RNA, 19 nt, Artificial Sequence
  Description of Artificial Sequence: Synthetic oligonucleotide
  Antisense strand to SEQ ID NO: 2322152
acuucucccgaacuaggug

SEQ ID NO: 2322154 - RNA, 19 nt, Artificial Sequence
  Description of Artificial Sequence: Synthetic oligonucleotide
  Sense strand starting at position 2831 of SEQ ID NO: 1885176
cuugacacuuguuuacaua

SEQ ID NO: 2322155 - RNA, 19 nt, Artificial Sequence
  Description of Artificial Sequence: Synthetic oligonucleotide
  Antisense strand to SEQ ID NO: 2322154
uauguaaacaagugucaag

SEQ ID NO: 2322156 - RNA, 19 nt, Artificial Sequence
  Description of Artificial Sequence: Synthetic oligonucleotide
  Sense strand starting at position 2967 of SEQ ID NO: 1885176
auguaucaucaugggagau

SEQ ID NO: 2322157 - RNA, 19 nt, Artificial Sequence
  Description of Artificial Sequence: Synthetic oligonucleotide
  Antisense strand to SEQ ID NO: 2322156
aucucccaugaugauacau

SEQ ID NO: 2322158 - RNA, 19 nt, Artificial Sequence
  Description of Artificial Sequence: Synthetic oligonucleotide
  Sense strand starting at position 2968 of SEQ ID NO: 1885176
uguaucaucaugggagaug

SEQ ID NO: 2322159 - RNA, 19 nt, Artificial Sequence
  Description of Artificial Sequence: Synthetic oligonucleotide
  Antisense strand to SEQ ID NO: 2322158
caucucccaugaugauaca

SEQ ID NO: 2322160 - RNA, 19 nt, Artificial Sequence
  Description of Artificial Sequence: Synthetic oligonucleotide
  Sense strand starting at position 3747 of SEQ ID NO: 1885176
cugcacaucuuucuggaaa

SEQ ID NO: 2322161 - RNA, 19 nt, Artificial Sequence
  Description of Artificial Sequence: Synthetic oligonucleotide
  Antisense strand to SEQ ID NO: 2322160
uuuccagaaagaugugcag

SEQ ID NO: 2322162 - RNA, 19 nt, Artificial Sequence
  Description of Artificial Sequence: Synthetic oligonucleotide
  Sense strand starting at position 3925 of SEQ ID NO: 1885176
aaagguuuacuauguguaa

SEQ ID NO: 2322163 - RNA, 19 nt, Artificial Sequence
  Description of Artificial Sequence: Synthetic oligonucleotide
  Antisense strand to SEQ ID NO: 2322162
uuacacauaguaaaccuuu

SEQ ID NO: 2322164 - RNA, 19 nt, Artificial Sequence
  Description of Artificial Sequence: Synthetic oligonucleotide
  Sense strand starting at position 3926 of SEQ ID NO: 1885176
aagguuuacuauguguaau

SEQ ID NO: 2322165 - RNA, 19 nt, Artificial Sequence
  Description of Artificial Sequence: Synthetic oligonucleotide
  Antisense strand to SEQ ID NO: 2322164
auuacacauaguaaaccuu

SEQ ID NO: 2322166 - RNA, 19 nt, Artificial Sequence
  Description of Artificial Sequence: Synthetic oligonucleotide
  Sense strand starting at position 3948 of SEQ ID NO: 1885176
auguaacugcugcaauaau

SEQ ID NO: 2322167 - RNA, 19 nt, Artificial Sequence
  Description of Artificial Sequence: Synthetic oligonucleotide
  Antisense strand to SEQ ID NO: 2322166
auuauugcagcaguuacau

SEQ ID NO: 2322168 - RNA, 19 nt, Artificial Sequence
  Description of Artificial Sequence: Synthetic oligonucleotide
  Sense strand starting at position 3978 of SEQ ID NO: 1885176
uguagaaauaugugaauga

SEQ ID NO: 2322169 - RNA, 19 nt, Artificial Sequence
  Description of Artificial Sequence: Synthetic oligonucleotide
  Antisense strand to SEQ ID NO: 2322168
ucauucacauauuucuaca

SEQ ID NO: 2322170 - RNA, 19 nt, Artificial Sequence
  Description of Artificial Sequence: Synthetic oligonucleotide
  Sense strand starting at position 28 of SEQ ID NO: 1885177
gaucaaaguucugaaggau

SEQ ID NO: 2322171 - RNA, 19 nt, Artificial Sequence
  Description of Artificial Sequence: Synthetic oligonucleotide
  Antisense strand to SEQ ID NO: 2322170
auccuucagaacuuugauc

SEQ ID NO: 2322172 - RNA, 19 nt, Artificial Sequence
  Description of Artificial Sequence: Synthetic oligonucleotide
  Sense strand starting at position 56 of SEQ ID NO: 1885177
uugacaauaggcgacuuaa

SEQ ID NO: 2322173 - RNA, 19 nt, Artificial Sequence
  Description of Artificial Sequence: Synthetic oligonucleotide
  Antisense strand to SEQ ID NO: 2322172
uuaagucgccuauugucaa

SEQ ID NO: 2322174 - RNA, 19 nt, Artificial Sequence
  Description of Artificial Sequence: Synthetic oligonucleotide
  Sense strand starting at position 100 of SEQ ID NO: 1885177
agacaauucugagucugga

SEQ ID NO: 2322175 - RNA, 19 nt, Artificial Sequence
  Description of Artificial Sequence: Synthetic oligonucleotide
  Antisense strand to SEQ ID NO: 2322174
uccagacucagaauugucu

SEQ ID NO: 2322176 - RNA, 19 nt, Artificial Sequence
  Description of Artificial Sequence: Synthetic oligonucleotide
  Sense strand starting at position 103 of SEQ ID NO: 1885177
caauucugagucuggaaga

SEQ ID NO: 2322177 - RNA, 19 nt, Artificial Sequence
  Description of Artificial Sequence: Synthetic oligonucleotide
  Antisense strand to SEQ ID NO: 2322176
ucuuccagacucagaauug

SEQ ID NO: 2322178 - RNA, 19 nt, Artificial Sequence
  Description of Artificial Sequence: Synthetic oligonucleotide
  Sense strand starting at position 104 of SEQ ID NO: 1885177
aauucugagucuggaagaa

SEQ ID NO: 2322179 - RNA, 19 nt, Artificial Sequence
  Description of Artificial Sequence: Synthetic oligonucleotide
  Antisense strand to SEQ ID NO: 2322178
uucuuccagacucagaauu

SEQ ID NO: 2322180 - RNA, 19 nt, Artificial Sequence
  Description of Artificial Sequence: Synthetic oligonucleotide
  Sense strand starting at position 124 of SEQ ID NO: 1885177
agguuaaauuuguuuggcu

SEQ ID NO: 2322181 - RNA, 19 nt, Artificial Sequence
  Description of Artificial Sequence: Synthetic oligonucleotide
  Antisense strand to SEQ ID NO: 2322180
agccaaacaaauuuaaccu

SEQ ID NO: 2322182 - RNA, 19 nt, Artificial Sequence
  Description of Artificial Sequence: Synthetic oligonucleotide
  Sense strand starting at position 125 of SEQ ID NO: 1885177
gguuaaauuuguuuggcuu

SEQ ID NO: 2322183 - RNA, 19 nt, Artificial Sequence
  Description of Artificial Sequence: Synthetic oligonucleotide
  Antisense strand to SEQ ID NO: 2322182
aagccaaacaaauuuaacc

SEQ ID NO: 2322184 - RNA, 19 nt, Artificial Sequence
  Description of Artificial Sequence: Synthetic oligonucleotide
  Sense strand starting at position 126 of SEQ ID NO: 1885177
guuaaauuuguuuggcuuu

SEQ ID NO: 2322185 - RNA, 19 nt, Artificial Sequence
  Description of Artificial Sequence: Synthetic oligonucleotide
  Antisense strand to SEQ ID NO: 2322184
aaagccaaacaaauuuaac

SEQ ID NO: 2322186 - RNA, 19 nt, Artificial Sequence
  Description of Artificial Sequence: Synthetic oligonucleotide
  Sense strand starting at position 359 of SEQ ID NO: 1885177
uaggcagucugauaauaaa

SEQ ID NO: 2322187 - RNA, 19 nt, Artificial Sequence
  Description of Artificial Sequence: Synthetic oligonucleotide
  Antisense strand to SEQ ID NO: 2322186
uuuauuaucagacugccua

SEQ ID NO: 2322188 - RNA, 19 nt, Artificial Sequence
  Description of Artificial Sequence: Synthetic oligonucleotide
  Sense strand starting at position 406 of SEQ ID NO: 1885177
gcuacuaaucacggugugu

SEQ ID NO: 2322189 - RNA, 19 nt, Artificial Sequence
  Description of Artificial Sequence: Synthetic oligonucleotide
  Antisense strand to SEQ ID NO: 2322188
acacaccgugauuaguagc

SEQ ID NO: 2322190 - RNA, 19 nt, Artificial Sequence
  Description of Artificial Sequence: Synthetic oligonucleotide
  Sense strand starting at position 408 of SEQ ID NO: 1885177
uacuaaucacgguguguga

SEQ ID NO: 2322191 - RNA, 19 nt, Artificial Sequence
  Description of Artificial Sequence: Synthetic oligonucleotide
  Antisense strand to SEQ ID NO: 2322190
ucacacaccgugauuagua

SEQ ID NO: 2322192 - RNA, 19 nt, Artificial Sequence
  Description of Artificial Sequence: Synthetic oligonucleotide
  Sense strand starting at position 410 of SEQ ID NO: 1885177
cuaaucacggugugugaau

SEQ ID NO: 2322193 - RNA, 19 nt, Artificial Sequence
  Description of Artificial Sequence: Synthetic oligonucleotide
  Antisense strand to SEQ ID NO: 2322192
auucacacaccgugauuag

SEQ ID NO: 2322194 - RNA, 19 nt, Artificial Sequence
  Description of Artificial Sequence: Synthetic oligonucleotide
  Sense strand starting at position 411 of SEQ ID NO: 1885177
uaaucacggugugugaauu

SEQ ID NO: 2322195 - RNA, 19 nt, Artificial Sequence
  Description of Artificial Sequence: Synthetic oligonucleotide
  Antisense strand to SEQ ID NO: 2322194
aauucacacaccgugauua

SEQ ID NO: 2322196 - RNA, 19 nt, Artificial Sequence
  Description of Artificial Sequence: Synthetic oligonucleotide
  Sense strand starting at position 412 of SEQ ID NO: 1885177
aaucacggugugugaauuu

SEQ ID NO: 2322197 - RNA, 19 nt, Artificial Sequence
  Description of Artificial Sequence: Synthetic oligonucleotide
  Antisense strand to SEQ ID NO: 2322196
aaauucacacaccgugauu

SEQ ID NO: 2322198 - RNA, 19 nt, Artificial Sequence
  Description of Artificial Sequence: Synthetic oligonucleotide
  Sense strand starting at position 421 of SEQ ID NO: 1885177
gugugaauuuaagguaaag

SEQ ID NO: 2322199 - RNA, 19 nt, Artificial Sequence
  Description of Artificial Sequence: Synthetic oligonucleotide
  Antisense strand to SEQ ID NO: 2322198
cuuuaccuuaaauucacac

SEQ ID NO: 2322200 - RNA, 19 nt, Artificial Sequence
  Description of Artificial Sequence: Synthetic oligonucleotide
  Sense strand starting at position 564 of SEQ ID NO: 1885177
agccaaacucucugacgau

SEQ ID NO: 2322201 - RNA, 19 nt, Artificial Sequence
  Description of Artificial Sequence: Synthetic oligonucleotide
  Antisense strand to SEQ ID NO: 2322200
aucgucagagaguuuggcu

SEQ ID NO: 2322202 - RNA, 19 nt, Artificial Sequence
  Description of Artificial Sequence: Synthetic oligonucleotide
  Sense strand starting at position 625 of SEQ ID NO: 1885177
caacaaauggugcguuuaa

SEQ ID NO: 2322203 - RNA, 19 nt, Artificial Sequence
  Description of Artificial Sequence: Synthetic oligonucleotide
  Antisense strand to SEQ ID NO: 2322202
uuaaacgcaccauuuguug

SEQ ID NO: 2322204 - RNA, 19 nt, Artificial Sequence
  Description of Artificial Sequence: Synthetic oligonucleotide
  Sense strand starting at position 654 of SEQ ID NO: 1885177
cacucacuggcuggagaau

SEQ ID NO: 2322205 - RNA, 19 nt, Artificial Sequence
  Description of Artificial Sequence: Synthetic oligonucleotide
  Antisense strand to SEQ ID NO: 2322204
auucuccagccagugagug

SEQ ID NO: 2322206 - RNA, 19 nt, Artificial Sequence
  Description of Artificial Sequence: Synthetic oligonucleotide
  Sense strand starting at position 666 of SEQ ID NO: 1885177
ggagaauccuggcuaaguc

SEQ ID NO: 2322207 - RNA, 19 nt, Artificial Sequence
  Description of Artificial Sequence: Synthetic oligonucleotide
  Antisense strand to SEQ ID NO: 2322206
gacuuagccaggauucucc

SEQ ID NO: 2322208 - RNA, 19 nt, Artificial Sequence
  Description of Artificial Sequence: Synthetic oligonucleotide
  Sense strand starting at position 667 of SEQ ID NO: 1885177
gagaauccuggcuaaguca

SEQ ID NO: 2322209 - RNA, 19 nt, Artificial Sequence
  Description of Artificial Sequence: Synthetic oligonucleotide
  Antisense strand to SEQ ID NO: 2322208
ugacuuagccaggauucuc

SEQ ID NO: 2322210 - RNA, 19 nt, Artificial Sequence
  Description of Artificial Sequence: Synthetic oligonucleotide
  Sense strand starting at position 681 of SEQ ID NO: 1885177
agucacuuucucugagcuu

SEQ ID NO: 2322211 - RNA, 19 nt, Artificial Sequence
  Description of Artificial Sequence: Synthetic oligonucleotide
  Antisense strand to SEQ ID NO: 2322210
aagcucagagaaagugacu

SEQ ID NO: 2322212 - RNA, 19 nt, Artificial Sequence
  Description of Artificial Sequence: Synthetic oligonucleotide
  Sense strand starting at position 708 of SEQ ID NO: 1885177
cuucuauaccaagguggau

SEQ ID NO: 2322213 - RNA, 19 nt, Artificial Sequence
  Description of Artificial Sequence: Synthetic oligonucleotide
  Antisense strand to SEQ ID NO: 2322212
auccaccuugguauagaag

SEQ ID NO: 2322214 - RNA, 19 nt, Artificial Sequence
  Description of Artificial Sequence: Synthetic oligonucleotide
  Sense strand starting at position 730 of SEQ ID NO: 1885177
agcaaucucuccuuaugag

SEQ ID NO: 2322215 - RNA, 19 nt, Artificial Sequence
  Description of Artificial Sequence: Synthetic oligonucleotide
  Antisense strand to SEQ ID NO: 2322214
cucauaaggagagauugcu

SEQ ID NO: 2322216 - RNA, 19 nt, Artificial Sequence
  Description of Artificial Sequence: Synthetic oligonucleotide
  Sense strand starting at position 731 of SEQ ID NO: 1885177
gcaaucucuccuuaugaga

SEQ ID NO: 2322217 - RNA, 19 nt, Artificial Sequence
  Description of Artificial Sequence: Synthetic oligonucleotide
  Antisense strand to SEQ ID NO: 2322216
ucucauaaggagagauugc

SEQ ID NO: 2322218 - RNA, 19 nt, Artificial Sequence
  Description of Artificial Sequence: Synthetic oligonucleotide
  Sense strand starting at position 736 of SEQ ID NO: 1885177
cucuccuuaugagaaauga

SEQ ID NO: 2322219 - RNA, 19 nt, Artificial Sequence
  Description of Artificial Sequence: Synthetic oligonucleotide
  Antisense strand to SEQ ID NO: 2322218
ucauuucucauaaggagag

SEQ ID NO: 2322220 - RNA, 19 nt, Artificial Sequence
  Description of Artificial Sequence: Synthetic oligonucleotide
  Sense strand starting at position 762 of SEQ ID NO: 1885177
acgaacuacuuccuguaua

SEQ ID NO: 2322221 - RNA, 19 nt, Artificial Sequence
  Description of Artificial Sequence: Synthetic oligonucleotide
  Antisense strand to SEQ ID NO: 2322220
uauacaggaaguaguucgu

SEQ ID NO: 2322222 - RNA, 19 nt, Artificial Sequence
  Description of Artificial Sequence: Synthetic oligonucleotide
  Sense strand starting at position 889 of SEQ ID NO: 1885177
ccuuauccguucuauuuga

SEQ ID NO: 2322223 - RNA, 19 nt, Artificial Sequence
  Description of Artificial Sequence: Synthetic oligonucleotide
  Antisense strand to SEQ ID NO: 2322222
ucaaauagaacggauaagg

SEQ ID NO: 2322224 - RNA, 19 nt, Artificial Sequence
  Description of Artificial Sequence: Synthetic oligonucleotide
  Sense strand starting at position 1989 of SEQ ID NO: 1885177
cccgguucuagaugauuga

SEQ ID NO: 2322225 - RNA, 19 nt, Artificial Sequence
  Description of Artificial Sequence: Synthetic oligonucleotide
  Antisense strand to SEQ ID NO: 2322224
ucaaucaucuagaaccggg

SEQ ID NO: 2322226 - RNA, 19 nt, Artificial Sequence
  Description of Artificial Sequence: Synthetic oligonucleotide
  Sense strand starting at position 1992 of SEQ ID NO: 1885177
gguucuagaugauugacaa

SEQ ID NO: 2322227 - RNA, 19 nt, Artificial Sequence
  Description of Artificial Sequence: Synthetic oligonucleotide
  Antisense strand to SEQ ID NO: 2322226
uugucaaucaucuagaacc

SEQ ID NO: 2322228 - RNA, 19 nt, Artificial Sequence
  Description of Artificial Sequence: Synthetic oligonucleotide
  Sense strand starting at position 1993 of SEQ ID NO: 1885177
guucuagaugauugacaag

SEQ ID NO: 2322229 - RNA, 19 nt, Artificial Sequence
  Description of Artificial Sequence: Synthetic oligonucleotide
  Antisense strand to SEQ ID NO: 2322228
cuugucaaucaucuagaac

SEQ ID NO: 2322230 - RNA, 19 nt, Artificial Sequence
  Description of Artificial Sequence: Synthetic oligonucleotide
  Sense strand starting at position 2047 of SEQ ID NO: 1885177
cuaagagguucggcuggaa

SEQ ID NO: 2322231 - RNA, 19 nt, Artificial Sequence
  Description of Artificial Sequence: Synthetic oligonucleotide
  Antisense strand to SEQ ID NO: 2322230
uuccagccgaaccucuuag

SEQ ID NO: 2322232 - RNA, 19 nt, Artificial Sequence
  Description of Artificial Sequence: Synthetic oligonucleotide
  Sense strand starting at position 2108 of SEQ ID NO: 1885177
uuguguuuaucggcccauu

SEQ ID NO: 2322233 - RNA, 19 nt, Artificial Sequence
  Description of Artificial Sequence: Synthetic oligonucleotide
  Antisense strand to SEQ ID NO: 2322232
aaugggccgauaaacacaa

SEQ ID NO: 2322234 - RNA, 19 nt, Artificial Sequence
  Description of Artificial Sequence: Synthetic oligonucleotide
  Sense strand starting at position 2130 of SEQ ID NO: 1885177
aggcuugcggcguuauaga

SEQ ID NO: 2322235 - RNA, 19 nt, Artificial Sequence
  Description of Artificial Sequence: Synthetic oligonucleotide
  Antisense strand to SEQ ID NO: 2322234
ucuauaacgccgcaagccu

SEQ ID NO: 2322236 - RNA, 19 nt, Artificial Sequence
  Description of Artificial Sequence: Synthetic oligonucleotide
  Sense strand starting at position 2477 of SEQ ID NO: 1885177
gugugaucccaaugcuuug

SEQ ID NO: 2322237 - RNA, 19 nt, Artificial Sequence
  Description of Artificial Sequence: Synthetic oligonucleotide
  Antisense strand to SEQ ID NO: 2322236
caaagcauugggaucacac

SEQ ID NO: 2322238 - RNA, 19 nt, Artificial Sequence
  Description of Artificial Sequence: Synthetic oligonucleotide
  Sense strand starting at position 2887 of SEQ ID NO: 1885177
guguccucauugcucauua

SEQ ID NO: 2322239 - RNA, 19 nt, Artificial Sequence
  Description of Artificial Sequence: Synthetic oligonucleotide
  Antisense strand to SEQ ID NO: 2322238
uaaugagcaaugaggacac

SEQ ID NO: 2322240 - RNA, 19 nt, Artificial Sequence
  Description of Artificial Sequence: Synthetic oligonucleotide
  Sense strand starting at position 2889 of SEQ ID NO: 1885177
guccucauugcucauuauu

SEQ ID NO: 2322241 - RNA, 19 nt, Artificial Sequence
  Description of Artificial Sequence: Synthetic oligonucleotide
  Antisense strand to SEQ ID NO: 2322240
aauaaugagcaaugaggac

SEQ ID NO: 2322242 - RNA, 19 nt, Artificial Sequence
  Description of Artificial Sequence: Synthetic oligonucleotide
  Sense strand starting at position 2897 of SEQ ID NO: 1885177
ugcucauuauuugcugauu

SEQ ID NO: 2322243 - RNA, 19 nt, Artificial Sequence
  Description of Artificial Sequence: Synthetic oligonucleotide
  Antisense strand to SEQ ID NO: 2322242
aaucagcaaauaaugagca

SEQ ID NO: 2322244 - RNA, 19 nt, Artificial Sequence
  Description of Artificial Sequence: Synthetic oligonucleotide
  Sense strand starting at position 2898 of SEQ ID NO: 1885177
gcucauuauuugcugauua

SEQ ID NO: 2322245 - RNA, 19 nt, Artificial Sequence
  Description of Artificial Sequence: Synthetic oligonucleotide
  Antisense strand to SEQ ID NO: 2322244
uaaucagcaaauaaugagc

SEQ ID NO: 2322246 - RNA, 19 nt, Artificial Sequence
  Description of Artificial Sequence: Synthetic oligonucleotide
  Sense strand starting at position 2918 of SEQ ID NO: 1885177
aacguauuagcaugcuaaa

SEQ ID NO: 2322247 - RNA, 19 nt, Artificial Sequence
  Description of Artificial Sequence: Synthetic oligonucleotide
  Antisense strand to SEQ ID NO: 2322246
uuuagcaugcuaauacguu

SEQ ID NO: 2322248 - RNA, 19 nt, Artificial Sequence
  Description of Artificial Sequence: Synthetic oligonucleotide
  Sense strand starting at position 3107 of SEQ ID NO: 1885177
uauaacuauguguggaguu

SEQ ID NO: 2322249 - RNA, 19 nt, Artificial Sequence
  Description of Artificial Sequence: Synthetic oligonucleotide
  Antisense strand to SEQ ID NO: 2322248
aacuccacacauaguuaua

SEQ ID NO: 2322250 - RNA, 19 nt, Artificial Sequence
  Description of Artificial Sequence: Synthetic oligonucleotide
  Sense strand starting at position 106 of SEQ ID NO: 1885178
ggauguuuauacuuccaau

SEQ ID NO: 2322251 - RNA, 19 nt, Artificial Sequence
  Description of Artificial Sequence: Synthetic oligonucleotide
  Antisense strand to SEQ ID NO: 2322250
auuggaaguauaaacaucc

SEQ ID NO: 2322252 - RNA, 19 nt, Artificial Sequence
  Description of Artificial Sequence: Synthetic oligonucleotide
  Sense strand starting at position 611 of SEQ ID NO: 1885178
auauuucuguggcagagga

SEQ ID NO: 2322253 - RNA, 19 nt, Artificial Sequence
  Description of Artificial Sequence: Synthetic oligonucleotide
  Antisense strand to SEQ ID NO: 2322252
uccucugccacagaaauau

SEQ ID NO: 2322254 - RNA, 19 nt, Artificial Sequence
  Description of Artificial Sequence: Synthetic oligonucleotide
  Sense strand starting at position 619 of SEQ ID NO: 1885178
guggcagaggaguaaacua

SEQ ID NO: 2322255 - RNA, 19 nt, Artificial Sequence
  Description of Artificial Sequence: Synthetic oligonucleotide
  Antisense strand to SEQ ID NO: 2322254
uaguuuacuccucugccac

SEQ ID NO: 2322256 - RNA, 19 nt, Artificial Sequence
  Description of Artificial Sequence: Synthetic oligonucleotide
  Sense strand starting at position 696 of SEQ ID NO: 1885178
aucuuauuagccgaacuga

SEQ ID NO: 2322257 - RNA, 19 nt, Artificial Sequence
  Description of Artificial Sequence: Synthetic oligonucleotide
  Antisense strand to SEQ ID NO: 2322256
ucaguucggcuaauaagau

SEQ ID NO: 2322258 - RNA, 19 nt, Artificial Sequence
  Description of Artificial Sequence: Synthetic oligonucleotide
  Sense strand starting at position 725 of SEQ ID NO: 1885178
ccauuaguacccgauaaac

SEQ ID NO: 2322259 - RNA, 19 nt, Artificial Sequence
  Description of Artificial Sequence: Synthetic oligonucleotide
  Antisense strand to SEQ ID NO: 2322258
guuuaucggguacuaaugg

SEQ ID NO: 2322260 - RNA, 19 nt, Artificial Sequence
  Description of Artificial Sequence: Synthetic oligonucleotide
  Sense strand starting at position 781 of SEQ ID NO: 1885178
acuuauuacggcugggaau

SEQ ID NO: 2322261 - RNA, 19 nt, Artificial Sequence
  Description of Artificial Sequence: Synthetic oligonucleotide
  Antisense strand to SEQ ID NO: 2322260
auucccagccguaauaagu

SEQ ID NO: 2322262 - RNA, 19 nt, Artificial Sequence
  Description of Artificial Sequence: Synthetic oligonucleotide
  Sense strand starting at position 782 of SEQ ID NO: 1885178
cuuauuacggcugggaauu

SEQ ID NO: 2322263 - RNA, 19 nt, Artificial Sequence
  Description of Artificial Sequence: Synthetic oligonucleotide
  Antisense strand to SEQ ID NO: 2322262
aauucccagccguaauaag

SEQ ID NO: 2322264 - RNA, 19 nt, Artificial Sequence
  Description of Artificial Sequence: Synthetic oligonucleotide
  Sense strand starting at position 783 of SEQ ID NO: 1885178
uuauuacggcugggaauua

SEQ ID NO: 2322265 - RNA, 19 nt, Artificial Sequence
  Description of Artificial Sequence: Synthetic oligonucleotide
  Antisense strand to SEQ ID NO: 2322264
uaauucccagccguaauaa

SEQ ID NO: 2322266 - RNA, 19 nt, Artificial Sequence
  Description of Artificial Sequence: Synthetic oligonucleotide
  Sense strand starting at position 795 of SEQ ID NO: 1885178
ggaauuauaaagugucaug

SEQ ID NO: 2322267 - RNA, 19 nt, Artificial Sequence
  Description of Artificial Sequence: Synthetic oligonucleotide
  Antisense strand to SEQ ID NO: 2322266
caugacacuuuauaauucc

SEQ ID NO: 2322268 - RNA, 19 nt, Artificial Sequence
  Description of Artificial Sequence: Synthetic oligonucleotide
  Sense strand starting at position 806 of SEQ ID NO: 1885178
gugucauguuaaucaauaa

SEQ ID NO: 2322269 - RNA, 19 nt, Artificial Sequence
  Description of Artificial Sequence: Synthetic oligonucleotide
  Antisense strand to SEQ ID NO: 2322268
uuauugauuaacaugacac

SEQ ID NO: 2322270 - RNA, 19 nt, Artificial Sequence
  Description of Artificial Sequence: Synthetic oligonucleotide
  Sense strand starting at position 1029 of SEQ ID NO: 1885178
cuugguaucugaccuacaa

SEQ ID NO: 2322271 - RNA, 19 nt, Artificial Sequence
  Description of Artificial Sequence: Synthetic oligonucleotide
  Antisense strand to SEQ ID NO: 2322270
uuguaggucagauaccaag

SEQ ID NO: 2322272 - RNA, 19 nt, Artificial Sequence
  Description of Artificial Sequence: Synthetic oligonucleotide
  Sense strand starting at position 1173 of SEQ ID NO: 1885178
aagagagucagagguaucu

SEQ ID NO: 2322273 - RNA, 19 nt, Artificial Sequence
  Description of Artificial Sequence: Synthetic oligonucleotide
  Antisense strand to SEQ ID NO: 2322272
agauaccucugacucucuu

SEQ ID NO: 2322274 - RNA, 19 nt, Artificial Sequence
  Description of Artificial Sequence: Synthetic oligonucleotide
  Sense strand starting at position 1182 of SEQ ID NO: 1885178
agagguaucuuagcaguag

SEQ ID NO: 2322275 - RNA, 19 nt, Artificial Sequence
  Description of Artificial Sequence: Synthetic oligonucleotide
  Antisense strand to SEQ ID NO: 2322274
cuacugcuaagauaccucu

SEQ ID NO: 2322276 - RNA, 19 nt, Artificial Sequence
  Description of Artificial Sequence: Synthetic oligonucleotide
  Sense strand starting at position 1449 of SEQ ID NO: 1885178
cgguaaagcagucgaaaua

SEQ ID NO: 2322277 - RNA, 19 nt, Artificial Sequence
  Description of Artificial Sequence: Synthetic oligonucleotide
  Antisense strand to SEQ ID NO: 2322276
uauuucgacugcuuuaccg

SEQ ID NO: 2322278 - RNA, 19 nt, Artificial Sequence
  Description of Artificial Sequence: Synthetic oligonucleotide
  Sense strand starting at position 1475 of SEQ ID NO: 1885178
gcgucacgugcgguuaauu

SEQ ID NO: 2322279 - RNA, 19 nt, Artificial Sequence
  Description of Artificial Sequence: Synthetic oligonucleotide
  Antisense strand to SEQ ID NO: 2322278
aauuaaccgcacgugacgc

SEQ ID NO: 2322280 - RNA, 19 nt, Artificial Sequence
  Description of Artificial Sequence: Synthetic oligonucleotide
  Sense strand starting at position 1484 of SEQ ID NO: 1885178
gcgguuaauuuggaaauca

SEQ ID NO: 2322281 - RNA, 19 nt, Artificial Sequence
  Description of Artificial Sequence: Synthetic oligonucleotide
  Antisense strand to SEQ ID NO: 2322280
ugauuuccaaauuaaccgc

SEQ ID NO: 2322282 - RNA, 19 nt, Artificial Sequence
  Description of Artificial Sequence: Synthetic oligonucleotide
  Sense strand starting at position 1563 of SEQ ID NO: 1885178
uccugugagaaguagcuaa

SEQ ID NO: 2322283 - RNA, 19 nt, Artificial Sequence
  Description of Artificial Sequence: Synthetic oligonucleotide
  Antisense strand to SEQ ID NO: 2322282
uuagcuacuucucacagga

SEQ ID NO: 2322284 - RNA, 19 nt, Artificial Sequence
  Description of Artificial Sequence: Synthetic oligonucleotide
  Sense strand starting at position 2113 of SEQ ID NO: 1885178
cuguaaaucgcuugagacc

SEQ ID NO: 2322285 - RNA, 19 nt, Artificial Sequence
  Description of Artificial Sequence: Synthetic oligonucleotide
  Antisense strand to SEQ ID NO: 2322284
ggucucaagcgauuuacag

SEQ ID NO: 2322286 - RNA, 19 nt, Artificial Sequence
  Description of Artificial Sequence: Synthetic oligonucleotide
  Sense strand starting at position 2114 of SEQ ID NO: 1885178
uguaaaucgcuugagaccu

SEQ ID NO: 2322287 - RNA, 19 nt, Artificial Sequence
  Description of Artificial Sequence: Synthetic oligonucleotide
  Antisense strand to SEQ ID NO: 2322286
aggucucaagcgauuuaca

SEQ ID NO: 2322288 - RNA, 19 nt, Artificial Sequence
  Description of Artificial Sequence: Synthetic oligonucleotide
  Sense strand starting at position 2120 of SEQ ID NO: 1885178
ucgcuugagaccuguauuu

SEQ ID NO: 2322289 - RNA, 19 nt, Artificial Sequence
  Description of Artificial Sequence: Synthetic oligonucleotide
  Antisense strand to SEQ ID NO: 2322288
aaauacaggucucaagcga

SEQ ID NO: 2322290 - RNA, 19 nt, Artificial Sequence
  Description of Artificial Sequence: Synthetic oligonucleotide
  Sense strand starting at position 2215 of SEQ ID NO: 1885178
acugcaucgaguugagaau

SEQ ID NO: 2322291 - RNA, 19 nt, Artificial Sequence
  Description of Artificial Sequence: Synthetic oligonucleotide
  Antisense strand to SEQ ID NO: 2322290
auucucaacucgaugcagu

SEQ ID NO: 2322292 - RNA, 19 nt, Artificial Sequence
  Description of Artificial Sequence: Synthetic oligonucleotide
  Sense strand starting at position 2216 of SEQ ID NO: 1885178
cugcaucgaguugagaauu

SEQ ID NO: 2322293 - RNA, 19 nt, Artificial Sequence
  Description of Artificial Sequence: Synthetic oligonucleotide
  Antisense strand to SEQ ID NO: 2322292
aauucucaacucgaugcag

SEQ ID NO: 2322294 - RNA, 19 nt, Artificial Sequence
  Description of Artificial Sequence: Synthetic oligonucleotide
  Sense strand starting at position 2330 of SEQ ID NO: 1885178
gauguucugucaucagaga

SEQ ID NO: 2322295 - RNA, 19 nt, Artificial Sequence
  Description of Artificial Sequence: Synthetic oligonucleotide
  Antisense strand to SEQ ID NO: 2322294
ucucugaugacagaacauc

SEQ ID NO: 2322296 - RNA, 19 nt, Artificial Sequence
  Description of Artificial Sequence: Synthetic oligonucleotide
  Sense strand starting at position 2575 of SEQ ID NO: 1885178
agcacuguccaguaggauu

SEQ ID NO: 2322297 - RNA, 19 nt, Artificial Sequence
  Description of Artificial Sequence: Synthetic oligonucleotide
  Antisense strand to SEQ ID NO: 2322296
aauccuacuggacagugcu

SEQ ID NO: 2322298 - RNA, 19 nt, Artificial Sequence
  Description of Artificial Sequence: Synthetic oligonucleotide
  Sense strand starting at position 2661 of SEQ ID NO: 1885178
cugaaauguggccaguaca

SEQ ID NO: 2322299 - RNA, 19 nt, Artificial Sequence
  Description of Artificial Sequence: Synthetic oligonucleotide
  Antisense strand to SEQ ID NO: 2322298
uguacuggccacauuucag

SEQ ID NO: 2322300 - RNA, 19 nt, Artificial Sequence
  Description of Artificial Sequence: Synthetic oligonucleotide
  Sense strand starting at position 2800 of SEQ ID NO: 1885178
uccuauuaggcauagguua

SEQ ID NO: 2322301 - RNA, 19 nt, Artificial Sequence
  Description of Artificial Sequence: Synthetic oligonucleotide
  Antisense strand to SEQ ID NO: 2322300
uaaccuaugccuaauagga

SEQ ID NO: 2322302 - RNA, 19 nt, Artificial Sequence
  Description of Artificial Sequence: Synthetic oligonucleotide
  Sense strand starting at position 2877 of SEQ ID NO: 1885178
gccacauucuggcuaauuu

SEQ ID NO: 2322303 - RNA, 19 nt, Artificial Sequence
  Description of Artificial Sequence: Synthetic oligonucleotide
  Antisense strand to SEQ ID NO: 2322302
aaauuagccagaauguggc

SEQ ID NO: 2322304 - RNA, 19 nt, Artificial Sequence
  Description of Artificial Sequence: Synthetic oligonucleotide
  Sense strand starting at position 2922 of SEQ ID NO: 1885178
uuuauuucuuuggcuugua

SEQ ID NO: 2322305 - RNA, 19 nt, Artificial Sequence
  Description of Artificial Sequence: Synthetic oligonucleotide
  Antisense strand to SEQ ID NO: 2322304
uacaagccaaagaaauaaa

SEQ ID NO: 2322306 - RNA, 19 nt, Artificial Sequence
  Description of Artificial Sequence: Synthetic oligonucleotide
  Sense strand starting at position 2949 of SEQ ID NO: 1885178
ucuaguucgccuguucuga

SEQ ID NO: 2322307 - RNA, 19 nt, Artificial Sequence
  Description of Artificial Sequence: Synthetic oligonucleotide
  Antisense strand to SEQ ID NO: 2322306
ucagaacaggcgaacuaga

SEQ ID NO: 2322308 - RNA, 19 nt, Artificial Sequence
  Description of Artificial Sequence: Synthetic oligonucleotide
  Sense strand starting at position 2968 of SEQ ID NO: 1885178
ggguaaagcucuucaggug

SEQ ID NO: 2322309 - RNA, 19 nt, Artificial Sequence
  Description of Artificial Sequence: Synthetic oligonucleotide
  Antisense strand to SEQ ID NO: 2322308
caccugaagagcuuuaccc

SEQ ID NO: 2322310 - RNA, 19 nt, Artificial Sequence
  Description of Artificial Sequence: Synthetic oligonucleotide
  Sense strand starting at position 2969 of SEQ ID NO: 1885178
gguaaagcucuucagguga

SEQ ID NO: 2322311 - RNA, 19 nt, Artificial Sequence
  Description of Artificial Sequence: Synthetic oligonucleotide
  Antisense strand to SEQ ID NO: 2322310
ucaccugaagagcuuuacc

SEQ ID NO: 2322312 - RNA, 19 nt, Artificial Sequence
  Description of Artificial Sequence: Synthetic oligonucleotide
  Sense strand starting at position 3015 of SEQ ID NO: 1885178
ugcaccuuuccugaagugu

SEQ ID NO: 2322313 - RNA, 19 nt, Artificial Sequence
  Description of Artificial Sequence: Synthetic oligonucleotide
  Antisense strand to SEQ ID NO: 2322312
acacuucaggaaaggugca

SEQ ID NO: 2322314 - RNA, 19 nt, Artificial Sequence
  Description of Artificial Sequence: Synthetic oligonucleotide
  Sense strand starting at position 3029 of SEQ ID NO: 1885178
aguguagacuuuguugaca

SEQ ID NO: 2322315 - RNA, 19 nt, Artificial Sequence
  Description of Artificial Sequence: Synthetic oligonucleotide
  Antisense strand to SEQ ID NO: 2322314
ugucaacaaagucuacacu

SEQ ID NO: 2322316 - RNA, 19 nt, Artificial Sequence
  Description of Artificial Sequence: Synthetic oligonucleotide
  Sense strand starting at position 3058 of SEQ ID NO: 1885178
ggcaauuaacacuaagguu

SEQ ID NO: 2322317 - RNA, 19 nt, Artificial Sequence
  Description of Artificial Sequence: Synthetic oligonucleotide
  Antisense strand to SEQ ID NO: 2322316
aaccuuaguguuaauugcc

SEQ ID NO: 2322318 - RNA, 19 nt, Artificial Sequence
  Description of Artificial Sequence: Synthetic oligonucleotide
  Sense strand starting at position 3275 of SEQ ID NO: 1885178
gucauuggccauuagggaa

SEQ ID NO: 2322319 - RNA, 19 nt, Artificial Sequence
  Description of Artificial Sequence: Synthetic oligonucleotide
  Antisense strand to SEQ ID NO: 2322318
uucccuaauggccaaugac

SEQ ID NO: 2322320 - RNA, 19 nt, Artificial Sequence
  Description of Artificial Sequence: Synthetic oligonucleotide
  Sense strand starting at position 3568 of SEQ ID NO: 1885178
gaaugucaugguggcuuua

SEQ ID NO: 2322321 - RNA, 19 nt, Artificial Sequence
  Description of Artificial Sequence: Synthetic oligonucleotide
  Antisense strand to SEQ ID NO: 2322320
uaaagccaccaugacauuc

SEQ ID NO: 2322322 - RNA, 19 nt, Artificial Sequence
  Description of Artificial Sequence: Synthetic oligonucleotide
  Sense strand starting at position 3925 of SEQ ID NO: 1885178
gccaaacaguccuuaguga

SEQ ID NO: 2322323 - RNA, 19 nt, Artificial Sequence
  Description of Artificial Sequence: Synthetic oligonucleotide
  Antisense strand to SEQ ID NO: 2322322
ucacuaaggacuguuuggc

SEQ ID NO: 2322324 - RNA, 19 nt, Artificial Sequence
  Description of Artificial Sequence: Synthetic oligonucleotide
  Sense strand starting at position 3926 of SEQ ID NO: 1885178
ccaaacaguccuuagugaa

SEQ ID NO: 2322325 - RNA, 19 nt, Artificial Sequence
  Description of Artificial Sequence: Synthetic oligonucleotide
  Antisense strand to SEQ ID NO: 2322324
uucacuaaggacuguuugg

SEQ ID NO: 2322326 - RNA, 19 nt, Artificial Sequence
  Description of Artificial Sequence: Synthetic oligonucleotide
  Sense strand starting at position 3933 of SEQ ID NO: 1885178
guccuuagugaaugaauag

SEQ ID NO: 2322327 - RNA, 19 nt, Artificial Sequence
  Description of Artificial Sequence: Synthetic oligonucleotide
  Antisense strand to SEQ ID NO: 2322326
cuauucauucacuaaggac

SEQ ID NO: 2322328 - RNA, 19 nt, Artificial Sequence
  Description of Artificial Sequence: Synthetic oligonucleotide
  Sense strand starting at position 3962 of SEQ ID NO: 1885178
ggaguauauccaugccaug

SEQ ID NO: 2322329 - RNA, 19 nt, Artificial Sequence
  Description of Artificial Sequence: Synthetic oligonucleotide
  Antisense strand to SEQ ID NO: 2322328
cauggcauggauauacucc

SEQ ID NO: 2322330 - RNA, 19 nt, Artificial Sequence
  Description of Artificial Sequence: Synthetic oligonucleotide
  Sense strand starting at position 48 of SEQ ID NO: 1885179
uguauaugaagcugaagaa

SEQ ID NO: 2322331 - RNA, 19 nt, Artificial Sequence
  Description of Artificial Sequence: Synthetic oligonucleotide
  Antisense strand to SEQ ID NO: 2322330
uucuucagcuucauauaca

SEQ ID NO: 2322332 - RNA, 19 nt, Artificial Sequence
  Description of Artificial Sequence: Synthetic oligonucleotide
  Sense strand starting at position 87 of SEQ ID NO: 1885179
uuauaaauggcauauuggu

SEQ ID NO: 2322333 - RNA, 19 nt, Artificial Sequence
  Description of Artificial Sequence: Synthetic oligonucleotide
  Antisense strand to SEQ ID NO: 2322332
accaauaugccauuuauaa

SEQ ID NO: 2322334 - RNA, 19 nt, Artificial Sequence
  Description of Artificial Sequence: Synthetic oligonucleotide
  Sense strand starting at position 100 of SEQ ID NO: 1885179
auuggucguuauccaggaa

SEQ ID NO: 2322335 - RNA, 19 nt, Artificial Sequence
  Description of Artificial Sequence: Synthetic oligonucleotide
  Antisense strand to SEQ ID NO: 2322334
uuccuggauaacgaccaau

SEQ ID NO: 2322336 - RNA, 19 nt, Artificial Sequence
  Description of Artificial Sequence: Synthetic oligonucleotide
  Sense strand starting at position 101 of SEQ ID NO: 1885179
uuggucguuauccaggaaa

SEQ ID NO: 2322337 - RNA, 19 nt, Artificial Sequence
  Description of Artificial Sequence: Synthetic oligonucleotide
  Antisense strand to SEQ ID NO: 2322336
uuuccuggauaacgaccaa

SEQ ID NO: 2322338 - RNA, 19 nt, Artificial Sequence
  Description of Artificial Sequence: Synthetic oligonucleotide
  Sense strand starting at position 123 of SEQ ID NO: 1885179
ggaguuguccugucugugu

SEQ ID NO: 2322339 - RNA, 19 nt, Artificial Sequence
  Description of Artificial Sequence: Synthetic oligonucleotide
  Antisense strand to SEQ ID NO: 2322338
acacagacaggacaacucc

SEQ ID NO: 2322340 - RNA, 19 nt, Artificial Sequence
  Description of Artificial Sequence: Synthetic oligonucleotide
  Sense strand starting at position 252 of SEQ ID NO: 1885179
auaagucaguaugcugaaa

SEQ ID NO: 2322341 - RNA, 19 nt, Artificial Sequence
  Description of Artificial Sequence: Synthetic oligonucleotide
  Antisense strand to SEQ ID NO: 2322340
uuucagcauacugacuuau

SEQ ID NO: 2322342 - RNA, 19 nt, Artificial Sequence
  Description of Artificial Sequence: Synthetic oligonucleotide
  Sense strand starting at position 277 of SEQ ID NO: 1885179
guuguaacccgagaccaau

SEQ ID NO: 2322343 - RNA, 19 nt, Artificial Sequence
  Description of Artificial Sequence: Synthetic oligonucleotide
  Antisense strand to SEQ ID NO: 2322342
auuggucucggguuacaac

SEQ ID NO: 2322344 - RNA, 19 nt, Artificial Sequence
  Description of Artificial Sequence: Synthetic oligonucleotide
  Sense strand starting at position 300 of SEQ ID NO: 1885179
ucuauagaugcugagguaa

SEQ ID NO: 2322345 - RNA, 19 nt, Artificial Sequence
  Description of Artificial Sequence: Synthetic oligonucleotide
  Antisense strand to SEQ ID NO: 2322344
uuaccucagcaucuauaga

SEQ ID NO: 2322346 - RNA, 19 nt, Artificial Sequence
  Description of Artificial Sequence: Synthetic oligonucleotide
  Sense strand starting at position 322 of SEQ ID NO: 1885179
gcugcaauuguaggacuaa

SEQ ID NO: 2322347 - RNA, 19 nt, Artificial Sequence
  Description of Artificial Sequence: Synthetic oligonucleotide
  Antisense strand to SEQ ID NO: 2322346
uuaguccuacaauugcagc

SEQ ID NO: 2322348 - RNA, 19 nt, Artificial Sequence
  Description of Artificial Sequence: Synthetic oligonucleotide
  Sense strand starting at position 414 of SEQ ID NO: 1885179
cucgaagagcgacagauau

SEQ ID NO: 2322349 - RNA, 19 nt, Artificial Sequence
  Description of Artificial Sequence: Synthetic oligonucleotide
  Antisense strand to SEQ ID NO: 2322348
auaucugucgcucuucgag

SEQ ID NO: 2322350 - RNA, 19 nt, Artificial Sequence
  Description of Artificial Sequence: Synthetic oligonucleotide
  Sense strand starting at position 630 of SEQ ID NO: 1885179
uuaagauuagcgcacuuua

SEQ ID NO: 2322351 - RNA, 19 nt, Artificial Sequence
  Description of Artificial Sequence: Synthetic oligonucleotide
  Antisense strand to SEQ ID NO: 2322350
uaaagugcgcuaaucuuaa

SEQ ID NO: 2322352 - RNA, 19 nt, Artificial Sequence
  Description of Artificial Sequence: Synthetic oligonucleotide
  Sense strand starting at position 640 of SEQ ID NO: 1885179
cgcacuuuacuggauaucu

SEQ ID NO: 2322353 - RNA, 19 nt, Artificial Sequence
  Description of Artificial Sequence: Synthetic oligonucleotide
  Antisense strand to SEQ ID NO: 2322352
agauauccaguaaagugcg

SEQ ID NO: 2322354 - RNA, 19 nt, Artificial Sequence
  Description of Artificial Sequence: Synthetic oligonucleotide
  Sense strand starting at position 651 of SEQ ID NO: 1885179
ggauaucuguuauuccuga

SEQ ID NO: 2322355 - RNA, 19 nt, Artificial Sequence
  Description of Artificial Sequence: Synthetic oligonucleotide
  Antisense strand to SEQ ID NO: 2322354
ucaggaauaacagauaucc

SEQ ID NO: 2322356 - RNA, 19 nt, Artificial Sequence
  Description of Artificial Sequence: Synthetic oligonucleotide
  Sense strand starting at position 1000 of SEQ ID NO: 1885179
uaaugucagcaugaaguau

SEQ ID NO: 2322357 - RNA, 19 nt, Artificial Sequence
  Description of Artificial Sequence: Synthetic oligonucleotide
  Antisense strand to SEQ ID NO: 2322356
auacuucaugcugacauua

SEQ ID NO: 2322358 - RNA, 19 nt, Artificial Sequence
  Description of Artificial Sequence: Synthetic oligonucleotide
  Sense strand starting at position 1056 of SEQ ID NO: 1885179
uacugaggucuugguaaag

SEQ ID NO: 2322359 - RNA, 19 nt, Artificial Sequence
  Description of Artificial Sequence: Synthetic oligonucleotide
  Antisense strand to SEQ ID NO: 2322358
cuuuaccaagaccucagua

SEQ ID NO: 2322360 - RNA, 19 nt, Artificial Sequence
  Description of Artificial Sequence: Synthetic oligonucleotide
  Sense strand starting at position 1279 of SEQ ID NO: 1885179
cagaaagugcuauguaaac

SEQ ID NO: 2322361 - RNA, 19 nt, Artificial Sequence
  Description of Artificial Sequence: Synthetic oligonucleotide
  Antisense strand to SEQ ID NO: 2322360
guuuacauagcacuuucug

SEQ ID NO: 2322362 - RNA, 19 nt, Artificial Sequence
  Description of Artificial Sequence: Synthetic oligonucleotide
  Sense strand starting at position 1300 of SEQ ID NO: 1885179
ucuuuaaagcaguauugaa

SEQ ID NO: 2322363 - RNA, 19 nt, Artificial Sequence
  Description of Artificial Sequence: Synthetic oligonucleotide
  Antisense strand to SEQ ID NO: 2322362
uucaauacugcuuuaaaga

SEQ ID NO: 2322364 - RNA, 19 nt, Artificial Sequence
  Description of Artificial Sequence: Synthetic oligonucleotide
  Sense strand starting at position 1379 of SEQ ID NO: 1885179
ccacucuuagaccgugaga

SEQ ID NO: 2322365 - RNA, 19 nt, Artificial Sequence
  Description of Artificial Sequence: Synthetic oligonucleotide
  Antisense strand to SEQ ID NO: 2322364
ucucacggucuaagagugg

SEQ ID NO: 2322366 - RNA, 19 nt, Artificial Sequence
  Description of Artificial Sequence: Synthetic oligonucleotide
  Sense strand starting at position 1381 of SEQ ID NO: 1885179
acucuuagaccgugagaag

SEQ ID NO: 2322367 - RNA, 19 nt, Artificial Sequence
  Description of Artificial Sequence: Synthetic oligonucleotide
  Antisense strand to SEQ ID NO: 2322366
cuucucacggucuaagagu

SEQ ID NO: 2322368 - RNA, 19 nt, Artificial Sequence
  Description of Artificial Sequence: Synthetic oligonucleotide
  Sense strand starting at position 1382 of SEQ ID NO: 1885179
cucuuagaccgugagaagu

SEQ ID NO: 2322369 - RNA, 19 nt, Artificial Sequence
  Description of Artificial Sequence: Synthetic oligonucleotide
  Antisense strand to SEQ ID NO: 2322368
acuucucacggucuaagag

SEQ ID NO: 2322370 - RNA, 19 nt, Artificial Sequence
  Description of Artificial Sequence: Synthetic oligonucleotide
  Sense strand starting at position 1395 of SEQ ID NO: 1885179
agaaguaacuaguuggucu

SEQ ID NO: 2322371 - RNA, 19 nt, Artificial Sequence
  Description of Artificial Sequence: Synthetic oligonucleotide
  Antisense strand to SEQ ID NO: 2322370
agaccaacuaguuacuucu

SEQ ID NO: 2322372 - RNA, 19 nt, Artificial Sequence
  Description of Artificial Sequence: Synthetic oligonucleotide
  Sense strand starting at position 1399 of SEQ ID NO: 1885179
guaacuaguuggucuggga

SEQ ID NO: 2322373 - RNA, 19 nt, Artificial Sequence
  Description of Artificial Sequence: Synthetic oligonucleotide
  Antisense strand to SEQ ID NO: 2322372
ucccagaccaacuaguuac

SEQ ID NO: 2322374 - RNA, 19 nt, Artificial Sequence
  Description of Artificial Sequence: Synthetic oligonucleotide
  Sense strand starting at position 2479 of SEQ ID NO: 1885179
accauuucguaagacgaaa

SEQ ID NO: 2322375 - RNA, 19 nt, Artificial Sequence
  Description of Artificial Sequence: Synthetic oligonucleotide
  Antisense strand to SEQ ID NO: 2322374
uuucgucuuacgaaauggu

SEQ ID NO: 2322376 - RNA, 19 nt, Artificial Sequence
  Description of Artificial Sequence: Synthetic oligonucleotide
  Sense strand starting at position 2572 of SEQ ID NO: 1885179
gaguguguccauuagauuc

SEQ ID NO: 2322377 - RNA, 19 nt, Artificial Sequence
  Description of Artificial Sequence: Synthetic oligonucleotide
  Antisense strand to SEQ ID NO: 2322376
gaaucuaauggacacacuc

SEQ ID NO: 2322378 - RNA, 19 nt, Artificial Sequence
  Description of Artificial Sequence: Synthetic oligonucleotide
  Sense strand starting at position 2588 of SEQ ID NO: 1885179
uucugaaacuaguuugaau

SEQ ID NO: 2322379 - RNA, 19 nt, Artificial Sequence
  Description of Artificial Sequence: Synthetic oligonucleotide
  Antisense strand to SEQ ID NO: 2322378
auucaaacuaguuucagaa

SEQ ID NO: 2322380 - RNA, 19 nt, Artificial Sequence
  Description of Artificial Sequence: Synthetic oligonucleotide
  Sense strand starting at position 2590 of SEQ ID NO: 1885179
cugaaacuaguuugaauac

SEQ ID NO: 2322381 - RNA, 19 nt, Artificial Sequence
  Description of Artificial Sequence: Synthetic oligonucleotide
  Antisense strand to SEQ ID NO: 2322380
guauucaaacuaguuucag

SEQ ID NO: 2322382 - RNA, 19 nt, Artificial Sequence
  Description of Artificial Sequence: Synthetic oligonucleotide
  Sense strand starting at position 2603 of SEQ ID NO: 1885179
gaauacugacagugcagaa

SEQ ID NO: 2322383 - RNA, 19 nt, Artificial Sequence
  Description of Artificial Sequence: Synthetic oligonucleotide
  Antisense strand to SEQ ID NO: 2322382
uucugcacugucaguauuc

SEQ ID NO: 2322384 - RNA, 19 nt, Artificial Sequence
  Description of Artificial Sequence: Synthetic oligonucleotide
  Sense strand starting at position 2664 of SEQ ID NO: 1885179
cccuuuaaucuaggaaguu

SEQ ID NO: 2322385 - RNA, 19 nt, Artificial Sequence
  Description of Artificial Sequence: Synthetic oligonucleotide
  Antisense strand to SEQ ID NO: 2322384
aacuuccuagauuaaaggg

SEQ ID NO: 2322386 - RNA, 19 nt, Artificial Sequence
  Description of Artificial Sequence: Synthetic oligonucleotide
  Sense strand starting at position 2717 of SEQ ID NO: 1885179
ggcuuccaugucugauuaa

SEQ ID NO: 2322387 - RNA, 19 nt, Artificial Sequence
  Description of Artificial Sequence: Synthetic oligonucleotide
  Antisense strand to SEQ ID NO: 2322386
uuaaucagacauggaagcc

SEQ ID NO: 2322388 - RNA, 19 nt, Artificial Sequence
  Description of Artificial Sequence: Synthetic oligonucleotide
  Sense strand starting at position 2776 of SEQ ID NO: 1885179
ugccauuuauaaccguuau

SEQ ID NO: 2322389 - RNA, 19 nt, Artificial Sequence
  Description of Artificial Sequence: Synthetic oligonucleotide
  Antisense strand to SEQ ID NO: 2322388
auaacgguuauaaauggca

SEQ ID NO: 2322390 - RNA, 19 nt, Artificial Sequence
  Description of Artificial Sequence: Synthetic oligonucleotide
  Sense strand starting at position 3278 of SEQ ID NO: 1885179
aagcuaaagcccgagacuu

SEQ ID NO: 2322391 - RNA, 19 nt, Artificial Sequence
  Description of Artificial Sequence: Synthetic oligonucleotide
  Antisense strand to SEQ ID NO: 2322390
aagucucgggcuuuagcuu

SEQ ID NO: 2322392 - RNA, 19 nt, Artificial Sequence
  Description of Artificial Sequence: Synthetic oligonucleotide
  Sense strand starting at position 3289 of SEQ ID NO: 1885179
cgagacuuccgagaucaca

SEQ ID NO: 2322393 - RNA, 19 nt, Artificial Sequence
  Description of Artificial Sequence: Synthetic oligonucleotide
  Antisense strand to SEQ ID NO: 2322392
ugugaucucggaagucucg

SEQ ID NO: 2322394 - RNA, 19 nt, Artificial Sequence
  Description of Artificial Sequence: Synthetic oligonucleotide
  Sense strand starting at position 3410 of SEQ ID NO: 1885179
aaauguguaucuuuaagga

SEQ ID NO: 2322395 - RNA, 19 nt, Artificial Sequence
  Description of Artificial Sequence: Synthetic oligonucleotide
  Antisense strand to SEQ ID NO: 2322394
uccuuaaagauacacauuu

SEQ ID NO: 2322396 - RNA, 19 nt, Artificial Sequence
  Description of Artificial Sequence: Synthetic oligonucleotide
  Sense strand starting at position 3420 of SEQ ID NO: 1885179
cuuuaaggauagucgcaau

SEQ ID NO: 2322397 - RNA, 19 nt, Artificial Sequence
  Description of Artificial Sequence: Synthetic oligonucleotide
  Antisense strand to SEQ ID NO: 2322396
auugcgacuauccuuaaag

SEQ ID NO: 2322398 - RNA, 19 nt, Artificial Sequence
  Description of Artificial Sequence: Synthetic oligonucleotide
  Sense strand starting at position 3431 of SEQ ID NO: 1885179
gucgcaauauccucuauuu

SEQ ID NO: 2322399 - RNA, 19 nt, Artificial Sequence
  Description of Artificial Sequence: Synthetic oligonucleotide
  Antisense strand to SEQ ID NO: 2322398
aaauagaggauauugcgac

SEQ ID NO: 2322400 - RNA, 19 nt, Artificial Sequence
  Description of Artificial Sequence: Synthetic oligonucleotide
  Sense strand starting at position 3573 of SEQ ID NO: 1885179
gguuauaauguguaaguuu

SEQ ID NO: 2322401 - RNA, 19 nt, Artificial Sequence
  Description of Artificial Sequence: Synthetic oligonucleotide
  Antisense strand to SEQ ID NO: 2322400
aaacuuacacauuauaacc

SEQ ID NO: 2322402 - RNA, 19 nt, Artificial Sequence
  Description of Artificial Sequence: Synthetic oligonucleotide
  Sense strand starting at position 3832 of SEQ ID NO: 1885179
ucuuuaugccaucauagga

SEQ ID NO: 2322403 - RNA, 19 nt, Artificial Sequence
  Description of Artificial Sequence: Synthetic oligonucleotide
  Antisense strand to SEQ ID NO: 2322402
uccuaugauggcauaaaga

SEQ ID NO: 2322404 - RNA, 19 nt, Artificial Sequence
  Description of Artificial Sequence: Synthetic oligonucleotide
  Sense strand starting at position 3863 of SEQ ID NO: 1885179
cuccuaugucaugguuaag

SEQ ID NO: 2322405 - RNA, 19 nt, Artificial Sequence
  Description of Artificial Sequence: Synthetic oligonucleotide
  Antisense strand to SEQ ID NO: 2322404
cuuaaccaugacauaggag

SEQ ID NO: 2322406 - RNA, 19 nt, Artificial Sequence
  Description of Artificial Sequence: Synthetic oligonucleotide
  Sense strand starting at position 3866 of SEQ ID NO: 1885179
cuaugucaugguuaagagu

SEQ ID NO: 2322407 - RNA, 19 nt, Artificial Sequence
  Description of Artificial Sequence: Synthetic oligonucleotide
  Antisense strand to SEQ ID NO: 2322406
acucuuaaccaugacauag

SEQ ID NO: 2322408 - RNA, 19 nt, Artificial Sequence
  Description of Artificial Sequence: Synthetic oligonucleotide
  Sense strand starting at position 3874 of SEQ ID NO: 1885179
ugguuaagaguccaggauu

SEQ ID NO: 2322409 - RNA, 19 nt, Artificial Sequence
  Description of Artificial Sequence: Synthetic oligonucleotide
  Antisense strand to SEQ ID NO: 2322408
aauccuggacucuuaacca

SEQ ID NO: 2322410 - RNA, 19 nt, Artificial Sequence
  Description of Artificial Sequence: Synthetic oligonucleotide
  Sense strand starting at position 354 of SEQ ID NO: 1885180
cugauaacagccugguaua

SEQ ID NO: 2322411 - RNA, 19 nt, Artificial Sequence
  Description of Artificial Sequence: Synthetic oligonucleotide
  Antisense strand to SEQ ID NO: 2322410
uauaccaggcuguuaucag

SEQ ID NO: 2322412 - RNA, 19 nt, Artificial Sequence
  Description of Artificial Sequence: Synthetic oligonucleotide
  Sense strand starting at position 585 of SEQ ID NO: 1885180
uaacguuggcaagaaugua

SEQ ID NO: 2322413 - RNA, 19 nt, Artificial Sequence
  Description of Artificial Sequence: Synthetic oligonucleotide
  Antisense strand to SEQ ID NO: 2322412
uacauucuugccaacguua

SEQ ID NO: 2322414 - RNA, 19 nt, Artificial Sequence
  Description of Artificial Sequence: Synthetic oligonucleotide
  Sense strand starting at position 782 of SEQ ID NO: 1885180
gcagcuuuauuugcccaaa

SEQ ID NO: 2322415 - RNA, 19 nt, Artificial Sequence
  Description of Artificial Sequence: Synthetic oligonucleotide
  Antisense strand to SEQ ID NO: 2322414
uuugggcaaauaaagcugc

SEQ ID NO: 2322416 - RNA, 19 nt, Artificial Sequence
  Description of Artificial Sequence: Synthetic oligonucleotide
  Sense strand starting at position 802 of SEQ ID NO: 1885180
cugggaauagcucacaugu

SEQ ID NO: 2322417 - RNA, 19 nt, Artificial Sequence
  Description of Artificial Sequence: Synthetic oligonucleotide
  Antisense strand to SEQ ID NO: 2322416
acaugugagcuauucccag

SEQ ID NO: 2322418 - RNA, 19 nt, Artificial Sequence
  Description of Artificial Sequence: Synthetic oligonucleotide
  Sense strand starting at position 815 of SEQ ID NO: 1885180
acauguuaaucugcagaaa

SEQ ID NO: 2322419 - RNA, 19 nt, Artificial Sequence
  Description of Artificial Sequence: Synthetic oligonucleotide
  Antisense strand to SEQ ID NO: 2322418
uuucugcagauuaacaugu

SEQ ID NO: 2322420 - RNA, 19 nt, Artificial Sequence
  Description of Artificial Sequence: Synthetic oligonucleotide
  Sense strand starting at position 909 of SEQ ID NO: 1885180
acaugaacugcuuauaugu

SEQ ID NO: 2322421 - RNA, 19 nt, Artificial Sequence
  Description of Artificial Sequence: Synthetic oligonucleotide
  Antisense strand to SEQ ID NO: 2322420
acauauaagcaguucaugu

SEQ ID NO: 2322422 - RNA, 19 nt, Artificial Sequence
  Description of Artificial Sequence: Synthetic oligonucleotide
  Sense strand starting at position 990 of SEQ ID NO: 1885180
guuugauuguaucuagaua

SEQ ID NO: 2322423 - RNA, 19 nt, Artificial Sequence
  Description of Artificial Sequence: Synthetic oligonucleotide
  Antisense strand to SEQ ID NO: 2322422
uaucuagauacaaucaaac

SEQ ID NO: 2322424 - RNA, 19 nt, Artificial Sequence
  Description of Artificial Sequence: Synthetic oligonucleotide
  Sense strand starting at position 1223 of SEQ ID NO: 1885180
auuaauaucuagcuaguga

SEQ ID NO: 2322425 - RNA, 19 nt, Artificial Sequence
  Description of Artificial Sequence: Synthetic oligonucleotide
  Antisense strand to SEQ ID NO: 2322424
ucacuagcuagauauuaau

SEQ ID NO: 2322426 - RNA, 19 nt, Artificial Sequence
  Description of Artificial Sequence: Synthetic oligonucleotide
  Sense strand starting at position 1381 of SEQ ID NO: 1885180
auguuuaugguagaaugua

SEQ ID NO: 2322427 - RNA, 19 nt, Artificial Sequence
  Description of Artificial Sequence: Synthetic oligonucleotide
  Antisense strand to SEQ ID NO: 2322426
uacauucuaccauaaacau

SEQ ID NO: 2322428 - RNA, 19 nt, Artificial Sequence
  Description of Artificial Sequence: Synthetic oligonucleotide
  Sense strand starting at position 1397 of SEQ ID NO: 1885180
guagguguuggguaugaua

SEQ ID NO: 2322429 - RNA, 19 nt, Artificial Sequence
  Description of Artificial Sequence: Synthetic oligonucleotide
  Antisense strand to SEQ ID NO: 2322428
uaucauacccaacaccuac

SEQ ID NO: 2322430 - RNA, 19 nt, Artificial Sequence
  Description of Artificial Sequence: Synthetic oligonucleotide
  Sense strand starting at position 1577 of SEQ ID NO: 1885180
augggacuauuugauaaua

SEQ ID NO: 2322431 - RNA, 19 nt, Artificial Sequence
  Description of Artificial Sequence: Synthetic oligonucleotide
  Antisense strand to SEQ ID NO: 2322430
uauuaucaaauagucccau

SEQ ID NO: 2322432 - RNA, 19 nt, Artificial Sequence
  Description of Artificial Sequence: Synthetic oligonucleotide
  Sense strand starting at position 1654 of SEQ ID NO: 1885180
cuaguaauuguacagguau

SEQ ID NO: 2322433 - RNA, 19 nt, Artificial Sequence
  Description of Artificial Sequence: Synthetic oligonucleotide
  Antisense strand to SEQ ID NO: 2322432
auaccuguacaauuacuag

SEQ ID NO: 2322434 - RNA, 19 nt, Artificial Sequence
  Description of Artificial Sequence: Synthetic oligonucleotide
  Sense strand starting at position 1764 of SEQ ID NO: 1885180
auccaagacuuaguuagau

SEQ ID NO: 2322435 - RNA, 19 nt, Artificial Sequence
  Description of Artificial Sequence: Synthetic oligonucleotide
  Antisense strand to SEQ ID NO: 2322434
aucuaacuaagucuuggau

SEQ ID NO: 2322436 - RNA, 19 nt, Artificial Sequence
  Description of Artificial Sequence: Synthetic oligonucleotide
  Sense strand starting at position 1808 of SEQ ID NO: 1885180
cuuggcagccaugaagaau

SEQ ID NO: 2322437 - RNA, 19 nt, Artificial Sequence
  Description of Artificial Sequence: Synthetic oligonucleotide
  Antisense strand to SEQ ID NO: 2322436
auucuucauggcugccaag

SEQ ID NO: 2322438 - RNA, 19 nt, Artificial Sequence
  Description of Artificial Sequence: Synthetic oligonucleotide
  Sense strand starting at position 2123 of SEQ ID NO: 1885180
acaguaguccuuuauuaga

SEQ ID NO: 2322439 - RNA, 19 nt, Artificial Sequence
  Description of Artificial Sequence: Synthetic oligonucleotide
  Antisense strand to SEQ ID NO: 2322438
ucuaauaaaggacuacugu

SEQ ID NO: 2322440 - RNA, 19 nt, Artificial Sequence
  Description of Artificial Sequence: Synthetic oligonucleotide
  Sense strand starting at position 2125 of SEQ ID NO: 1885180
aguaguccuuuauuagaga

SEQ ID NO: 2322441 - RNA, 19 nt, Artificial Sequence
  Description of Artificial Sequence: Synthetic oligonucleotide
  Antisense strand to SEQ ID NO: 2322440
ucucuaauaaaggacuacu

SEQ ID NO: 2322442 - RNA, 19 nt, Artificial Sequence
  Description of Artificial Sequence: Synthetic oligonucleotide
  Sense strand starting at position 2160 of SEQ ID NO: 1885180
auaauuacauggucacuga

SEQ ID NO: 2322443 - RNA, 19 nt, Artificial Sequence
  Description of Artificial Sequence: Synthetic oligonucleotide
  Antisense strand to SEQ ID NO: 2322442
ucagugaccauguaauuau

SEQ ID NO: 2322444 - RNA, 19 nt, Artificial Sequence
  Description of Artificial Sequence: Synthetic oligonucleotide
  Sense strand starting at position 2164 of SEQ ID NO: 1885180
uuacauggucacugaggga

SEQ ID NO: 2322445 - RNA, 19 nt, Artificial Sequence
  Description of Artificial Sequence: Synthetic oligonucleotide
  Antisense strand to SEQ ID NO: 2322444
ucccucagugaccauguaa

SEQ ID NO: 2322446 - RNA, 19 nt, Artificial Sequence
  Description of Artificial Sequence: Synthetic oligonucleotide
  Sense strand starting at position 2402 of SEQ ID NO: 1885180
cugccaggacgauauguua

SEQ ID NO: 2322447 - RNA, 19 nt, Artificial Sequence
  Description of Artificial Sequence: Synthetic oligonucleotide
  Antisense strand to SEQ ID NO: 2322446
uaacauaucguccuggcag

SEQ ID NO: 2322448 - RNA, 19 nt, Artificial Sequence
  Description of Artificial Sequence: Synthetic oligonucleotide
  Sense strand starting at position 2405 of SEQ ID NO: 1885180
ccaggacgauauguuaaua

SEQ ID NO: 2322449 - RNA, 19 nt, Artificial Sequence
  Description of Artificial Sequence: Synthetic oligonucleotide
  Antisense strand to SEQ ID NO: 2322448
uauuaacauaucguccugg

SEQ ID NO: 2322450 - RNA, 19 nt, Artificial Sequence
  Description of Artificial Sequence: Synthetic oligonucleotide
  Sense strand starting at position 2489 of SEQ ID NO: 1885180
uuaugugguaagggauauu

SEQ ID NO: 2322451 - RNA, 19 nt, Artificial Sequence
  Description of Artificial Sequence: Synthetic oligonucleotide
  Antisense strand to SEQ ID NO: 2322450
aauaucccuuaccacauaa

SEQ ID NO: 2322452 - RNA, 19 nt, Artificial Sequence
  Description of Artificial Sequence: Synthetic oligonucleotide
  Sense strand starting at position 2499 of SEQ ID NO: 1885180
agggauauugugggucauc

SEQ ID NO: 2322453 - RNA, 19 nt, Artificial Sequence
  Description of Artificial Sequence: Synthetic oligonucleotide
  Antisense strand to SEQ ID NO: 2322452
gaugacccacaauaucccu

SEQ ID NO: 2322454 - RNA, 19 nt, Artificial Sequence
  Description of Artificial Sequence: Synthetic oligonucleotide
  Sense strand starting at position 2500 of SEQ ID NO: 1885180
gggauauugugggucaucu

SEQ ID NO: 2322455 - RNA, 19 nt, Artificial Sequence
  Description of Artificial Sequence: Synthetic oligonucleotide
  Antisense strand to SEQ ID NO: 2322454
agaugacccacaauauccc

SEQ ID NO: 2322456 - RNA, 19 nt, Artificial Sequence
  Description of Artificial Sequence: Synthetic oligonucleotide
  Sense strand starting at position 2511 of SEQ ID NO: 1885180
ggucaucugguccaccuaa

SEQ ID NO: 2322457 - RNA, 19 nt, Artificial Sequence
  Description of Artificial Sequence: Synthetic oligonucleotide
  Antisense strand to SEQ ID NO: 2322456
uuagguggaccagaugacc

SEQ ID NO: 2322458 - RNA, 19 nt, Artificial Sequence
  Description of Artificial Sequence: Synthetic oligonucleotide
  Sense strand starting at position 2544 of SEQ ID NO: 1885180
cugucaaauguaugaauau

SEQ ID NO: 2322459 - RNA, 19 nt, Artificial Sequence
  Description of Artificial Sequence: Synthetic oligonucleotide
  Antisense strand to SEQ ID NO: 2322458
auauucauacauuugacag

SEQ ID NO: 2322460 - RNA, 19 nt, Artificial Sequence
  Description of Artificial Sequence: Synthetic oligonucleotide
  Sense strand starting at position 2655 of SEQ ID NO: 1885180
ucagaaacugauuguuaua

SEQ ID NO: 2322461 - RNA, 19 nt, Artificial Sequence
  Description of Artificial Sequence: Synthetic oligonucleotide
  Antisense strand to SEQ ID NO: 2322460
uauaacaaucaguuucuga

SEQ ID NO: 2322462 - RNA, 19 nt, Artificial Sequence
  Description of Artificial Sequence: Synthetic oligonucleotide
  Sense strand starting at position 2720 of SEQ ID NO: 1885180
cuacuacuaguaggaguau

SEQ ID NO: 2322463 - RNA, 19 nt, Artificial Sequence
  Description of Artificial Sequence: Synthetic oligonucleotide
  Antisense strand to SEQ ID NO: 2322462
auacuccuacuaguaguag

SEQ ID NO: 2322464 - RNA, 19 nt, Artificial Sequence
  Description of Artificial Sequence: Synthetic oligonucleotide
  Sense strand starting at position 2729 of SEQ ID NO: 1885180
guaggaguauuaccaggaa

SEQ ID NO: 2322465 - RNA, 19 nt, Artificial Sequence
  Description of Artificial Sequence: Synthetic oligonucleotide
  Antisense strand to SEQ ID NO: 2322464
uuccugguaauacuccuac

SEQ ID NO: 2322466 - RNA, 19 nt, Artificial Sequence
  Description of Artificial Sequence: Synthetic oligonucleotide
  Sense strand starting at position 2915 of SEQ ID NO: 1885180
agccaaucaugguuauaau

SEQ ID NO: 2322467 - RNA, 19 nt, Artificial Sequence
  Description of Artificial Sequence: Synthetic oligonucleotide
  Antisense strand to SEQ ID NO: 2322466
auuauaaccaugauuggcu

SEQ ID NO: 2322468 - RNA, 19 nt, Artificial Sequence
  Description of Artificial Sequence: Synthetic oligonucleotide
  Sense strand starting at position 2916 of SEQ ID NO: 1885180
gccaaucaugguuauaaua

SEQ ID NO: 2322469 - RNA, 19 nt, Artificial Sequence
  Description of Artificial Sequence: Synthetic oligonucleotide
  Antisense strand to SEQ ID NO: 2322468
uauuauaaccaugauuggc

SEQ ID NO: 2322470 - RNA, 19 nt, Artificial Sequence
  Description of Artificial Sequence: Synthetic oligonucleotide
  Sense strand starting at position 2954 of SEQ ID NO: 1885180
gaauaagaaucuguguuua

SEQ ID NO: 2322471 - RNA, 19 nt, Artificial Sequence
  Description of Artificial Sequence: Synthetic oligonucleotide
  Antisense strand to SEQ ID NO: 2322470
uaaacacagauucuuauuc

SEQ ID NO: 2322472 - RNA, 19 nt, Artificial Sequence
  Description of Artificial Sequence: Synthetic oligonucleotide
  Sense strand starting at position 3127 of SEQ ID NO: 1885180
aggaauucuccaggcuaau

SEQ ID NO: 2322473 - RNA, 19 nt, Artificial Sequence
  Description of Artificial Sequence: Synthetic oligonucleotide
  Antisense strand to SEQ ID NO: 2322472
auuagccuggagaauuccu

SEQ ID NO: 2322474 - RNA, 19 nt, Artificial Sequence
  Description of Artificial Sequence: Synthetic oligonucleotide
  Sense strand starting at position 3154 of SEQ ID NO: 1885180
aaaggcauccuggguggaa

SEQ ID NO: 2322475 - RNA, 19 nt, Artificial Sequence
  Description of Artificial Sequence: Synthetic oligonucleotide
  Antisense strand to SEQ ID NO: 2322474
uuccacccaggaugccuuu

SEQ ID NO: 2322476 - RNA, 19 nt, Artificial Sequence
  Description of Artificial Sequence: Synthetic oligonucleotide
  Sense strand starting at position 3156 of SEQ ID NO: 1885180
aggcauccuggguggaaga

SEQ ID NO: 2322477 - RNA, 19 nt, Artificial Sequence
  Description of Artificial Sequence: Synthetic oligonucleotide
  Antisense strand to SEQ ID NO: 2322476
ucuuccacccaggaugccu

SEQ ID NO: 2322478 - RNA, 19 nt, Artificial Sequence
  Description of Artificial Sequence: Synthetic oligonucleotide
  Sense strand starting at position 3433 of SEQ ID NO: 1885180
agaggugaugagggucuaa

SEQ ID NO: 2322479 - RNA, 19 nt, Artificial Sequence
  Description of Artificial Sequence: Synthetic oligonucleotide
  Antisense strand to SEQ ID NO: 2322478
uuagacccucaucaccucu

SEQ ID NO: 2322480 - RNA, 19 nt, Artificial Sequence
  Description of Artificial Sequence: Synthetic oligonucleotide
  Sense strand starting at position 3512 of SEQ ID NO: 1885180
ugucaacaagauugaguga

SEQ ID NO: 2322481 - RNA, 19 nt, Artificial Sequence
  Description of Artificial Sequence: Synthetic oligonucleotide
  Antisense strand to SEQ ID NO: 2322480
ucacucaaucuuguugaca

SEQ ID NO: 2322482 - RNA, 19 nt, Artificial Sequence
  Description of Artificial Sequence: Synthetic oligonucleotide
  Sense strand starting at position 3671 of SEQ ID NO: 1885180
gggugagagguuuaguugu

SEQ ID NO: 2322483 - RNA, 19 nt, Artificial Sequence
  Description of Artificial Sequence: Synthetic oligonucleotide
  Antisense strand to SEQ ID NO: 2322482
acaacuaaaccucucaccc

SEQ ID NO: 2322484 - RNA, 19 nt, Artificial Sequence
  Description of Artificial Sequence: Synthetic oligonucleotide
  Sense strand starting at position 3679 of SEQ ID NO: 1885180
gguuuaguuguagacauaa

SEQ ID NO: 2322485 - RNA, 19 nt, Artificial Sequence
  Description of Artificial Sequence: Synthetic oligonucleotide
  Antisense strand to SEQ ID NO: 2322484
uuaugucuacaacuaaacc

SEQ ID NO: 2322486 - RNA, 19 nt, Artificial Sequence
  Description of Artificial Sequence: Synthetic oligonucleotide
  Sense strand starting at position 3736 of SEQ ID NO: 1885180
gaagaugucccauaggcac

SEQ ID NO: 2322487 - RNA, 19 nt, Artificial Sequence
  Description of Artificial Sequence: Synthetic oligonucleotide
  Antisense strand to SEQ ID NO: 2322486
gugccuaugggacaucuuc

SEQ ID NO: 2322488 - RNA, 19 nt, Artificial Sequence
  Description of Artificial Sequence: Synthetic oligonucleotide
  Sense strand starting at position 3844 of SEQ ID NO: 1885180
guaagugccaaguacagaa

SEQ ID NO: 2322489 - RNA, 19 nt, Artificial Sequence
  Description of Artificial Sequence: Synthetic oligonucleotide
  Antisense strand to SEQ ID NO: 2322488
uucuguacuuggcacuuac

SEQ ID NO: 2322490 - RNA, 19 nt, Artificial Sequence
  Description of Artificial Sequence: Synthetic oligonucleotide
  Sense strand starting at position 198 of SEQ ID NO: 1885181
gggaaagugggaugcauaa

SEQ ID NO: 2322491 - RNA, 19 nt, Artificial Sequence
  Description of Artificial Sequence: Synthetic oligonucleotide
  Antisense strand to SEQ ID NO: 2322490
uuaugcaucccacuuuccc

SEQ ID NO: 2322492 - RNA, 19 nt, Artificial Sequence
  Description of Artificial Sequence: Synthetic oligonucleotide
  Sense strand starting at position 219 of SEQ ID NO: 1885181
cuagguggguccucccaua

SEQ ID NO: 2322493 - RNA, 19 nt, Artificial Sequence
  Description of Artificial Sequence: Synthetic oligonucleotide
  Antisense strand to SEQ ID NO: 2322492
uaugggaggacccaccuag

SEQ ID NO: 2322494 - RNA, 19 nt, Artificial Sequence
  Description of Artificial Sequence: Synthetic oligonucleotide
  Sense strand starting at position 950 of SEQ ID NO: 1885181
acacuuaguguuugaacca

SEQ ID NO: 2322495 - RNA, 19 nt, Artificial Sequence
  Description of Artificial Sequence: Synthetic oligonucleotide
  Antisense strand to SEQ ID NO: 2322494
ugguucaaacacuaagugu

SEQ ID NO: 2322496 - RNA, 19 nt, Artificial Sequence
  Description of Artificial Sequence: Synthetic oligonucleotide
  Sense strand starting at position 985 of SEQ ID NO: 1885181
gucauagggcuuugagaau

SEQ ID NO: 2322497 - RNA, 19 nt, Artificial Sequence
  Description of Artificial Sequence: Synthetic oligonucleotide
  Antisense strand to SEQ ID NO: 2322496
auucucaaagcccuaugac

SEQ ID NO: 2322498 - RNA, 19 nt, Artificial Sequence
  Description of Artificial Sequence: Synthetic oligonucleotide
  Sense strand starting at position 1229 of SEQ ID NO: 1885181
ucugcaugagcccagaauu

SEQ ID NO: 2322499 - RNA, 19 nt, Artificial Sequence
  Description of Artificial Sequence: Synthetic oligonucleotide
  Antisense strand to SEQ ID NO: 2322498
aauucugggcucaugcaga

SEQ ID NO: 2322500 - RNA, 19 nt, Artificial Sequence
  Description of Artificial Sequence: Synthetic oligonucleotide
  Sense strand starting at position 1360 of SEQ ID NO: 1885181
uugagaaguuaugcauuaa

SEQ ID NO: 2322501 - RNA, 19 nt, Artificial Sequence
  Description of Artificial Sequence: Synthetic oligonucleotide
  Antisense strand to SEQ ID NO: 2322500
uuaaugcauaacuucucaa

SEQ ID NO: 2322502 - RNA, 19 nt, Artificial Sequence
  Description of Artificial Sequence: Synthetic oligonucleotide
  Sense strand starting at position 1364 of SEQ ID NO: 1885181
gaaguuaugcauuaaagug

SEQ ID NO: 2322503 - RNA, 19 nt, Artificial Sequence
  Description of Artificial Sequence: Synthetic oligonucleotide
  Antisense strand to SEQ ID NO: 2322502
cacuuuaaugcauaacuuc

SEQ ID NO: 2322504 - RNA, 19 nt, Artificial Sequence
  Description of Artificial Sequence: Synthetic oligonucleotide
  Sense strand starting at position 1397 of SEQ ID NO: 1885181
aguuaauggguuuguuauu

SEQ ID NO: 2322505 - RNA, 19 nt, Artificial Sequence
  Description of Artificial Sequence: Synthetic oligonucleotide
  Antisense strand to SEQ ID NO: 2322504
aauaacaaacccauuaacu

SEQ ID NO: 2322506 - RNA, 19 nt, Artificial Sequence
  Description of Artificial Sequence: Synthetic oligonucleotide
  Sense strand starting at position 1398 of SEQ ID NO: 1885181
guuaauggguuuguuauua

SEQ ID NO: 2322507 - RNA, 19 nt, Artificial Sequence
  Description of Artificial Sequence: Synthetic oligonucleotide
  Antisense strand to SEQ ID NO: 2322506
uaauaacaaacccauuaac

SEQ ID NO: 2322508 - RNA, 19 nt, Artificial Sequence
  Description of Artificial Sequence: Synthetic oligonucleotide
  Sense strand starting at position 1438 of SEQ ID NO: 1885181
ugguuuaauuccucaugca

SEQ ID NO: 2322509 - RNA, 19 nt, Artificial Sequence
  Description of Artificial Sequence: Synthetic oligonucleotide
  Antisense strand to SEQ ID NO: 2322508
ugcaugaggaauuaaacca

SEQ ID NO: 2322510 - RNA, 19 nt, Artificial Sequence
  Description of Artificial Sequence: Synthetic oligonucleotide
  Sense strand starting at position 1439 of SEQ ID NO: 1885181
gguuuaauuccucaugcac

SEQ ID NO: 2322511 - RNA, 19 nt, Artificial Sequence
  Description of Artificial Sequence: Synthetic oligonucleotide
  Antisense strand to SEQ ID NO: 2322510
gugcaugaggaauuaaacc

SEQ ID NO: 2322512 - RNA, 19 nt, Artificial Sequence
  Description of Artificial Sequence: Synthetic oligonucleotide
  Sense strand starting at position 1542 of SEQ ID NO: 1885181
ugggaaccgcuguguuaaa

SEQ ID NO: 2322513 - RNA, 19 nt, Artificial Sequence
  Description of Artificial Sequence: Synthetic oligonucleotide
  Antisense strand to SEQ ID NO: 2322512
uuuaacacagcgguuccca

SEQ ID NO: 2322514 - RNA, 19 nt, Artificial Sequence
  Description of Artificial Sequence: Synthetic oligonucleotide
  Sense strand starting at position 1607 of SEQ ID NO: 1885181
gcgcguucacguuugccau

SEQ ID NO: 2322515 - RNA, 19 nt, Artificial Sequence
  Description of Artificial Sequence: Synthetic oligonucleotide
  Antisense strand to SEQ ID NO: 2322514
auggcaaacgugaacgcgc

SEQ ID NO: 2322516 - RNA, 19 nt, Artificial Sequence
  Description of Artificial Sequence: Synthetic oligonucleotide
  Sense strand starting at position 1667 of SEQ ID NO: 1885181
gguaauucgaccuaaggug

SEQ ID NO: 2322517 - RNA, 19 nt, Artificial Sequence
  Description of Artificial Sequence: Synthetic oligonucleotide
  Antisense strand to SEQ ID NO: 2322516
caccuuaggucgaauuacc

SEQ ID NO: 2322518 - RNA, 19 nt, Artificial Sequence
  Description of Artificial Sequence: Synthetic oligonucleotide
  Sense strand starting at position 2155 of SEQ ID NO: 1885181
cggcgagucccgaggucaa

SEQ ID NO: 2322519 - RNA, 19 nt, Artificial Sequence
  Description of Artificial Sequence: Synthetic oligonucleotide
  Antisense strand to SEQ ID NO: 2322518
uugaccucgggacucgccg

SEQ ID NO: 2322520 - RNA, 19 nt, Artificial Sequence
  Description of Artificial Sequence: Synthetic oligonucleotide
  Sense strand starting at position 2347 of SEQ ID NO: 1885181
agccaacauuucuagggau

SEQ ID NO: 2322521 - RNA, 19 nt, Artificial Sequence
  Description of Artificial Sequence: Synthetic oligonucleotide
  Antisense strand to SEQ ID NO: 2322520
aucccuagaaauguuggcu

SEQ ID NO: 2322522 - RNA, 19 nt, Artificial Sequence
  Description of Artificial Sequence: Synthetic oligonucleotide
  Sense strand starting at position 2359 of SEQ ID NO: 1885181
uagggauuucuucgcagcu

SEQ ID NO: 2322523 - RNA, 19 nt, Artificial Sequence
  Description of Artificial Sequence: Synthetic oligonucleotide
  Antisense strand to SEQ ID NO: 2322522
agcugcgaagaaaucccua

SEQ ID NO: 2322524 - RNA, 19 nt, Artificial Sequence
  Description of Artificial Sequence: Synthetic oligonucleotide
  Sense strand starting at position 2360 of SEQ ID NO: 1885181
agggauuucuucgcagcuu

SEQ ID NO: 2322525 - RNA, 19 nt, Artificial Sequence
  Description of Artificial Sequence: Synthetic oligonucleotide
  Antisense strand to SEQ ID NO: 2322524
aagcugcgaagaaaucccu

SEQ ID NO: 2322526 - RNA, 19 nt, Artificial Sequence
  Description of Artificial Sequence: Synthetic oligonucleotide
  Sense strand starting at position 2422 of SEQ ID NO: 1885181
ugcauaucuugguuagcaa

SEQ ID NO: 2322527 - RNA, 19 nt, Artificial Sequence
  Description of Artificial Sequence: Synthetic oligonucleotide
  Antisense strand to SEQ ID NO: 2322526
uugcuaaccaagauaugca

SEQ ID NO: 2322528 - RNA, 19 nt, Artificial Sequence
  Description of Artificial Sequence: Synthetic oligonucleotide
  Sense strand starting at position 2423 of SEQ ID NO: 1885181
gcauaucuugguuagcaau

SEQ ID NO: 2322529 - RNA, 19 nt, Artificial Sequence
  Description of Artificial Sequence: Synthetic oligonucleotide
  Antisense strand to SEQ ID NO: 2322528
auugcuaaccaagauaugc

SEQ ID NO: 2322530 - RNA, 19 nt, Artificial Sequence
  Description of Artificial Sequence: Synthetic oligonucleotide
  Sense strand starting at position 2425 of SEQ ID NO: 1885181
auaucuugguuagcaauua

SEQ ID NO: 2322531 - RNA, 19 nt, Artificial Sequence
  Description of Artificial Sequence: Synthetic oligonucleotide
  Antisense strand to SEQ ID NO: 2322530
uaauugcuaaccaagauau

SEQ ID NO: 2322532 - RNA, 19 nt, Artificial Sequence
  Description of Artificial Sequence: Synthetic oligonucleotide
  Sense strand starting at position 2437 of SEQ ID NO: 1885181
gcaauuaaucuagaguggu

SEQ ID NO: 2322533 - RNA, 19 nt, Artificial Sequence
  Description of Artificial Sequence: Synthetic oligonucleotide
  Antisense strand to SEQ ID NO: 2322532
accacucuagauuaauugc

SEQ ID NO: 2322534 - RNA, 19 nt, Artificial Sequence
  Description of Artificial Sequence: Synthetic oligonucleotide
  Sense strand starting at position 2440 of SEQ ID NO: 1885181
auuaaucuagaguggucaa

SEQ ID NO: 2322535 - RNA, 19 nt, Artificial Sequence
  Description of Artificial Sequence: Synthetic oligonucleotide
  Antisense strand to SEQ ID NO: 2322534
uugaccacucuagauuaau

SEQ ID NO: 2322536 - RNA, 19 nt, Artificial Sequence
  Description of Artificial Sequence: Synthetic oligonucleotide
  Sense strand starting at position 2443 of SEQ ID NO: 1885181
aaucuagaguggucaaagu

SEQ ID NO: 2322537 - RNA, 19 nt, Artificial Sequence
  Description of Artificial Sequence: Synthetic oligonucleotide
  Antisense strand to SEQ ID NO: 2322536
acuuugaccacucuagauu

SEQ ID NO: 2322538 - RNA, 19 nt, Artificial Sequence
  Description of Artificial Sequence: Synthetic oligonucleotide
  Sense strand starting at position 2469 of SEQ ID NO: 1885181
ggcugcauccuggaacaca

SEQ ID NO: 2322539 - RNA, 19 nt, Artificial Sequence
  Description of Artificial Sequence: Synthetic oligonucleotide
  Antisense strand to SEQ ID NO: 2322538
uguguuccaggaugcagcc

SEQ ID NO: 2322540 - RNA, 19 nt, Artificial Sequence
  Description of Artificial Sequence: Synthetic oligonucleotide
  Sense strand starting at position 2571 of SEQ ID NO: 1885181
cguucugcagcggugagaa

SEQ ID NO: 2322541 - RNA, 19 nt, Artificial Sequence
  Description of Artificial Sequence: Synthetic oligonucleotide
  Antisense strand to SEQ ID NO: 2322540
uucucaccgcugcagaacg

SEQ ID NO: 2322542 - RNA, 19 nt, Artificial Sequence
  Description of Artificial Sequence: Synthetic oligonucleotide
  Sense strand starting at position 2780 of SEQ ID NO: 1885181
cugaaaccguuucucagaa

SEQ ID NO: 2322543 - RNA, 19 nt, Artificial Sequence
  Description of Artificial Sequence: Synthetic oligonucleotide
  Antisense strand to SEQ ID NO: 2322542
uucugagaaacgguuucag

SEQ ID NO: 2322544 - RNA, 19 nt, Artificial Sequence
  Description of Artificial Sequence: Synthetic oligonucleotide
  Sense strand starting at position 2929 of SEQ ID NO: 1885181
uucugcugagccuaagaau

SEQ ID NO: 2322545 - RNA, 19 nt, Artificial Sequence
  Description of Artificial Sequence: Synthetic oligonucleotide
  Antisense strand to SEQ ID NO: 2322544
auucuuaggcucagcagaa

SEQ ID NO: 2322546 - RNA, 19 nt, Artificial Sequence
  Description of Artificial Sequence: Synthetic oligonucleotide
  Sense strand starting at position 2938 of SEQ ID NO: 1885181
gccuaagaauuauuguuau

SEQ ID NO: 2322547 - RNA, 19 nt, Artificial Sequence
  Description of Artificial Sequence: Synthetic oligonucleotide
  Antisense strand to SEQ ID NO: 2322546
auaacaauaauucuuaggc

SEQ ID NO: 2322548 - RNA, 19 nt, Artificial Sequence
  Description of Artificial Sequence: Synthetic oligonucleotide
  Sense strand starting at position 2951 of SEQ ID NO: 1885181
uguuauauucgauaccaac

SEQ ID NO: 2322549 - RNA, 19 nt, Artificial Sequence
  Description of Artificial Sequence: Synthetic oligonucleotide
  Antisense strand to SEQ ID NO: 2322548
guugguaucgaauauaaca

SEQ ID NO: 2322550 - RNA, 19 nt, Artificial Sequence
  Description of Artificial Sequence: Synthetic oligonucleotide
  Sense strand starting at position 3584 of SEQ ID NO: 1885181
gcuggagugcaguaauuac

SEQ ID NO: 2322551 - RNA, 19 nt, Artificial Sequence
  Description of Artificial Sequence: Synthetic oligonucleotide
  Antisense strand to SEQ ID NO: 2322550
guaauuacugcacuccagc

SEQ ID NO: 2322552 - RNA, 19 nt, Artificial Sequence
  Description of Artificial Sequence: Synthetic oligonucleotide
  Sense strand starting at position 3653 of SEQ ID NO: 1885181
acucaagucugauucugga

SEQ ID NO: 2322553 - RNA, 19 nt, Artificial Sequence
  Description of Artificial Sequence: Synthetic oligonucleotide
  Antisense strand to SEQ ID NO: 2322552
uccagaaucagacuugagu

SEQ ID NO: 2322554 - RNA, 19 nt, Artificial Sequence
  Description of Artificial Sequence: Synthetic oligonucleotide
  Sense strand starting at position 3783 of SEQ ID NO: 1885181
cuccuaguuccagaguuga

SEQ ID NO: 2322555 - RNA, 19 nt, Artificial Sequence
  Description of Artificial Sequence: Synthetic oligonucleotide
  Antisense strand to SEQ ID NO: 2322554
ucaacucuggaacuaggag

SEQ ID NO: 2322556 - RNA, 19 nt, Artificial Sequence
  Description of Artificial Sequence: Synthetic oligonucleotide
  Sense strand starting at position 3861 of SEQ ID NO: 1885181
ggguauaaauaccucauca

SEQ ID NO: 2322557 - RNA, 19 nt, Artificial Sequence
  Description of Artificial Sequence: Synthetic oligonucleotide
  Antisense strand to SEQ ID NO: 2322556
ugaugagguauuuauaccc

SEQ ID NO: 2322558 - RNA, 19 nt, Artificial Sequence
  Description of Artificial Sequence: Synthetic oligonucleotide
  Sense strand starting at position 3879 of SEQ ID NO: 1885181
accucauaggcuuguuaua

SEQ ID NO: 2322559 - RNA, 19 nt, Artificial Sequence
  Description of Artificial Sequence: Synthetic oligonucleotide
  Antisense strand to SEQ ID NO: 2322558
uauaacaagccuaugaggu

SEQ ID NO: 2322560 - RNA, 19 nt, Artificial Sequence
  Description of Artificial Sequence: Synthetic oligonucleotide
  Sense strand starting at position 3881 of SEQ ID NO: 1885181
cucauaggcuuguuauaau

SEQ ID NO: 2322561 - RNA, 19 nt, Artificial Sequence
  Description of Artificial Sequence: Synthetic oligonucleotide
  Antisense strand to SEQ ID NO: 2322560
auuauaacaagccuaugag

SEQ ID NO: 2322562 - RNA, 19 nt, Artificial Sequence
  Description of Artificial Sequence: Synthetic oligonucleotide
  Sense strand starting at position 3898 of SEQ ID NO: 1885181
augauagacugaguuuaca

SEQ ID NO: 2322563 - RNA, 19 nt, Artificial Sequence
  Description of Artificial Sequence: Synthetic oligonucleotide
  Antisense strand to SEQ ID NO: 2322562
uguaaacucagucuaucau

SEQ ID NO: 2322564 - RNA, 19 nt, Artificial Sequence
  Description of Artificial Sequence: Synthetic oligonucleotide
  Sense strand starting at position 3952 of SEQ ID NO: 1885181
gcaaguucucaguaguguu

SEQ ID NO: 2322565 - RNA, 19 nt, Artificial Sequence
  Description of Artificial Sequence: Synthetic oligonucleotide
  Antisense strand to SEQ ID NO: 2322564
aacacuacugagaacuugc

SEQ ID NO: 2322566 - RNA, 19 nt, Artificial Sequence
  Description of Artificial Sequence: Synthetic oligonucleotide
  Sense strand starting at position 3965 of SEQ ID NO: 1885181
aguguuaacuauuccucau

SEQ ID NO: 2322567 - RNA, 19 nt, Artificial Sequence
  Description of Artificial Sequence: Synthetic oligonucleotide
  Antisense strand to SEQ ID NO: 2322566
augaggaauaguuaacacu

SEQ ID NO: 2322568 - RNA, 19 nt, Artificial Sequence
  Description of Artificial Sequence: Synthetic oligonucleotide
  Sense strand starting at position 3983 of SEQ ID NO: 1885181
uuauuauugucauugcauc

SEQ ID NO: 2322569 - RNA, 19 nt, Artificial Sequence
  Description of Artificial Sequence: Synthetic oligonucleotide
  Antisense strand to SEQ ID NO: 2322568
gaugcaaugacaauaauaa

SEQ ID NO: 2322570 - RNA, 19 nt, Artificial Sequence
  Description of Artificial Sequence: Synthetic oligonucleotide
  Sense strand starting at position 174 of SEQ ID NO: 1885182
uuuguuucugugcacaaua

SEQ ID NO: 2322571 - RNA, 19 nt, Artificial Sequence
  Description of Artificial Sequence: Synthetic oligonucleotide
  Antisense strand to SEQ ID NO: 2322570
uauugugcacagaaacaaa

SEQ ID NO: 2322572 - RNA, 19 nt, Artificial Sequence
  Description of Artificial Sequence: Synthetic oligonucleotide
  Sense strand starting at position 227 of SEQ ID NO: 1885182
gccucauuugcuuguuuga

SEQ ID NO: 2322573 - RNA, 19 nt, Artificial Sequence
  Description of Artificial Sequence: Synthetic oligonucleotide
  Antisense strand to SEQ ID NO: 2322572
ucaaacaagcaaaugaggc

SEQ ID NO: 2322574 - RNA, 19 nt, Artificial Sequence
  Description of Artificial Sequence: Synthetic oligonucleotide
  Sense strand starting at position 229 of SEQ ID NO: 1885182
cucauuugcuuguuugaag

SEQ ID NO: 2322575 - RNA, 19 nt, Artificial Sequence
  Description of Artificial Sequence: Synthetic oligonucleotide
  Antisense strand to SEQ ID NO: 2322574
cuucaaacaagcaaaugag

SEQ ID NO: 2322576 - RNA, 19 nt, Artificial Sequence
  Description of Artificial Sequence: Synthetic oligonucleotide
  Sense strand starting at position 246 of SEQ ID NO: 1885182
agccuaauugcagguauuu

SEQ ID NO: 2322577 - RNA, 19 nt, Artificial Sequence
  Description of Artificial Sequence: Synthetic oligonucleotide
  Antisense strand to SEQ ID NO: 2322576
aaauaccugcaauuaggcu

SEQ ID NO: 2322578 - RNA, 19 nt, Artificial Sequence
  Description of Artificial Sequence: Synthetic oligonucleotide
  Sense strand starting at position 282 of SEQ ID NO: 1885182
ggauuucucucgucuucca

SEQ ID NO: 2322579 - RNA, 19 nt, Artificial Sequence
  Description of Artificial Sequence: Synthetic oligonucleotide
  Antisense strand to SEQ ID NO: 2322578
uggaagacgagagaaaucc

SEQ ID NO: 2322580 - RNA, 19 nt, Artificial Sequence
  Description of Artificial Sequence: Synthetic oligonucleotide
  Sense strand starting at position 326 of SEQ ID NO: 1885182
gugguaauugcugagaaga

SEQ ID NO: 2322581 - RNA, 19 nt, Artificial Sequence
  Description of Artificial Sequence: Synthetic oligonucleotide
  Antisense strand to SEQ ID NO: 2322580
ucuucucagcaauuaccac

SEQ ID NO: 2322582 - RNA, 19 nt, Artificial Sequence
  Description of Artificial Sequence: Synthetic oligonucleotide
  Sense strand starting at position 436 of SEQ ID NO: 1885182
ggcagaaggucuucucaua

SEQ ID NO: 2322583 - RNA, 19 nt, Artificial Sequence
  Description of Artificial Sequence: Synthetic oligonucleotide
  Antisense strand to SEQ ID NO: 2322582
uaugagaagaccuucugcc

SEQ ID NO: 2322584 - RNA, 19 nt, Artificial Sequence
  Description of Artificial Sequence: Synthetic oligonucleotide
  Sense strand starting at position 647 of SEQ ID NO: 1885182
uggguuugucuagauauaa

SEQ ID NO: 2322585 - RNA, 19 nt, Artificial Sequence
  Description of Artificial Sequence: Synthetic oligonucleotide
  Antisense strand to SEQ ID NO: 2322584
uuauaucuagacaaaccca

SEQ ID NO: 2322586 - RNA, 19 nt, Artificial Sequence
  Description of Artificial Sequence: Synthetic oligonucleotide
  Sense strand starting at position 694 of SEQ ID NO: 1885182
gaguaaacacuaugcagua

SEQ ID NO: 2322587 - RNA, 19 nt, Artificial Sequence
  Description of Artificial Sequence: Synthetic oligonucleotide
  Antisense strand to SEQ ID NO: 2322586
uacugcauaguguuuacuc

SEQ ID NO: 2322588 - RNA, 19 nt, Artificial Sequence
  Description of Artificial Sequence: Synthetic oligonucleotide
  Sense strand starting at position 939 of SEQ ID NO: 1885182
uggcggugggcuucuguaa

SEQ ID NO: 2322589 - RNA, 19 nt, Artificial Sequence
  Description of Artificial Sequence: Synthetic oligonucleotide
  Antisense strand to SEQ ID NO: 2322588
uuacagaagcccaccgcca

SEQ ID NO: 2322590 - RNA, 19 nt, Artificial Sequence
  Description of Artificial Sequence: Synthetic oligonucleotide
  Sense strand starting at position 940 of SEQ ID NO: 1885182
ggcggugggcuucuguaau

SEQ ID NO: 2322591 - RNA, 19 nt, Artificial Sequence
  Description of Artificial Sequence: Synthetic oligonucleotide
  Antisense strand to SEQ ID NO: 2322590
auuacagaagcccaccgcc

SEQ ID NO: 2322592 - RNA, 19 nt, Artificial Sequence
  Description of Artificial Sequence: Synthetic oligonucleotide
  Sense strand starting at position 1993 of SEQ ID NO: 1885182
ucauaauuguguucuagaa

SEQ ID NO: 2322593 - RNA, 19 nt, Artificial Sequence
  Description of Artificial Sequence: Synthetic oligonucleotide
  Antisense strand to SEQ ID NO: 2322592
uucuagaacacaauuauga

SEQ ID NO: 2322594 - RNA, 19 nt, Artificial Sequence
  Description of Artificial Sequence: Synthetic oligonucleotide
  Sense strand starting at position 1997 of SEQ ID NO: 1885182
aauuguguucuagaaguuc

SEQ ID NO: 2322595 - RNA, 19 nt, Artificial Sequence
  Description of Artificial Sequence: Synthetic oligonucleotide
  Antisense strand to SEQ ID NO: 2322594
gaacuucuagaacacaauu

SEQ ID NO: 2322596 - RNA, 19 nt, Artificial Sequence
  Description of Artificial Sequence: Synthetic oligonucleotide
  Sense strand starting at position 2068 of SEQ ID NO: 1885182
auugucuccuucccagaga

SEQ ID NO: 2322597 - RNA, 19 nt, Artificial Sequence
  Description of Artificial Sequence: Synthetic oligonucleotide
  Antisense strand to SEQ ID NO: 2322596
ucucugggaaggagacaau

SEQ ID NO: 2322598 - RNA, 19 nt, Artificial Sequence
  Description of Artificial Sequence: Synthetic oligonucleotide
  Sense strand starting at position 2071 of SEQ ID NO: 1885182
gucuccuucccagagauca

SEQ ID NO: 2322599 - RNA, 19 nt, Artificial Sequence
  Description of Artificial Sequence: Synthetic oligonucleotide
  Antisense strand to SEQ ID NO: 2322598
ugaucucugggaaggagac

SEQ ID NO: 2322600 - RNA, 19 nt, Artificial Sequence
  Description of Artificial Sequence: Synthetic oligonucleotide
  Sense strand starting at position 2091 of SEQ ID NO: 1885182
gaugaagggcuguguuaaa

SEQ ID NO: 2322601 - RNA, 19 nt, Artificial Sequence
  Description of Artificial Sequence: Synthetic oligonucleotide
  Antisense strand to SEQ ID NO: 2322600
uuuaacacagcccuucauc

SEQ ID NO: 2322602 - RNA, 19 nt, Artificial Sequence
  Description of Artificial Sequence: Synthetic oligonucleotide
  Sense strand starting at position 2184 of SEQ ID NO: 1885182
aagugugaggccuaaagag

SEQ ID NO: 2322603 - RNA, 19 nt, Artificial Sequence
  Description of Artificial Sequence: Synthetic oligonucleotide
  Antisense strand to SEQ ID NO: 2322602
cucuuuaggccucacacuu

SEQ ID NO: 2322604 - RNA, 19 nt, Artificial Sequence
  Description of Artificial Sequence: Synthetic oligonucleotide
  Sense strand starting at position 2205 of SEQ ID NO: 1885182
gagagaguaucuuugugcu

SEQ ID NO: 2322605 - RNA, 19 nt, Artificial Sequence
  Description of Artificial Sequence: Synthetic oligonucleotide
  Antisense strand to SEQ ID NO: 2322604
agcacaaagauacucucuc

SEQ ID NO: 2322606 - RNA, 19 nt, Artificial Sequence
  Description of Artificial Sequence: Synthetic oligonucleotide
  Sense strand starting at position 2212 of SEQ ID NO: 1885182
uaucuuugugcuguguuau

SEQ ID NO: 2322607 - RNA, 19 nt, Artificial Sequence
  Description of Artificial Sequence: Synthetic oligonucleotide
  Antisense strand to SEQ ID NO: 2322606
auaacacagcacaaagaua

SEQ ID NO: 2322608 - RNA, 19 nt, Artificial Sequence
  Description of Artificial Sequence: Synthetic oligonucleotide
  Sense strand starting at position 2223 of SEQ ID NO: 1885182
uguguuaugccugacacau

SEQ ID NO: 2322609 - RNA, 19 nt, Artificial Sequence
  Description of Artificial Sequence: Synthetic oligonucleotide
  Antisense strand to SEQ ID NO: 2322608
augugucaggcauaacaca

SEQ ID NO: 2322610 - RNA, 19 nt, Artificial Sequence
  Description of Artificial Sequence: Synthetic oligonucleotide
  Sense strand starting at position 2235 of SEQ ID NO: 1885182
gacacauugucggugacca

SEQ ID NO: 2322611 - RNA, 19 nt, Artificial Sequence
  Description of Artificial Sequence: Synthetic oligonucleotide
  Antisense strand to SEQ ID NO: 2322610
uggucaccgacaauguguc

SEQ ID NO: 2322612 - RNA, 19 nt, Artificial Sequence
  Description of Artificial Sequence: Synthetic oligonucleotide
  Sense strand starting at position 2236 of SEQ ID NO: 1885182
acacauugucggugaccaa

SEQ ID NO: 2322613 - RNA, 19 nt, Artificial Sequence
  Description of Artificial Sequence: Synthetic oligonucleotide
  Antisense strand to SEQ ID NO: 2322612
uuggucaccgacaaugugu

SEQ ID NO: 2322614 - RNA, 19 nt, Artificial Sequence
  Description of Artificial Sequence: Synthetic oligonucleotide
  Sense strand starting at position 2254 of SEQ ID NO: 1885182
acagauguacuuggccauu

SEQ ID NO: 2322615 - RNA, 19 nt, Artificial Sequence
  Description of Artificial Sequence: Synthetic oligonucleotide
  Antisense strand to SEQ ID NO: 2322614
aauggccaaguacaucugu

SEQ ID NO: 2322616 - RNA, 19 nt, Artificial Sequence
  Description of Artificial Sequence: Synthetic oligonucleotide
  Sense strand starting at position 2358 of SEQ ID NO: 1885182
agucaucugcuugaguauc

SEQ ID NO: 2322617 - RNA, 19 nt, Artificial Sequence
  Description of Artificial Sequence: Synthetic oligonucleotide
  Antisense strand to SEQ ID NO: 2322616
gauacucaagcagaugacu

SEQ ID NO: 2322618 - RNA, 19 nt, Artificial Sequence
  Description of Artificial Sequence: Synthetic oligonucleotide
  Sense strand starting at position 2370 of SEQ ID NO: 1885182
gaguaucagcuaugcugaa

SEQ ID NO: 2322619 - RNA, 19 nt, Artificial Sequence
  Description of Artificial Sequence: Synthetic oligonucleotide
  Antisense strand to SEQ ID NO: 2322618
uucagcauagcugauacuc

SEQ ID NO: 2322620 - RNA, 19 nt, Artificial Sequence
  Description of Artificial Sequence: Synthetic oligonucleotide
  Sense strand starting at position 2374 of SEQ ID NO: 1885182
aucagcuaugcugaaggaa

SEQ ID NO: 2322621 - RNA, 19 nt, Artificial Sequence
  Description of Artificial Sequence: Synthetic oligonucleotide
  Antisense strand to SEQ ID NO: 2322620
uuccuucagcauagcugau

SEQ ID NO: 2322622 - RNA, 19 nt, Artificial Sequence
  Description of Artificial Sequence: Synthetic oligonucleotide
  Sense strand starting at position 2421 of SEQ ID NO: 1885182
guggcagccagagauaaau

SEQ ID NO: 2322623 - RNA, 19 nt, Artificial Sequence
  Description of Artificial Sequence: Synthetic oligonucleotide
  Antisense strand to SEQ ID NO: 2322622
auuuaucucuggcugccac

SEQ ID NO: 2322624 - RNA, 19 nt, Artificial Sequence
  Description of Artificial Sequence: Synthetic oligonucleotide
  Sense strand starting at position 2432 of SEQ ID NO: 1885182
agauaaauguaucucugag

SEQ ID NO: 2322625 - RNA, 19 nt, Artificial Sequence
  Description of Artificial Sequence: Synthetic oligonucleotide
  Antisense strand to SEQ ID NO: 2322624
cucagagauacauuuaucu

SEQ ID NO: 2322626 - RNA, 19 nt, Artificial Sequence
  Description of Artificial Sequence: Synthetic oligonucleotide
  Sense strand starting at position 2440 of SEQ ID NO: 1885182
guaucucugaggcaugguu

SEQ ID NO: 2322627 - RNA, 19 nt, Artificial Sequence
  Description of Artificial Sequence: Synthetic oligonucleotide
  Antisense strand to SEQ ID NO: 2322626
aaccaugccucagagauac

SEQ ID NO: 2322628 - RNA, 19 nt, Artificial Sequence
  Description of Artificial Sequence: Synthetic oligonucleotide
  Sense strand starting at position 2459 of SEQ ID NO: 1885182
ucaucuggucaguaagaug

SEQ ID NO: 2322629 - RNA, 19 nt, Artificial Sequence
  Description of Artificial Sequence: Synthetic oligonucleotide
  Antisense strand to SEQ ID NO: 2322628
caucuuacugaccagauga

SEQ ID NO: 2322630 - RNA, 19 nt, Artificial Sequence
  Description of Artificial Sequence: Synthetic oligonucleotide
  Sense strand starting at position 2490 of SEQ ID NO: 1885182
ucugcuucgggcuaaauau

SEQ ID NO: 2322631 - RNA, 19 nt, Artificial Sequence
  Description of Artificial Sequence: Synthetic oligonucleotide
  Antisense strand to SEQ ID NO: 2322630
auauuuagcccgaagcaga

SEQ ID NO: 2322632 - RNA, 19 nt, Artificial Sequence
  Description of Artificial Sequence: Synthetic oligonucleotide
  Sense strand starting at position 2517 of SEQ ID NO: 1885182
uuuggugggcuuuagaagu

SEQ ID NO: 2322633 - RNA, 19 nt, Artificial Sequence
  Description of Artificial Sequence: Synthetic oligonucleotide
  Antisense strand to SEQ ID NO: 2322632
acuucuaaagcccaccaaa

SEQ ID NO: 2322634 - RNA, 19 nt, Artificial Sequence
  Description of Artificial Sequence: Synthetic oligonucleotide
  Sense strand starting at position 2688 of SEQ ID NO: 1885182
agcaaaugauggucuucua

SEQ ID NO: 2322635 - RNA, 19 nt, Artificial Sequence
  Description of Artificial Sequence: Synthetic oligonucleotide
  Antisense strand to SEQ ID NO: 2322634
uagaagaccaucauuugcu

SEQ ID NO: 2322636 - RNA, 19 nt, Artificial Sequence
  Description of Artificial Sequence: Synthetic oligonucleotide
  Sense strand starting at position 2691 of SEQ ID NO: 1885182
aaaugauggucuucuacug

SEQ ID NO: 2322637 - RNA, 19 nt, Artificial Sequence
  Description of Artificial Sequence: Synthetic oligonucleotide
  Antisense strand to SEQ ID NO: 2322636
caguagaagaccaucauuu

SEQ ID NO: 2322638 - RNA, 19 nt, Artificial Sequence
  Description of Artificial Sequence: Synthetic oligonucleotide
  Sense strand starting at position 2762 of SEQ ID NO: 1885182
cagccugcacuugaguauu

SEQ ID NO: 2322639 - RNA, 19 nt, Artificial Sequence
  Description of Artificial Sequence: Synthetic oligonucleotide
  Antisense strand to SEQ ID NO: 2322638
aauacucaagugcaggcug

SEQ ID NO: 2322640 - RNA, 19 nt, Artificial Sequence
  Description of Artificial Sequence: Synthetic oligonucleotide
  Sense strand starting at position 2770 of SEQ ID NO: 1885182
acuugaguauuccuuaugu

SEQ ID NO: 2322641 - RNA, 19 nt, Artificial Sequence
  Description of Artificial Sequence: Synthetic oligonucleotide
  Antisense strand to SEQ ID NO: 2322640
acauaaggaauacucaagu

SEQ ID NO: 2322642 - RNA, 19 nt, Artificial Sequence
  Description of Artificial Sequence: Synthetic oligonucleotide
  Sense strand starting at position 2772 of SEQ ID NO: 1885182
uugaguauuccuuaugugu

SEQ ID NO: 2322643 - RNA, 19 nt, Artificial Sequence
  Description of Artificial Sequence: Synthetic oligonucleotide
  Antisense strand to SEQ ID NO: 2322642
acacauaaggaauacucaa

SEQ ID NO: 2322644 - RNA, 19 nt, Artificial Sequence
  Description of Artificial Sequence: Synthetic oligonucleotide
  Sense strand starting at position 3150 of SEQ ID NO: 1885182
ugucacaguggccauagau

SEQ ID NO: 2322645 - RNA, 19 nt, Artificial Sequence
  Description of Artificial Sequence: Synthetic oligonucleotide
  Antisense strand to SEQ ID NO: 2322644
aucuauggccacugugaca

SEQ ID NO: 2322646 - RNA, 19 nt, Artificial Sequence
  Description of Artificial Sequence: Synthetic oligonucleotide
  Sense strand starting at position 3444 of SEQ ID NO: 1885182
acuggccucuuagugagaa

SEQ ID NO: 2322647 - RNA, 19 nt, Artificial Sequence
  Description of Artificial Sequence: Synthetic oligonucleotide
  Antisense strand to SEQ ID NO: 2322646
uucucacuaagaggccagu

SEQ ID NO: 2322648 - RNA, 19 nt, Artificial Sequence
  Description of Artificial Sequence: Synthetic oligonucleotide
  Sense strand starting at position 3446 of SEQ ID NO: 1885182
uggccucuuagugagaaua

SEQ ID NO: 2322649 - RNA, 19 nt, Artificial Sequence
  Description of Artificial Sequence: Synthetic oligonucleotide
  Antisense strand to SEQ ID NO: 2322648
uauucucacuaagaggcca

SEQ ID NO: 2322650 - RNA, 19 nt, Artificial Sequence
  Description of Artificial Sequence: Synthetic oligonucleotide
  Sense strand starting at position 108 of SEQ ID NO: 1885183
aguacacucuggcuggaau

SEQ ID NO: 2322651 - RNA, 19 nt, Artificial Sequence
  Description of Artificial Sequence: Synthetic oligonucleotide
  Antisense strand to SEQ ID NO: 2322650
auuccagccagaguguacu

SEQ ID NO: 2322652 - RNA, 19 nt, Artificial Sequence
  Description of Artificial Sequence: Synthetic oligonucleotide
  Sense strand starting at position 231 of SEQ ID NO: 1885183
cugcaaaguggauauaguu

SEQ ID NO: 2322653 - RNA, 19 nt, Artificial Sequence
  Description of Artificial Sequence: Synthetic oligonucleotide
  Antisense strand to SEQ ID NO: 2322652
aacuauauccacuuugcag

SEQ ID NO: 2322654 - RNA, 19 nt, Artificial Sequence
  Description of Artificial Sequence: Synthetic oligonucleotide
  Sense strand starting at position 275 of SEQ ID NO: 1885183
gcauacauaccaggucaga

SEQ ID NO: 2322655 - RNA, 19 nt, Artificial Sequence
  Description of Artificial Sequence: Synthetic oligonucleotide
  Antisense strand to SEQ ID NO: 2322654
ucugaccugguauguaugc

SEQ ID NO: 2322656 - RNA, 19 nt, Artificial Sequence
  Description of Artificial Sequence: Synthetic oligonucleotide
  Sense strand starting at position 545 of SEQ ID NO: 1885183
ccaugauucucagcaauga

SEQ ID NO: 2322657 - RNA, 19 nt, Artificial Sequence
  Description of Artificial Sequence: Synthetic oligonucleotide
  Antisense strand to SEQ ID NO: 2322656
ucauugcugagaaucaugg

SEQ ID NO: 2322658 - RNA, 19 nt, Artificial Sequence
  Description of Artificial Sequence: Synthetic oligonucleotide
  Sense strand starting at position 549 of SEQ ID NO: 1885183
gauucucagcaaugaagga

SEQ ID NO: 2322659 - RNA, 19 nt, Artificial Sequence
  Description of Artificial Sequence: Synthetic oligonucleotide
  Antisense strand to SEQ ID NO: 2322658
uccuucauugcugagaauc

SEQ ID NO: 2322660 - RNA, 19 nt, Artificial Sequence
  Description of Artificial Sequence: Synthetic oligonucleotide
  Sense strand starting at position 590 of SEQ ID NO: 1885183
ccagucauaucuguaaaug

SEQ ID NO: 2322661 - RNA, 19 nt, Artificial Sequence
  Description of Artificial Sequence: Synthetic oligonucleotide
  Antisense strand to SEQ ID NO: 2322660
cauuuacagauaugacugg

SEQ ID NO: 2322662 - RNA, 19 nt, Artificial Sequence
  Description of Artificial Sequence: Synthetic oligonucleotide
  Sense strand starting at position 664 of SEQ ID NO: 1885183
aagacuuaggacuguguuu

SEQ ID NO: 2322663 - RNA, 19 nt, Artificial Sequence
  Description of Artificial Sequence: Synthetic oligonucleotide
  Antisense strand to SEQ ID NO: 2322662
aaacacaguccuaagucuu

SEQ ID NO: 2322664 - RNA, 19 nt, Artificial Sequence
  Description of Artificial Sequence: Synthetic oligonucleotide
  Sense strand starting at position 666 of SEQ ID NO: 1885183
gacuuaggacuguguuuac

SEQ ID NO: 2322665 - RNA, 19 nt, Artificial Sequence
  Description of Artificial Sequence: Synthetic oligonucleotide
  Antisense strand to SEQ ID NO: 2322664
guaaacacaguccuaaguc

SEQ ID NO: 2322666 - RNA, 19 nt, Artificial Sequence
  Description of Artificial Sequence: Synthetic oligonucleotide
  Sense strand starting at position 709 of SEQ ID NO: 1885183
uucuaaaugugaccugacu

SEQ ID NO: 2322667 - RNA, 19 nt, Artificial Sequence
  Description of Artificial Sequence: Synthetic oligonucleotide
  Antisense strand to SEQ ID NO: 2322666
agucaggucacauuuagaa

SEQ ID NO: 2322668 - RNA, 19 nt, Artificial Sequence
  Description of Artificial Sequence: Synthetic oligonucleotide
  Sense strand starting at position 818 of SEQ ID NO: 1885183
ggauuuaacuuugaccaac

SEQ ID NO: 2322669 - RNA, 19 nt, Artificial Sequence
  Description of Artificial Sequence: Synthetic oligonucleotide
  Antisense strand to SEQ ID NO: 2322668
guuggucaaaguuaaaucc

SEQ ID NO: 2322670 - RNA, 19 nt, Artificial Sequence
  Description of Artificial Sequence: Synthetic oligonucleotide
  Sense strand starting at position 949 of SEQ ID NO: 1885183
uggcgauuaacucugcguu

SEQ ID NO: 2322671 - RNA, 19 nt, Artificial Sequence
  Description of Artificial Sequence: Synthetic oligonucleotide
  Antisense strand to SEQ ID NO: 2322670
aacgcagaguuaaucgcca

SEQ ID NO: 2322672 - RNA, 19 nt, Artificial Sequence
  Description of Artificial Sequence: Synthetic oligonucleotide
  Sense strand starting at position 1014 of SEQ ID NO: 1885183
acauccucugagcaguaaa

SEQ ID NO: 2322673 - RNA, 19 nt, Artificial Sequence
  Description of Artificial Sequence: Synthetic oligonucleotide
  Antisense strand to SEQ ID NO: 2322672
uuuacugcucagaggaugu

SEQ ID NO: 2322674 - RNA, 19 nt, Artificial Sequence
  Description of Artificial Sequence: Synthetic oligonucleotide
  Sense strand starting at position 1046 of SEQ ID NO: 1885183
gcaagcucuguggaugaaa

SEQ ID NO: 2322675 - RNA, 19 nt, Artificial Sequence
  Description of Artificial Sequence: Synthetic oligonucleotide
  Antisense strand to SEQ ID NO: 2322674
uuucauccacagagcuugc

SEQ ID NO: 2322676 - RNA, 19 nt, Artificial Sequence
  Description of Artificial Sequence: Synthetic oligonucleotide
  Sense strand starting at position 1196 of SEQ ID NO: 1885183
gcauguaguuuggucauuu

SEQ ID NO: 2322677 - RNA, 19 nt, Artificial Sequence
  Description of Artificial Sequence: Synthetic oligonucleotide
  Antisense strand to SEQ ID NO: 2322676
aaaugaccaaacuacaugc

SEQ ID NO: 2322678 - RNA, 19 nt, Artificial Sequence
  Description of Artificial Sequence: Synthetic oligonucleotide
  Sense strand starting at position 1197 of SEQ ID NO: 1885183
cauguaguuuggucauuug

SEQ ID NO: 2322679 - RNA, 19 nt, Artificial Sequence
  Description of Artificial Sequence: Synthetic oligonucleotide
  Antisense strand to SEQ ID NO: 2322678
caaaugaccaaacuacaug

SEQ ID NO: 2322680 - RNA, 19 nt, Artificial Sequence
  Description of Artificial Sequence: Synthetic oligonucleotide
  Sense strand starting at position 1567 of SEQ ID NO: 1885183
ggauguuucccucaccauc

SEQ ID NO: 2322681 - RNA, 19 nt, Artificial Sequence
  Description of Artificial Sequence: Synthetic oligonucleotide
  Antisense strand to SEQ ID NO: 2322680
gauggugagggaaacaucc

SEQ ID NO: 2322682 - RNA, 19 nt, Artificial Sequence
  Description of Artificial Sequence: Synthetic oligonucleotide
  Sense strand starting at position 1581 of SEQ ID NO: 1885183
ccaucaguugauggaauca

SEQ ID NO: 2322683 - RNA, 19 nt, Artificial Sequence
  Description of Artificial Sequence: Synthetic oligonucleotide
  Antisense strand to SEQ ID NO: 2322682
ugauuccaucaacugaugg

SEQ ID NO: 2322684 - RNA, 19 nt, Artificial Sequence
  Description of Artificial Sequence: Synthetic oligonucleotide
  Sense strand starting at position 1631 of SEQ ID NO: 1885183
uugagaauguuucugaaca

SEQ ID NO: 2322685 - RNA, 19 nt, Artificial Sequence
  Description of Artificial Sequence: Synthetic oligonucleotide
  Antisense strand to SEQ ID NO: 2322684
uguucagaaacauucucaa

SEQ ID NO: 2322686 - RNA, 19 nt, Artificial Sequence
  Description of Artificial Sequence: Synthetic oligonucleotide
  Sense strand starting at position 2029 of SEQ ID NO: 1885183
gcagaaaggcuuggguuaa

SEQ ID NO: 2322687 - RNA, 19 nt, Artificial Sequence
  Description of Artificial Sequence: Synthetic oligonucleotide
  Antisense strand to SEQ ID NO: 2322686
uuaacccaagccuuucugc

SEQ ID NO: 2322688 - RNA, 19 nt, Artificial Sequence
  Description of Artificial Sequence: Synthetic oligonucleotide
  Sense strand starting at position 2066 of SEQ ID NO: 1885183
agugucucuccugauuaac

SEQ ID NO: 2322689 - RNA, 19 nt, Artificial Sequence
  Description of Artificial Sequence: Synthetic oligonucleotide
  Antisense strand to SEQ ID NO: 2322688
guuaaucaggagagacacu

SEQ ID NO: 2322690 - RNA, 19 nt, Artificial Sequence
  Description of Artificial Sequence: Synthetic oligonucleotide
  Sense strand starting at position 2076 of SEQ ID NO: 1885183
cugauuaacccuuggauua

SEQ ID NO: 2322691 - RNA, 19 nt, Artificial Sequence
  Description of Artificial Sequence: Synthetic oligonucleotide
  Antisense strand to SEQ ID NO: 2322690
uaauccaaggguuaaucag

SEQ ID NO: 2322692 - RNA, 19 nt, Artificial Sequence
  Description of Artificial Sequence: Synthetic oligonucleotide
  Sense strand starting at position 2077 of SEQ ID NO: 1885183
ugauuaacccuuggauuac

SEQ ID NO: 2322693 - RNA, 19 nt, Artificial Sequence
  Description of Artificial Sequence: Synthetic oligonucleotide
  Antisense strand to SEQ ID NO: 2322692
guaauccaaggguuaauca

SEQ ID NO: 2322694 - RNA, 19 nt, Artificial Sequence
  Description of Artificial Sequence: Synthetic oligonucleotide
  Sense strand starting at position 2174 of SEQ ID NO: 1885183
ccuagaugcacugauggua

SEQ ID NO: 2322695 - RNA, 19 nt, Artificial Sequence
  Description of Artificial Sequence: Synthetic oligonucleotide
  Antisense strand to SEQ ID NO: 2322694
uaccaucagugcaucuagg

SEQ ID NO: 2322696 - RNA, 19 nt, Artificial Sequence
  Description of Artificial Sequence: Synthetic oligonucleotide
  Sense strand starting at position 2311 of SEQ ID NO: 1885183
auaucuaaguuaucuagag

SEQ ID NO: 2322697 - RNA, 19 nt, Artificial Sequence
  Description of Artificial Sequence: Synthetic oligonucleotide
  Antisense strand to SEQ ID NO: 2322696
cucuagauaacuuagauau

SEQ ID NO: 2322698 - RNA, 19 nt, Artificial Sequence
  Description of Artificial Sequence: Synthetic oligonucleotide
  Sense strand starting at position 2315 of SEQ ID NO: 1885183
cuaaguuaucuagaguuau

SEQ ID NO: 2322699 - RNA, 19 nt, Artificial Sequence
  Description of Artificial Sequence: Synthetic oligonucleotide
  Antisense strand to SEQ ID NO: 2322698
auaacucuagauaacuuag

SEQ ID NO: 2322700 - RNA, 19 nt, Artificial Sequence
  Description of Artificial Sequence: Synthetic oligonucleotide
  Sense strand starting at position 2564 of SEQ ID NO: 1885183
uuguguuagauugagucau

SEQ ID NO: 2322701 - RNA, 19 nt, Artificial Sequence
  Description of Artificial Sequence: Synthetic oligonucleotide
  Antisense strand to SEQ ID NO: 2322700
augacucaaucuaacacaa

SEQ ID NO: 2322702 - RNA, 19 nt, Artificial Sequence
  Description of Artificial Sequence: Synthetic oligonucleotide
  Sense strand starting at position 2679 of SEQ ID NO: 1885183
uaaucacuguacgugauaa

SEQ ID NO: 2322703 - RNA, 19 nt, Artificial Sequence
  Description of Artificial Sequence: Synthetic oligonucleotide
  Antisense strand to SEQ ID NO: 2322702
uuaucacguacagugauua

SEQ ID NO: 2322704 - RNA, 19 nt, Artificial Sequence
  Description of Artificial Sequence: Synthetic oligonucleotide
  Sense strand starting at position 2681 of SEQ ID NO: 1885183
aucacuguacgugauaaga

SEQ ID NO: 2322705 - RNA, 19 nt, Artificial Sequence
  Description of Artificial Sequence: Synthetic oligonucleotide
  Antisense strand to SEQ ID NO: 2322704
ucuuaucacguacagugau

SEQ ID NO: 2322706 - RNA, 19 nt, Artificial Sequence
  Description of Artificial Sequence: Synthetic oligonucleotide
  Sense strand starting at position 2807 of SEQ ID NO: 1885183
gcugguucuagggauacag

SEQ ID NO: 2322707 - RNA, 19 nt, Artificial Sequence
  Description of Artificial Sequence: Synthetic oligonucleotide
  Antisense strand to SEQ ID NO: 2322706
cuguaucccuagaaccagc

SEQ ID NO: 2322708 - RNA, 19 nt, Artificial Sequence
  Description of Artificial Sequence: Synthetic oligonucleotide
  Sense strand starting at position 2931 of SEQ ID NO: 1885183
gagcgagaguuucuaggau

SEQ ID NO: 2322709 - RNA, 19 nt, Artificial Sequence
  Description of Artificial Sequence: Synthetic oligonucleotide
  Antisense strand to SEQ ID NO: 2322708
auccuagaaacucucgcuc

SEQ ID NO: 2322710 - RNA, 19 nt, Artificial Sequence
  Description of Artificial Sequence: Synthetic oligonucleotide
  Sense strand starting at position 3007 of SEQ ID NO: 1885183
guggacugugccuaaguaa

SEQ ID NO: 2322711 - RNA, 19 nt, Artificial Sequence
  Description of Artificial Sequence: Synthetic oligonucleotide
  Antisense strand to SEQ ID NO: 2322710
uuacuuaggcacaguccac

SEQ ID NO: 2322712 - RNA, 19 nt, Artificial Sequence
  Description of Artificial Sequence: Synthetic oligonucleotide
  Sense strand starting at position 3010 of SEQ ID NO: 1885183
gacugugccuaaguaauaa

SEQ ID NO: 2322713 - RNA, 19 nt, Artificial Sequence
  Description of Artificial Sequence: Synthetic oligonucleotide
  Antisense strand to SEQ ID NO: 2322712
uuauuacuuaggcacaguc

SEQ ID NO: 2322714 - RNA, 19 nt, Artificial Sequence
  Description of Artificial Sequence: Synthetic oligonucleotide
  Sense strand starting at position 3041 of SEQ ID NO: 1885183
guagaaacucaguguacau

SEQ ID NO: 2322715 - RNA, 19 nt, Artificial Sequence
  Description of Artificial Sequence: Synthetic oligonucleotide
  Antisense strand to SEQ ID NO: 2322714
auguacacugaguuucuac

SEQ ID NO: 2322716 - RNA, 19 nt, Artificial Sequence
  Description of Artificial Sequence: Synthetic oligonucleotide
  Sense strand starting at position 3075 of SEQ ID NO: 1885183
uggauaugauagccuggaa

SEQ ID NO: 2322717 - RNA, 19 nt, Artificial Sequence
  Description of Artificial Sequence: Synthetic oligonucleotide
  Antisense strand to SEQ ID NO: 2322716
uuccaggcuaucauaucca

SEQ ID NO: 2322718 - RNA, 19 nt, Artificial Sequence
  Description of Artificial Sequence: Synthetic oligonucleotide
  Sense strand starting at position 3078 of SEQ ID NO: 1885183
auaugauagccuggaagug

SEQ ID NO: 2322719 - RNA, 19 nt, Artificial Sequence
  Description of Artificial Sequence: Synthetic oligonucleotide
  Antisense strand to SEQ ID NO: 2322718
cacuuccaggcuaucauau

SEQ ID NO: 2322720 - RNA, 19 nt, Artificial Sequence
  Description of Artificial Sequence: Synthetic oligonucleotide
  Sense strand starting at position 3141 of SEQ ID NO: 1885183
uuaagaaagugcuuagaau

SEQ ID NO: 2322721 - RNA, 19 nt, Artificial Sequence
  Description of Artificial Sequence: Synthetic oligonucleotide
  Antisense strand to SEQ ID NO: 2322720
auucuaagcacuuucuuaa

SEQ ID NO: 2322722 - RNA, 19 nt, Artificial Sequence
  Description of Artificial Sequence: Synthetic oligonucleotide
  Sense strand starting at position 3677 of SEQ ID NO: 1885183
uuguguaaugaucaucacu

SEQ ID NO: 2322723 - RNA, 19 nt, Artificial Sequence
  Description of Artificial Sequence: Synthetic oligonucleotide
  Antisense strand to SEQ ID NO: 2322722
agugaugaucauuacacaa

SEQ ID NO: 2322724 - RNA, 19 nt, Artificial Sequence
  Description of Artificial Sequence: Synthetic oligonucleotide
  Sense strand starting at position 3679 of SEQ ID NO: 1885183
guguaaugaucaucacuau

SEQ ID NO: 2322725 - RNA, 19 nt, Artificial Sequence
  Description of Artificial Sequence: Synthetic oligonucleotide
  Antisense strand to SEQ ID NO: 2322724
auagugaugaucauuacac

SEQ ID NO: 2322726 - RNA, 19 nt, Artificial Sequence
  Description of Artificial Sequence: Synthetic oligonucleotide
  Sense strand starting at position 3813 of SEQ ID NO: 1885183
agauuugucuguucgggac

SEQ ID NO: 2322727 - RNA, 19 nt, Artificial Sequence
  Description of Artificial Sequence: Synthetic oligonucleotide
  Antisense strand to SEQ ID NO: 2322726
gucccgaacagacaaaucu

SEQ ID NO: 2322728 - RNA, 19 nt, Artificial Sequence
  Description of Artificial Sequence: Synthetic oligonucleotide
  Sense strand starting at position 3826 of SEQ ID NO: 1885183
cgggacauuuccuauaaau

SEQ ID NO: 2322729 - RNA, 19 nt, Artificial Sequence
  Description of Artificial Sequence: Synthetic oligonucleotide
  Antisense strand to SEQ ID NO: 2322728
auuuauaggaaaugucccg

SEQ ID NO: 2322730 - RNA, 19 nt, Artificial Sequence
  Description of Artificial Sequence: Synthetic oligonucleotide
  Sense strand starting at position 108 of SEQ ID NO: 1885184
gaagcaguuucuuuagacu

SEQ ID NO: 2322731 - RNA, 19 nt, Artificial Sequence
  Description of Artificial Sequence: Synthetic oligonucleotide
  Antisense strand to SEQ ID NO: 2322730
agucuaaagaaacugcuuc

SEQ ID NO: 2322732 - RNA, 19 nt, Artificial Sequence
  Description of Artificial Sequence: Synthetic oligonucleotide
  Sense strand starting at position 122 of SEQ ID NO: 1885184
agacuauagccuugaaaug

SEQ ID NO: 2322733 - RNA, 19 nt, Artificial Sequence
  Description of Artificial Sequence: Synthetic oligonucleotide
  Antisense strand to SEQ ID NO: 2322732
cauuucaaggcuauagucu

SEQ ID NO: 2322734 - RNA, 19 nt, Artificial Sequence
  Description of Artificial Sequence: Synthetic oligonucleotide
  Sense strand starting at position 123 of SEQ ID NO: 1885184
gacuauagccuugaaaugu

SEQ ID NO: 2322735 - RNA, 19 nt, Artificial Sequence
  Description of Artificial Sequence: Synthetic oligonucleotide
  Antisense strand to SEQ ID NO: 2322734
acauuucaaggcuauaguc

SEQ ID NO: 2322736 - RNA, 19 nt, Artificial Sequence
  Description of Artificial Sequence: Synthetic oligonucleotide
  Sense strand starting at position 159 of SEQ ID NO: 1885184
agaaguaaucaguaauguu

SEQ ID NO: 2322737 - RNA, 19 nt, Artificial Sequence
  Description of Artificial Sequence: Synthetic oligonucleotide
  Antisense strand to SEQ ID NO: 2322736
aacauuacugauuacuucu

SEQ ID NO: 2322738 - RNA, 19 nt, Artificial Sequence
  Description of Artificial Sequence: Synthetic oligonucleotide
  Sense strand starting at position 166 of SEQ ID NO: 1885184
aucaguaauguugaacgaa

SEQ ID NO: 2322739 - RNA, 19 nt, Artificial Sequence
  Description of Artificial Sequence: Synthetic oligonucleotide
  Antisense strand to SEQ ID NO: 2322738
uucguucaacauuacugau

SEQ ID NO: 2322740 - RNA, 19 nt, Artificial Sequence
  Description of Artificial Sequence: Synthetic oligonucleotide
  Sense strand starting at position 169 of SEQ ID NO: 1885184
aguaauguugaacgaauga

SEQ ID NO: 2322741 - RNA, 19 nt, Artificial Sequence
  Description of Artificial Sequence: Synthetic oligonucleotide
  Antisense strand to SEQ ID NO: 2322740
ucauucguucaacauuacu

SEQ ID NO: 2322742 - RNA, 19 nt, Artificial Sequence
  Description of Artificial Sequence: Synthetic oligonucleotide
  Sense strand starting at position 219 of SEQ ID NO: 1885184
accaguuacuaguuauaug

SEQ ID NO: 2322743 - RNA, 19 nt, Artificial Sequence
  Description of Artificial Sequence: Synthetic oligonucleotide
  Antisense strand to SEQ ID NO: 2322742
cauauaacuaguaacuggu

SEQ ID NO: 2322744 - RNA, 19 nt, Artificial Sequence
  Description of Artificial Sequence: Synthetic oligonucleotide
  Sense strand starting at position 308 of SEQ ID NO: 1885184
gugguucacgccuuguaau

SEQ ID NO: 2322745 - RNA, 19 nt, Artificial Sequence
  Description of Artificial Sequence: Synthetic oligonucleotide
  Antisense strand to SEQ ID NO: 2322744
auuacaaggcgugaaccac

SEQ ID NO: 2322746 - RNA, 19 nt, Artificial Sequence
  Description of Artificial Sequence: Synthetic oligonucleotide
  Sense strand starting at position 940 of SEQ ID NO: 1885184
ggaaucaaauuguuaucga

SEQ ID NO: 2322747 - RNA, 19 nt, Artificial Sequence
  Description of Artificial Sequence: Synthetic oligonucleotide
  Antisense strand to SEQ ID NO: 2322746
ucgauaacaauuugauucc

SEQ ID NO: 2322748 - RNA, 19 nt, Artificial Sequence
  Description of Artificial Sequence: Synthetic oligonucleotide
  Sense strand starting at position 943 of SEQ ID NO: 1885184
aucaaauuguuaucgacag

SEQ ID NO: 2322749 - RNA, 19 nt, Artificial Sequence
  Description of Artificial Sequence: Synthetic oligonucleotide
  Antisense strand to SEQ ID NO: 2322748
cugucgauaacaauuugau

SEQ ID NO: 2322750 - RNA, 19 nt, Artificial Sequence
  Description of Artificial Sequence: Synthetic oligonucleotide
  Sense strand starting at position 947 of SEQ ID NO: 1885184
aauuguuaucgacagcuua

SEQ ID NO: 2322751 - RNA, 19 nt, Artificial Sequence
  Description of Artificial Sequence: Synthetic oligonucleotide
  Antisense strand to SEQ ID NO: 2322750
uaagcugucgauaacaauu

SEQ ID NO: 2322752 - RNA, 19 nt, Artificial Sequence
  Description of Artificial Sequence: Synthetic oligonucleotide
  Sense strand starting at position 1008 of SEQ ID NO: 1885184
ugacauauguucuucuuua

SEQ ID NO: 2322753 - RNA, 19 nt, Artificial Sequence
  Description of Artificial Sequence: Synthetic oligonucleotide
  Antisense strand to SEQ ID NO: 2322752
uaaagaagaacauauguca

SEQ ID NO: 2322754 - RNA, 19 nt, Artificial Sequence
  Description of Artificial Sequence: Synthetic oligonucleotide
  Sense strand starting at position 1070 of SEQ ID NO: 1885184
agaagagauggcuggguau

SEQ ID NO: 2322755 - RNA, 19 nt, Artificial Sequence
  Description of Artificial Sequence: Synthetic oligonucleotide
  Antisense strand to SEQ ID NO: 2322754
auacccagccaucucuucu

SEQ ID NO: 2322756 - RNA, 19 nt, Artificial Sequence
  Description of Artificial Sequence: Synthetic oligonucleotide
  Sense strand starting at position 1072 of SEQ ID NO: 1885184
aagagauggcuggguaugu

SEQ ID NO: 2322757 - RNA, 19 nt, Artificial Sequence
  Description of Artificial Sequence: Synthetic oligonucleotide
  Antisense strand to SEQ ID NO: 2322756
acauacccagccaucucuu

SEQ ID NO: 2322758 - RNA, 19 nt, Artificial Sequence
  Description of Artificial Sequence: Synthetic oligonucleotide
  Sense strand starting at position 1118 of SEQ ID NO: 1885184
ucaggagguacuugugaga

SEQ ID NO: 2322759 - RNA, 19 nt, Artificial Sequence
  Description of Artificial Sequence: Synthetic oligonucleotide
  Antisense strand to SEQ ID NO: 2322758
ucucacaaguaccuccuga

SEQ ID NO: 2322760 - RNA, 19 nt, Artificial Sequence
  Description of Artificial Sequence: Synthetic oligonucleotide
  Sense strand starting at position 1137 of SEQ ID NO: 1885184
gcaugcugucaguuuaucu

SEQ ID NO: 2322761 - RNA, 19 nt, Artificial Sequence
  Description of Artificial Sequence: Synthetic oligonucleotide
  Antisense strand to SEQ ID NO: 2322760
agauaaacugacagcaugc

SEQ ID NO: 2322762 - RNA, 19 nt, Artificial Sequence
  Description of Artificial Sequence: Synthetic oligonucleotide
  Sense strand starting at position 1144 of SEQ ID NO: 1885184
gucaguuuaucuucuaaag

SEQ ID NO: 2322763 - RNA, 19 nt, Artificial Sequence
  Description of Artificial Sequence: Synthetic oligonucleotide
  Antisense strand to SEQ ID NO: 2322762
cuuuagaagauaaacugac

SEQ ID NO: 2322764 - RNA, 19 nt, Artificial Sequence
  Description of Artificial Sequence: Synthetic oligonucleotide
  Sense strand starting at position 1246 of SEQ ID NO: 1885184
uaguucuuucgcgcugcaa

SEQ ID NO: 2322765 - RNA, 19 nt, Artificial Sequence
  Description of Artificial Sequence: Synthetic oligonucleotide
  Antisense strand to SEQ ID NO: 2322764
uugcagcgcgaaagaacua

SEQ ID NO: 2322766 - RNA, 19 nt, Artificial Sequence
  Description of Artificial Sequence: Synthetic oligonucleotide
  Sense strand starting at position 1247 of SEQ ID NO: 1885184
aguucuuucgcgcugcaaa

SEQ ID NO: 2322767 - RNA, 19 nt, Artificial Sequence
  Description of Artificial Sequence: Synthetic oligonucleotide
  Antisense strand to SEQ ID NO: 2322766
uuugcagcgcgaaagaacu

SEQ ID NO: 2322768 - RNA, 19 nt, Artificial Sequence
  Description of Artificial Sequence: Synthetic oligonucleotide
  Sense strand starting at position 1249 of SEQ ID NO: 1885184
uucuuucgcgcugcaaauu

SEQ ID NO: 2322769 - RNA, 19 nt, Artificial Sequence
  Description of Artificial Sequence: Synthetic oligonucleotide
  Antisense strand to SEQ ID NO: 2322768
aauuugcagcgcgaaagaa

SEQ ID NO: 2322770 - RNA, 19 nt, Artificial Sequence
  Description of Artificial Sequence: Synthetic oligonucleotide
  Sense strand starting at position 1444 of SEQ ID NO: 1885184
ggguguuuggaggacacuu

SEQ ID NO: 2322771 - RNA, 19 nt, Artificial Sequence
  Description of Artificial Sequence: Synthetic oligonucleotide
  Antisense strand to SEQ ID NO: 2322770
aaguguccuccaaacaccc

SEQ ID NO: 2322772 - RNA, 19 nt, Artificial Sequence
  Description of Artificial Sequence: Synthetic oligonucleotide
  Sense strand starting at position 2316 of SEQ ID NO: 1885184
ucugguaggcauuggagaa

SEQ ID NO: 2322773 - RNA, 19 nt, Artificial Sequence
  Description of Artificial Sequence: Synthetic oligonucleotide
  Antisense strand to SEQ ID NO: 2322772
uucuccaaugccuaccaga

SEQ ID NO: 2322774 - RNA, 19 nt, Artificial Sequence
  Description of Artificial Sequence: Synthetic oligonucleotide
  Sense strand starting at position 2317 of SEQ ID NO: 1885184
cugguaggcauuggagaau

SEQ ID NO: 2322775 - RNA, 19 nt, Artificial Sequence
  Description of Artificial Sequence: Synthetic oligonucleotide
  Antisense strand to SEQ ID NO: 2322774
auucuccaaugccuaccag

SEQ ID NO: 2322776 - RNA, 19 nt, Artificial Sequence
  Description of Artificial Sequence: Synthetic oligonucleotide
  Sense strand starting at position 2343 of SEQ ID NO: 1885184
gugugucugaaacagacaa

SEQ ID NO: 2322777 - RNA, 19 nt, Artificial Sequence
  Description of Artificial Sequence: Synthetic oligonucleotide
  Antisense strand to SEQ ID NO: 2322776
uugucuguuucagacacac

SEQ ID NO: 2322778 - RNA, 19 nt, Artificial Sequence
  Description of Artificial Sequence: Synthetic oligonucleotide
  Sense strand starting at position 2372 of SEQ ID NO: 1885184
agauguuauuagguuguga

SEQ ID NO: 2322779 - RNA, 19 nt, Artificial Sequence
  Description of Artificial Sequence: Synthetic oligonucleotide
  Antisense strand to SEQ ID NO: 2322778
ucacaaccuaauaacaucu

SEQ ID NO: 2322780 - RNA, 19 nt, Artificial Sequence
  Description of Artificial Sequence: Synthetic oligonucleotide
  Sense strand starting at position 2407 of SEQ ID NO: 1885184
gaaguaguacagugaaaga

SEQ ID NO: 2322781 - RNA, 19 nt, Artificial Sequence
  Description of Artificial Sequence: Synthetic oligonucleotide
  Antisense strand to SEQ ID NO: 2322780
ucuuucacuguacuacuuc

SEQ ID NO: 2322782 - RNA, 19 nt, Artificial Sequence
  Description of Artificial Sequence: Synthetic oligonucleotide
  Sense strand starting at position 2529 of SEQ ID NO: 1885184
ggcagaagaaaguguguaa

SEQ ID NO: 2322783 - RNA, 19 nt, Artificial Sequence
  Description of Artificial Sequence: Synthetic oligonucleotide
  Antisense strand to SEQ ID NO: 2322782
uuacacacuuucuucugcc

SEQ ID NO: 2322784 - RNA, 19 nt, Artificial Sequence
  Description of Artificial Sequence: Synthetic oligonucleotide
  Sense strand starting at position 2533 of SEQ ID NO: 1885184
gaagaaaguguguaagugu

SEQ ID NO: 2322785 - RNA, 19 nt, Artificial Sequence
  Description of Artificial Sequence: Synthetic oligonucleotide
  Antisense strand to SEQ ID NO: 2322784
acacuuacacacuuucuuc

SEQ ID NO: 2322786 - RNA, 19 nt, Artificial Sequence
  Description of Artificial Sequence: Synthetic oligonucleotide
  Sense strand starting at position 2570 of SEQ ID NO: 1885184
ugaacuuggcccugacaca

SEQ ID NO: 2322787 - RNA, 19 nt, Artificial Sequence
  Description of Artificial Sequence: Synthetic oligonucleotide
  Antisense strand to SEQ ID NO: 2322786
ugugucagggccaaguuca

SEQ ID NO: 2322788 - RNA, 19 nt, Artificial Sequence
  Description of Artificial Sequence: Synthetic oligonucleotide
  Sense strand starting at position 2606 of SEQ ID NO: 1885184
guagcuguaaaguaaugga

SEQ ID NO: 2322789 - RNA, 19 nt, Artificial Sequence
  Description of Artificial Sequence: Synthetic oligonucleotide
  Antisense strand to SEQ ID NO: 2322788
uccauuacuuuacagcuac

SEQ ID NO: 2322790 - RNA, 19 nt, Artificial Sequence
  Description of Artificial Sequence: Synthetic oligonucleotide
  Sense strand starting at position 2745 of SEQ ID NO: 1885184
ugaauuauuugucagaaac

SEQ ID NO: 2322791 - RNA, 19 nt, Artificial Sequence
  Description of Artificial Sequence: Synthetic oligonucleotide
  Antisense strand to SEQ ID NO: 2322790
guuucugacaaauaauuca

SEQ ID NO: 2322792 - RNA, 19 nt, Artificial Sequence
  Description of Artificial Sequence: Synthetic oligonucleotide
  Sense strand starting at position 2956 of SEQ ID NO: 1885184
cagcaauaucuagguauga

SEQ ID NO: 2322793 - RNA, 19 nt, Artificial Sequence
  Description of Artificial Sequence: Synthetic oligonucleotide
  Antisense strand to SEQ ID NO: 2322792
ucauaccuagauauugcug

SEQ ID NO: 2322794 - RNA, 19 nt, Artificial Sequence
  Description of Artificial Sequence: Synthetic oligonucleotide
  Sense strand starting at position 2957 of SEQ ID NO: 1885184
agcaauaucuagguaugaa

SEQ ID NO: 2322795 - RNA, 19 nt, Artificial Sequence
  Description of Artificial Sequence: Synthetic oligonucleotide
  Antisense strand to SEQ ID NO: 2322794
uucauaccuagauauugcu

SEQ ID NO: 2322796 - RNA, 19 nt, Artificial Sequence
  Description of Artificial Sequence: Synthetic oligonucleotide
  Sense strand starting at position 3161 of SEQ ID NO: 1885184
uuaccuaagguguauauau

SEQ ID NO: 2322797 - RNA, 19 nt, Artificial Sequence
  Description of Artificial Sequence: Synthetic oligonucleotide
  Antisense strand to SEQ ID NO: 2322796
auauauacaccuuagguaa

SEQ ID NO: 2322798 - RNA, 19 nt, Artificial Sequence
  Description of Artificial Sequence: Synthetic oligonucleotide
  Sense strand starting at position 3168 of SEQ ID NO: 1885184
agguguauauauccaaaug

SEQ ID NO: 2322799 - RNA, 19 nt, Artificial Sequence
  Description of Artificial Sequence: Synthetic oligonucleotide
  Antisense strand to SEQ ID NO: 2322798
cauuuggauauauacaccu

SEQ ID NO: 2322800 - RNA, 19 nt, Artificial Sequence
  Description of Artificial Sequence: Synthetic oligonucleotide
  Sense strand starting at position 3301 of SEQ ID NO: 1885184
guaugaccucuuuauguga

SEQ ID NO: 2322801 - RNA, 19 nt, Artificial Sequence
  Description of Artificial Sequence: Synthetic oligonucleotide
  Antisense strand to SEQ ID NO: 2322800
ucacauaaagaggucauac

SEQ ID NO: 2322802 - RNA, 19 nt, Artificial Sequence
  Description of Artificial Sequence: Synthetic oligonucleotide
  Sense strand starting at position 3304 of SEQ ID NO: 1885184
ugaccucuuuaugugaaau

SEQ ID NO: 2322803 - RNA, 19 nt, Artificial Sequence
  Description of Artificial Sequence: Synthetic oligonucleotide
  Antisense strand to SEQ ID NO: 2322802
auuucacauaaagagguca

SEQ ID NO: 2322804 - RNA, 19 nt, Artificial Sequence
  Description of Artificial Sequence: Synthetic oligonucleotide
  Sense strand starting at position 3360 of SEQ ID NO: 1885184
ugagugguucugggaagag

SEQ ID NO: 2322805 - RNA, 19 nt, Artificial Sequence
  Description of Artificial Sequence: Synthetic oligonucleotide
  Antisense strand to SEQ ID NO: 2322804
cucuucccagaaccacuca

SEQ ID NO: 2322806 - RNA, 19 nt, Artificial Sequence
  Description of Artificial Sequence: Synthetic oligonucleotide
  Sense strand starting at position 3630 of SEQ ID NO: 1885184
ucucgaguucaggaguuaa

SEQ ID NO: 2322807 - RNA, 19 nt, Artificial Sequence
  Description of Artificial Sequence: Synthetic oligonucleotide
  Antisense strand to SEQ ID NO: 2322806
uuaacuccugaacucgaga

SEQ ID NO: 2322808 - RNA, 19 nt, Artificial Sequence
  Description of Artificial Sequence: Synthetic oligonucleotide
  Sense strand starting at position 3838 of SEQ ID NO: 1885184
ggagcaaggcccuaucuua

SEQ ID NO: 2322809 - RNA, 19 nt, Artificial Sequence
  Description of Artificial Sequence: Synthetic oligonucleotide
  Antisense strand to SEQ ID NO: 2322808
uaagauagggccuugcucc

SEQ ID NO: 2322810 - RNA, 19 nt, Artificial Sequence
  Description of Artificial Sequence: Synthetic oligonucleotide
  Sense strand starting at position 751 of SEQ ID NO: 1885185
gacccaaguucuguagacu

SEQ ID NO: 2322811 - RNA, 19 nt, Artificial Sequence
  Description of Artificial Sequence: Synthetic oligonucleotide
  Antisense strand to SEQ ID NO: 2322810
agucuacagaacuuggguc

SEQ ID NO: 2322812 - RNA, 19 nt, Artificial Sequence
  Description of Artificial Sequence: Synthetic oligonucleotide
  Sense strand starting at position 752 of SEQ ID NO: 1885185
acccaaguucuguagacuu

SEQ ID NO: 2322813 - RNA, 19 nt, Artificial Sequence
  Description of Artificial Sequence: Synthetic oligonucleotide
  Antisense strand to SEQ ID NO: 2322812
aagucuacagaacuugggu

SEQ ID NO: 2322814 - RNA, 19 nt, Artificial Sequence
  Description of Artificial Sequence: Synthetic oligonucleotide
  Sense strand starting at position 851 of SEQ ID NO: 1885185
acacgugugcaugcucuua

SEQ ID NO: 2322815 - RNA, 19 nt, Artificial Sequence
  Description of Artificial Sequence: Synthetic oligonucleotide
  Antisense strand to SEQ ID NO: 2322814
uaagagcaugcacacgugu

SEQ ID NO: 2322816 - RNA, 19 nt, Artificial Sequence
  Description of Artificial Sequence: Synthetic oligonucleotide
  Sense strand starting at position 897 of SEQ ID NO: 1885185
cgcgacuucgaauacagaa

SEQ ID NO: 2322817 - RNA, 19 nt, Artificial Sequence
  Description of Artificial Sequence: Synthetic oligonucleotide
  Antisense strand to SEQ ID NO: 2322816
uucuguauucgaagucgcg

SEQ ID NO: 2322818 - RNA, 19 nt, Artificial Sequence
  Description of Artificial Sequence: Synthetic oligonucleotide
  Sense strand starting at position 979 of SEQ ID NO: 1885185
cgggaagggucucugggau

SEQ ID NO: 2322819 - RNA, 19 nt, Artificial Sequence
  Description of Artificial Sequence: Synthetic oligonucleotide
  Antisense strand to SEQ ID NO: 2322818
aucccagagacccuucccg

SEQ ID NO: 2322820 - RNA, 19 nt, Artificial Sequence
  Description of Artificial Sequence: Synthetic oligonucleotide
  Sense strand starting at position 1287 of SEQ ID NO: 1885185
auucguuguggccaggaga

SEQ ID NO: 2322821 - RNA, 19 nt, Artificial Sequence
  Description of Artificial Sequence: Synthetic oligonucleotide
  Antisense strand to SEQ ID NO: 2322820
ucuccuggccacaacgaau

SEQ ID NO: 2322822 - RNA, 19 nt, Artificial Sequence
  Description of Artificial Sequence: Synthetic oligonucleotide
  Sense strand starting at position 1288 of SEQ ID NO: 1885185
uucguuguggccaggagau

SEQ ID NO: 2322823 - RNA, 19 nt, Artificial Sequence
  Description of Artificial Sequence: Synthetic oligonucleotide
  Antisense strand to SEQ ID NO: 2322822
aucuccuggccacaacgaa

SEQ ID NO: 2322824 - RNA, 19 nt, Artificial Sequence
  Description of Artificial Sequence: Synthetic oligonucleotide
  Sense strand starting at position 1290 of SEQ ID NO: 1885185
cguuguggccaggagauaa

SEQ ID NO: 2322825 - RNA, 19 nt, Artificial Sequence
  Description of Artificial Sequence: Synthetic oligonucleotide
  Antisense strand to SEQ ID NO: 2322824
uuaucuccuggccacaacg

SEQ ID NO: 2322826 - RNA, 19 nt, Artificial Sequence
  Description of Artificial Sequence: Synthetic oligonucleotide
  Sense strand starting at position 1304 of SEQ ID NO: 1885185
gauaaaggcuaucuuaguc

SEQ ID NO: 2322827 - RNA, 19 nt, Artificial Sequence
  Description of Artificial Sequence: Synthetic oligonucleotide
  Antisense strand to SEQ ID NO: 2322826
gacuaagauagccuuuauc

SEQ ID NO: 2322828 - RNA, 19 nt, Artificial Sequence
  Description of Artificial Sequence: Synthetic oligonucleotide
  Sense strand starting at position 1312 of SEQ ID NO: 1885185
cuaucuuagucuccagaag

SEQ ID NO: 2322829 - RNA, 19 nt, Artificial Sequence
  Description of Artificial Sequence: Synthetic oligonucleotide
  Antisense strand to SEQ ID NO: 2322828
cuucuggagacuaagauag

SEQ ID NO: 2322830 - RNA, 19 nt, Artificial Sequence
  Description of Artificial Sequence: Synthetic oligonucleotide
  Sense strand starting at position 1404 of SEQ ID NO: 1885185
cuuggaggccaucagaguu

SEQ ID NO: 2322831 - RNA, 19 nt, Artificial Sequence
  Description of Artificial Sequence: Synthetic oligonucleotide
  Antisense strand to SEQ ID NO: 2322830
aacucugauggccuccaag

SEQ ID NO: 2322832 - RNA, 19 nt, Artificial Sequence
  Description of Artificial Sequence: Synthetic oligonucleotide
  Sense strand starting at position 2027 of SEQ ID NO: 1885185
auauuccuuccucauggua

SEQ ID NO: 2322833 - RNA, 19 nt, Artificial Sequence
  Description of Artificial Sequence: Synthetic oligonucleotide
  Antisense strand to SEQ ID NO: 2322832
uaccaugaggaaggaauau

SEQ ID NO: 2322834 - RNA, 19 nt, Artificial Sequence
  Description of Artificial Sequence: Synthetic oligonucleotide
  Sense strand starting at position 2275 of SEQ ID NO: 1885185
ggccuuuguaaggagugua

SEQ ID NO: 2322835 - RNA, 19 nt, Artificial Sequence
  Description of Artificial Sequence: Synthetic oligonucleotide
  Antisense strand to SEQ ID NO: 2322834
uacacuccuuacaaaggcc

SEQ ID NO: 2322836 - RNA, 19 nt, Artificial Sequence
  Description of Artificial Sequence: Synthetic oligonucleotide
  Sense strand starting at position 2308 of SEQ ID NO: 1885185
gccuguuauccgucuuacu

SEQ ID NO: 2322837 - RNA, 19 nt, Artificial Sequence
  Description of Artificial Sequence: Synthetic oligonucleotide
  Antisense strand to SEQ ID NO: 2322836
aguaagacggauaacaggc

SEQ ID NO: 2322838 - RNA, 19 nt, Artificial Sequence
  Description of Artificial Sequence: Synthetic oligonucleotide
  Sense strand starting at position 2355 of SEQ ID NO: 1885185
cugcuuuggguuuaccaga

SEQ ID NO: 2322839 - RNA, 19 nt, Artificial Sequence
  Description of Artificial Sequence: Synthetic oligonucleotide
  Antisense strand to SEQ ID NO: 2322838
ucugguaaacccaaagcag

SEQ ID NO: 2322840 - RNA, 19 nt, Artificial Sequence
  Description of Artificial Sequence: Synthetic oligonucleotide
  Sense strand starting at position 2360 of SEQ ID NO: 1885185
uuggguuuaccagaagucu

SEQ ID NO: 2322841 - RNA, 19 nt, Artificial Sequence
  Description of Artificial Sequence: Synthetic oligonucleotide
  Antisense strand to SEQ ID NO: 2322840
agacuucugguaaacccaa

SEQ ID NO: 2322842 - RNA, 19 nt, Artificial Sequence
  Description of Artificial Sequence: Synthetic oligonucleotide
  Sense strand starting at position 2505 of SEQ ID NO: 1885185
cuggaauaccuuuggguau

SEQ ID NO: 2322843 - RNA, 19 nt, Artificial Sequence
  Description of Artificial Sequence: Synthetic oligonucleotide
  Antisense strand to SEQ ID NO: 2322842
auacccaaagguauuccag

SEQ ID NO: 2322844 - RNA, 19 nt, Artificial Sequence
  Description of Artificial Sequence: Synthetic oligonucleotide
  Sense strand starting at position 2508 of SEQ ID NO: 1885185
gaauaccuuuggguauaaa

SEQ ID NO: 2322845 - RNA, 19 nt, Artificial Sequence
  Description of Artificial Sequence: Synthetic oligonucleotide
  Antisense strand to SEQ ID NO: 2322844
uuuauacccaaagguauuc

SEQ ID NO: 2322846 - RNA, 19 nt, Artificial Sequence
  Description of Artificial Sequence: Synthetic oligonucleotide
  Sense strand starting at position 2534 of SEQ ID NO: 1885185
gccuguggauacuuugaaa

SEQ ID NO: 2322847 - RNA, 19 nt, Artificial Sequence
  Description of Artificial Sequence: Synthetic oligonucleotide
  Antisense strand to SEQ ID NO: 2322846
uuucaaaguauccacaggc

SEQ ID NO: 2322848 - RNA, 19 nt, Artificial Sequence
  Description of Artificial Sequence: Synthetic oligonucleotide
  Sense strand starting at position 2634 of SEQ ID NO: 1885185
cucagcuuuggccagauua

SEQ ID NO: 2322849 - RNA, 19 nt, Artificial Sequence
  Description of Artificial Sequence: Synthetic oligonucleotide
  Antisense strand to SEQ ID NO: 2322848
uaaucuggccaaagcugag

SEQ ID NO: 2322850 - RNA, 19 nt, Artificial Sequence
  Description of Artificial Sequence: Synthetic oligonucleotide
  Sense strand starting at position 2645 of SEQ ID NO: 1885185
ccagauuagguuuagcuua

SEQ ID NO: 2322851 - RNA, 19 nt, Artificial Sequence
  Description of Artificial Sequence: Synthetic oligonucleotide
  Antisense strand to SEQ ID NO: 2322850
uaagcuaaaccuaaucugg

SEQ ID NO: 2322852 - RNA, 19 nt, Artificial Sequence
  Description of Artificial Sequence: Synthetic oligonucleotide
  Sense strand starting at position 2719 of SEQ ID NO: 1885185
agcagaggcuccucaacuu

SEQ ID NO: 2322853 - RNA, 19 nt, Artificial Sequence
  Description of Artificial Sequence: Synthetic oligonucleotide
  Antisense strand to SEQ ID NO: 2322852
aaguugaggagccucugcu

SEQ ID NO: 2322854 - RNA, 19 nt, Artificial Sequence
  Description of Artificial Sequence: Synthetic oligonucleotide
  Sense strand starting at position 2923 of SEQ ID NO: 1885185
ggaccaucuguauacuauu

SEQ ID NO: 2322855 - RNA, 19 nt, Artificial Sequence
  Description of Artificial Sequence: Synthetic oligonucleotide
  Antisense strand to SEQ ID NO: 2322854
aauaguauacagauggucc

SEQ ID NO: 2322856 - RNA, 19 nt, Artificial Sequence
  Description of Artificial Sequence: Synthetic oligonucleotide
  Sense strand starting at position 2975 of SEQ ID NO: 1885185
gggucuuccagugaguuua

SEQ ID NO: 2322857 - RNA, 19 nt, Artificial Sequence
  Description of Artificial Sequence: Synthetic oligonucleotide
  Antisense strand to SEQ ID NO: 2322856
uaaacucacuggaagaccc

SEQ ID NO: 2322858 - RNA, 19 nt, Artificial Sequence
  Description of Artificial Sequence: Synthetic oligonucleotide
  Sense strand starting at position 3132 of SEQ ID NO: 1885185
auuacauagugauugcuaa

SEQ ID NO: 2322859 - RNA, 19 nt, Artificial Sequence
  Description of Artificial Sequence: Synthetic oligonucleotide
  Antisense strand to SEQ ID NO: 2322858
uuagcaaucacuauguaau

SEQ ID NO: 2322860 - RNA, 19 nt, Artificial Sequence
  Description of Artificial Sequence: Synthetic oligonucleotide
  Sense strand starting at position 3133 of SEQ ID NO: 1885185
uuacauagugauugcuaau

SEQ ID NO: 2322861 - RNA, 19 nt, Artificial Sequence
  Description of Artificial Sequence: Synthetic oligonucleotide
  Antisense strand to SEQ ID NO: 2322860
auuagcaaucacuauguaa

SEQ ID NO: 2322862 - RNA, 19 nt, Artificial Sequence
  Description of Artificial Sequence: Synthetic oligonucleotide
  Sense strand starting at position 3238 of SEQ ID NO: 1885185
cuaugauaaguuggagcaa

SEQ ID NO: 2322863 - RNA, 19 nt, Artificial Sequence
  Description of Artificial Sequence: Synthetic oligonucleotide
  Antisense strand to SEQ ID NO: 2322862
uugcuccaacuuaucauag

SEQ ID NO: 2322864 - RNA, 19 nt, Artificial Sequence
  Description of Artificial Sequence: Synthetic oligonucleotide
  Sense strand starting at position 3263 of SEQ ID NO: 1885185
gcuaaauccugggcaggga

SEQ ID NO: 2322865 - RNA, 19 nt, Artificial Sequence
  Description of Artificial Sequence: Synthetic oligonucleotide
  Antisense strand to SEQ ID NO: 2322864
ucccugcccaggauuuagc

SEQ ID NO: 2322866 - RNA, 19 nt, Artificial Sequence
  Description of Artificial Sequence: Synthetic oligonucleotide
  Sense strand starting at position 3301 of SEQ ID NO: 1885185
uccagaagcuuaucaugga

SEQ ID NO: 2322867 - RNA, 19 nt, Artificial Sequence
  Description of Artificial Sequence: Synthetic oligonucleotide
  Antisense strand to SEQ ID NO: 2322866
uccaugauaagcuucugga

SEQ ID NO: 2322868 - RNA, 19 nt, Artificial Sequence
  Description of Artificial Sequence: Synthetic oligonucleotide
  Sense strand starting at position 3305 of SEQ ID NO: 1885185
gaagcuuaucauggaaggu

SEQ ID NO: 2322869 - RNA, 19 nt, Artificial Sequence
  Description of Artificial Sequence: Synthetic oligonucleotide
  Antisense strand to SEQ ID NO: 2322868
accuuccaugauaagcuuc

SEQ ID NO: 2322870 - RNA, 19 nt, Artificial Sequence
  Description of Artificial Sequence: Synthetic oligonucleotide
  Sense strand starting at position 3450 of SEQ ID NO: 1885185
uugugaagggcaugauuac

SEQ ID NO: 2322871 - RNA, 19 nt, Artificial Sequence
  Description of Artificial Sequence: Synthetic oligonucleotide
  Antisense strand to SEQ ID NO: 2322870
guaaucaugcccuucacaa

SEQ ID NO: 2322872 - RNA, 19 nt, Artificial Sequence
  Description of Artificial Sequence: Synthetic oligonucleotide
  Sense strand starting at position 3664 of SEQ ID NO: 1885185
ccagaaguaccuugacuuc

SEQ ID NO: 2322873 - RNA, 19 nt, Artificial Sequence
  Description of Artificial Sequence: Synthetic oligonucleotide
  Antisense strand to SEQ ID NO: 2322872
gaagucaagguacuucugg

SEQ ID NO: 2322874 - RNA, 19 nt, Artificial Sequence
  Description of Artificial Sequence: Synthetic oligonucleotide
  Sense strand starting at position 3667 of SEQ ID NO: 1885185
gaaguaccuugacuucuga

SEQ ID NO: 2322875 - RNA, 19 nt, Artificial Sequence
  Description of Artificial Sequence: Synthetic oligonucleotide
  Antisense strand to SEQ ID NO: 2322874
ucagaagucaagguacuuc

SEQ ID NO: 2322876 - RNA, 19 nt, Artificial Sequence
  Description of Artificial Sequence: Synthetic oligonucleotide
  Sense strand starting at position 3698 of SEQ ID NO: 1885185
cccauugucccugacaaug

SEQ ID NO: 2322877 - RNA, 19 nt, Artificial Sequence
  Description of Artificial Sequence: Synthetic oligonucleotide
  Antisense strand to SEQ ID NO: 2322876
cauugucagggacaauggg

SEQ ID NO: 2322878 - RNA, 19 nt, Artificial Sequence
  Description of Artificial Sequence: Synthetic oligonucleotide
  Sense strand starting at position 3703 of SEQ ID NO: 1885185
ugucccugacaauggauaa

SEQ ID NO: 2322879 - RNA, 19 nt, Artificial Sequence
  Description of Artificial Sequence: Synthetic oligonucleotide
  Antisense strand to SEQ ID NO: 2322878
uuauccauugucagggaca

SEQ ID NO: 2322880 - RNA, 19 nt, Artificial Sequence
  Description of Artificial Sequence: Synthetic oligonucleotide
  Sense strand starting at position 3714 of SEQ ID NO: 1885185
auggauaagugagcagaca

SEQ ID NO: 2322881 - RNA, 19 nt, Artificial Sequence
  Description of Artificial Sequence: Synthetic oligonucleotide
  Antisense strand to SEQ ID NO: 2322880
ugucugcucacuuauccau

SEQ ID NO: 2322882 - RNA, 19 nt, Artificial Sequence
  Description of Artificial Sequence: Synthetic oligonucleotide
  Sense strand starting at position 3729 of SEQ ID NO: 1885185
gacacaucuguguacugga

SEQ ID NO: 2322883 - RNA, 19 nt, Artificial Sequence
  Description of Artificial Sequence: Synthetic oligonucleotide
  Antisense strand to SEQ ID NO: 2322882
uccaguacacagauguguc

SEQ ID NO: 2322884 - RNA, 19 nt, Artificial Sequence
  Description of Artificial Sequence: Synthetic oligonucleotide
  Sense strand starting at position 3856 of SEQ ID NO: 1885185
uggugacaagcauauggua

SEQ ID NO: 2322885 - RNA, 19 nt, Artificial Sequence
  Description of Artificial Sequence: Synthetic oligonucleotide
  Antisense strand to SEQ ID NO: 2322884
uaccauaugcuugucacca

SEQ ID NO: 2322886 - RNA, 19 nt, Artificial Sequence
  Description of Artificial Sequence: Synthetic oligonucleotide
  Sense strand starting at position 3887 of SEQ ID NO: 1885185
cuggcaucucagcauaaua

SEQ ID NO: 2322887 - RNA, 19 nt, Artificial Sequence
  Description of Artificial Sequence: Synthetic oligonucleotide
  Antisense strand to SEQ ID NO: 2322886
uauuaugcugagaugccag

SEQ ID NO: 2322888 - RNA, 19 nt, Artificial Sequence
  Description of Artificial Sequence: Synthetic oligonucleotide
  Sense strand starting at position 3889 of SEQ ID NO: 1885185
ggcaucucagcauaauaag

SEQ ID NO: 2322889 - RNA, 19 nt, Artificial Sequence
  Description of Artificial Sequence: Synthetic oligonucleotide
  Antisense strand to SEQ ID NO: 2322888
cuuauuaugcugagaugcc

SEQ ID NO: 2322890 - RNA, 19 nt, Artificial Sequence
  Description of Artificial Sequence: Synthetic oligonucleotide
  Sense strand starting at position 182 of SEQ ID NO: 1885186
augagaugcuucccaaacu

SEQ ID NO: 2322891 - RNA, 19 nt, Artificial Sequence
  Description of Artificial Sequence: Synthetic oligonucleotide
  Antisense strand to SEQ ID NO: 2322890
aguuugggaagcaucucau

SEQ ID NO: 2322892 - RNA, 19 nt, Artificial Sequence
  Description of Artificial Sequence: Synthetic oligonucleotide
  Sense strand starting at position 375 of SEQ ID NO: 1885186
aaguaaauuccagguacag

SEQ ID NO: 2322893 - RNA, 19 nt, Artificial Sequence
  Description of Artificial Sequence: Synthetic oligonucleotide
  Antisense strand to SEQ ID NO: 2322892
cuguaccuggaauuuacuu

SEQ ID NO: 2322894 - RNA, 19 nt, Artificial Sequence
  Description of Artificial Sequence: Synthetic oligonucleotide
  Sense strand starting at position 429 of SEQ ID NO: 1885186
guugaaaucucaguaagga

SEQ ID NO: 2322895 - RNA, 19 nt, Artificial Sequence
  Description of Artificial Sequence: Synthetic oligonucleotide
  Antisense strand to SEQ ID NO: 2322894
uccuuacugagauuucaac

SEQ ID NO: 2322896 - RNA, 19 nt, Artificial Sequence
  Description of Artificial Sequence: Synthetic oligonucleotide
  Sense strand starting at position 575 of SEQ ID NO: 1885186
aaggacaauugauaggaaa

SEQ ID NO: 2322897 - RNA, 19 nt, Artificial Sequence
  Description of Artificial Sequence: Synthetic oligonucleotide
  Antisense strand to SEQ ID NO: 2322896
uuuccuaucaauuguccuu

SEQ ID NO: 2322898 - RNA, 19 nt, Artificial Sequence
  Description of Artificial Sequence: Synthetic oligonucleotide
  Sense strand starting at position 625 of SEQ ID NO: 1885186
augugcaacucacugauaa

SEQ ID NO: 2322899 - RNA, 19 nt, Artificial Sequence
  Description of Artificial Sequence: Synthetic oligonucleotide
  Antisense strand to SEQ ID NO: 2322898
uuaucagugaguugcacau

SEQ ID NO: 2322900 - RNA, 19 nt, Artificial Sequence
  Description of Artificial Sequence: Synthetic oligonucleotide
  Sense strand starting at position 626 of SEQ ID NO: 1885186
ugugcaacucacugauaau

SEQ ID NO: 2322901 - RNA, 19 nt, Artificial Sequence
  Description of Artificial Sequence: Synthetic oligonucleotide
  Antisense strand to SEQ ID NO: 2322900
auuaucagugaguugcaca

SEQ ID NO: 2322902 - RNA, 19 nt, Artificial Sequence
  Description of Artificial Sequence: Synthetic oligonucleotide
  Sense strand starting at position 822 of SEQ ID NO: 1885186
aguacagagccuuagacua

SEQ ID NO: 2322903 - RNA, 19 nt, Artificial Sequence
  Description of Artificial Sequence: Synthetic oligonucleotide
  Antisense strand to SEQ ID NO: 2322902
uagucuaaggcucuguacu

SEQ ID NO: 2322904 - RNA, 19 nt, Artificial Sequence
  Description of Artificial Sequence: Synthetic oligonucleotide
  Sense strand starting at position 827 of SEQ ID NO: 1885186
agagccuuagacuagcaaa

SEQ ID NO: 2322905 - RNA, 19 nt, Artificial Sequence
  Description of Artificial Sequence: Synthetic oligonucleotide
  Antisense strand to SEQ ID NO: 2322904
uuugcuagucuaaggcucu

SEQ ID NO: 2322906 - RNA, 19 nt, Artificial Sequence
  Description of Artificial Sequence: Synthetic oligonucleotide
  Sense strand starting at position 856 of SEQ ID NO: 1885186
ggaagaauauucuaaagag

SEQ ID NO: 2322907 - RNA, 19 nt, Artificial Sequence
  Description of Artificial Sequence: Synthetic oligonucleotide
  Antisense strand to SEQ ID NO: 2322906
cucuuuagaauauucuucc

SEQ ID NO: 2322908 - RNA, 19 nt, Artificial Sequence
  Description of Artificial Sequence: Synthetic oligonucleotide
  Sense strand starting at position 899 of SEQ ID NO: 1885186
aaggguacucauuguaaag

SEQ ID NO: 2322909 - RNA, 19 nt, Artificial Sequence
  Description of Artificial Sequence: Synthetic oligonucleotide
  Antisense strand to SEQ ID NO: 2322908
cuuuacaaugaguacccuu

SEQ ID NO: 2322910 - RNA, 19 nt, Artificial Sequence
  Description of Artificial Sequence: Synthetic oligonucleotide
  Sense strand starting at position 1007 of SEQ ID NO: 1885186
uuugaaacgucuguauuuc

SEQ ID NO: 2322911 - RNA, 19 nt, Artificial Sequence
  Description of Artificial Sequence: Synthetic oligonucleotide
  Antisense strand to SEQ ID NO: 2322910
gaaauacagacguuucaaa

SEQ ID NO: 2322912 - RNA, 19 nt, Artificial Sequence
  Description of Artificial Sequence: Synthetic oligonucleotide
  Sense strand starting at position 1210 of SEQ ID NO: 1885186
cuuggcaugucauuaggaa

SEQ ID NO: 2322913 - RNA, 19 nt, Artificial Sequence
  Description of Artificial Sequence: Synthetic oligonucleotide
  Antisense strand to SEQ ID NO: 2322912
uuccuaaugacaugccaag

SEQ ID NO: 2322914 - RNA, 19 nt, Artificial Sequence
  Description of Artificial Sequence: Synthetic oligonucleotide
  Sense strand starting at position 1211 of SEQ ID NO: 1885186
uuggcaugucauuaggaau

SEQ ID NO: 2322915 - RNA, 19 nt, Artificial Sequence
  Description of Artificial Sequence: Synthetic oligonucleotide
  Antisense strand to SEQ ID NO: 2322914
auuccuaaugacaugccaa

SEQ ID NO: 2322916 - RNA, 19 nt, Artificial Sequence
  Description of Artificial Sequence: Synthetic oligonucleotide
  Sense strand starting at position 1217 of SEQ ID NO: 1885186
ugucauuaggaauguuuaa

SEQ ID NO: 2322917 - RNA, 19 nt, Artificial Sequence
  Description of Artificial Sequence: Synthetic oligonucleotide
  Antisense strand to SEQ ID NO: 2322916
uuaaacauuccuaaugaca

SEQ ID NO: 2322918 - RNA, 19 nt, Artificial Sequence
  Description of Artificial Sequence: Synthetic oligonucleotide
  Sense strand starting at position 1359 of SEQ ID NO: 1885186
gguucugucagagaaccua

SEQ ID NO: 2322919 - RNA, 19 nt, Artificial Sequence
  Description of Artificial Sequence: Synthetic oligonucleotide
  Antisense strand to SEQ ID NO: 2322918
uagguucucugacagaacc

SEQ ID NO: 2322920 - RNA, 19 nt, Artificial Sequence
  Description of Artificial Sequence: Synthetic oligonucleotide
  Sense strand starting at position 1385 of SEQ ID NO: 1885186
cuacuuugccauuaaggca

SEQ ID NO: 2322921 - RNA, 19 nt, Artificial Sequence
  Description of Artificial Sequence: Synthetic oligonucleotide
  Antisense strand to SEQ ID NO: 2322920
ugccuuaauggcaaaguag

SEQ ID NO: 2322922 - RNA, 19 nt, Artificial Sequence
  Description of Artificial Sequence: Synthetic oligonucleotide
  Sense strand starting at position 1548 of SEQ ID NO: 1885186
ucaucucacgcugaucauu

SEQ ID NO: 2322923 - RNA, 19 nt, Artificial Sequence
  Description of Artificial Sequence: Synthetic oligonucleotide
  Antisense strand to SEQ ID NO: 2322922
aaugaucagcgugagauga

SEQ ID NO: 2322924 - RNA, 19 nt, Artificial Sequence
  Description of Artificial Sequence: Synthetic oligonucleotide
  Sense strand starting at position 1590 of SEQ ID NO: 1885186
gguggucagaaguacauua

SEQ ID NO: 2322925 - RNA, 19 nt, Artificial Sequence
  Description of Artificial Sequence: Synthetic oligonucleotide
  Antisense strand to SEQ ID NO: 2322924
uaauguacuucugaccacc

SEQ ID NO: 2322926 - RNA, 19 nt, Artificial Sequence
  Description of Artificial Sequence: Synthetic oligonucleotide
  Sense strand starting at position 1751 of SEQ ID NO: 1885186
agcucagcugcucaauaaa

SEQ ID NO: 2322927 - RNA, 19 nt, Artificial Sequence
  Description of Artificial Sequence: Synthetic oligonucleotide
  Antisense strand to SEQ ID NO: 2322926
uuuauugagcagcugagcu

SEQ ID NO: 2322928 - RNA, 19 nt, Artificial Sequence
  Description of Artificial Sequence: Synthetic oligonucleotide
  Sense strand starting at position 2450 of SEQ ID NO: 1885186
gcguucugugaauuggugu

SEQ ID NO: 2322929 - RNA, 19 nt, Artificial Sequence
  Description of Artificial Sequence: Synthetic oligonucleotide
  Antisense strand to SEQ ID NO: 2322928
acaccaauucacagaacgc

SEQ ID NO: 2322930 - RNA, 19 nt, Artificial Sequence
  Description of Artificial Sequence: Synthetic oligonucleotide
  Sense strand starting at position 2596 of SEQ ID NO: 1885186
cccugugcucaggcguaau

SEQ ID NO: 2322931 - RNA, 19 nt, Artificial Sequence
  Description of Artificial Sequence: Synthetic oligonucleotide
  Antisense strand to SEQ ID NO: 2322930
auuacgccugagcacaggg

SEQ ID NO: 2322932 - RNA, 19 nt, Artificial Sequence
  Description of Artificial Sequence: Synthetic oligonucleotide
  Sense strand starting at position 2606 of SEQ ID NO: 1885186
aggcguaauuucucacucu

SEQ ID NO: 2322933 - RNA, 19 nt, Artificial Sequence
  Description of Artificial Sequence: Synthetic oligonucleotide
  Antisense strand to SEQ ID NO: 2322932
agagugagaaauuacgccu

SEQ ID NO: 2322934 - RNA, 19 nt, Artificial Sequence
  Description of Artificial Sequence: Synthetic oligonucleotide
  Sense strand starting at position 2644 of SEQ ID NO: 1885186
gucuaagggcgauaaguag

SEQ ID NO: 2322935 - RNA, 19 nt, Artificial Sequence
  Description of Artificial Sequence: Synthetic oligonucleotide
  Antisense strand to SEQ ID NO: 2322934
cuacuuaucgcccuuagac

SEQ ID NO: 2322936 - RNA, 19 nt, Artificial Sequence
  Description of Artificial Sequence: Synthetic oligonucleotide
  Sense strand starting at position 2715 of SEQ ID NO: 1885186
ccuuguaugguguucguau

SEQ ID NO: 2322937 - RNA, 19 nt, Artificial Sequence
  Description of Artificial Sequence: Synthetic oligonucleotide
  Antisense strand to SEQ ID NO: 2322936
auacgaacaccauacaagg

SEQ ID NO: 2322938 - RNA, 19 nt, Artificial Sequence
  Description of Artificial Sequence: Synthetic oligonucleotide
  Sense strand starting at position 2753 of SEQ ID NO: 1885186
gcagcaauuugggcuuaaa

SEQ ID NO: 2322939 - RNA, 19 nt, Artificial Sequence
  Description of Artificial Sequence: Synthetic oligonucleotide
  Antisense strand to SEQ ID NO: 2322938
uuuaagcccaaauugcugc

SEQ ID NO: 2322940 - RNA, 19 nt, Artificial Sequence
  Description of Artificial Sequence: Synthetic oligonucleotide
  Sense strand starting at position 2788 of SEQ ID NO: 1885186
auacucauuccagaucugu

SEQ ID NO: 2322941 - RNA, 19 nt, Artificial Sequence
  Description of Artificial Sequence: Synthetic oligonucleotide
  Antisense strand to SEQ ID NO: 2322940
acagaucuggaaugaguau

SEQ ID NO: 2322942 - RNA, 19 nt, Artificial Sequence
  Description of Artificial Sequence: Synthetic oligonucleotide
  Sense strand starting at position 2880 of SEQ ID NO: 1885186
cugggaauugagugcuacu

SEQ ID NO: 2322943 - RNA, 19 nt, Artificial Sequence
  Description of Artificial Sequence: Synthetic oligonucleotide
  Antisense strand to SEQ ID NO: 2322942
aguagcacucaauucccag

SEQ ID NO: 2322944 - RNA, 19 nt, Artificial Sequence
  Description of Artificial Sequence: Synthetic oligonucleotide
  Sense strand starting at position 2973 of SEQ ID NO: 1885186
gucuguuuggcggcauuau

SEQ ID NO: 2322945 - RNA, 19 nt, Artificial Sequence
  Description of Artificial Sequence: Synthetic oligonucleotide
  Antisense strand to SEQ ID NO: 2322944
auaaugccgccaaacagac

SEQ ID NO: 2322946 - RNA, 19 nt, Artificial Sequence
  Description of Artificial Sequence: Synthetic oligonucleotide
  Sense strand starting at position 3052 of SEQ ID NO: 1885186
uugaauuauguugguaaga

SEQ ID NO: 2322947 - RNA, 19 nt, Artificial Sequence
  Description of Artificial Sequence: Synthetic oligonucleotide
  Antisense strand to SEQ ID NO: 2322946
ucuuaccaacauaauucaa

SEQ ID NO: 2322948 - RNA, 19 nt, Artificial Sequence
  Description of Artificial Sequence: Synthetic oligonucleotide
  Sense strand starting at position 3078 of SEQ ID NO: 1885186
ugugaaggguagucuuaag

SEQ ID NO: 2322949 - RNA, 19 nt, Artificial Sequence
  Description of Artificial Sequence: Synthetic oligonucleotide
  Antisense strand to SEQ ID NO: 2322948
cuuaagacuacccuucaca

SEQ ID NO: 2322950 - RNA, 19 nt, Artificial Sequence
  Description of Artificial Sequence: Synthetic oligonucleotide
  Sense strand starting at position 3305 of SEQ ID NO: 1885186
ggucuaguucuguaacauu

SEQ ID NO: 2322951 - RNA, 19 nt, Artificial Sequence
  Description of Artificial Sequence: Synthetic oligonucleotide
  Antisense strand to SEQ ID NO: 2322950
aauguuacagaacuagacc

SEQ ID NO: 2322952 - RNA, 19 nt, Artificial Sequence
  Description of Artificial Sequence: Synthetic oligonucleotide
  Sense strand starting at position 3324 of SEQ ID NO: 1885186
ugaaauuacuggcuuuagu

SEQ ID NO: 2322953 - RNA, 19 nt, Artificial Sequence
  Description of Artificial Sequence: Synthetic oligonucleotide
  Antisense strand to SEQ ID NO: 2322952
acuaaagccaguaauuuca

SEQ ID NO: 2322954 - RNA, 19 nt, Artificial Sequence
  Description of Artificial Sequence: Synthetic oligonucleotide
  Sense strand starting at position 3332 of SEQ ID NO: 1885186
cuggcuuuaguacaauaua

SEQ ID NO: 2322955 - RNA, 19 nt, Artificial Sequence
  Description of Artificial Sequence: Synthetic oligonucleotide
  Antisense strand to SEQ ID NO: 2322954
uauauuguacuaaagccag

SEQ ID NO: 2322956 - RNA, 19 nt, Artificial Sequence
  Description of Artificial Sequence: Synthetic oligonucleotide
  Sense strand starting at position 3335 of SEQ ID NO: 1885186
gcuuuaguacaauauauug

SEQ ID NO: 2322957 - RNA, 19 nt, Artificial Sequence
  Description of Artificial Sequence: Synthetic oligonucleotide
  Antisense strand to SEQ ID NO: 2322956
caauauauuguacuaaagc

SEQ ID NO: 2322958 - RNA, 19 nt, Artificial Sequence
  Description of Artificial Sequence: Synthetic oligonucleotide
  Sense strand starting at position 3492 of SEQ ID NO: 1885186
auaguugcacucugaaacu

SEQ ID NO: 2322959 - RNA, 19 nt, Artificial Sequence
  Description of Artificial Sequence: Synthetic oligonucleotide
  Antisense strand to SEQ ID NO: 2322958
aguuucagagugcaacuau

SEQ ID NO: 2322960 - RNA, 19 nt, Artificial Sequence
  Description of Artificial Sequence: Synthetic oligonucleotide
  Sense strand starting at position 3619 of SEQ ID NO: 1885186
uugcaagcuuaugugauuu

SEQ ID NO: 2322961 - RNA, 19 nt, Artificial Sequence
  Description of Artificial Sequence: Synthetic oligonucleotide
  Antisense strand to SEQ ID NO: 2322960
aaaucacauaagcuugcaa

SEQ ID NO: 2322962 - RNA, 19 nt, Artificial Sequence
  Description of Artificial Sequence: Synthetic oligonucleotide
  Sense strand starting at position 3679 of SEQ ID NO: 1885186
aguggaugguaucuuaaca

SEQ ID NO: 2322963 - RNA, 19 nt, Artificial Sequence
  Description of Artificial Sequence: Synthetic oligonucleotide
  Antisense strand to SEQ ID NO: 2322962
uguuaagauaccauccacu

SEQ ID NO: 2322964 - RNA, 19 nt, Artificial Sequence
  Description of Artificial Sequence: Synthetic oligonucleotide
  Sense strand starting at position 3763 of SEQ ID NO: 1885186
ggaaacacauuguuuaacu

SEQ ID NO: 2322965 - RNA, 19 nt, Artificial Sequence
  Description of Artificial Sequence: Synthetic oligonucleotide
  Antisense strand to SEQ ID NO: 2322964
aguuaaacaauguguuucc

SEQ ID NO: 2322966 - RNA, 19 nt, Artificial Sequence
  Description of Artificial Sequence: Synthetic oligonucleotide
  Sense strand starting at position 3811 of SEQ ID NO: 1885186
ggaugauagucuuccucac

SEQ ID NO: 2322967 - RNA, 19 nt, Artificial Sequence
  Description of Artificial Sequence: Synthetic oligonucleotide
  Antisense strand to SEQ ID NO: 2322966
gugaggaagacuaucaucc

SEQ ID NO: 2322968 - RNA, 19 nt, Artificial Sequence
  Description of Artificial Sequence: Synthetic oligonucleotide
  Sense strand starting at position 3867 of SEQ ID NO: 1885186
gagcuauuucuccagcugu

SEQ ID NO: 2322969 - RNA, 19 nt, Artificial Sequence
  Description of Artificial Sequence: Synthetic oligonucleotide
  Antisense strand to SEQ ID NO: 2322968
acagcuggagaaauagcuc

SEQ ID NO: 2322970 - RNA, 19 nt, Artificial Sequence
  Description of Artificial Sequence: Synthetic oligonucleotide
  Sense strand starting at position 2046 of SEQ ID NO: 1885187
aagaucugcuuguauagag

SEQ ID NO: 2322971 - RNA, 19 nt, Artificial Sequence
  Description of Artificial Sequence: Synthetic oligonucleotide
  Antisense strand to SEQ ID NO: 2322970
cucuauacaagcagaucuu

SEQ ID NO: 2322972 - RNA, 19 nt, Artificial Sequence
  Description of Artificial Sequence: Synthetic oligonucleotide
  Sense strand starting at position 2188 of SEQ ID NO: 1885187
acgcuuaagcuacacuaau

SEQ ID NO: 2322973 - RNA, 19 nt, Artificial Sequence
  Description of Artificial Sequence: Synthetic oligonucleotide
  Antisense strand to SEQ ID NO: 2322972
auuaguguagcuuaagcgu

SEQ ID NO: 2322974 - RNA, 19 nt, Artificial Sequence
  Description of Artificial Sequence: Synthetic oligonucleotide
  Sense strand starting at position 2561 of SEQ ID NO: 1885187
gcugucaccuccugugaua

SEQ ID NO: 2322975 - RNA, 19 nt, Artificial Sequence
  Description of Artificial Sequence: Synthetic oligonucleotide
  Antisense strand to SEQ ID NO: 2322974
uaucacaggaggugacagc

SEQ ID NO: 2322976 - RNA, 19 nt, Artificial Sequence
  Description of Artificial Sequence: Synthetic oligonucleotide
  Sense strand starting at position 2563 of SEQ ID NO: 1885187
ugucaccuccugugauaac

SEQ ID NO: 2322977 - RNA, 19 nt, Artificial Sequence
  Description of Artificial Sequence: Synthetic oligonucleotide
  Antisense strand to SEQ ID NO: 2322976
guuaucacaggaggugaca

SEQ ID NO: 2322978 - RNA, 19 nt, Artificial Sequence
  Description of Artificial Sequence: Synthetic oligonucleotide
  Sense strand starting at position 2564 of SEQ ID NO: 1885187
gucaccuccugugauaaca

SEQ ID NO: 2322979 - RNA, 19 nt, Artificial Sequence
  Description of Artificial Sequence: Synthetic oligonucleotide
  Antisense strand to SEQ ID NO: 2322978
uguuaucacaggaggugac

SEQ ID NO: 2322980 - RNA, 19 nt, Artificial Sequence
  Description of Artificial Sequence: Synthetic oligonucleotide
  Sense strand starting at position 2630 of SEQ ID NO: 1885187
acgguuaacuucuaacagu

SEQ ID NO: 2322981 - RNA, 19 nt, Artificial Sequence
  Description of Artificial Sequence: Synthetic oligonucleotide
  Antisense strand to SEQ ID NO: 2322980
acuguuagaaguuaaccgu

SEQ ID NO: 2322982 - RNA, 19 nt, Artificial Sequence
  Description of Artificial Sequence: Synthetic oligonucleotide
  Sense strand starting at position 2633 of SEQ ID NO: 1885187
guuaacuucuaacaguaca

SEQ ID NO: 2322983 - RNA, 19 nt, Artificial Sequence
  Description of Artificial Sequence: Synthetic oligonucleotide
  Antisense strand to SEQ ID NO: 2322982
uguacuguuagaaguuaac

SEQ ID NO: 2322984 - RNA, 19 nt, Artificial Sequence
  Description of Artificial Sequence: Synthetic oligonucleotide
  Sense strand starting at position 2678 of SEQ ID NO: 1885187
uacaguuugguccaaugau

SEQ ID NO: 2322985 - RNA, 19 nt, Artificial Sequence
  Description of Artificial Sequence: Synthetic oligonucleotide
  Antisense strand to SEQ ID NO: 2322984
aucauuggaccaaacugua

SEQ ID NO: 2322986 - RNA, 19 nt, Artificial Sequence
  Description of Artificial Sequence: Synthetic oligonucleotide
  Sense strand starting at position 3147 of SEQ ID NO: 1885187
gaucauucuggcugcuuga

SEQ ID NO: 2322987 - RNA, 19 nt, Artificial Sequence
  Description of Artificial Sequence: Synthetic oligonucleotide
  Antisense strand to SEQ ID NO: 2322986
ucaagcagccagaaugauc

SEQ ID NO: 2322988 - RNA, 19 nt, Artificial Sequence
  Description of Artificial Sequence: Synthetic oligonucleotide
  Sense strand starting at position 3150 of SEQ ID NO: 1885187
cauucuggcugcuugauau

SEQ ID NO: 2322989 - RNA, 19 nt, Artificial Sequence
  Description of Artificial Sequence: Synthetic oligonucleotide
  Antisense strand to SEQ ID NO: 2322988
auaucaagcagccagaaug

SEQ ID NO: 2322990 - RNA, 19 nt, Artificial Sequence
  Description of Artificial Sequence: Synthetic oligonucleotide
  Sense strand starting at position 3154 of SEQ ID NO: 1885187
cuggcugcuugauauugau

SEQ ID NO: 2322991 - RNA, 19 nt, Artificial Sequence
  Description of Artificial Sequence: Synthetic oligonucleotide
  Antisense strand to SEQ ID NO: 2322990
aucaauaucaagcagccag

SEQ ID NO: 2322992 - RNA, 19 nt, Artificial Sequence
  Description of Artificial Sequence: Synthetic oligonucleotide
  Sense strand starting at position 3337 of SEQ ID NO: 1885187
gcugcaaucccauaaacgu

SEQ ID NO: 2322993 - RNA, 19 nt, Artificial Sequence
  Description of Artificial Sequence: Synthetic oligonucleotide
  Antisense strand to SEQ ID NO: 2322992
acguuuaugggauugcagc

SEQ ID NO: 2322994 - RNA, 19 nt, Artificial Sequence
  Description of Artificial Sequence: Synthetic oligonucleotide
  Sense strand starting at position 3346 of SEQ ID NO: 1885187
ccauaaacguggcuugauu

SEQ ID NO: 2322995 - RNA, 19 nt, Artificial Sequence
  Description of Artificial Sequence: Synthetic oligonucleotide
  Antisense strand to SEQ ID NO: 2322994
aaucaagccacguuuaugg

SEQ ID NO: 2322996 - RNA, 19 nt, Artificial Sequence
  Description of Artificial Sequence: Synthetic oligonucleotide
  Sense strand starting at position 3478 of SEQ ID NO: 1885187
ccaucugugucgcaguaua

SEQ ID NO: 2322997 - RNA, 19 nt, Artificial Sequence
  Description of Artificial Sequence: Synthetic oligonucleotide
  Antisense strand to SEQ ID NO: 2322996
uauacugcgacacagaugg

SEQ ID NO: 2322998 - RNA, 19 nt, Artificial Sequence
  Description of Artificial Sequence: Synthetic oligonucleotide
  Sense strand starting at position 3789 of SEQ ID NO: 1885187
gcaaucaacuucugguaug

SEQ ID NO: 2322999 - RNA, 19 nt, Artificial Sequence
  Description of Artificial Sequence: Synthetic oligonucleotide
  Antisense strand to SEQ ID NO: 2322998
cauaccagaaguugauugc

SEQ ID NO: 2323000 - RNA, 19 nt, Artificial Sequence
  Description of Artificial Sequence: Synthetic oligonucleotide
  Sense strand starting at position 45 of SEQ ID NO: 1885188
acuucugaguucugauggu

SEQ ID NO: 2323001 - RNA, 19 nt, Artificial Sequence
  Description of Artificial Sequence: Synthetic oligonucleotide
  Antisense strand to SEQ ID NO: 2323000
accaucagaacucagaagu

SEQ ID NO: 2323002 - RNA, 19 nt, Artificial Sequence
  Description of Artificial Sequence: Synthetic oligonucleotide
  Sense strand starting at position 65 of SEQ ID NO: 1885188
caggcagucuaucagaauu

SEQ ID NO: 2323003 - RNA, 19 nt, Artificial Sequence
  Description of Artificial Sequence: Synthetic oligonucleotide
  Antisense strand to SEQ ID NO: 2323002
aauucugauagacugccug

SEQ ID NO: 2323004 - RNA, 19 nt, Artificial Sequence
  Description of Artificial Sequence: Synthetic oligonucleotide
  Sense strand starting at position 67 of SEQ ID NO: 1885188
ggcagucuaucagaauuag

SEQ ID NO: 2323005 - RNA, 19 nt, Artificial Sequence
  Description of Artificial Sequence: Synthetic oligonucleotide
  Antisense strand to SEQ ID NO: 2323004
cuaauucugauagacugcc

SEQ ID NO: 2323006 - RNA, 19 nt, Artificial Sequence
  Description of Artificial Sequence: Synthetic oligonucleotide
  Sense strand starting at position 202 of SEQ ID NO: 1885188
gaaggagcucugugaggau

SEQ ID NO: 2323007 - RNA, 19 nt, Artificial Sequence
  Description of Artificial Sequence: Synthetic oligonucleotide
  Antisense strand to SEQ ID NO: 2323006
auccucacagagcuccuuc

SEQ ID NO: 2323008 - RNA, 19 nt, Artificial Sequence
  Description of Artificial Sequence: Synthetic oligonucleotide
  Sense strand starting at position 206 of SEQ ID NO: 1885188
gagcucugugaggaucagu

SEQ ID NO: 2323009 - RNA, 19 nt, Artificial Sequence
  Description of Artificial Sequence: Synthetic oligonucleotide
  Antisense strand to SEQ ID NO: 2323008
acugauccucacagagcuc

SEQ ID NO: 2323010 - RNA, 19 nt, Artificial Sequence
  Description of Artificial Sequence: Synthetic oligonucleotide
  Sense strand starting at position 209 of SEQ ID NO: 1885188
cucugugaggaucaguuaa

SEQ ID NO: 2323011 - RNA, 19 nt, Artificial Sequence
  Description of Artificial Sequence: Synthetic oligonucleotide
  Antisense strand to SEQ ID NO: 2323010
uuaacugauccucacagag

SEQ ID NO: 2323012 - RNA, 19 nt, Artificial Sequence
  Description of Artificial Sequence: Synthetic oligonucleotide
  Sense strand starting at position 371 of SEQ ID NO: 1885188
guccucguuucagaugaag

SEQ ID NO: 2323013 - RNA, 19 nt, Artificial Sequence
  Description of Artificial Sequence: Synthetic oligonucleotide
  Antisense strand to SEQ ID NO: 2323012
cuucaucugaaacgaggac

SEQ ID NO: 2323014 - RNA, 19 nt, Artificial Sequence
  Description of Artificial Sequence: Synthetic oligonucleotide
  Sense strand starting at position 417 of SEQ ID NO: 1885188
gggaaugcucucugccaga

SEQ ID NO: 2323015 - RNA, 19 nt, Artificial Sequence
  Description of Artificial Sequence: Synthetic oligonucleotide
  Antisense strand to SEQ ID NO: 2323014
ucuggcagagagcauuccc

SEQ ID NO: 2323016 - RNA, 19 nt, Artificial Sequence
  Description of Artificial Sequence: Synthetic oligonucleotide
  Sense strand starting at position 434 of SEQ ID NO: 1885188
gaugcuguauuugaaacau

SEQ ID NO: 2323017 - RNA, 19 nt, Artificial Sequence
  Description of Artificial Sequence: Synthetic oligonucleotide
  Antisense strand to SEQ ID NO: 2323016
auguuucaaauacagcauc

SEQ ID NO: 2323018 - RNA, 19 nt, Artificial Sequence
  Description of Artificial Sequence: Synthetic oligonucleotide
  Sense strand starting at position 1295 of SEQ ID NO: 1885188
guuucuggcuuucgugaag

SEQ ID NO: 2323019 - RNA, 19 nt, Artificial Sequence
  Description of Artificial Sequence: Synthetic oligonucleotide
  Antisense strand to SEQ ID NO: 2323018
cuucacgaaagccagaaac

SEQ ID NO: 2323020 - RNA, 19 nt, Artificial Sequence
  Description of Artificial Sequence: Synthetic oligonucleotide
  Sense strand starting at position 1300 of SEQ ID NO: 1885188
uggcuuucgugaaguugag

SEQ ID NO: 2323021 - RNA, 19 nt, Artificial Sequence
  Description of Artificial Sequence: Synthetic oligonucleotide
  Antisense strand to SEQ ID NO: 2323020
cucaacuucacgaaagcca

SEQ ID NO: 2323022 - RNA, 19 nt, Artificial Sequence
  Description of Artificial Sequence: Synthetic oligonucleotide
  Sense strand starting at position 1304 of SEQ ID NO: 1885188
uuucgugaaguugagaauu

SEQ ID NO: 2323023 - RNA, 19 nt, Artificial Sequence
  Description of Artificial Sequence: Synthetic oligonucleotide
  Antisense strand to SEQ ID NO: 2323022
aauucucaacuucacgaaa

SEQ ID NO: 2323024 - RNA, 19 nt, Artificial Sequence
  Description of Artificial Sequence: Synthetic oligonucleotide
  Sense strand starting at position 1357 of SEQ ID NO: 1885188
cguucuucagucgcuugaa

SEQ ID NO: 2323025 - RNA, 19 nt, Artificial Sequence
  Description of Artificial Sequence: Synthetic oligonucleotide
  Antisense strand to SEQ ID NO: 2323024
uucaagcgacugaagaacg

SEQ ID NO: 2323026 - RNA, 19 nt, Artificial Sequence
  Description of Artificial Sequence: Synthetic oligonucleotide
  Sense strand starting at position 1453 of SEQ ID NO: 1885188
uuagaaauauccgccauca

SEQ ID NO: 2323027 - RNA, 19 nt, Artificial Sequence
  Description of Artificial Sequence: Synthetic oligonucleotide
  Antisense strand to SEQ ID NO: 2323026
ugauggcggauauuucuaa

SEQ ID NO: 2323028 - RNA, 19 nt, Artificial Sequence
  Description of Artificial Sequence: Synthetic oligonucleotide
  Sense strand starting at position 1455 of SEQ ID NO: 1885188
agaaauauccgccaucaau

SEQ ID NO: 2323029 - RNA, 19 nt, Artificial Sequence
  Description of Artificial Sequence: Synthetic oligonucleotide
  Antisense strand to SEQ ID NO: 2323028
auugauggcggauauuucu

SEQ ID NO: 2323030 - RNA, 19 nt, Artificial Sequence
  Description of Artificial Sequence: Synthetic oligonucleotide
  Sense strand starting at position 1855 of SEQ ID NO: 1885188
auucgaaucugccgucaua

SEQ ID NO: 2323031 - RNA, 19 nt, Artificial Sequence
  Description of Artificial Sequence: Synthetic oligonucleotide
  Antisense strand to SEQ ID NO: 2323030
uaugacggcagauucgaau

SEQ ID NO: 2323032 - RNA, 19 nt, Artificial Sequence
  Description of Artificial Sequence: Synthetic oligonucleotide
  Sense strand starting at position 2388 of SEQ ID NO: 1885188
cauuaauguuuguguaaug

SEQ ID NO: 2323033 - RNA, 19 nt, Artificial Sequence
  Description of Artificial Sequence: Synthetic oligonucleotide
  Antisense strand to SEQ ID NO: 2323032
cauuacacaaacauuaaug

SEQ ID NO: 2323034 - RNA, 19 nt, Artificial Sequence
  Description of Artificial Sequence: Synthetic oligonucleotide
  Sense strand starting at position 2395 of SEQ ID NO: 1885188
guuuguguaauguaucuuu

SEQ ID NO: 2323035 - RNA, 19 nt, Artificial Sequence
  Description of Artificial Sequence: Synthetic oligonucleotide
  Antisense strand to SEQ ID NO: 2323034
aaagauacauuacacaaac

SEQ ID NO: 2323036 - RNA, 19 nt, Artificial Sequence
  Description of Artificial Sequence: Synthetic oligonucleotide
  Sense strand starting at position 2454 of SEQ ID NO: 1885188
ucaaguuucuuguacacag

SEQ ID NO: 2323037 - RNA, 19 nt, Artificial Sequence
  Description of Artificial Sequence: Synthetic oligonucleotide
  Antisense strand to SEQ ID NO: 2323036
cuguguacaagaaacuuga

SEQ ID NO: 2323038 - RNA, 19 nt, Artificial Sequence
  Description of Artificial Sequence: Synthetic oligonucleotide
  Sense strand starting at position 2523 of SEQ ID NO: 1885188
uuaucugucccuugguaga

SEQ ID NO: 2323039 - RNA, 19 nt, Artificial Sequence
  Description of Artificial Sequence: Synthetic oligonucleotide
  Antisense strand to SEQ ID NO: 2323038
ucuaccaagggacagauaa

SEQ ID NO: 2323040 - RNA, 19 nt, Artificial Sequence
  Description of Artificial Sequence: Synthetic oligonucleotide
  Sense strand starting at position 2634 of SEQ ID NO: 1885188
caugacuuccuguggguca

SEQ ID NO: 2323041 - RNA, 19 nt, Artificial Sequence
  Description of Artificial Sequence: Synthetic oligonucleotide
  Antisense strand to SEQ ID NO: 2323040
ugacccacaggaagucaug

SEQ ID NO: 2323042 - RNA, 19 nt, Artificial Sequence
  Description of Artificial Sequence: Synthetic oligonucleotide
  Sense strand starting at position 2669 of SEQ ID NO: 1885188
agaauuccauguuguuauu

SEQ ID NO: 2323043 - RNA, 19 nt, Artificial Sequence
  Description of Artificial Sequence: Synthetic oligonucleotide
  Antisense strand to SEQ ID NO: 2323042
aauaacaacauggaauucu

SEQ ID NO: 2323044 - RNA, 19 nt, Artificial Sequence
  Description of Artificial Sequence: Synthetic oligonucleotide
  Sense strand starting at position 34 of SEQ ID NO: 1885189
ccuauaagggauuacguuu

SEQ ID NO: 2323045 - RNA, 19 nt, Artificial Sequence
  Description of Artificial Sequence: Synthetic oligonucleotide
  Antisense strand to SEQ ID NO: 2323044
aaacguaaucccuuauagg

SEQ ID NO: 2323046 - RNA, 19 nt, Artificial Sequence
  Description of Artificial Sequence: Synthetic oligonucleotide
  Sense strand starting at position 80 of SEQ ID NO: 1885189
ucaaucauagcgcaagaaa

SEQ ID NO: 2323047 - RNA, 19 nt, Artificial Sequence
  Description of Artificial Sequence: Synthetic oligonucleotide
  Antisense strand to SEQ ID NO: 2323046
uuucuugcgcuaugauuga

SEQ ID NO: 2323048 - RNA, 19 nt, Artificial Sequence
  Description of Artificial Sequence: Synthetic oligonucleotide
  Sense strand starting at position 421 of SEQ ID NO: 1885189
uugcaacuucuggaacaua

SEQ ID NO: 2323049 - RNA, 19 nt, Artificial Sequence
  Description of Artificial Sequence: Synthetic oligonucleotide
  Antisense strand to SEQ ID NO: 2323048
uauguuccagaaguugcaa

SEQ ID NO: 2323050 - RNA, 19 nt, Artificial Sequence
  Description of Artificial Sequence: Synthetic oligonucleotide
  Sense strand starting at position 606 of SEQ ID NO: 1885189
augaguuggaggcgaugaa

SEQ ID NO: 2323051 - RNA, 19 nt, Artificial Sequence
  Description of Artificial Sequence: Synthetic oligonucleotide
  Antisense strand to SEQ ID NO: 2323050
uucaucgccuccaacucau

SEQ ID NO: 2323052 - RNA, 19 nt, Artificial Sequence
  Description of Artificial Sequence: Synthetic oligonucleotide
  Sense strand starting at position 827 of SEQ ID NO: 1885189
caggauuaauguuuccaag

SEQ ID NO: 2323053 - RNA, 19 nt, Artificial Sequence
  Description of Artificial Sequence: Synthetic oligonucleotide
  Antisense strand to SEQ ID NO: 2323052
cuuggaaacauuaauccug

SEQ ID NO: 2323054 - RNA, 19 nt, Artificial Sequence
  Description of Artificial Sequence: Synthetic oligonucleotide
  Sense strand starting at position 856 of SEQ ID NO: 1885189
uguccacugggaugagauu

SEQ ID NO: 2323055 - RNA, 19 nt, Artificial Sequence
  Description of Artificial Sequence: Synthetic oligonucleotide
  Antisense strand to SEQ ID NO: 2323054
aaucucaucccaguggaca

SEQ ID NO: 2323056 - RNA, 19 nt, Artificial Sequence
  Description of Artificial Sequence: Synthetic oligonucleotide
  Sense strand starting at position 908 of SEQ ID NO: 1885189
uugcucugucuuuaagaga

SEQ ID NO: 2323057 - RNA, 19 nt, Artificial Sequence
  Description of Artificial Sequence: Synthetic oligonucleotide
  Antisense strand to SEQ ID NO: 2323056
ucucuuaaagacagagcaa

SEQ ID NO: 2323058 - RNA, 19 nt, Artificial Sequence
  Description of Artificial Sequence: Synthetic oligonucleotide
  Sense strand starting at position 1021 of SEQ ID NO: 1885189
ugcuaagauuuggaagaga

SEQ ID NO: 2323059 - RNA, 19 nt, Artificial Sequence
  Description of Artificial Sequence: Synthetic oligonucleotide
  Antisense strand to SEQ ID NO: 2323058
ucucuuccaaaucuuagca

SEQ ID NO: 2323060 - RNA, 19 nt, Artificial Sequence
  Description of Artificial Sequence: Synthetic oligonucleotide
  Sense strand starting at position 1032 of SEQ ID NO: 1885189
ggaagagagaugcguuuga

SEQ ID NO: 2323061 - RNA, 19 nt, Artificial Sequence
  Description of Artificial Sequence: Synthetic oligonucleotide
  Antisense strand to SEQ ID NO: 2323060
ucaaacgcaucucucuucc

SEQ ID NO: 2323062 - RNA, 19 nt, Artificial Sequence
  Description of Artificial Sequence: Synthetic oligonucleotide
  Sense strand starting at position 1068 of SEQ ID NO: 1885189
aaugaugauuguuucuaag

SEQ ID NO: 2323063 - RNA, 19 nt, Artificial Sequence
  Description of Artificial Sequence: Synthetic oligonucleotide
  Antisense strand to SEQ ID NO: 2323062
cuuagaaacaaucaucauu

SEQ ID NO: 2323064 - RNA, 19 nt, Artificial Sequence
  Description of Artificial Sequence: Synthetic oligonucleotide
  Sense strand starting at position 1070 of SEQ ID NO: 1885189
ugaugauuguuucuaagag

SEQ ID NO: 2323065 - RNA, 19 nt, Artificial Sequence
  Description of Artificial Sequence: Synthetic oligonucleotide
  Antisense strand to SEQ ID NO: 2323064
cucuuagaaacaaucauca

SEQ ID NO: 2323066 - RNA, 19 nt, Artificial Sequence
  Description of Artificial Sequence: Synthetic oligonucleotide
  Sense strand starting at position 1106 of SEQ ID NO: 1885189
cucucuaauuugguuagca

SEQ ID NO: 2323067 - RNA, 19 nt, Artificial Sequence
  Description of Artificial Sequence: Synthetic oligonucleotide
  Antisense strand to SEQ ID NO: 2323066
ugcuaaccaaauuagagag

SEQ ID NO: 2323068 - RNA, 19 nt, Artificial Sequence
  Description of Artificial Sequence: Synthetic oligonucleotide
  Sense strand starting at position 1107 of SEQ ID NO: 1885189
ucucuaauuugguuagcau

SEQ ID NO: 2323069 - RNA, 19 nt, Artificial Sequence
  Description of Artificial Sequence: Synthetic oligonucleotide
  Antisense strand to SEQ ID NO: 2323068
augcuaaccaaauuagaga

SEQ ID NO: 2323070 - RNA, 19 nt, Artificial Sequence
  Description of Artificial Sequence: Synthetic oligonucleotide
  Sense strand starting at position 1114 of SEQ ID NO: 1885189
uuugguuagcaugagaaau

SEQ ID NO: 2323071 - RNA, 19 nt, Artificial Sequence
  Description of Artificial Sequence: Synthetic oligonucleotide
  Antisense strand to SEQ ID NO: 2323070
auuucucaugcuaaccaaa

SEQ ID NO: 2323072 - RNA, 19 nt, Artificial Sequence
  Description of Artificial Sequence: Synthetic oligonucleotide
  Sense strand starting at position 1315 of SEQ ID NO: 1885189
aggacacaucuuugaaugu

SEQ ID NO: 2323073 - RNA, 19 nt, Artificial Sequence
  Description of Artificial Sequence: Synthetic oligonucleotide
  Antisense strand to SEQ ID NO: 2323072
acauucaaagauguguccu

SEQ ID NO: 2323074 - RNA, 19 nt, Artificial Sequence
  Description of Artificial Sequence: Synthetic oligonucleotide
  Sense strand starting at position 1324 of SEQ ID NO: 1885189
cuuugaaugugaucaacuu

SEQ ID NO: 2323075 - RNA, 19 nt, Artificial Sequence
  Description of Artificial Sequence: Synthetic oligonucleotide
  Antisense strand to SEQ ID NO: 2323074
aaguugaucacauucaaag

SEQ ID NO: 2323076 - RNA, 19 nt, Artificial Sequence
  Description of Artificial Sequence: Synthetic oligonucleotide
  Sense strand starting at position 1377 of SEQ ID NO: 1885189
augucuuuagagcaauaaa

SEQ ID NO: 2323077 - RNA, 19 nt, Artificial Sequence
  Description of Artificial Sequence: Synthetic oligonucleotide
  Antisense strand to SEQ ID NO: 2323076
uuuauugcucuaaagacau

SEQ ID NO: 2323078 - RNA, 19 nt, Artificial Sequence
  Description of Artificial Sequence: Synthetic oligonucleotide
  Sense strand starting at position 1440 of SEQ ID NO: 1885189
gggcucugacuauaucagu

SEQ ID NO: 2323079 - RNA, 19 nt, Artificial Sequence
  Description of Artificial Sequence: Synthetic oligonucleotide
  Antisense strand to SEQ ID NO: 2323078
acugauauagucagagccc

SEQ ID NO: 2323080 - RNA, 19 nt, Artificial Sequence
  Description of Artificial Sequence: Synthetic oligonucleotide
  Sense strand starting at position 1901 of SEQ ID NO: 1885189
aggaauuagaagcgaggua

SEQ ID NO: 2323081 - RNA, 19 nt, Artificial Sequence
  Description of Artificial Sequence: Synthetic oligonucleotide
  Antisense strand to SEQ ID NO: 2323080
uaccucgcuucuaauuccu

SEQ ID NO: 2323082 - RNA, 19 nt, Artificial Sequence
  Description of Artificial Sequence: Synthetic oligonucleotide
  Sense strand starting at position 1996 of SEQ ID NO: 1885189
guugaaucccacugggacu

SEQ ID NO: 2323083 - RNA, 19 nt, Artificial Sequence
  Description of Artificial Sequence: Synthetic oligonucleotide
  Antisense strand to SEQ ID NO: 2323082
agucccagugggauucaac

SEQ ID NO: 2323084 - RNA, 19 nt, Artificial Sequence
  Description of Artificial Sequence: Synthetic oligonucleotide
  Sense strand starting at position 2194 of SEQ ID NO: 1885189
cgagcugguagcugauuua

SEQ ID NO: 2323085 - RNA, 19 nt, Artificial Sequence
  Description of Artificial Sequence: Synthetic oligonucleotide
  Antisense strand to SEQ ID NO: 2323084
uaaaucagcuaccagcucg

SEQ ID NO: 2323086 - RNA, 19 nt, Artificial Sequence
  Description of Artificial Sequence: Synthetic oligonucleotide
  Sense strand starting at position 2332 of SEQ ID NO: 1885189
aguggacacucaguauuau

SEQ ID NO: 2323087 - RNA, 19 nt, Artificial Sequence
  Description of Artificial Sequence: Synthetic oligonucleotide
  Antisense strand to SEQ ID NO: 2323086
auaauacugaguguccacu

SEQ ID NO: 2323088 - RNA, 19 nt, Artificial Sequence
  Description of Artificial Sequence: Synthetic oligonucleotide
  Sense strand starting at position 2333 of SEQ ID NO: 1885189
guggacacucaguauuauc

SEQ ID NO: 2323089 - RNA, 19 nt, Artificial Sequence
  Description of Artificial Sequence: Synthetic oligonucleotide
  Antisense strand to SEQ ID NO: 2323088
gauaauacugaguguccac

SEQ ID NO: 2323090 - RNA, 19 nt, Artificial Sequence
  Description of Artificial Sequence: Synthetic oligonucleotide
  Sense strand starting at position 2349 of SEQ ID NO: 1885189
auccaucacgggcauauau

SEQ ID NO: 2323091 - RNA, 19 nt, Artificial Sequence
  Description of Artificial Sequence: Synthetic oligonucleotide
  Antisense strand to SEQ ID NO: 2323090
auauaugcccgugauggau

SEQ ID NO: 2323092 - RNA, 19 nt, Artificial Sequence
  Description of Artificial Sequence: Synthetic oligonucleotide
  Sense strand starting at position 2351 of SEQ ID NO: 1885189
ccaucacgggcauauauua

SEQ ID NO: 2323093 - RNA, 19 nt, Artificial Sequence
  Description of Artificial Sequence: Synthetic oligonucleotide
  Antisense strand to SEQ ID NO: 2323092
uaauauaugcccgugaugg

SEQ ID NO: 2323094 - RNA, 19 nt, Artificial Sequence
  Description of Artificial Sequence: Synthetic oligonucleotide
  Sense strand starting at position 2459 of SEQ ID NO: 1885189
aagugaguuaagggucuaa

SEQ ID NO: 2323095 - RNA, 19 nt, Artificial Sequence
  Description of Artificial Sequence: Synthetic oligonucleotide
  Antisense strand to SEQ ID NO: 2323094
uuagacccuuaacucacuu

SEQ ID NO: 2323096 - RNA, 19 nt, Artificial Sequence
  Description of Artificial Sequence: Synthetic oligonucleotide
  Sense strand starting at position 2463 of SEQ ID NO: 1885189
gaguuaagggucuaagcuu

SEQ ID NO: 2323097 - RNA, 19 nt, Artificial Sequence
  Description of Artificial Sequence: Synthetic oligonucleotide
  Antisense strand to SEQ ID NO: 2323096
aagcuuagacccuuaacuc

SEQ ID NO: 2323098 - RNA, 19 nt, Artificial Sequence
  Description of Artificial Sequence: Synthetic oligonucleotide
  Sense strand starting at position 2533 of SEQ ID NO: 1885189
ccacaucugcaauaugaug

SEQ ID NO: 2323099 - RNA, 19 nt, Artificial Sequence
  Description of Artificial Sequence: Synthetic oligonucleotide
  Antisense strand to SEQ ID NO: 2323098
caucauauugcagaugugg

SEQ ID NO: 2323100 - RNA, 19 nt, Artificial Sequence
  Description of Artificial Sequence: Synthetic oligonucleotide
  Sense strand starting at position 2635 of SEQ ID NO: 1885189
auguuaaugccagauuaca

SEQ ID NO: 2323101 - RNA, 19 nt, Artificial Sequence
  Description of Artificial Sequence: Synthetic oligonucleotide
  Antisense strand to SEQ ID NO: 2323100
uguaaucuggcauuaacau

SEQ ID NO: 2323102 - RNA, 19 nt, Artificial Sequence
  Description of Artificial Sequence: Synthetic oligonucleotide
  Sense strand starting at position 2729 of SEQ ID NO: 1885189
acuugaguacaugguagaa

SEQ ID NO: 2323103 - RNA, 19 nt, Artificial Sequence
  Description of Artificial Sequence: Synthetic oligonucleotide
  Antisense strand to SEQ ID NO: 2323102
uucuaccauguacucaagu

SEQ ID NO: 2323104 - RNA, 19 nt, Artificial Sequence
  Description of Artificial Sequence: Synthetic oligonucleotide
  Sense strand starting at position 2803 of SEQ ID NO: 1885189
uuagaacaguguuucuaaa

SEQ ID NO: 2323105 - RNA, 19 nt, Artificial Sequence
  Description of Artificial Sequence: Synthetic oligonucleotide
  Antisense strand to SEQ ID NO: 2323104
uuuagaaacacuguucuaa

SEQ ID NO: 2323106 - RNA, 19 nt, Artificial Sequence
  Description of Artificial Sequence: Synthetic oligonucleotide
  Sense strand starting at position 2821 of SEQ ID NO: 1885189
agcuuuaaggugcaugaga

SEQ ID NO: 2323107 - RNA, 19 nt, Artificial Sequence
  Description of Artificial Sequence: Synthetic oligonucleotide
  Antisense strand to SEQ ID NO: 2323106
ucucaugcaccuuaaagcu

SEQ ID NO: 2323108 - RNA, 19 nt, Artificial Sequence
  Description of Artificial Sequence: Synthetic oligonucleotide
  Sense strand starting at position 2901 of SEQ ID NO: 1885189
guguauuucuaaccagcac

SEQ ID NO: 2323109 - RNA, 19 nt, Artificial Sequence
  Description of Artificial Sequence: Synthetic oligonucleotide
  Antisense strand to SEQ ID NO: 2323108
gugcugguuagaaauacac

SEQ ID NO: 2323110 - RNA, 19 nt, Artificial Sequence
  Description of Artificial Sequence: Synthetic oligonucleotide
  Sense strand starting at position 3069 of SEQ ID NO: 1885189
ugugcugugccagcauuau

SEQ ID NO: 2323111 - RNA, 19 nt, Artificial Sequence
  Description of Artificial Sequence: Synthetic oligonucleotide
  Antisense strand to SEQ ID NO: 2323110
auaaugcuggcacagcaca

SEQ ID NO: 2323112 - RNA, 19 nt, Artificial Sequence
  Description of Artificial Sequence: Synthetic oligonucleotide
  Sense strand starting at position 3157 of SEQ ID NO: 1885189
cuaagaggguuacuaguau

SEQ ID NO: 2323113 - RNA, 19 nt, Artificial Sequence
  Description of Artificial Sequence: Synthetic oligonucleotide
  Antisense strand to SEQ ID NO: 2323112
auacuaguaacccucuuag

SEQ ID NO: 2323114 - RNA, 19 nt, Artificial Sequence
  Description of Artificial Sequence: Synthetic oligonucleotide
  Sense strand starting at position 3571 of SEQ ID NO: 1885189
uagugaggaguguaaauuc

SEQ ID NO: 2323115 - RNA, 19 nt, Artificial Sequence
  Description of Artificial Sequence: Synthetic oligonucleotide
  Antisense strand to SEQ ID NO: 2323114
gaauuuacacuccucacua

SEQ ID NO: 2323116 - RNA, 19 nt, Artificial Sequence
  Description of Artificial Sequence: Synthetic oligonucleotide
  Sense strand starting at position 3648 of SEQ ID NO: 1885189
ugaugauagcucuaccaug

SEQ ID NO: 2323117 - RNA, 19 nt, Artificial Sequence
  Description of Artificial Sequence: Synthetic oligonucleotide
  Antisense strand to SEQ ID NO: 2323116
caugguagagcuaucauca

SEQ ID NO: 2323118 - RNA, 19 nt, Artificial Sequence
  Description of Artificial Sequence: Synthetic oligonucleotide
  Sense strand starting at position 3708 of SEQ ID NO: 1885189
guucucaguuaucccauuu

SEQ ID NO: 2323119 - RNA, 19 nt, Artificial Sequence
  Description of Artificial Sequence: Synthetic oligonucleotide
  Antisense strand to SEQ ID NO: 2323118
aaaugggauaacugagaac

SEQ ID NO: 2323120 - RNA, 19 nt, Artificial Sequence
  Description of Artificial Sequence: Synthetic oligonucleotide
  Sense strand starting at position 3715 of SEQ ID NO: 1885189
guuaucccauuuguaaagu

SEQ ID NO: 2323121 - RNA, 19 nt, Artificial Sequence
  Description of Artificial Sequence: Synthetic oligonucleotide
  Antisense strand to SEQ ID NO: 2323120
acuuuacaaaugggauaac

SEQ ID NO: 2323122 - RNA, 19 nt, Artificial Sequence
  Description of Artificial Sequence: Synthetic oligonucleotide
  Sense strand starting at position 3883 of SEQ ID NO: 1885189
uaaauagagcgcuaggauu

SEQ ID NO: 2323123 - RNA, 19 nt, Artificial Sequence
  Description of Artificial Sequence: Synthetic oligonucleotide
  Antisense strand to SEQ ID NO: 2323122
aauccuagcgcucuauuua

SEQ ID NO: 2323124 - RNA, 19 nt, Artificial Sequence
  Description of Artificial Sequence: Synthetic oligonucleotide
  Sense strand starting at position 575 of SEQ ID NO: 1885190
gacacagcucuuuggauga

SEQ ID NO: 2323125 - RNA, 19 nt, Artificial Sequence
  Description of Artificial Sequence: Synthetic oligonucleotide
  Antisense strand to SEQ ID NO: 2323124
ucauccaaagagcuguguc

SEQ ID NO: 2323126 - RNA, 19 nt, Artificial Sequence
  Description of Artificial Sequence: Synthetic oligonucleotide
  Sense strand starting at position 614 of SEQ ID NO: 1885190
auugauagugucuauuaac

SEQ ID NO: 2323127 - RNA, 19 nt, Artificial Sequence
  Description of Artificial Sequence: Synthetic oligonucleotide
  Antisense strand to SEQ ID NO: 2323126
guuaauagacacuaucaau

SEQ ID NO: 2323128 - RNA, 19 nt, Artificial Sequence
  Description of Artificial Sequence: Synthetic oligonucleotide
  Sense strand starting at position 647 of SEQ ID NO: 1885190
ugaugaaacugaucuaugu

SEQ ID NO: 2323129 - RNA, 19 nt, Artificial Sequence
  Description of Artificial Sequence: Synthetic oligonucleotide
  Antisense strand to SEQ ID NO: 2323128
acauagaucaguuucauca

SEQ ID NO: 2323130 - RNA, 19 nt, Artificial Sequence
  Description of Artificial Sequence: Synthetic oligonucleotide
  Sense strand starting at position 657 of SEQ ID NO: 1885190
gaucuauguccugggacuc

SEQ ID NO: 2323131 - RNA, 19 nt, Artificial Sequence
  Description of Artificial Sequence: Synthetic oligonucleotide
  Antisense strand to SEQ ID NO: 2323130
gagucccaggacauagauc

SEQ ID NO: 2323132 - RNA, 19 nt, Artificial Sequence
  Description of Artificial Sequence: Synthetic oligonucleotide
  Sense strand starting at position 781 of SEQ ID NO: 1885190
uugaaagauuucuggaagg

SEQ ID NO: 2323133 - RNA, 19 nt, Artificial Sequence
  Description of Artificial Sequence: Synthetic oligonucleotide
  Antisense strand to SEQ ID NO: 2323132
ccuuccagaaaucuuucaa

SEQ ID NO: 2323134 - RNA, 19 nt, Artificial Sequence
  Description of Artificial Sequence: Synthetic oligonucleotide
  Sense strand starting at position 891 of SEQ ID NO: 1885190
uuucuuacgcccuaagacu

SEQ ID NO: 2323135 - RNA, 19 nt, Artificial Sequence
  Description of Artificial Sequence: Synthetic oligonucleotide
  Antisense strand to SEQ ID NO: 2323134
agucuuagggcguaagaaa

SEQ ID NO: 2323136 - RNA, 19 nt, Artificial Sequence
  Description of Artificial Sequence: Synthetic oligonucleotide
  Sense strand starting at position 904 of SEQ ID NO: 1885190
aagacuuuggugugaggaa

SEQ ID NO: 2323137 - RNA, 19 nt, Artificial Sequence
  Description of Artificial Sequence: Synthetic oligonucleotide
  Antisense strand to SEQ ID NO: 2323136
uuccucacaccaaagucuu

SEQ ID NO: 2323138 - RNA, 19 nt, Artificial Sequence
  Description of Artificial Sequence: Synthetic oligonucleotide
  Sense strand starting at position 913 of SEQ ID NO: 1885190
gugugaggaagccaauaau

SEQ ID NO: 2323139 - RNA, 19 nt, Artificial Sequence
  Description of Artificial Sequence: Synthetic oligonucleotide
  Antisense strand to SEQ ID NO: 2323138
auuauuggcuuccucacac

SEQ ID NO: 2323140 - RNA, 19 nt, Artificial Sequence
  Description of Artificial Sequence: Synthetic oligonucleotide
  Sense strand starting at position 942 of SEQ ID NO: 1885190
gcuauuucucuggguuagu

SEQ ID NO: 2323141 - RNA, 19 nt, Artificial Sequence
  Description of Artificial Sequence: Synthetic oligonucleotide
  Antisense strand to SEQ ID NO: 2323140
acuaacccagagaaauagc

SEQ ID NO: 2323142 - RNA, 19 nt, Artificial Sequence
  Description of Artificial Sequence: Synthetic oligonucleotide
  Sense strand starting at position 1285 of SEQ ID NO: 1885190
gugggaccacugcaaugau

SEQ ID NO: 2323143 - RNA, 19 nt, Artificial Sequence
  Description of Artificial Sequence: Synthetic oligonucleotide
  Antisense strand to SEQ ID NO: 2323142
aucauugcaguggucccac

SEQ ID NO: 2323144 - RNA, 19 nt, Artificial Sequence
  Description of Artificial Sequence: Synthetic oligonucleotide
  Sense strand starting at position 1288 of SEQ ID NO: 1885190
ggaccacugcaaugauuaa

SEQ ID NO: 2323145 - RNA, 19 nt, Artificial Sequence
  Description of Artificial Sequence: Synthetic oligonucleotide
  Antisense strand to SEQ ID NO: 2323144
uuaaucauugcaguggucc

SEQ ID NO: 2323146 - RNA, 19 nt, Artificial Sequence
  Description of Artificial Sequence: Synthetic oligonucleotide
  Sense strand starting at position 1316 of SEQ ID NO: 1885190
agaaucauguuuguaaaca

SEQ ID NO: 2323147 - RNA, 19 nt, Artificial Sequence
  Description of Artificial Sequence: Synthetic oligonucleotide
  Antisense strand to SEQ ID NO: 2323146
uguuuacaaacaugauucu

SEQ ID NO: 2323148 - RNA, 19 nt, Artificial Sequence
  Description of Artificial Sequence: Synthetic oligonucleotide
  Sense strand starting at position 1324 of SEQ ID NO: 1885190
guuuguaaacaugguauaa

SEQ ID NO: 2323149 - RNA, 19 nt, Artificial Sequence
  Description of Artificial Sequence: Synthetic oligonucleotide
  Antisense strand to SEQ ID NO: 2323148
uuauaccauguuuacaaac

SEQ ID NO: 2323150 - RNA, 19 nt, Artificial Sequence
  Description of Artificial Sequence: Synthetic oligonucleotide
  Sense strand starting at position 1344 of SEQ ID NO: 1885190
auagucaagucauuacaua

SEQ ID NO: 2323151 - RNA, 19 nt, Artificial Sequence
  Description of Artificial Sequence: Synthetic oligonucleotide
  Antisense strand to SEQ ID NO: 2323150
uauguaaugacuugacuau

SEQ ID NO: 2323152 - RNA, 19 nt, Artificial Sequence
  Description of Artificial Sequence: Synthetic oligonucleotide
  Sense strand starting at position 1767 of SEQ ID NO: 1885190
auguaaagugucuagcaua

SEQ ID NO: 2323153 - RNA, 19 nt, Artificial Sequence
  Description of Artificial Sequence: Synthetic oligonucleotide
  Antisense strand to SEQ ID NO: 2323152
uaugcuagacacuuuacau

SEQ ID NO: 2323154 - RNA, 19 nt, Artificial Sequence
  Description of Artificial Sequence: Synthetic oligonucleotide
  Sense strand starting at position 1884 of SEQ ID NO: 1885190
gccaucuaaccuugagaaa

SEQ ID NO: 2323155 - RNA, 19 nt, Artificial Sequence
  Description of Artificial Sequence: Synthetic oligonucleotide
  Antisense strand to SEQ ID NO: 2323154
uuucucaagguuagauggc

SEQ ID NO: 2323156 - RNA, 19 nt, Artificial Sequence
  Description of Artificial Sequence: Synthetic oligonucleotide
  Sense strand starting at position 1989 of SEQ ID NO: 1885190
gauuucuaauaaugggaag

SEQ ID NO: 2323157 - RNA, 19 nt, Artificial Sequence
  Description of Artificial Sequence: Synthetic oligonucleotide
  Antisense strand to SEQ ID NO: 2323156
cuucccauuauuagaaauc

SEQ ID NO: 2323158 - RNA, 19 nt, Artificial Sequence
  Description of Artificial Sequence: Synthetic oligonucleotide
  Sense strand starting at position 2063 of SEQ ID NO: 1885190
cuguuauacugagcuugaa

SEQ ID NO: 2323159 - RNA, 19 nt, Artificial Sequence
  Description of Artificial Sequence: Synthetic oligonucleotide
  Antisense strand to SEQ ID NO: 2323158
uucaagcucaguauaacag

SEQ ID NO: 2323160 - RNA, 19 nt, Artificial Sequence
  Description of Artificial Sequence: Synthetic oligonucleotide
  Sense strand starting at position 2066 of SEQ ID NO: 1885190
uuauacugagcuugaauua

SEQ ID NO: 2323161 - RNA, 19 nt, Artificial Sequence
  Description of Artificial Sequence: Synthetic oligonucleotide
  Antisense strand to SEQ ID NO: 2323160
uaauucaagcucaguauaa

SEQ ID NO: 2323162 - RNA, 19 nt, Artificial Sequence
  Description of Artificial Sequence: Synthetic oligonucleotide
  Sense strand starting at position 2077 of SEQ ID NO: 1885190
uugaauuauuccuccacga

SEQ ID NO: 2323163 - RNA, 19 nt, Artificial Sequence
  Description of Artificial Sequence: Synthetic oligonucleotide
  Antisense strand to SEQ ID NO: 2323162
ucguggaggaauaauucaa

SEQ ID NO: 2323164 - RNA, 19 nt, Artificial Sequence
  Description of Artificial Sequence: Synthetic oligonucleotide
  Sense strand starting at position 2155 of SEQ ID NO: 1885190
augauaacgccucaaauau

SEQ ID NO: 2323165 - RNA, 19 nt, Artificial Sequence
  Description of Artificial Sequence: Synthetic oligonucleotide
  Antisense strand to SEQ ID NO: 2323164
auauuugaggcguuaucau

SEQ ID NO: 2323166 - RNA, 19 nt, Artificial Sequence
  Description of Artificial Sequence: Synthetic oligonucleotide
  Sense strand starting at position 2212 of SEQ ID NO: 1885190
uaaagagugcccugaaaug

SEQ ID NO: 2323167 - RNA, 19 nt, Artificial Sequence
  Description of Artificial Sequence: Synthetic oligonucleotide
  Antisense strand to SEQ ID NO: 2323166
cauuucagggcacucuuua

SEQ ID NO: 2323168 - RNA, 19 nt, Artificial Sequence
  Description of Artificial Sequence: Synthetic oligonucleotide
  Sense strand starting at position 2385 of SEQ ID NO: 1885190
ggugaugcagcauaagacu

SEQ ID NO: 2323169 - RNA, 19 nt, Artificial Sequence
  Description of Artificial Sequence: Synthetic oligonucleotide
  Antisense strand to SEQ ID NO: 2323168
agucuuaugcugcaucacc

SEQ ID NO: 2323170 - RNA, 19 nt, Artificial Sequence
  Description of Artificial Sequence: Synthetic oligonucleotide
  Sense strand starting at position 2396 of SEQ ID NO: 1885190
auaagacucugcuugacuu

SEQ ID NO: 2323171 - RNA, 19 nt, Artificial Sequence
  Description of Artificial Sequence: Synthetic oligonucleotide
  Antisense strand to SEQ ID NO: 2323170
aagucaagcagagucuuau

SEQ ID NO: 2323172 - RNA, 19 nt, Artificial Sequence
  Description of Artificial Sequence: Synthetic oligonucleotide
  Sense strand starting at position 2630 of SEQ ID NO: 1885190
auucuugcacucuaggauu

SEQ ID NO: 2323173 - RNA, 19 nt, Artificial Sequence
  Description of Artificial Sequence: Synthetic oligonucleotide
  Antisense strand to SEQ ID NO: 2323172
aauccuagagugcaagaau

SEQ ID NO: 2323174 - RNA, 19 nt, Artificial Sequence
  Description of Artificial Sequence: Synthetic oligonucleotide
  Sense strand starting at position 2660 of SEQ ID NO: 1885190
uugaaugaguuaucagaca

SEQ ID NO: 2323175 - RNA, 19 nt, Artificial Sequence
  Description of Artificial Sequence: Synthetic oligonucleotide
  Antisense strand to SEQ ID NO: 2323174
ugucugauaacucauucaa

SEQ ID NO: 2323176 - RNA, 19 nt, Artificial Sequence
  Description of Artificial Sequence: Synthetic oligonucleotide
  Sense strand starting at position 2735 of SEQ ID NO: 1885190
acuuacuugucagugauua

SEQ ID NO: 2323177 - RNA, 19 nt, Artificial Sequence
  Description of Artificial Sequence: Synthetic oligonucleotide
  Antisense strand to SEQ ID NO: 2323176
uaaucacugacaaguaagu

SEQ ID NO: 2323178 - RNA, 19 nt, Artificial Sequence
  Description of Artificial Sequence: Synthetic oligonucleotide
  Sense strand starting at position 3074 of SEQ ID NO: 1885190
uuugaugugccauaagagu

SEQ ID NO: 2323179 - RNA, 19 nt, Artificial Sequence
  Description of Artificial Sequence: Synthetic oligonucleotide
  Antisense strand to SEQ ID NO: 2323178
acucuuauggcacaucaaa

SEQ ID NO: 2323180 - RNA, 19 nt, Artificial Sequence
  Description of Artificial Sequence: Synthetic oligonucleotide
  Sense strand starting at position 3083 of SEQ ID NO: 1885190
ccauaagaguauguucuca

SEQ ID NO: 2323181 - RNA, 19 nt, Artificial Sequence
  Description of Artificial Sequence: Synthetic oligonucleotide
  Antisense strand to SEQ ID NO: 2323180
ugagaacauacucuuaugg

SEQ ID NO: 2323182 - RNA, 19 nt, Artificial Sequence
  Description of Artificial Sequence: Synthetic oligonucleotide
  Sense strand starting at position 3085 of SEQ ID NO: 1885190
auaagaguauguucucaug

SEQ ID NO: 2323183 - RNA, 19 nt, Artificial Sequence
  Description of Artificial Sequence: Synthetic oligonucleotide
  Antisense strand to SEQ ID NO: 2323182
caugagaacauacucuuau

SEQ ID NO: 2323184 - RNA, 19 nt, Artificial Sequence
  Description of Artificial Sequence: Synthetic oligonucleotide
  Sense strand starting at position 3179 of SEQ ID NO: 1885190
ucacaucugcuguggaaag

SEQ ID NO: 2323185 - RNA, 19 nt, Artificial Sequence
  Description of Artificial Sequence: Synthetic oligonucleotide
  Antisense strand to SEQ ID NO: 2323184
cuuuccacagcagauguga

SEQ ID NO: 2323186 - RNA, 19 nt, Artificial Sequence
  Description of Artificial Sequence: Synthetic oligonucleotide
  Sense strand starting at position 3352 of SEQ ID NO: 1885190
aaauguuaugggugguuaa

SEQ ID NO: 2323187 - RNA, 19 nt, Artificial Sequence
  Description of Artificial Sequence: Synthetic oligonucleotide
  Antisense strand to SEQ ID NO: 2323186
uuaaccacccauaacauuu

SEQ ID NO: 2323188 - RNA, 19 nt, Artificial Sequence
  Description of Artificial Sequence: Synthetic oligonucleotide
  Sense strand starting at position 3353 of SEQ ID NO: 1885190
aauguuaugggugguuaaa

SEQ ID NO: 2323189 - RNA, 19 nt, Artificial Sequence
  Description of Artificial Sequence: Synthetic oligonucleotide
  Antisense strand to SEQ ID NO: 2323188
uuuaaccacccauaacauu

SEQ ID NO: 2323190 - RNA, 19 nt, Artificial Sequence
  Description of Artificial Sequence: Synthetic oligonucleotide
  Sense strand starting at position 3355 of SEQ ID NO: 1885190
uguuaugggugguuaaaua

SEQ ID NO: 2323191 - RNA, 19 nt, Artificial Sequence
  Description of Artificial Sequence: Synthetic oligonucleotide
  Antisense strand to SEQ ID NO: 2323190
uauuuaaccacccauaaca

SEQ ID NO: 2323192 - RNA, 19 nt, Artificial Sequence
  Description of Artificial Sequence: Synthetic oligonucleotide
  Sense strand starting at position 3556 of SEQ ID NO: 1885190
ugaacagcaugcuuugaaa

SEQ ID NO: 2323193 - RNA, 19 nt, Artificial Sequence
  Description of Artificial Sequence: Synthetic oligonucleotide
  Antisense strand to SEQ ID NO: 2323192
uuucaaagcaugcuguuca

SEQ ID NO: 2323194 - RNA, 19 nt, Artificial Sequence
  Description of Artificial Sequence: Synthetic oligonucleotide
  Sense strand starting at position 3725 of SEQ ID NO: 1885190
uuugcuauaucucugaaag

SEQ ID NO: 2323195 - RNA, 19 nt, Artificial Sequence
  Description of Artificial Sequence: Synthetic oligonucleotide
  Antisense strand to SEQ ID NO: 2323194
cuuucagagauauagcaaa

SEQ ID NO: 2323196 - RNA, 19 nt, Artificial Sequence
  Description of Artificial Sequence: Synthetic oligonucleotide
  Sense strand starting at position 3726 of SEQ ID NO: 1885190
uugcuauaucucugaaaga

SEQ ID NO: 2323197 - RNA, 19 nt, Artificial Sequence
  Description of Artificial Sequence: Synthetic oligonucleotide
  Antisense strand to SEQ ID NO: 2323196
ucuuucagagauauagcaa

SEQ ID NO: 2323198 - RNA, 19 nt, Artificial Sequence
  Description of Artificial Sequence: Synthetic oligonucleotide
  Sense strand starting at position 3824 of SEQ ID NO: 1885190
acauacugcuacuuggaaa

SEQ ID NO: 2323199 - RNA, 19 nt, Artificial Sequence
  Description of Artificial Sequence: Synthetic oligonucleotide
  Antisense strand to SEQ ID NO: 2323198
uuuccaaguagcaguaugu

SEQ ID NO: 2323200 - RNA, 19 nt, Artificial Sequence
  Description of Artificial Sequence: Synthetic oligonucleotide
  Sense strand starting at position 3879 of SEQ ID NO: 1885190
uuuauuaaacugcagguau

SEQ ID NO: 2323201 - RNA, 19 nt, Artificial Sequence
  Description of Artificial Sequence: Synthetic oligonucleotide
  Antisense strand to SEQ ID NO: 2323200
auaccugcaguuuaauaaa

SEQ ID NO: 2323202 - RNA, 19 nt, Artificial Sequence
  Description of Artificial Sequence: Synthetic oligonucleotide
  Sense strand starting at position 3927 of SEQ ID NO: 1885190
cuuauaauccuaugaggua

SEQ ID NO: 2323203 - RNA, 19 nt, Artificial Sequence
  Description of Artificial Sequence: Synthetic oligonucleotide
  Antisense strand to SEQ ID NO: 2323202
uaccucauaggauuauaag

SEQ ID NO: 2323204 - RNA, 19 nt, Artificial Sequence
  Description of Artificial Sequence: Synthetic oligonucleotide
  Sense strand starting at position 6 of SEQ ID NO: 1885191
gcaucuguauauuucugau

SEQ ID NO: 2323205 - RNA, 19 nt, Artificial Sequence
  Description of Artificial Sequence: Synthetic oligonucleotide
  Antisense strand to SEQ ID NO: 2323204
aucagaaauauacagaugc

SEQ ID NO: 2323206 - RNA, 19 nt, Artificial Sequence
  Description of Artificial Sequence: Synthetic oligonucleotide
  Sense strand starting at position 92 of SEQ ID NO: 1885191
aguacuaguacguaaauua

SEQ ID NO: 2323207 - RNA, 19 nt, Artificial Sequence
  Description of Artificial Sequence: Synthetic oligonucleotide
  Antisense strand to SEQ ID NO: 2323206
uaauuuacguacuaguacu

SEQ ID NO: 2323208 - RNA, 19 nt, Artificial Sequence
  Description of Artificial Sequence: Synthetic oligonucleotide
  Sense strand starting at position 178 of SEQ ID NO: 1885191
cuuguuaaacuguguauuu

SEQ ID NO: 2323209 - RNA, 19 nt, Artificial Sequence
  Description of Artificial Sequence: Synthetic oligonucleotide
  Antisense strand to SEQ ID NO: 2323208
aaauacacaguuuaacaag

SEQ ID NO: 2323210 - RNA, 19 nt, Artificial Sequence
  Description of Artificial Sequence: Synthetic oligonucleotide
  Sense strand starting at position 290 of SEQ ID NO: 1885191
auaugugauguaggaauca

SEQ ID NO: 2323211 - RNA, 19 nt, Artificial Sequence
  Description of Artificial Sequence: Synthetic oligonucleotide
  Antisense strand to SEQ ID NO: 2323210
ugauuccuacaucacauau

SEQ ID NO: 2323212 - RNA, 19 nt, Artificial Sequence
  Description of Artificial Sequence: Synthetic oligonucleotide
  Sense strand starting at position 605 of SEQ ID NO: 1885191
guuaaauuaaggugguaaa

SEQ ID NO: 2323213 - RNA, 19 nt, Artificial Sequence
  Description of Artificial Sequence: Synthetic oligonucleotide
  Antisense strand to SEQ ID NO: 2323212
uuuaccaccuuaauuuaac

SEQ ID NO: 2323214 - RNA, 19 nt, Artificial Sequence
  Description of Artificial Sequence: Synthetic oligonucleotide
  Sense strand starting at position 834 of SEQ ID NO: 1885191
gugucugaacucuaaaccu

SEQ ID NO: 2323215 - RNA, 19 nt, Artificial Sequence
  Description of Artificial Sequence: Synthetic oligonucleotide
  Antisense strand to SEQ ID NO: 2323214
agguuuagaguucagacac

SEQ ID NO: 2323216 - RNA, 19 nt, Artificial Sequence
  Description of Artificial Sequence: Synthetic oligonucleotide
  Sense strand starting at position 1024 of SEQ ID NO: 1885191
ugugguaccuuauuuggua

SEQ ID NO: 2323217 - RNA, 19 nt, Artificial Sequence
  Description of Artificial Sequence: Synthetic oligonucleotide
  Antisense strand to SEQ ID NO: 2323216
uaccaaauaagguaccaca

SEQ ID NO: 2323218 - RNA, 19 nt, Artificial Sequence
  Description of Artificial Sequence: Synthetic oligonucleotide
  Sense strand starting at position 1067 of SEQ ID NO: 1885191
gggcaaauuugauaacauu

SEQ ID NO: 2323219 - RNA, 19 nt, Artificial Sequence
  Description of Artificial Sequence: Synthetic oligonucleotide
  Antisense strand to SEQ ID NO: 2323218
aauguuaucaaauuugccc

SEQ ID NO: 2323220 - RNA, 19 nt, Artificial Sequence
  Description of Artificial Sequence: Synthetic oligonucleotide
  Sense strand starting at position 1517 of SEQ ID NO: 1885191
ggcauugauccucaguuua

SEQ ID NO: 2323221 - RNA, 19 nt, Artificial Sequence
  Description of Artificial Sequence: Synthetic oligonucleotide
  Antisense strand to SEQ ID NO: 2323220
uaaacugaggaucaaugcc

SEQ ID NO: 2323222 - RNA, 19 nt, Artificial Sequence
  Description of Artificial Sequence: Synthetic oligonucleotide
  Sense strand starting at position 1772 of SEQ ID NO: 1885191
uauagauacugaguaguag

SEQ ID NO: 2323223 - RNA, 19 nt, Artificial Sequence
  Description of Artificial Sequence: Synthetic oligonucleotide
  Antisense strand to SEQ ID NO: 2323222
cuacuacucaguaucuaua

SEQ ID NO: 2323224 - RNA, 19 nt, Artificial Sequence
  Description of Artificial Sequence: Synthetic oligonucleotide
  Sense strand starting at position 1773 of SEQ ID NO: 1885191
auagauacugaguaguagu

SEQ ID NO: 2323225 - RNA, 19 nt, Artificial Sequence
  Description of Artificial Sequence: Synthetic oligonucleotide
  Antisense strand to SEQ ID NO: 2323224
acuacuacucaguaucuau

SEQ ID NO: 2323226 - RNA, 19 nt, Artificial Sequence
  Description of Artificial Sequence: Synthetic oligonucleotide
  Sense strand starting at position 1789 of SEQ ID NO: 1885191
aguaauuggccucauucca

SEQ ID NO: 2323227 - RNA, 19 nt, Artificial Sequence
  Description of Artificial Sequence: Synthetic oligonucleotide
  Antisense strand to SEQ ID NO: 2323226
uggaaugaggccaauuacu

SEQ ID NO: 2323228 - RNA, 19 nt, Artificial Sequence
  Description of Artificial Sequence: Synthetic oligonucleotide
  Sense strand starting at position 1990 of SEQ ID NO: 1885191
ggaggaagucagcaugagu

SEQ ID NO: 2323229 - RNA, 19 nt, Artificial Sequence
  Description of Artificial Sequence: Synthetic oligonucleotide
  Antisense strand to SEQ ID NO: 2323228
acucaugcugacuuccucc

SEQ ID NO: 2323230 - RNA, 19 nt, Artificial Sequence
  Description of Artificial Sequence: Synthetic oligonucleotide
  Sense strand starting at position 2023 of SEQ ID NO: 1885191
ggaggagucacaggauucu

SEQ ID NO: 2323231 - RNA, 19 nt, Artificial Sequence
  Description of Artificial Sequence: Synthetic oligonucleotide
  Antisense strand to SEQ ID NO: 2323230
agaauccugugacuccucc

SEQ ID NO: 2323232 - RNA, 19 nt, Artificial Sequence
  Description of Artificial Sequence: Synthetic oligonucleotide
  Sense strand starting at position 2106 of SEQ ID NO: 1885191
agaggcaagcuuuacucaa

SEQ ID NO: 2323233 - RNA, 19 nt, Artificial Sequence
  Description of Artificial Sequence: Synthetic oligonucleotide
  Antisense strand to SEQ ID NO: 2323232
uugaguaaagcuugccucu

SEQ ID NO: 2323234 - RNA, 19 nt, Artificial Sequence
  Description of Artificial Sequence: Synthetic oligonucleotide
  Sense strand starting at position 2128 of SEQ ID NO: 1885191
ccagauuuauuaggacaga

SEQ ID NO: 2323235 - RNA, 19 nt, Artificial Sequence
  Description of Artificial Sequence: Synthetic oligonucleotide
  Antisense strand to SEQ ID NO: 2323234
ucuguccuaauaaaucugg

SEQ ID NO: 2323236 - RNA, 19 nt, Artificial Sequence
  Description of Artificial Sequence: Synthetic oligonucleotide
  Sense strand starting at position 2162 of SEQ ID NO: 1885191
cuugguaaucauugacuga

SEQ ID NO: 2323237 - RNA, 19 nt, Artificial Sequence
  Description of Artificial Sequence: Synthetic oligonucleotide
  Antisense strand to SEQ ID NO: 2323236
ucagucaaugauuaccaag

SEQ ID NO: 2323238 - RNA, 19 nt, Artificial Sequence
  Description of Artificial Sequence: Synthetic oligonucleotide
  Sense strand starting at position 2165 of SEQ ID NO: 1885191
gguaaucauugacugacuu

SEQ ID NO: 2323239 - RNA, 19 nt, Artificial Sequence
  Description of Artificial Sequence: Synthetic oligonucleotide
  Antisense strand to SEQ ID NO: 2323238
aagucagucaaugauuacc

SEQ ID NO: 2323240 - RNA, 19 nt, Artificial Sequence
  Description of Artificial Sequence: Synthetic oligonucleotide
  Sense strand starting at position 2166 of SEQ ID NO: 1885191
guaaucauugacugacuuu

SEQ ID NO: 2323241 - RNA, 19 nt, Artificial Sequence
  Description of Artificial Sequence: Synthetic oligonucleotide
  Antisense strand to SEQ ID NO: 2323240
aaagucagucaaugauuac

SEQ ID NO: 2323242 - RNA, 19 nt, Artificial Sequence
  Description of Artificial Sequence: Synthetic oligonucleotide
  Sense strand starting at position 2173 of SEQ ID NO: 1885191
uugacugacuuucugaauu

SEQ ID NO: 2323243 - RNA, 19 nt, Artificial Sequence
  Description of Artificial Sequence: Synthetic oligonucleotide
  Antisense strand to SEQ ID NO: 2323242
aauucagaaagucagucaa

SEQ ID NO: 2323244 - RNA, 19 nt, Artificial Sequence
  Description of Artificial Sequence: Synthetic oligonucleotide
  Sense strand starting at position 2215 of SEQ ID NO: 1885191
ccugacaauucccuggaau

SEQ ID NO: 2323245 - RNA, 19 nt, Artificial Sequence
  Description of Artificial Sequence: Synthetic oligonucleotide
  Antisense strand to SEQ ID NO: 2323244
auuccagggaauugucagg

SEQ ID NO: 2323246 - RNA, 19 nt, Artificial Sequence
  Description of Artificial Sequence: Synthetic oligonucleotide
  Sense strand starting at position 2216 of SEQ ID NO: 1885191
cugacaauucccuggaaug

SEQ ID NO: 2323247 - RNA, 19 nt, Artificial Sequence
  Description of Artificial Sequence: Synthetic oligonucleotide
  Antisense strand to SEQ ID NO: 2323246
cauuccagggaauugucag

SEQ ID NO: 2323248 - RNA, 19 nt, Artificial Sequence
  Description of Artificial Sequence: Synthetic oligonucleotide
  Sense strand starting at position 2335 of SEQ ID NO: 1885191
acuguuuagcugucuuguu

SEQ ID NO: 2323249 - RNA, 19 nt, Artificial Sequence
  Description of Artificial Sequence: Synthetic oligonucleotide
  Antisense strand to SEQ ID NO: 2323248
aacaagacagcuaaacagu

SEQ ID NO: 2323250 - RNA, 19 nt, Artificial Sequence
  Description of Artificial Sequence: Synthetic oligonucleotide
  Sense strand starting at position 2456 of SEQ ID NO: 1885191
cucagauagugguuuaaag

SEQ ID NO: 2323251 - RNA, 19 nt, Artificial Sequence
  Description of Artificial Sequence: Synthetic oligonucleotide
  Antisense strand to SEQ ID NO: 2323250
cuuuaaaccacuaucugag

SEQ ID NO: 2323252 - RNA, 19 nt, Artificial Sequence
  Description of Artificial Sequence: Synthetic oligonucleotide
  Sense strand starting at position 2458 of SEQ ID NO: 1885191
cagauagugguuuaaagua

SEQ ID NO: 2323253 - RNA, 19 nt, Artificial Sequence
  Description of Artificial Sequence: Synthetic oligonucleotide
  Antisense strand to SEQ ID NO: 2323252
uacuuuaaaccacuaucug

SEQ ID NO: 2323254 - RNA, 19 nt, Artificial Sequence
  Description of Artificial Sequence: Synthetic oligonucleotide
  Sense strand starting at position 2467 of SEQ ID NO: 1885191
guuuaaaguaaauggagua

SEQ ID NO: 2323255 - RNA, 19 nt, Artificial Sequence
  Description of Artificial Sequence: Synthetic oligonucleotide
  Antisense strand to SEQ ID NO: 2323254
uacuccauuuacuuuaaac

SEQ ID NO: 2323256 - RNA, 19 nt, Artificial Sequence
  Description of Artificial Sequence: Synthetic oligonucleotide
  Sense strand starting at position 2640 of SEQ ID NO: 1885191
auaggcuuguaauugggaa

SEQ ID NO: 2323257 - RNA, 19 nt, Artificial Sequence
  Description of Artificial Sequence: Synthetic oligonucleotide
  Antisense strand to SEQ ID NO: 2323256
uucccaauuacaagccuau

SEQ ID NO: 2323258 - RNA, 19 nt, Artificial Sequence
  Description of Artificial Sequence: Synthetic oligonucleotide
  Sense strand starting at position 2642 of SEQ ID NO: 1885191
aggcuuguaauugggaaua

SEQ ID NO: 2323259 - RNA, 19 nt, Artificial Sequence
  Description of Artificial Sequence: Synthetic oligonucleotide
  Antisense strand to SEQ ID NO: 2323258
uauucccaauuacaagccu

SEQ ID NO: 2323260 - RNA, 19 nt, Artificial Sequence
  Description of Artificial Sequence: Synthetic oligonucleotide
  Sense strand starting at position 2728 of SEQ ID NO: 1885191
agaugcaugcuagauaaau

SEQ ID NO: 2323261 - RNA, 19 nt, Artificial Sequence
  Description of Artificial Sequence: Synthetic oligonucleotide
  Antisense strand to SEQ ID NO: 2323260
auuuaucuagcaugcaucu

SEQ ID NO: 2323262 - RNA, 19 nt, Artificial Sequence
  Description of Artificial Sequence: Synthetic oligonucleotide
  Sense strand starting at position 2841 of SEQ ID NO: 1885191
acuuccuggcaguaguaaa

SEQ ID NO: 2323263 - RNA, 19 nt, Artificial Sequence
  Description of Artificial Sequence: Synthetic oligonucleotide
  Antisense strand to SEQ ID NO: 2323262
uuuacuacugccaggaagu

SEQ ID NO: 2323264 - RNA, 19 nt, Artificial Sequence
  Description of Artificial Sequence: Synthetic oligonucleotide
  Sense strand starting at position 2932 of SEQ ID NO: 1885191
auaccauugugauuagaau

SEQ ID NO: 2323265 - RNA, 19 nt, Artificial Sequence
  Description of Artificial Sequence: Synthetic oligonucleotide
  Antisense strand to SEQ ID NO: 2323264
auucuaaucacaaugguau

SEQ ID NO: 2323266 - RNA, 19 nt, Artificial Sequence
  Description of Artificial Sequence: Synthetic oligonucleotide
  Sense strand starting at position 2938 of SEQ ID NO: 1885191
uugugauuagaauaccugu

SEQ ID NO: 2323267 - RNA, 19 nt, Artificial Sequence
  Description of Artificial Sequence: Synthetic oligonucleotide
  Antisense strand to SEQ ID NO: 2323266
acagguauucuaaucacaa

SEQ ID NO: 2323268 - RNA, 19 nt, Artificial Sequence
  Description of Artificial Sequence: Synthetic oligonucleotide
  Sense strand starting at position 2978 of SEQ ID NO: 1885191
augguaucugcucaaauca

SEQ ID NO: 2323269 - RNA, 19 nt, Artificial Sequence
  Description of Artificial Sequence: Synthetic oligonucleotide
  Antisense strand to SEQ ID NO: 2323268
ugauuugagcagauaccau

SEQ ID NO: 2323270 - RNA, 19 nt, Artificial Sequence
  Description of Artificial Sequence: Synthetic oligonucleotide
  Sense strand starting at position 3107 of SEQ ID NO: 1885191
ugagaugugcuacaguaua

SEQ ID NO: 2323271 - RNA, 19 nt, Artificial Sequence
  Description of Artificial Sequence: Synthetic oligonucleotide
  Antisense strand to SEQ ID NO: 2323270
uauacuguagcacaucuca

SEQ ID NO: 2323272 - RNA, 19 nt, Artificial Sequence
  Description of Artificial Sequence: Synthetic oligonucleotide
  Sense strand starting at position 3165 of SEQ ID NO: 1885191
agugaaaugucaucaauaa

SEQ ID NO: 2323273 - RNA, 19 nt, Artificial Sequence
  Description of Artificial Sequence: Synthetic oligonucleotide
  Antisense strand to SEQ ID NO: 2323272
uuauugaugacauuucacu

SEQ ID NO: 2323274 - RNA, 19 nt, Artificial Sequence
  Description of Artificial Sequence: Synthetic oligonucleotide
  Sense strand starting at position 3280 of SEQ ID NO: 1885191
acucaugugguuuacauua

SEQ ID NO: 2323275 - RNA, 19 nt, Artificial Sequence
  Description of Artificial Sequence: Synthetic oligonucleotide
  Antisense strand to SEQ ID NO: 2323274
uaauguaaaccacaugagu

SEQ ID NO: 2323276 - RNA, 19 nt, Artificial Sequence
  Description of Artificial Sequence: Synthetic oligonucleotide
  Sense strand starting at position 3516 of SEQ ID NO: 1885191
guuguaagaucaccuugag

SEQ ID NO: 2323277 - RNA, 19 nt, Artificial Sequence
  Description of Artificial Sequence: Synthetic oligonucleotide
  Antisense strand to SEQ ID NO: 2323276
cucaaggugaucuuacaac

SEQ ID NO: 2323278 - RNA, 19 nt, Artificial Sequence
  Description of Artificial Sequence: Synthetic oligonucleotide
  Sense strand starting at position 3519 of SEQ ID NO: 1885191
guaagaucaccuugaguua

SEQ ID NO: 2323279 - RNA, 19 nt, Artificial Sequence
  Description of Artificial Sequence: Synthetic oligonucleotide
  Antisense strand to SEQ ID NO: 2323278
uaacucaaggugaucuuac

SEQ ID NO: 2323280 - RNA, 19 nt, Artificial Sequence
  Description of Artificial Sequence: Synthetic oligonucleotide
  Sense strand starting at position 3522 of SEQ ID NO: 1885191
agaucaccuugaguuaucu

SEQ ID NO: 2323281 - RNA, 19 nt, Artificial Sequence
  Description of Artificial Sequence: Synthetic oligonucleotide
  Antisense strand to SEQ ID NO: 2323280
agauaacucaaggugaucu

SEQ ID NO: 2323282 - RNA, 19 nt, Artificial Sequence
  Description of Artificial Sequence: Synthetic oligonucleotide
  Sense strand starting at position 3559 of SEQ ID NO: 1885191
ugguucuugacauaaagug

SEQ ID NO: 2323283 - RNA, 19 nt, Artificial Sequence
  Description of Artificial Sequence: Synthetic oligonucleotide
  Antisense strand to SEQ ID NO: 2323282
cacuuuaugucaagaacca

SEQ ID NO: 2323284 - RNA, 19 nt, Artificial Sequence
  Description of Artificial Sequence: Synthetic oligonucleotide
  Sense strand starting at position 63 of SEQ ID NO: 1885192
gagggauugcuugaggcua

SEQ ID NO: 2323285 - RNA, 19 nt, Artificial Sequence
  Description of Artificial Sequence: Synthetic oligonucleotide
  Antisense strand to SEQ ID NO: 2323284
uagccucaagcaaucccuc

SEQ ID NO: 2323286 - RNA, 19 nt, Artificial Sequence
  Description of Artificial Sequence: Synthetic oligonucleotide
  Sense strand starting at position 234 of SEQ ID NO: 1885192
ugaacugugaucgaaucac

SEQ ID NO: 2323287 - RNA, 19 nt, Artificial Sequence
  Description of Artificial Sequence: Synthetic oligonucleotide
  Antisense strand to SEQ ID NO: 2323286
gugauucgaucacaguuca

SEQ ID NO: 2323288 - RNA, 19 nt, Artificial Sequence
  Description of Artificial Sequence: Synthetic oligonucleotide
  Sense strand starting at position 421 of SEQ ID NO: 1885192
cuguuaacuguagaaauua

SEQ ID NO: 2323289 - RNA, 19 nt, Artificial Sequence
  Description of Artificial Sequence: Synthetic oligonucleotide
  Antisense strand to SEQ ID NO: 2323288
uaauuucuacaguuaacag

SEQ ID NO: 2323290 - RNA, 19 nt, Artificial Sequence
  Description of Artificial Sequence: Synthetic oligonucleotide
  Sense strand starting at position 497 of SEQ ID NO: 1885192
gugugaagugaugauaggu

SEQ ID NO: 2323291 - RNA, 19 nt, Artificial Sequence
  Description of Artificial Sequence: Synthetic oligonucleotide
  Antisense strand to SEQ ID NO: 2323290
accuaucaucacuucacac

SEQ ID NO: 2323292 - RNA, 19 nt, Artificial Sequence
  Description of Artificial Sequence: Synthetic oligonucleotide
  Sense strand starting at position 591 of SEQ ID NO: 1885192
gcaucuguauauuucugau

SEQ ID NO: 2323293 - RNA, 19 nt, Artificial Sequence
  Description of Artificial Sequence: Synthetic oligonucleotide
  Antisense strand to SEQ ID NO: 2323292
aucagaaauauacagaugc

SEQ ID NO: 2323294 - RNA, 19 nt, Artificial Sequence
  Description of Artificial Sequence: Synthetic oligonucleotide
  Sense strand starting at position 677 of SEQ ID NO: 1885192
aguacuaguacguaaauua

SEQ ID NO: 2323295 - RNA, 19 nt, Artificial Sequence
  Description of Artificial Sequence: Synthetic oligonucleotide
  Antisense strand to SEQ ID NO: 2323294
uaauuuacguacuaguacu

SEQ ID NO: 2323296 - RNA, 19 nt, Artificial Sequence
  Description of Artificial Sequence: Synthetic oligonucleotide
  Sense strand starting at position 763 of SEQ ID NO: 1885192
cuuguuaaacuguguauuu

SEQ ID NO: 2323297 - RNA, 19 nt, Artificial Sequence
  Description of Artificial Sequence: Synthetic oligonucleotide
  Antisense strand to SEQ ID NO: 2323296
aaauacacaguuuaacaag

SEQ ID NO: 2323298 - RNA, 19 nt, Artificial Sequence
  Description of Artificial Sequence: Synthetic oligonucleotide
  Sense strand starting at position 875 of SEQ ID NO: 1885192
auaugugauguaggaauca

SEQ ID NO: 2323299 - RNA, 19 nt, Artificial Sequence
  Description of Artificial Sequence: Synthetic oligonucleotide
  Antisense strand to SEQ ID NO: 2323298
ugauuccuacaucacauau

SEQ ID NO: 2323300 - RNA, 19 nt, Artificial Sequence
  Description of Artificial Sequence: Synthetic oligonucleotide
  Sense strand starting at position 1190 of SEQ ID NO: 1885192
guuaaauuaaggugguaaa

SEQ ID NO: 2323301 - RNA, 19 nt, Artificial Sequence
  Description of Artificial Sequence: Synthetic oligonucleotide
  Antisense strand to SEQ ID NO: 2323300
uuuaccaccuuaauuuaac

SEQ ID NO: 2323302 - RNA, 19 nt, Artificial Sequence
  Description of Artificial Sequence: Synthetic oligonucleotide
  Sense strand starting at position 1419 of SEQ ID NO: 1885192
gugucugaacucuaaaccu

SEQ ID NO: 2323303 - RNA, 19 nt, Artificial Sequence
  Description of Artificial Sequence: Synthetic oligonucleotide
  Antisense strand to SEQ ID NO: 2323302
agguuuagaguucagacac

SEQ ID NO: 2323304 - RNA, 19 nt, Artificial Sequence
  Description of Artificial Sequence: Synthetic oligonucleotide
  Sense strand starting at position 1609 of SEQ ID NO: 1885192
ugugguaccuuauuuggua

SEQ ID NO: 2323305 - RNA, 19 nt, Artificial Sequence
  Description of Artificial Sequence: Synthetic oligonucleotide
  Antisense strand to SEQ ID NO: 2323304
uaccaaauaagguaccaca

SEQ ID NO: 2323306 - RNA, 19 nt, Artificial Sequence
  Description of Artificial Sequence: Synthetic oligonucleotide
  Sense strand starting at position 1652 of SEQ ID NO: 1885192
gggcaaauuugauaacauu

SEQ ID NO: 2323307 - RNA, 19 nt, Artificial Sequence
  Description of Artificial Sequence: Synthetic oligonucleotide
  Antisense strand to SEQ ID NO: 2323306
aauguuaucaaauuugccc

SEQ ID NO: 2323308 - RNA, 19 nt, Artificial Sequence
  Description of Artificial Sequence: Synthetic oligonucleotide
  Sense strand starting at position 2102 of SEQ ID NO: 1885192
ggcauugauccucaguuua

SEQ ID NO: 2323309 - RNA, 19 nt, Artificial Sequence
  Description of Artificial Sequence: Synthetic oligonucleotide
  Antisense strand to SEQ ID NO: 2323308
uaaacugaggaucaaugcc

SEQ ID NO: 2323310 - RNA, 19 nt, Artificial Sequence
  Description of Artificial Sequence: Synthetic oligonucleotide
  Sense strand starting at position 2357 of SEQ ID NO: 1885192
uauagauacugaguaguag

SEQ ID NO: 2323311 - RNA, 19 nt, Artificial Sequence
  Description of Artificial Sequence: Synthetic oligonucleotide
  Antisense strand to SEQ ID NO: 2323310
cuacuacucaguaucuaua

SEQ ID NO: 2323312 - RNA, 19 nt, Artificial Sequence
  Description of Artificial Sequence: Synthetic oligonucleotide
  Sense strand starting at position 2358 of SEQ ID NO: 1885192
auagauacugaguaguagu

SEQ ID NO: 2323313 - RNA, 19 nt, Artificial Sequence
  Description of Artificial Sequence: Synthetic oligonucleotide
  Antisense strand to SEQ ID NO: 2323312
acuacuacucaguaucuau

SEQ ID NO: 2323314 - RNA, 19 nt, Artificial Sequence
  Description of Artificial Sequence: Synthetic oligonucleotide
  Sense strand starting at position 2374 of SEQ ID NO: 1885192
aguaauuggccucauucca

SEQ ID NO: 2323315 - RNA, 19 nt, Artificial Sequence
  Description of Artificial Sequence: Synthetic oligonucleotide
  Antisense strand to SEQ ID NO: 2323314
uggaaugaggccaauuacu

SEQ ID NO: 2323316 - RNA, 19 nt, Artificial Sequence
  Description of Artificial Sequence: Synthetic oligonucleotide
  Sense strand starting at position 2575 of SEQ ID NO: 1885192
ggaggaagucagcaugagu

SEQ ID NO: 2323317 - RNA, 19 nt, Artificial Sequence
  Description of Artificial Sequence: Synthetic oligonucleotide
  Antisense strand to SEQ ID NO: 2323316
acucaugcugacuuccucc

SEQ ID NO: 2323318 - RNA, 19 nt, Artificial Sequence
  Description of Artificial Sequence: Synthetic oligonucleotide
  Sense strand starting at position 2608 of SEQ ID NO: 1885192
ggaggagucacaggauucu

SEQ ID NO: 2323319 - RNA, 19 nt, Artificial Sequence
  Description of Artificial Sequence: Synthetic oligonucleotide
  Antisense strand to SEQ ID NO: 2323318
agaauccugugacuccucc

SEQ ID NO: 2323320 - RNA, 19 nt, Artificial Sequence
  Description of Artificial Sequence: Synthetic oligonucleotide
  Sense strand starting at position 2691 of SEQ ID NO: 1885192
agaggcaagcuuuacucaa

SEQ ID NO: 2323321 - RNA, 19 nt, Artificial Sequence
  Description of Artificial Sequence: Synthetic oligonucleotide
  Antisense strand to SEQ ID NO: 2323320
uugaguaaagcuugccucu

SEQ ID NO: 2323322 - RNA, 19 nt, Artificial Sequence
  Description of Artificial Sequence: Synthetic oligonucleotide
  Sense strand starting at position 2713 of SEQ ID NO: 1885192
ccagauuuauuaggacaga

SEQ ID NO: 2323323 - RNA, 19 nt, Artificial Sequence
  Description of Artificial Sequence: Synthetic oligonucleotide
  Antisense strand to SEQ ID NO: 2323322
ucuguccuaauaaaucugg

SEQ ID NO: 2323324 - RNA, 19 nt, Artificial Sequence
  Description of Artificial Sequence: Synthetic oligonucleotide
  Sense strand starting at position 2747 of SEQ ID NO: 1885192
cuugguaaucauugacuga

SEQ ID NO: 2323325 - RNA, 19 nt, Artificial Sequence
  Description of Artificial Sequence: Synthetic oligonucleotide
  Antisense strand to SEQ ID NO: 2323324
ucagucaaugauuaccaag

SEQ ID NO: 2323326 - RNA, 19 nt, Artificial Sequence
  Description of Artificial Sequence: Synthetic oligonucleotide
  Sense strand starting at position 2750 of SEQ ID NO: 1885192
gguaaucauugacugacuu

SEQ ID NO: 2323327 - RNA, 19 nt, Artificial Sequence
  Description of Artificial Sequence: Synthetic oligonucleotide
  Antisense strand to SEQ ID NO: 2323326
aagucagucaaugauuacc

SEQ ID NO: 2323328 - RNA, 19 nt, Artificial Sequence
  Description of Artificial Sequence: Synthetic oligonucleotide
  Sense strand starting at position 2751 of SEQ ID NO: 1885192
guaaucauugacugacuuu

SEQ ID NO: 2323329 - RNA, 19 nt, Artificial Sequence
  Description of Artificial Sequence: Synthetic oligonucleotide
  Antisense strand to SEQ ID NO: 2323328
aaagucagucaaugauuac

SEQ ID NO: 2323330 - RNA, 19 nt, Artificial Sequence
  Description of Artificial Sequence: Synthetic oligonucleotide
  Sense strand starting at position 2758 of SEQ ID NO: 1885192
uugacugacuuucugaauu

SEQ ID NO: 2323331 - RNA, 19 nt, Artificial Sequence
  Description of Artificial Sequence: Synthetic oligonucleotide
  Antisense strand to SEQ ID NO: 2323330
aauucagaaagucagucaa

SEQ ID NO: 2323332 - RNA, 19 nt, Artificial Sequence
  Description of Artificial Sequence: Synthetic oligonucleotide
  Sense strand starting at position 2800 of SEQ ID NO: 1885192
ccugacaauucccuggaau

SEQ ID NO: 2323333 - RNA, 19 nt, Artificial Sequence
  Description of Artificial Sequence: Synthetic oligonucleotide
  Antisense strand to SEQ ID NO: 2323332
auuccagggaauugucagg

SEQ ID NO: 2323334 - RNA, 19 nt, Artificial Sequence
  Description of Artificial Sequence: Synthetic oligonucleotide
  Sense strand starting at position 2801 of SEQ ID NO: 1885192
cugacaauucccuggaaug

SEQ ID NO: 2323335 - RNA, 19 nt, Artificial Sequence
  Description of Artificial Sequence: Synthetic oligonucleotide
  Antisense strand to SEQ ID NO: 2323334
cauuccagggaauugucag

SEQ ID NO: 2323336 - RNA, 19 nt, Artificial Sequence
  Description of Artificial Sequence: Synthetic oligonucleotide
  Sense strand starting at position 2920 of SEQ ID NO: 1885192
acuguuuagcugucuuguu

SEQ ID NO: 2323337 - RNA, 19 nt, Artificial Sequence
  Description of Artificial Sequence: Synthetic oligonucleotide
  Antisense strand to SEQ ID NO: 2323336
aacaagacagcuaaacagu

SEQ ID NO: 2323338 - RNA, 19 nt, Artificial Sequence
  Description of Artificial Sequence: Synthetic oligonucleotide
  Sense strand starting at position 3041 of SEQ ID NO: 1885192
cucagauagugguuuaaag

SEQ ID NO: 2323339 - RNA, 19 nt, Artificial Sequence
  Description of Artificial Sequence: Synthetic oligonucleotide
  Antisense strand to SEQ ID NO: 2323338
cuuuaaaccacuaucugag

SEQ ID NO: 2323340 - RNA, 19 nt, Artificial Sequence
  Description of Artificial Sequence: Synthetic oligonucleotide
  Sense strand starting at position 3043 of SEQ ID NO: 1885192
cagauagugguuuaaagua

SEQ ID NO: 2323341 - RNA, 19 nt, Artificial Sequence
  Description of Artificial Sequence: Synthetic oligonucleotide
  Antisense strand to SEQ ID NO: 2323340
uacuuuaaaccacuaucug

SEQ ID NO: 2323342 - RNA, 19 nt, Artificial Sequence
  Description of Artificial Sequence: Synthetic oligonucleotide
  Sense strand starting at position 3052 of SEQ ID NO: 1885192
guuuaaaguaaauggagua

SEQ ID NO: 2323343 - RNA, 19 nt, Artificial Sequence
  Description of Artificial Sequence: Synthetic oligonucleotide
  Antisense strand to SEQ ID NO: 2323342
uacuccauuuacuuuaaac

SEQ ID NO: 2323344 - RNA, 19 nt, Artificial Sequence
  Description of Artificial Sequence: Synthetic oligonucleotide
  Sense strand starting at position 3225 of SEQ ID NO: 1885192
auaggcuuguaauugggaa

SEQ ID NO: 2323345 - RNA, 19 nt, Artificial Sequence
  Description of Artificial Sequence: Synthetic oligonucleotide
  Antisense strand to SEQ ID NO: 2323344
uucccaauuacaagccuau

SEQ ID NO: 2323346 - RNA, 19 nt, Artificial Sequence
  Description of Artificial Sequence: Synthetic oligonucleotide
  Sense strand starting at position 3227 of SEQ ID NO: 1885192
aggcuuguaauugggaaua

SEQ ID NO: 2323347 - RNA, 19 nt, Artificial Sequence
  Description of Artificial Sequence: Synthetic oligonucleotide
  Antisense strand to SEQ ID NO: 2323346
uauucccaauuacaagccu

SEQ ID NO: 2323348 - RNA, 19 nt, Artificial Sequence
  Description of Artificial Sequence: Synthetic oligonucleotide
  Sense strand starting at position 3313 of SEQ ID NO: 1885192
agaugcaugcuagauaaau

SEQ ID NO: 2323349 - RNA, 19 nt, Artificial Sequence
  Description of Artificial Sequence: Synthetic oligonucleotide
  Antisense strand to SEQ ID NO: 2323348
auuuaucuagcaugcaucu

SEQ ID NO: 2323350 - RNA, 19 nt, Artificial Sequence
  Description of Artificial Sequence: Synthetic oligonucleotide
  Sense strand starting at position 3426 of SEQ ID NO: 1885192
acuuccuggcaguaguaaa

SEQ ID NO: 2323351 - RNA, 19 nt, Artificial Sequence
  Description of Artificial Sequence: Synthetic oligonucleotide
  Antisense strand to SEQ ID NO: 2323350
uuuacuacugccaggaagu

SEQ ID NO: 2323352 - RNA, 19 nt, Artificial Sequence
  Description of Artificial Sequence: Synthetic oligonucleotide
  Sense strand starting at position 3517 of SEQ ID NO: 1885192
auaccauugugauuagaau

SEQ ID NO: 2323353 - RNA, 19 nt, Artificial Sequence
  Description of Artificial Sequence: Synthetic oligonucleotide
  Antisense strand to SEQ ID NO: 2323352
auucuaaucacaaugguau

SEQ ID NO: 2323354 - RNA, 19 nt, Artificial Sequence
  Description of Artificial Sequence: Synthetic oligonucleotide
  Sense strand starting at position 3523 of SEQ ID NO: 1885192
uugugauuagaauaccugu

SEQ ID NO: 2323355 - RNA, 19 nt, Artificial Sequence
  Description of Artificial Sequence: Synthetic oligonucleotide
  Antisense strand to SEQ ID NO: 2323354
acagguauucuaaucacaa

SEQ ID NO: 2323356 - RNA, 19 nt, Artificial Sequence
  Description of Artificial Sequence: Synthetic oligonucleotide
  Sense strand starting at position 3563 of SEQ ID NO: 1885192
augguaucugcucaaauca

SEQ ID NO: 2323357 - RNA, 19 nt, Artificial Sequence
  Description of Artificial Sequence: Synthetic oligonucleotide
  Antisense strand to SEQ ID NO: 2323356
ugauuugagcagauaccau

SEQ ID NO: 2323358 - RNA, 19 nt, Artificial Sequence
  Description of Artificial Sequence: Synthetic oligonucleotide
  Sense strand starting at position 3692 of SEQ ID NO: 1885192
ugagaugugcuacaguaua

SEQ ID NO: 2323359 - RNA, 19 nt, Artificial Sequence
  Description of Artificial Sequence: Synthetic oligonucleotide
  Antisense strand to SEQ ID NO: 2323358
uauacuguagcacaucuca

SEQ ID NO: 2323360 - RNA, 19 nt, Artificial Sequence
  Description of Artificial Sequence: Synthetic oligonucleotide
  Sense strand starting at position 3750 of SEQ ID NO: 1885192
agugaaaugucaucaauaa

SEQ ID NO: 2323361 - RNA, 19 nt, Artificial Sequence
  Description of Artificial Sequence: Synthetic oligonucleotide
  Antisense strand to SEQ ID NO: 2323360
uuauugaugacauuucacu

SEQ ID NO: 2323362 - RNA, 19 nt, Artificial Sequence
  Description of Artificial Sequence: Synthetic oligonucleotide
  Sense strand starting at position 3865 of SEQ ID NO: 1885192
acucaugugguuuacauua

SEQ ID NO: 2323363 - RNA, 19 nt, Artificial Sequence
  Description of Artificial Sequence: Synthetic oligonucleotide
  Antisense strand to SEQ ID NO: 2323362
uaauguaaaccacaugagu

SEQ ID NO: 2323364 - RNA, 19 nt, Artificial Sequence
  Description of Artificial Sequence: Synthetic oligonucleotide
  Sense strand starting at position 84 of SEQ ID NO: 1885193
ugcaauauagacuguaaug

SEQ ID NO: 2323365 - RNA, 19 nt, Artificial Sequence
  Description of Artificial Sequence: Synthetic oligonucleotide
  Antisense strand to SEQ ID NO: 2323364
cauuacagucuauauugca

SEQ ID NO: 2323366 - RNA, 19 nt, Artificial Sequence
  Description of Artificial Sequence: Synthetic oligonucleotide
  Sense strand starting at position 135 of SEQ ID NO: 1885193
gugcaaauuagguacagua

SEQ ID NO: 2323367 - RNA, 19 nt, Artificial Sequence
  Description of Artificial Sequence: Synthetic oligonucleotide
  Antisense strand to SEQ ID NO: 2323366
uacuguaccuaauuugcac

SEQ ID NO: 2323368 - RNA, 19 nt, Artificial Sequence
  Description of Artificial Sequence: Synthetic oligonucleotide
  Sense strand starting at position 137 of SEQ ID NO: 1885193
gcaaauuagguacaguauu

SEQ ID NO: 2323369 - RNA, 19 nt, Artificial Sequence
  Description of Artificial Sequence: Synthetic oligonucleotide
  Antisense strand to SEQ ID NO: 2323368
aauacuguaccuaauuugc

SEQ ID NO: 2323370 - RNA, 19 nt, Artificial Sequence
  Description of Artificial Sequence: Synthetic oligonucleotide
  Sense strand starting at position 209 of SEQ ID NO: 1885193
auugcuuuggaugacaagu

SEQ ID NO: 2323371 - RNA, 19 nt, Artificial Sequence
  Description of Artificial Sequence: Synthetic oligonucleotide
  Antisense strand to SEQ ID NO: 2323370
acuugucauccaaagcaau

SEQ ID NO: 2323372 - RNA, 19 nt, Artificial Sequence
  Description of Artificial Sequence: Synthetic oligonucleotide
  Sense strand starting at position 244 of SEQ ID NO: 1885193
aggagaugaaucuguguuu

SEQ ID NO: 2323373 - RNA, 19 nt, Artificial Sequence
  Description of Artificial Sequence: Synthetic oligonucleotide
  Antisense strand to SEQ ID NO: 2323372
aaacacagauucaucuccu

SEQ ID NO: 2323374 - RNA, 19 nt, Artificial Sequence
  Description of Artificial Sequence: Synthetic oligonucleotide
  Sense strand starting at position 452 of SEQ ID NO: 1885193
uuagaugugcaguaacuau

SEQ ID NO: 2323375 - RNA, 19 nt, Artificial Sequence
  Description of Artificial Sequence: Synthetic oligonucleotide
  Antisense strand to SEQ ID NO: 2323374
auaguuacugcacaucuaa

SEQ ID NO: 2323376 - RNA, 19 nt, Artificial Sequence
  Description of Artificial Sequence: Synthetic oligonucleotide
  Sense strand starting at position 632 of SEQ ID NO: 1885193
caacuuagaggguguaaua

SEQ ID NO: 2323377 - RNA, 19 nt, Artificial Sequence
  Description of Artificial Sequence: Synthetic oligonucleotide
  Antisense strand to SEQ ID NO: 2323376
uauuacacccucuaaguug

SEQ ID NO: 2323378 - RNA, 19 nt, Artificial Sequence
  Description of Artificial Sequence: Synthetic oligonucleotide
  Sense strand starting at position 641 of SEQ ID NO: 1885193
ggguguaauaaguaguauu

SEQ ID NO: 2323379 - RNA, 19 nt, Artificial Sequence
  Description of Artificial Sequence: Synthetic oligonucleotide
  Antisense strand to SEQ ID NO: 2323378
aauacuacuuauuacaccc

SEQ ID NO: 2323380 - RNA, 19 nt, Artificial Sequence
  Description of Artificial Sequence: Synthetic oligonucleotide
  Sense strand starting at position 833 of SEQ ID NO: 1885193
gaguguaugguuuauaagg

SEQ ID NO: 2323381 - RNA, 19 nt, Artificial Sequence
  Description of Artificial Sequence: Synthetic oligonucleotide
  Antisense strand to SEQ ID NO: 2323380
ccuuauaaaccauacacuc

SEQ ID NO: 2323382 - RNA, 19 nt, Artificial Sequence
  Description of Artificial Sequence: Synthetic oligonucleotide
  Sense strand starting at position 980 of SEQ ID NO: 1885193
auuaguguuagucaauuga

SEQ ID NO: 2323383 - RNA, 19 nt, Artificial Sequence
  Description of Artificial Sequence: Synthetic oligonucleotide
  Antisense strand to SEQ ID NO: 2323382
ucaauugacuaacacuaau

SEQ ID NO: 2323384 - RNA, 19 nt, Artificial Sequence
  Description of Artificial Sequence: Synthetic oligonucleotide
  Sense strand starting at position 1022 of SEQ ID NO: 1885193
gcccauuuaucuuugaggu

SEQ ID NO: 2323385 - RNA, 19 nt, Artificial Sequence
  Description of Artificial Sequence: Synthetic oligonucleotide
  Antisense strand to SEQ ID NO: 2323384
accucaaagauaaaugggc

SEQ ID NO: 2323386 - RNA, 19 nt, Artificial Sequence
  Description of Artificial Sequence: Synthetic oligonucleotide
  Sense strand starting at position 1345 of SEQ ID NO: 1885193
guagucaguguuguuguua

SEQ ID NO: 2323387 - RNA, 19 nt, Artificial Sequence
  Description of Artificial Sequence: Synthetic oligonucleotide
  Antisense strand to SEQ ID NO: 2323386
uaacaacaacacugacuac

SEQ ID NO: 2323388 - RNA, 19 nt, Artificial Sequence
  Description of Artificial Sequence: Synthetic oligonucleotide
  Sense strand starting at position 1384 of SEQ ID NO: 1885193
uggaauuaugcucaucuuu

SEQ ID NO: 2323389 - RNA, 19 nt, Artificial Sequence
  Description of Artificial Sequence: Synthetic oligonucleotide
  Antisense strand to SEQ ID NO: 2323388
aaagaugagcauaauucca

SEQ ID NO: 2323390 - RNA, 19 nt, Artificial Sequence
  Description of Artificial Sequence: Synthetic oligonucleotide
  Sense strand starting at position 1585 of SEQ ID NO: 1885193
uuuccuguucucuaagaug

SEQ ID NO: 2323391 - RNA, 19 nt, Artificial Sequence
  Description of Artificial Sequence: Synthetic oligonucleotide
  Antisense strand to SEQ ID NO: 2323390
caucuuagagaacaggaaa

SEQ ID NO: 2323392 - RNA, 19 nt, Artificial Sequence
  Description of Artificial Sequence: Synthetic oligonucleotide
  Sense strand starting at position 1623 of SEQ ID NO: 1885193
aggguugcuggguauacua

SEQ ID NO: 2323393 - RNA, 19 nt, Artificial Sequence
  Description of Artificial Sequence: Synthetic oligonucleotide
  Antisense strand to SEQ ID NO: 2323392
uaguauacccagcaacccu

SEQ ID NO: 2323394 - RNA, 19 nt, Artificial Sequence
  Description of Artificial Sequence: Synthetic oligonucleotide
  Sense strand starting at position 1649 of SEQ ID NO: 1885193
caaaguguccaguaaggug

SEQ ID NO: 2323395 - RNA, 19 nt, Artificial Sequence
  Description of Artificial Sequence: Synthetic oligonucleotide
  Antisense strand to SEQ ID NO: 2323394
caccuuacuggacacuuug

SEQ ID NO: 2323396 - RNA, 19 nt, Artificial Sequence
  Description of Artificial Sequence: Synthetic oligonucleotide
  Sense strand starting at position 1680 of SEQ ID NO: 1885193
uaaggugggcuguaucaua

SEQ ID NO: 2323397 - RNA, 19 nt, Artificial Sequence
  Description of Artificial Sequence: Synthetic oligonucleotide
  Antisense strand to SEQ ID NO: 2323396
uaugauacagcccaccuua

SEQ ID NO: 2323398 - RNA, 19 nt, Artificial Sequence
  Description of Artificial Sequence: Synthetic oligonucleotide
  Sense strand starting at position 2329 of SEQ ID NO: 1885193
ugcugaaagacugagucua

SEQ ID NO: 2323399 - RNA, 19 nt, Artificial Sequence
  Description of Artificial Sequence: Synthetic oligonucleotide
  Antisense strand to SEQ ID NO: 2323398
uagacucagucuuucagca

SEQ ID NO: 2323400 - RNA, 19 nt, Artificial Sequence
  Description of Artificial Sequence: Synthetic oligonucleotide
  Sense strand starting at position 2381 of SEQ ID NO: 1885193
cagguugcacauuagaguu

SEQ ID NO: 2323401 - RNA, 19 nt, Artificial Sequence
  Description of Artificial Sequence: Synthetic oligonucleotide
  Antisense strand to SEQ ID NO: 2323400
aacucuaaugugcaaccug

SEQ ID NO: 2323402 - RNA, 19 nt, Artificial Sequence
  Description of Artificial Sequence: Synthetic oligonucleotide
  Sense strand starting at position 2433 of SEQ ID NO: 1885193
uccaucuuuggguauugau

SEQ ID NO: 2323403 - RNA, 19 nt, Artificial Sequence
  Description of Artificial Sequence: Synthetic oligonucleotide
  Antisense strand to SEQ ID NO: 2323402
aucaauacccaaagaugga

SEQ ID NO: 2323404 - RNA, 19 nt, Artificial Sequence
  Description of Artificial Sequence: Synthetic oligonucleotide
  Sense strand starting at position 2656 of SEQ ID NO: 1885193
accauuaucggugacccaa

SEQ ID NO: 2323405 - RNA, 19 nt, Artificial Sequence
  Description of Artificial Sequence: Synthetic oligonucleotide
  Antisense strand to SEQ ID NO: 2323404
uugggucaccgauaauggu

SEQ ID NO: 2323406 - RNA, 19 nt, Artificial Sequence
  Description of Artificial Sequence: Synthetic oligonucleotide
  Sense strand starting at position 2799 of SEQ ID NO: 1885193
aucugauucguccaucuga

SEQ ID NO: 2323407 - RNA, 19 nt, Artificial Sequence
  Description of Artificial Sequence: Synthetic oligonucleotide
  Antisense strand to SEQ ID NO: 2323406
ucagauggacgaaucagau

SEQ ID NO: 2323408 - RNA, 19 nt, Artificial Sequence
  Description of Artificial Sequence: Synthetic oligonucleotide
  Sense strand starting at position 3056 of SEQ ID NO: 1885193
uggauuacagacugguuau

SEQ ID NO: 2323409 - RNA, 19 nt, Artificial Sequence
  Description of Artificial Sequence: Synthetic oligonucleotide
  Antisense strand to SEQ ID NO: 2323408
auaaccagucuguaaucca

SEQ ID NO: 2323410 - RNA, 19 nt, Artificial Sequence
  Description of Artificial Sequence: Synthetic oligonucleotide
  Sense strand starting at position 3057 of SEQ ID NO: 1885193
ggauuacagacugguuaug

SEQ ID NO: 2323411 - RNA, 19 nt, Artificial Sequence
  Description of Artificial Sequence: Synthetic oligonucleotide
  Antisense strand to SEQ ID NO: 2323410
cauaaccagucuguaaucc

SEQ ID NO: 2323412 - RNA, 19 nt, Artificial Sequence
  Description of Artificial Sequence: Synthetic oligonucleotide
  Sense strand starting at position 3100 of SEQ ID NO: 1885193
uugggaguauccuugagaa

SEQ ID NO: 2323413 - RNA, 19 nt, Artificial Sequence
  Description of Artificial Sequence: Synthetic oligonucleotide
  Antisense strand to SEQ ID NO: 2323412
uucucaaggauacucccaa

SEQ ID NO: 2323414 - RNA, 19 nt, Artificial Sequence
  Description of Artificial Sequence: Synthetic oligonucleotide
  Sense strand starting at position 3107 of SEQ ID NO: 1885193
uauccuugagaaugaguga

SEQ ID NO: 2323415 - RNA, 19 nt, Artificial Sequence
  Description of Artificial Sequence: Synthetic oligonucleotide
  Antisense strand to SEQ ID NO: 2323414
ucacucauucucaaggaua

SEQ ID NO: 2323416 - RNA, 19 nt, Artificial Sequence
  Description of Artificial Sequence: Synthetic oligonucleotide
  Sense strand starting at position 3135 of SEQ ID NO: 1885193
aggugaugccuauauggau

SEQ ID NO: 2323417 - RNA, 19 nt, Artificial Sequence
  Description of Artificial Sequence: Synthetic oligonucleotide
  Antisense strand to SEQ ID NO: 2323416
auccauauaggcaucaccu

SEQ ID NO: 2323418 - RNA, 19 nt, Artificial Sequence
  Description of Artificial Sequence: Synthetic oligonucleotide
  Sense strand starting at position 3149 of SEQ ID NO: 1885193
uggaucuuacugugaagga

SEQ ID NO: 2323419 - RNA, 19 nt, Artificial Sequence
  Description of Artificial Sequence: Synthetic oligonucleotide
  Antisense strand to SEQ ID NO: 2323418
uccuucacaguaagaucca

SEQ ID NO: 2323420 - RNA, 19 nt, Artificial Sequence
  Description of Artificial Sequence: Synthetic oligonucleotide
  Sense strand starting at position 3169 of SEQ ID NO: 1885193
gcagaauaacauuggucaa

SEQ ID NO: 2323421 - RNA, 19 nt, Artificial Sequence
  Description of Artificial Sequence: Synthetic oligonucleotide
  Antisense strand to SEQ ID NO: 2323420
uugaccaauguuauucugc

SEQ ID NO: 2323422 - RNA, 19 nt, Artificial Sequence
  Description of Artificial Sequence: Synthetic oligonucleotide
  Sense strand starting at position 3172 of SEQ ID NO: 1885193
gaauaacauuggucaaagu

SEQ ID NO: 2323423 - RNA, 19 nt, Artificial Sequence
  Description of Artificial Sequence: Synthetic oligonucleotide
  Antisense strand to SEQ ID NO: 2323422
acuuugaccaauguuauuc

SEQ ID NO: 2323424 - RNA, 19 nt, Artificial Sequence
  Description of Artificial Sequence: Synthetic oligonucleotide
  Sense strand starting at position 3195 of SEQ ID NO: 1885193
gaaccucagguguaguauu

SEQ ID NO: 2323425 - RNA, 19 nt, Artificial Sequence
  Description of Artificial Sequence: Synthetic oligonucleotide
  Antisense strand to SEQ ID NO: 2323424
aauacuacaccugagguuc

SEQ ID NO: 2323426 - RNA, 19 nt, Artificial Sequence
  Description of Artificial Sequence: Synthetic oligonucleotide
  Sense strand starting at position 3309 of SEQ ID NO: 1885193
aguuuaagugcucaagauc

SEQ ID NO: 2323427 - RNA, 19 nt, Artificial Sequence
  Description of Artificial Sequence: Synthetic oligonucleotide
  Antisense strand to SEQ ID NO: 2323426
gaucuugagcacuuaaacu

SEQ ID NO: 2323428 - RNA, 19 nt, Artificial Sequence
  Description of Artificial Sequence: Synthetic oligonucleotide
  Sense strand starting at position 3312 of SEQ ID NO: 1885193
uuaagugcucaagaucaca

SEQ ID NO: 2323429 - RNA, 19 nt, Artificial Sequence
  Description of Artificial Sequence: Synthetic oligonucleotide
  Antisense strand to SEQ ID NO: 2323428
ugugaucuugagcacuuaa

SEQ ID NO: 2323430 - RNA, 19 nt, Artificial Sequence
  Description of Artificial Sequence: Synthetic oligonucleotide
  Sense strand starting at position 3364 of SEQ ID NO: 1885193
aggugagucuuaucccaga

SEQ ID NO: 2323431 - RNA, 19 nt, Artificial Sequence
  Description of Artificial Sequence: Synthetic oligonucleotide
  Antisense strand to SEQ ID NO: 2323430
ucugggauaagacucaccu

SEQ ID NO: 2323432 - RNA, 19 nt, Artificial Sequence
  Description of Artificial Sequence: Synthetic oligonucleotide
  Sense strand starting at position 3544 of SEQ ID NO: 1885193
ugcgguagugucuugguca

SEQ ID NO: 2323433 - RNA, 19 nt, Artificial Sequence
  Description of Artificial Sequence: Synthetic oligonucleotide
  Antisense strand to SEQ ID NO: 2323432
ugaccaagacacuaccgca

SEQ ID NO: 2323434 - RNA, 19 nt, Artificial Sequence
  Description of Artificial Sequence: Synthetic oligonucleotide
  Sense strand starting at position 3594 of SEQ ID NO: 1885193
uugguuuaaggugaggauu

SEQ ID NO: 2323435 - RNA, 19 nt, Artificial Sequence
  Description of Artificial Sequence: Synthetic oligonucleotide
  Antisense strand to SEQ ID NO: 2323434
aauccucaccuuaaaccaa

SEQ ID NO: 2323436 - RNA, 19 nt, Artificial Sequence
  Description of Artificial Sequence: Synthetic oligonucleotide
  Sense strand starting at position 3597 of SEQ ID NO: 1885193
guuuaaggugaggauuauu

SEQ ID NO: 2323437 - RNA, 19 nt, Artificial Sequence
  Description of Artificial Sequence: Synthetic oligonucleotide
  Antisense strand to SEQ ID NO: 2323436
aauaauccucaccuuaaac

SEQ ID NO: 2323438 - RNA, 19 nt, Artificial Sequence
  Description of Artificial Sequence: Synthetic oligonucleotide
  Sense strand starting at position 3607 of SEQ ID NO: 1885193
aggauuauuuaggaaagua

SEQ ID NO: 2323439 - RNA, 19 nt, Artificial Sequence
  Description of Artificial Sequence: Synthetic oligonucleotide
  Antisense strand to SEQ ID NO: 2323438
uacuuuccuaaauaauccu

SEQ ID NO: 2323440 - RNA, 19 nt, Artificial Sequence
  Description of Artificial Sequence: Synthetic oligonucleotide
  Sense strand starting at position 3655 of SEQ ID NO: 1885193
ggacucacaccuuacugua

SEQ ID NO: 2323441 - RNA, 19 nt, Artificial Sequence
  Description of Artificial Sequence: Synthetic oligonucleotide
  Antisense strand to SEQ ID NO: 2323440
uacaguaaggugugagucc

SEQ ID NO: 2323442 - RNA, 19 nt, Artificial Sequence
  Description of Artificial Sequence: Synthetic oligonucleotide
  Sense strand starting at position 3797 of SEQ ID NO: 1885193
gguggugugcucuuguaau

SEQ ID NO: 2323443 - RNA, 19 nt, Artificial Sequence
  Description of Artificial Sequence: Synthetic oligonucleotide
  Antisense strand to SEQ ID NO: 2323442
auuacaagagcacaccacc

SEQ ID NO: 2323444 - RNA, 19 nt, Artificial Sequence
  Description of Artificial Sequence: Synthetic oligonucleotide
  Sense strand starting at position 230 of SEQ ID NO: 1885194
acaacaguccaaugaggua

SEQ ID NO: 2323445 - RNA, 19 nt, Artificial Sequence
  Description of Artificial Sequence: Synthetic oligonucleotide
  Antisense strand to SEQ ID NO: 2323444
uaccucauuggacuguugu

SEQ ID NO: 2323446 - RNA, 19 nt, Artificial Sequence
  Description of Artificial Sequence: Synthetic oligonucleotide
  Sense strand starting at position 940 of SEQ ID NO: 1885194
uagacagguuugccuagau

SEQ ID NO: 2323447 - RNA, 19 nt, Artificial Sequence
  Description of Artificial Sequence: Synthetic oligonucleotide
  Antisense strand to SEQ ID NO: 2323446
aucuaggcaaaccugucua

SEQ ID NO: 2323448 - RNA, 19 nt, Artificial Sequence
  Description of Artificial Sequence: Synthetic oligonucleotide
  Sense strand starting at position 1060 of SEQ ID NO: 1885194
ggcuguugugagcaauaaa

SEQ ID NO: 2323449 - RNA, 19 nt, Artificial Sequence
  Description of Artificial Sequence: Synthetic oligonucleotide
  Antisense strand to SEQ ID NO: 2323448
uuuauugcucacaacagcc

SEQ ID NO: 2323450 - RNA, 19 nt, Artificial Sequence
  Description of Artificial Sequence: Synthetic oligonucleotide
  Sense strand starting at position 1063 of SEQ ID NO: 1885194
uguugugagcaauaaacac

SEQ ID NO: 2323451 - RNA, 19 nt, Artificial Sequence
  Description of Artificial Sequence: Synthetic oligonucleotide
  Antisense strand to SEQ ID NO: 2323450
guguuuauugcucacaaca

SEQ ID NO: 2323452 - RNA, 19 nt, Artificial Sequence
  Description of Artificial Sequence: Synthetic oligonucleotide
  Sense strand starting at position 1067 of SEQ ID NO: 1885194
gugagcaauaaacacgauu

SEQ ID NO: 2323453 - RNA, 19 nt, Artificial Sequence
  Description of Artificial Sequence: Synthetic oligonucleotide
  Antisense strand to SEQ ID NO: 2323452
aaucguguuuauugcucac

SEQ ID NO: 2323454 - RNA, 19 nt, Artificial Sequence
  Description of Artificial Sequence: Synthetic oligonucleotide
  Sense strand starting at position 1160 of SEQ ID NO: 1885194
caacguguugcacaacaga

SEQ ID NO: 2323455 - RNA, 19 nt, Artificial Sequence
  Description of Artificial Sequence: Synthetic oligonucleotide
  Antisense strand to SEQ ID NO: 2323454
ucuguugugcaacacguug

SEQ ID NO: 2323456 - RNA, 19 nt, Artificial Sequence
  Description of Artificial Sequence: Synthetic oligonucleotide
  Sense strand starting at position 1283 of SEQ ID NO: 1885194
acaaguuaagacgguaaga

SEQ ID NO: 2323457 - RNA, 19 nt, Artificial Sequence
  Description of Artificial Sequence: Synthetic oligonucleotide
  Antisense strand to SEQ ID NO: 2323456
ucuuaccgucuuaacuugu

SEQ ID NO: 2323458 - RNA, 19 nt, Artificial Sequence
  Description of Artificial Sequence: Synthetic oligonucleotide
  Sense strand starting at position 1486 of SEQ ID NO: 1885194
ggcugcugaaucugacaga

SEQ ID NO: 2323459 - RNA, 19 nt, Artificial Sequence
  Description of Artificial Sequence: Synthetic oligonucleotide
  Antisense strand to SEQ ID NO: 2323458
ucugucagauucagcagcc

SEQ ID NO: 2323460 - RNA, 19 nt, Artificial Sequence
  Description of Artificial Sequence: Synthetic oligonucleotide
  Sense strand starting at position 2025 of SEQ ID NO: 1885194
gaguuugcgcaugcguaaa

SEQ ID NO: 2323461 - RNA, 19 nt, Artificial Sequence
  Description of Artificial Sequence: Synthetic oligonucleotide
  Antisense strand to SEQ ID NO: 2323460
uuuacgcaugcgcaaacuc

SEQ ID NO: 2323462 - RNA, 19 nt, Artificial Sequence
  Description of Artificial Sequence: Synthetic oligonucleotide
  Sense strand starting at position 2226 of SEQ ID NO: 1885194
ggauaaccuguccgagagu

SEQ ID NO: 2323463 - RNA, 19 nt, Artificial Sequence
  Description of Artificial Sequence: Synthetic oligonucleotide
  Antisense strand to SEQ ID NO: 2323462
acucucggacagguuaucc

SEQ ID NO: 2323464 - RNA, 19 nt, Artificial Sequence
  Description of Artificial Sequence: Synthetic oligonucleotide
  Sense strand starting at position 2229 of SEQ ID NO: 1885194
uaaccuguccgagaguaua

SEQ ID NO: 2323465 - RNA, 19 nt, Artificial Sequence
  Description of Artificial Sequence: Synthetic oligonucleotide
  Antisense strand to SEQ ID NO: 2323464
uauacucucggacagguua

SEQ ID NO: 2323466 - RNA, 19 nt, Artificial Sequence
  Description of Artificial Sequence: Synthetic oligonucleotide
  Sense strand starting at position 2345 of SEQ ID NO: 1885194
ucgguaagagccugaagaa

SEQ ID NO: 2323467 - RNA, 19 nt, Artificial Sequence
  Description of Artificial Sequence: Synthetic oligonucleotide
  Antisense strand to SEQ ID NO: 2323466
uucuucaggcucuuaccga

SEQ ID NO: 2323468 - RNA, 19 nt, Artificial Sequence
  Description of Artificial Sequence: Synthetic oligonucleotide
  Sense strand starting at position 2798 of SEQ ID NO: 1885194
gaaacuuaaggucgacaga

SEQ ID NO: 2323469 - RNA, 19 nt, Artificial Sequence
  Description of Artificial Sequence: Synthetic oligonucleotide
  Antisense strand to SEQ ID NO: 2323468
ucugucgaccuuaaguuuc

SEQ ID NO: 2323470 - RNA, 19 nt, Artificial Sequence
  Description of Artificial Sequence: Synthetic oligonucleotide
  Sense strand starting at position 2984 of SEQ ID NO: 1885194
cggugaggucucuagguag

SEQ ID NO: 2323471 - RNA, 19 nt, Artificial Sequence
  Description of Artificial Sequence: Synthetic oligonucleotide
  Antisense strand to SEQ ID NO: 2323470
cuaccuagagaccucaccg

SEQ ID NO: 2323472 - RNA, 19 nt, Artificial Sequence
  Description of Artificial Sequence: Synthetic oligonucleotide
  Sense strand starting at position 2987 of SEQ ID NO: 1885194
ugaggucucuagguaggua

SEQ ID NO: 2323473 - RNA, 19 nt, Artificial Sequence
  Description of Artificial Sequence: Synthetic oligonucleotide
  Antisense strand to SEQ ID NO: 2323472
uaccuaccuagagaccuca

SEQ ID NO: 2323474 - RNA, 19 nt, Artificial Sequence
  Description of Artificial Sequence: Synthetic oligonucleotide
  Sense strand starting at position 3207 of SEQ ID NO: 1885194
guggcuauuuccuccgagu

SEQ ID NO: 2323475 - RNA, 19 nt, Artificial Sequence
  Description of Artificial Sequence: Synthetic oligonucleotide
  Antisense strand to SEQ ID NO: 2323474
acucggaggaaauagccac

SEQ ID NO: 2323476 - RNA, 19 nt, Artificial Sequence
  Description of Artificial Sequence: Synthetic oligonucleotide
  Sense strand starting at position 3322 of SEQ ID NO: 1885194
aagucuuuacccggacaac

SEQ ID NO: 2323477 - RNA, 19 nt, Artificial Sequence
  Description of Artificial Sequence: Synthetic oligonucleotide
  Antisense strand to SEQ ID NO: 2323476
guuguccggguaaagacuu

SEQ ID NO: 2323478 - RNA, 19 nt, Artificial Sequence
  Description of Artificial Sequence: Synthetic oligonucleotide
  Sense strand starting at position 3323 of SEQ ID NO: 1885194
agucuuuacccggacaacu

SEQ ID NO: 2323479 - RNA, 19 nt, Artificial Sequence
  Description of Artificial Sequence: Synthetic oligonucleotide
  Antisense strand to SEQ ID NO: 2323478
aguuguccggguaaagacu

SEQ ID NO: 2323480 - RNA, 19 nt, Artificial Sequence
  Description of Artificial Sequence: Synthetic oligonucleotide
  Sense strand starting at position 3325 of SEQ ID NO: 1885194
ucuuuacccggacaacuua

SEQ ID NO: 2323481 - RNA, 19 nt, Artificial Sequence
  Description of Artificial Sequence: Synthetic oligonucleotide
  Antisense strand to SEQ ID NO: 2323480
uaaguuguccggguaaaga

SEQ ID NO: 2323482 - RNA, 19 nt, Artificial Sequence
  Description of Artificial Sequence: Synthetic oligonucleotide
  Sense strand starting at position 3334 of SEQ ID NO: 1885194
ggacaacuuaacgguaauu

SEQ ID NO: 2323483 - RNA, 19 nt, Artificial Sequence
  Description of Artificial Sequence: Synthetic oligonucleotide
  Antisense strand to SEQ ID NO: 2323482
aauuaccguuaaguugucc

SEQ ID NO: 2323484 - RNA, 19 nt, Artificial Sequence
  Description of Artificial Sequence: Synthetic oligonucleotide
  Sense strand starting at position 3387 of SEQ ID NO: 1885194
agggacgagaguuguuauu

SEQ ID NO: 2323485 - RNA, 19 nt, Artificial Sequence
  Description of Artificial Sequence: Synthetic oligonucleotide
  Antisense strand to SEQ ID NO: 2323484
aauaacaacucucgucccu

SEQ ID NO: 2323486 - RNA, 19 nt, Artificial Sequence
  Description of Artificial Sequence: Synthetic oligonucleotide
  Sense strand starting at position 3393 of SEQ ID NO: 1885194
gagaguuguuauuugucuu

SEQ ID NO: 2323487 - RNA, 19 nt, Artificial Sequence
  Description of Artificial Sequence: Synthetic oligonucleotide
  Antisense strand to SEQ ID NO: 2323486
aagacaaauaacaacucuc

SEQ ID NO: 2323488 - RNA, 19 nt, Artificial Sequence
  Description of Artificial Sequence: Synthetic oligonucleotide
  Sense strand starting at position 3394 of SEQ ID NO: 1885194
agaguuguuauuugucuuu

SEQ ID NO: 2323489 - RNA, 19 nt, Artificial Sequence
  Description of Artificial Sequence: Synthetic oligonucleotide
  Antisense strand to SEQ ID NO: 2323488
aaagacaaauaacaacucu

SEQ ID NO: 2323490 - RNA, 19 nt, Artificial Sequence
  Description of Artificial Sequence: Synthetic oligonucleotide
  Sense strand starting at position 3399 of SEQ ID NO: 1885194
uguuauuugucuuucccuu

SEQ ID NO: 2323491 - RNA, 19 nt, Artificial Sequence
  Description of Artificial Sequence: Synthetic oligonucleotide
  Antisense strand to SEQ ID NO: 2323490
aagggaaagacaaauaaca

SEQ ID NO: 2323492 - RNA, 19 nt, Artificial Sequence
  Description of Artificial Sequence: Synthetic oligonucleotide
  Sense strand starting at position 3467 of SEQ ID NO: 1885194
uccacagcucuugagugau

SEQ ID NO: 2323493 - RNA, 19 nt, Artificial Sequence
  Description of Artificial Sequence: Synthetic oligonucleotide
  Antisense strand to SEQ ID NO: 2323492
aucacucaagagcugugga

SEQ ID NO: 2323494 - RNA, 19 nt, Artificial Sequence
  Description of Artificial Sequence: Synthetic oligonucleotide
  Sense strand starting at position 3471 of SEQ ID NO: 1885194
cagcucuugagugauguga

SEQ ID NO: 2323495 - RNA, 19 nt, Artificial Sequence
  Description of Artificial Sequence: Synthetic oligonucleotide
  Antisense strand to SEQ ID NO: 2323494
ucacaucacucaagagcug

SEQ ID NO: 2323496 - RNA, 19 nt, Artificial Sequence
  Description of Artificial Sequence: Synthetic oligonucleotide
  Sense strand starting at position 3492 of SEQ ID NO: 1885194
cagugacggcauuaacuuu

SEQ ID NO: 2323497 - RNA, 19 nt, Artificial Sequence
  Description of Artificial Sequence: Synthetic oligonucleotide
  Antisense strand to SEQ ID NO: 2323496
aaaguuaaugccgucacug

SEQ ID NO: 2323498 - RNA, 19 nt, Artificial Sequence
  Description of Artificial Sequence: Synthetic oligonucleotide
  Sense strand starting at position 3498 of SEQ ID NO: 1885194
cggcauuaacuuuagguaa

SEQ ID NO: 2323499 - RNA, 19 nt, Artificial Sequence
  Description of Artificial Sequence: Synthetic oligonucleotide
  Antisense strand to SEQ ID NO: 2323498
uuaccuaaaguuaaugccg

SEQ ID NO: 2323500 - RNA, 19 nt, Artificial Sequence
  Description of Artificial Sequence: Synthetic oligonucleotide
  Sense strand starting at position 3544 of SEQ ID NO: 1885194
gcguuaaggauguauuaga

SEQ ID NO: 2323501 - RNA, 19 nt, Artificial Sequence
  Description of Artificial Sequence: Synthetic oligonucleotide
  Antisense strand to SEQ ID NO: 2323500
ucuaauacauccuuaacgc

SEQ ID NO: 2323502 - RNA, 19 nt, Artificial Sequence
  Description of Artificial Sequence: Synthetic oligonucleotide
  Sense strand starting at position 3555 of SEQ ID NO: 1885194
guauuagaucuugaguucu

SEQ ID NO: 2323503 - RNA, 19 nt, Artificial Sequence
  Description of Artificial Sequence: Synthetic oligonucleotide
  Antisense strand to SEQ ID NO: 2323502
agaacucaagaucuaauac

SEQ ID NO: 2323504 - RNA, 19 nt, Artificial Sequence
  Description of Artificial Sequence: Synthetic oligonucleotide
  Sense strand starting at position 3557 of SEQ ID NO: 1885194
auuagaucuugaguucuuu

SEQ ID NO: 2323505 - RNA, 19 nt, Artificial Sequence
  Description of Artificial Sequence: Synthetic oligonucleotide
  Antisense strand to SEQ ID NO: 2323504
aaagaacucaagaucuaau

SEQ ID NO: 2323506 - RNA, 19 nt, Artificial Sequence
  Description of Artificial Sequence: Synthetic oligonucleotide
  Sense strand starting at position 3646 of SEQ ID NO: 1885194
gcaaauauuccggagaugc

SEQ ID NO: 2323507 - RNA, 19 nt, Artificial Sequence
  Description of Artificial Sequence: Synthetic oligonucleotide
  Antisense strand to SEQ ID NO: 2323506
gcaucuccggaauauuugc

SEQ ID NO: 2323508 - RNA, 19 nt, Artificial Sequence
  Description of Artificial Sequence: Synthetic oligonucleotide
  Sense strand starting at position 3648 of SEQ ID NO: 1885194
aaauauuccggagaugcuu

SEQ ID NO: 2323509 - RNA, 19 nt, Artificial Sequence
  Description of Artificial Sequence: Synthetic oligonucleotide
  Antisense strand to SEQ ID NO: 2323508
aagcaucuccggaauauuu

SEQ ID NO: 2323510 - RNA, 19 nt, Artificial Sequence
  Description of Artificial Sequence: Synthetic oligonucleotide
  Sense strand starting at position 3689 of SEQ ID NO: 1885194
guuguucgcaaagaggaau

SEQ ID NO: 2323511 - RNA, 19 nt, Artificial Sequence
  Description of Artificial Sequence: Synthetic oligonucleotide
  Antisense strand to SEQ ID NO: 2323510
auuccucuuugcgaacaac

SEQ ID NO: 2323512 - RNA, 19 nt, Artificial Sequence
  Description of Artificial Sequence: Synthetic oligonucleotide
  Sense strand starting at position 3704 of SEQ ID NO: 1885194
gaauaacgcuuccugggaa

SEQ ID NO: 2323513 - RNA, 19 nt, Artificial Sequence
  Description of Artificial Sequence: Synthetic oligonucleotide
  Antisense strand to SEQ ID NO: 2323512
uucccaggaagcguuauuc

SEQ ID NO: 2323514 - RNA, 19 nt, Artificial Sequence
  Description of Artificial Sequence: Synthetic oligonucleotide
  Sense strand starting at position 3772 of SEQ ID NO: 1885194
guggaauugauguaacgau

SEQ ID NO: 2323515 - RNA, 19 nt, Artificial Sequence
  Description of Artificial Sequence: Synthetic oligonucleotide
  Antisense strand to SEQ ID NO: 2323514
aucguuacaucaauuccac

SEQ ID NO: 2323516 - RNA, 19 nt, Artificial Sequence
  Description of Artificial Sequence: Synthetic oligonucleotide
  Sense strand starting at position 3842 of SEQ ID NO: 1885194
auguuucccggaggagaau

SEQ ID NO: 2323517 - RNA, 19 nt, Artificial Sequence
  Description of Artificial Sequence: Synthetic oligonucleotide
  Antisense strand to SEQ ID NO: 2323516
auucuccuccgggaaacau

SEQ ID NO: 2323518 - RNA, 19 nt, Artificial Sequence
  Description of Artificial Sequence: Synthetic oligonucleotide
  Sense strand starting at position 3861 of SEQ ID NO: 1885194
agaagagugcaaugugaug

SEQ ID NO: 2323519 - RNA, 19 nt, Artificial Sequence
  Description of Artificial Sequence: Synthetic oligonucleotide
  Antisense strand to SEQ ID NO: 2323518
caucacauugcacucuucu

SEQ ID NO: 2323520 - RNA, 19 nt, Artificial Sequence
  Description of Artificial Sequence: Synthetic oligonucleotide
  Sense strand starting at position 3884 of SEQ ID NO: 1885194
ucaaauugugucuaacgga

SEQ ID NO: 2323521 - RNA, 19 nt, Artificial Sequence
  Description of Artificial Sequence: Synthetic oligonucleotide
  Antisense strand to SEQ ID NO: 2323520
uccguuagacacaauuuga

SEQ ID NO: 2323522 - RNA, 19 nt, Artificial Sequence
  Description of Artificial Sequence: Synthetic oligonucleotide
  Sense strand starting at position 3929 of SEQ ID NO: 1885194
cccugauuggcuggaagga

SEQ ID NO: 2323523 - RNA, 19 nt, Artificial Sequence
  Description of Artificial Sequence: Synthetic oligonucleotide
  Antisense strand to SEQ ID NO: 2323522
uccuuccagccaaucaggg

SEQ ID NO: 2323524 - RNA, 19 nt, Artificial Sequence
  Description of Artificial Sequence: Synthetic oligonucleotide
  Sense strand starting at position 163 of SEQ ID NO: 1885195
auccuccugcagugagaaa

SEQ ID NO: 2323525 - RNA, 19 nt, Artificial Sequence
  Description of Artificial Sequence: Synthetic oligonucleotide
  Antisense strand to SEQ ID NO: 2323524
uuucucacugcaggaggau

SEQ ID NO: 2323526 - RNA, 19 nt, Artificial Sequence
  Description of Artificial Sequence: Synthetic oligonucleotide
  Sense strand starting at position 197 of SEQ ID NO: 1885195
gccauuucagugggaguca

SEQ ID NO: 2323527 - RNA, 19 nt, Artificial Sequence
  Description of Artificial Sequence: Synthetic oligonucleotide
  Antisense strand to SEQ ID NO: 2323526
ugacucccacugaaauggc

SEQ ID NO: 2323528 - RNA, 19 nt, Artificial Sequence
  Description of Artificial Sequence: Synthetic oligonucleotide
  Sense strand starting at position 247 of SEQ ID NO: 1885195
uggaacaagucucuaugaa

SEQ ID NO: 2323529 - RNA, 19 nt, Artificial Sequence
  Description of Artificial Sequence: Synthetic oligonucleotide
  Antisense strand to SEQ ID NO: 2323528
uucauagagacuuguucca

SEQ ID NO: 2323530 - RNA, 19 nt, Artificial Sequence
  Description of Artificial Sequence: Synthetic oligonucleotide
  Sense strand starting at position 336 of SEQ ID NO: 1885195
gaauuuauuugccauguag

SEQ ID NO: 2323531 - RNA, 19 nt, Artificial Sequence
  Description of Artificial Sequence: Synthetic oligonucleotide
  Antisense strand to SEQ ID NO: 2323530
cuacauggcaaauaaauuc

SEQ ID NO: 2323532 - RNA, 19 nt, Artificial Sequence
  Description of Artificial Sequence: Synthetic oligonucleotide
  Sense strand starting at position 362 of SEQ ID NO: 1885195
acuguagugguugaggaua

SEQ ID NO: 2323533 - RNA, 19 nt, Artificial Sequence
  Description of Artificial Sequence: Synthetic oligonucleotide
  Antisense strand to SEQ ID NO: 2323532
uauccucaaccacuacagu

SEQ ID NO: 2323534 - RNA, 19 nt, Artificial Sequence
  Description of Artificial Sequence: Synthetic oligonucleotide
  Sense strand starting at position 430 of SEQ ID NO: 1885195
uaaacuguguagguccaua

SEQ ID NO: 2323535 - RNA, 19 nt, Artificial Sequence
  Description of Artificial Sequence: Synthetic oligonucleotide
  Antisense strand to SEQ ID NO: 2323534
uauggaccuacacaguuua

SEQ ID NO: 2323536 - RNA, 19 nt, Artificial Sequence
  Description of Artificial Sequence: Synthetic oligonucleotide
  Sense strand starting at position 464 of SEQ ID NO: 1885195
caaugacaguacucuguga

SEQ ID NO: 2323537 - RNA, 19 nt, Artificial Sequence
  Description of Artificial Sequence: Synthetic oligonucleotide
  Antisense strand to SEQ ID NO: 2323536
ucacagaguacugucauug

SEQ ID NO: 2323538 - RNA, 19 nt, Artificial Sequence
  Description of Artificial Sequence: Synthetic oligonucleotide
  Sense strand starting at position 466 of SEQ ID NO: 1885195
augacaguacucugugaag

SEQ ID NO: 2323539 - RNA, 19 nt, Artificial Sequence
  Description of Artificial Sequence: Synthetic oligonucleotide
  Antisense strand to SEQ ID NO: 2323538
cuucacagaguacugucau

SEQ ID NO: 2323540 - RNA, 19 nt, Artificial Sequence
  Description of Artificial Sequence: Synthetic oligonucleotide
  Sense strand starting at position 468 of SEQ ID NO: 1885195
gacaguacucugugaagag

SEQ ID NO: 2323541 - RNA, 19 nt, Artificial Sequence
  Description of Artificial Sequence: Synthetic oligonucleotide
  Antisense strand to SEQ ID NO: 2323540
cucuucacagaguacuguc

SEQ ID NO: 2323542 - RNA, 19 nt, Artificial Sequence
  Description of Artificial Sequence: Synthetic oligonucleotide
  Sense strand starting at position 485 of SEQ ID NO: 1885195
aggagaaggugugcuuaca

SEQ ID NO: 2323543 - RNA, 19 nt, Artificial Sequence
  Description of Artificial Sequence: Synthetic oligonucleotide
  Antisense strand to SEQ ID NO: 2323542
uguaagcacaccuucuccu

SEQ ID NO: 2323544 - RNA, 19 nt, Artificial Sequence
  Description of Artificial Sequence: Synthetic oligonucleotide
  Sense strand starting at position 526 of SEQ ID NO: 1885195
ccucuucccgauggagaga

SEQ ID NO: 2323545 - RNA, 19 nt, Artificial Sequence
  Description of Artificial Sequence: Synthetic oligonucleotide
  Antisense strand to SEQ ID NO: 2323544
ucucuccaucgggaagagg

SEQ ID NO: 2323546 - RNA, 19 nt, Artificial Sequence
  Description of Artificial Sequence: Synthetic oligonucleotide
  Sense strand starting at position 660 of SEQ ID NO: 1885195
aggauuagauguuugaccu

SEQ ID NO: 2323547 - RNA, 19 nt, Artificial Sequence
  Description of Artificial Sequence: Synthetic oligonucleotide
  Antisense strand to SEQ ID NO: 2323546
aggucaaacaucuaauccu

SEQ ID NO: 2323548 - RNA, 19 nt, Artificial Sequence
  Description of Artificial Sequence: Synthetic oligonucleotide
  Sense strand starting at position 661 of SEQ ID NO: 1885195
ggauuagauguuugaccua

SEQ ID NO: 2323549 - RNA, 19 nt, Artificial Sequence
  Description of Artificial Sequence: Synthetic oligonucleotide
  Antisense strand to SEQ ID NO: 2323548
uaggucaaacaucuaaucc

SEQ ID NO: 2323550 - RNA, 19 nt, Artificial Sequence
  Description of Artificial Sequence: Synthetic oligonucleotide
  Sense strand starting at position 664 of SEQ ID NO: 1885195
uuagauguuugaccuacuu

SEQ ID NO: 2323551 - RNA, 19 nt, Artificial Sequence
  Description of Artificial Sequence: Synthetic oligonucleotide
  Antisense strand to SEQ ID NO: 2323550
aaguaggucaaacaucuaa

SEQ ID NO: 2323552 - RNA, 19 nt, Artificial Sequence
  Description of Artificial Sequence: Synthetic oligonucleotide
  Sense strand starting at position 1003 of SEQ ID NO: 1885195
ggaguuuaccagcaaggua

SEQ ID NO: 2323553 - RNA, 19 nt, Artificial Sequence
  Description of Artificial Sequence: Synthetic oligonucleotide
  Antisense strand to SEQ ID NO: 2323552
uaccuugcugguaaacucc

SEQ ID NO: 2323554 - RNA, 19 nt, Artificial Sequence
  Description of Artificial Sequence: Synthetic oligonucleotide
  Sense strand starting at position 1028 of SEQ ID NO: 1885195
gacacauacgagcagguua

SEQ ID NO: 2323555 - RNA, 19 nt, Artificial Sequence
  Description of Artificial Sequence: Synthetic oligonucleotide
  Antisense strand to SEQ ID NO: 2323554
uaaccugcucguauguguc

SEQ ID NO: 2323556 - RNA, 19 nt, Artificial Sequence
  Description of Artificial Sequence: Synthetic oligonucleotide
  Sense strand starting at position 1188 of SEQ ID NO: 1885195
cacucucaggcuggagaaa

SEQ ID NO: 2323557 - RNA, 19 nt, Artificial Sequence
  Description of Artificial Sequence: Synthetic oligonucleotide
  Antisense strand to SEQ ID NO: 2323556
uuucuccagccugagagug

SEQ ID NO: 2323558 - RNA, 19 nt, Artificial Sequence
  Description of Artificial Sequence: Synthetic oligonucleotide
  Sense strand starting at position 1243 of SEQ ID NO: 1885195
gguacagaucccuggaguc

SEQ ID NO: 2323559 - RNA, 19 nt, Artificial Sequence
  Description of Artificial Sequence: Synthetic oligonucleotide
  Antisense strand to SEQ ID NO: 2323558
gacuccagggaucuguacc

SEQ ID NO: 2323560 - RNA, 19 nt, Artificial Sequence
  Description of Artificial Sequence: Synthetic oligonucleotide
  Sense strand starting at position 1245 of SEQ ID NO: 1885195
uacagaucccuggagucuu

SEQ ID NO: 2323561 - RNA, 19 nt, Artificial Sequence
  Description of Artificial Sequence: Synthetic oligonucleotide
  Antisense strand to SEQ ID NO: 2323560
aagacuccagggaucugua

SEQ ID NO: 2323562 - RNA, 19 nt, Artificial Sequence
  Description of Artificial Sequence: Synthetic oligonucleotide
  Sense strand starting at position 1673 of SEQ ID NO: 1885195
uuucuaaaguagucaaaug

SEQ ID NO: 2323563 - RNA, 19 nt, Artificial Sequence
  Description of Artificial Sequence: Synthetic oligonucleotide
  Antisense strand to SEQ ID NO: 2323562
cauuugacuacuuuagaaa

SEQ ID NO: 2323564 - RNA, 19 nt, Artificial Sequence
  Description of Artificial Sequence: Synthetic oligonucleotide
  Sense strand starting at position 1868 of SEQ ID NO: 1885195
gguugcugccaucagauga

SEQ ID NO: 2323565 - RNA, 19 nt, Artificial Sequence
  Description of Artificial Sequence: Synthetic oligonucleotide
  Antisense strand to SEQ ID NO: 2323564
ucaucugauggcagcaacc

SEQ ID NO: 2323566 - RNA, 19 nt, Artificial Sequence
  Description of Artificial Sequence: Synthetic oligonucleotide
  Sense strand starting at position 1912 of SEQ ID NO: 1885195
uuuaaaugacucugcagua

SEQ ID NO: 2323567 - RNA, 19 nt, Artificial Sequence
  Description of Artificial Sequence: Synthetic oligonucleotide
  Antisense strand to SEQ ID NO: 2323566
uacugcagagucauuuaaa

SEQ ID NO: 2323568 - RNA, 19 nt, Artificial Sequence
  Description of Artificial Sequence: Synthetic oligonucleotide
  Sense strand starting at position 1988 of SEQ ID NO: 1885195
acugaaauucucuggccuu

SEQ ID NO: 2323569 - RNA, 19 nt, Artificial Sequence
  Description of Artificial Sequence: Synthetic oligonucleotide
  Antisense strand to SEQ ID NO: 2323568
aaggccagagaauuucagu

SEQ ID NO: 2323570 - RNA, 19 nt, Artificial Sequence
  Description of Artificial Sequence: Synthetic oligonucleotide
  Sense strand starting at position 2111 of SEQ ID NO: 1885195
acgugaaaugugcacagga

SEQ ID NO: 2323571 - RNA, 19 nt, Artificial Sequence
  Description of Artificial Sequence: Synthetic oligonucleotide
  Antisense strand to SEQ ID NO: 2323570
uccugugcacauuucacgu

SEQ ID NO: 2323572 - RNA, 19 nt, Artificial Sequence
  Description of Artificial Sequence: Synthetic oligonucleotide
  Sense strand starting at position 2127 of SEQ ID NO: 1885195
ggaggacucuaguuuggag

SEQ ID NO: 2323573 - RNA, 19 nt, Artificial Sequence
  Description of Artificial Sequence: Synthetic oligonucleotide
  Antisense strand to SEQ ID NO: 2323572
cuccaaacuagaguccucc

SEQ ID NO: 2323574 - RNA, 19 nt, Artificial Sequence
  Description of Artificial Sequence: Synthetic oligonucleotide
  Sense strand starting at position 2187 of SEQ ID NO: 1885195
aauguaucuguauagguaa

SEQ ID NO: 2323575 - RNA, 19 nt, Artificial Sequence
  Description of Artificial Sequence: Synthetic oligonucleotide
  Antisense strand to SEQ ID NO: 2323574
uuaccuauacagauacauu

SEQ ID NO: 2323576 - RNA, 19 nt, Artificial Sequence
  Description of Artificial Sequence: Synthetic oligonucleotide
  Sense strand starting at position 2189 of SEQ ID NO: 1885195
uguaucuguauagguaaga

SEQ ID NO: 2323577 - RNA, 19 nt, Artificial Sequence
  Description of Artificial Sequence: Synthetic oligonucleotide
  Antisense strand to SEQ ID NO: 2323576
ucuuaccuauacagauaca

SEQ ID NO: 2323578 - RNA, 19 nt, Artificial Sequence
  Description of Artificial Sequence: Synthetic oligonucleotide
  Sense strand starting at position 2284 of SEQ ID NO: 1885195
augagauaaaugugaugua

SEQ ID NO: 2323579 - RNA, 19 nt, Artificial Sequence
  Description of Artificial Sequence: Synthetic oligonucleotide
  Antisense strand to SEQ ID NO: 2323578
uacaucacauuuaucucau

SEQ ID NO: 2323580 - RNA, 19 nt, Artificial Sequence
  Description of Artificial Sequence: Synthetic oligonucleotide
  Sense strand starting at position 2356 of SEQ ID NO: 1885195
guauuaucauuuccuuguu

SEQ ID NO: 2323581 - RNA, 19 nt, Artificial Sequence
  Description of Artificial Sequence: Synthetic oligonucleotide
  Antisense strand to SEQ ID NO: 2323580
aacaaggaaaugauaauac

SEQ ID NO: 2323582 - RNA, 19 nt, Artificial Sequence
  Description of Artificial Sequence: Synthetic oligonucleotide
  Sense strand starting at position 2388 of SEQ ID NO: 1885195
aguuaaucugagcacacau

SEQ ID NO: 2323583 - RNA, 19 nt, Artificial Sequence
  Description of Artificial Sequence: Synthetic oligonucleotide
  Antisense strand to SEQ ID NO: 2323582
augugugcucagauuaacu

SEQ ID NO: 2323584 - RNA, 19 nt, Artificial Sequence
  Description of Artificial Sequence: Synthetic oligonucleotide
  Sense strand starting at position 3203 of SEQ ID NO: 1885195
acuaauuauuaaccgugaa

SEQ ID NO: 2323585 - RNA, 19 nt, Artificial Sequence
  Description of Artificial Sequence: Synthetic oligonucleotide
  Antisense strand to SEQ ID NO: 2323584
uucacgguuaauaauuagu

SEQ ID NO: 2323586 - RNA, 19 nt, Artificial Sequence
  Description of Artificial Sequence: Synthetic oligonucleotide
  Sense strand starting at position 3206 of SEQ ID NO: 1885195
aauuauuaaccgugaaugu

SEQ ID NO: 2323587 - RNA, 19 nt, Artificial Sequence
  Description of Artificial Sequence: Synthetic oligonucleotide
  Antisense strand to SEQ ID NO: 2323586
acauucacgguuaauaauu

SEQ ID NO: 2323588 - RNA, 19 nt, Artificial Sequence
  Description of Artificial Sequence: Synthetic oligonucleotide
  Sense strand starting at position 3207 of SEQ ID NO: 1885195
auuauuaaccgugaauguu

SEQ ID NO: 2323589 - RNA, 19 nt, Artificial Sequence
  Description of Artificial Sequence: Synthetic oligonucleotide
  Antisense strand to SEQ ID NO: 2323588
aacauucacgguuaauaau

SEQ ID NO: 2323590 - RNA, 19 nt, Artificial Sequence
  Description of Artificial Sequence: Synthetic oligonucleotide
  Sense strand starting at position 3224 of SEQ ID NO: 1885195
uugagcggccuugacaaau

SEQ ID NO: 2323591 - RNA, 19 nt, Artificial Sequence
  Description of Artificial Sequence: Synthetic oligonucleotide
  Antisense strand to SEQ ID NO: 2323590
auuugucaaggccgcucaa

SEQ ID NO: 2323592 - RNA, 19 nt, Artificial Sequence
  Description of Artificial Sequence: Synthetic oligonucleotide
  Sense strand starting at position 3273 of SEQ ID NO: 1885195
aucagagaguuaucuaucu

SEQ ID NO: 2323593 - RNA, 19 nt, Artificial Sequence
  Description of Artificial Sequence: Synthetic oligonucleotide
  Antisense strand to SEQ ID NO: 2323592
agauagauaacucucugau

SEQ ID NO: 2323594 - RNA, 19 nt, Artificial Sequence
  Description of Artificial Sequence: Synthetic oligonucleotide
  Sense strand starting at position 3278 of SEQ ID NO: 1885195
agaguuaucuaucuacuuc

SEQ ID NO: 2323595 - RNA, 19 nt, Artificial Sequence
  Description of Artificial Sequence: Synthetic oligonucleotide
  Antisense strand to SEQ ID NO: 2323594
gaaguagauagauaacucu

SEQ ID NO: 2323596 - RNA, 19 nt, Artificial Sequence
  Description of Artificial Sequence: Synthetic oligonucleotide
  Sense strand starting at position 3407 of SEQ ID NO: 1885195
gguggauugaguuaggcaa

SEQ ID NO: 2323597 - RNA, 19 nt, Artificial Sequence
  Description of Artificial Sequence: Synthetic oligonucleotide
  Antisense strand to SEQ ID NO: 2323596
uugccuaacucaauccacc

SEQ ID NO: 2323598 - RNA, 19 nt, Artificial Sequence
  Description of Artificial Sequence: Synthetic oligonucleotide
  Sense strand starting at position 3485 of SEQ ID NO: 1885195
acagacagguuucuuuaca

SEQ ID NO: 2323599 - RNA, 19 nt, Artificial Sequence
  Description of Artificial Sequence: Synthetic oligonucleotide
  Antisense strand to SEQ ID NO: 2323598
uguaaagaaaccugucugu

SEQ ID NO: 2323600 - RNA, 19 nt, Artificial Sequence
  Description of Artificial Sequence: Synthetic oligonucleotide
  Sense strand starting at position 3531 of SEQ ID NO: 1885195
gcccaaaucauguggagaa

SEQ ID NO: 2323601 - RNA, 19 nt, Artificial Sequence
  Description of Artificial Sequence: Synthetic oligonucleotide
  Antisense strand to SEQ ID NO: 2323600
uucuccacaugauuugggc

SEQ ID NO: 2323602 - RNA, 19 nt, Artificial Sequence
  Description of Artificial Sequence: Synthetic oligonucleotide
  Sense strand starting at position 3558 of SEQ ID NO: 1885195
aaagaaguaucagaggaga

SEQ ID NO: 2323603 - RNA, 19 nt, Artificial Sequence
  Description of Artificial Sequence: Synthetic oligonucleotide
  Antisense strand to SEQ ID NO: 2323602
ucuccucugauacuucuuu

SEQ ID NO: 2323604 - RNA, 19 nt, Artificial Sequence
  Description of Artificial Sequence: Synthetic oligonucleotide
  Sense strand starting at position 33 of SEQ ID NO: 1885196
cuugauagacugcgaucua

SEQ ID NO: 2323605 - RNA, 19 nt, Artificial Sequence
  Description of Artificial Sequence: Synthetic oligonucleotide
  Antisense strand to SEQ ID NO: 2323604
uagaucgcagucuaucaag

SEQ ID NO: 2323606 - RNA, 19 nt, Artificial Sequence
  Description of Artificial Sequence: Synthetic oligonucleotide
  Sense strand starting at position 42 of SEQ ID NO: 1885196
cugcgaucuacugggagga

SEQ ID NO: 2323607 - RNA, 19 nt, Artificial Sequence
  Description of Artificial Sequence: Synthetic oligonucleotide
  Antisense strand to SEQ ID NO: 2323606
uccucccaguagaucgcag

SEQ ID NO: 2323608 - RNA, 19 nt, Artificial Sequence
  Description of Artificial Sequence: Synthetic oligonucleotide
  Sense strand starting at position 76 of SEQ ID NO: 1885196
cugaauuauugcucguggu

SEQ ID NO: 2323609 - RNA, 19 nt, Artificial Sequence
  Description of Artificial Sequence: Synthetic oligonucleotide
  Antisense strand to SEQ ID NO: 2323608
accacgagcaauaauucag

SEQ ID NO: 2323610 - RNA, 19 nt, Artificial Sequence
  Description of Artificial Sequence: Synthetic oligonucleotide
  Sense strand starting at position 77 of SEQ ID NO: 1885196
ugaauuauugcucgugguu

SEQ ID NO: 2323611 - RNA, 19 nt, Artificial Sequence
  Description of Artificial Sequence: Synthetic oligonucleotide
  Antisense strand to SEQ ID NO: 2323610
aaccacgagcaauaauuca

SEQ ID NO: 2323612 - RNA, 19 nt, Artificial Sequence
  Description of Artificial Sequence: Synthetic oligonucleotide
  Sense strand starting at position 185 of SEQ ID NO: 1885196
gacgaacuguuguaacuag

SEQ ID NO: 2323613 - RNA, 19 nt, Artificial Sequence
  Description of Artificial Sequence: Synthetic oligonucleotide
  Antisense strand to SEQ ID NO: 2323612
cuaguuacaacaguucguc

SEQ ID NO: 2323614 - RNA, 19 nt, Artificial Sequence
  Description of Artificial Sequence: Synthetic oligonucleotide
  Sense strand starting at position 212 of SEQ ID NO: 1885196
cgaggccugcuaugucuua

SEQ ID NO: 2323615 - RNA, 19 nt, Artificial Sequence
  Description of Artificial Sequence: Synthetic oligonucleotide
  Antisense strand to SEQ ID NO: 2323614
uaagacauagcaggccucg

SEQ ID NO: 2323616 - RNA, 19 nt, Artificial Sequence
  Description of Artificial Sequence: Synthetic oligonucleotide
  Sense strand starting at position 322 of SEQ ID NO: 1885196
gacggauucgagcgaagcu

SEQ ID NO: 2323617 - RNA, 19 nt, Artificial Sequence
  Description of Artificial Sequence: Synthetic oligonucleotide
  Antisense strand to SEQ ID NO: 2323616
agcuucgcucgaauccguc

SEQ ID NO: 2323618 - RNA, 19 nt, Artificial Sequence
  Description of Artificial Sequence: Synthetic oligonucleotide
  Sense strand starting at position 323 of SEQ ID NO: 1885196
acggauucgagcgaagcuu

SEQ ID NO: 2323619 - RNA, 19 nt, Artificial Sequence
  Description of Artificial Sequence: Synthetic oligonucleotide
  Antisense strand to SEQ ID NO: 2323618
aagcuucgcucgaauccgu

SEQ ID NO: 2323620 - RNA, 19 nt, Artificial Sequence
  Description of Artificial Sequence: Synthetic oligonucleotide
  Sense strand starting at position 1636 of SEQ ID NO: 1885196
ugcagauuugcuggcuguu

SEQ ID NO: 2323621 - RNA, 19 nt, Artificial Sequence
  Description of Artificial Sequence: Synthetic oligonucleotide
  Antisense strand to SEQ ID NO: 2323620
aacagccagcaaaucugca

SEQ ID NO: 2323622 - RNA, 19 nt, Artificial Sequence
  Description of Artificial Sequence: Synthetic oligonucleotide
  Sense strand starting at position 1720 of SEQ ID NO: 1885196
aaagaaagcccacaguguu

SEQ ID NO: 2323623 - RNA, 19 nt, Artificial Sequence
  Description of Artificial Sequence: Synthetic oligonucleotide
  Antisense strand to SEQ ID NO: 2323622
aacacugugggcuuucuuu

SEQ ID NO: 2323624 - RNA, 19 nt, Artificial Sequence
  Description of Artificial Sequence: Synthetic oligonucleotide
  Sense strand starting at position 2025 of SEQ ID NO: 1885196
cuauuuauagauugcguca

SEQ ID NO: 2323625 - RNA, 19 nt, Artificial Sequence
  Description of Artificial Sequence: Synthetic oligonucleotide
  Antisense strand to SEQ ID NO: 2323624
ugacgcaaucuauaaauag

SEQ ID NO: 2323626 - RNA, 19 nt, Artificial Sequence
  Description of Artificial Sequence: Synthetic oligonucleotide
  Sense strand starting at position 2027 of SEQ ID NO: 1885196
auuuauagauugcgucaac

SEQ ID NO: 2323627 - RNA, 19 nt, Artificial Sequence
  Description of Artificial Sequence: Synthetic oligonucleotide
  Antisense strand to SEQ ID NO: 2323626
guugacgcaaucuauaaau

SEQ ID NO: 2323628 - RNA, 19 nt, Artificial Sequence
  Description of Artificial Sequence: Synthetic oligonucleotide
  Sense strand starting at position 2028 of SEQ ID NO: 1885196
uuuauagauugcgucaaca

SEQ ID NO: 2323629 - RNA, 19 nt, Artificial Sequence
  Description of Artificial Sequence: Synthetic oligonucleotide
  Antisense strand to SEQ ID NO: 2323628
uguugacgcaaucuauaaa

SEQ ID NO: 2323630 - RNA, 19 nt, Artificial Sequence
  Description of Artificial Sequence: Synthetic oligonucleotide
  Sense strand starting at position 2030 of SEQ ID NO: 1885196
uauagauugcgucaacauu

SEQ ID NO: 2323631 - RNA, 19 nt, Artificial Sequence
  Description of Artificial Sequence: Synthetic oligonucleotide
  Antisense strand to SEQ ID NO: 2323630
aauguugacgcaaucuaua

SEQ ID NO: 2323632 - RNA, 19 nt, Artificial Sequence
  Description of Artificial Sequence: Synthetic oligonucleotide
  Sense strand starting at position 2036 of SEQ ID NO: 1885196
uugcgucaacauugcgaaa

SEQ ID NO: 2323633 - RNA, 19 nt, Artificial Sequence
  Description of Artificial Sequence: Synthetic oligonucleotide
  Antisense strand to SEQ ID NO: 2323632
uuucgcaauguugacgcaa

SEQ ID NO: 2323634 - RNA, 19 nt, Artificial Sequence
  Description of Artificial Sequence: Synthetic oligonucleotide
  Sense strand starting at position 2815 of SEQ ID NO: 1885196
uugagaaguuacuggaagu

SEQ ID NO: 2323635 - RNA, 19 nt, Artificial Sequence
  Description of Artificial Sequence: Synthetic oligonucleotide
  Antisense strand to SEQ ID NO: 2323634
acuuccaguaacuucucaa

SEQ ID NO: 2323636 - RNA, 19 nt, Artificial Sequence
  Description of Artificial Sequence: Synthetic oligonucleotide
  Sense strand starting at position 2826 of SEQ ID NO: 1885196
cuggaaguuagaugugaga

SEQ ID NO: 2323637 - RNA, 19 nt, Artificial Sequence
  Description of Artificial Sequence: Synthetic oligonucleotide
  Antisense strand to SEQ ID NO: 2323636
ucucacaucuaacuuccag

SEQ ID NO: 2323638 - RNA, 19 nt, Artificial Sequence
  Description of Artificial Sequence: Synthetic oligonucleotide
  Sense strand starting at position 2828 of SEQ ID NO: 1885196
ggaaguuagaugugagaca

SEQ ID NO: 2323639 - RNA, 19 nt, Artificial Sequence
  Description of Artificial Sequence: Synthetic oligonucleotide
  Antisense strand to SEQ ID NO: 2323638
ugucucacaucuaacuucc

SEQ ID NO: 2323640 - RNA, 19 nt, Artificial Sequence
  Description of Artificial Sequence: Synthetic oligonucleotide
  Sense strand starting at position 2829 of SEQ ID NO: 1885196
gaaguuagaugugagacaa

SEQ ID NO: 2323641 - RNA, 19 nt, Artificial Sequence
  Description of Artificial Sequence: Synthetic oligonucleotide
  Antisense strand to SEQ ID NO: 2323640
uugucucacaucuaacuuc

SEQ ID NO: 2323642 - RNA, 19 nt, Artificial Sequence
  Description of Artificial Sequence: Synthetic oligonucleotide
  Sense strand starting at position 2894 of SEQ ID NO: 1885196
uugccauacccuugaaaug

SEQ ID NO: 2323643 - RNA, 19 nt, Artificial Sequence
  Description of Artificial Sequence: Synthetic oligonucleotide
  Antisense strand to SEQ ID NO: 2323642
cauuucaaggguauggcaa

SEQ ID NO: 2323644 - RNA, 19 nt, Artificial Sequence
  Description of Artificial Sequence: Synthetic oligonucleotide
  Sense strand starting at position 2895 of SEQ ID NO: 1885196
ugccauacccuugaaauga

SEQ ID NO: 2323645 - RNA, 19 nt, Artificial Sequence
  Description of Artificial Sequence: Synthetic oligonucleotide
  Antisense strand to SEQ ID NO: 2323644
ucauuucaaggguauggca

SEQ ID NO: 2323646 - RNA, 19 nt, Artificial Sequence
  Description of Artificial Sequence: Synthetic oligonucleotide
  Sense strand starting at position 3012 of SEQ ID NO: 1885196
gcaaguagcucauuugagu

SEQ ID NO: 2323647 - RNA, 19 nt, Artificial Sequence
  Description of Artificial Sequence: Synthetic oligonucleotide
  Antisense strand to SEQ ID NO: 2323646
acucaaaugagcuacuugc

SEQ ID NO: 2323648 - RNA, 19 nt, Artificial Sequence
  Description of Artificial Sequence: Synthetic oligonucleotide
  Sense strand starting at position 3017 of SEQ ID NO: 1885196
uagcucauuugaguguuau

SEQ ID NO: 2323649 - RNA, 19 nt, Artificial Sequence
  Description of Artificial Sequence: Synthetic oligonucleotide
  Antisense strand to SEQ ID NO: 2323648
auaacacucaaaugagcua

SEQ ID NO: 2323650 - RNA, 19 nt, Artificial Sequence
  Description of Artificial Sequence: Synthetic oligonucleotide
  Sense strand starting at position 3018 of SEQ ID NO: 1885196
agcucauuugaguguuauu

SEQ ID NO: 2323651 - RNA, 19 nt, Artificial Sequence
  Description of Artificial Sequence: Synthetic oligonucleotide
  Antisense strand to SEQ ID NO: 2323650
aauaacacucaaaugagcu

SEQ ID NO: 2323652 - RNA, 19 nt, Artificial Sequence
  Description of Artificial Sequence: Synthetic oligonucleotide
  Sense strand starting at position 3027 of SEQ ID NO: 1885196
gaguguuauuuaucuuagc

SEQ ID NO: 2323653 - RNA, 19 nt, Artificial Sequence
  Description of Artificial Sequence: Synthetic oligonucleotide
  Antisense strand to SEQ ID NO: 2323652
gcuaagauaaauaacacuc

SEQ ID NO: 2323654 - RNA, 19 nt, Artificial Sequence
  Description of Artificial Sequence: Synthetic oligonucleotide
  Sense strand starting at position 3028 of SEQ ID NO: 1885196
aguguuauuuaucuuagca

SEQ ID NO: 2323655 - RNA, 19 nt, Artificial Sequence
  Description of Artificial Sequence: Synthetic oligonucleotide
  Antisense strand to SEQ ID NO: 2323654
ugcuaagauaaauaacacu

SEQ ID NO: 2323656 - RNA, 19 nt, Artificial Sequence
  Description of Artificial Sequence: Synthetic oligonucleotide
  Sense strand starting at position 3043 of SEQ ID NO: 1885196
agcagcuucccugagugau

SEQ ID NO: 2323657 - RNA, 19 nt, Artificial Sequence
  Description of Artificial Sequence: Synthetic oligonucleotide
  Antisense strand to SEQ ID NO: 2323656
aucacucagggaagcugcu

SEQ ID NO: 2323658 - RNA, 19 nt, Artificial Sequence
  Description of Artificial Sequence: Synthetic oligonucleotide
  Sense strand starting at position 3045 of SEQ ID NO: 1885196
cagcuucccugagugauuu

SEQ ID NO: 2323659 - RNA, 19 nt, Artificial Sequence
  Description of Artificial Sequence: Synthetic oligonucleotide
  Antisense strand to SEQ ID NO: 2323658
aaaucacucagggaagcug

SEQ ID NO: 2323660 - RNA, 19 nt, Artificial Sequence
  Description of Artificial Sequence: Synthetic oligonucleotide
  Sense strand starting at position 3186 of SEQ ID NO: 1885196
agcugaacagugugaugaa

SEQ ID NO: 2323661 - RNA, 19 nt, Artificial Sequence
  Description of Artificial Sequence: Synthetic oligonucleotide
  Antisense strand to SEQ ID NO: 2323660
uucaucacacuguucagcu

SEQ ID NO: 2323662 - RNA, 19 nt, Artificial Sequence
  Description of Artificial Sequence: Synthetic oligonucleotide
  Sense strand starting at position 3187 of SEQ ID NO: 1885196
gcugaacagugugaugaac

SEQ ID NO: 2323663 - RNA, 19 nt, Artificial Sequence
  Description of Artificial Sequence: Synthetic oligonucleotide
  Antisense strand to SEQ ID NO: 2323662
guucaucacacuguucagc

SEQ ID NO: 2323664 - RNA, 19 nt, Artificial Sequence
  Description of Artificial Sequence: Synthetic oligonucleotide
  Sense strand starting at position 3214 of SEQ ID NO: 1885196
aggguuauguuauuacuua

SEQ ID NO: 2323665 - RNA, 19 nt, Artificial Sequence
  Description of Artificial Sequence: Synthetic oligonucleotide
  Antisense strand to SEQ ID NO: 2323664
uaaguaauaacauaacccu

SEQ ID NO: 2323666 - RNA, 19 nt, Artificial Sequence
  Description of Artificial Sequence: Synthetic oligonucleotide
  Sense strand starting at position 3215 of SEQ ID NO: 1885196
ggguuauguuauuacuuaa

SEQ ID NO: 2323667 - RNA, 19 nt, Artificial Sequence
  Description of Artificial Sequence: Synthetic oligonucleotide
  Antisense strand to SEQ ID NO: 2323666
uuaaguaauaacauaaccc

SEQ ID NO: 2323668 - RNA, 19 nt, Artificial Sequence
  Description of Artificial Sequence: Synthetic oligonucleotide
  Sense strand starting at position 3384 of SEQ ID NO: 1885196
ucaagacagcaauaaguuu

SEQ ID NO: 2323669 - RNA, 19 nt, Artificial Sequence
  Description of Artificial Sequence: Synthetic oligonucleotide
  Antisense strand to SEQ ID NO: 2323668
aaacuuauugcugucuuga

SEQ ID NO: 2323670 - RNA, 19 nt, Artificial Sequence
  Description of Artificial Sequence: Synthetic oligonucleotide
  Sense strand starting at position 3391 of SEQ ID NO: 1885196
agcaauaaguuugccucua

SEQ ID NO: 2323671 - RNA, 19 nt, Artificial Sequence
  Description of Artificial Sequence: Synthetic oligonucleotide
  Antisense strand to SEQ ID NO: 2323670
uagaggcaaacuuauugcu

SEQ ID NO: 2323672 - RNA, 19 nt, Artificial Sequence
  Description of Artificial Sequence: Synthetic oligonucleotide
  Sense strand starting at position 3392 of SEQ ID NO: 1885196
gcaauaaguuugccucuau

SEQ ID NO: 2323673 - RNA, 19 nt, Artificial Sequence
  Description of Artificial Sequence: Synthetic oligonucleotide
  Antisense strand to SEQ ID NO: 2323672
auagaggcaaacuuauugc

SEQ ID NO: 2323674 - RNA, 19 nt, Artificial Sequence
  Description of Artificial Sequence: Synthetic oligonucleotide
  Sense strand starting at position 3403 of SEQ ID NO: 1885196
gccucuauuugggaaaccu

SEQ ID NO: 2323675 - RNA, 19 nt, Artificial Sequence
  Description of Artificial Sequence: Synthetic oligonucleotide
  Antisense strand to SEQ ID NO: 2323674
agguuucccaaauagaggc

SEQ ID NO: 2323676 - RNA, 19 nt, Artificial Sequence
  Description of Artificial Sequence: Synthetic oligonucleotide
  Sense strand starting at position 3413 of SEQ ID NO: 1885196
gggaaaccuuuccaggcuu

SEQ ID NO: 2323677 - RNA, 19 nt, Artificial Sequence
  Description of Artificial Sequence: Synthetic oligonucleotide
  Antisense strand to SEQ ID NO: 2323676
aagccuggaaagguuuccc

SEQ ID NO: 2323678 - RNA, 19 nt, Artificial Sequence
  Description of Artificial Sequence: Synthetic oligonucleotide
  Sense strand starting at position 3465 of SEQ ID NO: 1885196
gggaucgucagcugccaau

SEQ ID NO: 2323679 - RNA, 19 nt, Artificial Sequence
  Description of Artificial Sequence: Synthetic oligonucleotide
  Antisense strand to SEQ ID NO: 2323678
auuggcagcugacgauccc

SEQ ID NO: 2323680 - RNA, 19 nt, Artificial Sequence
  Description of Artificial Sequence: Synthetic oligonucleotide
  Sense strand starting at position 3482 of SEQ ID NO: 1885196
augugugcacucguucuaa

SEQ ID NO: 2323681 - RNA, 19 nt, Artificial Sequence
  Description of Artificial Sequence: Synthetic oligonucleotide
  Antisense strand to SEQ ID NO: 2323680
uuagaacgagugcacacau

SEQ ID NO: 2323682 - RNA, 19 nt, Artificial Sequence
  Description of Artificial Sequence: Synthetic oligonucleotide
  Sense strand starting at position 3739 of SEQ ID NO: 1885196
gaauucguuucugcgccaa

SEQ ID NO: 2323683 - RNA, 19 nt, Artificial Sequence
  Description of Artificial Sequence: Synthetic oligonucleotide
  Antisense strand to SEQ ID NO: 2323682
uuggcgcagaaacgaauuc

SEQ ID NO: 2323684 - RNA, 19 nt, Artificial Sequence
  Description of Artificial Sequence: Synthetic oligonucleotide
  Sense strand starting at position 69 of SEQ ID NO: 1885197
ggagaacuuucuccuggca

SEQ ID NO: 2323685 - RNA, 19 nt, Artificial Sequence
  Description of Artificial Sequence: Synthetic oligonucleotide
  Antisense strand to SEQ ID NO: 2323684
ugccaggagaaaguucucc

SEQ ID NO: 2323686 - RNA, 19 nt, Artificial Sequence
  Description of Artificial Sequence: Synthetic oligonucleotide
  Sense strand starting at position 388 of SEQ ID NO: 1885197
gccagaugauagguugacu

SEQ ID NO: 2323687 - RNA, 19 nt, Artificial Sequence
  Description of Artificial Sequence: Synthetic oligonucleotide
  Antisense strand to SEQ ID NO: 2323686
agucaaccuaucaucuggc

SEQ ID NO: 2323688 - RNA, 19 nt, Artificial Sequence
  Description of Artificial Sequence: Synthetic oligonucleotide
  Sense strand starting at position 414 of SEQ ID NO: 1885197
ccauuauguccggcgucaa

SEQ ID NO: 2323689 - RNA, 19 nt, Artificial Sequence
  Description of Artificial Sequence: Synthetic oligonucleotide
  Antisense strand to SEQ ID NO: 2323688
uugacgccggacauaaugg

SEQ ID NO: 2323690 - RNA, 19 nt, Artificial Sequence
  Description of Artificial Sequence: Synthetic oligonucleotide
  Sense strand starting at position 417 of SEQ ID NO: 1885197
uuauguccggcgucaagua

SEQ ID NO: 2323691 - RNA, 19 nt, Artificial Sequence
  Description of Artificial Sequence: Synthetic oligonucleotide
  Antisense strand to SEQ ID NO: 2323690
uacuugacgccggacauaa

SEQ ID NO: 2323692 - RNA, 19 nt, Artificial Sequence
  Description of Artificial Sequence: Synthetic oligonucleotide
  Sense strand starting at position 518 of SEQ ID NO: 1885197
uugccuuugggcuaagaug

SEQ ID NO: 2323693 - RNA, 19 nt, Artificial Sequence
  Description of Artificial Sequence: Synthetic oligonucleotide
  Antisense strand to SEQ ID NO: 2323692
caucuuagcccaaaggcaa

SEQ ID NO: 2323694 - RNA, 19 nt, Artificial Sequence
  Description of Artificial Sequence: Synthetic oligonucleotide
  Sense strand starting at position 675 of SEQ ID NO: 1885197
agugauuaauauguccuau

SEQ ID NO: 2323695 - RNA, 19 nt, Artificial Sequence
  Description of Artificial Sequence: Synthetic oligonucleotide
  Antisense strand to SEQ ID NO: 2323694
auaggacauauuaaucacu

SEQ ID NO: 2323696 - RNA, 19 nt, Artificial Sequence
  Description of Artificial Sequence: Synthetic oligonucleotide
  Sense strand starting at position 710 of SEQ ID NO: 1885197
gaggaaagguugucaaacu

SEQ ID NO: 2323697 - RNA, 19 nt, Artificial Sequence
  Description of Artificial Sequence: Synthetic oligonucleotide
  Antisense strand to SEQ ID NO: 2323696
aguuugacaaccuuuccuc

SEQ ID NO: 2323698 - RNA, 19 nt, Artificial Sequence
  Description of Artificial Sequence: Synthetic oligonucleotide
  Sense strand starting at position 718 of SEQ ID NO: 1885197
guugucaaacuuuagauaa

SEQ ID NO: 2323699 - RNA, 19 nt, Artificial Sequence
  Description of Artificial Sequence: Synthetic oligonucleotide
  Antisense strand to SEQ ID NO: 2323698
uuaucuaaaguuugacaac

SEQ ID NO: 2323700 - RNA, 19 nt, Artificial Sequence
  Description of Artificial Sequence: Synthetic oligonucleotide
  Sense strand starting at position 792 of SEQ ID NO: 1885197
agcuucuugacauguggaa

SEQ ID NO: 2323701 - RNA, 19 nt, Artificial Sequence
  Description of Artificial Sequence: Synthetic oligonucleotide
  Antisense strand to SEQ ID NO: 2323700
uuccacaugucaagaagcu

SEQ ID NO: 2323702 - RNA, 19 nt, Artificial Sequence
  Description of Artificial Sequence: Synthetic oligonucleotide
  Sense strand starting at position 804 of SEQ ID NO: 1885197
uguggaauugacugggaca

SEQ ID NO: 2323703 - RNA, 19 nt, Artificial Sequence
  Description of Artificial Sequence: Synthetic oligonucleotide
  Antisense strand to SEQ ID NO: 2323702
ugucccagucaauuccaca

SEQ ID NO: 2323704 - RNA, 19 nt, Artificial Sequence
  Description of Artificial Sequence: Synthetic oligonucleotide
  Sense strand starting at position 822 of SEQ ID NO: 1885197
acugguaauugauccuauu

SEQ ID NO: 2323705 - RNA, 19 nt, Artificial Sequence
  Description of Artificial Sequence: Synthetic oligonucleotide
  Antisense strand to SEQ ID NO: 2323704
aauaggaucaauuaccagu

SEQ ID NO: 2323706 - RNA, 19 nt, Artificial Sequence
  Description of Artificial Sequence: Synthetic oligonucleotide
  Sense strand starting at position 825 of SEQ ID NO: 1885197
gguaauugauccuauuuaa

SEQ ID NO: 2323707 - RNA, 19 nt, Artificial Sequence
  Description of Artificial Sequence: Synthetic oligonucleotide
  Antisense strand to SEQ ID NO: 2323706
uuaaauaggaucaauuacc

SEQ ID NO: 2323708 - RNA, 19 nt, Artificial Sequence
  Description of Artificial Sequence: Synthetic oligonucleotide
  Sense strand starting at position 1025 of SEQ ID NO: 1885197
cucaguuugcaagaauauc

SEQ ID NO: 2323709 - RNA, 19 nt, Artificial Sequence
  Description of Artificial Sequence: Synthetic oligonucleotide
  Antisense strand to SEQ ID NO: 2323708
gauauucuugcaaacugag

SEQ ID NO: 2323710 - RNA, 19 nt, Artificial Sequence
  Description of Artificial Sequence: Synthetic oligonucleotide
  Sense strand starting at position 1075 of SEQ ID NO: 1885197
acccaauugcuagagcaua

SEQ ID NO: 2323711 - RNA, 19 nt, Artificial Sequence
  Description of Artificial Sequence: Synthetic oligonucleotide
  Antisense strand to SEQ ID NO: 2323710
uaugcucuagcaauugggu

SEQ ID NO: 2323712 - RNA, 19 nt, Artificial Sequence
  Description of Artificial Sequence: Synthetic oligonucleotide
  Sense strand starting at position 1344 of SEQ ID NO: 1885197
auggaacucuguucucaca

SEQ ID NO: 2323713 - RNA, 19 nt, Artificial Sequence
  Description of Artificial Sequence: Synthetic oligonucleotide
  Antisense strand to SEQ ID NO: 2323712
ugugagaacagaguuccau

SEQ ID NO: 2323714 - RNA, 19 nt, Artificial Sequence
  Description of Artificial Sequence: Synthetic oligonucleotide
  Sense strand starting at position 1355 of SEQ ID NO: 1885197
uucucacagugauuauaca

SEQ ID NO: 2323715 - RNA, 19 nt, Artificial Sequence
  Description of Artificial Sequence: Synthetic oligonucleotide
  Antisense strand to SEQ ID NO: 2323714
uguauaaucacugugagaa

SEQ ID NO: 2323716 - RNA, 19 nt, Artificial Sequence
  Description of Artificial Sequence: Synthetic oligonucleotide
  Sense strand starting at position 1399 of SEQ ID NO: 1885197
cuagaaacacuugguacuu

SEQ ID NO: 2323717 - RNA, 19 nt, Artificial Sequence
  Description of Artificial Sequence: Synthetic oligonucleotide
  Antisense strand to SEQ ID NO: 2323716
aaguaccaaguguuucuag

SEQ ID NO: 2323718 - RNA, 19 nt, Artificial Sequence
  Description of Artificial Sequence: Synthetic oligonucleotide
  Sense strand starting at position 1571 of SEQ ID NO: 1885197
agugauagccaaugauaug

SEQ ID NO: 2323719 - RNA, 19 nt, Artificial Sequence
  Description of Artificial Sequence: Synthetic oligonucleotide
  Antisense strand to SEQ ID NO: 2323718
cauaucauuggcuaucacu

SEQ ID NO: 2323720 - RNA, 19 nt, Artificial Sequence
  Description of Artificial Sequence: Synthetic oligonucleotide
  Sense strand starting at position 1686 of SEQ ID NO: 1885197
uccuguucugauuaauguu

SEQ ID NO: 2323721 - RNA, 19 nt, Artificial Sequence
  Description of Artificial Sequence: Synthetic oligonucleotide
  Antisense strand to SEQ ID NO: 2323720
aacauuaaucagaacagga

SEQ ID NO: 2323722 - RNA, 19 nt, Artificial Sequence
  Description of Artificial Sequence: Synthetic oligonucleotide
  Sense strand starting at position 1709 of SEQ ID NO: 1885197
ugccuugaugcacauauaa

SEQ ID NO: 2323723 - RNA, 19 nt, Artificial Sequence
  Description of Artificial Sequence: Synthetic oligonucleotide
  Antisense strand to SEQ ID NO: 2323722
uuauaugugcaucaaggca

SEQ ID NO: 2323724 - RNA, 19 nt, Artificial Sequence
  Description of Artificial Sequence: Synthetic oligonucleotide
  Sense strand starting at position 1740 of SEQ ID NO: 1885197
gcagaaaggguuuagcuua

SEQ ID NO: 2323725 - RNA, 19 nt, Artificial Sequence
  Description of Artificial Sequence: Synthetic oligonucleotide
  Antisense strand to SEQ ID NO: 2323724
uaagcuaaacccuuucugc

SEQ ID NO: 2323726 - RNA, 19 nt, Artificial Sequence
  Description of Artificial Sequence: Synthetic oligonucleotide
  Sense strand starting at position 1745 of SEQ ID NO: 1885197
aaggguuuagcuuaggacu

SEQ ID NO: 2323727 - RNA, 19 nt, Artificial Sequence
  Description of Artificial Sequence: Synthetic oligonucleotide
  Antisense strand to SEQ ID NO: 2323726
aguccuaagcuaaacccuu

SEQ ID NO: 2323728 - RNA, 19 nt, Artificial Sequence
  Description of Artificial Sequence: Synthetic oligonucleotide
  Sense strand starting at position 1753 of SEQ ID NO: 1885197
agcuuaggacuguggagaa

SEQ ID NO: 2323729 - RNA, 19 nt, Artificial Sequence
  Description of Artificial Sequence: Synthetic oligonucleotide
  Antisense strand to SEQ ID NO: 2323728
uucuccacaguccuaagcu

SEQ ID NO: 2323730 - RNA, 19 nt, Artificial Sequence
  Description of Artificial Sequence: Synthetic oligonucleotide
  Sense strand starting at position 1830 of SEQ ID NO: 1885197
ucccaaguuccugauaagu

SEQ ID NO: 2323731 - RNA, 19 nt, Artificial Sequence
  Description of Artificial Sequence: Synthetic oligonucleotide
  Antisense strand to SEQ ID NO: 2323730
acuuaucaggaacuuggga

SEQ ID NO: 2323732 - RNA, 19 nt, Artificial Sequence
  Description of Artificial Sequence: Synthetic oligonucleotide
  Sense strand starting at position 1840 of SEQ ID NO: 1885197
cugauaagucuacaaagcu

SEQ ID NO: 2323733 - RNA, 19 nt, Artificial Sequence
  Description of Artificial Sequence: Synthetic oligonucleotide
  Antisense strand to SEQ ID NO: 2323732
agcuuuguagacuuaucag

SEQ ID NO: 2323734 - RNA, 19 nt, Artificial Sequence
  Description of Artificial Sequence: Synthetic oligonucleotide
  Sense strand starting at position 1862 of SEQ ID NO: 1885197
acacucacaguuugaucau

SEQ ID NO: 2323735 - RNA, 19 nt, Artificial Sequence
  Description of Artificial Sequence: Synthetic oligonucleotide
  Antisense strand to SEQ ID NO: 2323734
augaucaaacugugagugu

SEQ ID NO: 2323736 - RNA, 19 nt, Artificial Sequence
  Description of Artificial Sequence: Synthetic oligonucleotide
  Sense strand starting at position 1865 of SEQ ID NO: 1885197
cucacaguuugaucauuag

SEQ ID NO: 2323737 - RNA, 19 nt, Artificial Sequence
  Description of Artificial Sequence: Synthetic oligonucleotide
  Antisense strand to SEQ ID NO: 2323736
cuaaugaucaaacugugag

SEQ ID NO: 2323738 - RNA, 19 nt, Artificial Sequence
  Description of Artificial Sequence: Synthetic oligonucleotide
  Sense strand starting at position 1995 of SEQ ID NO: 1885197
gcugaucccuuucucagaa

SEQ ID NO: 2323739 - RNA, 19 nt, Artificial Sequence
  Description of Artificial Sequence: Synthetic oligonucleotide
  Antisense strand to SEQ ID NO: 2323738
uucugagaaagggaucagc

SEQ ID NO: 2323740 - RNA, 19 nt, Artificial Sequence
  Description of Artificial Sequence: Synthetic oligonucleotide
  Sense strand starting at position 2032 of SEQ ID NO: 1885197
ggcaucaucuccuuugaga

SEQ ID NO: 2323741 - RNA, 19 nt, Artificial Sequence
  Description of Artificial Sequence: Synthetic oligonucleotide
  Antisense strand to SEQ ID NO: 2323740
ucucaaaggagaugaugcc

SEQ ID NO: 2323742 - RNA, 19 nt, Artificial Sequence
  Description of Artificial Sequence: Synthetic oligonucleotide
  Sense strand starting at position 2175 of SEQ ID NO: 1885197
gugagaaggucuccuacug

SEQ ID NO: 2323743 - RNA, 19 nt, Artificial Sequence
  Description of Artificial Sequence: Synthetic oligonucleotide
  Antisense strand to SEQ ID NO: 2323742
caguaggagaccuucucac

SEQ ID NO: 2323744 - RNA, 19 nt, Artificial Sequence
  Description of Artificial Sequence: Synthetic oligonucleotide
  Sense strand starting at position 2420 of SEQ ID NO: 1885197
gaaacuggugcuugagaga

SEQ ID NO: 2323745 - RNA, 19 nt, Artificial Sequence
  Description of Artificial Sequence: Synthetic oligonucleotide
  Antisense strand to SEQ ID NO: 2323744
ucucucaagcaccaguuuc

SEQ ID NO: 2323746 - RNA, 19 nt, Artificial Sequence
  Description of Artificial Sequence: Synthetic oligonucleotide
  Sense strand starting at position 2586 of SEQ ID NO: 1885197
uaaggaagccgguauagua

SEQ ID NO: 2323747 - RNA, 19 nt, Artificial Sequence
  Description of Artificial Sequence: Synthetic oligonucleotide
  Antisense strand to SEQ ID NO: 2323746
uacuauaccggcuuccuua

SEQ ID NO: 2323748 - RNA, 19 nt, Artificial Sequence
  Description of Artificial Sequence: Synthetic oligonucleotide
  Sense strand starting at position 2781 of SEQ ID NO: 1885197
aguacuucuuuacuaaagu

SEQ ID NO: 2323749 - RNA, 19 nt, Artificial Sequence
  Description of Artificial Sequence: Synthetic oligonucleotide
  Antisense strand to SEQ ID NO: 2323748
acuuuaguaaagaaguacu

SEQ ID NO: 2323750 - RNA, 19 nt, Artificial Sequence
  Description of Artificial Sequence: Synthetic oligonucleotide
  Sense strand starting at position 3293 of SEQ ID NO: 1885197
ugucuaauaugagucagaa

SEQ ID NO: 2323751 - RNA, 19 nt, Artificial Sequence
  Description of Artificial Sequence: Synthetic oligonucleotide
  Antisense strand to SEQ ID NO: 2323750
uucugacucauauuagaca

SEQ ID NO: 2323752 - RNA, 19 nt, Artificial Sequence
  Description of Artificial Sequence: Synthetic oligonucleotide
  Sense strand starting at position 3722 of SEQ ID NO: 1885197
agagaagacuuaguggcau

SEQ ID NO: 2323753 - RNA, 19 nt, Artificial Sequence
  Description of Artificial Sequence: Synthetic oligonucleotide
  Antisense strand to SEQ ID NO: 2323752
augccacuaagucuucucu

SEQ ID NO: 2323754 - RNA, 19 nt, Artificial Sequence
  Description of Artificial Sequence: Synthetic oligonucleotide
  Sense strand starting at position 3730 of SEQ ID NO: 1885197
cuuaguggcauaggacaua

SEQ ID NO: 2323755 - RNA, 19 nt, Artificial Sequence
  Description of Artificial Sequence: Synthetic oligonucleotide
  Antisense strand to SEQ ID NO: 2323754
uauguccuaugccacuaag

SEQ ID NO: 2323756 - RNA, 19 nt, Artificial Sequence
  Description of Artificial Sequence: Synthetic oligonucleotide
  Sense strand starting at position 3762 of SEQ ID NO: 1885197
ugaagaugccuguggauuc

SEQ ID NO: 2323757 - RNA, 19 nt, Artificial Sequence
  Description of Artificial Sequence: Synthetic oligonucleotide
  Antisense strand to SEQ ID NO: 2323756
gaauccacaggcaucuuca

SEQ ID NO: 2323758 - RNA, 19 nt, Artificial Sequence
  Description of Artificial Sequence: Synthetic oligonucleotide
  Sense strand starting at position 3804 of SEQ ID NO: 1885197
gcacaauucuaagugauac

SEQ ID NO: 2323759 - RNA, 19 nt, Artificial Sequence
  Description of Artificial Sequence: Synthetic oligonucleotide
  Antisense strand to SEQ ID NO: 2323758
guaucacuuagaauugugc

SEQ ID NO: 2323760 - RNA, 19 nt, Artificial Sequence
  Description of Artificial Sequence: Synthetic oligonucleotide
  Sense strand starting at position 3827 of SEQ ID NO: 1885197
ugaaauguaaauggagguu

SEQ ID NO: 2323761 - RNA, 19 nt, Artificial Sequence
  Description of Artificial Sequence: Synthetic oligonucleotide
  Antisense strand to SEQ ID NO: 2323760
aaccuccauuuacauuuca

SEQ ID NO: 2323762 - RNA, 19 nt, Artificial Sequence
  Description of Artificial Sequence: Synthetic oligonucleotide
  Sense strand starting at position 3983 of SEQ ID NO: 1885197
ugggcauaucuauauucca

SEQ ID NO: 2323763 - RNA, 19 nt, Artificial Sequence
  Description of Artificial Sequence: Synthetic oligonucleotide
  Antisense strand to SEQ ID NO: 2323762
uggaauauagauaugccca

SEQ ID NO: 2323764 - RNA, 19 nt, Artificial Sequence
  Description of Artificial Sequence: Synthetic oligonucleotide
  Sense strand starting at position 5 of SEQ ID NO: 1885198
acuguauugcuagaaauaa

SEQ ID NO: 2323765 - RNA, 19 nt, Artificial Sequence
  Description of Artificial Sequence: Synthetic oligonucleotide
  Antisense strand to SEQ ID NO: 2323764
uuauuucuagcaauacagu

SEQ ID NO: 2323766 - RNA, 19 nt, Artificial Sequence
  Description of Artificial Sequence: Synthetic oligonucleotide
  Sense strand starting at position 157 of SEQ ID NO: 1885198
ggaacaguuaagggugauu

SEQ ID NO: 2323767 - RNA, 19 nt, Artificial Sequence
  Description of Artificial Sequence: Synthetic oligonucleotide
  Antisense strand to SEQ ID NO: 2323766
aaucacccuuaacuguucc

SEQ ID NO: 2323768 - RNA, 19 nt, Artificial Sequence
  Description of Artificial Sequence: Synthetic oligonucleotide
  Sense strand starting at position 225 of SEQ ID NO: 1885198
uguguuuguauuuagugua

SEQ ID NO: 2323769 - RNA, 19 nt, Artificial Sequence
  Description of Artificial Sequence: Synthetic oligonucleotide
  Antisense strand to SEQ ID NO: 2323768
uacacuaaauacaaacaca

SEQ ID NO: 2323770 - RNA, 19 nt, Artificial Sequence
  Description of Artificial Sequence: Synthetic oligonucleotide
  Sense strand starting at position 366 of SEQ ID NO: 1885198
ccuguuuaaguggagguua

SEQ ID NO: 2323771 - RNA, 19 nt, Artificial Sequence
  Description of Artificial Sequence: Synthetic oligonucleotide
  Antisense strand to SEQ ID NO: 2323770
uaaccuccacuuaaacagg

SEQ ID NO: 2323772 - RNA, 19 nt, Artificial Sequence
  Description of Artificial Sequence: Synthetic oligonucleotide
  Sense strand starting at position 678 of SEQ ID NO: 1885198
ccuggauagccucagcaaa

SEQ ID NO: 2323773 - RNA, 19 nt, Artificial Sequence
  Description of Artificial Sequence: Synthetic oligonucleotide
  Antisense strand to SEQ ID NO: 2323772
uuugcugaggcuauccagg

SEQ ID NO: 2323774 - RNA, 19 nt, Artificial Sequence
  Description of Artificial Sequence: Synthetic oligonucleotide
  Sense strand starting at position 890 of SEQ ID NO: 1885198
uuagaucaugguugagaac

SEQ ID NO: 2323775 - RNA, 19 nt, Artificial Sequence
  Description of Artificial Sequence: Synthetic oligonucleotide
  Antisense strand to SEQ ID NO: 2323774
guucucaaccaugaucuaa

SEQ ID NO: 2323776 - RNA, 19 nt, Artificial Sequence
  Description of Artificial Sequence: Synthetic oligonucleotide
  Sense strand starting at position 903 of SEQ ID NO: 1885198
gagaacuaauucucauggu

SEQ ID NO: 2323777 - RNA, 19 nt, Artificial Sequence
  Description of Artificial Sequence: Synthetic oligonucleotide
  Antisense strand to SEQ ID NO: 2323776
accaugagaauuaguucuc

SEQ ID NO: 2323778 - RNA, 19 nt, Artificial Sequence
  Description of Artificial Sequence: Synthetic oligonucleotide
  Sense strand starting at position 909 of SEQ ID NO: 1885198
uaauucucaugguugagaa

SEQ ID NO: 2323779 - RNA, 19 nt, Artificial Sequence
  Description of Artificial Sequence: Synthetic oligonucleotide
  Antisense strand to SEQ ID NO: 2323778
uucucaaccaugagaauua

SEQ ID NO: 2323780 - RNA, 19 nt, Artificial Sequence
  Description of Artificial Sequence: Synthetic oligonucleotide
  Sense strand starting at position 910 of SEQ ID NO: 1885198
aauucucaugguugagaau

SEQ ID NO: 2323781 - RNA, 19 nt, Artificial Sequence
  Description of Artificial Sequence: Synthetic oligonucleotide
  Antisense strand to SEQ ID NO: 2323780
auucucaaccaugagaauu

SEQ ID NO: 2323782 - RNA, 19 nt, Artificial Sequence
  Description of Artificial Sequence: Synthetic oligonucleotide
  Sense strand starting at position 1237 of SEQ ID NO: 1885198
uuguaagauugguuugaga

SEQ ID NO: 2323783 - RNA, 19 nt, Artificial Sequence
  Description of Artificial Sequence: Synthetic oligonucleotide
  Antisense strand to SEQ ID NO: 2323782
ucucaaaccaaucuuacaa

SEQ ID NO: 2323784 - RNA, 19 nt, Artificial Sequence
  Description of Artificial Sequence: Synthetic oligonucleotide
  Sense strand starting at position 1239 of SEQ ID NO: 1885198
guaagauugguuugagaua

SEQ ID NO: 2323785 - RNA, 19 nt, Artificial Sequence
  Description of Artificial Sequence: Synthetic oligonucleotide
  Antisense strand to SEQ ID NO: 2323784
uaucucaaaccaaucuuac

SEQ ID NO: 2323786 - RNA, 19 nt, Artificial Sequence
  Description of Artificial Sequence: Synthetic oligonucleotide
  Sense strand starting at position 1375 of SEQ ID NO: 1885198
uggugugucauuuaguguu

SEQ ID NO: 2323787 - RNA, 19 nt, Artificial Sequence
  Description of Artificial Sequence: Synthetic oligonucleotide
  Antisense strand to SEQ ID NO: 2323786
aacacuaaaugacacacca

SEQ ID NO: 2323788 - RNA, 19 nt, Artificial Sequence
  Description of Artificial Sequence: Synthetic oligonucleotide
  Sense strand starting at position 1440 of SEQ ID NO: 1885198
ccucuagcugcuguguaua

SEQ ID NO: 2323789 - RNA, 19 nt, Artificial Sequence
  Description of Artificial Sequence: Synthetic oligonucleotide
  Antisense strand to SEQ ID NO: 2323788
uauacacagcagcuagagg

SEQ ID NO: 2323790 - RNA, 19 nt, Artificial Sequence
  Description of Artificial Sequence: Synthetic oligonucleotide
  Sense strand starting at position 1452 of SEQ ID NO: 1885198
guguauauucuacaguuga

SEQ ID NO: 2323791 - RNA, 19 nt, Artificial Sequence
  Description of Artificial Sequence: Synthetic oligonucleotide
  Antisense strand to SEQ ID NO: 2323790
ucaacuguagaauauacac

SEQ ID NO: 2323792 - RNA, 19 nt, Artificial Sequence
  Description of Artificial Sequence: Synthetic oligonucleotide
  Sense strand starting at position 1499 of SEQ ID NO: 1885198
aguguuuaauuugugugaa

SEQ ID NO: 2323793 - RNA, 19 nt, Artificial Sequence
  Description of Artificial Sequence: Synthetic oligonucleotide
  Antisense strand to SEQ ID NO: 2323792
uucacacaaauuaaacacu

SEQ ID NO: 2323794 - RNA, 19 nt, Artificial Sequence
  Description of Artificial Sequence: Synthetic oligonucleotide
  Sense strand starting at position 1894 of SEQ ID NO: 1885198
ucauauaccuuacuugagu

SEQ ID NO: 2323795 - RNA, 19 nt, Artificial Sequence
  Description of Artificial Sequence: Synthetic oligonucleotide
  Antisense strand to SEQ ID NO: 2323794
acucaaguaagguauauga

SEQ ID NO: 2323796 - RNA, 19 nt, Artificial Sequence
  Description of Artificial Sequence: Synthetic oligonucleotide
  Sense strand starting at position 2151 of SEQ ID NO: 1885198
uguacuuuccuagaggauu

SEQ ID NO: 2323797 - RNA, 19 nt, Artificial Sequence
  Description of Artificial Sequence: Synthetic oligonucleotide
  Antisense strand to SEQ ID NO: 2323796
aauccucuaggaaaguaca

SEQ ID NO: 2323798 - RNA, 19 nt, Artificial Sequence
  Description of Artificial Sequence: Synthetic oligonucleotide
  Sense strand starting at position 2221 of SEQ ID NO: 1885198
auucuugagccugaaauug

SEQ ID NO: 2323799 - RNA, 19 nt, Artificial Sequence
  Description of Artificial Sequence: Synthetic oligonucleotide
  Antisense strand to SEQ ID NO: 2323798
caauuucaggcucaagaau

SEQ ID NO: 2323800 - RNA, 19 nt, Artificial Sequence
  Description of Artificial Sequence: Synthetic oligonucleotide
  Sense strand starting at position 2230 of SEQ ID NO: 1885198
ccugaaauugugugaaacc

SEQ ID NO: 2323801 - RNA, 19 nt, Artificial Sequence
  Description of Artificial Sequence: Synthetic oligonucleotide
  Antisense strand to SEQ ID NO: 2323800
gguuucacacaauuucagg

SEQ ID NO: 2323802 - RNA, 19 nt, Artificial Sequence
  Description of Artificial Sequence: Synthetic oligonucleotide
  Sense strand starting at position 2319 of SEQ ID NO: 1885198
uggacauaauccucucaug

SEQ ID NO: 2323803 - RNA, 19 nt, Artificial Sequence
  Description of Artificial Sequence: Synthetic oligonucleotide
  Antisense strand to SEQ ID NO: 2323802
caugagaggauuaugucca

SEQ ID NO: 2323804 - RNA, 19 nt, Artificial Sequence
  Description of Artificial Sequence: Synthetic oligonucleotide
  Sense strand starting at position 2413 of SEQ ID NO: 1885198
gccuuaagguccuuaauuu

SEQ ID NO: 2323805 - RNA, 19 nt, Artificial Sequence
  Description of Artificial Sequence: Synthetic oligonucleotide
  Antisense strand to SEQ ID NO: 2323804
aaauuaaggaccuuaaggc

SEQ ID NO: 2323806 - RNA, 19 nt, Artificial Sequence
  Description of Artificial Sequence: Synthetic oligonucleotide
  Sense strand starting at position 2450 of SEQ ID NO: 1885198
ugggcagugguuagauguu

SEQ ID NO: 2323807 - RNA, 19 nt, Artificial Sequence
  Description of Artificial Sequence: Synthetic oligonucleotide
  Antisense strand to SEQ ID NO: 2323806
aacaucuaaccacugccca

SEQ ID NO: 2323808 - RNA, 19 nt, Artificial Sequence
  Description of Artificial Sequence: Synthetic oligonucleotide
  Sense strand starting at position 2481 of SEQ ID NO: 1885198
ccggaauugaaggguacau

SEQ ID NO: 2323809 - RNA, 19 nt, Artificial Sequence
  Description of Artificial Sequence: Synthetic oligonucleotide
  Antisense strand to SEQ ID NO: 2323808
auguacccuucaauuccgg

SEQ ID NO: 2323810 - RNA, 19 nt, Artificial Sequence
  Description of Artificial Sequence: Synthetic oligonucleotide
  Sense strand starting at position 2908 of SEQ ID NO: 1885198
aagauaugggccugagaug

SEQ ID NO: 2323811 - RNA, 19 nt, Artificial Sequence
  Description of Artificial Sequence: Synthetic oligonucleotide
  Antisense strand to SEQ ID NO: 2323810
caucucaggcccauaucuu

SEQ ID NO: 2323812 - RNA, 19 nt, Artificial Sequence
  Description of Artificial Sequence: Synthetic oligonucleotide
  Sense strand starting at position 2917 of SEQ ID NO: 1885198
gccugagaugcguuucugu

SEQ ID NO: 2323813 - RNA, 19 nt, Artificial Sequence
  Description of Artificial Sequence: Synthetic oligonucleotide
  Antisense strand to SEQ ID NO: 2323812
acagaaacgcaucucaggc

SEQ ID NO: 2323814 - RNA, 19 nt, Artificial Sequence
  Description of Artificial Sequence: Synthetic oligonucleotide
  Sense strand starting at position 2989 of SEQ ID NO: 1885198
ugaaucaagaaguguuaga

SEQ ID NO: 2323815 - RNA, 19 nt, Artificial Sequence
  Description of Artificial Sequence: Synthetic oligonucleotide
  Antisense strand to SEQ ID NO: 2323814
ucuaacacuucuugauuca

SEQ ID NO: 2323816 - RNA, 19 nt, Artificial Sequence
  Description of Artificial Sequence: Synthetic oligonucleotide
  Sense strand starting at position 2999 of SEQ ID NO: 1885198
aguguuagaaccuauguga

SEQ ID NO: 2323817 - RNA, 19 nt, Artificial Sequence
  Description of Artificial Sequence: Synthetic oligonucleotide
  Antisense strand to SEQ ID NO: 2323816
ucacauagguucuaacacu

SEQ ID NO: 2323818 - RNA, 19 nt, Artificial Sequence
  Description of Artificial Sequence: Synthetic oligonucleotide
  Sense strand starting at position 3002 of SEQ ID NO: 1885198
guuagaaccuaugugagga

SEQ ID NO: 2323819 - RNA, 19 nt, Artificial Sequence
  Description of Artificial Sequence: Synthetic oligonucleotide
  Antisense strand to SEQ ID NO: 2323818
uccucacauagguucuaac

SEQ ID NO: 2323820 - RNA, 19 nt, Artificial Sequence
  Description of Artificial Sequence: Synthetic oligonucleotide
  Sense strand starting at position 3003 of SEQ ID NO: 1885198
uuagaaccuaugugaggau

SEQ ID NO: 2323821 - RNA, 19 nt, Artificial Sequence
  Description of Artificial Sequence: Synthetic oligonucleotide
  Antisense strand to SEQ ID NO: 2323820
auccucacauagguucuaa

SEQ ID NO: 2323822 - RNA, 19 nt, Artificial Sequence
  Description of Artificial Sequence: Synthetic oligonucleotide
  Sense strand starting at position 3012 of SEQ ID NO: 1885198
augugaggaugcuuaauag

SEQ ID NO: 2323823 - RNA, 19 nt, Artificial Sequence
  Description of Artificial Sequence: Synthetic oligonucleotide
  Antisense strand to SEQ ID NO: 2323822
cuauuaagcauccucacau

SEQ ID NO: 2323824 - RNA, 19 nt, Artificial Sequence
  Description of Artificial Sequence: Synthetic oligonucleotide
  Sense strand starting at position 3104 of SEQ ID NO: 1885198
gcuaucucugcagaauuaa

SEQ ID NO: 2323825 - RNA, 19 nt, Artificial Sequence
  Description of Artificial Sequence: Synthetic oligonucleotide
  Antisense strand to SEQ ID NO: 2323824
uuaauucugcagagauagc

SEQ ID NO: 2323826 - RNA, 19 nt, Artificial Sequence
  Description of Artificial Sequence: Synthetic oligonucleotide
  Sense strand starting at position 3273 of SEQ ID NO: 1885198
cacauaggauucguggaua

SEQ ID NO: 2323827 - RNA, 19 nt, Artificial Sequence
  Description of Artificial Sequence: Synthetic oligonucleotide
  Antisense strand to SEQ ID NO: 2323826
uauccacgaauccuaugug

SEQ ID NO: 2323828 - RNA, 19 nt, Artificial Sequence
  Description of Artificial Sequence: Synthetic oligonucleotide
  Sense strand starting at position 3327 of SEQ ID NO: 1885198
uggaguguagucuaaugga

SEQ ID NO: 2323829 - RNA, 19 nt, Artificial Sequence
  Description of Artificial Sequence: Synthetic oligonucleotide
  Antisense strand to SEQ ID NO: 2323828
uccauuagacuacacucca

SEQ ID NO: 2323830 - RNA, 19 nt, Artificial Sequence
  Description of Artificial Sequence: Synthetic oligonucleotide
  Sense strand starting at position 3334 of SEQ ID NO: 1885198
uagucuaauggaggucaca

SEQ ID NO: 2323831 - RNA, 19 nt, Artificial Sequence
  Description of Artificial Sequence: Synthetic oligonucleotide
  Antisense strand to SEQ ID NO: 2323830
ugugaccuccauuagacua

SEQ ID NO: 2323832 - RNA, 19 nt, Artificial Sequence
  Description of Artificial Sequence: Synthetic oligonucleotide
  Sense strand starting at position 3401 of SEQ ID NO: 1885198
gaggaacuugaguguauca

SEQ ID NO: 2323833 - RNA, 19 nt, Artificial Sequence
  Description of Artificial Sequence: Synthetic oligonucleotide
  Antisense strand to SEQ ID NO: 2323832
ugauacacucaaguuccuc

SEQ ID NO: 2323834 - RNA, 19 nt, Artificial Sequence
  Description of Artificial Sequence: Synthetic oligonucleotide
  Sense strand starting at position 3521 of SEQ ID NO: 1885198
gggaacuagagauguuccu

SEQ ID NO: 2323835 - RNA, 19 nt, Artificial Sequence
  Description of Artificial Sequence: Synthetic oligonucleotide
  Antisense strand to SEQ ID NO: 2323834
aggaacaucucuaguuccc

SEQ ID NO: 2323836 - RNA, 19 nt, Artificial Sequence
  Description of Artificial Sequence: Synthetic oligonucleotide
  Sense strand starting at position 3540 of SEQ ID NO: 1885198
uacugcggaguuuagaaua

SEQ ID NO: 2323837 - RNA, 19 nt, Artificial Sequence
  Description of Artificial Sequence: Synthetic oligonucleotide
  Antisense strand to SEQ ID NO: 2323836
uauucuaaacuccgcagua

SEQ ID NO: 2323838 - RNA, 19 nt, Artificial Sequence
  Description of Artificial Sequence: Synthetic oligonucleotide
  Sense strand starting at position 3547 of SEQ ID NO: 1885198
gaguuuagaauauggguga

SEQ ID NO: 2323839 - RNA, 19 nt, Artificial Sequence
  Description of Artificial Sequence: Synthetic oligonucleotide
  Antisense strand to SEQ ID NO: 2323838
ucacccauauucuaaacuc

SEQ ID NO: 2323840 - RNA, 19 nt, Artificial Sequence
  Description of Artificial Sequence: Synthetic oligonucleotide
  Sense strand starting at position 3905 of SEQ ID NO: 1885198
aucuauccauguucugaua

SEQ ID NO: 2323841 - RNA, 19 nt, Artificial Sequence
  Description of Artificial Sequence: Synthetic oligonucleotide
  Antisense strand to SEQ ID NO: 2323840
uaucagaacauggauagau

SEQ ID NO: 2323842 - RNA, 19 nt, Artificial Sequence
  Description of Artificial Sequence: Synthetic oligonucleotide
  Sense strand starting at position 3938 of SEQ ID NO: 1885198
acagucuacccauagcaua

SEQ ID NO: 2323843 - RNA, 19 nt, Artificial Sequence
  Description of Artificial Sequence: Synthetic oligonucleotide
  Antisense strand to SEQ ID NO: 2323842
uaugcuauggguagacugu

SEQ ID NO: 2323844 - RNA, 19 nt, Artificial Sequence
  Description of Artificial Sequence: Synthetic oligonucleotide
  Sense strand starting at position 2054 of SEQ ID NO: 1885199
gcgaguggucgccgaggga

SEQ ID NO: 2323845 - RNA, 19 nt, Artificial Sequence
  Description of Artificial Sequence: Synthetic oligonucleotide
  Antisense strand to SEQ ID NO: 2323844
ucccucggcgaccacucgc

SEQ ID NO: 2323846 - RNA, 19 nt, Artificial Sequence
  Description of Artificial Sequence: Synthetic oligonucleotide
  Sense strand starting at position 2820 of SEQ ID NO: 1885199
uucugucaacugggaaauu

SEQ ID NO: 2323847 - RNA, 19 nt, Artificial Sequence
  Description of Artificial Sequence: Synthetic oligonucleotide
  Antisense strand to SEQ ID NO: 2323846
aauuucccaguugacagaa

SEQ ID NO: 2323848 - RNA, 19 nt, Artificial Sequence
  Description of Artificial Sequence: Synthetic oligonucleotide
  Sense strand starting at position 2821 of SEQ ID NO: 1885199
ucugucaacugggaaauua

SEQ ID NO: 2323849 - RNA, 19 nt, Artificial Sequence
  Description of Artificial Sequence: Synthetic oligonucleotide
  Antisense strand to SEQ ID NO: 2323848
uaauuucccaguugacaga

SEQ ID NO: 2323850 - RNA, 19 nt, Artificial Sequence
  Description of Artificial Sequence: Synthetic oligonucleotide
  Sense strand starting at position 2975 of SEQ ID NO: 1885199
cugcuaacccuuugaguug

SEQ ID NO: 2323851 - RNA, 19 nt, Artificial Sequence
  Description of Artificial Sequence: Synthetic oligonucleotide
  Antisense strand to SEQ ID NO: 2323850
caacucaaaggguuagcag

SEQ ID NO: 2323852 - RNA, 19 nt, Artificial Sequence
  Description of Artificial Sequence: Synthetic oligonucleotide
  Sense strand starting at position 2984 of SEQ ID NO: 1885199
cuuugaguuggcugaacuc

SEQ ID NO: 2323853 - RNA, 19 nt, Artificial Sequence
  Description of Artificial Sequence: Synthetic oligonucleotide
  Antisense strand to SEQ ID NO: 2323852
gaguucagccaacucaaag

SEQ ID NO: 2323854 - RNA, 19 nt, Artificial Sequence
  Description of Artificial Sequence: Synthetic oligonucleotide
  Sense strand starting at position 3109 of SEQ ID NO: 1885199
ucgcuaauuuaguauuggu

SEQ ID NO: 2323855 - RNA, 19 nt, Artificial Sequence
  Description of Artificial Sequence: Synthetic oligonucleotide
  Antisense strand to SEQ ID NO: 2323854
accaauacuaaauuagcga

SEQ ID NO: 2323856 - RNA, 19 nt, Artificial Sequence
  Description of Artificial Sequence: Synthetic oligonucleotide
  Sense strand starting at position 3117 of SEQ ID NO: 1885199
uuaguauuggugcaaauuc

SEQ ID NO: 2323857 - RNA, 19 nt, Artificial Sequence
  Description of Artificial Sequence: Synthetic oligonucleotide
  Antisense strand to SEQ ID NO: 2323856
gaauuugcaccaauacuaa

SEQ ID NO: 2323858 - RNA, 19 nt, Artificial Sequence
  Description of Artificial Sequence: Synthetic oligonucleotide
  Sense strand starting at position 3127 of SEQ ID NO: 1885199
ugcaaauuccugugacguu

SEQ ID NO: 2323859 - RNA, 19 nt, Artificial Sequence
  Description of Artificial Sequence: Synthetic oligonucleotide
  Antisense strand to SEQ ID NO: 2323858
aacgucacaggaauuugca

SEQ ID NO: 2323860 - RNA, 19 nt, Artificial Sequence
  Description of Artificial Sequence: Synthetic oligonucleotide
  Sense strand starting at position 3182 of SEQ ID NO: 1885199
cgaaucuucccguggcaga

SEQ ID NO: 2323861 - RNA, 19 nt, Artificial Sequence
  Description of Artificial Sequence: Synthetic oligonucleotide
  Antisense strand to SEQ ID NO: 2323860
ucugccacgggaagauucg

SEQ ID NO: 2323862 - RNA, 19 nt, Artificial Sequence
  Description of Artificial Sequence: Synthetic oligonucleotide
  Sense strand starting at position 3195 of SEQ ID NO: 1885199
ggcagaacgucuuuagaga

SEQ ID NO: 2323863 - RNA, 19 nt, Artificial Sequence
  Description of Artificial Sequence: Synthetic oligonucleotide
  Antisense strand to SEQ ID NO: 2323862
ucucuaaagacguucugcc

SEQ ID NO: 2323864 - RNA, 19 nt, Artificial Sequence
  Description of Artificial Sequence: Synthetic oligonucleotide
  Sense strand starting at position 3196 of SEQ ID NO: 1885199
gcagaacgucuuuagagaa

SEQ ID NO: 2323865 - RNA, 19 nt, Artificial Sequence
  Description of Artificial Sequence: Synthetic oligonucleotide
  Antisense strand to SEQ ID NO: 2323864
uucucuaaagacguucugc

SEQ ID NO: 2323866 - RNA, 19 nt, Artificial Sequence
  Description of Artificial Sequence: Synthetic oligonucleotide
  Sense strand starting at position 3226 of SEQ ID NO: 1885199
gugugaggaagaugaaguu

SEQ ID NO: 2323867 - RNA, 19 nt, Artificial Sequence
  Description of Artificial Sequence: Synthetic oligonucleotide
  Antisense strand to SEQ ID NO: 2323866
aacuucaucuuccucacac

SEQ ID NO: 2323868 - RNA, 19 nt, Artificial Sequence
  Description of Artificial Sequence: Synthetic oligonucleotide
  Sense strand starting at position 3436 of SEQ ID NO: 1885199
gugggugugacuuguguuu

SEQ ID NO: 2323869 - RNA, 19 nt, Artificial Sequence
  Description of Artificial Sequence: Synthetic oligonucleotide
  Antisense strand to SEQ ID NO: 2323868
aaacacaagucacacccac

SEQ ID NO: 2323870 - RNA, 19 nt, Artificial Sequence
  Description of Artificial Sequence: Synthetic oligonucleotide
  Sense strand starting at position 3440 of SEQ ID NO: 1885199
gugugacuuguguuuguug

SEQ ID NO: 2323871 - RNA, 19 nt, Artificial Sequence
  Description of Artificial Sequence: Synthetic oligonucleotide
  Antisense strand to SEQ ID NO: 2323870
caacaaacacaagucacac

SEQ ID NO: 2323872 - RNA, 19 nt, Artificial Sequence
  Description of Artificial Sequence: Synthetic oligonucleotide
  Sense strand starting at position 3442 of SEQ ID NO: 1885199
gugacuuguguuuguugga

SEQ ID NO: 2323873 - RNA, 19 nt, Artificial Sequence
  Description of Artificial Sequence: Synthetic oligonucleotide
  Antisense strand to SEQ ID NO: 2323872
uccaacaaacacaagucac

SEQ ID NO: 2323874 - RNA, 19 nt, Artificial Sequence
  Description of Artificial Sequence: Synthetic oligonucleotide
  Sense strand starting at position 3443 of SEQ ID NO: 1885199
ugacuuguguuuguuggaa

SEQ ID NO: 2323875 - RNA, 19 nt, Artificial Sequence
  Description of Artificial Sequence: Synthetic oligonucleotide
  Antisense strand to SEQ ID NO: 2323874
uuccaacaaacacaaguca

SEQ ID NO: 2323876 - RNA, 19 nt, Artificial Sequence
  Description of Artificial Sequence: Synthetic oligonucleotide
  Sense strand starting at position 3445 of SEQ ID NO: 1885199
acuuguguuuguuggaaca

SEQ ID NO: 2323877 - RNA, 19 nt, Artificial Sequence
  Description of Artificial Sequence: Synthetic oligonucleotide
  Antisense strand to SEQ ID NO: 2323876
uguuccaacaaacacaagu

SEQ ID NO: 2323878 - RNA, 19 nt, Artificial Sequence
  Description of Artificial Sequence: Synthetic oligonucleotide
  Sense strand starting at position 3447 of SEQ ID NO: 1885199
uuguguuuguuggaacagu

SEQ ID NO: 2323879 - RNA, 19 nt, Artificial Sequence
  Description of Artificial Sequence: Synthetic oligonucleotide
  Antisense strand to SEQ ID NO: 2323878
acuguuccaacaaacacaa

SEQ ID NO: 2323880 - RNA, 19 nt, Artificial Sequence
  Description of Artificial Sequence: Synthetic oligonucleotide
  Sense strand starting at position 3470 of SEQ ID NO: 1885199
gaagaugggccuuggaagu

SEQ ID NO: 2323881 - RNA, 19 nt, Artificial Sequence
  Description of Artificial Sequence: Synthetic oligonucleotide
  Antisense strand to SEQ ID NO: 2323880
acuuccaaggcccaucuuc

SEQ ID NO: 2323882 - RNA, 19 nt, Artificial Sequence
  Description of Artificial Sequence: Synthetic oligonucleotide
  Sense strand starting at position 3592 of SEQ ID NO: 1885199
gacacagaauugcgugaau

SEQ ID NO: 2323883 - RNA, 19 nt, Artificial Sequence
  Description of Artificial Sequence: Synthetic oligonucleotide
  Antisense strand to SEQ ID NO: 2323882
auucacgcaauucuguguc

SEQ ID NO: 2323884 - RNA, 19 nt, Artificial Sequence
  Description of Artificial Sequence: Synthetic oligonucleotide
  Sense strand starting at position 3594 of SEQ ID NO: 1885199
cacagaauugcgugaauga

SEQ ID NO: 2323885 - RNA, 19 nt, Artificial Sequence
  Description of Artificial Sequence: Synthetic oligonucleotide
  Antisense strand to SEQ ID NO: 2323884
ucauucacgcaauucugug

SEQ ID NO: 2323886 - RNA, 19 nt, Artificial Sequence
  Description of Artificial Sequence: Synthetic oligonucleotide
  Sense strand starting at position 3595 of SEQ ID NO: 1885199
acagaauugcgugaaugac

SEQ ID NO: 2323887 - RNA, 19 nt, Artificial Sequence
  Description of Artificial Sequence: Synthetic oligonucleotide
  Antisense strand to SEQ ID NO: 2323886
gucauucacgcaauucugu

SEQ ID NO: 2323888 - RNA, 19 nt, Artificial Sequence
  Description of Artificial Sequence: Synthetic oligonucleotide
  Sense strand starting at position 3597 of SEQ ID NO: 1885199
agaauugcgugaaugacgu

SEQ ID NO: 2323889 - RNA, 19 nt, Artificial Sequence
  Description of Artificial Sequence: Synthetic oligonucleotide
  Antisense strand to SEQ ID NO: 2323888
acgucauucacgcaauucu

SEQ ID NO: 2323890 - RNA, 19 nt, Artificial Sequence
  Description of Artificial Sequence: Synthetic oligonucleotide
  Sense strand starting at position 3607 of SEQ ID NO: 1885199
gaaugacguuuguggagau

SEQ ID NO: 2323891 - RNA, 19 nt, Artificial Sequence
  Description of Artificial Sequence: Synthetic oligonucleotide
  Antisense strand to SEQ ID NO: 2323890
aucuccacaaacgucauuc

SEQ ID NO: 2323892 - RNA, 19 nt, Artificial Sequence
  Description of Artificial Sequence: Synthetic oligonucleotide
  Sense strand starting at position 3608 of SEQ ID NO: 1885199
aaugacguuuguggagauu

SEQ ID NO: 2323893 - RNA, 19 nt, Artificial Sequence
  Description of Artificial Sequence: Synthetic oligonucleotide
  Antisense strand to SEQ ID NO: 2323892
aaucuccacaaacgucauu

SEQ ID NO: 2323894 - RNA, 19 nt, Artificial Sequence
  Description of Artificial Sequence: Synthetic oligonucleotide
  Sense strand starting at position 3611 of SEQ ID NO: 1885199
gacguuuguggagauugga

SEQ ID NO: 2323895 - RNA, 19 nt, Artificial Sequence
  Description of Artificial Sequence: Synthetic oligonucleotide
  Antisense strand to SEQ ID NO: 2323894
uccaaucuccacaaacguc

SEQ ID NO: 2323896 - RNA, 19 nt, Artificial Sequence
  Description of Artificial Sequence: Synthetic oligonucleotide
  Sense strand starting at position 3614 of SEQ ID NO: 1885199
guuuguggagauuggagau

SEQ ID NO: 2323897 - RNA, 19 nt, Artificial Sequence
  Description of Artificial Sequence: Synthetic oligonucleotide
  Antisense strand to SEQ ID NO: 2323896
aucuccaaucuccacaaac

SEQ ID NO: 2323898 - RNA, 19 nt, Artificial Sequence
  Description of Artificial Sequence: Synthetic oligonucleotide
  Sense strand starting at position 3617 of SEQ ID NO: 1885199
uguggagauuggagaugaa

SEQ ID NO: 2323899 - RNA, 19 nt, Artificial Sequence
  Description of Artificial Sequence: Synthetic oligonucleotide
  Antisense strand to SEQ ID NO: 2323898
uucaucuccaaucuccaca

SEQ ID NO: 2323900 - RNA, 19 nt, Artificial Sequence
  Description of Artificial Sequence: Synthetic oligonucleotide
  Sense strand starting at position 3629 of SEQ ID NO: 1885199
agaugaagcuucgcugauu

SEQ ID NO: 2323901 - RNA, 19 nt, Artificial Sequence
  Description of Artificial Sequence: Synthetic oligonucleotide
  Antisense strand to SEQ ID NO: 2323900
aaucagcgaagcuucaucu

SEQ ID NO: 2323902 - RNA, 19 nt, Artificial Sequence
  Description of Artificial Sequence: Synthetic oligonucleotide
  Sense strand starting at position 3630 of SEQ ID NO: 1885199
gaugaagcuucgcugauuu

SEQ ID NO: 2323903 - RNA, 19 nt, Artificial Sequence
  Description of Artificial Sequence: Synthetic oligonucleotide
  Antisense strand to SEQ ID NO: 2323902
aaaucagcgaagcuucauc

SEQ ID NO: 2323904 - RNA, 19 nt, Artificial Sequence
  Description of Artificial Sequence: Synthetic oligonucleotide
  Sense strand starting at position 3632 of SEQ ID NO: 1885199
ugaagcuucgcugauuucu

SEQ ID NO: 2323905 - RNA, 19 nt, Artificial Sequence
  Description of Artificial Sequence: Synthetic oligonucleotide
  Antisense strand to SEQ ID NO: 2323904
agaaaucagcgaagcuuca

SEQ ID NO: 2323906 - RNA, 19 nt, Artificial Sequence
  Description of Artificial Sequence: Synthetic oligonucleotide
  Sense strand starting at position 3655 of SEQ ID NO: 1885199
ccaguuugcucaguuugaa

SEQ ID NO: 2323907 - RNA, 19 nt, Artificial Sequence
  Description of Artificial Sequence: Synthetic oligonucleotide
  Antisense strand to SEQ ID NO: 2323906
uucaaacugagcaaacugg

SEQ ID NO: 2323908 - RNA, 19 nt, Artificial Sequence
  Description of Artificial Sequence: Synthetic oligonucleotide
  Sense strand starting at position 3658 of SEQ ID NO: 1885199
guuugcucaguuugaauuu

SEQ ID NO: 2323909 - RNA, 19 nt, Artificial Sequence
  Description of Artificial Sequence: Synthetic oligonucleotide
  Antisense strand to SEQ ID NO: 2323908
aaauucaaacugagcaaac

SEQ ID NO: 2323910 - RNA, 19 nt, Artificial Sequence
  Description of Artificial Sequence: Synthetic oligonucleotide
  Sense strand starting at position 3854 of SEQ ID NO: 1885199
uccugcaucuuccugaguu

SEQ ID NO: 2323911 - RNA, 19 nt, Artificial Sequence
  Description of Artificial Sequence: Synthetic oligonucleotide
  Antisense strand to SEQ ID NO: 2323910
aacucaggaagaugcagga

SEQ ID NO: 2323912 - RNA, 19 nt, Artificial Sequence
  Description of Artificial Sequence: Synthetic oligonucleotide
  Sense strand starting at position 3875 of SEQ ID NO: 1885199
gccagugcauguuaaggau

SEQ ID NO: 2323913 - RNA, 19 nt, Artificial Sequence
  Description of Artificial Sequence: Synthetic oligonucleotide
  Antisense strand to SEQ ID NO: 2323912
auccuuaacaugcacuggc

SEQ ID NO: 2323914 - RNA, 19 nt, Artificial Sequence
  Description of Artificial Sequence: Synthetic oligonucleotide
  Sense strand starting at position 3878 of SEQ ID NO: 1885199
agugcauguuaaggauaaa

SEQ ID NO: 2323915 - RNA, 19 nt, Artificial Sequence
  Description of Artificial Sequence: Synthetic oligonucleotide
  Antisense strand to SEQ ID NO: 2323914
uuuauccuuaacaugcacu

SEQ ID NO: 2323916 - RNA, 19 nt, Artificial Sequence
  Description of Artificial Sequence: Synthetic oligonucleotide
  Sense strand starting at position 3879 of SEQ ID NO: 1885199
gugcauguuaaggauaaag

SEQ ID NO: 2323917 - RNA, 19 nt, Artificial Sequence
  Description of Artificial Sequence: Synthetic oligonucleotide
  Antisense strand to SEQ ID NO: 2323916
cuuuauccuuaacaugcac

SEQ ID NO: 2323918 - RNA, 19 nt, Artificial Sequence
  Description of Artificial Sequence: Synthetic oligonucleotide
  Sense strand starting at position 3898 of SEQ ID NO: 1885199
ccugcaacuucuuuggcau

SEQ ID NO: 2323919 - RNA, 19 nt, Artificial Sequence
  Description of Artificial Sequence: Synthetic oligonucleotide
  Antisense strand to SEQ ID NO: 2323918
augccaaagaaguugcagg

SEQ ID NO: 2323920 - RNA, 19 nt, Artificial Sequence
  Description of Artificial Sequence: Synthetic oligonucleotide
  Sense strand starting at position 3931 of SEQ ID NO: 1885199
cacagaaguugguuccuuu

SEQ ID NO: 2323921 - RNA, 19 nt, Artificial Sequence
  Description of Artificial Sequence: Synthetic oligonucleotide
  Antisense strand to SEQ ID NO: 2323920
aaaggaaccaacuucugug

SEQ ID NO: 2323922 - RNA, 19 nt, Artificial Sequence
  Description of Artificial Sequence: Synthetic oligonucleotide
  Sense strand starting at position 3935 of SEQ ID NO: 1885199
gaaguugguuccuuuaucu

SEQ ID NO: 2323923 - RNA, 19 nt, Artificial Sequence
  Description of Artificial Sequence: Synthetic oligonucleotide
  Antisense strand to SEQ ID NO: 2323922
agauaaaggaaccaacuuc

SEQ ID NO: 2323924 - RNA, 19 nt, Artificial Sequence
  Description of Artificial Sequence: Synthetic oligonucleotide
  Sense strand starting at position 186 of SEQ ID NO: 1885200
ucugauaugcuauauacag

SEQ ID NO: 2323925 - RNA, 19 nt, Artificial Sequence
  Description of Artificial Sequence: Synthetic oligonucleotide
  Antisense strand to SEQ ID NO: 2323924
cuguauauagcauaucaga

SEQ ID NO: 2323926 - RNA, 19 nt, Artificial Sequence
  Description of Artificial Sequence: Synthetic oligonucleotide
  Sense strand starting at position 319 of SEQ ID NO: 1885200
cucccuuguucugugggaa

SEQ ID NO: 2323927 - RNA, 19 nt, Artificial Sequence
  Description of Artificial Sequence: Synthetic oligonucleotide
  Antisense strand to SEQ ID NO: 2323926
uucccacagaacaagggag

SEQ ID NO: 2323928 - RNA, 19 nt, Artificial Sequence
  Description of Artificial Sequence: Synthetic oligonucleotide
  Sense strand starting at position 320 of SEQ ID NO: 1885200
ucccuuguucugugggaaa

SEQ ID NO: 2323929 - RNA, 19 nt, Artificial Sequence
  Description of Artificial Sequence: Synthetic oligonucleotide
  Antisense strand to SEQ ID NO: 2323928
uuucccacagaacaaggga

SEQ ID NO: 2323930 - RNA, 19 nt, Artificial Sequence
  Description of Artificial Sequence: Synthetic oligonucleotide
  Sense strand starting at position 333 of SEQ ID NO: 1885200
gggaaaccuuguguucaag

SEQ ID NO: 2323931 - RNA, 19 nt, Artificial Sequence
  Description of Artificial Sequence: Synthetic oligonucleotide
  Antisense strand to SEQ ID NO: 2323930
cuugaacacaagguuuccc

SEQ ID NO: 2323932 - RNA, 19 nt, Artificial Sequence
  Description of Artificial Sequence: Synthetic oligonucleotide
  Sense strand starting at position 740 of SEQ ID NO: 1885200
gucccuuaucucuacaugu

SEQ ID NO: 2323933 - RNA, 19 nt, Artificial Sequence
  Description of Artificial Sequence: Synthetic oligonucleotide
  Antisense strand to SEQ ID NO: 2323932
acauguagagauaagggac

SEQ ID NO: 2323934 - RNA, 19 nt, Artificial Sequence
  Description of Artificial Sequence: Synthetic oligonucleotide
  Sense strand starting at position 753 of SEQ ID NO: 1885200
acauguugauuaucagaau

SEQ ID NO: 2323935 - RNA, 19 nt, Artificial Sequence
  Description of Artificial Sequence: Synthetic oligonucleotide
  Antisense strand to SEQ ID NO: 2323934
auucugauaaucaacaugu

SEQ ID NO: 2323936 - RNA, 19 nt, Artificial Sequence
  Description of Artificial Sequence: Synthetic oligonucleotide
  Sense strand starting at position 815 of SEQ ID NO: 1885200
cguaaacauuuacagaacu

SEQ ID NO: 2323937 - RNA, 19 nt, Artificial Sequence
  Description of Artificial Sequence: Synthetic oligonucleotide
  Antisense strand to SEQ ID NO: 2323936
aguucuguaaauguuuacg

SEQ ID NO: 2323938 - RNA, 19 nt, Artificial Sequence
  Description of Artificial Sequence: Synthetic oligonucleotide
  Sense strand starting at position 950 of SEQ ID NO: 1885200
acugauacuugggcauagu

SEQ ID NO: 2323939 - RNA, 19 nt, Artificial Sequence
  Description of Artificial Sequence: Synthetic oligonucleotide
  Antisense strand to SEQ ID NO: 2323938
acuaugcccaaguaucagu

SEQ ID NO: 2323940 - RNA, 19 nt, Artificial Sequence
  Description of Artificial Sequence: Synthetic oligonucleotide
  Sense strand starting at position 951 of SEQ ID NO: 1885200
cugauacuugggcauaguu

SEQ ID NO: 2323941 - RNA, 19 nt, Artificial Sequence
  Description of Artificial Sequence: Synthetic oligonucleotide
  Antisense strand to SEQ ID NO: 2323940
aacuaugcccaaguaucag

SEQ ID NO: 2323942 - RNA, 19 nt, Artificial Sequence
  Description of Artificial Sequence: Synthetic oligonucleotide
  Sense strand starting at position 953 of SEQ ID NO: 1885200
gauacuugggcauaguuua

SEQ ID NO: 2323943 - RNA, 19 nt, Artificial Sequence
  Description of Artificial Sequence: Synthetic oligonucleotide
  Antisense strand to SEQ ID NO: 2323942
uaaacuaugcccaaguauc

SEQ ID NO: 2323944 - RNA, 19 nt, Artificial Sequence
  Description of Artificial Sequence: Synthetic oligonucleotide
  Sense strand starting at position 1080 of SEQ ID NO: 1885200
uggguugaaucucuaagga

SEQ ID NO: 2323945 - RNA, 19 nt, Artificial Sequence
  Description of Artificial Sequence: Synthetic oligonucleotide
  Antisense strand to SEQ ID NO: 2323944
uccuuagagauucaaccca

SEQ ID NO: 2323946 - RNA, 19 nt, Artificial Sequence
  Description of Artificial Sequence: Synthetic oligonucleotide
  Sense strand starting at position 1106 of SEQ ID NO: 1885200
uuccuaagaccucgacuga

SEQ ID NO: 2323947 - RNA, 19 nt, Artificial Sequence
  Description of Artificial Sequence: Synthetic oligonucleotide
  Antisense strand to SEQ ID NO: 2323946
ucagucgaggucuuaggaa

SEQ ID NO: 2323948 - RNA, 19 nt, Artificial Sequence
  Description of Artificial Sequence: Synthetic oligonucleotide
  Sense strand starting at position 1107 of SEQ ID NO: 1885200
uccuaagaccucgacugau

SEQ ID NO: 2323949 - RNA, 19 nt, Artificial Sequence
  Description of Artificial Sequence: Synthetic oligonucleotide
  Antisense strand to SEQ ID NO: 2323948
aucagucgaggucuuagga

SEQ ID NO: 2323950 - RNA, 19 nt, Artificial Sequence
  Description of Artificial Sequence: Synthetic oligonucleotide
  Sense strand starting at position 1150 of SEQ ID NO: 1885200
agacuagacugccucagaa

SEQ ID NO: 2323951 - RNA, 19 nt, Artificial Sequence
  Description of Artificial Sequence: Synthetic oligonucleotide
  Antisense strand to SEQ ID NO: 2323950
uucugaggcagucuagucu

SEQ ID NO: 2323952 - RNA, 19 nt, Artificial Sequence
  Description of Artificial Sequence: Synthetic oligonucleotide
  Sense strand starting at position 1152 of SEQ ID NO: 1885200
acuagacugccucagaauc

SEQ ID NO: 2323953 - RNA, 19 nt, Artificial Sequence
  Description of Artificial Sequence: Synthetic oligonucleotide
  Antisense strand to SEQ ID NO: 2323952
gauucugaggcagucuagu

SEQ ID NO: 2323954 - RNA, 19 nt, Artificial Sequence
  Description of Artificial Sequence: Synthetic oligonucleotide
  Sense strand starting at position 1187 of SEQ ID NO: 1885200
acuggaaagucaccuaauu

SEQ ID NO: 2323955 - RNA, 19 nt, Artificial Sequence
  Description of Artificial Sequence: Synthetic oligonucleotide
  Antisense strand to SEQ ID NO: 2323954
aauuaggugacuuuccagu

SEQ ID NO: 2323956 - RNA, 19 nt, Artificial Sequence
  Description of Artificial Sequence: Synthetic oligonucleotide
  Sense strand starting at position 1265 of SEQ ID NO: 1885200
cuguaaagaucugaaauuu

SEQ ID NO: 2323957 - RNA, 19 nt, Artificial Sequence
  Description of Artificial Sequence: Synthetic oligonucleotide
  Antisense strand to SEQ ID NO: 2323956
aaauuucagaucuuuacag

SEQ ID NO: 2323958 - RNA, 19 nt, Artificial Sequence
  Description of Artificial Sequence: Synthetic oligonucleotide
  Sense strand starting at position 1308 of SEQ ID NO: 1885200
acauuagacacggguguuu

SEQ ID NO: 2323959 - RNA, 19 nt, Artificial Sequence
  Description of Artificial Sequence: Synthetic oligonucleotide
  Antisense strand to SEQ ID NO: 2323958
aaacacccgugucuaaugu

SEQ ID NO: 2323960 - RNA, 19 nt, Artificial Sequence
  Description of Artificial Sequence: Synthetic oligonucleotide
  Sense strand starting at position 1318 of SEQ ID NO: 1885200
cggguguuucguuugucuu

SEQ ID NO: 2323961 - RNA, 19 nt, Artificial Sequence
  Description of Artificial Sequence: Synthetic oligonucleotide
  Antisense strand to SEQ ID NO: 2323960
aagacaaacgaaacacccg

SEQ ID NO: 2323962 - RNA, 19 nt, Artificial Sequence
  Description of Artificial Sequence: Synthetic oligonucleotide
  Sense strand starting at position 2198 of SEQ ID NO: 1885200
gaaggaacgugcucaccaa

SEQ ID NO: 2323963 - RNA, 19 nt, Artificial Sequence
  Description of Artificial Sequence: Synthetic oligonucleotide
  Antisense strand to SEQ ID NO: 2323962
uuggugagcacguuccuuc

SEQ ID NO: 2323964 - RNA, 19 nt, Artificial Sequence
  Description of Artificial Sequence: Synthetic oligonucleotide
  Sense strand starting at position 2255 of SEQ ID NO: 1885200
agcccaaaggauugguaau

SEQ ID NO: 2323965 - RNA, 19 nt, Artificial Sequence
  Description of Artificial Sequence: Synthetic oligonucleotide
  Antisense strand to SEQ ID NO: 2323964
auuaccaauccuuugggcu

SEQ ID NO: 2323966 - RNA, 19 nt, Artificial Sequence
  Description of Artificial Sequence: Synthetic oligonucleotide
  Sense strand starting at position 2256 of SEQ ID NO: 1885200
gcccaaaggauugguaaua

SEQ ID NO: 2323967 - RNA, 19 nt, Artificial Sequence
  Description of Artificial Sequence: Synthetic oligonucleotide
  Antisense strand to SEQ ID NO: 2323966
uauuaccaauccuuugggc

SEQ ID NO: 2323968 - RNA, 19 nt, Artificial Sequence
  Description of Artificial Sequence: Synthetic oligonucleotide
  Sense strand starting at position 2337 of SEQ ID NO: 1885200
agccuagguaguggaaauu

SEQ ID NO: 2323969 - RNA, 19 nt, Artificial Sequence
  Description of Artificial Sequence: Synthetic oligonucleotide
  Antisense strand to SEQ ID NO: 2323968
aauuuccacuaccuaggcu

SEQ ID NO: 2323970 - RNA, 19 nt, Artificial Sequence
  Description of Artificial Sequence: Synthetic oligonucleotide
  Sense strand starting at position 2564 of SEQ ID NO: 1885200
gauagaugcguuuaaccug

SEQ ID NO: 2323971 - RNA, 19 nt, Artificial Sequence
  Description of Artificial Sequence: Synthetic oligonucleotide
  Antisense strand to SEQ ID NO: 2323970
cagguuaaacgcaucuauc

SEQ ID NO: 2323972 - RNA, 19 nt, Artificial Sequence
  Description of Artificial Sequence: Synthetic oligonucleotide
  Sense strand starting at position 2629 of SEQ ID NO: 1885200
agcacugagugguuaaauu

SEQ ID NO: 2323973 - RNA, 19 nt, Artificial Sequence
  Description of Artificial Sequence: Synthetic oligonucleotide
  Antisense strand to SEQ ID NO: 2323972
aauuuaaccacucagugcu

SEQ ID NO: 2323974 - RNA, 19 nt, Artificial Sequence
  Description of Artificial Sequence: Synthetic oligonucleotide
  Sense strand starting at position 2970 of SEQ ID NO: 1885200
aagagucagugcccauaua

SEQ ID NO: 2323975 - RNA, 19 nt, Artificial Sequence
  Description of Artificial Sequence: Synthetic oligonucleotide
  Antisense strand to SEQ ID NO: 2323974
uauaugggcacugacucuu

SEQ ID NO: 2323976 - RNA, 19 nt, Artificial Sequence
  Description of Artificial Sequence: Synthetic oligonucleotide
  Sense strand starting at position 3156 of SEQ ID NO: 1885200
uugggagucuggaggaauu

SEQ ID NO: 2323977 - RNA, 19 nt, Artificial Sequence
  Description of Artificial Sequence: Synthetic oligonucleotide
  Antisense strand to SEQ ID NO: 2323976
aauuccuccagacucccaa

SEQ ID NO: 2323978 - RNA, 19 nt, Artificial Sequence
  Description of Artificial Sequence: Synthetic oligonucleotide
  Sense strand starting at position 3274 of SEQ ID NO: 1885200
ggucuucaggauuagaagu

SEQ ID NO: 2323979 - RNA, 19 nt, Artificial Sequence
  Description of Artificial Sequence: Synthetic oligonucleotide
  Antisense strand to SEQ ID NO: 2323978
acuucuaauccugaagacc

SEQ ID NO: 2323980 - RNA, 19 nt, Artificial Sequence
  Description of Artificial Sequence: Synthetic oligonucleotide
  Sense strand starting at position 3281 of SEQ ID NO: 1885200
aggauuagaaguuguuaau

SEQ ID NO: 2323981 - RNA, 19 nt, Artificial Sequence
  Description of Artificial Sequence: Synthetic oligonucleotide
  Antisense strand to SEQ ID NO: 2323980
auuaacaacuucuaauccu

SEQ ID NO: 2323982 - RNA, 19 nt, Artificial Sequence
  Description of Artificial Sequence: Synthetic oligonucleotide
  Sense strand starting at position 3287 of SEQ ID NO: 1885200
agaaguuguuaaucacuua

SEQ ID NO: 2323983 - RNA, 19 nt, Artificial Sequence
  Description of Artificial Sequence: Synthetic oligonucleotide
  Antisense strand to SEQ ID NO: 2323982
uaagugauuaacaacuucu

SEQ ID NO: 2323984 - RNA, 19 nt, Artificial Sequence
  Description of Artificial Sequence: Synthetic oligonucleotide
  Sense strand starting at position 3324 of SEQ ID NO: 1885200
cucuuacacguagacauau

SEQ ID NO: 2323985 - RNA, 19 nt, Artificial Sequence
  Description of Artificial Sequence: Synthetic oligonucleotide
  Antisense strand to SEQ ID NO: 2323984
auaugucuacguguaagag

SEQ ID NO: 2323986 - RNA, 19 nt, Artificial Sequence
  Description of Artificial Sequence: Synthetic oligonucleotide
  Sense strand starting at position 3377 of SEQ ID NO: 1885200
guaauuaugaguuggucug

SEQ ID NO: 2323987 - RNA, 19 nt, Artificial Sequence
  Description of Artificial Sequence: Synthetic oligonucleotide
  Antisense strand to SEQ ID NO: 2323986
cagaccaacucauaauuac

SEQ ID NO: 2323988 - RNA, 19 nt, Artificial Sequence
  Description of Artificial Sequence: Synthetic oligonucleotide
  Sense strand starting at position 3537 of SEQ ID NO: 1885200
acccuaugaggucggugaa

SEQ ID NO: 2323989 - RNA, 19 nt, Artificial Sequence
  Description of Artificial Sequence: Synthetic oligonucleotide
  Antisense strand to SEQ ID NO: 2323988
uucaccgaccucauagggu

SEQ ID NO: 2323990 - RNA, 19 nt, Artificial Sequence
  Description of Artificial Sequence: Synthetic oligonucleotide
  Sense strand starting at position 3538 of SEQ ID NO: 1885200
cccuaugaggucggugaaa

SEQ ID NO: 2323991 - RNA, 19 nt, Artificial Sequence
  Description of Artificial Sequence: Synthetic oligonucleotide
  Antisense strand to SEQ ID NO: 2323990
uuucaccgaccucauaggg

SEQ ID NO: 2323992 - RNA, 19 nt, Artificial Sequence
  Description of Artificial Sequence: Synthetic oligonucleotide
  Sense strand starting at position 3540 of SEQ ID NO: 1885200
cuaugaggucggugaaaua

SEQ ID NO: 2323993 - RNA, 19 nt, Artificial Sequence
  Description of Artificial Sequence: Synthetic oligonucleotide
  Antisense strand to SEQ ID NO: 2323992
uauuucaccgaccucauag

SEQ ID NO: 2323994 - RNA, 19 nt, Artificial Sequence
  Description of Artificial Sequence: Synthetic oligonucleotide
  Sense strand starting at position 3696 of SEQ ID NO: 1885200
guguuauuuauucggauag

SEQ ID NO: 2323995 - RNA, 19 nt, Artificial Sequence
  Description of Artificial Sequence: Synthetic oligonucleotide
  Antisense strand to SEQ ID NO: 2323994
cuauccgaauaaauaacac

SEQ ID NO: 2323996 - RNA, 19 nt, Artificial Sequence
  Description of Artificial Sequence: Synthetic oligonucleotide
  Sense strand starting at position 3703 of SEQ ID NO: 1885200
uuauucggauaguuugauu

SEQ ID NO: 2323997 - RNA, 19 nt, Artificial Sequence
  Description of Artificial Sequence: Synthetic oligonucleotide
  Antisense strand to SEQ ID NO: 2323996
aaucaaacuauccgaauaa

SEQ ID NO: 2323998 - RNA, 19 nt, Artificial Sequence
  Description of Artificial Sequence: Synthetic oligonucleotide
  Sense strand starting at position 3723 of SEQ ID NO: 1885200
gcaagaugauguucuggag

SEQ ID NO: 2323999 - RNA, 19 nt, Artificial Sequence
  Description of Artificial Sequence: Synthetic oligonucleotide
  Antisense strand to SEQ ID NO: 2323998
cuccagaacaucaucuugc

SEQ ID NO: 2324000 - RNA, 19 nt, Artificial Sequence
  Description of Artificial Sequence: Synthetic oligonucleotide
  Sense strand starting at position 3729 of SEQ ID NO: 1885200
ugauguucuggagauuggu

SEQ ID NO: 2324001 - RNA, 19 nt, Artificial Sequence
  Description of Artificial Sequence: Synthetic oligonucleotide
  Antisense strand to SEQ ID NO: 2324000
accaaucuccagaacauca

SEQ ID NO: 2324002 - RNA, 19 nt, Artificial Sequence
  Description of Artificial Sequence: Synthetic oligonucleotide
  Sense strand starting at position 3913 of SEQ ID NO: 1885200
auagaaugauccuuguuua

SEQ ID NO: 2324003 - RNA, 19 nt, Artificial Sequence
  Description of Artificial Sequence: Synthetic oligonucleotide
  Antisense strand to SEQ ID NO: 2324002
uaaacaaggaucauucuau

SEQ ID NO: 2324004 - RNA, 19 nt, Artificial Sequence
  Description of Artificial Sequence: Synthetic oligonucleotide
  Sense strand starting at position 18 of SEQ ID NO: 1885201
ucuccucuaggcuauaaga

SEQ ID NO: 2324005 - RNA, 19 nt, Artificial Sequence
  Description of Artificial Sequence: Synthetic oligonucleotide
  Antisense strand to SEQ ID NO: 2324004
ucuuauagccuagaggaga

SEQ ID NO: 2324006 - RNA, 19 nt, Artificial Sequence
  Description of Artificial Sequence: Synthetic oligonucleotide
  Sense strand starting at position 280 of SEQ ID NO: 1885201
gaaauaguguuaucaagau

SEQ ID NO: 2324007 - RNA, 19 nt, Artificial Sequence
  Description of Artificial Sequence: Synthetic oligonucleotide
  Antisense strand to SEQ ID NO: 2324006
aucuugauaacacuauuuc

SEQ ID NO: 2324008 - RNA, 19 nt, Artificial Sequence
  Description of Artificial Sequence: Synthetic oligonucleotide
  Sense strand starting at position 642 of SEQ ID NO: 1885201
gacacuucugagugaauuc

SEQ ID NO: 2324009 - RNA, 19 nt, Artificial Sequence
  Description of Artificial Sequence: Synthetic oligonucleotide
  Antisense strand to SEQ ID NO: 2324008
gaauucacucagaaguguc

SEQ ID NO: 2324010 - RNA, 19 nt, Artificial Sequence
  Description of Artificial Sequence: Synthetic oligonucleotide
  Sense strand starting at position 649 of SEQ ID NO: 1885201
cugagugaauucuugaaag

SEQ ID NO: 2324011 - RNA, 19 nt, Artificial Sequence
  Description of Artificial Sequence: Synthetic oligonucleotide
  Antisense strand to SEQ ID NO: 2324010
cuuucaagaauucacucag

SEQ ID NO: 2324012 - RNA, 19 nt, Artificial Sequence
  Description of Artificial Sequence: Synthetic oligonucleotide
  Sense strand starting at position 666 of SEQ ID NO: 1885201
agaacuauauacucguaua

SEQ ID NO: 2324013 - RNA, 19 nt, Artificial Sequence
  Description of Artificial Sequence: Synthetic oligonucleotide
  Antisense strand to SEQ ID NO: 2324012
uauacgaguauauaguucu

SEQ ID NO: 2324014 - RNA, 19 nt, Artificial Sequence
  Description of Artificial Sequence: Synthetic oligonucleotide
  Sense strand starting at position 738 of SEQ ID NO: 1885201
cagggaguacuuggagauu

SEQ ID NO: 2324015 - RNA, 19 nt, Artificial Sequence
  Description of Artificial Sequence: Synthetic oligonucleotide
  Antisense strand to SEQ ID NO: 2324014
aaucuccaaguacucccug

SEQ ID NO: 2324016 - RNA, 19 nt, Artificial Sequence
  Description of Artificial Sequence: Synthetic oligonucleotide
  Sense strand starting at position 1109 of SEQ ID NO: 1885201
ccuuauuuguaauaaugga

SEQ ID NO: 2324017 - RNA, 19 nt, Artificial Sequence
  Description of Artificial Sequence: Synthetic oligonucleotide
  Antisense strand to SEQ ID NO: 2324016
uccauuauuacaaauaagg

SEQ ID NO: 2324018 - RNA, 19 nt, Artificial Sequence
  Description of Artificial Sequence: Synthetic oligonucleotide
  Sense strand starting at position 1202 of SEQ ID NO: 1885201
gagacugaugccuguaaga

SEQ ID NO: 2324019 - RNA, 19 nt, Artificial Sequence
  Description of Artificial Sequence: Synthetic oligonucleotide
  Antisense strand to SEQ ID NO: 2324018
ucuuacaggcaucagucuc

SEQ ID NO: 2324020 - RNA, 19 nt, Artificial Sequence
  Description of Artificial Sequence: Synthetic oligonucleotide
  Sense strand starting at position 1204 of SEQ ID NO: 1885201
gacugaugccuguaagagc

SEQ ID NO: 2324021 - RNA, 19 nt, Artificial Sequence
  Description of Artificial Sequence: Synthetic oligonucleotide
  Antisense strand to SEQ ID NO: 2324020
gcucuuacaggcaucaguc

SEQ ID NO: 2324022 - RNA, 19 nt, Artificial Sequence
  Description of Artificial Sequence: Synthetic oligonucleotide
  Sense strand starting at position 1340 of SEQ ID NO: 1885201
gaucccaaggacuguguua

SEQ ID NO: 2324023 - RNA, 19 nt, Artificial Sequence
  Description of Artificial Sequence: Synthetic oligonucleotide
  Antisense strand to SEQ ID NO: 2324022
uaacacaguccuugggauc

SEQ ID NO: 2324024 - RNA, 19 nt, Artificial Sequence
  Description of Artificial Sequence: Synthetic oligonucleotide
  Sense strand starting at position 1342 of SEQ ID NO: 1885201
ucccaaggacuguguuaua

SEQ ID NO: 2324025 - RNA, 19 nt, Artificial Sequence
  Description of Artificial Sequence: Synthetic oligonucleotide
  Antisense strand to SEQ ID NO: 2324024
uauaacacaguccuuggga

SEQ ID NO: 2324026 - RNA, 19 nt, Artificial Sequence
  Description of Artificial Sequence: Synthetic oligonucleotide
  Sense strand starting at position 1525 of SEQ ID NO: 1885201
uuugcuccagccuagauaa

SEQ ID NO: 2324027 - RNA, 19 nt, Artificial Sequence
  Description of Artificial Sequence: Synthetic oligonucleotide
  Antisense strand to SEQ ID NO: 2324026
uuaucuaggcuggagcaaa

SEQ ID NO: 2324028 - RNA, 19 nt, Artificial Sequence
  Description of Artificial Sequence: Synthetic oligonucleotide
  Sense strand starting at position 1716 of SEQ ID NO: 1885201
uaaggaguuugcucucaaa

SEQ ID NO: 2324029 - RNA, 19 nt, Artificial Sequence
  Description of Artificial Sequence: Synthetic oligonucleotide
  Antisense strand to SEQ ID NO: 2324028
uuugagagcaaacuccuua

SEQ ID NO: 2324030 - RNA, 19 nt, Artificial Sequence
  Description of Artificial Sequence: Synthetic oligonucleotide
  Sense strand starting at position 1768 of SEQ ID NO: 1885201
gagacuuucuuggucagua

SEQ ID NO: 2324031 - RNA, 19 nt, Artificial Sequence
  Description of Artificial Sequence: Synthetic oligonucleotide
  Antisense strand to SEQ ID NO: 2324030
uacugaccaagaaagucuc

SEQ ID NO: 2324032 - RNA, 19 nt, Artificial Sequence
  Description of Artificial Sequence: Synthetic oligonucleotide
  Sense strand starting at position 1884 of SEQ ID NO: 1885201
cugaguauggucuagguaa

SEQ ID NO: 2324033 - RNA, 19 nt, Artificial Sequence
  Description of Artificial Sequence: Synthetic oligonucleotide
  Antisense strand to SEQ ID NO: 2324032
uuaccuagaccauacucag

SEQ ID NO: 2324034 - RNA, 19 nt, Artificial Sequence
  Description of Artificial Sequence: Synthetic oligonucleotide
  Sense strand starting at position 1886 of SEQ ID NO: 1885201
gaguauggucuagguaaag

SEQ ID NO: 2324035 - RNA, 19 nt, Artificial Sequence
  Description of Artificial Sequence: Synthetic oligonucleotide
  Antisense strand to SEQ ID NO: 2324034
cuuuaccuagaccauacuc

SEQ ID NO: 2324036 - RNA, 19 nt, Artificial Sequence
  Description of Artificial Sequence: Synthetic oligonucleotide
  Sense strand starting at position 2005 of SEQ ID NO: 1885201
gggugugauuaauuacaua

SEQ ID NO: 2324037 - RNA, 19 nt, Artificial Sequence
  Description of Artificial Sequence: Synthetic oligonucleotide
  Antisense strand to SEQ ID NO: 2324036
uauguaauuaaucacaccc

SEQ ID NO: 2324038 - RNA, 19 nt, Artificial Sequence
  Description of Artificial Sequence: Synthetic oligonucleotide
  Sense strand starting at position 2201 of SEQ ID NO: 1885201
uuaggugacagcuauguua

SEQ ID NO: 2324039 - RNA, 19 nt, Artificial Sequence
  Description of Artificial Sequence: Synthetic oligonucleotide
  Antisense strand to SEQ ID NO: 2324038
uaacauagcugucaccuaa

SEQ ID NO: 2324040 - RNA, 19 nt, Artificial Sequence
  Description of Artificial Sequence: Synthetic oligonucleotide
  Sense strand starting at position 2501 of SEQ ID NO: 1885201
gugccacuuaaugaugaga

SEQ ID NO: 2324041 - RNA, 19 nt, Artificial Sequence
  Description of Artificial Sequence: Synthetic oligonucleotide
  Antisense strand to SEQ ID NO: 2324040
ucucaucauuaaguggcac

SEQ ID NO: 2324042 - RNA, 19 nt, Artificial Sequence
  Description of Artificial Sequence: Synthetic oligonucleotide
  Sense strand starting at position 2709 of SEQ ID NO: 1885201
cuaugucuuccaggaaacu

SEQ ID NO: 2324043 - RNA, 19 nt, Artificial Sequence
  Description of Artificial Sequence: Synthetic oligonucleotide
  Antisense strand to SEQ ID NO: 2324042
aguuuccuggaagacauag

SEQ ID NO: 2324044 - RNA, 19 nt, Artificial Sequence
  Description of Artificial Sequence: Synthetic oligonucleotide
  Sense strand starting at position 2829 of SEQ ID NO: 1885201
gugugacaaucucugacaa

SEQ ID NO: 2324045 - RNA, 19 nt, Artificial Sequence
  Description of Artificial Sequence: Synthetic oligonucleotide
  Antisense strand to SEQ ID NO: 2324044
uugucagagauugucacac

SEQ ID NO: 2324046 - RNA, 19 nt, Artificial Sequence
  Description of Artificial Sequence: Synthetic oligonucleotide
  Sense strand starting at position 2830 of SEQ ID NO: 1885201
ugugacaaucucugacaaa

SEQ ID NO: 2324047 - RNA, 19 nt, Artificial Sequence
  Description of Artificial Sequence: Synthetic oligonucleotide
  Antisense strand to SEQ ID NO: 2324046
uuugucagagauugucaca

SEQ ID NO: 2324048 - RNA, 19 nt, Artificial Sequence
  Description of Artificial Sequence: Synthetic oligonucleotide
  Sense strand starting at position 2934 of SEQ ID NO: 1885201
cuagaucauuguuugugga

SEQ ID NO: 2324049 - RNA, 19 nt, Artificial Sequence
  Description of Artificial Sequence: Synthetic oligonucleotide
  Antisense strand to SEQ ID NO: 2324048
uccacaaacaaugaucuag

SEQ ID NO: 2324050 - RNA, 19 nt, Artificial Sequence
  Description of Artificial Sequence: Synthetic oligonucleotide
  Sense strand starting at position 2950 of SEQ ID NO: 1885201
ggaguuuaagagugugaug

SEQ ID NO: 2324051 - RNA, 19 nt, Artificial Sequence
  Description of Artificial Sequence: Synthetic oligonucleotide
  Antisense strand to SEQ ID NO: 2324050
caucacacucuuaaacucc

SEQ ID NO: 2324052 - RNA, 19 nt, Artificial Sequence
  Description of Artificial Sequence: Synthetic oligonucleotide
  Sense strand starting at position 2952 of SEQ ID NO: 1885201
aguuuaagagugugaugau

SEQ ID NO: 2324053 - RNA, 19 nt, Artificial Sequence
  Description of Artificial Sequence: Synthetic oligonucleotide
  Antisense strand to SEQ ID NO: 2324052
aucaucacacucuuaaacu

SEQ ID NO: 2324054 - RNA, 19 nt, Artificial Sequence
  Description of Artificial Sequence: Synthetic oligonucleotide
  Sense strand starting at position 3291 of SEQ ID NO: 1885201
uuguuaacaguagauguga

SEQ ID NO: 2324055 - RNA, 19 nt, Artificial Sequence
  Description of Artificial Sequence: Synthetic oligonucleotide
  Antisense strand to SEQ ID NO: 2324054
ucacaucuacuguuaacaa

SEQ ID NO: 2324056 - RNA, 19 nt, Artificial Sequence
  Description of Artificial Sequence: Synthetic oligonucleotide
  Sense strand starting at position 3347 of SEQ ID NO: 1885201
acuuuaguuaaccgggaga

SEQ ID NO: 2324057 - RNA, 19 nt, Artificial Sequence
  Description of Artificial Sequence: Synthetic oligonucleotide
  Antisense strand to SEQ ID NO: 2324056
ucucccgguuaacuaaagu

SEQ ID NO: 2324058 - RNA, 19 nt, Artificial Sequence
  Description of Artificial Sequence: Synthetic oligonucleotide
  Sense strand starting at position 3349 of SEQ ID NO: 1885201
uuuaguuaaccgggagaca

SEQ ID NO: 2324059 - RNA, 19 nt, Artificial Sequence
  Description of Artificial Sequence: Synthetic oligonucleotide
  Antisense strand to SEQ ID NO: 2324058
ugucucccgguuaacuaaa

SEQ ID NO: 2324060 - RNA, 19 nt, Artificial Sequence
  Description of Artificial Sequence: Synthetic oligonucleotide
  Sense strand starting at position 3451 of SEQ ID NO: 1885201
ugcuucugaggaugaaauu

SEQ ID NO: 2324061 - RNA, 19 nt, Artificial Sequence
  Description of Artificial Sequence: Synthetic oligonucleotide
  Antisense strand to SEQ ID NO: 2324060
aauuucauccucagaagca

SEQ ID NO: 2324062 - RNA, 19 nt, Artificial Sequence
  Description of Artificial Sequence: Synthetic oligonucleotide
  Sense strand starting at position 3562 of SEQ ID NO: 1885201
agaaucgacuuaccauauu

SEQ ID NO: 2324063 - RNA, 19 nt, Artificial Sequence
  Description of Artificial Sequence: Synthetic oligonucleotide
  Antisense strand to SEQ ID NO: 2324062
aauaugguaagucgauucu

SEQ ID NO: 2324064 - RNA, 19 nt, Artificial Sequence
  Description of Artificial Sequence: Synthetic oligonucleotide
  Sense strand starting at position 3581 of SEQ ID NO: 1885201
uuauauacagugugaaaug

SEQ ID NO: 2324065 - RNA, 19 nt, Artificial Sequence
  Description of Artificial Sequence: Synthetic oligonucleotide
  Antisense strand to SEQ ID NO: 2324064
cauuucacacuguauauaa

SEQ ID NO: 2324066 - RNA, 19 nt, Artificial Sequence
  Description of Artificial Sequence: Synthetic oligonucleotide
  Sense strand starting at position 3623 of SEQ ID NO: 1885201
gucagaaagcuuuacauca

SEQ ID NO: 2324067 - RNA, 19 nt, Artificial Sequence
  Description of Artificial Sequence: Synthetic oligonucleotide
  Antisense strand to SEQ ID NO: 2324066
ugauguaaagcuuucugac

SEQ ID NO: 2324068 - RNA, 19 nt, Artificial Sequence
  Description of Artificial Sequence: Synthetic oligonucleotide
  Sense strand starting at position 3707 of SEQ ID NO: 1885201
guagguaaaucacuuagac

SEQ ID NO: 2324069 - RNA, 19 nt, Artificial Sequence
  Description of Artificial Sequence: Synthetic oligonucleotide
  Antisense strand to SEQ ID NO: 2324068
gucuaagugauuuaccuac

SEQ ID NO: 2324070 - RNA, 19 nt, Artificial Sequence
  Description of Artificial Sequence: Synthetic oligonucleotide
  Sense strand starting at position 3792 of SEQ ID NO: 1885201
cagugugaagacuggguaa

SEQ ID NO: 2324071 - RNA, 19 nt, Artificial Sequence
  Description of Artificial Sequence: Synthetic oligonucleotide
  Antisense strand to SEQ ID NO: 2324070
uuacccagucuucacacug

SEQ ID NO: 2324072 - RNA, 19 nt, Artificial Sequence
  Description of Artificial Sequence: Synthetic oligonucleotide
  Sense strand starting at position 3794 of SEQ ID NO: 1885201
gugugaagacuggguaaua

SEQ ID NO: 2324073 - RNA, 19 nt, Artificial Sequence
  Description of Artificial Sequence: Synthetic oligonucleotide
  Antisense strand to SEQ ID NO: 2324072
uauuacccagucuucacac

SEQ ID NO: 2324074 - RNA, 19 nt, Artificial Sequence
  Description of Artificial Sequence: Synthetic oligonucleotide
  Sense strand starting at position 3795 of SEQ ID NO: 1885201
ugugaagacuggguaauau

SEQ ID NO: 2324075 - RNA, 19 nt, Artificial Sequence
  Description of Artificial Sequence: Synthetic oligonucleotide
  Antisense strand to SEQ ID NO: 2324074
auauuacccagucuucaca

SEQ ID NO: 2324076 - RNA, 19 nt, Artificial Sequence
  Description of Artificial Sequence: Synthetic oligonucleotide
  Sense strand starting at position 3923 of SEQ ID NO: 1885201
aacagauauguuuguaaug

SEQ ID NO: 2324077 - RNA, 19 nt, Artificial Sequence
  Description of Artificial Sequence: Synthetic oligonucleotide
  Antisense strand to SEQ ID NO: 2324076
cauuacaaacauaucuguu

SEQ ID NO: 2324078 - RNA, 19 nt, Artificial Sequence
  Description of Artificial Sequence: Synthetic oligonucleotide
  Sense strand starting at position 3949 of SEQ ID NO: 1885201
aaaguuuaguaguugaaug

SEQ ID NO: 2324079 - RNA, 19 nt, Artificial Sequence
  Description of Artificial Sequence: Synthetic oligonucleotide
  Antisense strand to SEQ ID NO: 2324078
cauucaacuacuaaacuuu

SEQ ID NO: 2324080 - RNA, 19 nt, Artificial Sequence
  Description of Artificial Sequence: Synthetic oligonucleotide
  Sense strand starting at position 3951 of SEQ ID NO: 1885201
aguuuaguaguugaaugaa

SEQ ID NO: 2324081 - RNA, 19 nt, Artificial Sequence
  Description of Artificial Sequence: Synthetic oligonucleotide
  Antisense strand to SEQ ID NO: 2324080
uucauucaacuacuaaacu

SEQ ID NO: 2324082 - RNA, 19 nt, Artificial Sequence
  Description of Artificial Sequence: Synthetic oligonucleotide
  Sense strand starting at position 3954 of SEQ ID NO: 1885201
uuaguaguugaaugaaagu

SEQ ID NO: 2324083 - RNA, 19 nt, Artificial Sequence
  Description of Artificial Sequence: Synthetic oligonucleotide
  Antisense strand to SEQ ID NO: 2324082
acuuucauucaacuacuaa

SEQ ID NO: 2324084 - RNA, 19 nt, Artificial Sequence
  Description of Artificial Sequence: Synthetic oligonucleotide
  Sense strand starting at position 1 of SEQ ID NO: 1885202
aguguacuuccauaugcag

SEQ ID NO: 2324085 - RNA, 19 nt, Artificial Sequence
  Description of Artificial Sequence: Synthetic oligonucleotide
  Antisense strand to SEQ ID NO: 2324084
cugcauauggaaguacacu

SEQ ID NO: 2324086 - RNA, 19 nt, Artificial Sequence
  Description of Artificial Sequence: Synthetic oligonucleotide
  Sense strand starting at position 7 of SEQ ID NO: 1885202
cuuccauaugcagagcuaa

SEQ ID NO: 2324087 - RNA, 19 nt, Artificial Sequence
  Description of Artificial Sequence: Synthetic oligonucleotide
  Antisense strand to SEQ ID NO: 2324086
uuagcucugcauauggaag

SEQ ID NO: 2324088 - RNA, 19 nt, Artificial Sequence
  Description of Artificial Sequence: Synthetic oligonucleotide
  Sense strand starting at position 51 of SEQ ID NO: 1885202
agagacugcucuuuaagug

SEQ ID NO: 2324089 - RNA, 19 nt, Artificial Sequence
  Description of Artificial Sequence: Synthetic oligonucleotide
  Antisense strand to SEQ ID NO: 2324088
cacuuaaagagcagucucu

SEQ ID NO: 2324090 - RNA, 19 nt, Artificial Sequence
  Description of Artificial Sequence: Synthetic oligonucleotide
  Sense strand starting at position 105 of SEQ ID NO: 1885202
ggccgacuuaucugaaaga

SEQ ID NO: 2324091 - RNA, 19 nt, Artificial Sequence
  Description of Artificial Sequence: Synthetic oligonucleotide
  Antisense strand to SEQ ID NO: 2324090
ucuuucagauaagucggcc

SEQ ID NO: 2324092 - RNA, 19 nt, Artificial Sequence
  Description of Artificial Sequence: Synthetic oligonucleotide
  Sense strand starting at position 118 of SEQ ID NO: 1885202
gaaagaaugagguggguuu

SEQ ID NO: 2324093 - RNA, 19 nt, Artificial Sequence
  Description of Artificial Sequence: Synthetic oligonucleotide
  Antisense strand to SEQ ID NO: 2324092
aaacccaccucauucuuuc

SEQ ID NO: 2324094 - RNA, 19 nt, Artificial Sequence
  Description of Artificial Sequence: Synthetic oligonucleotide
  Sense strand starting at position 119 of SEQ ID NO: 1885202
aaagaaugagguggguuua

SEQ ID NO: 2324095 - RNA, 19 nt, Artificial Sequence
  Description of Artificial Sequence: Synthetic oligonucleotide
  Antisense strand to SEQ ID NO: 2324094
uaaacccaccucauucuuu

SEQ ID NO: 2324096 - RNA, 19 nt, Artificial Sequence
  Description of Artificial Sequence: Synthetic oligonucleotide
  Sense strand starting at position 131 of SEQ ID NO: 1885202
ggguuuacauguuuggaua

SEQ ID NO: 2324097 - RNA, 19 nt, Artificial Sequence
  Description of Artificial Sequence: Synthetic oligonucleotide
  Antisense strand to SEQ ID NO: 2324096
uauccaaacauguaaaccc

SEQ ID NO: 2324098 - RNA, 19 nt, Artificial Sequence
  Description of Artificial Sequence: Synthetic oligonucleotide
  Sense strand starting at position 142 of SEQ ID NO: 1885202
uuuggauauuuccaucuga

SEQ ID NO: 2324099 - RNA, 19 nt, Artificial Sequence
  Description of Artificial Sequence: Synthetic oligonucleotide
  Antisense strand to SEQ ID NO: 2324098
ucagauggaaauauccaaa

SEQ ID NO: 2324100 - RNA, 19 nt, Artificial Sequence
  Description of Artificial Sequence: Synthetic oligonucleotide
  Sense strand starting at position 277 of SEQ ID NO: 1885202
gcaccaggccaguagagau

SEQ ID NO: 2324101 - RNA, 19 nt, Artificial Sequence
  Description of Artificial Sequence: Synthetic oligonucleotide
  Antisense strand to SEQ ID NO: 2324100
aucucuacuggccuggugc

SEQ ID NO: 2324102 - RNA, 19 nt, Artificial Sequence
  Description of Artificial Sequence: Synthetic oligonucleotide
  Sense strand starting at position 484 of SEQ ID NO: 1885202
uccuuagagugauugcaag

SEQ ID NO: 2324103 - RNA, 19 nt, Artificial Sequence
  Description of Artificial Sequence: Synthetic oligonucleotide
  Antisense strand to SEQ ID NO: 2324102
cuugcaaucacucuaagga

SEQ ID NO: 2324104 - RNA, 19 nt, Artificial Sequence
  Description of Artificial Sequence: Synthetic oligonucleotide
  Sense strand starting at position 577 of SEQ ID NO: 1885202
cugugucaccacuagggaa

SEQ ID NO: 2324105 - RNA, 19 nt, Artificial Sequence
  Description of Artificial Sequence: Synthetic oligonucleotide
  Antisense strand to SEQ ID NO: 2324104
uucccuaguggugacacag

SEQ ID NO: 2324106 - RNA, 19 nt, Artificial Sequence
  Description of Artificial Sequence: Synthetic oligonucleotide
  Sense strand starting at position 579 of SEQ ID NO: 1885202
gugucaccacuagggaaau

SEQ ID NO: 2324107 - RNA, 19 nt, Artificial Sequence
  Description of Artificial Sequence: Synthetic oligonucleotide
  Antisense strand to SEQ ID NO: 2324106
auuucccuaguggugacac

SEQ ID NO: 2324108 - RNA, 19 nt, Artificial Sequence
  Description of Artificial Sequence: Synthetic oligonucleotide
  Sense strand starting at position 702 of SEQ ID NO: 1885202
ugucuuaugguaggaauac

SEQ ID NO: 2324109 - RNA, 19 nt, Artificial Sequence
  Description of Artificial Sequence: Synthetic oligonucleotide
  Antisense strand to SEQ ID NO: 2324108
guauuccuaccauaagaca

SEQ ID NO: 2324110 - RNA, 19 nt, Artificial Sequence
  Description of Artificial Sequence: Synthetic oligonucleotide
  Sense strand starting at position 811 of SEQ ID NO: 1885202
gcuuaauggcaagacuaug

SEQ ID NO: 2324111 - RNA, 19 nt, Artificial Sequence
  Description of Artificial Sequence: Synthetic oligonucleotide
  Antisense strand to SEQ ID NO: 2324110
cauagucuugccauuaagc

SEQ ID NO: 2324112 - RNA, 19 nt, Artificial Sequence
  Description of Artificial Sequence: Synthetic oligonucleotide
  Sense strand starting at position 874 of SEQ ID NO: 1885202
uaugauagauguguuccua

SEQ ID NO: 2324113 - RNA, 19 nt, Artificial Sequence
  Description of Artificial Sequence: Synthetic oligonucleotide
  Antisense strand to SEQ ID NO: 2324112
uaggaacacaucuaucaua

SEQ ID NO: 2324114 - RNA, 19 nt, Artificial Sequence
  Description of Artificial Sequence: Synthetic oligonucleotide
  Sense strand starting at position 878 of SEQ ID NO: 1885202
auagauguguuccuacaaa

SEQ ID NO: 2324115 - RNA, 19 nt, Artificial Sequence
  Description of Artificial Sequence: Synthetic oligonucleotide
  Antisense strand to SEQ ID NO: 2324114
uuuguaggaacacaucuau

SEQ ID NO: 2324116 - RNA, 19 nt, Artificial Sequence
  Description of Artificial Sequence: Synthetic oligonucleotide
  Sense strand starting at position 1054 of SEQ ID NO: 1885202
gggcuaucacccugagagg

SEQ ID NO: 2324117 - RNA, 19 nt, Artificial Sequence
  Description of Artificial Sequence: Synthetic oligonucleotide
  Antisense strand to SEQ ID NO: 2324116
ccucucagggugauagccc

SEQ ID NO: 2324118 - RNA, 19 nt, Artificial Sequence
  Description of Artificial Sequence: Synthetic oligonucleotide
  Sense strand starting at position 1055 of SEQ ID NO: 1885202
ggcuaucacccugagaggu

SEQ ID NO: 2324119 - RNA, 19 nt, Artificial Sequence
  Description of Artificial Sequence: Synthetic oligonucleotide
  Antisense strand to SEQ ID NO: 2324118
accucucagggugauagcc

SEQ ID NO: 2324120 - RNA, 19 nt, Artificial Sequence
  Description of Artificial Sequence: Synthetic oligonucleotide
  Sense strand starting at position 1068 of SEQ ID NO: 1885202
agaggugagccauaacuuc

SEQ ID NO: 2324121 - RNA, 19 nt, Artificial Sequence
  Description of Artificial Sequence: Synthetic oligonucleotide
  Antisense strand to SEQ ID NO: 2324120
gaaguuauggcucaccucu

SEQ ID NO: 2324122 - RNA, 19 nt, Artificial Sequence
  Description of Artificial Sequence: Synthetic oligonucleotide
  Sense strand starting at position 1137 of SEQ ID NO: 1885202
acugaaaguaugggcaaua

SEQ ID NO: 2324123 - RNA, 19 nt, Artificial Sequence
  Description of Artificial Sequence: Synthetic oligonucleotide
  Antisense strand to SEQ ID NO: 2324122
uauugcccauacuuucagu

SEQ ID NO: 2324124 - RNA, 19 nt, Artificial Sequence
  Description of Artificial Sequence: Synthetic oligonucleotide
  Sense strand starting at position 1138 of SEQ ID NO: 1885202
cugaaaguaugggcaauaa

SEQ ID NO: 2324125 - RNA, 19 nt, Artificial Sequence
  Description of Artificial Sequence: Synthetic oligonucleotide
  Antisense strand to SEQ ID NO: 2324124
uuauugcccauacuuucag

SEQ ID NO: 2324126 - RNA, 19 nt, Artificial Sequence
  Description of Artificial Sequence: Synthetic oligonucleotide
  Sense strand starting at position 1224 of SEQ ID NO: 1885202
auuagauggcaagguagau

SEQ ID NO: 2324127 - RNA, 19 nt, Artificial Sequence
  Description of Artificial Sequence: Synthetic oligonucleotide
  Antisense strand to SEQ ID NO: 2324126
aucuaccuugccaucuaau

SEQ ID NO: 2324128 - RNA, 19 nt, Artificial Sequence
  Description of Artificial Sequence: Synthetic oligonucleotide
  Sense strand starting at position 1281 of SEQ ID NO: 1885202
guccauucuacgggaagau

SEQ ID NO: 2324129 - RNA, 19 nt, Artificial Sequence
  Description of Artificial Sequence: Synthetic oligonucleotide
  Antisense strand to SEQ ID NO: 2324128
aucuucccguagaauggac

SEQ ID NO: 2324130 - RNA, 19 nt, Artificial Sequence
  Description of Artificial Sequence: Synthetic oligonucleotide
  Sense strand starting at position 2476 of SEQ ID NO: 1885202
uggaauugucaccaaggcu

SEQ ID NO: 2324131 - RNA, 19 nt, Artificial Sequence
  Description of Artificial Sequence: Synthetic oligonucleotide
  Antisense strand to SEQ ID NO: 2324130
agccuuggugacaauucca

SEQ ID NO: 2324132 - RNA, 19 nt, Artificial Sequence
  Description of Artificial Sequence: Synthetic oligonucleotide
  Sense strand starting at position 2518 of SEQ ID NO: 1885202
accugaagguguccuuaca

SEQ ID NO: 2324133 - RNA, 19 nt, Artificial Sequence
  Description of Artificial Sequence: Synthetic oligonucleotide
  Antisense strand to SEQ ID NO: 2324132
uguaaggacaccuucaggu

SEQ ID NO: 2324134 - RNA, 19 nt, Artificial Sequence
  Description of Artificial Sequence: Synthetic oligonucleotide
  Sense strand starting at position 2598 of SEQ ID NO: 1885202
cauagagcugguuacagau

SEQ ID NO: 2324135 - RNA, 19 nt, Artificial Sequence
  Description of Artificial Sequence: Synthetic oligonucleotide
  Antisense strand to SEQ ID NO: 2324134
aucuguaaccagcucuaug

SEQ ID NO: 2324136 - RNA, 19 nt, Artificial Sequence
  Description of Artificial Sequence: Synthetic oligonucleotide
  Sense strand starting at position 2608 of SEQ ID NO: 1885202
guuacagauugauucugua

SEQ ID NO: 2324137 - RNA, 19 nt, Artificial Sequence
  Description of Artificial Sequence: Synthetic oligonucleotide
  Antisense strand to SEQ ID NO: 2324136
uacagaaucaaucuguaac

SEQ ID NO: 2324138 - RNA, 19 nt, Artificial Sequence
  Description of Artificial Sequence: Synthetic oligonucleotide
  Sense strand starting at position 2644 of SEQ ID NO: 1885202
agcugccucagcguuuauu

SEQ ID NO: 2324139 - RNA, 19 nt, Artificial Sequence
  Description of Artificial Sequence: Synthetic oligonucleotide
  Antisense strand to SEQ ID NO: 2324138
aauaaacgcugaggcagcu

SEQ ID NO: 2324140 - RNA, 19 nt, Artificial Sequence
  Description of Artificial Sequence: Synthetic oligonucleotide
  Sense strand starting at position 2704 of SEQ ID NO: 1885202
cuauguauacuguauagca

SEQ ID NO: 2324141 - RNA, 19 nt, Artificial Sequence
  Description of Artificial Sequence: Synthetic oligonucleotide
  Antisense strand to SEQ ID NO: 2324140
ugcuauacaguauacauag

SEQ ID NO: 2324142 - RNA, 19 nt, Artificial Sequence
  Description of Artificial Sequence: Synthetic oligonucleotide
  Sense strand starting at position 2820 of SEQ ID NO: 1885202
ugaugagaauguucugcaa

SEQ ID NO: 2324143 - RNA, 19 nt, Artificial Sequence
  Description of Artificial Sequence: Synthetic oligonucleotide
  Antisense strand to SEQ ID NO: 2324142
uugcagaacauucucauca

SEQ ID NO: 2324144 - RNA, 19 nt, Artificial Sequence
  Description of Artificial Sequence: Synthetic oligonucleotide
  Sense strand starting at position 2838 of SEQ ID NO: 1885202
auuugauagugggaaugga

SEQ ID NO: 2324145 - RNA, 19 nt, Artificial Sequence
  Description of Artificial Sequence: Synthetic oligonucleotide
  Antisense strand to SEQ ID NO: 2324144
uccauucccacuaucaaau

SEQ ID NO: 2324146 - RNA, 19 nt, Artificial Sequence
  Description of Artificial Sequence: Synthetic oligonucleotide
  Sense strand starting at position 2922 of SEQ ID NO: 1885202
ugugaacaguaucucaaua

SEQ ID NO: 2324147 - RNA, 19 nt, Artificial Sequence
  Description of Artificial Sequence: Synthetic oligonucleotide
  Antisense strand to SEQ ID NO: 2324146
uauugagauacuguucaca

SEQ ID NO: 2324148 - RNA, 19 nt, Artificial Sequence
  Description of Artificial Sequence: Synthetic oligonucleotide
  Sense strand starting at position 3231 of SEQ ID NO: 1885202
agacuccaucgugacaaua

SEQ ID NO: 2324149 - RNA, 19 nt, Artificial Sequence
  Description of Artificial Sequence: Synthetic oligonucleotide
  Antisense strand to SEQ ID NO: 2324148
uauugucacgauggagucu

SEQ ID NO: 2324150 - RNA, 19 nt, Artificial Sequence
  Description of Artificial Sequence: Synthetic oligonucleotide
  Sense strand starting at position 3433 of SEQ ID NO: 1885202
uuucuuugugggcagaaau

SEQ ID NO: 2324151 - RNA, 19 nt, Artificial Sequence
  Description of Artificial Sequence: Synthetic oligonucleotide
  Antisense strand to SEQ ID NO: 2324150
auuucugcccacaaagaaa

SEQ ID NO: 2324152 - RNA, 19 nt, Artificial Sequence
  Description of Artificial Sequence: Synthetic oligonucleotide
  Sense strand starting at position 3546 of SEQ ID NO: 1885202
ugaucucugucaucaagga

SEQ ID NO: 2324153 - RNA, 19 nt, Artificial Sequence
  Description of Artificial Sequence: Synthetic oligonucleotide
  Antisense strand to SEQ ID NO: 2324152
uccuugaugacagagauca

SEQ ID NO: 2324154 - RNA, 19 nt, Artificial Sequence
  Description of Artificial Sequence: Synthetic oligonucleotide
  Sense strand starting at position 3664 of SEQ ID NO: 1885202
ggcugaaggauguguaaug

SEQ ID NO: 2324155 - RNA, 19 nt, Artificial Sequence
  Description of Artificial Sequence: Synthetic oligonucleotide
  Antisense strand to SEQ ID NO: 2324154
cauuacacauccuucagcc

SEQ ID NO: 2324156 - RNA, 19 nt, Artificial Sequence
  Description of Artificial Sequence: Synthetic oligonucleotide
  Sense strand starting at position 3752 of SEQ ID NO: 1885202
agaguagaacuguggacua

SEQ ID NO: 2324157 - RNA, 19 nt, Artificial Sequence
  Description of Artificial Sequence: Synthetic oligonucleotide
  Antisense strand to SEQ ID NO: 2324156
uaguccacaguucuacucu

SEQ ID NO: 2324158 - RNA, 19 nt, Artificial Sequence
  Description of Artificial Sequence: Synthetic oligonucleotide
  Sense strand starting at position 3764 of SEQ ID NO: 1885202
uggacuagagcucaguuaa

SEQ ID NO: 2324159 - RNA, 19 nt, Artificial Sequence
  Description of Artificial Sequence: Synthetic oligonucleotide
  Antisense strand to SEQ ID NO: 2324158
uuaacugagcucuagucca

SEQ ID NO: 2324160 - RNA, 19 nt, Artificial Sequence
  Description of Artificial Sequence: Synthetic oligonucleotide
  Sense strand starting at position 3867 of SEQ ID NO: 1885202
ggucucagucaucaucaua

SEQ ID NO: 2324161 - RNA, 19 nt, Artificial Sequence
  Description of Artificial Sequence: Synthetic oligonucleotide
  Antisense strand to SEQ ID NO: 2324160
uaugaugaugacugagacc

SEQ ID NO: 2324162 - RNA, 19 nt, Artificial Sequence
  Description of Artificial Sequence: Synthetic oligonucleotide
  Sense strand starting at position 3926 of SEQ ID NO: 1885202
cuuugugguauguauaaac

SEQ ID NO: 2324163 - RNA, 19 nt, Artificial Sequence
  Description of Artificial Sequence: Synthetic oligonucleotide
  Antisense strand to SEQ ID NO: 2324162
guuuauacauaccacaaag

SEQ ID NO: 2324164 - RNA, 19 nt, Artificial Sequence
  Description of Artificial Sequence: Synthetic oligonucleotide
  Sense strand starting at position 32 of SEQ ID NO: 1885203
gucagcugauaccuagaga

SEQ ID NO: 2324165 - RNA, 19 nt, Artificial Sequence
  Description of Artificial Sequence: Synthetic oligonucleotide
  Antisense strand to SEQ ID NO: 2324164
ucucuagguaucagcugac

SEQ ID NO: 2324166 - RNA, 19 nt, Artificial Sequence
  Description of Artificial Sequence: Synthetic oligonucleotide
  Sense strand starting at position 278 of SEQ ID NO: 1885203
cuguucuuuccauggaaac

SEQ ID NO: 2324167 - RNA, 19 nt, Artificial Sequence
  Description of Artificial Sequence: Synthetic oligonucleotide
  Antisense strand to SEQ ID NO: 2324166
guuuccauggaaagaacag

SEQ ID NO: 2324168 - RNA, 19 nt, Artificial Sequence
  Description of Artificial Sequence: Synthetic oligonucleotide
  Sense strand starting at position 452 of SEQ ID NO: 1885203
ggccucgucguacuugaau

SEQ ID NO: 2324169 - RNA, 19 nt, Artificial Sequence
  Description of Artificial Sequence: Synthetic oligonucleotide
  Antisense strand to SEQ ID NO: 2324168
auucaaguacgacgaggcc

SEQ ID NO: 2324170 - RNA, 19 nt, Artificial Sequence
  Description of Artificial Sequence: Synthetic oligonucleotide
  Sense strand starting at position 578 of SEQ ID NO: 1885203
aagguuuauuuggagaggu

SEQ ID NO: 2324171 - RNA, 19 nt, Artificial Sequence
  Description of Artificial Sequence: Synthetic oligonucleotide
  Antisense strand to SEQ ID NO: 2324170
accucuccaaauaaaccuu

SEQ ID NO: 2324172 - RNA, 19 nt, Artificial Sequence
  Description of Artificial Sequence: Synthetic oligonucleotide
  Sense strand starting at position 720 of SEQ ID NO: 1885203
cacauagaacguuguaaau

SEQ ID NO: 2324173 - RNA, 19 nt, Artificial Sequence
  Description of Artificial Sequence: Synthetic oligonucleotide
  Antisense strand to SEQ ID NO: 2324172
auuuacaacguucuaugug

SEQ ID NO: 2324174 - RNA, 19 nt, Artificial Sequence
  Description of Artificial Sequence: Synthetic oligonucleotide
  Sense strand starting at position 958 of SEQ ID NO: 1885203
guauauaugcuuuagauag

SEQ ID NO: 2324175 - RNA, 19 nt, Artificial Sequence
  Description of Artificial Sequence: Synthetic oligonucleotide
  Antisense strand to SEQ ID NO: 2324174
cuaucuaaagcauauauac

SEQ ID NO: 2324176 - RNA, 19 nt, Artificial Sequence
  Description of Artificial Sequence: Synthetic oligonucleotide
  Sense strand starting at position 1003 of SEQ ID NO: 1885203
guguguuaccaagcagcuu

SEQ ID NO: 2324177 - RNA, 19 nt, Artificial Sequence
  Description of Artificial Sequence: Synthetic oligonucleotide
  Antisense strand to SEQ ID NO: 2324176
aagcugcuugguaacacac

SEQ ID NO: 2324178 - RNA, 19 nt, Artificial Sequence
  Description of Artificial Sequence: Synthetic oligonucleotide
  Sense strand starting at position 1210 of SEQ ID NO: 1885203
auguuuguuagguaagacu

SEQ ID NO: 2324179 - RNA, 19 nt, Artificial Sequence
  Description of Artificial Sequence: Synthetic oligonucleotide
  Antisense strand to SEQ ID NO: 2324178
agucuuaccuaacaaacau

SEQ ID NO: 2324180 - RNA, 19 nt, Artificial Sequence
  Description of Artificial Sequence: Synthetic oligonucleotide
  Sense strand starting at position 1218 of SEQ ID NO: 1885203
uagguaagacugugagaau

SEQ ID NO: 2324181 - RNA, 19 nt, Artificial Sequence
  Description of Artificial Sequence: Synthetic oligonucleotide
  Antisense strand to SEQ ID NO: 2324180
auucucacagucuuaccua

SEQ ID NO: 2324182 - RNA, 19 nt, Artificial Sequence
  Description of Artificial Sequence: Synthetic oligonucleotide
  Sense strand starting at position 1623 of SEQ ID NO: 1885203
caguguuugcgucugcuua

SEQ ID NO: 2324183 - RNA, 19 nt, Artificial Sequence
  Description of Artificial Sequence: Synthetic oligonucleotide
  Antisense strand to SEQ ID NO: 2324182
uaagcagacgcaaacacug

SEQ ID NO: 2324184 - RNA, 19 nt, Artificial Sequence
  Description of Artificial Sequence: Synthetic oligonucleotide
  Sense strand starting at position 1641 of SEQ ID NO: 1885203
agggaaaugugcgugaaau

SEQ ID NO: 2324185 - RNA, 19 nt, Artificial Sequence
  Description of Artificial Sequence: Synthetic oligonucleotide
  Antisense strand to SEQ ID NO: 2324184
auuucacgcacauuucccu

SEQ ID NO: 2324186 - RNA, 19 nt, Artificial Sequence
  Description of Artificial Sequence: Synthetic oligonucleotide
  Sense strand starting at position 1643 of SEQ ID NO: 1885203
ggaaaugugcgugaaauaa

SEQ ID NO: 2324187 - RNA, 19 nt, Artificial Sequence
  Description of Artificial Sequence: Synthetic oligonucleotide
  Antisense strand to SEQ ID NO: 2324186
uuauuucacgcacauuucc

SEQ ID NO: 2324188 - RNA, 19 nt, Artificial Sequence
  Description of Artificial Sequence: Synthetic oligonucleotide
  Sense strand starting at position 1651 of SEQ ID NO: 1885203
gcgugaaauaaugacuuau

SEQ ID NO: 2324189 - RNA, 19 nt, Artificial Sequence
  Description of Artificial Sequence: Synthetic oligonucleotide
  Antisense strand to SEQ ID NO: 2324188
auaagucauuauuucacgc

SEQ ID NO: 2324190 - RNA, 19 nt, Artificial Sequence
  Description of Artificial Sequence: Synthetic oligonucleotide
  Sense strand starting at position 1661 of SEQ ID NO: 1885203
augacuuauuuagaacuga

SEQ ID NO: 2324191 - RNA, 19 nt, Artificial Sequence
  Description of Artificial Sequence: Synthetic oligonucleotide
  Antisense strand to SEQ ID NO: 2324190
ucaguucuaaauaagucau

SEQ ID NO: 2324192 - RNA, 19 nt, Artificial Sequence
  Description of Artificial Sequence: Synthetic oligonucleotide
  Sense strand starting at position 1756 of SEQ ID NO: 1885203
aaaggagcucugcagcaaa

SEQ ID NO: 2324193 - RNA, 19 nt, Artificial Sequence
  Description of Artificial Sequence: Synthetic oligonucleotide
  Antisense strand to SEQ ID NO: 2324192
uuugcugcagagcuccuuu

SEQ ID NO: 2324194 - RNA, 19 nt, Artificial Sequence
  Description of Artificial Sequence: Synthetic oligonucleotide
  Sense strand starting at position 1859 of SEQ ID NO: 1885203
uuauaaaugccuuaaggca

SEQ ID NO: 2324195 - RNA, 19 nt, Artificial Sequence
  Description of Artificial Sequence: Synthetic oligonucleotide
  Antisense strand to SEQ ID NO: 2324194
ugccuuaaggcauuuauaa

SEQ ID NO: 2324196 - RNA, 19 nt, Artificial Sequence
  Description of Artificial Sequence: Synthetic oligonucleotide
  Sense strand starting at position 2032 of SEQ ID NO: 1885203
uggcgaugccgcucugagu

SEQ ID NO: 2324197 - RNA, 19 nt, Artificial Sequence
  Description of Artificial Sequence: Synthetic oligonucleotide
  Antisense strand to SEQ ID NO: 2324196
acucagagcggcaucgcca

SEQ ID NO: 2324198 - RNA, 19 nt, Artificial Sequence
  Description of Artificial Sequence: Synthetic oligonucleotide
  Sense strand starting at position 2033 of SEQ ID NO: 1885203
ggcgaugccgcucugaguu

SEQ ID NO: 2324199 - RNA, 19 nt, Artificial Sequence
  Description of Artificial Sequence: Synthetic oligonucleotide
  Antisense strand to SEQ ID NO: 2324198
aacucagagcggcaucgcc

SEQ ID NO: 2324200 - RNA, 19 nt, Artificial Sequence
  Description of Artificial Sequence: Synthetic oligonucleotide
  Sense strand starting at position 2038 of SEQ ID NO: 1885203
ugccgcucugaguuaaagu

SEQ ID NO: 2324201 - RNA, 19 nt, Artificial Sequence
  Description of Artificial Sequence: Synthetic oligonucleotide
  Antisense strand to SEQ ID NO: 2324200
acuuuaacucagagcggca

SEQ ID NO: 2324202 - RNA, 19 nt, Artificial Sequence
  Description of Artificial Sequence: Synthetic oligonucleotide
  Sense strand starting at position 2062 of SEQ ID NO: 1885203
cuugguugccaggagaguu

SEQ ID NO: 2324203 - RNA, 19 nt, Artificial Sequence
  Description of Artificial Sequence: Synthetic oligonucleotide
  Antisense strand to SEQ ID NO: 2324202
aacucuccuggcaaccaag

SEQ ID NO: 2324204 - RNA, 19 nt, Artificial Sequence
  Description of Artificial Sequence: Synthetic oligonucleotide
  Sense strand starting at position 2180 of SEQ ID NO: 1885203
ggugacaucucaucuagau

SEQ ID NO: 2324205 - RNA, 19 nt, Artificial Sequence
  Description of Artificial Sequence: Synthetic oligonucleotide
  Antisense strand to SEQ ID NO: 2324204
aucuagaugagaugucacc

SEQ ID NO: 2324206 - RNA, 19 nt, Artificial Sequence
  Description of Artificial Sequence: Synthetic oligonucleotide
  Sense strand starting at position 2364 of SEQ ID NO: 1885203
gcuaguaacucuuugaaau

SEQ ID NO: 2324207 - RNA, 19 nt, Artificial Sequence
  Description of Artificial Sequence: Synthetic oligonucleotide
  Antisense strand to SEQ ID NO: 2324206
auuucaaagaguuacuagc

SEQ ID NO: 2324208 - RNA, 19 nt, Artificial Sequence
  Description of Artificial Sequence: Synthetic oligonucleotide
  Sense strand starting at position 2365 of SEQ ID NO: 1885203
cuaguaacucuuugaaaug

SEQ ID NO: 2324209 - RNA, 19 nt, Artificial Sequence
  Description of Artificial Sequence: Synthetic oligonucleotide
  Antisense strand to SEQ ID NO: 2324208
cauuucaaagaguuacuag

SEQ ID NO: 2324210 - RNA, 19 nt, Artificial Sequence
  Description of Artificial Sequence: Synthetic oligonucleotide
  Sense strand starting at position 2454 of SEQ ID NO: 1885203
uuauuugccguuugaaguu

SEQ ID NO: 2324211 - RNA, 19 nt, Artificial Sequence
  Description of Artificial Sequence: Synthetic oligonucleotide
  Antisense strand to SEQ ID NO: 2324210
aacuucaaacggcaaauaa

SEQ ID NO: 2324212 - RNA, 19 nt, Artificial Sequence
  Description of Artificial Sequence: Synthetic oligonucleotide
  Sense strand starting at position 2616 of SEQ ID NO: 1885203
ugaccucuccugcaaaguu

SEQ ID NO: 2324213 - RNA, 19 nt, Artificial Sequence
  Description of Artificial Sequence: Synthetic oligonucleotide
  Antisense strand to SEQ ID NO: 2324212
aacuuugcaggagagguca

SEQ ID NO: 2324214 - RNA, 19 nt, Artificial Sequence
  Description of Artificial Sequence: Synthetic oligonucleotide
  Sense strand starting at position 2742 of SEQ ID NO: 1885203
ccagcugcagcauaaauua

SEQ ID NO: 2324215 - RNA, 19 nt, Artificial Sequence
  Description of Artificial Sequence: Synthetic oligonucleotide
  Antisense strand to SEQ ID NO: 2324214
uaauuuaugcugcagcugg

SEQ ID NO: 2324216 - RNA, 19 nt, Artificial Sequence
  Description of Artificial Sequence: Synthetic oligonucleotide
  Sense strand starting at position 2832 of SEQ ID NO: 1885203
ugaaacauccauuguggaa

SEQ ID NO: 2324217 - RNA, 19 nt, Artificial Sequence
  Description of Artificial Sequence: Synthetic oligonucleotide
  Antisense strand to SEQ ID NO: 2324216
uuccacaauggauguuuca

SEQ ID NO: 2324218 - RNA, 19 nt, Artificial Sequence
  Description of Artificial Sequence: Synthetic oligonucleotide
  Sense strand starting at position 2958 of SEQ ID NO: 1885203
aaagauggaugcuuuaugu

SEQ ID NO: 2324219 - RNA, 19 nt, Artificial Sequence
  Description of Artificial Sequence: Synthetic oligonucleotide
  Antisense strand to SEQ ID NO: 2324218
acauaaagcauccaucuuu

SEQ ID NO: 2324220 - RNA, 19 nt, Artificial Sequence
  Description of Artificial Sequence: Synthetic oligonucleotide
  Sense strand starting at position 3030 of SEQ ID NO: 1885203
cuugauugaccucaguguu

SEQ ID NO: 2324221 - RNA, 19 nt, Artificial Sequence
  Description of Artificial Sequence: Synthetic oligonucleotide
  Antisense strand to SEQ ID NO: 2324220
aacacugaggucaaucaag

SEQ ID NO: 2324222 - RNA, 19 nt, Artificial Sequence
  Description of Artificial Sequence: Synthetic oligonucleotide
  Sense strand starting at position 3126 of SEQ ID NO: 1885203
uguuauggcagcuaugaag

SEQ ID NO: 2324223 - RNA, 19 nt, Artificial Sequence
  Description of Artificial Sequence: Synthetic oligonucleotide
  Antisense strand to SEQ ID NO: 2324222
cuucauagcugccauaaca

SEQ ID NO: 2324224 - RNA, 19 nt, Artificial Sequence
  Description of Artificial Sequence: Synthetic oligonucleotide
  Sense strand starting at position 3137 of SEQ ID NO: 1885203
cuaugaaggucuccauuag

SEQ ID NO: 2324225 - RNA, 19 nt, Artificial Sequence
  Description of Artificial Sequence: Synthetic oligonucleotide
  Antisense strand to SEQ ID NO: 2324224
cuaauggagaccuucauag

SEQ ID NO: 2324226 - RNA, 19 nt, Artificial Sequence
  Description of Artificial Sequence: Synthetic oligonucleotide
  Sense strand starting at position 3193 of SEQ ID NO: 1885203
ucauguaugcaucagagau

SEQ ID NO: 2324227 - RNA, 19 nt, Artificial Sequence
  Description of Artificial Sequence: Synthetic oligonucleotide
  Antisense strand to SEQ ID NO: 2324226
aucucugaugcauacauga

SEQ ID NO: 2324228 - RNA, 19 nt, Artificial Sequence
  Description of Artificial Sequence: Synthetic oligonucleotide
  Sense strand starting at position 3197 of SEQ ID NO: 1885203
guaugcaucagagaugcuu

SEQ ID NO: 2324229 - RNA, 19 nt, Artificial Sequence
  Description of Artificial Sequence: Synthetic oligonucleotide
  Antisense strand to SEQ ID NO: 2324228
aagcaucucugaugcauac

SEQ ID NO: 2324230 - RNA, 19 nt, Artificial Sequence
  Description of Artificial Sequence: Synthetic oligonucleotide
  Sense strand starting at position 3237 of SEQ ID NO: 1885203
uuugcauaugaaugaguga

SEQ ID NO: 2324231 - RNA, 19 nt, Artificial Sequence
  Description of Artificial Sequence: Synthetic oligonucleotide
  Antisense strand to SEQ ID NO: 2324230
ucacucauucauaugcaaa

SEQ ID NO: 2324232 - RNA, 19 nt, Artificial Sequence
  Description of Artificial Sequence: Synthetic oligonucleotide
  Sense strand starting at position 3406 of SEQ ID NO: 1885203
auacucuagugccuuaaga

SEQ ID NO: 2324233 - RNA, 19 nt, Artificial Sequence
  Description of Artificial Sequence: Synthetic oligonucleotide
  Antisense strand to SEQ ID NO: 2324232
ucuuaaggcacuagaguau

SEQ ID NO: 2324234 - RNA, 19 nt, Artificial Sequence
  Description of Artificial Sequence: Synthetic oligonucleotide
  Sense strand starting at position 3408 of SEQ ID NO: 1885203
acucuagugccuuaagaac

SEQ ID NO: 2324235 - RNA, 19 nt, Artificial Sequence
  Description of Artificial Sequence: Synthetic oligonucleotide
  Antisense strand to SEQ ID NO: 2324234
guucuuaaggcacuagagu

SEQ ID NO: 2324236 - RNA, 19 nt, Artificial Sequence
  Description of Artificial Sequence: Synthetic oligonucleotide
  Sense strand starting at position 3532 of SEQ ID NO: 1885203
aagugacaucgacauacuu

SEQ ID NO: 2324237 - RNA, 19 nt, Artificial Sequence
  Description of Artificial Sequence: Synthetic oligonucleotide
  Antisense strand to SEQ ID NO: 2324236
aaguaugucgaugucacuu

SEQ ID NO: 2324238 - RNA, 19 nt, Artificial Sequence
  Description of Artificial Sequence: Synthetic oligonucleotide
  Sense strand starting at position 3641 of SEQ ID NO: 1885203
ucagacaguuuauccagaa

SEQ ID NO: 2324239 - RNA, 19 nt, Artificial Sequence
  Description of Artificial Sequence: Synthetic oligonucleotide
  Antisense strand to SEQ ID NO: 2324238
uucuggauaaacugucuga

SEQ ID NO: 2324240 - RNA, 19 nt, Artificial Sequence
  Description of Artificial Sequence: Synthetic oligonucleotide
  Sense strand starting at position 3642 of SEQ ID NO: 1885203
cagacaguuuauccagaag

SEQ ID NO: 2324241 - RNA, 19 nt, Artificial Sequence
  Description of Artificial Sequence: Synthetic oligonucleotide
  Antisense strand to SEQ ID NO: 2324240
cuucuggauaaacugucug

SEQ ID NO: 2324242 - RNA, 19 nt, Artificial Sequence
  Description of Artificial Sequence: Synthetic oligonucleotide
  Sense strand starting at position 3952 of SEQ ID NO: 1885203
uaggguuugacugguagga

SEQ ID NO: 2324243 - RNA, 19 nt, Artificial Sequence
  Description of Artificial Sequence: Synthetic oligonucleotide
  Antisense strand to SEQ ID NO: 2324242
uccuaccagucaaacccua

SEQ ID NO: 2324244 - RNA, 19 nt, Artificial Sequence
  Description of Artificial Sequence: Synthetic oligonucleotide
  Sense strand starting at position 68 of SEQ ID NO: 1885204
gccugaggaaaguguugau

SEQ ID NO: 2324245 - RNA, 19 nt, Artificial Sequence
  Description of Artificial Sequence: Synthetic oligonucleotide
  Antisense strand to SEQ ID NO: 2324244
aucaacacuuuccucaggc

SEQ ID NO: 2324246 - RNA, 19 nt, Artificial Sequence
  Description of Artificial Sequence: Synthetic oligonucleotide
  Sense strand starting at position 336 of SEQ ID NO: 1885204
auauucugauuggcaauca

SEQ ID NO: 2324247 - RNA, 19 nt, Artificial Sequence
  Description of Artificial Sequence: Synthetic oligonucleotide
  Antisense strand to SEQ ID NO: 2324246
ugauugccaaucagaauau

SEQ ID NO: 2324248 - RNA, 19 nt, Artificial Sequence
  Description of Artificial Sequence: Synthetic oligonucleotide
  Sense strand starting at position 679 of SEQ ID NO: 1885204
uggugcuugccuguaguuu

SEQ ID NO: 2324249 - RNA, 19 nt, Artificial Sequence
  Description of Artificial Sequence: Synthetic oligonucleotide
  Antisense strand to SEQ ID NO: 2324248
aaacuacaggcaagcacca

SEQ ID NO: 2324250 - RNA, 19 nt, Artificial Sequence
  Description of Artificial Sequence: Synthetic oligonucleotide
  Sense strand starting at position 720 of SEQ ID NO: 1885204
aguagaaucuccuccugag

SEQ ID NO: 2324251 - RNA, 19 nt, Artificial Sequence
  Description of Artificial Sequence: Synthetic oligonucleotide
  Antisense strand to SEQ ID NO: 2324250
cucaggaggagauucuacu

SEQ ID NO: 2324252 - RNA, 19 nt, Artificial Sequence
  Description of Artificial Sequence: Synthetic oligonucleotide
  Sense strand starting at position 869 of SEQ ID NO: 1885204
gcuagacucucagcucaga

SEQ ID NO: 2324253 - RNA, 19 nt, Artificial Sequence
  Description of Artificial Sequence: Synthetic oligonucleotide
  Antisense strand to SEQ ID NO: 2324252
ucugagcugagagucuagc

SEQ ID NO: 2324254 - RNA, 19 nt, Artificial Sequence
  Description of Artificial Sequence: Synthetic oligonucleotide
  Sense strand starting at position 927 of SEQ ID NO: 1885204
ggauuucccugagauagcu

SEQ ID NO: 2324255 - RNA, 19 nt, Artificial Sequence
  Description of Artificial Sequence: Synthetic oligonucleotide
  Antisense strand to SEQ ID NO: 2324254
agcuaucucagggaaaucc

SEQ ID NO: 2324256 - RNA, 19 nt, Artificial Sequence
  Description of Artificial Sequence: Synthetic oligonucleotide
  Sense strand starting at position 1074 of SEQ ID NO: 1885204
caaagacucuguuugguca

SEQ ID NO: 2324257 - RNA, 19 nt, Artificial Sequence
  Description of Artificial Sequence: Synthetic oligonucleotide
  Antisense strand to SEQ ID NO: 2324256
ugaccaaacagagucuuug

SEQ ID NO: 2324258 - RNA, 19 nt, Artificial Sequence
  Description of Artificial Sequence: Synthetic oligonucleotide
  Sense strand starting at position 1210 of SEQ ID NO: 1885204
auggaauucccuuggcaga

SEQ ID NO: 2324259 - RNA, 19 nt, Artificial Sequence
  Description of Artificial Sequence: Synthetic oligonucleotide
  Antisense strand to SEQ ID NO: 2324258
ucugccaagggaauuccau

SEQ ID NO: 2324260 - RNA, 19 nt, Artificial Sequence
  Description of Artificial Sequence: Synthetic oligonucleotide
  Sense strand starting at position 1212 of SEQ ID NO: 1885204
ggaauucccuuggcagaga

SEQ ID NO: 2324261 - RNA, 19 nt, Artificial Sequence
  Description of Artificial Sequence: Synthetic oligonucleotide
  Antisense strand to SEQ ID NO: 2324260
ucucugccaagggaauucc

SEQ ID NO: 2324262 - RNA, 19 nt, Artificial Sequence
  Description of Artificial Sequence: Synthetic oligonucleotide
  Sense strand starting at position 1300 of SEQ ID NO: 1885204
uugugaucuggauauggca

SEQ ID NO: 2324263 - RNA, 19 nt, Artificial Sequence
  Description of Artificial Sequence: Synthetic oligonucleotide
  Antisense strand to SEQ ID NO: 2324262
ugccauauccagaucacaa

SEQ ID NO: 2324264 - RNA, 19 nt, Artificial Sequence
  Description of Artificial Sequence: Synthetic oligonucleotide
  Sense strand starting at position 1823 of SEQ ID NO: 1885204
gggcuucugccagaguuaa

SEQ ID NO: 2324265 - RNA, 19 nt, Artificial Sequence
  Description of Artificial Sequence: Synthetic oligonucleotide
  Antisense strand to SEQ ID NO: 2324264
uuaacucuggcagaagccc

SEQ ID NO: 2324266 - RNA, 19 nt, Artificial Sequence
  Description of Artificial Sequence: Synthetic oligonucleotide
  Sense strand starting at position 2309 of SEQ ID NO: 1885204
uucgaacgaaccuggaaau

SEQ ID NO: 2324267 - RNA, 19 nt, Artificial Sequence
  Description of Artificial Sequence: Synthetic oligonucleotide
  Antisense strand to SEQ ID NO: 2324266
auuuccagguucguucgaa

SEQ ID NO: 2324268 - RNA, 19 nt, Artificial Sequence
  Description of Artificial Sequence: Synthetic oligonucleotide
  Sense strand starting at position 2406 of SEQ ID NO: 1885204
gguggugaugccgaacuga

SEQ ID NO: 2324269 - RNA, 19 nt, Artificial Sequence
  Description of Artificial Sequence: Synthetic oligonucleotide
  Antisense strand to SEQ ID NO: 2324268
ucaguucggcaucaccacc

SEQ ID NO: 2324270 - RNA, 19 nt, Artificial Sequence
  Description of Artificial Sequence: Synthetic oligonucleotide
  Sense strand starting at position 2687 of SEQ ID NO: 1885204
ugaugucacccuggagauc

SEQ ID NO: 2324271 - RNA, 19 nt, Artificial Sequence
  Description of Artificial Sequence: Synthetic oligonucleotide
  Antisense strand to SEQ ID NO: 2324270
gaucuccagggugacauca

SEQ ID NO: 2324272 - RNA, 19 nt, Artificial Sequence
  Description of Artificial Sequence: Synthetic oligonucleotide
  Sense strand starting at position 2696 of SEQ ID NO: 1885204
ccuggagauccaugccaaa

SEQ ID NO: 2324273 - RNA, 19 nt, Artificial Sequence
  Description of Artificial Sequence: Synthetic oligonucleotide
  Antisense strand to SEQ ID NO: 2324272
uuuggcauggaucuccagg

SEQ ID NO: 2324274 - RNA, 19 nt, Artificial Sequence
  Description of Artificial Sequence: Synthetic oligonucleotide
  Sense strand starting at position 2767 of SEQ ID NO: 1885204
acaaguuauggccagguca

SEQ ID NO: 2324275 - RNA, 19 nt, Artificial Sequence
  Description of Artificial Sequence: Synthetic oligonucleotide
  Antisense strand to SEQ ID NO: 2324274
ugaccuggccauaacuugu

SEQ ID NO: 2324276 - RNA, 19 nt, Artificial Sequence
  Description of Artificial Sequence: Synthetic oligonucleotide
  Sense strand starting at position 2769 of SEQ ID NO: 1885204
aaguuauggccaggucaag

SEQ ID NO: 2324277 - RNA, 19 nt, Artificial Sequence
  Description of Artificial Sequence: Synthetic oligonucleotide
  Antisense strand to SEQ ID NO: 2324276
cuugaccuggccauaacuu

SEQ ID NO: 2324278 - RNA, 19 nt, Artificial Sequence
  Description of Artificial Sequence: Synthetic oligonucleotide
  Sense strand starting at position 2775 of SEQ ID NO: 1885204
uggccaggucaaggaauua

SEQ ID NO: 2324279 - RNA, 19 nt, Artificial Sequence
  Description of Artificial Sequence: Synthetic oligonucleotide
  Antisense strand to SEQ ID NO: 2324278
uaauuccuugaccuggcca

SEQ ID NO: 2324280 - RNA, 19 nt, Artificial Sequence
  Description of Artificial Sequence: Synthetic oligonucleotide
  Sense strand starting at position 2987 of SEQ ID NO: 1885204
cugagugacuuucugagaa

SEQ ID NO: 2324281 - RNA, 19 nt, Artificial Sequence
  Description of Artificial Sequence: Synthetic oligonucleotide
  Antisense strand to SEQ ID NO: 2324280
uucucagaaagucacucag

SEQ ID NO: 2324282 - RNA, 19 nt, Artificial Sequence
  Description of Artificial Sequence: Synthetic oligonucleotide
  Sense strand starting at position 2999 of SEQ ID NO: 1885204
cugagaaagcaguguauca

SEQ ID NO: 2324283 - RNA, 19 nt, Artificial Sequence
  Description of Artificial Sequence: Synthetic oligonucleotide
  Antisense strand to SEQ ID NO: 2324282
ugauacacugcuuucucag

SEQ ID NO: 2324284 - RNA, 19 nt, Artificial Sequence
  Description of Artificial Sequence: Synthetic oligonucleotide
  Sense strand starting at position 3001 of SEQ ID NO: 1885204
gagaaagcaguguaucauc

SEQ ID NO: 2324285 - RNA, 19 nt, Artificial Sequence
  Description of Artificial Sequence: Synthetic oligonucleotide
  Antisense strand to SEQ ID NO: 2324284
gaugauacacugcuuucuc

SEQ ID NO: 2324286 - RNA, 19 nt, Artificial Sequence
  Description of Artificial Sequence: Synthetic oligonucleotide
  Sense strand starting at position 3011 of SEQ ID NO: 1885204
uguaucaucugcccuaaga

SEQ ID NO: 2324287 - RNA, 19 nt, Artificial Sequence
  Description of Artificial Sequence: Synthetic oligonucleotide
  Antisense strand to SEQ ID NO: 2324286
ucuuagggcagaugauaca

SEQ ID NO: 2324288 - RNA, 19 nt, Artificial Sequence
  Description of Artificial Sequence: Synthetic oligonucleotide
  Sense strand starting at position 3060 of SEQ ID NO: 1885204
aguugagauuucuagacau

SEQ ID NO: 2324289 - RNA, 19 nt, Artificial Sequence
  Description of Artificial Sequence: Synthetic oligonucleotide
  Antisense strand to SEQ ID NO: 2324288
augucuagaaaucucaacu

SEQ ID NO: 2324290 - RNA, 19 nt, Artificial Sequence
  Description of Artificial Sequence: Synthetic oligonucleotide
  Sense strand starting at position 3146 of SEQ ID NO: 1885204
gcuggacauuaacuuguau

SEQ ID NO: 2324291 - RNA, 19 nt, Artificial Sequence
  Description of Artificial Sequence: Synthetic oligonucleotide
  Antisense strand to SEQ ID NO: 2324290
auacaaguuaauguccagc

SEQ ID NO: 2324292 - RNA, 19 nt, Artificial Sequence
  Description of Artificial Sequence: Synthetic oligonucleotide
  Sense strand starting at position 3287 of SEQ ID NO: 1885204
gcagacugucaugaucuca

SEQ ID NO: 2324293 - RNA, 19 nt, Artificial Sequence
  Description of Artificial Sequence: Synthetic oligonucleotide
  Antisense strand to SEQ ID NO: 2324292
ugagaucaugacagucugc

SEQ ID NO: 2324294 - RNA, 19 nt, Artificial Sequence
  Description of Artificial Sequence: Synthetic oligonucleotide
  Sense strand starting at position 3324 of SEQ ID NO: 1885204
uuaugucagggaugaagca

SEQ ID NO: 2324295 - RNA, 19 nt, Artificial Sequence
  Description of Artificial Sequence: Synthetic oligonucleotide
  Antisense strand to SEQ ID NO: 2324294
ugcuucaucccugacauaa

SEQ ID NO: 2324296 - RNA, 19 nt, Artificial Sequence
  Description of Artificial Sequence: Synthetic oligonucleotide
  Sense strand starting at position 3425 of SEQ ID NO: 1885204
ggagaaucagugugguaga

SEQ ID NO: 2324297 - RNA, 19 nt, Artificial Sequence
  Description of Artificial Sequence: Synthetic oligonucleotide
  Antisense strand to SEQ ID NO: 2324296
ucuaccacacugauucucc

SEQ ID NO: 2324298 - RNA, 19 nt, Artificial Sequence
  Description of Artificial Sequence: Synthetic oligonucleotide
  Sense strand starting at position 3519 of SEQ ID NO: 1885204
uggugauaucuauguaaca

SEQ ID NO: 2324299 - RNA, 19 nt, Artificial Sequence
  Description of Artificial Sequence: Synthetic oligonucleotide
  Antisense strand to SEQ ID NO: 2324298
uguuacauagauaucacca

SEQ ID NO: 2324300 - RNA, 19 nt, Artificial Sequence
  Description of Artificial Sequence: Synthetic oligonucleotide
  Sense strand starting at position 3520 of SEQ ID NO: 1885204
ggugauaucuauguaacaa

SEQ ID NO: 2324301 - RNA, 19 nt, Artificial Sequence
  Description of Artificial Sequence: Synthetic oligonucleotide
  Antisense strand to SEQ ID NO: 2324300
uuguuacauagauaucacc

SEQ ID NO: 2324302 - RNA, 19 nt, Artificial Sequence
  Description of Artificial Sequence: Synthetic oligonucleotide
  Sense strand starting at position 3581 of SEQ ID NO: 1885204
uugauaaacuugucaagga

SEQ ID NO: 2324303 - RNA, 19 nt, Artificial Sequence
  Description of Artificial Sequence: Synthetic oligonucleotide
  Antisense strand to SEQ ID NO: 2324302
uccuugacaaguuuaucaa

SEQ ID NO: 2324304 - RNA, 19 nt, Artificial Sequence
  Description of Artificial Sequence: Synthetic oligonucleotide
  Sense strand starting at position 3585 of SEQ ID NO: 1885204
uaaacuugucaaggaguuc

SEQ ID NO: 2324305 - RNA, 19 nt, Artificial Sequence
  Description of Artificial Sequence: Synthetic oligonucleotide
  Antisense strand to SEQ ID NO: 2324304
gaacuccuugacaaguuua

SEQ ID NO: 2324306 - RNA, 19 nt, Artificial Sequence
  Description of Artificial Sequence: Synthetic oligonucleotide
  Sense strand starting at position 3602 of SEQ ID NO: 1885204
uccugaaagugacuuacau

SEQ ID NO: 2324307 - RNA, 19 nt, Artificial Sequence
  Description of Artificial Sequence: Synthetic oligonucleotide
  Antisense strand to SEQ ID NO: 2324306
auguaagucacuuucagga

SEQ ID NO: 2324308 - RNA, 19 nt, Artificial Sequence
  Description of Artificial Sequence: Synthetic oligonucleotide
  Sense strand starting at position 3637 of SEQ ID NO: 1885204
uguuaucaccugcagauaa

SEQ ID NO: 2324309 - RNA, 19 nt, Artificial Sequence
  Description of Artificial Sequence: Synthetic oligonucleotide
  Antisense strand to SEQ ID NO: 2324308
uuaucugcaggugauaaca

SEQ ID NO: 2324310 - RNA, 19 nt, Artificial Sequence
  Description of Artificial Sequence: Synthetic oligonucleotide
  Sense strand starting at position 3647 of SEQ ID NO: 1885204
ugcagauaaugagcucuuu

SEQ ID NO: 2324311 - RNA, 19 nt, Artificial Sequence
  Description of Artificial Sequence: Synthetic oligonucleotide
  Antisense strand to SEQ ID NO: 2324310
aaagagcucauuaucugca

SEQ ID NO: 2324312 - RNA, 19 nt, Artificial Sequence
  Description of Artificial Sequence: Synthetic oligonucleotide
  Sense strand starting at position 3656 of SEQ ID NO: 1885204
ugagcucuuugaccaaaug

SEQ ID NO: 2324313 - RNA, 19 nt, Artificial Sequence
  Description of Artificial Sequence: Synthetic oligonucleotide
  Antisense strand to SEQ ID NO: 2324312
cauuuggucaaagagcuca

SEQ ID NO: 2324314 - RNA, 19 nt, Artificial Sequence
  Description of Artificial Sequence: Synthetic oligonucleotide
  Sense strand starting at position 3713 of SEQ ID NO: 1885204
uugucaugaagauagcuga

SEQ ID NO: 2324315 - RNA, 19 nt, Artificial Sequence
  Description of Artificial Sequence: Synthetic oligonucleotide
  Antisense strand to SEQ ID NO: 2324314
ucagcuaucuucaugacaa

SEQ ID NO: 2324316 - RNA, 19 nt, Artificial Sequence
  Description of Artificial Sequence: Synthetic oligonucleotide
  Sense strand starting at position 3819 of SEQ ID NO: 1885204
ccaugcaacccuggaauau

SEQ ID NO: 2324317 - RNA, 19 nt, Artificial Sequence
  Description of Artificial Sequence: Synthetic oligonucleotide
  Antisense strand to SEQ ID NO: 2324316
auauuccaggguugcaugg

SEQ ID NO: 2324318 - RNA, 19 nt, Artificial Sequence
  Description of Artificial Sequence: Synthetic oligonucleotide
  Sense strand starting at position 3881 of SEQ ID NO: 1885204
uuaccauguuucucacaga

SEQ ID NO: 2324319 - RNA, 19 nt, Artificial Sequence
  Description of Artificial Sequence: Synthetic oligonucleotide
  Antisense strand to SEQ ID NO: 2324318
ucugugagaaacaugguaa

SEQ ID NO: 2324320 - RNA, 19 nt, Artificial Sequence
  Description of Artificial Sequence: Synthetic oligonucleotide
  Sense strand starting at position 3915 of SEQ ID NO: 1885204
ggaaauauuucugacuccu

SEQ ID NO: 2324321 - RNA, 19 nt, Artificial Sequence
  Description of Artificial Sequence: Synthetic oligonucleotide
  Antisense strand to SEQ ID NO: 2324320
aggagucagaaauauuucc

SEQ ID NO: 2324322 - RNA, 19 nt, Artificial Sequence
  Description of Artificial Sequence: Synthetic oligonucleotide
  Sense strand starting at position 3926 of SEQ ID NO: 1885204
ugacuccuggcaugaaacu

SEQ ID NO: 2324323 - RNA, 19 nt, Artificial Sequence
  Description of Artificial Sequence: Synthetic oligonucleotide
  Antisense strand to SEQ ID NO: 2324322
aguuucaugccaggaguca

SEQ ID NO: 2324324 - RNA, 19 nt, Artificial Sequence
  Description of Artificial Sequence: Synthetic oligonucleotide
  Sense strand starting at position 649 of SEQ ID NO: 1885205
acacgauuaucuggaagga

SEQ ID NO: 2324325 - RNA, 19 nt, Artificial Sequence
  Description of Artificial Sequence: Synthetic oligonucleotide
  Antisense strand to SEQ ID NO: 2324324
uccuuccagauaaucgugu

SEQ ID NO: 2324326 - RNA, 19 nt, Artificial Sequence
  Description of Artificial Sequence: Synthetic oligonucleotide
  Sense strand starting at position 1591 of SEQ ID NO: 1885205
gcgcuuguccgaccucaca

SEQ ID NO: 2324327 - RNA, 19 nt, Artificial Sequence
  Description of Artificial Sequence: Synthetic oligonucleotide
  Antisense strand to SEQ ID NO: 2324326
ugugaggucggacaagcgc

SEQ ID NO: 2324328 - RNA, 19 nt, Artificial Sequence
  Description of Artificial Sequence: Synthetic oligonucleotide
  Sense strand starting at position 1717 of SEQ ID NO: 1885205
ggaugcugguuucuagaag

SEQ ID NO: 2324329 - RNA, 19 nt, Artificial Sequence
  Description of Artificial Sequence: Synthetic oligonucleotide
  Antisense strand to SEQ ID NO: 2324328
cuucuagaaaccagcaucc

SEQ ID NO: 2324330 - RNA, 19 nt, Artificial Sequence
  Description of Artificial Sequence: Synthetic oligonucleotide
  Sense strand starting at position 1848 of SEQ ID NO: 1885205
ccaccaaguuuauggagaa

SEQ ID NO: 2324331 - RNA, 19 nt, Artificial Sequence
  Description of Artificial Sequence: Synthetic oligonucleotide
  Antisense strand to SEQ ID NO: 2324330
uucuccauaaacuuggugg

SEQ ID NO: 2324332 - RNA, 19 nt, Artificial Sequence
  Description of Artificial Sequence: Synthetic oligonucleotide
  Sense strand starting at position 1849 of SEQ ID NO: 1885205
caccaaguuuauggagaaa

SEQ ID NO: 2324333 - RNA, 19 nt, Artificial Sequence
  Description of Artificial Sequence: Synthetic oligonucleotide
  Antisense strand to SEQ ID NO: 2324332
uuucuccauaaacuuggug

SEQ ID NO: 2324334 - RNA, 19 nt, Artificial Sequence
  Description of Artificial Sequence: Synthetic oligonucleotide
  Sense strand starting at position 2269 of SEQ ID NO: 1885205
ccuaauguaaguugggaaa

SEQ ID NO: 2324335 - RNA, 19 nt, Artificial Sequence
  Description of Artificial Sequence: Synthetic oligonucleotide
  Antisense strand to SEQ ID NO: 2324334
uuucccaacuuacauuagg

SEQ ID NO: 2324336 - RNA, 19 nt, Artificial Sequence
  Description of Artificial Sequence: Synthetic oligonucleotide
  Sense strand starting at position 2271 of SEQ ID NO: 1885205
uaauguaaguugggaaaca

SEQ ID NO: 2324337 - RNA, 19 nt, Artificial Sequence
  Description of Artificial Sequence: Synthetic oligonucleotide
  Antisense strand to SEQ ID NO: 2324336
uguuucccaacuuacauua

SEQ ID NO: 2324338 - RNA, 19 nt, Artificial Sequence
  Description of Artificial Sequence: Synthetic oligonucleotide
  Sense strand starting at position 2319 of SEQ ID NO: 1885205
auagcaaucaugcgaguca

SEQ ID NO: 2324339 - RNA, 19 nt, Artificial Sequence
  Description of Artificial Sequence: Synthetic oligonucleotide
  Antisense strand to SEQ ID NO: 2324338
ugacucgcaugauugcuau

SEQ ID NO: 2324340 - RNA, 19 nt, Artificial Sequence
  Description of Artificial Sequence: Synthetic oligonucleotide
  Sense strand starting at position 2320 of SEQ ID NO: 1885205
uagcaaucaugcgagucaa

SEQ ID NO: 2324341 - RNA, 19 nt, Artificial Sequence
  Description of Artificial Sequence: Synthetic oligonucleotide
  Antisense strand to SEQ ID NO: 2324340
uugacucgcaugauugcua

SEQ ID NO: 2324342 - RNA, 19 nt, Artificial Sequence
  Description of Artificial Sequence: Synthetic oligonucleotide
  Sense strand starting at position 2331 of SEQ ID NO: 1885205
cgagucaaaucucaagacu

SEQ ID NO: 2324343 - RNA, 19 nt, Artificial Sequence
  Description of Artificial Sequence: Synthetic oligonucleotide
  Antisense strand to SEQ ID NO: 2324342
agucuugagauuugacucg

SEQ ID NO: 2324344 - RNA, 19 nt, Artificial Sequence
  Description of Artificial Sequence: Synthetic oligonucleotide
  Sense strand starting at position 2334 of SEQ ID NO: 1885205
gucaaaucucaagacugua

SEQ ID NO: 2324345 - RNA, 19 nt, Artificial Sequence
  Description of Artificial Sequence: Synthetic oligonucleotide
  Antisense strand to SEQ ID NO: 2324344
uacagucuugagauuugac

SEQ ID NO: 2324346 - RNA, 19 nt, Artificial Sequence
  Description of Artificial Sequence: Synthetic oligonucleotide
  Sense strand starting at position 2348 of SEQ ID NO: 1885205
cuguaucuuggguguggau

SEQ ID NO: 2324347 - RNA, 19 nt, Artificial Sequence
  Description of Artificial Sequence: Synthetic oligonucleotide
  Antisense strand to SEQ ID NO: 2324346
auccacacccaagauacag

SEQ ID NO: 2324348 - RNA, 19 nt, Artificial Sequence
  Description of Artificial Sequence: Synthetic oligonucleotide
  Sense strand starting at position 2418 of SEQ ID NO: 1885205
aagggaggcugguuucuua

SEQ ID NO: 2324349 - RNA, 19 nt, Artificial Sequence
  Description of Artificial Sequence: Synthetic oligonucleotide
  Antisense strand to SEQ ID NO: 2324348
uaagaaaccagccucccuu

SEQ ID NO: 2324350 - RNA, 19 nt, Artificial Sequence
  Description of Artificial Sequence: Synthetic oligonucleotide
  Sense strand starting at position 2427 of SEQ ID NO: 1885205
ugguuucuuaggugagcca

SEQ ID NO: 2324351 - RNA, 19 nt, Artificial Sequence
  Description of Artificial Sequence: Synthetic oligonucleotide
  Antisense strand to SEQ ID NO: 2324350
uggcucaccuaagaaacca

SEQ ID NO: 2324352 - RNA, 19 nt, Artificial Sequence
  Description of Artificial Sequence: Synthetic oligonucleotide
  Sense strand starting at position 2456 of SEQ ID NO: 1885205
cugagaagugccgggaaua

SEQ ID NO: 2324353 - RNA, 19 nt, Artificial Sequence
  Description of Artificial Sequence: Synthetic oligonucleotide
  Antisense strand to SEQ ID NO: 2324352
uauucccggcacuucucag

SEQ ID NO: 2324354 - RNA, 19 nt, Artificial Sequence
  Description of Artificial Sequence: Synthetic oligonucleotide
  Sense strand starting at position 2457 of SEQ ID NO: 1885205
ugagaagugccgggaauag

SEQ ID NO: 2324355 - RNA, 19 nt, Artificial Sequence
  Description of Artificial Sequence: Synthetic oligonucleotide
  Antisense strand to SEQ ID NO: 2324354
cuauucccggcacuucuca

SEQ ID NO: 2324356 - RNA, 19 nt, Artificial Sequence
  Description of Artificial Sequence: Synthetic oligonucleotide
  Sense strand starting at position 2475 of SEQ ID NO: 1885205
ggaucauucuggcccugag

SEQ ID NO: 2324357 - RNA, 19 nt, Artificial Sequence
  Description of Artificial Sequence: Synthetic oligonucleotide
  Antisense strand to SEQ ID NO: 2324356
cucagggccagaaugaucc

SEQ ID NO: 2324358 - RNA, 19 nt, Artificial Sequence
  Description of Artificial Sequence: Synthetic oligonucleotide
  Sense strand starting at position 2962 of SEQ ID NO: 1885205
gacugaggguucucagaau

SEQ ID NO: 2324359 - RNA, 19 nt, Artificial Sequence
  Description of Artificial Sequence: Synthetic oligonucleotide
  Antisense strand to SEQ ID NO: 2324358
auucugagaacccucaguc

SEQ ID NO: 2324360 - RNA, 19 nt, Artificial Sequence
  Description of Artificial Sequence: Synthetic oligonucleotide
  Sense strand starting at position 2968 of SEQ ID NO: 1885205
ggguucucagaauguggaa

SEQ ID NO: 2324361 - RNA, 19 nt, Artificial Sequence
  Description of Artificial Sequence: Synthetic oligonucleotide
  Antisense strand to SEQ ID NO: 2324360
uuccacauucugagaaccc

SEQ ID NO: 2324362 - RNA, 19 nt, Artificial Sequence
  Description of Artificial Sequence: Synthetic oligonucleotide
  Sense strand starting at position 3066 of SEQ ID NO: 1885205
cagggaguauccuccaugu

SEQ ID NO: 2324363 - RNA, 19 nt, Artificial Sequence
  Description of Artificial Sequence: Synthetic oligonucleotide
  Antisense strand to SEQ ID NO: 2324362
acauggaggauacucccug

SEQ ID NO: 2324364 - RNA, 19 nt, Artificial Sequence
  Description of Artificial Sequence: Synthetic oligonucleotide
  Sense strand starting at position 3068 of SEQ ID NO: 1885205
gggaguauccuccauguga

SEQ ID NO: 2324365 - RNA, 19 nt, Artificial Sequence
  Description of Artificial Sequence: Synthetic oligonucleotide
  Antisense strand to SEQ ID NO: 2324364
ucacauggaggauacuccc

SEQ ID NO: 2324366 - RNA, 19 nt, Artificial Sequence
  Description of Artificial Sequence: Synthetic oligonucleotide
  Sense strand starting at position 3070 of SEQ ID NO: 1885205
gaguauccuccaugugaac

SEQ ID NO: 2324367 - RNA, 19 nt, Artificial Sequence
  Description of Artificial Sequence: Synthetic oligonucleotide
  Antisense strand to SEQ ID NO: 2324366
guucacauggaggauacuc

SEQ ID NO: 2324368 - RNA, 19 nt, Artificial Sequence
  Description of Artificial Sequence: Synthetic oligonucleotide
  Sense strand starting at position 3098 of SEQ ID NO: 1885205
gcugaugacuucuuuggaa

SEQ ID NO: 2324369 - RNA, 19 nt, Artificial Sequence
  Description of Artificial Sequence: Synthetic oligonucleotide
  Antisense strand to SEQ ID NO: 2324368
uuccaaagaagucaucagc

SEQ ID NO: 2324370 - RNA, 19 nt, Artificial Sequence
  Description of Artificial Sequence: Synthetic oligonucleotide
  Sense strand starting at position 3101 of SEQ ID NO: 1885205
gaugacuucuuuggaagcu

SEQ ID NO: 2324371 - RNA, 19 nt, Artificial Sequence
  Description of Artificial Sequence: Synthetic oligonucleotide
  Antisense strand to SEQ ID NO: 2324370
agcuuccaaagaagucauc

SEQ ID NO: 2324372 - RNA, 19 nt, Artificial Sequence
  Description of Artificial Sequence: Synthetic oligonucleotide
  Sense strand starting at position 3151 of SEQ ID NO: 1885205
ggaggugauuccuucccaa

SEQ ID NO: 2324373 - RNA, 19 nt, Artificial Sequence
  Description of Artificial Sequence: Synthetic oligonucleotide
  Antisense strand to SEQ ID NO: 2324372
uugggaaggaaucaccucc

SEQ ID NO: 2324374 - RNA, 19 nt, Artificial Sequence
  Description of Artificial Sequence: Synthetic oligonucleotide
  Sense strand starting at position 3154 of SEQ ID NO: 1885205
ggugauuccuucccaacag

SEQ ID NO: 2324375 - RNA, 19 nt, Artificial Sequence
  Description of Artificial Sequence: Synthetic oligonucleotide
  Antisense strand to SEQ ID NO: 2324374
cuguugggaaggaaucacc

SEQ ID NO: 2324376 - RNA, 19 nt, Artificial Sequence
  Description of Artificial Sequence: Synthetic oligonucleotide
  Sense strand starting at position 3346 of SEQ ID NO: 1885205
uaucgaucccagggagauc

SEQ ID NO: 2324377 - RNA, 19 nt, Artificial Sequence
  Description of Artificial Sequence: Synthetic oligonucleotide
  Antisense strand to SEQ ID NO: 2324376
gaucucccugggaucgaua

SEQ ID NO: 2324378 - RNA, 19 nt, Artificial Sequence
  Description of Artificial Sequence: Synthetic oligonucleotide
  Sense strand starting at position 3358 of SEQ ID NO: 1885205
ggagaucgcuuacaaagua

SEQ ID NO: 2324379 - RNA, 19 nt, Artificial Sequence
  Description of Artificial Sequence: Synthetic oligonucleotide
  Antisense strand to SEQ ID NO: 2324378
uacuuuguaagcgaucucc

SEQ ID NO: 2324380 - RNA, 19 nt, Artificial Sequence
  Description of Artificial Sequence: Synthetic oligonucleotide
  Sense strand starting at position 3374 of SEQ ID NO: 1885205
guagcugcuccgucuggaa

SEQ ID NO: 2324381 - RNA, 19 nt, Artificial Sequence
  Description of Artificial Sequence: Synthetic oligonucleotide
  Antisense strand to SEQ ID NO: 2324380
uuccagacggagcagcuac

SEQ ID NO: 2324382 - RNA, 19 nt, Artificial Sequence
  Description of Artificial Sequence: Synthetic oligonucleotide
  Sense strand starting at position 3376 of SEQ ID NO: 1885205
agcugcuccgucuggaaua

SEQ ID NO: 2324383 - RNA, 19 nt, Artificial Sequence
  Description of Artificial Sequence: Synthetic oligonucleotide
  Antisense strand to SEQ ID NO: 2324382
uauuccagacggagcagcu

SEQ ID NO: 2324384 - RNA, 19 nt, Artificial Sequence
  Description of Artificial Sequence: Synthetic oligonucleotide
  Sense strand starting at position 3377 of SEQ ID NO: 1885205
gcugcuccgucuggaauaa

SEQ ID NO: 2324385 - RNA, 19 nt, Artificial Sequence
  Description of Artificial Sequence: Synthetic oligonucleotide
  Antisense strand to SEQ ID NO: 2324384
uuauuccagacggagcagc

SEQ ID NO: 2324386 - RNA, 19 nt, Artificial Sequence
  Description of Artificial Sequence: Synthetic oligonucleotide
  Sense strand starting at position 3378 of SEQ ID NO: 1885205
cugcuccgucuggaauaaa

SEQ ID NO: 2324387 - RNA, 19 nt, Artificial Sequence
  Description of Artificial Sequence: Synthetic oligonucleotide
  Antisense strand to SEQ ID NO: 2324386
uuuauuccagacggagcag

SEQ ID NO: 2324388 - RNA, 19 nt, Artificial Sequence
  Description of Artificial Sequence: Synthetic oligonucleotide
  Sense strand starting at position 3813 of SEQ ID NO: 1885205
ugguguggguccuugagga

SEQ ID NO: 2324389 - RNA, 19 nt, Artificial Sequence
  Description of Artificial Sequence: Synthetic oligonucleotide
  Antisense strand to SEQ ID NO: 2324388
uccucaaggacccacacca

SEQ ID NO: 2324390 - RNA, 19 nt, Artificial Sequence
  Description of Artificial Sequence: Synthetic oligonucleotide
  Sense strand starting at position 283 of SEQ ID NO: 1885206
guuaccuaaggccaugaua

SEQ ID NO: 2324391 - RNA, 19 nt, Artificial Sequence
  Description of Artificial Sequence: Synthetic oligonucleotide
  Antisense strand to SEQ ID NO: 2324390
uaucauggccuuagguaac

SEQ ID NO: 2324392 - RNA, 19 nt, Artificial Sequence
  Description of Artificial Sequence: Synthetic oligonucleotide
  Sense strand starting at position 297 of SEQ ID NO: 1885206
ugauaaugcuucucaugua

SEQ ID NO: 2324393 - RNA, 19 nt, Artificial Sequence
  Description of Artificial Sequence: Synthetic oligonucleotide
  Antisense strand to SEQ ID NO: 2324392
uacaugagaagcauuauca

SEQ ID NO: 2324394 - RNA, 19 nt, Artificial Sequence
  Description of Artificial Sequence: Synthetic oligonucleotide
  Sense strand starting at position 527 of SEQ ID NO: 1885206
agguucuguacccauggau

SEQ ID NO: 2324395 - RNA, 19 nt, Artificial Sequence
  Description of Artificial Sequence: Synthetic oligonucleotide
  Antisense strand to SEQ ID NO: 2324394
auccauggguacagaaccu

SEQ ID NO: 2324396 - RNA, 19 nt, Artificial Sequence
  Description of Artificial Sequence: Synthetic oligonucleotide
  Sense strand starting at position 680 of SEQ ID NO: 1885206
cgguauuaugaguaaucua

SEQ ID NO: 2324397 - RNA, 19 nt, Artificial Sequence
  Description of Artificial Sequence: Synthetic oligonucleotide
  Antisense strand to SEQ ID NO: 2324396
uagauuacucauaauaccg

SEQ ID NO: 2324398 - RNA, 19 nt, Artificial Sequence
  Description of Artificial Sequence: Synthetic oligonucleotide
  Sense strand starting at position 721 of SEQ ID NO: 1885206
agaacaugcauagguuaga

SEQ ID NO: 2324399 - RNA, 19 nt, Artificial Sequence
  Description of Artificial Sequence: Synthetic oligonucleotide
  Antisense strand to SEQ ID NO: 2324398
ucuaaccuaugcauguucu

SEQ ID NO: 2324400 - RNA, 19 nt, Artificial Sequence
  Description of Artificial Sequence: Synthetic oligonucleotide
  Sense strand starting at position 722 of SEQ ID NO: 1885206
gaacaugcauagguuagau

SEQ ID NO: 2324401 - RNA, 19 nt, Artificial Sequence
  Description of Artificial Sequence: Synthetic oligonucleotide
  Antisense strand to SEQ ID NO: 2324400
aucuaaccuaugcauguuc

SEQ ID NO: 2324402 - RNA, 19 nt, Artificial Sequence
  Description of Artificial Sequence: Synthetic oligonucleotide
  Sense strand starting at position 751 of SEQ ID NO: 1885206
ugccauguuaaauauggga

SEQ ID NO: 2324403 - RNA, 19 nt, Artificial Sequence
  Description of Artificial Sequence: Synthetic oligonucleotide
  Antisense strand to SEQ ID NO: 2324402
ucccauauuuaacauggca

SEQ ID NO: 2324404 - RNA, 19 nt, Artificial Sequence
  Description of Artificial Sequence: Synthetic oligonucleotide
  Sense strand starting at position 753 of SEQ ID NO: 1885206
ccauguuaaauaugggaug

SEQ ID NO: 2324405 - RNA, 19 nt, Artificial Sequence
  Description of Artificial Sequence: Synthetic oligonucleotide
  Antisense strand to SEQ ID NO: 2324404
caucccauauuuaacaugg

SEQ ID NO: 2324406 - RNA, 19 nt, Artificial Sequence
  Description of Artificial Sequence: Synthetic oligonucleotide
  Sense strand starting at position 860 of SEQ ID NO: 1885206
uuaggacaacuguggucaa

SEQ ID NO: 2324407 - RNA, 19 nt, Artificial Sequence
  Description of Artificial Sequence: Synthetic oligonucleotide
  Antisense strand to SEQ ID NO: 2324406
uugaccacaguuguccuaa

SEQ ID NO: 2324408 - RNA, 19 nt, Artificial Sequence
  Description of Artificial Sequence: Synthetic oligonucleotide
  Sense strand starting at position 863 of SEQ ID NO: 1885206
ggacaacuguggucaauua

SEQ ID NO: 2324409 - RNA, 19 nt, Artificial Sequence
  Description of Artificial Sequence: Synthetic oligonucleotide
  Antisense strand to SEQ ID NO: 2324408
uaauugaccacaguugucc

SEQ ID NO: 2324410 - RNA, 19 nt, Artificial Sequence
  Description of Artificial Sequence: Synthetic oligonucleotide
  Sense strand starting at position 1022 of SEQ ID NO: 1885206
gugagagaguagucaucag

SEQ ID NO: 2324411 - RNA, 19 nt, Artificial Sequence
  Description of Artificial Sequence: Synthetic oligonucleotide
  Antisense strand to SEQ ID NO: 2324410
cugaugacuacucucucac

SEQ ID NO: 2324412 - RNA, 19 nt, Artificial Sequence
  Description of Artificial Sequence: Synthetic oligonucleotide
  Sense strand starting at position 1026 of SEQ ID NO: 1885206
gagaguagucaucagagua

SEQ ID NO: 2324413 - RNA, 19 nt, Artificial Sequence
  Description of Artificial Sequence: Synthetic oligonucleotide
  Antisense strand to SEQ ID NO: 2324412
uacucugaugacuacucuc

SEQ ID NO: 2324414 - RNA, 19 nt, Artificial Sequence
  Description of Artificial Sequence: Synthetic oligonucleotide
  Sense strand starting at position 1117 of SEQ ID NO: 1885206
ugaaucucaugucuaaaug

SEQ ID NO: 2324415 - RNA, 19 nt, Artificial Sequence
  Description of Artificial Sequence: Synthetic oligonucleotide
  Antisense strand to SEQ ID NO: 2324414
cauuuagacaugagauuca

SEQ ID NO: 2324416 - RNA, 19 nt, Artificial Sequence
  Description of Artificial Sequence: Synthetic oligonucleotide
  Sense strand starting at position 1140 of SEQ ID NO: 1885206
cccagacagcuggaucauu

SEQ ID NO: 2324417 - RNA, 19 nt, Artificial Sequence
  Description of Artificial Sequence: Synthetic oligonucleotide
  Antisense strand to SEQ ID NO: 2324416
aaugauccagcugucuggg

SEQ ID NO: 2324418 - RNA, 19 nt, Artificial Sequence
  Description of Artificial Sequence: Synthetic oligonucleotide
  Sense strand starting at position 1287 of SEQ ID NO: 1885206
uaagguaugguaugcaauu

SEQ ID NO: 2324419 - RNA, 19 nt, Artificial Sequence
  Description of Artificial Sequence: Synthetic oligonucleotide
  Antisense strand to SEQ ID NO: 2324418
aauugcauaccauaccuua

SEQ ID NO: 2324420 - RNA, 19 nt, Artificial Sequence
  Description of Artificial Sequence: Synthetic oligonucleotide
  Sense strand starting at position 1355 of SEQ ID NO: 1885206
cuaacugugggacgauaau

SEQ ID NO: 2324421 - RNA, 19 nt, Artificial Sequence
  Description of Artificial Sequence: Synthetic oligonucleotide
  Antisense strand to SEQ ID NO: 2324420
auuaucgucccacaguuag

SEQ ID NO: 2324422 - RNA, 19 nt, Artificial Sequence
  Description of Artificial Sequence: Synthetic oligonucleotide
  Sense strand starting at position 1615 of SEQ ID NO: 1885206
ucacguauuguccaugaug

SEQ ID NO: 2324423 - RNA, 19 nt, Artificial Sequence
  Description of Artificial Sequence: Synthetic oligonucleotide
  Antisense strand to SEQ ID NO: 2324422
caucauggacaauacguga

SEQ ID NO: 2324424 - RNA, 19 nt, Artificial Sequence
  Description of Artificial Sequence: Synthetic oligonucleotide
  Sense strand starting at position 1623 of SEQ ID NO: 1885206
uguccaugauguucuaaua

SEQ ID NO: 2324425 - RNA, 19 nt, Artificial Sequence
  Description of Artificial Sequence: Synthetic oligonucleotide
  Antisense strand to SEQ ID NO: 2324424
uauuagaacaucauggaca

SEQ ID NO: 2324426 - RNA, 19 nt, Artificial Sequence
  Description of Artificial Sequence: Synthetic oligonucleotide
  Sense strand starting at position 1636 of SEQ ID NO: 1885206
cuaauauaggguuaguuau

SEQ ID NO: 2324427 - RNA, 19 nt, Artificial Sequence
  Description of Artificial Sequence: Synthetic oligonucleotide
  Antisense strand to SEQ ID NO: 2324426
auaacuaacccuauauuag

SEQ ID NO: 2324428 - RNA, 19 nt, Artificial Sequence
  Description of Artificial Sequence: Synthetic oligonucleotide
  Sense strand starting at position 1835 of SEQ ID NO: 1885206
uguacuguccuccauaucu

SEQ ID NO: 2324429 - RNA, 19 nt, Artificial Sequence
  Description of Artificial Sequence: Synthetic oligonucleotide
  Antisense strand to SEQ ID NO: 2324428
agauauggaggacaguaca

SEQ ID NO: 2324430 - RNA, 19 nt, Artificial Sequence
  Description of Artificial Sequence: Synthetic oligonucleotide
  Sense strand starting at position 2035 of SEQ ID NO: 1885206
ugguccuguccugagaaug

SEQ ID NO: 2324431 - RNA, 19 nt, Artificial Sequence
  Description of Artificial Sequence: Synthetic oligonucleotide
  Antisense strand to SEQ ID NO: 2324430
cauucucaggacaggacca

SEQ ID NO: 2324432 - RNA, 19 nt, Artificial Sequence
  Description of Artificial Sequence: Synthetic oligonucleotide
  Sense strand starting at position 2188 of SEQ ID NO: 1885206
agggcuuaguuaguuaaua

SEQ ID NO: 2324433 - RNA, 19 nt, Artificial Sequence
  Description of Artificial Sequence: Synthetic oligonucleotide
  Antisense strand to SEQ ID NO: 2324432
uauuaacuaacuaagcccu

SEQ ID NO: 2324434 - RNA, 19 nt, Artificial Sequence
  Description of Artificial Sequence: Synthetic oligonucleotide
  Sense strand starting at position 2189 of SEQ ID NO: 1885206
gggcuuaguuaguuaauaa

SEQ ID NO: 2324435 - RNA, 19 nt, Artificial Sequence
  Description of Artificial Sequence: Synthetic oligonucleotide
  Antisense strand to SEQ ID NO: 2324434
uuauuaacuaacuaagccc

SEQ ID NO: 2324436 - RNA, 19 nt, Artificial Sequence
  Description of Artificial Sequence: Synthetic oligonucleotide
  Sense strand starting at position 2196 of SEQ ID NO: 1885206
guuaguuaauaaccacauu

SEQ ID NO: 2324437 - RNA, 19 nt, Artificial Sequence
  Description of Artificial Sequence: Synthetic oligonucleotide
  Antisense strand to SEQ ID NO: 2324436
aaugugguuauuaacuaac

SEQ ID NO: 2324438 - RNA, 19 nt, Artificial Sequence
  Description of Artificial Sequence: Synthetic oligonucleotide
  Sense strand starting at position 2243 of SEQ ID NO: 1885206
gcaauagugacaggaaaug

SEQ ID NO: 2324439 - RNA, 19 nt, Artificial Sequence
  Description of Artificial Sequence: Synthetic oligonucleotide
  Antisense strand to SEQ ID NO: 2324438
cauuuccugucacuauugc

SEQ ID NO: 2324440 - RNA, 19 nt, Artificial Sequence
  Description of Artificial Sequence: Synthetic oligonucleotide
  Sense strand starting at position 2595 of SEQ ID NO: 1885206
gcgaucauaccucaaugca

SEQ ID NO: 2324441 - RNA, 19 nt, Artificial Sequence
  Description of Artificial Sequence: Synthetic oligonucleotide
  Antisense strand to SEQ ID NO: 2324440
ugcauugagguaugaucgc

SEQ ID NO: 2324442 - RNA, 19 nt, Artificial Sequence
  Description of Artificial Sequence: Synthetic oligonucleotide
  Sense strand starting at position 2829 of SEQ ID NO: 1885206
ggccuagucugacuuuaaa

SEQ ID NO: 2324443 - RNA, 19 nt, Artificial Sequence
  Description of Artificial Sequence: Synthetic oligonucleotide
  Antisense strand to SEQ ID NO: 2324442
uuuaaagucagacuaggcc

SEQ ID NO: 2324444 - RNA, 19 nt, Artificial Sequence
  Description of Artificial Sequence: Synthetic oligonucleotide
  Sense strand starting at position 2944 of SEQ ID NO: 1885206
agagaauaguaagccuuga

SEQ ID NO: 2324445 - RNA, 19 nt, Artificial Sequence
  Description of Artificial Sequence: Synthetic oligonucleotide
  Antisense strand to SEQ ID NO: 2324444
ucaaggcuuacuauucucu

SEQ ID NO: 2324446 - RNA, 19 nt, Artificial Sequence
  Description of Artificial Sequence: Synthetic oligonucleotide
  Sense strand starting at position 2980 of SEQ ID NO: 1885206
auuaacauucuguagguau

SEQ ID NO: 2324447 - RNA, 19 nt, Artificial Sequence
  Description of Artificial Sequence: Synthetic oligonucleotide
  Antisense strand to SEQ ID NO: 2324446
auaccuacagaauguuaau

SEQ ID NO: 2324448 - RNA, 19 nt, Artificial Sequence
  Description of Artificial Sequence: Synthetic oligonucleotide
  Sense strand starting at position 3031 of SEQ ID NO: 1885206
ugaggaauuucucacugaa

SEQ ID NO: 2324449 - RNA, 19 nt, Artificial Sequence
  Description of Artificial Sequence: Synthetic oligonucleotide
  Antisense strand to SEQ ID NO: 2324448
uucagugagaaauuccuca

SEQ ID NO: 2324450 - RNA, 19 nt, Artificial Sequence
  Description of Artificial Sequence: Synthetic oligonucleotide
  Sense strand starting at position 3061 of SEQ ID NO: 1885206
agcccuucugcucaugaga

SEQ ID NO: 2324451 - RNA, 19 nt, Artificial Sequence
  Description of Artificial Sequence: Synthetic oligonucleotide
  Antisense strand to SEQ ID NO: 2324450
ucucaugagcagaagggcu

SEQ ID NO: 2324452 - RNA, 19 nt, Artificial Sequence
  Description of Artificial Sequence: Synthetic oligonucleotide
  Sense strand starting at position 3068 of SEQ ID NO: 1885206
cugcucaugagaugggauu

SEQ ID NO: 2324453 - RNA, 19 nt, Artificial Sequence
  Description of Artificial Sequence: Synthetic oligonucleotide
  Antisense strand to SEQ ID NO: 2324452
aaucccaucucaugagcag

SEQ ID NO: 2324454 - RNA, 19 nt, Artificial Sequence
  Description of Artificial Sequence: Synthetic oligonucleotide
  Sense strand starting at position 3190 of SEQ ID NO: 1885206
uguguauaugaaggguacu

SEQ ID NO: 2324455 - RNA, 19 nt, Artificial Sequence
  Description of Artificial Sequence: Synthetic oligonucleotide
  Antisense strand to SEQ ID NO: 2324454
aguacccuucauauacaca

SEQ ID NO: 2324456 - RNA, 19 nt, Artificial Sequence
  Description of Artificial Sequence: Synthetic oligonucleotide
  Sense strand starting at position 3191 of SEQ ID NO: 1885206
guguauaugaaggguacuu

SEQ ID NO: 2324457 - RNA, 19 nt, Artificial Sequence
  Description of Artificial Sequence: Synthetic oligonucleotide
  Antisense strand to SEQ ID NO: 2324456
aaguacccuucauauacac

SEQ ID NO: 2324458 - RNA, 19 nt, Artificial Sequence
  Description of Artificial Sequence: Synthetic oligonucleotide
  Sense strand starting at position 3286 of SEQ ID NO: 1885206
ucaggugagucucucuaau

SEQ ID NO: 2324459 - RNA, 19 nt, Artificial Sequence
  Description of Artificial Sequence: Synthetic oligonucleotide
  Antisense strand to SEQ ID NO: 2324458
auuagagagacucaccuga

SEQ ID NO: 2324460 - RNA, 19 nt, Artificial Sequence
  Description of Artificial Sequence: Synthetic oligonucleotide
  Sense strand starting at position 3343 of SEQ ID NO: 1885206
ggcgaagcucuuuaugaau

SEQ ID NO: 2324461 - RNA, 19 nt, Artificial Sequence
  Description of Artificial Sequence: Synthetic oligonucleotide
  Antisense strand to SEQ ID NO: 2324460
auucauaaagagcuucgcc

SEQ ID NO: 2324462 - RNA, 19 nt, Artificial Sequence
  Description of Artificial Sequence: Synthetic oligonucleotide
  Sense strand starting at position 3366 of SEQ ID NO: 1885206
cuaacauuaggugauguua

SEQ ID NO: 2324463 - RNA, 19 nt, Artificial Sequence
  Description of Artificial Sequence: Synthetic oligonucleotide
  Antisense strand to SEQ ID NO: 2324462
uaacaucaccuaauguuag

SEQ ID NO: 2324464 - RNA, 19 nt, Artificial Sequence
  Description of Artificial Sequence: Synthetic oligonucleotide
  Sense strand starting at position 3417 of SEQ ID NO: 1885206
uuagcauuuacgugacgaa

SEQ ID NO: 2324465 - RNA, 19 nt, Artificial Sequence
  Description of Artificial Sequence: Synthetic oligonucleotide
  Antisense strand to SEQ ID NO: 2324464
uucgucacguaaaugcuaa

SEQ ID NO: 2324466 - RNA, 19 nt, Artificial Sequence
  Description of Artificial Sequence: Synthetic oligonucleotide
  Sense strand starting at position 3595 of SEQ ID NO: 1885206
cgaucucuuuaauccauga

SEQ ID NO: 2324467 - RNA, 19 nt, Artificial Sequence
  Description of Artificial Sequence: Synthetic oligonucleotide
  Antisense strand to SEQ ID NO: 2324466
ucauggauuaaagagaucg

SEQ ID NO: 2324468 - RNA, 19 nt, Artificial Sequence
  Description of Artificial Sequence: Synthetic oligonucleotide
  Sense strand starting at position 3748 of SEQ ID NO: 1885206
ggaugcucuauacagugua

SEQ ID NO: 2324469 - RNA, 19 nt, Artificial Sequence
  Description of Artificial Sequence: Synthetic oligonucleotide
  Antisense strand to SEQ ID NO: 2324468
uacacuguauagagcaucc

SEQ ID NO: 2324470 - RNA, 19 nt, Artificial Sequence
  Description of Artificial Sequence: Synthetic oligonucleotide
  Sense strand starting at position 31 of SEQ ID NO: 1885207
auaccuguaugagggaaua

SEQ ID NO: 2324471 - RNA, 19 nt, Artificial Sequence
  Description of Artificial Sequence: Synthetic oligonucleotide
  Antisense strand to SEQ ID NO: 2324470
uauucccucauacagguau

SEQ ID NO: 2324472 - RNA, 19 nt, Artificial Sequence
  Description of Artificial Sequence: Synthetic oligonucleotide
  Sense strand starting at position 266 of SEQ ID NO: 1885207
guuguaguuaugcaguaga

SEQ ID NO: 2324473 - RNA, 19 nt, Artificial Sequence
  Description of Artificial Sequence: Synthetic oligonucleotide
  Antisense strand to SEQ ID NO: 2324472
ucuacugcauaacuacaac

SEQ ID NO: 2324474 - RNA, 19 nt, Artificial Sequence
  Description of Artificial Sequence: Synthetic oligonucleotide
  Sense strand starting at position 269 of SEQ ID NO: 1885207
guaguuaugcaguagauau

SEQ ID NO: 2324475 - RNA, 19 nt, Artificial Sequence
  Description of Artificial Sequence: Synthetic oligonucleotide
  Antisense strand to SEQ ID NO: 2324474
auaucuacugcauaacuac

SEQ ID NO: 2324476 - RNA, 19 nt, Artificial Sequence
  Description of Artificial Sequence: Synthetic oligonucleotide
  Sense strand starting at position 271 of SEQ ID NO: 1885207
aguuaugcaguagauauau

SEQ ID NO: 2324477 - RNA, 19 nt, Artificial Sequence
  Description of Artificial Sequence: Synthetic oligonucleotide
  Antisense strand to SEQ ID NO: 2324476
auauaucuacugcauaacu

SEQ ID NO: 2324478 - RNA, 19 nt, Artificial Sequence
  Description of Artificial Sequence: Synthetic oligonucleotide
  Sense strand starting at position 277 of SEQ ID NO: 1885207
gcaguagauauaugguacu

SEQ ID NO: 2324479 - RNA, 19 nt, Artificial Sequence
  Description of Artificial Sequence: Synthetic oligonucleotide
  Antisense strand to SEQ ID NO: 2324478
aguaccauauaucuacugc

SEQ ID NO: 2324480 - RNA, 19 nt, Artificial Sequence
  Description of Artificial Sequence: Synthetic oligonucleotide
  Sense strand starting at position 283 of SEQ ID NO: 1885207
gauauaugguacuugcaua

SEQ ID NO: 2324481 - RNA, 19 nt, Artificial Sequence
  Description of Artificial Sequence: Synthetic oligonucleotide
  Antisense strand to SEQ ID NO: 2324480
uaugcaaguaccauauauc

SEQ ID NO: 2324482 - RNA, 19 nt, Artificial Sequence
  Description of Artificial Sequence: Synthetic oligonucleotide
  Sense strand starting at position 400 of SEQ ID NO: 1885207
gaaggcagagucugaucaa

SEQ ID NO: 2324483 - RNA, 19 nt, Artificial Sequence
  Description of Artificial Sequence: Synthetic oligonucleotide
  Antisense strand to SEQ ID NO: 2324482
uugaucagacucugccuuc

SEQ ID NO: 2324484 - RNA, 19 nt, Artificial Sequence
  Description of Artificial Sequence: Synthetic oligonucleotide
  Sense strand starting at position 401 of SEQ ID NO: 1885207
aaggcagagucugaucaau

SEQ ID NO: 2324485 - RNA, 19 nt, Artificial Sequence
  Description of Artificial Sequence: Synthetic oligonucleotide
  Antisense strand to SEQ ID NO: 2324484
auugaucagacucugccuu

SEQ ID NO: 2324486 - RNA, 19 nt, Artificial Sequence
  Description of Artificial Sequence: Synthetic oligonucleotide
  Sense strand starting at position 403 of SEQ ID NO: 1885207
ggcagagucugaucaauga

SEQ ID NO: 2324487 - RNA, 19 nt, Artificial Sequence
  Description of Artificial Sequence: Synthetic oligonucleotide
  Antisense strand to SEQ ID NO: 2324486
ucauugaucagacucugcc

SEQ ID NO: 2324488 - RNA, 19 nt, Artificial Sequence
  Description of Artificial Sequence: Synthetic oligonucleotide
  Sense strand starting at position 622 of SEQ ID NO: 1885207
ucuguuaaccuuugcaaag

SEQ ID NO: 2324489 - RNA, 19 nt, Artificial Sequence
  Description of Artificial Sequence: Synthetic oligonucleotide
  Antisense strand to SEQ ID NO: 2324488
cuuugcaaagguuaacaga

SEQ ID NO: 2324490 - RNA, 19 nt, Artificial Sequence
  Description of Artificial Sequence: Synthetic oligonucleotide
  Sense strand starting at position 623 of SEQ ID NO: 1885207
cuguuaaccuuugcaaaga

SEQ ID NO: 2324491 - RNA, 19 nt, Artificial Sequence
  Description of Artificial Sequence: Synthetic oligonucleotide
  Antisense strand to SEQ ID NO: 2324490
ucuuugcaaagguuaacag

SEQ ID NO: 2324492 - RNA, 19 nt, Artificial Sequence
  Description of Artificial Sequence: Synthetic oligonucleotide
  Sense strand starting at position 711 of SEQ ID NO: 1885207
uucuaauaugggugaccau

SEQ ID NO: 2324493 - RNA, 19 nt, Artificial Sequence
  Description of Artificial Sequence: Synthetic oligonucleotide
  Antisense strand to SEQ ID NO: 2324492
auggucacccauauuagaa

SEQ ID NO: 2324494 - RNA, 19 nt, Artificial Sequence
  Description of Artificial Sequence: Synthetic oligonucleotide
  Sense strand starting at position 714 of SEQ ID NO: 1885207
uaauaugggugaccauuau

SEQ ID NO: 2324495 - RNA, 19 nt, Artificial Sequence
  Description of Artificial Sequence: Synthetic oligonucleotide
  Antisense strand to SEQ ID NO: 2324494
auaauggucacccauauua

SEQ ID NO: 2324496 - RNA, 19 nt, Artificial Sequence
  Description of Artificial Sequence: Synthetic oligonucleotide
  Sense strand starting at position 787 of SEQ ID NO: 1885207
guuucugcauggcaaagaa

SEQ ID NO: 2324497 - RNA, 19 nt, Artificial Sequence
  Description of Artificial Sequence: Synthetic oligonucleotide
  Antisense strand to SEQ ID NO: 2324496
uucuuugccaugcagaaac

SEQ ID NO: 2324498 - RNA, 19 nt, Artificial Sequence
  Description of Artificial Sequence: Synthetic oligonucleotide
  Sense strand starting at position 996 of SEQ ID NO: 1885207
gagauaagguccucgaaau

SEQ ID NO: 2324499 - RNA, 19 nt, Artificial Sequence
  Description of Artificial Sequence: Synthetic oligonucleotide
  Antisense strand to SEQ ID NO: 2324498
auuucgaggaccuuaucuc

SEQ ID NO: 2324500 - RNA, 19 nt, Artificial Sequence
  Description of Artificial Sequence: Synthetic oligonucleotide
  Sense strand starting at position 997 of SEQ ID NO: 1885207
agauaagguccucgaaauu

SEQ ID NO: 2324501 - RNA, 19 nt, Artificial Sequence
  Description of Artificial Sequence: Synthetic oligonucleotide
  Antisense strand to SEQ ID NO: 2324500
aauuucgaggaccuuaucu

SEQ ID NO: 2324502 - RNA, 19 nt, Artificial Sequence
  Description of Artificial Sequence: Synthetic oligonucleotide
  Sense strand starting at position 1051 of SEQ ID NO: 1885207
cgcagauagucucacacuu

SEQ ID NO: 2324503 - RNA, 19 nt, Artificial Sequence
  Description of Artificial Sequence: Synthetic oligonucleotide
  Antisense strand to SEQ ID NO: 2324502
aagugugagacuaucugcg

SEQ ID NO: 2324504 - RNA, 19 nt, Artificial Sequence
  Description of Artificial Sequence: Synthetic oligonucleotide
  Sense strand starting at position 1446 of SEQ ID NO: 1885207
cgggaacucauacacugua

SEQ ID NO: 2324505 - RNA, 19 nt, Artificial Sequence
  Description of Artificial Sequence: Synthetic oligonucleotide
  Antisense strand to SEQ ID NO: 2324504
uacaguguaugaguucccg

SEQ ID NO: 2324506 - RNA, 19 nt, Artificial Sequence
  Description of Artificial Sequence: Synthetic oligonucleotide
  Sense strand starting at position 1500 of SEQ ID NO: 1885207
acaguuaaauagcuggaaa

SEQ ID NO: 2324507 - RNA, 19 nt, Artificial Sequence
  Description of Artificial Sequence: Synthetic oligonucleotide
  Antisense strand to SEQ ID NO: 2324506
uuuccagcuauuuaacugu

SEQ ID NO: 2324508 - RNA, 19 nt, Artificial Sequence
  Description of Artificial Sequence: Synthetic oligonucleotide
  Sense strand starting at position 1502 of SEQ ID NO: 1885207
aguuaaauagcuggaaacu

SEQ ID NO: 2324509 - RNA, 19 nt, Artificial Sequence
  Description of Artificial Sequence: Synthetic oligonucleotide
  Antisense strand to SEQ ID NO: 2324508
aguuuccagcuauuuaacu

SEQ ID NO: 2324510 - RNA, 19 nt, Artificial Sequence
  Description of Artificial Sequence: Synthetic oligonucleotide
  Sense strand starting at position 1569 of SEQ ID NO: 1885207
uucuaaagguccugaggca

SEQ ID NO: 2324511 - RNA, 19 nt, Artificial Sequence
  Description of Artificial Sequence: Synthetic oligonucleotide
  Antisense strand to SEQ ID NO: 2324510
ugccucaggaccuuuagaa

SEQ ID NO: 2324512 - RNA, 19 nt, Artificial Sequence
  Description of Artificial Sequence: Synthetic oligonucleotide
  Sense strand starting at position 1570 of SEQ ID NO: 1885207
ucuaaagguccugaggcau

SEQ ID NO: 2324513 - RNA, 19 nt, Artificial Sequence
  Description of Artificial Sequence: Synthetic oligonucleotide
  Antisense strand to SEQ ID NO: 2324512
augccucaggaccuuuaga

SEQ ID NO: 2324514 - RNA, 19 nt, Artificial Sequence
  Description of Artificial Sequence: Synthetic oligonucleotide
  Sense strand starting at position 2869 of SEQ ID NO: 1885207
aaaugaaagacguguguag

SEQ ID NO: 2324515 - RNA, 19 nt, Artificial Sequence
  Description of Artificial Sequence: Synthetic oligonucleotide
  Antisense strand to SEQ ID NO: 2324514
cuacacacgucuuucauuu

SEQ ID NO: 2324516 - RNA, 19 nt, Artificial Sequence
  Description of Artificial Sequence: Synthetic oligonucleotide
  Sense strand starting at position 2873 of SEQ ID NO: 1885207
gaaagacguguguagcuuu

SEQ ID NO: 2324517 - RNA, 19 nt, Artificial Sequence
  Description of Artificial Sequence: Synthetic oligonucleotide
  Antisense strand to SEQ ID NO: 2324516
aaagcuacacacgucuuuc

SEQ ID NO: 2324518 - RNA, 19 nt, Artificial Sequence
  Description of Artificial Sequence: Synthetic oligonucleotide
  Sense strand starting at position 3200 of SEQ ID NO: 1885207
agucgaucacuuuguucuu

SEQ ID NO: 2324519 - RNA, 19 nt, Artificial Sequence
  Description of Artificial Sequence: Synthetic oligonucleotide
  Antisense strand to SEQ ID NO: 2324518
aagaacaaagugaucgacu

SEQ ID NO: 2324520 - RNA, 19 nt, Artificial Sequence
  Description of Artificial Sequence: Synthetic oligonucleotide
  Sense strand starting at position 3554 of SEQ ID NO: 1885207
cugagaccuuguuucuaag

SEQ ID NO: 2324521 - RNA, 19 nt, Artificial Sequence
  Description of Artificial Sequence: Synthetic oligonucleotide
  Antisense strand to SEQ ID NO: 2324520
cuuagaaacaaggucucag

SEQ ID NO: 2324522 - RNA, 19 nt, Artificial Sequence
  Description of Artificial Sequence: Synthetic oligonucleotide
  Sense strand starting at position 3557 of SEQ ID NO: 1885207
agaccuuguuucuaagaaa

SEQ ID NO: 2324523 - RNA, 19 nt, Artificial Sequence
  Description of Artificial Sequence: Synthetic oligonucleotide
  Antisense strand to SEQ ID NO: 2324522
uuucuuagaaacaaggucu

SEQ ID NO: 2324524 - RNA, 19 nt, Artificial Sequence
  Description of Artificial Sequence: Synthetic oligonucleotide
  Sense strand starting at position 93 of SEQ ID NO: 1885208
cauggcaauuaguuugaga

SEQ ID NO: 2324525 - RNA, 19 nt, Artificial Sequence
  Description of Artificial Sequence: Synthetic oligonucleotide
  Antisense strand to SEQ ID NO: 2324524
ucucaaacuaauugccaug

SEQ ID NO: 2324526 - RNA, 19 nt, Artificial Sequence
  Description of Artificial Sequence: Synthetic oligonucleotide
  Sense strand starting at position 95 of SEQ ID NO: 1885208
uggcaauuaguuugagaca

SEQ ID NO: 2324527 - RNA, 19 nt, Artificial Sequence
  Description of Artificial Sequence: Synthetic oligonucleotide
  Antisense strand to SEQ ID NO: 2324526
ugucucaaacuaauugcca

SEQ ID NO: 2324528 - RNA, 19 nt, Artificial Sequence
  Description of Artificial Sequence: Synthetic oligonucleotide
  Sense strand starting at position 175 of SEQ ID NO: 1885208
gcagaauggaucugggcaa

SEQ ID NO: 2324529 - RNA, 19 nt, Artificial Sequence
  Description of Artificial Sequence: Synthetic oligonucleotide
  Antisense strand to SEQ ID NO: 2324528
uugcccagauccauucugc

SEQ ID NO: 2324530 - RNA, 19 nt, Artificial Sequence
  Description of Artificial Sequence: Synthetic oligonucleotide
  Sense strand starting at position 189 of SEQ ID NO: 1885208
ggcaauuuauugucuuacu

SEQ ID NO: 2324531 - RNA, 19 nt, Artificial Sequence
  Description of Artificial Sequence: Synthetic oligonucleotide
  Antisense strand to SEQ ID NO: 2324530
aguaagacaauaaauugcc

SEQ ID NO: 2324532 - RNA, 19 nt, Artificial Sequence
  Description of Artificial Sequence: Synthetic oligonucleotide
  Sense strand starting at position 494 of SEQ ID NO: 1885208
uguugacugagagguuaua

SEQ ID NO: 2324533 - RNA, 19 nt, Artificial Sequence
  Description of Artificial Sequence: Synthetic oligonucleotide
  Antisense strand to SEQ ID NO: 2324532
uauaaccucucagucaaca

SEQ ID NO: 2324534 - RNA, 19 nt, Artificial Sequence
  Description of Artificial Sequence: Synthetic oligonucleotide
  Sense strand starting at position 523 of SEQ ID NO: 1885208
gaugaaaucucucuggagc

SEQ ID NO: 2324535 - RNA, 19 nt, Artificial Sequence
  Description of Artificial Sequence: Synthetic oligonucleotide
  Antisense strand to SEQ ID NO: 2324534
gcuccagagagauuucauc

SEQ ID NO: 2324536 - RNA, 19 nt, Artificial Sequence
  Description of Artificial Sequence: Synthetic oligonucleotide
  Sense strand starting at position 524 of SEQ ID NO: 1885208
augaaaucucucuggagca

SEQ ID NO: 2324537 - RNA, 19 nt, Artificial Sequence
  Description of Artificial Sequence: Synthetic oligonucleotide
  Antisense strand to SEQ ID NO: 2324536
ugcuccagagagauuucau

SEQ ID NO: 2324538 - RNA, 19 nt, Artificial Sequence
  Description of Artificial Sequence: Synthetic oligonucleotide
  Sense strand starting at position 543 of SEQ ID NO: 1885208
aguccugugaaacagugua

SEQ ID NO: 2324539 - RNA, 19 nt, Artificial Sequence
  Description of Artificial Sequence: Synthetic oligonucleotide
  Antisense strand to SEQ ID NO: 2324538
uacacuguuucacaggacu

SEQ ID NO: 2324540 - RNA, 19 nt, Artificial Sequence
  Description of Artificial Sequence: Synthetic oligonucleotide
  Sense strand starting at position 739 of SEQ ID NO: 1885208
uggcauuuaugggccuuua

SEQ ID NO: 2324541 - RNA, 19 nt, Artificial Sequence
  Description of Artificial Sequence: Synthetic oligonucleotide
  Antisense strand to SEQ ID NO: 2324540
uaaaggcccauaaaugcca

SEQ ID NO: 2324542 - RNA, 19 nt, Artificial Sequence
  Description of Artificial Sequence: Synthetic oligonucleotide
  Sense strand starting at position 849 of SEQ ID NO: 1885208
cauuauugucaggauuggu

SEQ ID NO: 2324543 - RNA, 19 nt, Artificial Sequence
  Description of Artificial Sequence: Synthetic oligonucleotide
  Antisense strand to SEQ ID NO: 2324542
accaauccugacaauaaug

SEQ ID NO: 2324544 - RNA, 19 nt, Artificial Sequence
  Description of Artificial Sequence: Synthetic oligonucleotide
  Sense strand starting at position 852 of SEQ ID NO: 1885208
uauugucaggauugguaaa

SEQ ID NO: 2324545 - RNA, 19 nt, Artificial Sequence
  Description of Artificial Sequence: Synthetic oligonucleotide
  Antisense strand to SEQ ID NO: 2324544
uuuaccaauccugacaaua

SEQ ID NO: 2324546 - RNA, 19 nt, Artificial Sequence
  Description of Artificial Sequence: Synthetic oligonucleotide
  Sense strand starting at position 853 of SEQ ID NO: 1885208
auugucaggauugguaaau

SEQ ID NO: 2324547 - RNA, 19 nt, Artificial Sequence
  Description of Artificial Sequence: Synthetic oligonucleotide
  Antisense strand to SEQ ID NO: 2324546
auuuaccaauccugacaau

SEQ ID NO: 2324548 - RNA, 19 nt, Artificial Sequence
  Description of Artificial Sequence: Synthetic oligonucleotide
  Sense strand starting at position 854 of SEQ ID NO: 1885208
uugucaggauugguaaauc

SEQ ID NO: 2324549 - RNA, 19 nt, Artificial Sequence
  Description of Artificial Sequence: Synthetic oligonucleotide
  Antisense strand to SEQ ID NO: 2324548
gauuuaccaauccugacaa

SEQ ID NO: 2324550 - RNA, 19 nt, Artificial Sequence
  Description of Artificial Sequence: Synthetic oligonucleotide
  Sense strand starting at position 1378 of SEQ ID NO: 1885208
ggccuaguaauauaaaggu

SEQ ID NO: 2324551 - RNA, 19 nt, Artificial Sequence
  Description of Artificial Sequence: Synthetic oligonucleotide
  Antisense strand to SEQ ID NO: 2324550
accuuuauauuacuaggcc

SEQ ID NO: 2324552 - RNA, 19 nt, Artificial Sequence
  Description of Artificial Sequence: Synthetic oligonucleotide
  Sense strand starting at position 1510 of SEQ ID NO: 1885208
gucacacucccuggaauga

SEQ ID NO: 2324553 - RNA, 19 nt, Artificial Sequence
  Description of Artificial Sequence: Synthetic oligonucleotide
  Antisense strand to SEQ ID NO: 2324552
ucauuccagggagugugac

SEQ ID NO: 2324554 - RNA, 19 nt, Artificial Sequence
  Description of Artificial Sequence: Synthetic oligonucleotide
  Sense strand starting at position 1538 of SEQ ID NO: 1885208
gcuuguugccgcagggaaa

SEQ ID NO: 2324555 - RNA, 19 nt, Artificial Sequence
  Description of Artificial Sequence: Synthetic oligonucleotide
  Antisense strand to SEQ ID NO: 2324554
uuucccugcggcaacaagc

SEQ ID NO: 2324556 - RNA, 19 nt, Artificial Sequence
  Description of Artificial Sequence: Synthetic oligonucleotide
  Sense strand starting at position 1785 of SEQ ID NO: 1885208
ucauguauccuugaucacu

SEQ ID NO: 2324557 - RNA, 19 nt, Artificial Sequence
  Description of Artificial Sequence: Synthetic oligonucleotide
  Antisense strand to SEQ ID NO: 2324556
agugaucaaggauacauga

SEQ ID NO: 2324558 - RNA, 19 nt, Artificial Sequence
  Description of Artificial Sequence: Synthetic oligonucleotide
  Sense strand starting at position 1806 of SEQ ID NO: 1885208
cuuggugaucuguagacuu

SEQ ID NO: 2324559 - RNA, 19 nt, Artificial Sequence
  Description of Artificial Sequence: Synthetic oligonucleotide
  Antisense strand to SEQ ID NO: 2324558
aagucuacagaucaccaag

SEQ ID NO: 2324560 - RNA, 19 nt, Artificial Sequence
  Description of Artificial Sequence: Synthetic oligonucleotide
  Sense strand starting at position 1808 of SEQ ID NO: 1885208
uggugaucuguagacuuag

SEQ ID NO: 2324561 - RNA, 19 nt, Artificial Sequence
  Description of Artificial Sequence: Synthetic oligonucleotide
  Antisense strand to SEQ ID NO: 2324560
cuaagucuacagaucacca

SEQ ID NO: 2324562 - RNA, 19 nt, Artificial Sequence
  Description of Artificial Sequence: Synthetic oligonucleotide
  Sense strand starting at position 1902 of SEQ ID NO: 1885208
ccgaguaauuuggugguuu

SEQ ID NO: 2324563 - RNA, 19 nt, Artificial Sequence
  Description of Artificial Sequence: Synthetic oligonucleotide
  Antisense strand to SEQ ID NO: 2324562
aaaccaccaaauuacucgg

SEQ ID NO: 2324564 - RNA, 19 nt, Artificial Sequence
  Description of Artificial Sequence: Synthetic oligonucleotide
  Sense strand starting at position 2041 of SEQ ID NO: 1885208
ugugguauugcagaaggga

SEQ ID NO: 2324565 - RNA, 19 nt, Artificial Sequence
  Description of Artificial Sequence: Synthetic oligonucleotide
  Antisense strand to SEQ ID NO: 2324564
ucccuucugcaauaccaca

SEQ ID NO: 2324566 - RNA, 19 nt, Artificial Sequence
  Description of Artificial Sequence: Synthetic oligonucleotide
  Sense strand starting at position 2109 of SEQ ID NO: 1885208
gugucagugcucucuguug

SEQ ID NO: 2324567 - RNA, 19 nt, Artificial Sequence
  Description of Artificial Sequence: Synthetic oligonucleotide
  Antisense strand to SEQ ID NO: 2324566
caacagagagcacugacac

SEQ ID NO: 2324568 - RNA, 19 nt, Artificial Sequence
  Description of Artificial Sequence: Synthetic oligonucleotide
  Sense strand starting at position 2396 of SEQ ID NO: 1885208
acagaaauugugugaaaug

SEQ ID NO: 2324569 - RNA, 19 nt, Artificial Sequence
  Description of Artificial Sequence: Synthetic oligonucleotide
  Antisense strand to SEQ ID NO: 2324568
cauuucacacaauuucugu

SEQ ID NO: 2324570 - RNA, 19 nt, Artificial Sequence
  Description of Artificial Sequence: Synthetic oligonucleotide
  Sense strand starting at position 2465 of SEQ ID NO: 1885208
ugugguaauagauaacagu

SEQ ID NO: 2324571 - RNA, 19 nt, Artificial Sequence
  Description of Artificial Sequence: Synthetic oligonucleotide
  Antisense strand to SEQ ID NO: 2324570
acuguuaucuauuaccaca

SEQ ID NO: 2324572 - RNA, 19 nt, Artificial Sequence
  Description of Artificial Sequence: Synthetic oligonucleotide
  Sense strand starting at position 2522 of SEQ ID NO: 1885208
cccucaacucugggacaau

SEQ ID NO: 2324573 - RNA, 19 nt, Artificial Sequence
  Description of Artificial Sequence: Synthetic oligonucleotide
  Antisense strand to SEQ ID NO: 2324572
auugucccagaguugaggg

SEQ ID NO: 2324574 - RNA, 19 nt, Artificial Sequence
  Description of Artificial Sequence: Synthetic oligonucleotide
  Sense strand starting at position 2654 of SEQ ID NO: 1885208
aggcaagcucuguaugaag

SEQ ID NO: 2324575 - RNA, 19 nt, Artificial Sequence
  Description of Artificial Sequence: Synthetic oligonucleotide
  Antisense strand to SEQ ID NO: 2324574
cuucauacagagcuugccu

SEQ ID NO: 2324576 - RNA, 19 nt, Artificial Sequence
  Description of Artificial Sequence: Synthetic oligonucleotide
  Sense strand starting at position 2727 of SEQ ID NO: 1885208
uuuacuuuccaucagaugu

SEQ ID NO: 2324577 - RNA, 19 nt, Artificial Sequence
  Description of Artificial Sequence: Synthetic oligonucleotide
  Antisense strand to SEQ ID NO: 2324576
acaucugauggaaaguaaa

SEQ ID NO: 2324578 - RNA, 19 nt, Artificial Sequence
  Description of Artificial Sequence: Synthetic oligonucleotide
  Sense strand starting at position 2763 of SEQ ID NO: 1885208
gauauuaccugcuugagau

SEQ ID NO: 2324579 - RNA, 19 nt, Artificial Sequence
  Description of Artificial Sequence: Synthetic oligonucleotide
  Antisense strand to SEQ ID NO: 2324578
aucucaagcagguaauauc

SEQ ID NO: 2324580 - RNA, 19 nt, Artificial Sequence
  Description of Artificial Sequence: Synthetic oligonucleotide
  Sense strand starting at position 2764 of SEQ ID NO: 1885208
auauuaccugcuugagauu

SEQ ID NO: 2324581 - RNA, 19 nt, Artificial Sequence
  Description of Artificial Sequence: Synthetic oligonucleotide
  Antisense strand to SEQ ID NO: 2324580
aaucucaagcagguaauau

SEQ ID NO: 2324582 - RNA, 19 nt, Artificial Sequence
  Description of Artificial Sequence: Synthetic oligonucleotide
  Sense strand starting at position 2917 of SEQ ID NO: 1885208
ggagaauguggucaguguu

SEQ ID NO: 2324583 - RNA, 19 nt, Artificial Sequence
  Description of Artificial Sequence: Synthetic oligonucleotide
  Antisense strand to SEQ ID NO: 2324582
aacacugaccacauucucc

SEQ ID NO: 2324584 - RNA, 19 nt, Artificial Sequence
  Description of Artificial Sequence: Synthetic oligonucleotide
  Sense strand starting at position 3083 of SEQ ID NO: 1885208
uuaugugaguaaucuuaga

SEQ ID NO: 2324585 - RNA, 19 nt, Artificial Sequence
  Description of Artificial Sequence: Synthetic oligonucleotide
  Antisense strand to SEQ ID NO: 2324584
ucuaagauuacucacauaa

SEQ ID NO: 2324586 - RNA, 19 nt, Artificial Sequence
  Description of Artificial Sequence: Synthetic oligonucleotide
  Sense strand starting at position 3113 of SEQ ID NO: 1885208
agaacagguuauguuuaca

SEQ ID NO: 2324587 - RNA, 19 nt, Artificial Sequence
  Description of Artificial Sequence: Synthetic oligonucleotide
  Antisense strand to SEQ ID NO: 2324586
uguaaacauaaccuguucu

SEQ ID NO: 2324588 - RNA, 19 nt, Artificial Sequence
  Description of Artificial Sequence: Synthetic oligonucleotide
  Sense strand starting at position 3116 of SEQ ID NO: 1885208
acagguuauguuuacaaau

SEQ ID NO: 2324589 - RNA, 19 nt, Artificial Sequence
  Description of Artificial Sequence: Synthetic oligonucleotide
  Antisense strand to SEQ ID NO: 2324588
auuuguaaacauaaccugu

SEQ ID NO: 2324590 - RNA, 19 nt, Artificial Sequence
  Description of Artificial Sequence: Synthetic oligonucleotide
  Sense strand starting at position 3261 of SEQ ID NO: 1885208
uucugagauugucucuaag

SEQ ID NO: 2324591 - RNA, 19 nt, Artificial Sequence
  Description of Artificial Sequence: Synthetic oligonucleotide
  Antisense strand to SEQ ID NO: 2324590
cuuagagacaaucucagaa

SEQ ID NO: 2324592 - RNA, 19 nt, Artificial Sequence
  Description of Artificial Sequence: Synthetic oligonucleotide
  Sense strand starting at position 3264 of SEQ ID NO: 1885208
ugagauugucucuaagcug

SEQ ID NO: 2324593 - RNA, 19 nt, Artificial Sequence
  Description of Artificial Sequence: Synthetic oligonucleotide
  Antisense strand to SEQ ID NO: 2324592
cagcuuagagacaaucuca

SEQ ID NO: 2324594 - RNA, 19 nt, Artificial Sequence
  Description of Artificial Sequence: Synthetic oligonucleotide
  Sense strand starting at position 3329 of SEQ ID NO: 1885208
gagucaguagucuaugaac

SEQ ID NO: 2324595 - RNA, 19 nt, Artificial Sequence
  Description of Artificial Sequence: Synthetic oligonucleotide
  Antisense strand to SEQ ID NO: 2324594
guucauagacuacugacuc

SEQ ID NO: 2324596 - RNA, 19 nt, Artificial Sequence
  Description of Artificial Sequence: Synthetic oligonucleotide
  Sense strand starting at position 3338 of SEQ ID NO: 1885208
gucuaugaacuccagugaa

SEQ ID NO: 2324597 - RNA, 19 nt, Artificial Sequence
  Description of Artificial Sequence: Synthetic oligonucleotide
  Antisense strand to SEQ ID NO: 2324596
uucacuggaguucauagac

SEQ ID NO: 2324598 - RNA, 19 nt, Artificial Sequence
  Description of Artificial Sequence: Synthetic oligonucleotide
  Sense strand starting at position 3574 of SEQ ID NO: 1885208
agagaacauuguuuagauc

SEQ ID NO: 2324599 - RNA, 19 nt, Artificial Sequence
  Description of Artificial Sequence: Synthetic oligonucleotide
  Antisense strand to SEQ ID NO: 2324598
gaucuaaacaauguucucu

SEQ ID NO: 2324600 - RNA, 19 nt, Artificial Sequence
  Description of Artificial Sequence: Synthetic oligonucleotide
  Sense strand starting at position 3637 of SEQ ID NO: 1885208
uagccaagucagggaaaua

SEQ ID NO: 2324601 - RNA, 19 nt, Artificial Sequence
  Description of Artificial Sequence: Synthetic oligonucleotide
  Antisense strand to SEQ ID NO: 2324600
uauuucccugacuuggcua

SEQ ID NO: 2324602 - RNA, 19 nt, Artificial Sequence
  Description of Artificial Sequence: Synthetic oligonucleotide
  Sense strand starting at position 3907 of SEQ ID NO: 1885208
aggaacaucuaacagauuu

SEQ ID NO: 2324603 - RNA, 19 nt, Artificial Sequence
  Description of Artificial Sequence: Synthetic oligonucleotide
  Antisense strand to SEQ ID NO: 2324602
aaaucuguuagauguuccu

SEQ ID NO: 2324604 - RNA, 19 nt, Artificial Sequence
  Description of Artificial Sequence: Synthetic oligonucleotide
  Sense strand starting at position 159 of SEQ ID NO: 1885209
cuauaaauaccacguagau

SEQ ID NO: 2324605 - RNA, 19 nt, Artificial Sequence
  Description of Artificial Sequence: Synthetic oligonucleotide
  Antisense strand to SEQ ID NO: 2324604
aucuacgugguauuuauag

SEQ ID NO: 2324606 - RNA, 19 nt, Artificial Sequence
  Description of Artificial Sequence: Synthetic oligonucleotide
  Sense strand starting at position 332 of SEQ ID NO: 1885209
guauuaccuccaggaggga

SEQ ID NO: 2324607 - RNA, 19 nt, Artificial Sequence
  Description of Artificial Sequence: Synthetic oligonucleotide
  Antisense strand to SEQ ID NO: 2324606
ucccuccuggagguaauac

SEQ ID NO: 2324608 - RNA, 19 nt, Artificial Sequence
  Description of Artificial Sequence: Synthetic oligonucleotide
  Sense strand starting at position 346 of SEQ ID NO: 1885209
agggacuguggagguaaua

SEQ ID NO: 2324609 - RNA, 19 nt, Artificial Sequence
  Description of Artificial Sequence: Synthetic oligonucleotide
  Antisense strand to SEQ ID NO: 2324608
uauuaccuccacagucccu

SEQ ID NO: 2324610 - RNA, 19 nt, Artificial Sequence
  Description of Artificial Sequence: Synthetic oligonucleotide
  Sense strand starting at position 431 of SEQ ID NO: 1885209
gucugugugguguuccuua

SEQ ID NO: 2324611 - RNA, 19 nt, Artificial Sequence
  Description of Artificial Sequence: Synthetic oligonucleotide
  Antisense strand to SEQ ID NO: 2324610
uaaggaacaccacacagac

SEQ ID NO: 2324612 - RNA, 19 nt, Artificial Sequence
  Description of Artificial Sequence: Synthetic oligonucleotide
  Sense strand starting at position 436 of SEQ ID NO: 1885209
ugugguguuccuuaggacu

SEQ ID NO: 2324613 - RNA, 19 nt, Artificial Sequence
  Description of Artificial Sequence: Synthetic oligonucleotide
  Antisense strand to SEQ ID NO: 2324612
aguccuaaggaacaccaca

SEQ ID NO: 2324614 - RNA, 19 nt, Artificial Sequence
  Description of Artificial Sequence: Synthetic oligonucleotide
  Sense strand starting at position 452 of SEQ ID NO: 1885209
acuuguguaccagguacaa

SEQ ID NO: 2324615 - RNA, 19 nt, Artificial Sequence
  Description of Artificial Sequence: Synthetic oligonucleotide
  Antisense strand to SEQ ID NO: 2324614
uuguaccugguacacaagu

SEQ ID NO: 2324616 - RNA, 19 nt, Artificial Sequence
  Description of Artificial Sequence: Synthetic oligonucleotide
  Sense strand starting at position 519 of SEQ ID NO: 1885209
gagggagacuucucagcuc

SEQ ID NO: 2324617 - RNA, 19 nt, Artificial Sequence
  Description of Artificial Sequence: Synthetic oligonucleotide
  Antisense strand to SEQ ID NO: 2324616
gagcugagaagucucccuc

SEQ ID NO: 2324618 - RNA, 19 nt, Artificial Sequence
  Description of Artificial Sequence: Synthetic oligonucleotide
  Sense strand starting at position 538 of SEQ ID NO: 1885209
cccguauaccucuagagau

SEQ ID NO: 2324619 - RNA, 19 nt, Artificial Sequence
  Description of Artificial Sequence: Synthetic oligonucleotide
  Antisense strand to SEQ ID NO: 2324618
aucucuagagguauacggg

SEQ ID NO: 2324620 - RNA, 19 nt, Artificial Sequence
  Description of Artificial Sequence: Synthetic oligonucleotide
  Sense strand starting at position 727 of SEQ ID NO: 1885209
augaaugucgcagacaugu

SEQ ID NO: 2324621 - RNA, 19 nt, Artificial Sequence
  Description of Artificial Sequence: Synthetic oligonucleotide
  Antisense strand to SEQ ID NO: 2324620
acaugucugcgacauucau

SEQ ID NO: 2324622 - RNA, 19 nt, Artificial Sequence
  Description of Artificial Sequence: Synthetic oligonucleotide
  Sense strand starting at position 729 of SEQ ID NO: 1885209
gaaugucgcagacauguuu

SEQ ID NO: 2324623 - RNA, 19 nt, Artificial Sequence
  Description of Artificial Sequence: Synthetic oligonucleotide
  Antisense strand to SEQ ID NO: 2324622
aaacaugucugcgacauuc

SEQ ID NO: 2324624 - RNA, 19 nt, Artificial Sequence
  Description of Artificial Sequence: Synthetic oligonucleotide
  Sense strand starting at position 760 of SEQ ID NO: 1885209
ugaaguucuuguuugauua

SEQ ID NO: 2324625 - RNA, 19 nt, Artificial Sequence
  Description of Artificial Sequence: Synthetic oligonucleotide
  Antisense strand to SEQ ID NO: 2324624
uaaucaaacaagaacuuca

SEQ ID NO: 2324626 - RNA, 19 nt, Artificial Sequence
  Description of Artificial Sequence: Synthetic oligonucleotide
  Sense strand starting at position 761 of SEQ ID NO: 1885209
gaaguucuuguuugauuag

SEQ ID NO: 2324627 - RNA, 19 nt, Artificial Sequence
  Description of Artificial Sequence: Synthetic oligonucleotide
  Antisense strand to SEQ ID NO: 2324626
cuaaucaaacaagaacuuc

SEQ ID NO: 2324628 - RNA, 19 nt, Artificial Sequence
  Description of Artificial Sequence: Synthetic oligonucleotide
  Sense strand starting at position 770 of SEQ ID NO: 1885209
guuugauuagucugguaac

SEQ ID NO: 2324629 - RNA, 19 nt, Artificial Sequence
  Description of Artificial Sequence: Synthetic oligonucleotide
  Antisense strand to SEQ ID NO: 2324628
guuaccagacuaaucaaac

SEQ ID NO: 2324630 - RNA, 19 nt, Artificial Sequence
  Description of Artificial Sequence: Synthetic oligonucleotide
  Sense strand starting at position 794 of SEQ ID NO: 1885209
guaagaaagucacccaaca

SEQ ID NO: 2324631 - RNA, 19 nt, Artificial Sequence
  Description of Artificial Sequence: Synthetic oligonucleotide
  Antisense strand to SEQ ID NO: 2324630
uguugggugacuuucuuac

SEQ ID NO: 2324632 - RNA, 19 nt, Artificial Sequence
  Description of Artificial Sequence: Synthetic oligonucleotide
  Sense strand starting at position 833 of SEQ ID NO: 1885209
uugucacugucucuugaca

SEQ ID NO: 2324633 - RNA, 19 nt, Artificial Sequence
  Description of Artificial Sequence: Synthetic oligonucleotide
  Antisense strand to SEQ ID NO: 2324632
ugucaagagacagugacaa

SEQ ID NO: 2324634 - RNA, 19 nt, Artificial Sequence
  Description of Artificial Sequence: Synthetic oligonucleotide
  Sense strand starting at position 2534 of SEQ ID NO: 1885209
ugauuagaguaaucccaga

SEQ ID NO: 2324635 - RNA, 19 nt, Artificial Sequence
  Description of Artificial Sequence: Synthetic oligonucleotide
  Antisense strand to SEQ ID NO: 2324634
ucugggauuacucuaauca

SEQ ID NO: 2324636 - RNA, 19 nt, Artificial Sequence
  Description of Artificial Sequence: Synthetic oligonucleotide
  Sense strand starting at position 2539 of SEQ ID NO: 1885209
agaguaaucccagaucagc

SEQ ID NO: 2324637 - RNA, 19 nt, Artificial Sequence
  Description of Artificial Sequence: Synthetic oligonucleotide
  Antisense strand to SEQ ID NO: 2324636
gcugaucugggauuacucu

SEQ ID NO: 2324638 - RNA, 19 nt, Artificial Sequence
  Description of Artificial Sequence: Synthetic oligonucleotide
  Sense strand starting at position 2592 of SEQ ID NO: 1885209
acacccaguccugauugua

SEQ ID NO: 2324639 - RNA, 19 nt, Artificial Sequence
  Description of Artificial Sequence: Synthetic oligonucleotide
  Antisense strand to SEQ ID NO: 2324638
uacaaucaggacugggugu

SEQ ID NO: 2324640 - RNA, 19 nt, Artificial Sequence
  Description of Artificial Sequence: Synthetic oligonucleotide
  Sense strand starting at position 2600 of SEQ ID NO: 1885209
uccugauuguaaguaaacu

SEQ ID NO: 2324641 - RNA, 19 nt, Artificial Sequence
  Description of Artificial Sequence: Synthetic oligonucleotide
  Antisense strand to SEQ ID NO: 2324640
aguuuacuuacaaucagga

SEQ ID NO: 2324642 - RNA, 19 nt, Artificial Sequence
  Description of Artificial Sequence: Synthetic oligonucleotide
  Sense strand starting at position 2635 of SEQ ID NO: 1885209
uguaucucucccggacuau

SEQ ID NO: 2324643 - RNA, 19 nt, Artificial Sequence
  Description of Artificial Sequence: Synthetic oligonucleotide
  Antisense strand to SEQ ID NO: 2324642
auaguccgggagagauaca

SEQ ID NO: 2324644 - RNA, 19 nt, Artificial Sequence
  Description of Artificial Sequence: Synthetic oligonucleotide
  Sense strand starting at position 2647 of SEQ ID NO: 1885209
ggacuauguuaacuauaua

SEQ ID NO: 2324645 - RNA, 19 nt, Artificial Sequence
  Description of Artificial Sequence: Synthetic oligonucleotide
  Antisense strand to SEQ ID NO: 2324644
uauauaguuaacauagucc

SEQ ID NO: 2324646 - RNA, 19 nt, Artificial Sequence
  Description of Artificial Sequence: Synthetic oligonucleotide
  Sense strand starting at position 2704 of SEQ ID NO: 1885209
agagguugaccuuagcgau

SEQ ID NO: 2324647 - RNA, 19 nt, Artificial Sequence
  Description of Artificial Sequence: Synthetic oligonucleotide
  Antisense strand to SEQ ID NO: 2324646
aucgcuaaggucaaccucu

SEQ ID NO: 2324648 - RNA, 19 nt, Artificial Sequence
  Description of Artificial Sequence: Synthetic oligonucleotide
  Sense strand starting at position 2772 of SEQ ID NO: 1885209
ggaagcgacuguuccaaga

SEQ ID NO: 2324649 - RNA, 19 nt, Artificial Sequence
  Description of Artificial Sequence: Synthetic oligonucleotide
  Antisense strand to SEQ ID NO: 2324648
ucuuggaacagucgcuucc

SEQ ID NO: 2324650 - RNA, 19 nt, Artificial Sequence
  Description of Artificial Sequence: Synthetic oligonucleotide
  Sense strand starting at position 2797 of SEQ ID NO: 1885209
uuuggaauuguaggcacaa

SEQ ID NO: 2324651 - RNA, 19 nt, Artificial Sequence
  Description of Artificial Sequence: Synthetic oligonucleotide
  Antisense strand to SEQ ID NO: 2324650
uugugccuacaauuccaaa

SEQ ID NO: 2324652 - RNA, 19 nt, Artificial Sequence
  Description of Artificial Sequence: Synthetic oligonucleotide
  Sense strand starting at position 2798 of SEQ ID NO: 1885209
uuggaauuguaggcacaaa

SEQ ID NO: 2324653 - RNA, 19 nt, Artificial Sequence
  Description of Artificial Sequence: Synthetic oligonucleotide
  Antisense strand to SEQ ID NO: 2324652
uuugugccuacaauuccaa

SEQ ID NO: 2324654 - RNA, 19 nt, Artificial Sequence
  Description of Artificial Sequence: Synthetic oligonucleotide
  Sense strand starting at position 2831 of SEQ ID NO: 1885209
uugagccuugggugaagaa

SEQ ID NO: 2324655 - RNA, 19 nt, Artificial Sequence
  Description of Artificial Sequence: Synthetic oligonucleotide
  Antisense strand to SEQ ID NO: 2324654
uucuucacccaaggcucaa

SEQ ID NO: 2324656 - RNA, 19 nt, Artificial Sequence
  Description of Artificial Sequence: Synthetic oligonucleotide
  Sense strand starting at position 2841 of SEQ ID NO: 1885209
ggugaagaaacgcguauuu

SEQ ID NO: 2324657 - RNA, 19 nt, Artificial Sequence
  Description of Artificial Sequence: Synthetic oligonucleotide
  Antisense strand to SEQ ID NO: 2324656
aaauacgcguuucuucacc

SEQ ID NO: 2324658 - RNA, 19 nt, Artificial Sequence
  Description of Artificial Sequence: Synthetic oligonucleotide
  Sense strand starting at position 2906 of SEQ ID NO: 1885209
gugguuggugcugaaauag

SEQ ID NO: 2324659 - RNA, 19 nt, Artificial Sequence
  Description of Artificial Sequence: Synthetic oligonucleotide
  Antisense strand to SEQ ID NO: 2324658
cuauuucagcaccaaccac

SEQ ID NO: 2324660 - RNA, 19 nt, Artificial Sequence
  Description of Artificial Sequence: Synthetic oligonucleotide
  Sense strand starting at position 2914 of SEQ ID NO: 1885209
ugcugaaauagauggcauu

SEQ ID NO: 2324661 - RNA, 19 nt, Artificial Sequence
  Description of Artificial Sequence: Synthetic oligonucleotide
  Antisense strand to SEQ ID NO: 2324660
aaugccaucuauuucagca

SEQ ID NO: 2324662 - RNA, 19 nt, Artificial Sequence
  Description of Artificial Sequence: Synthetic oligonucleotide
  Sense strand starting at position 3282 of SEQ ID NO: 1885209
gaagaagaguucuuccuuc

SEQ ID NO: 2324663 - RNA, 19 nt, Artificial Sequence
  Description of Artificial Sequence: Synthetic oligonucleotide
  Antisense strand to SEQ ID NO: 2324662
gaaggaagaacucuucuuc

SEQ ID NO: 2324664 - RNA, 19 nt, Artificial Sequence
  Description of Artificial Sequence: Synthetic oligonucleotide
  Sense strand starting at position 3332 of SEQ ID NO: 1885209
ucaauuaugauguggugaa

SEQ ID NO: 2324665 - RNA, 19 nt, Artificial Sequence
  Description of Artificial Sequence: Synthetic oligonucleotide
  Antisense strand to SEQ ID NO: 2324664
uucaccacaucauaauuga

SEQ ID NO: 2324666 - RNA, 19 nt, Artificial Sequence
  Description of Artificial Sequence: Synthetic oligonucleotide
  Sense strand starting at position 3347 of SEQ ID NO: 1885209
ugaacaauucuguguaggu

SEQ ID NO: 2324667 - RNA, 19 nt, Artificial Sequence
  Description of Artificial Sequence: Synthetic oligonucleotide
  Antisense strand to SEQ ID NO: 2324666
accuacacagaauuguuca

SEQ ID NO: 2324668 - RNA, 19 nt, Artificial Sequence
  Description of Artificial Sequence: Synthetic oligonucleotide
  Sense strand starting at position 3348 of SEQ ID NO: 1885209
gaacaauucuguguaggug

SEQ ID NO: 2324669 - RNA, 19 nt, Artificial Sequence
  Description of Artificial Sequence: Synthetic oligonucleotide
  Antisense strand to SEQ ID NO: 2324668
caccuacacagaauuguuc

SEQ ID NO: 2324670 - RNA, 19 nt, Artificial Sequence
  Description of Artificial Sequence: Synthetic oligonucleotide
  Sense strand starting at position 3374 of SEQ ID NO: 1885209
gugcuauagggccaaggaa

SEQ ID NO: 2324671 - RNA, 19 nt, Artificial Sequence
  Description of Artificial Sequence: Synthetic oligonucleotide
  Antisense strand to SEQ ID NO: 2324670
uuccuuggcccuauagcac

SEQ ID NO: 2324672 - RNA, 19 nt, Artificial Sequence
  Description of Artificial Sequence: Synthetic oligonucleotide
  Sense strand starting at position 3503 of SEQ ID NO: 1885209
agaagcauacuuuaagcuu

SEQ ID NO: 2324673 - RNA, 19 nt, Artificial Sequence
  Description of Artificial Sequence: Synthetic oligonucleotide
  Antisense strand to SEQ ID NO: 2324672
aagcuuaaaguaugcuucu

SEQ ID NO: 2324674 - RNA, 19 nt, Artificial Sequence
  Description of Artificial Sequence: Synthetic oligonucleotide
  Sense strand starting at position 3541 of SEQ ID NO: 1885209
ggugcagaccgagaauauc

SEQ ID NO: 2324675 - RNA, 19 nt, Artificial Sequence
  Description of Artificial Sequence: Synthetic oligonucleotide
  Antisense strand to SEQ ID NO: 2324674
gauauucucggucugcacc

SEQ ID NO: 2324676 - RNA, 19 nt, Artificial Sequence
  Description of Artificial Sequence: Synthetic oligonucleotide
  Sense strand starting at position 3569 of SEQ ID NO: 1885209
ugagaaauagaggguguuu

SEQ ID NO: 2324677 - RNA, 19 nt, Artificial Sequence
  Description of Artificial Sequence: Synthetic oligonucleotide
  Antisense strand to SEQ ID NO: 2324676
aaacacccucuauuucuca

SEQ ID NO: 2324678 - RNA, 19 nt, Artificial Sequence
  Description of Artificial Sequence: Synthetic oligonucleotide
  Sense strand starting at position 3651 of SEQ ID NO: 1885209
cugugucaugaucauaucu

SEQ ID NO: 2324679 - RNA, 19 nt, Artificial Sequence
  Description of Artificial Sequence: Synthetic oligonucleotide
  Antisense strand to SEQ ID NO: 2324678
agauaugaucaugacacag

SEQ ID NO: 2324680 - RNA, 19 nt, Artificial Sequence
  Description of Artificial Sequence: Synthetic oligonucleotide
  Sense strand starting at position 3766 of SEQ ID NO: 1885209
uggugagcgguccagaaua

SEQ ID NO: 2324681 - RNA, 19 nt, Artificial Sequence
  Description of Artificial Sequence: Synthetic oligonucleotide
  Antisense strand to SEQ ID NO: 2324680
uauucuggaccgcucacca

SEQ ID NO: 2324682 - RNA, 19 nt, Artificial Sequence
  Description of Artificial Sequence: Synthetic oligonucleotide
  Sense strand starting at position 3837 of SEQ ID NO: 1885209
guuugaauuugggaaggaa

SEQ ID NO: 2324683 - RNA, 19 nt, Artificial Sequence
  Description of Artificial Sequence: Synthetic oligonucleotide
  Antisense strand to SEQ ID NO: 2324682
uuccuucccaaauucaaac

SEQ ID NO: 2324684 - RNA, 19 nt, Artificial Sequence
  Description of Artificial Sequence: Synthetic oligonucleotide
  Sense strand starting at position 12 of SEQ ID NO: 1885210
aagagaagcuugucuaagu

SEQ ID NO: 2324685 - RNA, 19 nt, Artificial Sequence
  Description of Artificial Sequence: Synthetic oligonucleotide
  Antisense strand to SEQ ID NO: 2324684
acuuagacaagcuucucuu

SEQ ID NO: 2324686 - RNA, 19 nt, Artificial Sequence
  Description of Artificial Sequence: Synthetic oligonucleotide
  Sense strand starting at position 13 of SEQ ID NO: 1885210
agagaagcuugucuaaguc

SEQ ID NO: 2324687 - RNA, 19 nt, Artificial Sequence
  Description of Artificial Sequence: Synthetic oligonucleotide
  Antisense strand to SEQ ID NO: 2324686
gacuuagacaagcuucucu

SEQ ID NO: 2324688 - RNA, 19 nt, Artificial Sequence
  Description of Artificial Sequence: Synthetic oligonucleotide
  Sense strand starting at position 366 of SEQ ID NO: 1885210
uagucauaaugguugucua

SEQ ID NO: 2324689 - RNA, 19 nt, Artificial Sequence
  Description of Artificial Sequence: Synthetic oligonucleotide
  Antisense strand to SEQ ID NO: 2324688
uagacaaccauuaugacua

SEQ ID NO: 2324690 - RNA, 19 nt, Artificial Sequence
  Description of Artificial Sequence: Synthetic oligonucleotide
  Sense strand starting at position 367 of SEQ ID NO: 1885210
agucauaaugguugucuaa

SEQ ID NO: 2324691 - RNA, 19 nt, Artificial Sequence
  Description of Artificial Sequence: Synthetic oligonucleotide
  Antisense strand to SEQ ID NO: 2324690
uuagacaaccauuaugacu

SEQ ID NO: 2324692 - RNA, 19 nt, Artificial Sequence
  Description of Artificial Sequence: Synthetic oligonucleotide
  Sense strand starting at position 369 of SEQ ID NO: 1885210
ucauaaugguugucuaaag

SEQ ID NO: 2324693 - RNA, 19 nt, Artificial Sequence
  Description of Artificial Sequence: Synthetic oligonucleotide
  Antisense strand to SEQ ID NO: 2324692
cuuuagacaaccauuauga

SEQ ID NO: 2324694 - RNA, 19 nt, Artificial Sequence
  Description of Artificial Sequence: Synthetic oligonucleotide
  Sense strand starting at position 376 of SEQ ID NO: 1885210
gguugucuaaaggguagau

SEQ ID NO: 2324695 - RNA, 19 nt, Artificial Sequence
  Description of Artificial Sequence: Synthetic oligonucleotide
  Antisense strand to SEQ ID NO: 2324694
aucuacccuuuagacaacc

SEQ ID NO: 2324696 - RNA, 19 nt, Artificial Sequence
  Description of Artificial Sequence: Synthetic oligonucleotide
  Sense strand starting at position 393 of SEQ ID NO: 1885210
auaugaucaugacacagaa

SEQ ID NO: 2324697 - RNA, 19 nt, Artificial Sequence
  Description of Artificial Sequence: Synthetic oligonucleotide
  Antisense strand to SEQ ID NO: 2324696
uucugugucaugaucauau

SEQ ID NO: 2324698 - RNA, 19 nt, Artificial Sequence
  Description of Artificial Sequence: Synthetic oligonucleotide
  Sense strand starting at position 480 of SEQ ID NO: 1885210
cucuauuucucaguuguac

SEQ ID NO: 2324699 - RNA, 19 nt, Artificial Sequence
  Description of Artificial Sequence: Synthetic oligonucleotide
  Antisense strand to SEQ ID NO: 2324698
guacaacugagaaauagag

SEQ ID NO: 2324700 - RNA, 19 nt, Artificial Sequence
  Description of Artificial Sequence: Synthetic oligonucleotide
  Sense strand starting at position 597 of SEQ ID NO: 1885210
ggcuaacucuuagucauuc

SEQ ID NO: 2324701 - RNA, 19 nt, Artificial Sequence
  Description of Artificial Sequence: Synthetic oligonucleotide
  Antisense strand to SEQ ID NO: 2324700
gaaugacuaagaguuagcc

SEQ ID NO: 2324702 - RNA, 19 nt, Artificial Sequence
  Description of Artificial Sequence: Synthetic oligonucleotide
  Sense strand starting at position 618 of SEQ ID NO: 1885210
caugacucagucugaguuu

SEQ ID NO: 2324703 - RNA, 19 nt, Artificial Sequence
  Description of Artificial Sequence: Synthetic oligonucleotide
  Antisense strand to SEQ ID NO: 2324702
aaacucagacugagucaug

SEQ ID NO: 2324704 - RNA, 19 nt, Artificial Sequence
  Description of Artificial Sequence: Synthetic oligonucleotide
  Sense strand starting at position 857 of SEQ ID NO: 1885210
uugagauuguaguuacuga

SEQ ID NO: 2324705 - RNA, 19 nt, Artificial Sequence
  Description of Artificial Sequence: Synthetic oligonucleotide
  Antisense strand to SEQ ID NO: 2324704
ucaguaacuacaaucucaa

SEQ ID NO: 2324706 - RNA, 19 nt, Artificial Sequence
  Description of Artificial Sequence: Synthetic oligonucleotide
  Sense strand starting at position 1009 of SEQ ID NO: 1885210
uucccaauagcauggauau

SEQ ID NO: 2324707 - RNA, 19 nt, Artificial Sequence
  Description of Artificial Sequence: Synthetic oligonucleotide
  Antisense strand to SEQ ID NO: 2324706
auauccaugcuauugggaa

SEQ ID NO: 2324708 - RNA, 19 nt, Artificial Sequence
  Description of Artificial Sequence: Synthetic oligonucleotide
  Sense strand starting at position 1118 of SEQ ID NO: 1885210
ggauaaauggaaugccauc

SEQ ID NO: 2324709 - RNA, 19 nt, Artificial Sequence
  Description of Artificial Sequence: Synthetic oligonucleotide
  Antisense strand to SEQ ID NO: 2324708
gauggcauuccauuuaucc

SEQ ID NO: 2324710 - RNA, 19 nt, Artificial Sequence
  Description of Artificial Sequence: Synthetic oligonucleotide
  Sense strand starting at position 1321 of SEQ ID NO: 1885210
ggaacagguuguuugugau

SEQ ID NO: 2324711 - RNA, 19 nt, Artificial Sequence
  Description of Artificial Sequence: Synthetic oligonucleotide
  Antisense strand to SEQ ID NO: 2324710
aucacaaacaaccuguucc

SEQ ID NO: 2324712 - RNA, 19 nt, Artificial Sequence
  Description of Artificial Sequence: Synthetic oligonucleotide
  Sense strand starting at position 1351 of SEQ ID NO: 1885210
accucuuaucucugauggu

SEQ ID NO: 2324713 - RNA, 19 nt, Artificial Sequence
  Description of Artificial Sequence: Synthetic oligonucleotide
  Antisense strand to SEQ ID NO: 2324712
accaucagagauaagaggu

SEQ ID NO: 2324714 - RNA, 19 nt, Artificial Sequence
  Description of Artificial Sequence: Synthetic oligonucleotide
  Sense strand starting at position 1360 of SEQ ID NO: 1885210
cucugauggucucugaauu

SEQ ID NO: 2324715 - RNA, 19 nt, Artificial Sequence
  Description of Artificial Sequence: Synthetic oligonucleotide
  Antisense strand to SEQ ID NO: 2324714
aauucagagaccaucagag

SEQ ID NO: 2324716 - RNA, 19 nt, Artificial Sequence
  Description of Artificial Sequence: Synthetic oligonucleotide
  Sense strand starting at position 1403 of SEQ ID NO: 1885210
uaacauaguccgggagaga

SEQ ID NO: 2324717 - RNA, 19 nt, Artificial Sequence
  Description of Artificial Sequence: Synthetic oligonucleotide
  Antisense strand to SEQ ID NO: 2324716
ucucucccggacuauguua

SEQ ID NO: 2324718 - RNA, 19 nt, Artificial Sequence
  Description of Artificial Sequence: Synthetic oligonucleotide
  Sense strand starting at position 1437 of SEQ ID NO: 1885210
agggaaguuuacuuacaau

SEQ ID NO: 2324719 - RNA, 19 nt, Artificial Sequence
  Description of Artificial Sequence: Synthetic oligonucleotide
  Antisense strand to SEQ ID NO: 2324718
auuguaaguaaacuucccu

SEQ ID NO: 2324720 - RNA, 19 nt, Artificial Sequence
  Description of Artificial Sequence: Synthetic oligonucleotide
  Sense strand starting at position 1463 of SEQ ID NO: 1885210
gggugugaacguuauggga

SEQ ID NO: 2324721 - RNA, 19 nt, Artificial Sequence
  Description of Artificial Sequence: Synthetic oligonucleotide
  Antisense strand to SEQ ID NO: 2324720
ucccauaacguucacaccc

SEQ ID NO: 2324722 - RNA, 19 nt, Artificial Sequence
  Description of Artificial Sequence: Synthetic oligonucleotide
  Sense strand starting at position 1524 of SEQ ID NO: 1885210
ucaauauccuucuuguagu

SEQ ID NO: 2324723 - RNA, 19 nt, Artificial Sequence
  Description of Artificial Sequence: Synthetic oligonucleotide
  Antisense strand to SEQ ID NO: 2324722
acuacaagaaggauauuga

SEQ ID NO: 2324724 - RNA, 19 nt, Artificial Sequence
  Description of Artificial Sequence: Synthetic oligonucleotide
  Sense strand starting at position 1643 of SEQ ID NO: 1885210
uccugagcuugggcagaau

SEQ ID NO: 2324725 - RNA, 19 nt, Artificial Sequence
  Description of Artificial Sequence: Synthetic oligonucleotide
  Antisense strand to SEQ ID NO: 2324724
auucugcccaagcucagga

SEQ ID NO: 2324726 - RNA, 19 nt, Artificial Sequence
  Description of Artificial Sequence: Synthetic oligonucleotide
  Sense strand starting at position 3188 of SEQ ID NO: 1885210
augugucgugaacagaguu

SEQ ID NO: 2324727 - RNA, 19 nt, Artificial Sequence
  Description of Artificial Sequence: Synthetic oligonucleotide
  Antisense strand to SEQ ID NO: 2324726
aacucuguucacgacacau

SEQ ID NO: 2324728 - RNA, 19 nt, Artificial Sequence
  Description of Artificial Sequence: Synthetic oligonucleotide
  Sense strand starting at position 3250 of SEQ ID NO: 1885210
uugggugacuuucuuacau

SEQ ID NO: 2324729 - RNA, 19 nt, Artificial Sequence
  Description of Artificial Sequence: Synthetic oligonucleotide
  Antisense strand to SEQ ID NO: 2324728
auguaagaaagucacccaa

SEQ ID NO: 2324730 - RNA, 19 nt, Artificial Sequence
  Description of Artificial Sequence: Synthetic oligonucleotide
  Sense strand starting at position 3257 of SEQ ID NO: 1885210
acuuucuuacaugauguua

SEQ ID NO: 2324731 - RNA, 19 nt, Artificial Sequence
  Description of Artificial Sequence: Synthetic oligonucleotide
  Antisense strand to SEQ ID NO: 2324730
uaacaucauguaagaaagu

SEQ ID NO: 2324732 - RNA, 19 nt, Artificial Sequence
  Description of Artificial Sequence: Synthetic oligonucleotide
  Sense strand starting at position 3468 of SEQ ID NO: 1885210
aggacauaguuggucuuga

SEQ ID NO: 2324733 - RNA, 19 nt, Artificial Sequence
  Description of Artificial Sequence: Synthetic oligonucleotide
  Antisense strand to SEQ ID NO: 2324732
ucaagaccaacuauguccu

SEQ ID NO: 2324734 - RNA, 19 nt, Artificial Sequence
  Description of Artificial Sequence: Synthetic oligonucleotide
  Sense strand starting at position 3469 of SEQ ID NO: 1885210
ggacauaguuggucuugau

SEQ ID NO: 2324735 - RNA, 19 nt, Artificial Sequence
  Description of Artificial Sequence: Synthetic oligonucleotide
  Antisense strand to SEQ ID NO: 2324734
aucaagaccaacuaugucc

SEQ ID NO: 2324736 - RNA, 19 nt, Artificial Sequence
  Description of Artificial Sequence: Synthetic oligonucleotide
  Sense strand starting at position 3473 of SEQ ID NO: 1885210
auaguuggucuugauacaa

SEQ ID NO: 2324737 - RNA, 19 nt, Artificial Sequence
  Description of Artificial Sequence: Synthetic oligonucleotide
  Antisense strand to SEQ ID NO: 2324736
uuguaucaagaccaacuau

SEQ ID NO: 2324738 - RNA, 19 nt, Artificial Sequence
  Description of Artificial Sequence: Synthetic oligonucleotide
  Sense strand starting at position 3499 of SEQ ID NO: 1885210
auugcaucucuagagguau

SEQ ID NO: 2324739 - RNA, 19 nt, Artificial Sequence
  Description of Artificial Sequence: Synthetic oligonucleotide
  Antisense strand to SEQ ID NO: 2324738
auaccucuagagaugcaau

SEQ ID NO: 2324740 - RNA, 19 nt, Artificial Sequence
  Description of Artificial Sequence: Synthetic oligonucleotide
  Sense strand starting at position 3527 of SEQ ID NO: 1885210
ugagaagucucccucagaa

SEQ ID NO: 2324741 - RNA, 19 nt, Artificial Sequence
  Description of Artificial Sequence: Synthetic oligonucleotide
  Antisense strand to SEQ ID NO: 2324740
uucugagggagacuucuca

SEQ ID NO: 2324742 - RNA, 19 nt, Artificial Sequence
  Description of Artificial Sequence: Synthetic oligonucleotide
  Sense strand starting at position 3638 of SEQ ID NO: 1885210
ugagcaggcagauguguaa

SEQ ID NO: 2324743 - RNA, 19 nt, Artificial Sequence
  Description of Artificial Sequence: Synthetic oligonucleotide
  Antisense strand to SEQ ID NO: 2324742
uuacacaucugccugcuca

SEQ ID NO: 2324744 - RNA, 19 nt, Artificial Sequence
  Description of Artificial Sequence: Synthetic oligonucleotide
  Sense strand starting at position 3663 of SEQ ID NO: 1885210
guuucccugucccuauuua

SEQ ID NO: 2324745 - RNA, 19 nt, Artificial Sequence
  Description of Artificial Sequence: Synthetic oligonucleotide
  Antisense strand to SEQ ID NO: 2324744
uaaauagggacagggaaac

SEQ ID NO: 2324746 - RNA, 19 nt, Artificial Sequence
  Description of Artificial Sequence: Synthetic oligonucleotide
  Sense strand starting at position 3709 of SEQ ID NO: 1885210
gucccuccuggagguaaua

SEQ ID NO: 2324747 - RNA, 19 nt, Artificial Sequence
  Description of Artificial Sequence: Synthetic oligonucleotide
  Antisense strand to SEQ ID NO: 2324746
uauuaccuccaggagggac

SEQ ID NO: 2324748 - RNA, 19 nt, Artificial Sequence
  Description of Artificial Sequence: Synthetic oligonucleotide
  Sense strand starting at position 3728 of SEQ ID NO: 1885210
cugaguugggcucaaaggu

SEQ ID NO: 2324749 - RNA, 19 nt, Artificial Sequence
  Description of Artificial Sequence: Synthetic oligonucleotide
  Antisense strand to SEQ ID NO: 2324748
accuuugagcccaacucag

SEQ ID NO: 2324750 - RNA, 19 nt, Artificial Sequence
  Description of Artificial Sequence: Synthetic oligonucleotide
  Sense strand starting at position 3767 of SEQ ID NO: 1885210
ugcaaugacuuguuuaaca

SEQ ID NO: 2324751 - RNA, 19 nt, Artificial Sequence
  Description of Artificial Sequence: Synthetic oligonucleotide
  Antisense strand to SEQ ID NO: 2324750
uguuaaacaagucauugca

SEQ ID NO: 2324752 - RNA, 19 nt, Artificial Sequence
  Description of Artificial Sequence: Synthetic oligonucleotide
  Sense strand starting at position 3775 of SEQ ID NO: 1885210
cuuguuuaacacugaagag

SEQ ID NO: 2324753 - RNA, 19 nt, Artificial Sequence
  Description of Artificial Sequence: Synthetic oligonucleotide
  Antisense strand to SEQ ID NO: 2324752
cucuucaguguuaaacaag

SEQ ID NO: 2324754 - RNA, 19 nt, Artificial Sequence
  Description of Artificial Sequence: Synthetic oligonucleotide
  Sense strand starting at position 3876 of SEQ ID NO: 1885210
uugagacaucuacguggua

SEQ ID NO: 2324755 - RNA, 19 nt, Artificial Sequence
  Description of Artificial Sequence: Synthetic oligonucleotide
  Antisense strand to SEQ ID NO: 2324754
uaccacguagaugucucaa

SEQ ID NO: 2324756 - RNA, 19 nt, Artificial Sequence
  Description of Artificial Sequence: Synthetic oligonucleotide
  Sense strand starting at position 3877 of SEQ ID NO: 1885210
ugagacaucuacgugguau

SEQ ID NO: 2324757 - RNA, 19 nt, Artificial Sequence
  Description of Artificial Sequence: Synthetic oligonucleotide
  Antisense strand to SEQ ID NO: 2324756
auaccacguagaugucuca

SEQ ID NO: 2324758 - RNA, 19 nt, Artificial Sequence
  Description of Artificial Sequence: Synthetic oligonucleotide
  Sense strand starting at position 3878 of SEQ ID NO: 1885210
gagacaucuacgugguauu

SEQ ID NO: 2324759 - RNA, 19 nt, Artificial Sequence
  Description of Artificial Sequence: Synthetic oligonucleotide
  Antisense strand to SEQ ID NO: 2324758
aauaccacguagaugucuc

SEQ ID NO: 2324760 - RNA, 19 nt, Artificial Sequence
  Description of Artificial Sequence: Synthetic oligonucleotide
  Sense strand starting at position 3892 of SEQ ID NO: 1885210
guauuuauagaaggcguau

SEQ ID NO: 2324761 - RNA, 19 nt, Artificial Sequence
  Description of Artificial Sequence: Synthetic oligonucleotide
  Antisense strand to SEQ ID NO: 2324760
auacgccuucuauaaauac

SEQ ID NO: 2324762 - RNA, 19 nt, Artificial Sequence
  Description of Artificial Sequence: Synthetic oligonucleotide
  Sense strand starting at position 3901 of SEQ ID NO: 1885210
gaaggcguaugagucaauu

SEQ ID NO: 2324763 - RNA, 19 nt, Artificial Sequence
  Description of Artificial Sequence: Synthetic oligonucleotide
  Antisense strand to SEQ ID NO: 2324762
aauugacucauacgccuuc

SEQ ID NO: 2324764 - RNA, 19 nt, Artificial Sequence
  Description of Artificial Sequence: Synthetic oligonucleotide
  Sense strand starting at position 124 of SEQ ID NO: 1885211
gguacagauugagauaaac

SEQ ID NO: 2324765 - RNA, 19 nt, Artificial Sequence
  Description of Artificial Sequence: Synthetic oligonucleotide
  Antisense strand to SEQ ID NO: 2324764
guuuaucucaaucuguacc

SEQ ID NO: 2324766 - RNA, 19 nt, Artificial Sequence
  Description of Artificial Sequence: Synthetic oligonucleotide
  Sense strand starting at position 292 of SEQ ID NO: 1885211
agcuuuaacugauuagacu

SEQ ID NO: 2324767 - RNA, 19 nt, Artificial Sequence
  Description of Artificial Sequence: Synthetic oligonucleotide
  Antisense strand to SEQ ID NO: 2324766
agucuaaucaguuaaagcu

SEQ ID NO: 2324768 - RNA, 19 nt, Artificial Sequence
  Description of Artificial Sequence: Synthetic oligonucleotide
  Sense strand starting at position 293 of SEQ ID NO: 1885211
gcuuuaacugauuagacug

SEQ ID NO: 2324769 - RNA, 19 nt, Artificial Sequence
  Description of Artificial Sequence: Synthetic oligonucleotide
  Antisense strand to SEQ ID NO: 2324768
cagucuaaucaguuaaagc

SEQ ID NO: 2324770 - RNA, 19 nt, Artificial Sequence
  Description of Artificial Sequence: Synthetic oligonucleotide
  Sense strand starting at position 304 of SEQ ID NO: 1885211
uuagacugcuuuguugaca

SEQ ID NO: 2324771 - RNA, 19 nt, Artificial Sequence
  Description of Artificial Sequence: Synthetic oligonucleotide
  Antisense strand to SEQ ID NO: 2324770
ugucaacaaagcagucuaa

SEQ ID NO: 2324772 - RNA, 19 nt, Artificial Sequence
  Description of Artificial Sequence: Synthetic oligonucleotide
  Sense strand starting at position 305 of SEQ ID NO: 1885211
uagacugcuuuguugacaa

SEQ ID NO: 2324773 - RNA, 19 nt, Artificial Sequence
  Description of Artificial Sequence: Synthetic oligonucleotide
  Antisense strand to SEQ ID NO: 2324772
uugucaacaaagcagucua

SEQ ID NO: 2324774 - RNA, 19 nt, Artificial Sequence
  Description of Artificial Sequence: Synthetic oligonucleotide
  Sense strand starting at position 424 of SEQ ID NO: 1885211
gccagcuugcugucucuga

SEQ ID NO: 2324775 - RNA, 19 nt, Artificial Sequence
  Description of Artificial Sequence: Synthetic oligonucleotide
  Antisense strand to SEQ ID NO: 2324774
ucagagacagcaagcuggc

SEQ ID NO: 2324776 - RNA, 19 nt, Artificial Sequence
  Description of Artificial Sequence: Synthetic oligonucleotide
  Sense strand starting at position 428 of SEQ ID NO: 1885211
gcuugcugucucugaggau

SEQ ID NO: 2324777 - RNA, 19 nt, Artificial Sequence
  Description of Artificial Sequence: Synthetic oligonucleotide
  Antisense strand to SEQ ID NO: 2324776
auccucagagacagcaagc

SEQ ID NO: 2324778 - RNA, 19 nt, Artificial Sequence
  Description of Artificial Sequence: Synthetic oligonucleotide
  Sense strand starting at position 441 of SEQ ID NO: 1885211
gaggaugcucgggacacau

SEQ ID NO: 2324779 - RNA, 19 nt, Artificial Sequence
  Description of Artificial Sequence: Synthetic oligonucleotide
  Antisense strand to SEQ ID NO: 2324778
augugucccgagcauccuc

SEQ ID NO: 2324780 - RNA, 19 nt, Artificial Sequence
  Description of Artificial Sequence: Synthetic oligonucleotide
  Sense strand starting at position 461 of SEQ ID NO: 1885211
agaauucgcucccuuugga

SEQ ID NO: 2324781 - RNA, 19 nt, Artificial Sequence
  Description of Artificial Sequence: Synthetic oligonucleotide
  Antisense strand to SEQ ID NO: 2324780
uccaaagggagcgaauucu

SEQ ID NO: 2324782 - RNA, 19 nt, Artificial Sequence
  Description of Artificial Sequence: Synthetic oligonucleotide
  Sense strand starting at position 485 of SEQ ID NO: 1885211
gguggacuccuuugcaaca

SEQ ID NO: 2324783 - RNA, 19 nt, Artificial Sequence
  Description of Artificial Sequence: Synthetic oligonucleotide
  Antisense strand to SEQ ID NO: 2324782
uguugcaaaggaguccacc

SEQ ID NO: 2324784 - RNA, 19 nt, Artificial Sequence
  Description of Artificial Sequence: Synthetic oligonucleotide
  Sense strand starting at position 733 of SEQ ID NO: 1885211
guguauucugcggaauaga

SEQ ID NO: 2324785 - RNA, 19 nt, Artificial Sequence
  Description of Artificial Sequence: Synthetic oligonucleotide
  Antisense strand to SEQ ID NO: 2324784
ucuauuccgcagaauacac

SEQ ID NO: 2324786 - RNA, 19 nt, Artificial Sequence
  Description of Artificial Sequence: Synthetic oligonucleotide
  Sense strand starting at position 791 of SEQ ID NO: 1885211
acaggaagcuuccuaagga

SEQ ID NO: 2324787 - RNA, 19 nt, Artificial Sequence
  Description of Artificial Sequence: Synthetic oligonucleotide
  Antisense strand to SEQ ID NO: 2324786
uccuuaggaagcuuccugu

SEQ ID NO: 2324788 - RNA, 19 nt, Artificial Sequence
  Description of Artificial Sequence: Synthetic oligonucleotide
  Sense strand starting at position 792 of SEQ ID NO: 1885211
caggaagcuuccuaaggaa

SEQ ID NO: 2324789 - RNA, 19 nt, Artificial Sequence
  Description of Artificial Sequence: Synthetic oligonucleotide
  Antisense strand to SEQ ID NO: 2324788
uuccuuaggaagcuuccug

SEQ ID NO: 2324790 - RNA, 19 nt, Artificial Sequence
  Description of Artificial Sequence: Synthetic oligonucleotide
  Sense strand starting at position 951 of SEQ ID NO: 1885211
cgugaagcucagcgaaaga

SEQ ID NO: 2324791 - RNA, 19 nt, Artificial Sequence
  Description of Artificial Sequence: Synthetic oligonucleotide
  Antisense strand to SEQ ID NO: 2324790
ucuuucgcugagcuucacg

SEQ ID NO: 2324792 - RNA, 19 nt, Artificial Sequence
  Description of Artificial Sequence: Synthetic oligonucleotide
  Sense strand starting at position 1139 of SEQ ID NO: 1885211
uacgguauuugugcaauua

SEQ ID NO: 2324793 - RNA, 19 nt, Artificial Sequence
  Description of Artificial Sequence: Synthetic oligonucleotide
  Antisense strand to SEQ ID NO: 2324792
uaauugcacaaauaccgua

SEQ ID NO: 2324794 - RNA, 19 nt, Artificial Sequence
  Description of Artificial Sequence: Synthetic oligonucleotide
  Sense strand starting at position 1318 of SEQ ID NO: 1885211
ucaugauugacagggcaga

SEQ ID NO: 2324795 - RNA, 19 nt, Artificial Sequence
  Description of Artificial Sequence: Synthetic oligonucleotide
  Antisense strand to SEQ ID NO: 2324794
ucugcccugucaaucauga

SEQ ID NO: 2324796 - RNA, 19 nt, Artificial Sequence
  Description of Artificial Sequence: Synthetic oligonucleotide
  Sense strand starting at position 1319 of SEQ ID NO: 1885211
caugauugacagggcagau

SEQ ID NO: 2324797 - RNA, 19 nt, Artificial Sequence
  Description of Artificial Sequence: Synthetic oligonucleotide
  Antisense strand to SEQ ID NO: 2324796
aucugcccugucaaucaug

SEQ ID NO: 2324798 - RNA, 19 nt, Artificial Sequence
  Description of Artificial Sequence: Synthetic oligonucleotide
  Sense strand starting at position 1991 of SEQ ID NO: 1885211
gaucaaagauacuauguag

SEQ ID NO: 2324799 - RNA, 19 nt, Artificial Sequence
  Description of Artificial Sequence: Synthetic oligonucleotide
  Antisense strand to SEQ ID NO: 2324798
cuacauaguaucuuugauc

SEQ ID NO: 2324800 - RNA, 19 nt, Artificial Sequence
  Description of Artificial Sequence: Synthetic oligonucleotide
  Sense strand starting at position 2002 of SEQ ID NO: 1885211
cuauguaguuaccuauaua

SEQ ID NO: 2324801 - RNA, 19 nt, Artificial Sequence
  Description of Artificial Sequence: Synthetic oligonucleotide
  Antisense strand to SEQ ID NO: 2324800
uauauagguaacuacauag

SEQ ID NO: 2324802 - RNA, 19 nt, Artificial Sequence
  Description of Artificial Sequence: Synthetic oligonucleotide
  Sense strand starting at position 2005 of SEQ ID NO: 1885211
uguaguuaccuauauaacc

SEQ ID NO: 2324803 - RNA, 19 nt, Artificial Sequence
  Description of Artificial Sequence: Synthetic oligonucleotide
  Antisense strand to SEQ ID NO: 2324802
gguuauauagguaacuaca

SEQ ID NO: 2324804 - RNA, 19 nt, Artificial Sequence
  Description of Artificial Sequence: Synthetic oligonucleotide
  Sense strand starting at position 2096 of SEQ ID NO: 1885211
ugcugacuguugcucuaga

SEQ ID NO: 2324805 - RNA, 19 nt, Artificial Sequence
  Description of Artificial Sequence: Synthetic oligonucleotide
  Antisense strand to SEQ ID NO: 2324804
ucuagagcaacagucagca

SEQ ID NO: 2324806 - RNA, 19 nt, Artificial Sequence
  Description of Artificial Sequence: Synthetic oligonucleotide
  Sense strand starting at position 2101 of SEQ ID NO: 1885211
acuguugcucuagagguua

SEQ ID NO: 2324807 - RNA, 19 nt, Artificial Sequence
  Description of Artificial Sequence: Synthetic oligonucleotide
  Antisense strand to SEQ ID NO: 2324806
uaaccucuagagcaacagu

SEQ ID NO: 2324808 - RNA, 19 nt, Artificial Sequence
  Description of Artificial Sequence: Synthetic oligonucleotide
  Sense strand starting at position 2103 of SEQ ID NO: 1885211
uguugcucuagagguuaca

SEQ ID NO: 2324809 - RNA, 19 nt, Artificial Sequence
  Description of Artificial Sequence: Synthetic oligonucleotide
  Antisense strand to SEQ ID NO: 2324808
uguaaccucuagagcaaca

SEQ ID NO: 2324810 - RNA, 19 nt, Artificial Sequence
  Description of Artificial Sequence: Synthetic oligonucleotide
  Sense strand starting at position 2237 of SEQ ID NO: 1885211
gccucugguaccuaaggua

SEQ ID NO: 2324811 - RNA, 19 nt, Artificial Sequence
  Description of Artificial Sequence: Synthetic oligonucleotide
  Antisense strand to SEQ ID NO: 2324810
uaccuuagguaccagaggc

SEQ ID NO: 2324812 - RNA, 19 nt, Artificial Sequence
  Description of Artificial Sequence: Synthetic oligonucleotide
  Sense strand starting at position 2295 of SEQ ID NO: 1885211
ucuacagauuguguauaga

SEQ ID NO: 2324813 - RNA, 19 nt, Artificial Sequence
  Description of Artificial Sequence: Synthetic oligonucleotide
  Antisense strand to SEQ ID NO: 2324812
ucuauacacaaucuguaga

SEQ ID NO: 2324814 - RNA, 19 nt, Artificial Sequence
  Description of Artificial Sequence: Synthetic oligonucleotide
  Sense strand starting at position 2298 of SEQ ID NO: 1885211
acagauuguguauagaugu

SEQ ID NO: 2324815 - RNA, 19 nt, Artificial Sequence
  Description of Artificial Sequence: Synthetic oligonucleotide
  Antisense strand to SEQ ID NO: 2324814
acaucuauacacaaucugu

SEQ ID NO: 2324816 - RNA, 19 nt, Artificial Sequence
  Description of Artificial Sequence: Synthetic oligonucleotide
  Sense strand starting at position 2329 of SEQ ID NO: 1885211
aggauugagucccuaacug

SEQ ID NO: 2324817 - RNA, 19 nt, Artificial Sequence
  Description of Artificial Sequence: Synthetic oligonucleotide
  Antisense strand to SEQ ID NO: 2324816
caguuagggacucaauccu

SEQ ID NO: 2324818 - RNA, 19 nt, Artificial Sequence
  Description of Artificial Sequence: Synthetic oligonucleotide
  Sense strand starting at position 2390 of SEQ ID NO: 1885211
ugagcauggcucugaagaa

SEQ ID NO: 2324819 - RNA, 19 nt, Artificial Sequence
  Description of Artificial Sequence: Synthetic oligonucleotide
  Antisense strand to SEQ ID NO: 2324818
uucuucagagccaugcuca

SEQ ID NO: 2324820 - RNA, 19 nt, Artificial Sequence
  Description of Artificial Sequence: Synthetic oligonucleotide
  Sense strand starting at position 2551 of SEQ ID NO: 1885211
cacugucucccaggagaua

SEQ ID NO: 2324821 - RNA, 19 nt, Artificial Sequence
  Description of Artificial Sequence: Synthetic oligonucleotide
  Antisense strand to SEQ ID NO: 2324820
uaucuccugggagacagug

SEQ ID NO: 2324822 - RNA, 19 nt, Artificial Sequence
  Description of Artificial Sequence: Synthetic oligonucleotide
  Sense strand starting at position 2627 of SEQ ID NO: 1885211
uggcaaucgccagaccuaa

SEQ ID NO: 2324823 - RNA, 19 nt, Artificial Sequence
  Description of Artificial Sequence: Synthetic oligonucleotide
  Antisense strand to SEQ ID NO: 2324822
uuaggucuggcgauugcca

SEQ ID NO: 2324824 - RNA, 19 nt, Artificial Sequence
  Description of Artificial Sequence: Synthetic oligonucleotide
  Sense strand starting at position 2651 of SEQ ID NO: 1885211
gguucuaaccaacgugcua

SEQ ID NO: 2324825 - RNA, 19 nt, Artificial Sequence
  Description of Artificial Sequence: Synthetic oligonucleotide
  Antisense strand to SEQ ID NO: 2324824
uagcacguugguuagaacc

SEQ ID NO: 2324826 - RNA, 19 nt, Artificial Sequence
  Description of Artificial Sequence: Synthetic oligonucleotide
  Sense strand starting at position 2658 of SEQ ID NO: 1885211
accaacgugcuauaaauga

SEQ ID NO: 2324827 - RNA, 19 nt, Artificial Sequence
  Description of Artificial Sequence: Synthetic oligonucleotide
  Antisense strand to SEQ ID NO: 2324826
ucauuuauagcacguuggu

SEQ ID NO: 2324828 - RNA, 19 nt, Artificial Sequence
  Description of Artificial Sequence: Synthetic oligonucleotide
  Sense strand starting at position 2704 of SEQ ID NO: 1885211
caguuaauuugcuaggaug

SEQ ID NO: 2324829 - RNA, 19 nt, Artificial Sequence
  Description of Artificial Sequence: Synthetic oligonucleotide
  Antisense strand to SEQ ID NO: 2324828
cauccuagcaaauuaacug

SEQ ID NO: 2324830 - RNA, 19 nt, Artificial Sequence
  Description of Artificial Sequence: Synthetic oligonucleotide
  Sense strand starting at position 2754 of SEQ ID NO: 1885211
acccauuuauuagaaagga

SEQ ID NO: 2324831 - RNA, 19 nt, Artificial Sequence
  Description of Artificial Sequence: Synthetic oligonucleotide
  Antisense strand to SEQ ID NO: 2324830
uccuuucuaauaaaugggu

SEQ ID NO: 2324832 - RNA, 19 nt, Artificial Sequence
  Description of Artificial Sequence: Synthetic oligonucleotide
  Sense strand starting at position 3100 of SEQ ID NO: 1885211
ggacaucagucauccaugu

SEQ ID NO: 2324833 - RNA, 19 nt, Artificial Sequence
  Description of Artificial Sequence: Synthetic oligonucleotide
  Antisense strand to SEQ ID NO: 2324832
acauggaugacugaugucc

SEQ ID NO: 2324834 - RNA, 19 nt, Artificial Sequence
  Description of Artificial Sequence: Synthetic oligonucleotide
  Sense strand starting at position 3104 of SEQ ID NO: 1885211
aucagucauccaugugaaa

SEQ ID NO: 2324835 - RNA, 19 nt, Artificial Sequence
  Description of Artificial Sequence: Synthetic oligonucleotide
  Antisense strand to SEQ ID NO: 2324834
uuucacauggaugacugau

SEQ ID NO: 2324836 - RNA, 19 nt, Artificial Sequence
  Description of Artificial Sequence: Synthetic oligonucleotide
  Sense strand starting at position 3210 of SEQ ID NO: 1885211
gaguaagaguagucauaau

SEQ ID NO: 2324837 - RNA, 19 nt, Artificial Sequence
  Description of Artificial Sequence: Synthetic oligonucleotide
  Antisense strand to SEQ ID NO: 2324836
auuaugacuacucuuacuc

SEQ ID NO: 2324838 - RNA, 19 nt, Artificial Sequence
  Description of Artificial Sequence: Synthetic oligonucleotide
  Sense strand starting at position 3821 of SEQ ID NO: 1885211
uccugugauuacgugacuu

SEQ ID NO: 2324839 - RNA, 19 nt, Artificial Sequence
  Description of Artificial Sequence: Synthetic oligonucleotide
  Antisense strand to SEQ ID NO: 2324838
aagucacguaaucacagga

SEQ ID NO: 2324840 - RNA, 19 nt, Artificial Sequence
  Description of Artificial Sequence: Synthetic oligonucleotide
  Sense strand starting at position 3889 of SEQ ID NO: 1885211
ccggucuuguaugcaauaa

SEQ ID NO: 2324841 - RNA, 19 nt, Artificial Sequence
  Description of Artificial Sequence: Synthetic oligonucleotide
  Antisense strand to SEQ ID NO: 2324840
uuauugcauacaagaccgg

SEQ ID NO: 2324842 - RNA, 19 nt, Artificial Sequence
  Description of Artificial Sequence: Synthetic oligonucleotide
  Sense strand starting at position 3890 of SEQ ID NO: 1885211
cggucuuguaugcaauaaa

SEQ ID NO: 2324843 - RNA, 19 nt, Artificial Sequence
  Description of Artificial Sequence: Synthetic oligonucleotide
  Antisense strand to SEQ ID NO: 2324842
uuuauugcauacaagaccg

SEQ ID NO: 2324844 - RNA, 19 nt, Artificial Sequence
  Description of Artificial Sequence: Synthetic oligonucleotide
  Sense strand starting at position 3 of SEQ ID NO: 1885212
uggaaaucaugugcauauc

SEQ ID NO: 2324845 - RNA, 19 nt, Artificial Sequence
  Description of Artificial Sequence: Synthetic oligonucleotide
  Antisense strand to SEQ ID NO: 2324844
gauaugcacaugauuucca

SEQ ID NO: 2324846 - RNA, 19 nt, Artificial Sequence
  Description of Artificial Sequence: Synthetic oligonucleotide
  Sense strand starting at position 315 of SEQ ID NO: 1885212
aaggaugucucagcccuua

SEQ ID NO: 2324847 - RNA, 19 nt, Artificial Sequence
  Description of Artificial Sequence: Synthetic oligonucleotide
  Antisense strand to SEQ ID NO: 2324846
uaagggcugagacauccuu

SEQ ID NO: 2324848 - RNA, 19 nt, Artificial Sequence
  Description of Artificial Sequence: Synthetic oligonucleotide
  Sense strand starting at position 320 of SEQ ID NO: 1885212
ugucucagcccuuagcuau

SEQ ID NO: 2324849 - RNA, 19 nt, Artificial Sequence
  Description of Artificial Sequence: Synthetic oligonucleotide
  Antisense strand to SEQ ID NO: 2324848
auagcuaagggcugagaca

SEQ ID NO: 2324850 - RNA, 19 nt, Artificial Sequence
  Description of Artificial Sequence: Synthetic oligonucleotide
  Sense strand starting at position 405 of SEQ ID NO: 1885212
guagaaaugugacuaguaa

SEQ ID NO: 2324851 - RNA, 19 nt, Artificial Sequence
  Description of Artificial Sequence: Synthetic oligonucleotide
  Antisense strand to SEQ ID NO: 2324850
uuacuagucacauuucuac

SEQ ID NO: 2324852 - RNA, 19 nt, Artificial Sequence
  Description of Artificial Sequence: Synthetic oligonucleotide
  Sense strand starting at position 409 of SEQ ID NO: 1885212
aaaugugacuaguaaagag

SEQ ID NO: 2324853 - RNA, 19 nt, Artificial Sequence
  Description of Artificial Sequence: Synthetic oligonucleotide
  Antisense strand to SEQ ID NO: 2324852
cucuuuacuagucacauuu

SEQ ID NO: 2324854 - RNA, 19 nt, Artificial Sequence
  Description of Artificial Sequence: Synthetic oligonucleotide
  Sense strand starting at position 419 of SEQ ID NO: 1885212
aguaaagaguaaucauuac

SEQ ID NO: 2324855 - RNA, 19 nt, Artificial Sequence
  Description of Artificial Sequence: Synthetic oligonucleotide
  Antisense strand to SEQ ID NO: 2324854
guaaugauuacucuuuacu

SEQ ID NO: 2324856 - RNA, 19 nt, Artificial Sequence
  Description of Artificial Sequence: Synthetic oligonucleotide
  Sense strand starting at position 427 of SEQ ID NO: 1885212
guaaucauuacaugugugu

SEQ ID NO: 2324857 - RNA, 19 nt, Artificial Sequence
  Description of Artificial Sequence: Synthetic oligonucleotide
  Antisense strand to SEQ ID NO: 2324856
acacacauguaaugauuac

SEQ ID NO: 2324858 - RNA, 19 nt, Artificial Sequence
  Description of Artificial Sequence: Synthetic oligonucleotide
  Sense strand starting at position 430 of SEQ ID NO: 1885212
aucauuacauguguguuaa

SEQ ID NO: 2324859 - RNA, 19 nt, Artificial Sequence
  Description of Artificial Sequence: Synthetic oligonucleotide
  Antisense strand to SEQ ID NO: 2324858
uuaacacacauguaaugau

SEQ ID NO: 2324860 - RNA, 19 nt, Artificial Sequence
  Description of Artificial Sequence: Synthetic oligonucleotide
  Sense strand starting at position 431 of SEQ ID NO: 1885212
ucauuacauguguguuaaa

SEQ ID NO: 2324861 - RNA, 19 nt, Artificial Sequence
  Description of Artificial Sequence: Synthetic oligonucleotide
  Antisense strand to SEQ ID NO: 2324860
uuuaacacacauguaauga

SEQ ID NO: 2324862 - RNA, 19 nt, Artificial Sequence
  Description of Artificial Sequence: Synthetic oligonucleotide
  Sense strand starting at position 510 of SEQ ID NO: 1885212
agaagauaauccuagaaug

SEQ ID NO: 2324863 - RNA, 19 nt, Artificial Sequence
  Description of Artificial Sequence: Synthetic oligonucleotide
  Antisense strand to SEQ ID NO: 2324862
cauucuaggauuaucuucu

SEQ ID NO: 2324864 - RNA, 19 nt, Artificial Sequence
  Description of Artificial Sequence: Synthetic oligonucleotide
  Sense strand starting at position 580 of SEQ ID NO: 1885212
uaugcuugacaguguuaac

SEQ ID NO: 2324865 - RNA, 19 nt, Artificial Sequence
  Description of Artificial Sequence: Synthetic oligonucleotide
  Antisense strand to SEQ ID NO: 2324864
guuaacacugucaagcaua

SEQ ID NO: 2324866 - RNA, 19 nt, Artificial Sequence
  Description of Artificial Sequence: Synthetic oligonucleotide
  Sense strand starting at position 694 of SEQ ID NO: 1885212
guagccagccugggauaaa

SEQ ID NO: 2324867 - RNA, 19 nt, Artificial Sequence
  Description of Artificial Sequence: Synthetic oligonucleotide
  Antisense strand to SEQ ID NO: 2324866
uuuaucccaggcuggcuac

SEQ ID NO: 2324868 - RNA, 19 nt, Artificial Sequence
  Description of Artificial Sequence: Synthetic oligonucleotide
  Sense strand starting at position 874 of SEQ ID NO: 1885212
cacuaacuggugugauuag

SEQ ID NO: 2324869 - RNA, 19 nt, Artificial Sequence
  Description of Artificial Sequence: Synthetic oligonucleotide
  Antisense strand to SEQ ID NO: 2324868
cuaaucacaccaguuagug

SEQ ID NO: 2324870 - RNA, 19 nt, Artificial Sequence
  Description of Artificial Sequence: Synthetic oligonucleotide
  Sense strand starting at position 896 of SEQ ID NO: 1885212
gcaagauuaguaggcuaca

SEQ ID NO: 2324871 - RNA, 19 nt, Artificial Sequence
  Description of Artificial Sequence: Synthetic oligonucleotide
  Antisense strand to SEQ ID NO: 2324870
uguagccuacuaaucuugc

SEQ ID NO: 2324872 - RNA, 19 nt, Artificial Sequence
  Description of Artificial Sequence: Synthetic oligonucleotide
  Sense strand starting at position 897 of SEQ ID NO: 1885212
caagauuaguaggcuacaa

SEQ ID NO: 2324873 - RNA, 19 nt, Artificial Sequence
  Description of Artificial Sequence: Synthetic oligonucleotide
  Antisense strand to SEQ ID NO: 2324872
uuguagccuacuaaucuug

SEQ ID NO: 2324874 - RNA, 19 nt, Artificial Sequence
  Description of Artificial Sequence: Synthetic oligonucleotide
  Sense strand starting at position 993 of SEQ ID NO: 1885212
ccaucugucucagugagua

SEQ ID NO: 2324875 - RNA, 19 nt, Artificial Sequence
  Description of Artificial Sequence: Synthetic oligonucleotide
  Antisense strand to SEQ ID NO: 2324874
uacucacugagacagaugg

SEQ ID NO: 2324876 - RNA, 19 nt, Artificial Sequence
  Description of Artificial Sequence: Synthetic oligonucleotide
  Sense strand starting at position 995 of SEQ ID NO: 1885212
aucugucucagugaguacu

SEQ ID NO: 2324877 - RNA, 19 nt, Artificial Sequence
  Description of Artificial Sequence: Synthetic oligonucleotide
  Antisense strand to SEQ ID NO: 2324876
aguacucacugagacagau

SEQ ID NO: 2324878 - RNA, 19 nt, Artificial Sequence
  Description of Artificial Sequence: Synthetic oligonucleotide
  Sense strand starting at position 1112 of SEQ ID NO: 1885212
agaguuaguaaauacgcaa

SEQ ID NO: 2324879 - RNA, 19 nt, Artificial Sequence
  Description of Artificial Sequence: Synthetic oligonucleotide
  Antisense strand to SEQ ID NO: 2324878
uugcguauuuacuaacucu

SEQ ID NO: 2324880 - RNA, 19 nt, Artificial Sequence
  Description of Artificial Sequence: Synthetic oligonucleotide
  Sense strand starting at position 1177 of SEQ ID NO: 1885212
uucguuucugccuaacaua

SEQ ID NO: 2324881 - RNA, 19 nt, Artificial Sequence
  Description of Artificial Sequence: Synthetic oligonucleotide
  Antisense strand to SEQ ID NO: 2324880
uauguuaggcagaaacgaa

SEQ ID NO: 2324882 - RNA, 19 nt, Artificial Sequence
  Description of Artificial Sequence: Synthetic oligonucleotide
  Sense strand starting at position 1236 of SEQ ID NO: 1885212
ugguaacagcauggugaua

SEQ ID NO: 2324883 - RNA, 19 nt, Artificial Sequence
  Description of Artificial Sequence: Synthetic oligonucleotide
  Antisense strand to SEQ ID NO: 2324882
uaucaccaugcuguuacca

SEQ ID NO: 2324884 - RNA, 19 nt, Artificial Sequence
  Description of Artificial Sequence: Synthetic oligonucleotide
  Sense strand starting at position 1453 of SEQ ID NO: 1885212
uuuaauagauggucagaca

SEQ ID NO: 2324885 - RNA, 19 nt, Artificial Sequence
  Description of Artificial Sequence: Synthetic oligonucleotide
  Antisense strand to SEQ ID NO: 2324884
ugucugaccaucuauuaaa

SEQ ID NO: 2324886 - RNA, 19 nt, Artificial Sequence
  Description of Artificial Sequence: Synthetic oligonucleotide
  Sense strand starting at position 1456 of SEQ ID NO: 1885212
aauagauggucagacacaa

SEQ ID NO: 2324887 - RNA, 19 nt, Artificial Sequence
  Description of Artificial Sequence: Synthetic oligonucleotide
  Antisense strand to SEQ ID NO: 2324886
uugugucugaccaucuauu

SEQ ID NO: 2324888 - RNA, 19 nt, Artificial Sequence
  Description of Artificial Sequence: Synthetic oligonucleotide
  Sense strand starting at position 1589 of SEQ ID NO: 1885212
acgcuaacaguugaauaaa

SEQ ID NO: 2324889 - RNA, 19 nt, Artificial Sequence
  Description of Artificial Sequence: Synthetic oligonucleotide
  Antisense strand to SEQ ID NO: 2324888
uuuauucaacuguuagcgu

SEQ ID NO: 2324890 - RNA, 19 nt, Artificial Sequence
  Description of Artificial Sequence: Synthetic oligonucleotide
  Sense strand starting at position 1654 of SEQ ID NO: 1885212
gcaaucugacagcgaaauu

SEQ ID NO: 2324891 - RNA, 19 nt, Artificial Sequence
  Description of Artificial Sequence: Synthetic oligonucleotide
  Antisense strand to SEQ ID NO: 2324890
aauuucgcugucagauugc

SEQ ID NO: 2324892 - RNA, 19 nt, Artificial Sequence
  Description of Artificial Sequence: Synthetic oligonucleotide
  Sense strand starting at position 2977 of SEQ ID NO: 1885212
aguggaguuaauggagguu

SEQ ID NO: 2324893 - RNA, 19 nt, Artificial Sequence
  Description of Artificial Sequence: Synthetic oligonucleotide
  Antisense strand to SEQ ID NO: 2324892
aaccuccauuaacuccacu

SEQ ID NO: 2324894 - RNA, 19 nt, Artificial Sequence
  Description of Artificial Sequence: Synthetic oligonucleotide
  Sense strand starting at position 3126 of SEQ ID NO: 1885212
cuaggaagccucugaaaug

SEQ ID NO: 2324895 - RNA, 19 nt, Artificial Sequence
  Description of Artificial Sequence: Synthetic oligonucleotide
  Antisense strand to SEQ ID NO: 2324894
cauuucagaggcuuccuag

SEQ ID NO: 2324896 - RNA, 19 nt, Artificial Sequence
  Description of Artificial Sequence: Synthetic oligonucleotide
  Sense strand starting at position 3137 of SEQ ID NO: 1885212
cugaaaugggcuuggaagu

SEQ ID NO: 2324897 - RNA, 19 nt, Artificial Sequence
  Description of Artificial Sequence: Synthetic oligonucleotide
  Antisense strand to SEQ ID NO: 2324896
acuuccaagcccauuucag

SEQ ID NO: 2324898 - RNA, 19 nt, Artificial Sequence
  Description of Artificial Sequence: Synthetic oligonucleotide
  Sense strand starting at position 3138 of SEQ ID NO: 1885212
ugaaaugggcuuggaaguu

SEQ ID NO: 2324899 - RNA, 19 nt, Artificial Sequence
  Description of Artificial Sequence: Synthetic oligonucleotide
  Antisense strand to SEQ ID NO: 2324898
aacuuccaagcccauuuca

SEQ ID NO: 2324900 - RNA, 19 nt, Artificial Sequence
  Description of Artificial Sequence: Synthetic oligonucleotide
  Sense strand starting at position 3150 of SEQ ID NO: 1885212
ggaaguuucuaaucccaaa

SEQ ID NO: 2324901 - RNA, 19 nt, Artificial Sequence
  Description of Artificial Sequence: Synthetic oligonucleotide
  Antisense strand to SEQ ID NO: 2324900
uuugggauuagaaacuucc

SEQ ID NO: 2324902 - RNA, 19 nt, Artificial Sequence
  Description of Artificial Sequence: Synthetic oligonucleotide
  Sense strand starting at position 3365 of SEQ ID NO: 1885212
gcaauaaugccugagggcu

SEQ ID NO: 2324903 - RNA, 19 nt, Artificial Sequence
  Description of Artificial Sequence: Synthetic oligonucleotide
  Antisense strand to SEQ ID NO: 2324902
agcccucaggcauuauugc

SEQ ID NO: 2324904 - RNA, 19 nt, Artificial Sequence
  Description of Artificial Sequence: Synthetic oligonucleotide
  Sense strand starting at position 3468 of SEQ ID NO: 1885212
aauggugauggauguaaca

SEQ ID NO: 2324905 - RNA, 19 nt, Artificial Sequence
  Description of Artificial Sequence: Synthetic oligonucleotide
  Antisense strand to SEQ ID NO: 2324904
uguuacauccaucaccauu

SEQ ID NO: 2324906 - RNA, 19 nt, Artificial Sequence
  Description of Artificial Sequence: Synthetic oligonucleotide
  Sense strand starting at position 3582 of SEQ ID NO: 1885212
gugauuauucucuauauuc

SEQ ID NO: 2324907 - RNA, 19 nt, Artificial Sequence
  Description of Artificial Sequence: Synthetic oligonucleotide
  Antisense strand to SEQ ID NO: 2324906
gaauauagagaauaaucac

SEQ ID NO: 2324908 - RNA, 19 nt, Artificial Sequence
  Description of Artificial Sequence: Synthetic oligonucleotide
  Sense strand starting at position 3632 of SEQ ID NO: 1885212
guugauaacugacucucaa

SEQ ID NO: 2324909 - RNA, 19 nt, Artificial Sequence
  Description of Artificial Sequence: Synthetic oligonucleotide
  Antisense strand to SEQ ID NO: 2324908
uugagagucaguuaucaac

SEQ ID NO: 2324910 - RNA, 19 nt, Artificial Sequence
  Description of Artificial Sequence: Synthetic oligonucleotide
  Sense strand starting at position 3651 of SEQ ID NO: 1885212
accgauaucuuggccauac

SEQ ID NO: 2324911 - RNA, 19 nt, Artificial Sequence
  Description of Artificial Sequence: Synthetic oligonucleotide
  Antisense strand to SEQ ID NO: 2324910
guauggccaagauaucggu

SEQ ID NO: 2324912 - RNA, 19 nt, Artificial Sequence
  Description of Artificial Sequence: Synthetic oligonucleotide
  Sense strand starting at position 3653 of SEQ ID NO: 1885212
cgauaucuuggccauacgu

SEQ ID NO: 2324913 - RNA, 19 nt, Artificial Sequence
  Description of Artificial Sequence: Synthetic oligonucleotide
  Antisense strand to SEQ ID NO: 2324912
acguauggccaagauaucg

SEQ ID NO: 2324914 - RNA, 19 nt, Artificial Sequence
  Description of Artificial Sequence: Synthetic oligonucleotide
  Sense strand starting at position 3670 of SEQ ID NO: 1885212
guuuaagucccagaggauu

SEQ ID NO: 2324915 - RNA, 19 nt, Artificial Sequence
  Description of Artificial Sequence: Synthetic oligonucleotide
  Antisense strand to SEQ ID NO: 2324914
aauccucugggacuuaaac

SEQ ID NO: 2324916 - RNA, 19 nt, Artificial Sequence
  Description of Artificial Sequence: Synthetic oligonucleotide
  Sense strand starting at position 3686 of SEQ ID NO: 1885212
auugcugcgguguauagaa

SEQ ID NO: 2324917 - RNA, 19 nt, Artificial Sequence
  Description of Artificial Sequence: Synthetic oligonucleotide
  Antisense strand to SEQ ID NO: 2324916
uucuauacaccgcagcaau

SEQ ID NO: 2324918 - RNA, 19 nt, Artificial Sequence
  Description of Artificial Sequence: Synthetic oligonucleotide
  Sense strand starting at position 3885 of SEQ ID NO: 1885212
gcuccaggugaagauugau

SEQ ID NO: 2324919 - RNA, 19 nt, Artificial Sequence
  Description of Artificial Sequence: Synthetic oligonucleotide
  Antisense strand to SEQ ID NO: 2324918
aucaaucuucaccuggagc

SEQ ID NO: 2324920 - RNA, 19 nt, Artificial Sequence
  Description of Artificial Sequence: Synthetic oligonucleotide
  Sense strand starting at position 3893 of SEQ ID NO: 1885212
ugaagauugaugggauguu

SEQ ID NO: 2324921 - RNA, 19 nt, Artificial Sequence
  Description of Artificial Sequence: Synthetic oligonucleotide
  Antisense strand to SEQ ID NO: 2324920
aacaucccaucaaucuuca

SEQ ID NO: 2324922 - RNA, 19 nt, Artificial Sequence
  Description of Artificial Sequence: Synthetic oligonucleotide
  Sense strand starting at position 3967 of SEQ ID NO: 1885212
gugguaucuugagauauuu

SEQ ID NO: 2324923 - RNA, 19 nt, Artificial Sequence
  Description of Artificial Sequence: Synthetic oligonucleotide
  Antisense strand to SEQ ID NO: 2324922
aaauaucucaagauaccac

SEQ ID NO: 2324924 - RNA, 19 nt, Artificial Sequence
  Description of Artificial Sequence: Synthetic oligonucleotide
  Sense strand starting at position 114 of SEQ ID NO: 1885213
guguuaacuaugggcaaga

SEQ ID NO: 2324925 - RNA, 19 nt, Artificial Sequence
  Description of Artificial Sequence: Synthetic oligonucleotide
  Antisense strand to SEQ ID NO: 2324924
ucuugcccauaguuaacac

SEQ ID NO: 2324926 - RNA, 19 nt, Artificial Sequence
  Description of Artificial Sequence: Synthetic oligonucleotide
  Sense strand starting at position 115 of SEQ ID NO: 1885213
uguuaacuaugggcaagau

SEQ ID NO: 2324927 - RNA, 19 nt, Artificial Sequence
  Description of Artificial Sequence: Synthetic oligonucleotide
  Antisense strand to SEQ ID NO: 2324926
aucuugcccauaguuaaca

SEQ ID NO: 2324928 - RNA, 19 nt, Artificial Sequence
  Description of Artificial Sequence: Synthetic oligonucleotide
  Sense strand starting at position 374 of SEQ ID NO: 1885213
agucuuggcaagcaucaga

SEQ ID NO: 2324929 - RNA, 19 nt, Artificial Sequence
  Description of Artificial Sequence: Synthetic oligonucleotide
  Antisense strand to SEQ ID NO: 2324928
ucugaugcuugccaagacu

SEQ ID NO: 2324930 - RNA, 19 nt, Artificial Sequence
  Description of Artificial Sequence: Synthetic oligonucleotide
  Sense strand starting at position 387 of SEQ ID NO: 1885213
aucagaugggcguagguau

SEQ ID NO: 2324931 - RNA, 19 nt, Artificial Sequence
  Description of Artificial Sequence: Synthetic oligonucleotide
  Antisense strand to SEQ ID NO: 2324930
auaccuacgcccaucugau

SEQ ID NO: 2324932 - RNA, 19 nt, Artificial Sequence
  Description of Artificial Sequence: Synthetic oligonucleotide
  Sense strand starting at position 541 of SEQ ID NO: 1885213
ucaaucuggugagagauuu

SEQ ID NO: 2324933 - RNA, 19 nt, Artificial Sequence
  Description of Artificial Sequence: Synthetic oligonucleotide
  Antisense strand to SEQ ID NO: 2324932
aaaucucucaccagauuga

SEQ ID NO: 2324934 - RNA, 19 nt, Artificial Sequence
  Description of Artificial Sequence: Synthetic oligonucleotide
  Sense strand starting at position 586 of SEQ ID NO: 1885213
uuggaaaucugagugauug

SEQ ID NO: 2324935 - RNA, 19 nt, Artificial Sequence
  Description of Artificial Sequence: Synthetic oligonucleotide
  Antisense strand to SEQ ID NO: 2324934
caaucacucagauuuccaa

SEQ ID NO: 2324936 - RNA, 19 nt, Artificial Sequence
  Description of Artificial Sequence: Synthetic oligonucleotide
  Sense strand starting at position 606 of SEQ ID NO: 1885213
gugcuugccauuuggguaa

SEQ ID NO: 2324937 - RNA, 19 nt, Artificial Sequence
  Description of Artificial Sequence: Synthetic oligonucleotide
  Antisense strand to SEQ ID NO: 2324936
uuacccaaauggcaagcac

SEQ ID NO: 2324938 - RNA, 19 nt, Artificial Sequence
  Description of Artificial Sequence: Synthetic oligonucleotide
  Sense strand starting at position 610 of SEQ ID NO: 1885213
uugccauuuggguaagugu

SEQ ID NO: 2324939 - RNA, 19 nt, Artificial Sequence
  Description of Artificial Sequence: Synthetic oligonucleotide
  Antisense strand to SEQ ID NO: 2324938
acacuuacccaaauggcaa

SEQ ID NO: 2324940 - RNA, 19 nt, Artificial Sequence
  Description of Artificial Sequence: Synthetic oligonucleotide
  Sense strand starting at position 775 of SEQ ID NO: 1885213
augaacuguuaaucuagga

SEQ ID NO: 2324941 - RNA, 19 nt, Artificial Sequence
  Description of Artificial Sequence: Synthetic oligonucleotide
  Antisense strand to SEQ ID NO: 2324940
uccuagauuaacaguucau

SEQ ID NO: 2324942 - RNA, 19 nt, Artificial Sequence
  Description of Artificial Sequence: Synthetic oligonucleotide
  Sense strand starting at position 779 of SEQ ID NO: 1885213
acuguuaaucuaggaaguc

SEQ ID NO: 2324943 - RNA, 19 nt, Artificial Sequence
  Description of Artificial Sequence: Synthetic oligonucleotide
  Antisense strand to SEQ ID NO: 2324942
gacuuccuagauuaacagu

SEQ ID NO: 2324944 - RNA, 19 nt, Artificial Sequence
  Description of Artificial Sequence: Synthetic oligonucleotide
  Sense strand starting at position 825 of SEQ ID NO: 1885213
gcccaacauuugcuauguu

SEQ ID NO: 2324945 - RNA, 19 nt, Artificial Sequence
  Description of Artificial Sequence: Synthetic oligonucleotide
  Antisense strand to SEQ ID NO: 2324944
aacauagcaaauguugggc

SEQ ID NO: 2324946 - RNA, 19 nt, Artificial Sequence
  Description of Artificial Sequence: Synthetic oligonucleotide
  Sense strand starting at position 921 of SEQ ID NO: 1885213
aggauccugugguuuauga

SEQ ID NO: 2324947 - RNA, 19 nt, Artificial Sequence
  Description of Artificial Sequence: Synthetic oligonucleotide
  Antisense strand to SEQ ID NO: 2324946
ucauaaaccacaggauccu

SEQ ID NO: 2324948 - RNA, 19 nt, Artificial Sequence
  Description of Artificial Sequence: Synthetic oligonucleotide
  Sense strand starting at position 934 of SEQ ID NO: 1885213
uuaugagauaguuggccaa

SEQ ID NO: 2324949 - RNA, 19 nt, Artificial Sequence
  Description of Artificial Sequence: Synthetic oligonucleotide
  Antisense strand to SEQ ID NO: 2324948
uuggccaacuaucucauaa

SEQ ID NO: 2324950 - RNA, 19 nt, Artificial Sequence
  Description of Artificial Sequence: Synthetic oligonucleotide
  Sense strand starting at position 936 of SEQ ID NO: 1885213
augagauaguuggccaaau

SEQ ID NO: 2324951 - RNA, 19 nt, Artificial Sequence
  Description of Artificial Sequence: Synthetic oligonucleotide
  Antisense strand to SEQ ID NO: 2324950
auuuggccaacuaucucau

SEQ ID NO: 2324952 - RNA, 19 nt, Artificial Sequence
  Description of Artificial Sequence: Synthetic oligonucleotide
  Sense strand starting at position 937 of SEQ ID NO: 1885213
ugagauaguuggccaaauc

SEQ ID NO: 2324953 - RNA, 19 nt, Artificial Sequence
  Description of Artificial Sequence: Synthetic oligonucleotide
  Antisense strand to SEQ ID NO: 2324952
gauuuggccaacuaucuca

SEQ ID NO: 2324954 - RNA, 19 nt, Artificial Sequence
  Description of Artificial Sequence: Synthetic oligonucleotide
  Sense strand starting at position 1091 of SEQ ID NO: 1885213
gccauuguagagcaaggaa

SEQ ID NO: 2324955 - RNA, 19 nt, Artificial Sequence
  Description of Artificial Sequence: Synthetic oligonucleotide
  Antisense strand to SEQ ID NO: 2324954
uuccuugcucuacaauggc

SEQ ID NO: 2324956 - RNA, 19 nt, Artificial Sequence
  Description of Artificial Sequence: Synthetic oligonucleotide
  Sense strand starting at position 1303 of SEQ ID NO: 1885213
cugcauuucugggagggaa

SEQ ID NO: 2324957 - RNA, 19 nt, Artificial Sequence
  Description of Artificial Sequence: Synthetic oligonucleotide
  Antisense strand to SEQ ID NO: 2324956
uucccucccagaaaugcag

SEQ ID NO: 2324958 - RNA, 19 nt, Artificial Sequence
  Description of Artificial Sequence: Synthetic oligonucleotide
  Sense strand starting at position 1558 of SEQ ID NO: 1885213
ggaagccuugcugaagaga

SEQ ID NO: 2324959 - RNA, 19 nt, Artificial Sequence
  Description of Artificial Sequence: Synthetic oligonucleotide
  Antisense strand to SEQ ID NO: 2324958
ucucuucagcaaggcuucc

SEQ ID NO: 2324960 - RNA, 19 nt, Artificial Sequence
  Description of Artificial Sequence: Synthetic oligonucleotide
  Sense strand starting at position 2217 of SEQ ID NO: 1885213
uggaguaauagugaguaau

SEQ ID NO: 2324961 - RNA, 19 nt, Artificial Sequence
  Description of Artificial Sequence: Synthetic oligonucleotide
  Antisense strand to SEQ ID NO: 2324960
auuacucacuauuacucca

SEQ ID NO: 2324962 - RNA, 19 nt, Artificial Sequence
  Description of Artificial Sequence: Synthetic oligonucleotide
  Sense strand starting at position 2219 of SEQ ID NO: 1885213
gaguaauagugaguaauag

SEQ ID NO: 2324963 - RNA, 19 nt, Artificial Sequence
  Description of Artificial Sequence: Synthetic oligonucleotide
  Antisense strand to SEQ ID NO: 2324962
cuauuacucacuauuacuc

SEQ ID NO: 2324964 - RNA, 19 nt, Artificial Sequence
  Description of Artificial Sequence: Synthetic oligonucleotide
  Sense strand starting at position 2557 of SEQ ID NO: 1885213
ggcauuccuggcugcauuu

SEQ ID NO: 2324965 - RNA, 19 nt, Artificial Sequence
  Description of Artificial Sequence: Synthetic oligonucleotide
  Antisense strand to SEQ ID NO: 2324964
aaaugcagccaggaaugcc

SEQ ID NO: 2324966 - RNA, 19 nt, Artificial Sequence
  Description of Artificial Sequence: Synthetic oligonucleotide
  Sense strand starting at position 2686 of SEQ ID NO: 1885213
uaggguauugucugaagaa

SEQ ID NO: 2324967 - RNA, 19 nt, Artificial Sequence
  Description of Artificial Sequence: Synthetic oligonucleotide
  Antisense strand to SEQ ID NO: 2324966
uucuucagacaauacccua

SEQ ID NO: 2324968 - RNA, 19 nt, Artificial Sequence
  Description of Artificial Sequence: Synthetic oligonucleotide
  Sense strand starting at position 2791 of SEQ ID NO: 1885213
uguggaugauguucugaau

SEQ ID NO: 2324969 - RNA, 19 nt, Artificial Sequence
  Description of Artificial Sequence: Synthetic oligonucleotide
  Antisense strand to SEQ ID NO: 2324968
auucagaacaucauccaca

SEQ ID NO: 2324970 - RNA, 19 nt, Artificial Sequence
  Description of Artificial Sequence: Synthetic oligonucleotide
  Sense strand starting at position 2891 of SEQ ID NO: 1885213
agguucugacccuaauuau

SEQ ID NO: 2324971 - RNA, 19 nt, Artificial Sequence
  Description of Artificial Sequence: Synthetic oligonucleotide
  Antisense strand to SEQ ID NO: 2324970
auaauuagggucagaaccu

SEQ ID NO: 2324972 - RNA, 19 nt, Artificial Sequence
  Description of Artificial Sequence: Synthetic oligonucleotide
  Sense strand starting at position 2923 of SEQ ID NO: 1885213
agaauaugauggcuccuga

SEQ ID NO: 2324973 - RNA, 19 nt, Artificial Sequence
  Description of Artificial Sequence: Synthetic oligonucleotide
  Antisense strand to SEQ ID NO: 2324972
ucaggagccaucauauucu

SEQ ID NO: 2324974 - RNA, 19 nt, Artificial Sequence
  Description of Artificial Sequence: Synthetic oligonucleotide
  Sense strand starting at position 3214 of SEQ ID NO: 1885213
gugcauacugauuaaccua

SEQ ID NO: 2324975 - RNA, 19 nt, Artificial Sequence
  Description of Artificial Sequence: Synthetic oligonucleotide
  Antisense strand to SEQ ID NO: 2324974
uagguuaaucaguaugcac

SEQ ID NO: 2324976 - RNA, 19 nt, Artificial Sequence
  Description of Artificial Sequence: Synthetic oligonucleotide
  Sense strand starting at position 3228 of SEQ ID NO: 1885213
accuaccugugcucaaaga

SEQ ID NO: 2324977 - RNA, 19 nt, Artificial Sequence
  Description of Artificial Sequence: Synthetic oligonucleotide
  Antisense strand to SEQ ID NO: 2324976
ucuuugagcacagguaggu

SEQ ID NO: 2324978 - RNA, 19 nt, Artificial Sequence
  Description of Artificial Sequence: Synthetic oligonucleotide
  Sense strand starting at position 3237 of SEQ ID NO: 1885213
ugcucaaagagcuagugau

SEQ ID NO: 2324979 - RNA, 19 nt, Artificial Sequence
  Description of Artificial Sequence: Synthetic oligonucleotide
  Antisense strand to SEQ ID NO: 2324978
aucacuagcucuuugagca

SEQ ID NO: 2324980 - RNA, 19 nt, Artificial Sequence
  Description of Artificial Sequence: Synthetic oligonucleotide
  Sense strand starting at position 3244 of SEQ ID NO: 1885213
agagcuagugauuaauugu

SEQ ID NO: 2324981 - RNA, 19 nt, Artificial Sequence
  Description of Artificial Sequence: Synthetic oligonucleotide
  Antisense strand to SEQ ID NO: 2324980
acaauuaaucacuagcucu

SEQ ID NO: 2324982 - RNA, 19 nt, Artificial Sequence
  Description of Artificial Sequence: Synthetic oligonucleotide
  Sense strand starting at position 3250 of SEQ ID NO: 1885213
agugauuaauugucuccua

SEQ ID NO: 2324983 - RNA, 19 nt, Artificial Sequence
  Description of Artificial Sequence: Synthetic oligonucleotide
  Antisense strand to SEQ ID NO: 2324982
uaggagacaauuaaucacu

SEQ ID NO: 2324984 - RNA, 19 nt, Artificial Sequence
  Description of Artificial Sequence: Synthetic oligonucleotide
  Sense strand starting at position 3274 of SEQ ID NO: 1885213
augaccuguggccaagauu

SEQ ID NO: 2324985 - RNA, 19 nt, Artificial Sequence
  Description of Artificial Sequence: Synthetic oligonucleotide
  Antisense strand to SEQ ID NO: 2324984
aaucuuggccacaggucau

SEQ ID NO: 2324986 - RNA, 19 nt, Artificial Sequence
  Description of Artificial Sequence: Synthetic oligonucleotide
  Sense strand starting at position 3369 of SEQ ID NO: 1885213
gccuuaagguauucaggga

SEQ ID NO: 2324987 - RNA, 19 nt, Artificial Sequence
  Description of Artificial Sequence: Synthetic oligonucleotide
  Antisense strand to SEQ ID NO: 2324986
ucccugaauaccuuaaggc

SEQ ID NO: 2324988 - RNA, 19 nt, Artificial Sequence
  Description of Artificial Sequence: Synthetic oligonucleotide
  Sense strand starting at position 3385 of SEQ ID NO: 1885213
ggaugugcaucucuaaaug

SEQ ID NO: 2324989 - RNA, 19 nt, Artificial Sequence
  Description of Artificial Sequence: Synthetic oligonucleotide
  Antisense strand to SEQ ID NO: 2324988
cauuuagagaugcacaucc

SEQ ID NO: 2324990 - RNA, 19 nt, Artificial Sequence
  Description of Artificial Sequence: Synthetic oligonucleotide
  Sense strand starting at position 3595 of SEQ ID NO: 1885213
ggaugaaucuuccuuuguc

SEQ ID NO: 2324991 - RNA, 19 nt, Artificial Sequence
  Description of Artificial Sequence: Synthetic oligonucleotide
  Antisense strand to SEQ ID NO: 2324990
gacaaaggaagauucaucc

SEQ ID NO: 2324992 - RNA, 19 nt, Artificial Sequence
  Description of Artificial Sequence: Synthetic oligonucleotide
  Sense strand starting at position 3616 of SEQ ID NO: 1885213
ucugcucuuugauuaauga

SEQ ID NO: 2324993 - RNA, 19 nt, Artificial Sequence
  Description of Artificial Sequence: Synthetic oligonucleotide
  Antisense strand to SEQ ID NO: 2324992
ucauuaaucaaagagcaga

SEQ ID NO: 2324994 - RNA, 19 nt, Artificial Sequence
  Description of Artificial Sequence: Synthetic oligonucleotide
  Sense strand starting at position 3617 of SEQ ID NO: 1885213
cugcucuuugauuaaugaa

SEQ ID NO: 2324995 - RNA, 19 nt, Artificial Sequence
  Description of Artificial Sequence: Synthetic oligonucleotide
  Antisense strand to SEQ ID NO: 2324994
uucauuaaucaaagagcag

SEQ ID NO: 2324996 - RNA, 19 nt, Artificial Sequence
  Description of Artificial Sequence: Synthetic oligonucleotide
  Sense strand starting at position 3812 of SEQ ID NO: 1885213
uacugaggccaaugggauu

SEQ ID NO: 2324997 - RNA, 19 nt, Artificial Sequence
  Description of Artificial Sequence: Synthetic oligonucleotide
  Antisense strand to SEQ ID NO: 2324996
aaucccauuggccucagua

SEQ ID NO: 2324998 - RNA, 19 nt, Artificial Sequence
  Description of Artificial Sequence: Synthetic oligonucleotide
  Sense strand starting at position 3965 of SEQ ID NO: 1885213
cuuugagaauaucugugau

SEQ ID NO: 2324999 - RNA, 19 nt, Artificial Sequence
  Description of Artificial Sequence: Synthetic oligonucleotide
  Antisense strand to SEQ ID NO: 2324998
aucacagauauucucaaag

SEQ ID NO: 2325000 - RNA, 19 nt, Artificial Sequence
  Description of Artificial Sequence: Synthetic oligonucleotide
  Sense strand starting at position 3967 of SEQ ID NO: 1885213
uugagaauaucugugauac

SEQ ID NO: 2325001 - RNA, 19 nt, Artificial Sequence
  Description of Artificial Sequence: Synthetic oligonucleotide
  Antisense strand to SEQ ID NO: 2325000
guaucacagauauucucaa

SEQ ID NO: 2325002 - RNA, 19 nt, Artificial Sequence
  Description of Artificial Sequence: Synthetic oligonucleotide
  Sense strand starting at position 3968 of SEQ ID NO: 1885213
ugagaauaucugugauaca

SEQ ID NO: 2325003 - RNA, 19 nt, Artificial Sequence
  Description of Artificial Sequence: Synthetic oligonucleotide
  Antisense strand to SEQ ID NO: 2325002
uguaucacagauauucuca

SEQ ID NO: 2325004 - RNA, 19 nt, Artificial Sequence
  Description of Artificial Sequence: Synthetic oligonucleotide
  Sense strand starting at position 321 of SEQ ID NO: 1885214
gauguaucccguggaggga

SEQ ID NO: 2325005 - RNA, 19 nt, Artificial Sequence
  Description of Artificial Sequence: Synthetic oligonucleotide
  Antisense strand to SEQ ID NO: 2325004
ucccuccacgggauacauc

SEQ ID NO: 2325006 - RNA, 19 nt, Artificial Sequence
  Description of Artificial Sequence: Synthetic oligonucleotide
  Sense strand starting at position 401 of SEQ ID NO: 1885214
ggagguugggcauguguuu

SEQ ID NO: 2325007 - RNA, 19 nt, Artificial Sequence
  Description of Artificial Sequence: Synthetic oligonucleotide
  Antisense strand to SEQ ID NO: 2325006
aaacacaugcccaaccucc

SEQ ID NO: 2325008 - RNA, 19 nt, Artificial Sequence
  Description of Artificial Sequence: Synthetic oligonucleotide
  Sense strand starting at position 493 of SEQ ID NO: 1885214
gccucaugacaacacgaaa

SEQ ID NO: 2325009 - RNA, 19 nt, Artificial Sequence
  Description of Artificial Sequence: Synthetic oligonucleotide
  Antisense strand to SEQ ID NO: 2325008
uuucguguugucaugaggc

SEQ ID NO: 2325010 - RNA, 19 nt, Artificial Sequence
  Description of Artificial Sequence: Synthetic oligonucleotide
  Sense strand starting at position 506 of SEQ ID NO: 1885214
acgaaaugucuccagaggu

SEQ ID NO: 2325011 - RNA, 19 nt, Artificial Sequence
  Description of Artificial Sequence: Synthetic oligonucleotide
  Antisense strand to SEQ ID NO: 2325010
accucuggagacauuucgu

SEQ ID NO: 2325012 - RNA, 19 nt, Artificial Sequence
  Description of Artificial Sequence: Synthetic oligonucleotide
  Sense strand starting at position 600 of SEQ ID NO: 1885214
cacguaauacggcaaauau

SEQ ID NO: 2325013 - RNA, 19 nt, Artificial Sequence
  Description of Artificial Sequence: Synthetic oligonucleotide
  Antisense strand to SEQ ID NO: 2325012
auauuugccguauuacgug

SEQ ID NO: 2325014 - RNA, 19 nt, Artificial Sequence
  Description of Artificial Sequence: Synthetic oligonucleotide
  Sense strand starting at position 946 of SEQ ID NO: 1885214
cagaguuucggaggcaucu

SEQ ID NO: 2325015 - RNA, 19 nt, Artificial Sequence
  Description of Artificial Sequence: Synthetic oligonucleotide
  Antisense strand to SEQ ID NO: 2325014
agaugccuccgaaacucug

SEQ ID NO: 2325016 - RNA, 19 nt, Artificial Sequence
  Description of Artificial Sequence: Synthetic oligonucleotide
  Sense strand starting at position 1035 of SEQ ID NO: 1885214
gggugaugaccauggcucu

SEQ ID NO: 2325017 - RNA, 19 nt, Artificial Sequence
  Description of Artificial Sequence: Synthetic oligonucleotide
  Antisense strand to SEQ ID NO: 2325016
agagccauggucaucaccc

SEQ ID NO: 2325018 - RNA, 19 nt, Artificial Sequence
  Description of Artificial Sequence: Synthetic oligonucleotide
  Sense strand starting at position 1151 of SEQ ID NO: 1885214
ucccguuuccauggagaug

SEQ ID NO: 2325019 - RNA, 19 nt, Artificial Sequence
  Description of Artificial Sequence: Synthetic oligonucleotide
  Antisense strand to SEQ ID NO: 2325018
caucuccauggaaacggga

SEQ ID NO: 2325020 - RNA, 19 nt, Artificial Sequence
  Description of Artificial Sequence: Synthetic oligonucleotide
  Sense strand starting at position 1152 of SEQ ID NO: 1885214
cccguuuccauggagaugu

SEQ ID NO: 2325021 - RNA, 19 nt, Artificial Sequence
  Description of Artificial Sequence: Synthetic oligonucleotide
  Antisense strand to SEQ ID NO: 2325020
acaucuccauggaaacggg

SEQ ID NO: 2325022 - RNA, 19 nt, Artificial Sequence
  Description of Artificial Sequence: Synthetic oligonucleotide
  Sense strand starting at position 1156 of SEQ ID NO: 1885214
uuuccauggagaugugauu

SEQ ID NO: 2325023 - RNA, 19 nt, Artificial Sequence
  Description of Artificial Sequence: Synthetic oligonucleotide
  Antisense strand to SEQ ID NO: 2325022
aaucacaucuccauggaaa

SEQ ID NO: 2325024 - RNA, 19 nt, Artificial Sequence
  Description of Artificial Sequence: Synthetic oligonucleotide
  Sense strand starting at position 1367 of SEQ ID NO: 1885214
acucguaucccugaccagu

SEQ ID NO: 2325025 - RNA, 19 nt, Artificial Sequence
  Description of Artificial Sequence: Synthetic oligonucleotide
  Antisense strand to SEQ ID NO: 2325024
acuggucagggauacgagu

SEQ ID NO: 2325026 - RNA, 19 nt, Artificial Sequence
  Description of Artificial Sequence: Synthetic oligonucleotide
  Sense strand starting at position 1445 of SEQ ID NO: 1885214
ucgugucccugaccaguaa

SEQ ID NO: 2325027 - RNA, 19 nt, Artificial Sequence
  Description of Artificial Sequence: Synthetic oligonucleotide
  Antisense strand to SEQ ID NO: 2325026
uuacuggucagggacacga

SEQ ID NO: 2325028 - RNA, 19 nt, Artificial Sequence
  Description of Artificial Sequence: Synthetic oligonucleotide
  Sense strand starting at position 1635 of SEQ ID NO: 1885214
cggcuucugucuguggaca

SEQ ID NO: 2325029 - RNA, 19 nt, Artificial Sequence
  Description of Artificial Sequence: Synthetic oligonucleotide
  Antisense strand to SEQ ID NO: 2325028
uguccacagacagaagccg

SEQ ID NO: 2325030 - RNA, 19 nt, Artificial Sequence
  Description of Artificial Sequence: Synthetic oligonucleotide
  Sense strand starting at position 1710 of SEQ ID NO: 1885214
cccugagcacuguguguua

SEQ ID NO: 2325031 - RNA, 19 nt, Artificial Sequence
  Description of Artificial Sequence: Synthetic oligonucleotide
  Antisense strand to SEQ ID NO: 2325030
uaacacacagugcucaggg

SEQ ID NO: 2325032 - RNA, 19 nt, Artificial Sequence
  Description of Artificial Sequence: Synthetic oligonucleotide
  Sense strand starting at position 1712 of SEQ ID NO: 1885214
cugagcacuguguguuaca

SEQ ID NO: 2325033 - RNA, 19 nt, Artificial Sequence
  Description of Artificial Sequence: Synthetic oligonucleotide
  Antisense strand to SEQ ID NO: 2325032
uguaacacacagugcucag

SEQ ID NO: 2325034 - RNA, 19 nt, Artificial Sequence
  Description of Artificial Sequence: Synthetic oligonucleotide
  Sense strand starting at position 1721 of SEQ ID NO: 1885214
guguguuacagccucagca

SEQ ID NO: 2325035 - RNA, 19 nt, Artificial Sequence
  Description of Artificial Sequence: Synthetic oligonucleotide
  Antisense strand to SEQ ID NO: 2325034
ugcugaggcuguaacacac

SEQ ID NO: 2325036 - RNA, 19 nt, Artificial Sequence
  Description of Artificial Sequence: Synthetic oligonucleotide
  Sense strand starting at position 1835 of SEQ ID NO: 1885214
gauggaccacuguaguauu

SEQ ID NO: 2325037 - RNA, 19 nt, Artificial Sequence
  Description of Artificial Sequence: Synthetic oligonucleotide
  Antisense strand to SEQ ID NO: 2325036
aauacuacagugguccauc

SEQ ID NO: 2325038 - RNA, 19 nt, Artificial Sequence
  Description of Artificial Sequence: Synthetic oligonucleotide
  Sense strand starting at position 1900 of SEQ ID NO: 1885214
agagguuuaacgggacuua

SEQ ID NO: 2325039 - RNA, 19 nt, Artificial Sequence
  Description of Artificial Sequence: Synthetic oligonucleotide
  Antisense strand to SEQ ID NO: 2325038
uaagucccguuaaaccucu

SEQ ID NO: 2325040 - RNA, 19 nt, Artificial Sequence
  Description of Artificial Sequence: Synthetic oligonucleotide
  Sense strand starting at position 2014 of SEQ ID NO: 1885214
agcggaaauccugaucaac

SEQ ID NO: 2325041 - RNA, 19 nt, Artificial Sequence
  Description of Artificial Sequence: Synthetic oligonucleotide
  Antisense strand to SEQ ID NO: 2325040
guugaucaggauuuccgcu

SEQ ID NO: 2325042 - RNA, 19 nt, Artificial Sequence
  Description of Artificial Sequence: Synthetic oligonucleotide
  Sense strand starting at position 2016 of SEQ ID NO: 1885214
cggaaauccugaucaacca

SEQ ID NO: 2325043 - RNA, 19 nt, Artificial Sequence
  Description of Artificial Sequence: Synthetic oligonucleotide
  Antisense strand to SEQ ID NO: 2325042
ugguugaucaggauuuccg

SEQ ID NO: 2325044 - RNA, 19 nt, Artificial Sequence
  Description of Artificial Sequence: Synthetic oligonucleotide
  Sense strand starting at position 2420 of SEQ ID NO: 1885214
ucaguaguugccucugcuu

SEQ ID NO: 2325045 - RNA, 19 nt, Artificial Sequence
  Description of Artificial Sequence: Synthetic oligonucleotide
  Antisense strand to SEQ ID NO: 2325044
aagcagaggcaacuacuga

SEQ ID NO: 2325046 - RNA, 19 nt, Artificial Sequence
  Description of Artificial Sequence: Synthetic oligonucleotide
  Sense strand starting at position 2452 of SEQ ID NO: 1885214
agcagugcugcugugugaa

SEQ ID NO: 2325047 - RNA, 19 nt, Artificial Sequence
  Description of Artificial Sequence: Synthetic oligonucleotide
  Antisense strand to SEQ ID NO: 2325046
uucacacagcagcacugcu

SEQ ID NO: 2325048 - RNA, 19 nt, Artificial Sequence
  Description of Artificial Sequence: Synthetic oligonucleotide
  Sense strand starting at position 2454 of SEQ ID NO: 1885214
cagugcugcugugugaaau

SEQ ID NO: 2325049 - RNA, 19 nt, Artificial Sequence
  Description of Artificial Sequence: Synthetic oligonucleotide
  Antisense strand to SEQ ID NO: 2325048
auuucacacagcagcacug

SEQ ID NO: 2325050 - RNA, 19 nt, Artificial Sequence
  Description of Artificial Sequence: Synthetic oligonucleotide
  Sense strand starting at position 2460 of SEQ ID NO: 1885214
ugcugugugaaauguagaa

SEQ ID NO: 2325051 - RNA, 19 nt, Artificial Sequence
  Description of Artificial Sequence: Synthetic oligonucleotide
  Antisense strand to SEQ ID NO: 2325050
uucuacauuucacacagca

SEQ ID NO: 2325052 - RNA, 19 nt, Artificial Sequence
  Description of Artificial Sequence: Synthetic oligonucleotide
  Sense strand starting at position 2462 of SEQ ID NO: 1885214
cugugugaaauguagaaac

SEQ ID NO: 2325053 - RNA, 19 nt, Artificial Sequence
  Description of Artificial Sequence: Synthetic oligonucleotide
  Antisense strand to SEQ ID NO: 2325052
guuucuacauuucacacag

SEQ ID NO: 2325054 - RNA, 19 nt, Artificial Sequence
  Description of Artificial Sequence: Synthetic oligonucleotide
  Sense strand starting at position 2488 of SEQ ID NO: 1885214
ggaggagacucccuguaac

SEQ ID NO: 2325055 - RNA, 19 nt, Artificial Sequence
  Description of Artificial Sequence: Synthetic oligonucleotide
  Antisense strand to SEQ ID NO: 2325054
guuacagggagucuccucc

SEQ ID NO: 2325056 - RNA, 19 nt, Artificial Sequence
  Description of Artificial Sequence: Synthetic oligonucleotide
  Sense strand starting at position 2901 of SEQ ID NO: 1885214
gguucaucagaccgugacu

SEQ ID NO: 2325057 - RNA, 19 nt, Artificial Sequence
  Description of Artificial Sequence: Synthetic oligonucleotide
  Antisense strand to SEQ ID NO: 2325056
agucacggucugaugaacc

SEQ ID NO: 2325058 - RNA, 19 nt, Artificial Sequence
  Description of Artificial Sequence: Synthetic oligonucleotide
  Sense strand starting at position 2947 of SEQ ID NO: 1885214
acaggauccguccacauga

SEQ ID NO: 2325059 - RNA, 19 nt, Artificial Sequence
  Description of Artificial Sequence: Synthetic oligonucleotide
  Antisense strand to SEQ ID NO: 2325058
ucauguggacggauccugu

SEQ ID NO: 2325060 - RNA, 19 nt, Artificial Sequence
  Description of Artificial Sequence: Synthetic oligonucleotide
  Sense strand starting at position 3074 of SEQ ID NO: 1885214
cacgaaccuugagucaaau

SEQ ID NO: 2325061 - RNA, 19 nt, Artificial Sequence
  Description of Artificial Sequence: Synthetic oligonucleotide
  Antisense strand to SEQ ID NO: 2325060
auuugacucaagguucgug

SEQ ID NO: 2325062 - RNA, 19 nt, Artificial Sequence
  Description of Artificial Sequence: Synthetic oligonucleotide
  Sense strand starting at position 3100 of SEQ ID NO: 1885214
auucuuuguggcugggaua

SEQ ID NO: 2325063 - RNA, 19 nt, Artificial Sequence
  Description of Artificial Sequence: Synthetic oligonucleotide
  Antisense strand to SEQ ID NO: 2325062
uaucccagccacaaagaau

SEQ ID NO: 2325064 - RNA, 19 nt, Artificial Sequence
  Description of Artificial Sequence: Synthetic oligonucleotide
  Sense strand starting at position 3101 of SEQ ID NO: 1885214
uucuuuguggcugggauaa

SEQ ID NO: 2325065 - RNA, 19 nt, Artificial Sequence
  Description of Artificial Sequence: Synthetic oligonucleotide
  Antisense strand to SEQ ID NO: 2325064
uuaucccagccacaaagaa

SEQ ID NO: 2325066 - RNA, 19 nt, Artificial Sequence
  Description of Artificial Sequence: Synthetic oligonucleotide
  Sense strand starting at position 3150 of SEQ ID NO: 1885214
aacuguugaccuuggaguu

SEQ ID NO: 2325067 - RNA, 19 nt, Artificial Sequence
  Description of Artificial Sequence: Synthetic oligonucleotide
  Antisense strand to SEQ ID NO: 2325066
aacuccaaggucaacaguu

SEQ ID NO: 2325068 - RNA, 19 nt, Artificial Sequence
  Description of Artificial Sequence: Synthetic oligonucleotide
  Sense strand starting at position 3156 of SEQ ID NO: 1885214
ugaccuuggaguugaauau

SEQ ID NO: 2325069 - RNA, 19 nt, Artificial Sequence
  Description of Artificial Sequence: Synthetic oligonucleotide
  Antisense strand to SEQ ID NO: 2325068
auauucaacuccaagguca

SEQ ID NO: 2325070 - RNA, 19 nt, Artificial Sequence
  Description of Artificial Sequence: Synthetic oligonucleotide
  Sense strand starting at position 3210 of SEQ ID NO: 1885214
gucgggaaagaucgauguu

SEQ ID NO: 2325071 - RNA, 19 nt, Artificial Sequence
  Description of Artificial Sequence: Synthetic oligonucleotide
  Antisense strand to SEQ ID NO: 2325070
aacaucgaucuuucccgac

SEQ ID NO: 2325072 - RNA, 19 nt, Artificial Sequence
  Description of Artificial Sequence: Synthetic oligonucleotide
  Sense strand starting at position 3213 of SEQ ID NO: 1885214
gggaaagaucgauguugug

SEQ ID NO: 2325073 - RNA, 19 nt, Artificial Sequence
  Description of Artificial Sequence: Synthetic oligonucleotide
  Antisense strand to SEQ ID NO: 2325072
cacaacaucgaucuuuccc

SEQ ID NO: 2325074 - RNA, 19 nt, Artificial Sequence
  Description of Artificial Sequence: Synthetic oligonucleotide
  Sense strand starting at position 3323 of SEQ ID NO: 1885214
ggguuauuccugugacuuu

SEQ ID NO: 2325075 - RNA, 19 nt, Artificial Sequence
  Description of Artificial Sequence: Synthetic oligonucleotide
  Antisense strand to SEQ ID NO: 2325074
aaagucacaggaauaaccc

SEQ ID NO: 2325076 - RNA, 19 nt, Artificial Sequence
  Description of Artificial Sequence: Synthetic oligonucleotide
  Sense strand starting at position 3333 of SEQ ID NO: 1885214
ugugacuuugcuggccaga

SEQ ID NO: 2325077 - RNA, 19 nt, Artificial Sequence
  Description of Artificial Sequence: Synthetic oligonucleotide
  Antisense strand to SEQ ID NO: 2325076
ucuggccagcaaagucaca

SEQ ID NO: 2325078 - RNA, 19 nt, Artificial Sequence
  Description of Artificial Sequence: Synthetic oligonucleotide
  Sense strand starting at position 3525 of SEQ ID NO: 1885214
uagagccuucccugaggua

SEQ ID NO: 2325079 - RNA, 19 nt, Artificial Sequence
  Description of Artificial Sequence: Synthetic oligonucleotide
  Antisense strand to SEQ ID NO: 2325078
uaccucagggaaggcucua

SEQ ID NO: 2325080 - RNA, 19 nt, Artificial Sequence
  Description of Artificial Sequence: Synthetic oligonucleotide
  Sense strand starting at position 3526 of SEQ ID NO: 1885214
agagccuucccugagguaa

SEQ ID NO: 2325081 - RNA, 19 nt, Artificial Sequence
  Description of Artificial Sequence: Synthetic oligonucleotide
  Antisense strand to SEQ ID NO: 2325080
uuaccucagggaaggcucu

SEQ ID NO: 2325082 - RNA, 19 nt, Artificial Sequence
  Description of Artificial Sequence: Synthetic oligonucleotide
  Sense strand starting at position 3563 of SEQ ID NO: 1885214
ucgggaaauccguggcaca

SEQ ID NO: 2325083 - RNA, 19 nt, Artificial Sequence
  Description of Artificial Sequence: Synthetic oligonucleotide
  Antisense strand to SEQ ID NO: 2325082
ugugccacggauuucccga

SEQ ID NO: 2325084 - RNA, 19 nt, Artificial Sequence
  Description of Artificial Sequence: Synthetic oligonucleotide
  Sense strand starting at position 1303 of SEQ ID NO: 1885215
ggaucuaagcguugagccu

SEQ ID NO: 2325085 - RNA, 19 nt, Artificial Sequence
  Description of Artificial Sequence: Synthetic oligonucleotide
  Antisense strand to SEQ ID NO: 2325084
aggcucaacgcuuagaucc

SEQ ID NO: 2325086 - RNA, 19 nt, Artificial Sequence
  Description of Artificial Sequence: Synthetic oligonucleotide
  Sense strand starting at position 1535 of SEQ ID NO: 1885215
ugccuaugacuuugcgaaa

SEQ ID NO: 2325087 - RNA, 19 nt, Artificial Sequence
  Description of Artificial Sequence: Synthetic oligonucleotide
  Antisense strand to SEQ ID NO: 2325086
uuucgcaaagucauaggca

SEQ ID NO: 2325088 - RNA, 19 nt, Artificial Sequence
  Description of Artificial Sequence: Synthetic oligonucleotide
  Sense strand starting at position 1536 of SEQ ID NO: 1885215
gccuaugacuuugcgaaau

SEQ ID NO: 2325089 - RNA, 19 nt, Artificial Sequence
  Description of Artificial Sequence: Synthetic oligonucleotide
  Antisense strand to SEQ ID NO: 2325088
auuucgcaaagucauaggc

SEQ ID NO: 2325090 - RNA, 19 nt, Artificial Sequence
  Description of Artificial Sequence: Synthetic oligonucleotide
  Sense strand starting at position 1538 of SEQ ID NO: 1885215
cuaugacuuugcgaaauau

SEQ ID NO: 2325091 - RNA, 19 nt, Artificial Sequence
  Description of Artificial Sequence: Synthetic oligonucleotide
  Antisense strand to SEQ ID NO: 2325090
auauuucgcaaagucauag

SEQ ID NO: 2325092 - RNA, 19 nt, Artificial Sequence
  Description of Artificial Sequence: Synthetic oligonucleotide
  Sense strand starting at position 1547 of SEQ ID NO: 1885215
ugcgaaauauuccaagaca

SEQ ID NO: 2325093 - RNA, 19 nt, Artificial Sequence
  Description of Artificial Sequence: Synthetic oligonucleotide
  Antisense strand to SEQ ID NO: 2325092
ugucuuggaauauuucgca

SEQ ID NO: 2325094 - RNA, 19 nt, Artificial Sequence
  Description of Artificial Sequence: Synthetic oligonucleotide
  Sense strand starting at position 1570 of SEQ ID NO: 1885215
ccagaaagucuuggucucu

SEQ ID NO: 2325095 - RNA, 19 nt, Artificial Sequence
  Description of Artificial Sequence: Synthetic oligonucleotide
  Antisense strand to SEQ ID NO: 2325094
agagaccaagacuuucugg

SEQ ID NO: 2325096 - RNA, 19 nt, Artificial Sequence
  Description of Artificial Sequence: Synthetic oligonucleotide
  Sense strand starting at position 1575 of SEQ ID NO: 1885215
aagucuuggucucugaaga

SEQ ID NO: 2325097 - RNA, 19 nt, Artificial Sequence
  Description of Artificial Sequence: Synthetic oligonucleotide
  Antisense strand to SEQ ID NO: 2325096
ucuucagagaccaagacuu

SEQ ID NO: 2325098 - RNA, 19 nt, Artificial Sequence
  Description of Artificial Sequence: Synthetic oligonucleotide
  Sense strand starting at position 1576 of SEQ ID NO: 1885215
agucuuggucucugaagac

SEQ ID NO: 2325099 - RNA, 19 nt, Artificial Sequence
  Description of Artificial Sequence: Synthetic oligonucleotide
  Antisense strand to SEQ ID NO: 2325098
gucuucagagaccaagacu

SEQ ID NO: 2325100 - RNA, 19 nt, Artificial Sequence
  Description of Artificial Sequence: Synthetic oligonucleotide
  Sense strand starting at position 1616 of SEQ ID NO: 1885215
uuaaauaucuacugggaaa

SEQ ID NO: 2325101 - RNA, 19 nt, Artificial Sequence
  Description of Artificial Sequence: Synthetic oligonucleotide
  Antisense strand to SEQ ID NO: 2325100
uuucccaguagauauuuaa

SEQ ID NO: 2325102 - RNA, 19 nt, Artificial Sequence
  Description of Artificial Sequence: Synthetic oligonucleotide
  Sense strand starting at position 1679 of SEQ ID NO: 1885215
aaaggaaaccgucgcauuu

SEQ ID NO: 2325103 - RNA, 19 nt, Artificial Sequence
  Description of Artificial Sequence: Synthetic oligonucleotide
  Antisense strand to SEQ ID NO: 2325102
aaaugcgacgguuuccuuu

SEQ ID NO: 2325104 - RNA, 19 nt, Artificial Sequence
  Description of Artificial Sequence: Synthetic oligonucleotide
  Sense strand starting at position 1721 of SEQ ID NO: 1885215
uggaucugaccucagugua

SEQ ID NO: 2325105 - RNA, 19 nt, Artificial Sequence
  Description of Artificial Sequence: Synthetic oligonucleotide
  Antisense strand to SEQ ID NO: 2325104
uacacugaggucagaucca

SEQ ID NO: 2325106 - RNA, 19 nt, Artificial Sequence
  Description of Artificial Sequence: Synthetic oligonucleotide
  Sense strand starting at position 2572 of SEQ ID NO: 1885215
cgcgggagguguucgagaa

SEQ ID NO: 2325107 - RNA, 19 nt, Artificial Sequence
  Description of Artificial Sequence: Synthetic oligonucleotide
  Antisense strand to SEQ ID NO: 2325106
uucucgaacaccucccgcg

SEQ ID NO: 2325108 - RNA, 19 nt, Artificial Sequence
  Description of Artificial Sequence: Synthetic oligonucleotide
  Sense strand starting at position 2573 of SEQ ID NO: 1885215
gcgggagguguucgagaac

SEQ ID NO: 2325109 - RNA, 19 nt, Artificial Sequence
  Description of Artificial Sequence: Synthetic oligonucleotide
  Antisense strand to SEQ ID NO: 2325108
guucucgaacaccucccgc

SEQ ID NO: 2325110 - RNA, 19 nt, Artificial Sequence
  Description of Artificial Sequence: Synthetic oligonucleotide
  Sense strand starting at position 2576 of SEQ ID NO: 1885215
ggagguguucgagaacgac

SEQ ID NO: 2325111 - RNA, 19 nt, Artificial Sequence
  Description of Artificial Sequence: Synthetic oligonucleotide
  Antisense strand to SEQ ID NO: 2325110
gucguucucgaacaccucc

SEQ ID NO: 2325112 - RNA, 19 nt, Artificial Sequence
  Description of Artificial Sequence: Synthetic oligonucleotide
  Sense strand starting at position 2819 of SEQ ID NO: 1885215
ggaaacgcucgcugucaga

SEQ ID NO: 2325113 - RNA, 19 nt, Artificial Sequence
  Description of Artificial Sequence: Synthetic oligonucleotide
  Antisense strand to SEQ ID NO: 2325112
ucugacagcgagcguuucc

SEQ ID NO: 2325114 - RNA, 19 nt, Artificial Sequence
  Description of Artificial Sequence: Synthetic oligonucleotide
  Sense strand starting at position 2858 of SEQ ID NO: 1885215
gggaguccguuuccaaagu

SEQ ID NO: 2325115 - RNA, 19 nt, Artificial Sequence
  Description of Artificial Sequence: Synthetic oligonucleotide
  Antisense strand to SEQ ID NO: 2325114
acuuuggaaacggacuccc

SEQ ID NO: 2325116 - RNA, 19 nt, Artificial Sequence
  Description of Artificial Sequence: Synthetic oligonucleotide
  Sense strand starting at position 2961 of SEQ ID NO: 1885215
gcgccucguccuccugaga

SEQ ID NO: 2325117 - RNA, 19 nt, Artificial Sequence
  Description of Artificial Sequence: Synthetic oligonucleotide
  Antisense strand to SEQ ID NO: 2325116
ucucaggaggacgaggcgc

SEQ ID NO: 2325118 - RNA, 19 nt, Artificial Sequence
  Description of Artificial Sequence: Synthetic oligonucleotide
  Sense strand starting at position 3180 of SEQ ID NO: 1885215
cggcaccucgguuaggaau

SEQ ID NO: 2325119 - RNA, 19 nt, Artificial Sequence
  Description of Artificial Sequence: Synthetic oligonucleotide
  Antisense strand to SEQ ID NO: 2325118
auuccuaaccgaggugccg

SEQ ID NO: 2325120 - RNA, 19 nt, Artificial Sequence
  Description of Artificial Sequence: Synthetic oligonucleotide
  Sense strand starting at position 3191 of SEQ ID NO: 1885215
uuaggaauguccuuggaga

SEQ ID NO: 2325121 - RNA, 19 nt, Artificial Sequence
  Description of Artificial Sequence: Synthetic oligonucleotide
  Antisense strand to SEQ ID NO: 2325120
ucuccaaggacauuccuaa

SEQ ID NO: 2325122 - RNA, 19 nt, Artificial Sequence
  Description of Artificial Sequence: Synthetic oligonucleotide
  Sense strand starting at position 3317 of SEQ ID NO: 1885215
uguggauucccguugacgu

SEQ ID NO: 2325123 - RNA, 19 nt, Artificial Sequence
  Description of Artificial Sequence: Synthetic oligonucleotide
  Antisense strand to SEQ ID NO: 2325122
acgucaacgggaauccaca

SEQ ID NO: 2325124 - RNA, 19 nt, Artificial Sequence
  Description of Artificial Sequence: Synthetic oligonucleotide
  Sense strand starting at position 3344 of SEQ ID NO: 1885215
cccugaagucagggugauu

SEQ ID NO: 2325125 - RNA, 19 nt, Artificial Sequence
  Description of Artificial Sequence: Synthetic oligonucleotide
  Antisense strand to SEQ ID NO: 2325124
aaucacccugacuucaggg

SEQ ID NO: 2325126 - RNA, 19 nt, Artificial Sequence
  Description of Artificial Sequence: Synthetic oligonucleotide
  Sense strand starting at position 3357 of SEQ ID NO: 1885215
gugauuucauagcgaaguu

SEQ ID NO: 2325127 - RNA, 19 nt, Artificial Sequence
  Description of Artificial Sequence: Synthetic oligonucleotide
  Antisense strand to SEQ ID NO: 2325126
aacuucgcuaugaaaucac

SEQ ID NO: 2325128 - RNA, 19 nt, Artificial Sequence
  Description of Artificial Sequence: Synthetic oligonucleotide
  Sense strand starting at position 3377 of SEQ ID NO: 1885215
uccguucugcuggaauguu

SEQ ID NO: 2325129 - RNA, 19 nt, Artificial Sequence
  Description of Artificial Sequence: Synthetic oligonucleotide
  Antisense strand to SEQ ID NO: 2325128
aacauuccagcagaacgga

SEQ ID NO: 2325130 - RNA, 19 nt, Artificial Sequence
  Description of Artificial Sequence: Synthetic oligonucleotide
  Sense strand starting at position 3421 of SEQ ID NO: 1885215
gaauaaaugucacccggga

SEQ ID NO: 2325131 - RNA, 19 nt, Artificial Sequence
  Description of Artificial Sequence: Synthetic oligonucleotide
  Antisense strand to SEQ ID NO: 2325130
ucccgggugacauuuauuc

SEQ ID NO: 2325132 - RNA, 19 nt, Artificial Sequence
  Description of Artificial Sequence: Synthetic oligonucleotide
  Sense strand starting at position 3423 of SEQ ID NO: 1885215
auaaaugucacccgggaug

SEQ ID NO: 2325133 - RNA, 19 nt, Artificial Sequence
  Description of Artificial Sequence: Synthetic oligonucleotide
  Antisense strand to SEQ ID NO: 2325132
caucccgggugacauuuau

SEQ ID NO: 2325134 - RNA, 19 nt, Artificial Sequence
  Description of Artificial Sequence: Synthetic oligonucleotide
  Sense strand starting at position 3425 of SEQ ID NO: 1885215
aaaugucacccgggaugaa

SEQ ID NO: 2325135 - RNA, 19 nt, Artificial Sequence
  Description of Artificial Sequence: Synthetic oligonucleotide
  Antisense strand to SEQ ID NO: 2325134
uucaucccgggugacauuu

SEQ ID NO: 2325136 - RNA, 19 nt, Artificial Sequence
  Description of Artificial Sequence: Synthetic oligonucleotide
  Sense strand starting at position 3439 of SEQ ID NO: 1885215
augaaagagugguucugga

SEQ ID NO: 2325137 - RNA, 19 nt, Artificial Sequence
  Description of Artificial Sequence: Synthetic oligonucleotide
  Antisense strand to SEQ ID NO: 2325136
uccagaaccacucuuucau

SEQ ID NO: 2325138 - RNA, 19 nt, Artificial Sequence
  Description of Artificial Sequence: Synthetic oligonucleotide
  Sense strand starting at position 3443 of SEQ ID NO: 1885215
aagagugguucuggaugaa

SEQ ID NO: 2325139 - RNA, 19 nt, Artificial Sequence
  Description of Artificial Sequence: Synthetic oligonucleotide
  Antisense strand to SEQ ID NO: 2325138
uucauccagaaccacucuu

SEQ ID NO: 2325140 - RNA, 19 nt, Artificial Sequence
  Description of Artificial Sequence: Synthetic oligonucleotide
  Sense strand starting at position 3446 of SEQ ID NO: 1885215
agugguucuggaugaacca

SEQ ID NO: 2325141 - RNA, 19 nt, Artificial Sequence
  Description of Artificial Sequence: Synthetic oligonucleotide
  Antisense strand to SEQ ID NO: 2325140
ugguucauccagaaccacu

SEQ ID NO: 2325142 - RNA, 19 nt, Artificial Sequence
  Description of Artificial Sequence: Synthetic oligonucleotide
  Sense strand starting at position 3468 of SEQ ID NO: 1885215
aggccuguuuccgcuuaca

SEQ ID NO: 2325143 - RNA, 19 nt, Artificial Sequence
  Description of Artificial Sequence: Synthetic oligonucleotide
  Antisense strand to SEQ ID NO: 2325142
uguaagcggaaacaggccu

SEQ ID NO: 2325144 - RNA, 19 nt, Artificial Sequence
  Description of Artificial Sequence: Synthetic oligonucleotide
  Sense strand starting at position 3470 of SEQ ID NO: 1885215
gccuguuuccgcuuacauu

SEQ ID NO: 2325145 - RNA, 19 nt, Artificial Sequence
  Description of Artificial Sequence: Synthetic oligonucleotide
  Antisense strand to SEQ ID NO: 2325144
aauguaagcggaaacaggc

SEQ ID NO: 2325146 - RNA, 19 nt, Artificial Sequence
  Description of Artificial Sequence: Synthetic oligonucleotide
  Sense strand starting at position 3471 of SEQ ID NO: 1885215
ccuguuuccgcuuacauuu

SEQ ID NO: 2325147 - RNA, 19 nt, Artificial Sequence
  Description of Artificial Sequence: Synthetic oligonucleotide
  Antisense strand to SEQ ID NO: 2325146
aaauguaagcggaaacagg

SEQ ID NO: 2325148 - RNA, 19 nt, Artificial Sequence
  Description of Artificial Sequence: Synthetic oligonucleotide
  Sense strand starting at position 3482 of SEQ ID NO: 1885215
uuacauuucuagugguuga

SEQ ID NO: 2325149 - RNA, 19 nt, Artificial Sequence
  Description of Artificial Sequence: Synthetic oligonucleotide
  Antisense strand to SEQ ID NO: 2325148
ucaaccacuagaaauguaa

SEQ ID NO: 2325150 - RNA, 19 nt, Artificial Sequence
  Description of Artificial Sequence: Synthetic oligonucleotide
  Sense strand starting at position 3514 of SEQ ID NO: 1885215
agaucugccuuucugaaag

SEQ ID NO: 2325151 - RNA, 19 nt, Artificial Sequence
  Description of Artificial Sequence: Synthetic oligonucleotide
  Antisense strand to SEQ ID NO: 2325150
cuuucagaaaggcagaucu

SEQ ID NO: 2325152 - RNA, 19 nt, Artificial Sequence
  Description of Artificial Sequence: Synthetic oligonucleotide
  Sense strand starting at position 3524 of SEQ ID NO: 1885215
uucugaaagcucugaggcu

SEQ ID NO: 2325153 - RNA, 19 nt, Artificial Sequence
  Description of Artificial Sequence: Synthetic oligonucleotide
  Antisense strand to SEQ ID NO: 2325152
agccucagagcuuucagaa

SEQ ID NO: 2325154 - RNA, 19 nt, Artificial Sequence
  Description of Artificial Sequence: Synthetic oligonucleotide
  Sense strand starting at position 3573 of SEQ ID NO: 1885215
agcucaucccugcagagau

SEQ ID NO: 2325155 - RNA, 19 nt, Artificial Sequence
  Description of Artificial Sequence: Synthetic oligonucleotide
  Antisense strand to SEQ ID NO: 2325154
aucucugcagggaugagcu

SEQ ID NO: 2325156 - RNA, 19 nt, Artificial Sequence
  Description of Artificial Sequence: Synthetic oligonucleotide
  Sense strand starting at position 3805 of SEQ ID NO: 1885215
ggugcaguguccuccaaca

SEQ ID NO: 2325157 - RNA, 19 nt, Artificial Sequence
  Description of Artificial Sequence: Synthetic oligonucleotide
  Antisense strand to SEQ ID NO: 2325156
uguuggaggacacugcacc

SEQ ID NO: 2325158 - RNA, 19 nt, Artificial Sequence
  Description of Artificial Sequence: Synthetic oligonucleotide
  Sense strand starting at position 3825 of SEQ ID NO: 1885215
cguccucacccggaacauu

SEQ ID NO: 2325159 - RNA, 19 nt, Artificial Sequence
  Description of Artificial Sequence: Synthetic oligonucleotide
  Antisense strand to SEQ ID NO: 2325158
aauguuccgggugaggacg

SEQ ID NO: 2325160 - RNA, 19 nt, Artificial Sequence
  Description of Artificial Sequence: Synthetic oligonucleotide
  Sense strand starting at position 3836 of SEQ ID NO: 1885215
ggaacauucugcgugcaca

SEQ ID NO: 2325161 - RNA, 19 nt, Artificial Sequence
  Description of Artificial Sequence: Synthetic oligonucleotide
  Antisense strand to SEQ ID NO: 2325160
ugugcacgcagaauguucc

SEQ ID NO: 2325162 - RNA, 19 nt, Artificial Sequence
  Description of Artificial Sequence: Synthetic oligonucleotide
  Sense strand starting at position 3837 of SEQ ID NO: 1885215
gaacauucugcgugcacag

SEQ ID NO: 2325163 - RNA, 19 nt, Artificial Sequence
  Description of Artificial Sequence: Synthetic oligonucleotide
  Antisense strand to SEQ ID NO: 2325162
cugugcacgcagaauguuc

SEQ ID NO: 2325164 - RNA, 19 nt, Artificial Sequence
  Description of Artificial Sequence: Synthetic oligonucleotide
  Sense strand starting at position 248 of SEQ ID NO: 1885218
agcuauagauuagugauca

SEQ ID NO: 2325165 - RNA, 19 nt, Artificial Sequence
  Description of Artificial Sequence: Synthetic oligonucleotide
  Antisense strand to SEQ ID NO: 2325164
ugaucacuaaucuauagcu

SEQ ID NO: 2325166 - RNA, 19 nt, Artificial Sequence
  Description of Artificial Sequence: Synthetic oligonucleotide
  Sense strand starting at position 417 of SEQ ID NO: 1885218
cagugaccuguuuaagaac

SEQ ID NO: 2325167 - RNA, 19 nt, Artificial Sequence
  Description of Artificial Sequence: Synthetic oligonucleotide
  Antisense strand to SEQ ID NO: 2325166
guucuuaaacaggucacug

SEQ ID NO: 2325168 - RNA, 19 nt, Artificial Sequence
  Description of Artificial Sequence: Synthetic oligonucleotide
  Sense strand starting at position 428 of SEQ ID NO: 1885218
uuaagaaccuguguugaca

SEQ ID NO: 2325169 - RNA, 19 nt, Artificial Sequence
  Description of Artificial Sequence: Synthetic oligonucleotide
  Antisense strand to SEQ ID NO: 2325168
ugucaacacagguucuuaa

SEQ ID NO: 2325170 - RNA, 19 nt, Artificial Sequence
  Description of Artificial Sequence: Synthetic oligonucleotide
  Sense strand starting at position 555 of SEQ ID NO: 1885218
ucucuaaccugagcugaau

SEQ ID NO: 2325171 - RNA, 19 nt, Artificial Sequence
  Description of Artificial Sequence: Synthetic oligonucleotide
  Antisense strand to SEQ ID NO: 2325170
auucagcucagguuagaga

SEQ ID NO: 2325172 - RNA, 19 nt, Artificial Sequence
  Description of Artificial Sequence: Synthetic oligonucleotide
  Sense strand starting at position 564 of SEQ ID NO: 1885218
ugagcugaauacuuaacau

SEQ ID NO: 2325173 - RNA, 19 nt, Artificial Sequence
  Description of Artificial Sequence: Synthetic oligonucleotide
  Antisense strand to SEQ ID NO: 2325172
auguuaaguauucagcuca

SEQ ID NO: 2325174 - RNA, 19 nt, Artificial Sequence
  Description of Artificial Sequence: Synthetic oligonucleotide
  Sense strand starting at position 1080 of SEQ ID NO: 1885218
gacaaauguggucaugguc

SEQ ID NO: 2325175 - RNA, 19 nt, Artificial Sequence
  Description of Artificial Sequence: Synthetic oligonucleotide
  Antisense strand to SEQ ID NO: 2325174
gaccaugaccacauuuguc

SEQ ID NO: 2325176 - RNA, 19 nt, Artificial Sequence
  Description of Artificial Sequence: Synthetic oligonucleotide
  Sense strand starting at position 1086 of SEQ ID NO: 1885218
uguggucauggucauagaa

SEQ ID NO: 2325177 - RNA, 19 nt, Artificial Sequence
  Description of Artificial Sequence: Synthetic oligonucleotide
  Antisense strand to SEQ ID NO: 2325176
uucuaugaccaugaccaca

SEQ ID NO: 2325178 - RNA, 19 nt, Artificial Sequence
  Description of Artificial Sequence: Synthetic oligonucleotide
  Sense strand starting at position 1181 of SEQ ID NO: 1885218
gugcaaaggguguguauuu

SEQ ID NO: 2325179 - RNA, 19 nt, Artificial Sequence
  Description of Artificial Sequence: Synthetic oligonucleotide
  Antisense strand to SEQ ID NO: 2325178
aaauacacacccuuugcac

SEQ ID NO: 2325180 - RNA, 19 nt, Artificial Sequence
  Description of Artificial Sequence: Synthetic oligonucleotide
  Sense strand starting at position 1327 of SEQ ID NO: 1885218
ccugauuuguggcaauuuc

SEQ ID NO: 2325181 - RNA, 19 nt, Artificial Sequence
  Description of Artificial Sequence: Synthetic oligonucleotide
  Antisense strand to SEQ ID NO: 2325180
gaaauugccacaaaucagg

SEQ ID NO: 2325182 - RNA, 19 nt, Artificial Sequence
  Description of Artificial Sequence: Synthetic oligonucleotide
  Sense strand starting at position 1343 of SEQ ID NO: 1885218
uuccuuucuggauaucuga

SEQ ID NO: 2325183 - RNA, 19 nt, Artificial Sequence
  Description of Artificial Sequence: Synthetic oligonucleotide
  Antisense strand to SEQ ID NO: 2325182
ucagauauccagaaaggaa

SEQ ID NO: 2325184 - RNA, 19 nt, Artificial Sequence
  Description of Artificial Sequence: Synthetic oligonucleotide
  Sense strand starting at position 1375 of SEQ ID NO: 1885218
ucuguauaucuauagcaca

SEQ ID NO: 2325185 - RNA, 19 nt, Artificial Sequence
  Description of Artificial Sequence: Synthetic oligonucleotide
  Antisense strand to SEQ ID NO: 2325184
ugugcuauagauauacaga

SEQ ID NO: 2325186 - RNA, 19 nt, Artificial Sequence
  Description of Artificial Sequence: Synthetic oligonucleotide
  Sense strand starting at position 1393 of SEQ ID NO: 1885218
acucuaucuccagaguacu

SEQ ID NO: 2325187 - RNA, 19 nt, Artificial Sequence
  Description of Artificial Sequence: Synthetic oligonucleotide
  Antisense strand to SEQ ID NO: 2325186
aguacucuggagauagagu

SEQ ID NO: 2325188 - RNA, 19 nt, Artificial Sequence
  Description of Artificial Sequence: Synthetic oligonucleotide
  Sense strand starting at position 1401 of SEQ ID NO: 1885218
uccagaguacuguggagau

SEQ ID NO: 2325189 - RNA, 19 nt, Artificial Sequence
  Description of Artificial Sequence: Synthetic oligonucleotide
  Antisense strand to SEQ ID NO: 2325188
aucuccacaguacucugga

SEQ ID NO: 2325190 - RNA, 19 nt, Artificial Sequence
  Description of Artificial Sequence: Synthetic oligonucleotide
  Sense strand starting at position 1442 of SEQ ID NO: 1885218
guaagaauccagcaaaggu

SEQ ID NO: 2325191 - RNA, 19 nt, Artificial Sequence
  Description of Artificial Sequence: Synthetic oligonucleotide
  Antisense strand to SEQ ID NO: 2325190
accuuugcuggauucuuac

SEQ ID NO: 2325192 - RNA, 19 nt, Artificial Sequence
  Description of Artificial Sequence: Synthetic oligonucleotide
  Sense strand starting at position 1451 of SEQ ID NO: 1885218
cagcaaaggucacuggaua

SEQ ID NO: 2325193 - RNA, 19 nt, Artificial Sequence
  Description of Artificial Sequence: Synthetic oligonucleotide
  Antisense strand to SEQ ID NO: 2325192
uauccagugaccuuugcug

SEQ ID NO: 2325194 - RNA, 19 nt, Artificial Sequence
  Description of Artificial Sequence: Synthetic oligonucleotide
  Sense strand starting at position 1572 of SEQ ID NO: 1885218
cuagucuuacaguaucuau

SEQ ID NO: 2325195 - RNA, 19 nt, Artificial Sequence
  Description of Artificial Sequence: Synthetic oligonucleotide
  Antisense strand to SEQ ID NO: 2325194
auagauacuguaagacuag

SEQ ID NO: 2325196 - RNA, 19 nt, Artificial Sequence
  Description of Artificial Sequence: Synthetic oligonucleotide
  Sense strand starting at position 1586 of SEQ ID NO: 1885218
ucuauaugaugucccagaa

SEQ ID NO: 2325197 - RNA, 19 nt, Artificial Sequence
  Description of Artificial Sequence: Synthetic oligonucleotide
  Antisense strand to SEQ ID NO: 2325196
uucugggacaucauauaga

SEQ ID NO: 2325198 - RNA, 19 nt, Artificial Sequence
  Description of Artificial Sequence: Synthetic oligonucleotide
  Sense strand starting at position 1728 of SEQ ID NO: 1885218
ggauuaagggaugagcgua

SEQ ID NO: 2325199 - RNA, 19 nt, Artificial Sequence
  Description of Artificial Sequence: Synthetic oligonucleotide
  Antisense strand to SEQ ID NO: 2325198
uacgcucaucccuuaaucc

SEQ ID NO: 2325200 - RNA, 19 nt, Artificial Sequence
  Description of Artificial Sequence: Synthetic oligonucleotide
  Sense strand starting at position 1733 of SEQ ID NO: 1885218
aagggaugagcguauccua

SEQ ID NO: 2325201 - RNA, 19 nt, Artificial Sequence
  Description of Artificial Sequence: Synthetic oligonucleotide
  Antisense strand to SEQ ID NO: 2325200
uaggauacgcucaucccuu

SEQ ID NO: 2325202 - RNA, 19 nt, Artificial Sequence
  Description of Artificial Sequence: Synthetic oligonucleotide
  Sense strand starting at position 1742 of SEQ ID NO: 1885218
gcguauccuaaugaaauag

SEQ ID NO: 2325203 - RNA, 19 nt, Artificial Sequence
  Description of Artificial Sequence: Synthetic oligonucleotide
  Antisense strand to SEQ ID NO: 2325202
cuauuucauuaggauacgc

SEQ ID NO: 2325204 - RNA, 19 nt, Artificial Sequence
  Description of Artificial Sequence: Synthetic oligonucleotide
  Sense strand starting at position 1844 of SEQ ID NO: 1885218
auuauugcaggcuaaauga

SEQ ID NO: 2325205 - RNA, 19 nt, Artificial Sequence
  Description of Artificial Sequence: Synthetic oligonucleotide
  Antisense strand to SEQ ID NO: 2325204
ucauuuagccugcaauaau

SEQ ID NO: 2325206 - RNA, 19 nt, Artificial Sequence
  Description of Artificial Sequence: Synthetic oligonucleotide
  Sense strand starting at position 2036 of SEQ ID NO: 1885218
guguaagugauagacuaga

SEQ ID NO: 2325207 - RNA, 19 nt, Artificial Sequence
  Description of Artificial Sequence: Synthetic oligonucleotide
  Antisense strand to SEQ ID NO: 2325206
ucuagucuaucacuuacac

SEQ ID NO: 2325208 - RNA, 19 nt, Artificial Sequence
  Description of Artificial Sequence: Synthetic oligonucleotide
  Sense strand starting at position 2116 of SEQ ID NO: 1885218
uccagugugauggauuaag

SEQ ID NO: 2325209 - RNA, 19 nt, Artificial Sequence
  Description of Artificial Sequence: Synthetic oligonucleotide
  Antisense strand to SEQ ID NO: 2325208
cuuaauccaucacacugga

SEQ ID NO: 2325210 - RNA, 19 nt, Artificial Sequence
  Description of Artificial Sequence: Synthetic oligonucleotide
  Sense strand starting at position 2300 of SEQ ID NO: 1885218
aguuaaauuugggaaauag

SEQ ID NO: 2325211 - RNA, 19 nt, Artificial Sequence
  Description of Artificial Sequence: Synthetic oligonucleotide
  Antisense strand to SEQ ID NO: 2325210
cuauuucccaaauuuaacu

SEQ ID NO: 2325212 - RNA, 19 nt, Artificial Sequence
  Description of Artificial Sequence: Synthetic oligonucleotide
  Sense strand starting at position 2344 of SEQ ID NO: 1885218
cuagcugaaucuuugauua

SEQ ID NO: 2325213 - RNA, 19 nt, Artificial Sequence
  Description of Artificial Sequence: Synthetic oligonucleotide
  Antisense strand to SEQ ID NO: 2325212
uaaucaaagauucagcuag

SEQ ID NO: 2325214 - RNA, 19 nt, Artificial Sequence
  Description of Artificial Sequence: Synthetic oligonucleotide
  Sense strand starting at position 2493 of SEQ ID NO: 1885218
ugcauucuuccaggaaauu

SEQ ID NO: 2325215 - RNA, 19 nt, Artificial Sequence
  Description of Artificial Sequence: Synthetic oligonucleotide
  Antisense strand to SEQ ID NO: 2325214
aauuuccuggaagaaugca

SEQ ID NO: 2325216 - RNA, 19 nt, Artificial Sequence
  Description of Artificial Sequence: Synthetic oligonucleotide
  Sense strand starting at position 2607 of SEQ ID NO: 1885218
agugcauguaguuugugua

SEQ ID NO: 2325217 - RNA, 19 nt, Artificial Sequence
  Description of Artificial Sequence: Synthetic oligonucleotide
  Antisense strand to SEQ ID NO: 2325216
uacacaaacuacaugcacu

SEQ ID NO: 2325218 - RNA, 19 nt, Artificial Sequence
  Description of Artificial Sequence: Synthetic oligonucleotide
  Sense strand starting at position 3058 of SEQ ID NO: 1885218
uaggcagguccuuauuaua

SEQ ID NO: 2325219 - RNA, 19 nt, Artificial Sequence
  Description of Artificial Sequence: Synthetic oligonucleotide
  Antisense strand to SEQ ID NO: 2325218
uauaauaaggaccugccua

SEQ ID NO: 2325220 - RNA, 19 nt, Artificial Sequence
  Description of Artificial Sequence: Synthetic oligonucleotide
  Sense strand starting at position 3114 of SEQ ID NO: 1885218
agaacuccagagugugauu

SEQ ID NO: 2325221 - RNA, 19 nt, Artificial Sequence
  Description of Artificial Sequence: Synthetic oligonucleotide
  Antisense strand to SEQ ID NO: 2325220
aaucacacucuggaguucu

SEQ ID NO: 2325222 - RNA, 19 nt, Artificial Sequence
  Description of Artificial Sequence: Synthetic oligonucleotide
  Sense strand starting at position 3121 of SEQ ID NO: 1885218
cagagugugauuggguaau

SEQ ID NO: 2325223 - RNA, 19 nt, Artificial Sequence
  Description of Artificial Sequence: Synthetic oligonucleotide
  Antisense strand to SEQ ID NO: 2325222
auuacccaaucacacucug

SEQ ID NO: 2325224 - RNA, 19 nt, Artificial Sequence
  Description of Artificial Sequence: Synthetic oligonucleotide
  Sense strand starting at position 3132 of SEQ ID NO: 1885218
uggguaauugugcaaagaa

SEQ ID NO: 2325225 - RNA, 19 nt, Artificial Sequence
  Description of Artificial Sequence: Synthetic oligonucleotide
  Antisense strand to SEQ ID NO: 2325224
uucuuugcacaauuaccca

SEQ ID NO: 2325226 - RNA, 19 nt, Artificial Sequence
  Description of Artificial Sequence: Synthetic oligonucleotide
  Sense strand starting at position 3151 of SEQ ID NO: 1885218
aagucagguuguuuaggaa

SEQ ID NO: 2325227 - RNA, 19 nt, Artificial Sequence
  Description of Artificial Sequence: Synthetic oligonucleotide
  Antisense strand to SEQ ID NO: 2325226
uuccuaaacaaccugacuu

SEQ ID NO: 2325228 - RNA, 19 nt, Artificial Sequence
  Description of Artificial Sequence: Synthetic oligonucleotide
  Sense strand starting at position 3171 of SEQ ID NO: 1885218
gucuaaacucaagaauguc

SEQ ID NO: 2325229 - RNA, 19 nt, Artificial Sequence
  Description of Artificial Sequence: Synthetic oligonucleotide
  Antisense strand to SEQ ID NO: 2325228
gacauucuugaguuuagac

SEQ ID NO: 2325230 - RNA, 19 nt, Artificial Sequence
  Description of Artificial Sequence: Synthetic oligonucleotide
  Sense strand starting at position 3256 of SEQ ID NO: 1885218
gaaguuguccuuuagcaaa

SEQ ID NO: 2325231 - RNA, 19 nt, Artificial Sequence
  Description of Artificial Sequence: Synthetic oligonucleotide
  Antisense strand to SEQ ID NO: 2325230
uuugcuaaaggacaacuuc

SEQ ID NO: 2325232 - RNA, 19 nt, Artificial Sequence
  Description of Artificial Sequence: Synthetic oligonucleotide
  Sense strand starting at position 3277 of SEQ ID NO: 1885218
cugugaaaguuaccacuca

SEQ ID NO: 2325233 - RNA, 19 nt, Artificial Sequence
  Description of Artificial Sequence: Synthetic oligonucleotide
  Antisense strand to SEQ ID NO: 2325232
ugagugguaacuuucacag

SEQ ID NO: 2325234 - RNA, 19 nt, Artificial Sequence
  Description of Artificial Sequence: Synthetic oligonucleotide
  Sense strand starting at position 3413 of SEQ ID NO: 1885218
uagacagaaccggguuuaa

SEQ ID NO: 2325235 - RNA, 19 nt, Artificial Sequence
  Description of Artificial Sequence: Synthetic oligonucleotide
  Antisense strand to SEQ ID NO: 2325234
uuaaacccgguucugucua

SEQ ID NO: 2325236 - RNA, 19 nt, Artificial Sequence
  Description of Artificial Sequence: Synthetic oligonucleotide
  Sense strand starting at position 3455 of SEQ ID NO: 1885218
auaauauagccuugaggau

SEQ ID NO: 2325237 - RNA, 19 nt, Artificial Sequence
  Description of Artificial Sequence: Synthetic oligonucleotide
  Antisense strand to SEQ ID NO: 2325236
auccucaaggcuauauuau

SEQ ID NO: 2325238 - RNA, 19 nt, Artificial Sequence
  Description of Artificial Sequence: Synthetic oligonucleotide
  Sense strand starting at position 3542 of SEQ ID NO: 1885218
ucgauauagcuauaugaaa

SEQ ID NO: 2325239 - RNA, 19 nt, Artificial Sequence
  Description of Artificial Sequence: Synthetic oligonucleotide
  Antisense strand to SEQ ID NO: 2325238
uuucauauagcuauaucga

SEQ ID NO: 2325240 - RNA, 19 nt, Artificial Sequence
  Description of Artificial Sequence: Synthetic oligonucleotide
  Sense strand starting at position 3824 of SEQ ID NO: 1885218
uuauuacagccauauuggu

SEQ ID NO: 2325241 - RNA, 19 nt, Artificial Sequence
  Description of Artificial Sequence: Synthetic oligonucleotide
  Antisense strand to SEQ ID NO: 2325240
accaauauggcuguaauaa

SEQ ID NO: 2325242 - RNA, 19 nt, Artificial Sequence
  Description of Artificial Sequence: Synthetic oligonucleotide
  Sense strand starting at position 3854 of SEQ ID NO: 1885218
guuugacuuuaaccagauc

SEQ ID NO: 2325243 - RNA, 19 nt, Artificial Sequence
  Description of Artificial Sequence: Synthetic oligonucleotide
  Antisense strand to SEQ ID NO: 2325242
gaucugguuaaagucaaac

SEQ ID NO: 2325244 - RNA, 19 nt, Artificial Sequence
  Description of Artificial Sequence: Synthetic oligonucleotide
  Sense strand starting at position 362 of SEQ ID NO: 1885217
gcgguacacaaugaaguau

SEQ ID NO: 2325245 - RNA, 19 nt, Artificial Sequence
  Description of Artificial Sequence: Synthetic oligonucleotide
  Antisense strand to SEQ ID NO: 2325244
auacuucauuguguaccgc

SEQ ID NO: 2325246 - RNA, 19 nt, Artificial Sequence
  Description of Artificial Sequence: Synthetic oligonucleotide
  Sense strand starting at position 955 of SEQ ID NO: 1885217
gaauaagaauguuuguaac

SEQ ID NO: 2325247 - RNA, 19 nt, Artificial Sequence
  Description of Artificial Sequence: Synthetic oligonucleotide
  Antisense strand to SEQ ID NO: 2325246
guuacaaacauucuuauuc

SEQ ID NO: 2325248 - RNA, 19 nt, Artificial Sequence
  Description of Artificial Sequence: Synthetic oligonucleotide
  Sense strand starting at position 957 of SEQ ID NO: 1885217
auaagaauguuuguaacac

SEQ ID NO: 2325249 - RNA, 19 nt, Artificial Sequence
  Description of Artificial Sequence: Synthetic oligonucleotide
  Antisense strand to SEQ ID NO: 2325248
guguuacaaacauucuuau

SEQ ID NO: 2325250 - RNA, 19 nt, Artificial Sequence
  Description of Artificial Sequence: Synthetic oligonucleotide
  Sense strand starting at position 1231 of SEQ ID NO: 1885217
aguauaagcuuaucugauu

SEQ ID NO: 2325251 - RNA, 19 nt, Artificial Sequence
  Description of Artificial Sequence: Synthetic oligonucleotide
  Antisense strand to SEQ ID NO: 2325250
aaucagauaagcuuauacu

SEQ ID NO: 2325252 - RNA, 19 nt, Artificial Sequence
  Description of Artificial Sequence: Synthetic oligonucleotide
  Sense strand starting at position 1242 of SEQ ID NO: 1885217
aucugauucccagguuauu

SEQ ID NO: 2325253 - RNA, 19 nt, Artificial Sequence
  Description of Artificial Sequence: Synthetic oligonucleotide
  Antisense strand to SEQ ID NO: 2325252
aauaaccugggaaucagau

SEQ ID NO: 2325254 - RNA, 19 nt, Artificial Sequence
  Description of Artificial Sequence: Synthetic oligonucleotide
  Sense strand starting at position 1448 of SEQ ID NO: 1885217
aucacuaggcauugaauaa

SEQ ID NO: 2325255 - RNA, 19 nt, Artificial Sequence
  Description of Artificial Sequence: Synthetic oligonucleotide
  Antisense strand to SEQ ID NO: 2325254
uuauucaaugccuagugau

SEQ ID NO: 2325256 - RNA, 19 nt, Artificial Sequence
  Description of Artificial Sequence: Synthetic oligonucleotide
  Sense strand starting at position 1459 of SEQ ID NO: 1885217
uugaauaauugcuuguaac

SEQ ID NO: 2325257 - RNA, 19 nt, Artificial Sequence
  Description of Artificial Sequence: Synthetic oligonucleotide
  Antisense strand to SEQ ID NO: 2325256
guuacaagcaauuauucaa

SEQ ID NO: 2325258 - RNA, 19 nt, Artificial Sequence
  Description of Artificial Sequence: Synthetic oligonucleotide
  Sense strand starting at position 1460 of SEQ ID NO: 1885217
ugaauaauugcuuguaaca

SEQ ID NO: 2325259 - RNA, 19 nt, Artificial Sequence
  Description of Artificial Sequence: Synthetic oligonucleotide
  Antisense strand to SEQ ID NO: 2325258
uguuacaagcaauuauuca

SEQ ID NO: 2325260 - RNA, 19 nt, Artificial Sequence
  Description of Artificial Sequence: Synthetic oligonucleotide
  Sense strand starting at position 1838 of SEQ ID NO: 1885217
acuuauaguuugcuauaga

SEQ ID NO: 2325261 - RNA, 19 nt, Artificial Sequence
  Description of Artificial Sequence: Synthetic oligonucleotide
  Antisense strand to SEQ ID NO: 2325260
ucuauagcaaacuauaagu

SEQ ID NO: 2325262 - RNA, 19 nt, Artificial Sequence
  Description of Artificial Sequence: Synthetic oligonucleotide
  Sense strand starting at position 1888 of SEQ ID NO: 1885217
agcuauagauuagugauca

SEQ ID NO: 2325263 - RNA, 19 nt, Artificial Sequence
  Description of Artificial Sequence: Synthetic oligonucleotide
  Antisense strand to SEQ ID NO: 2325262
ugaucacuaaucuauagcu

SEQ ID NO: 2325264 - RNA, 19 nt, Artificial Sequence
  Description of Artificial Sequence: Synthetic oligonucleotide
  Sense strand starting at position 2057 of SEQ ID NO: 1885217
cagugaccuguuuaagaac

SEQ ID NO: 2325265 - RNA, 19 nt, Artificial Sequence
  Description of Artificial Sequence: Synthetic oligonucleotide
  Antisense strand to SEQ ID NO: 2325264
guucuuaaacaggucacug

SEQ ID NO: 2325266 - RNA, 19 nt, Artificial Sequence
  Description of Artificial Sequence: Synthetic oligonucleotide
  Sense strand starting at position 2068 of SEQ ID NO: 1885217
uuaagaaccuguguugaca

SEQ ID NO: 2325267 - RNA, 19 nt, Artificial Sequence
  Description of Artificial Sequence: Synthetic oligonucleotide
  Antisense strand to SEQ ID NO: 2325266
ugucaacacagguucuuaa

SEQ ID NO: 2325268 - RNA, 19 nt, Artificial Sequence
  Description of Artificial Sequence: Synthetic oligonucleotide
  Sense strand starting at position 2195 of SEQ ID NO: 1885217
ucucuaaccugagcugaau

SEQ ID NO: 2325269 - RNA, 19 nt, Artificial Sequence
  Description of Artificial Sequence: Synthetic oligonucleotide
  Antisense strand to SEQ ID NO: 2325268
auucagcucagguuagaga

SEQ ID NO: 2325270 - RNA, 19 nt, Artificial Sequence
  Description of Artificial Sequence: Synthetic oligonucleotide
  Sense strand starting at position 2204 of SEQ ID NO: 1885217
ugagcugaauacuuaacau

SEQ ID NO: 2325271 - RNA, 19 nt, Artificial Sequence
  Description of Artificial Sequence: Synthetic oligonucleotide
  Antisense strand to SEQ ID NO: 2325270
auguuaaguauucagcuca

SEQ ID NO: 2325272 - RNA, 19 nt, Artificial Sequence
  Description of Artificial Sequence: Synthetic oligonucleotide
  Sense strand starting at position 2719 of SEQ ID NO: 1885217
ugacaaauguggucauggu

SEQ ID NO: 2325273 - RNA, 19 nt, Artificial Sequence
  Description of Artificial Sequence: Synthetic oligonucleotide
  Antisense strand to SEQ ID NO: 2325272
accaugaccacauuuguca

SEQ ID NO: 2325274 - RNA, 19 nt, Artificial Sequence
  Description of Artificial Sequence: Synthetic oligonucleotide
  Sense strand starting at position 2720 of SEQ ID NO: 1885217
gacaaauguggucaugguc

SEQ ID NO: 2325275 - RNA, 19 nt, Artificial Sequence
  Description of Artificial Sequence: Synthetic oligonucleotide
  Antisense strand to SEQ ID NO: 2325274
gaccaugaccacauuuguc

SEQ ID NO: 2325276 - RNA, 19 nt, Artificial Sequence
  Description of Artificial Sequence: Synthetic oligonucleotide
  Sense strand starting at position 2723 of SEQ ID NO: 1885217
aaauguggucauggucaua

SEQ ID NO: 2325277 - RNA, 19 nt, Artificial Sequence
  Description of Artificial Sequence: Synthetic oligonucleotide
  Antisense strand to SEQ ID NO: 2325276
uaugaccaugaccacauuu

SEQ ID NO: 2325278 - RNA, 19 nt, Artificial Sequence
  Description of Artificial Sequence: Synthetic oligonucleotide
  Sense strand starting at position 2726 of SEQ ID NO: 1885217
uguggucauggucauagaa

SEQ ID NO: 2325279 - RNA, 19 nt, Artificial Sequence
  Description of Artificial Sequence: Synthetic oligonucleotide
  Antisense strand to SEQ ID NO: 2325278
uucuaugaccaugaccaca

SEQ ID NO: 2325280 - RNA, 19 nt, Artificial Sequence
  Description of Artificial Sequence: Synthetic oligonucleotide
  Sense strand starting at position 2821 of SEQ ID NO: 1885217
gugcaaaggguguguauuu

SEQ ID NO: 2325281 - RNA, 19 nt, Artificial Sequence
  Description of Artificial Sequence: Synthetic oligonucleotide
  Antisense strand to SEQ ID NO: 2325280
aaauacacacccuuugcac

SEQ ID NO: 2325282 - RNA, 19 nt, Artificial Sequence
  Description of Artificial Sequence: Synthetic oligonucleotide
  Sense strand starting at position 2967 of SEQ ID NO: 1885217
ccugauuuguggcaauuuc

SEQ ID NO: 2325283 - RNA, 19 nt, Artificial Sequence
  Description of Artificial Sequence: Synthetic oligonucleotide
  Antisense strand to SEQ ID NO: 2325282
gaaauugccacaaaucagg

SEQ ID NO: 2325284 - RNA, 19 nt, Artificial Sequence
  Description of Artificial Sequence: Synthetic oligonucleotide
  Sense strand starting at position 2983 of SEQ ID NO: 1885217
uuccuuucuggauaucuga

SEQ ID NO: 2325285 - RNA, 19 nt, Artificial Sequence
  Description of Artificial Sequence: Synthetic oligonucleotide
  Antisense strand to SEQ ID NO: 2325284
ucagauauccagaaaggaa

SEQ ID NO: 2325286 - RNA, 19 nt, Artificial Sequence
  Description of Artificial Sequence: Synthetic oligonucleotide
  Sense strand starting at position 3015 of SEQ ID NO: 1885217
ucuguauaucuauagcaca

SEQ ID NO: 2325287 - RNA, 19 nt, Artificial Sequence
  Description of Artificial Sequence: Synthetic oligonucleotide
  Antisense strand to SEQ ID NO: 2325286
ugugcuauagauauacaga

SEQ ID NO: 2325288 - RNA, 19 nt, Artificial Sequence
  Description of Artificial Sequence: Synthetic oligonucleotide
  Sense strand starting at position 3033 of SEQ ID NO: 1885217
acucuaucuccagaguacu

SEQ ID NO: 2325289 - RNA, 19 nt, Artificial Sequence
  Description of Artificial Sequence: Synthetic oligonucleotide
  Antisense strand to SEQ ID NO: 2325288
aguacucuggagauagagu

SEQ ID NO: 2325290 - RNA, 19 nt, Artificial Sequence
  Description of Artificial Sequence: Synthetic oligonucleotide
  Sense strand starting at position 3041 of SEQ ID NO: 1885217
uccagaguacuguggagau

SEQ ID NO: 2325291 - RNA, 19 nt, Artificial Sequence
  Description of Artificial Sequence: Synthetic oligonucleotide
  Antisense strand to SEQ ID NO: 2325290
aucuccacaguacucugga

SEQ ID NO: 2325292 - RNA, 19 nt, Artificial Sequence
  Description of Artificial Sequence: Synthetic oligonucleotide
  Sense strand starting at position 3082 of SEQ ID NO: 1885217
guaagaauccagcaaaggu

SEQ ID NO: 2325293 - RNA, 19 nt, Artificial Sequence
  Description of Artificial Sequence: Synthetic oligonucleotide
  Antisense strand to SEQ ID NO: 2325292
accuuugcuggauucuuac

SEQ ID NO: 2325294 - RNA, 19 nt, Artificial Sequence
  Description of Artificial Sequence: Synthetic oligonucleotide
  Sense strand starting at position 3091 of SEQ ID NO: 1885217
cagcaaaggucacuggaua

SEQ ID NO: 2325295 - RNA, 19 nt, Artificial Sequence
  Description of Artificial Sequence: Synthetic oligonucleotide
  Antisense strand to SEQ ID NO: 2325294
uauccagugaccuuugcug

SEQ ID NO: 2325296 - RNA, 19 nt, Artificial Sequence
  Description of Artificial Sequence: Synthetic oligonucleotide
  Sense strand starting at position 3212 of SEQ ID NO: 1885217
cuagucuuacaguaucuau

SEQ ID NO: 2325297 - RNA, 19 nt, Artificial Sequence
  Description of Artificial Sequence: Synthetic oligonucleotide
  Antisense strand to SEQ ID NO: 2325296
auagauacuguaagacuag

SEQ ID NO: 2325298 - RNA, 19 nt, Artificial Sequence
  Description of Artificial Sequence: Synthetic oligonucleotide
  Sense strand starting at position 3215 of SEQ ID NO: 1885217
gucuuacaguaucuauaug

SEQ ID NO: 2325299 - RNA, 19 nt, Artificial Sequence
  Description of Artificial Sequence: Synthetic oligonucleotide
  Antisense strand to SEQ ID NO: 2325298
cauauagauacuguaagac

SEQ ID NO: 2325300 - RNA, 19 nt, Artificial Sequence
  Description of Artificial Sequence: Synthetic oligonucleotide
  Sense strand starting at position 3226 of SEQ ID NO: 1885217
ucuauaugaugucccagaa

SEQ ID NO: 2325301 - RNA, 19 nt, Artificial Sequence
  Description of Artificial Sequence: Synthetic oligonucleotide
  Antisense strand to SEQ ID NO: 2325300
uucugggacaucauauaga

SEQ ID NO: 2325302 - RNA, 19 nt, Artificial Sequence
  Description of Artificial Sequence: Synthetic oligonucleotide
  Sense strand starting at position 3357 of SEQ ID NO: 1885217
gucuauuucuaggauuaag

SEQ ID NO: 2325303 - RNA, 19 nt, Artificial Sequence
  Description of Artificial Sequence: Synthetic oligonucleotide
  Antisense strand to SEQ ID NO: 2325302
cuuaauccuagaaauagac

SEQ ID NO: 2325304 - RNA, 19 nt, Artificial Sequence
  Description of Artificial Sequence: Synthetic oligonucleotide
  Sense strand starting at position 3368 of SEQ ID NO: 1885217
ggauuaagggaugagcgua

SEQ ID NO: 2325305 - RNA, 19 nt, Artificial Sequence
  Description of Artificial Sequence: Synthetic oligonucleotide
  Antisense strand to SEQ ID NO: 2325304
uacgcucaucccuuaaucc

SEQ ID NO: 2325306 - RNA, 19 nt, Artificial Sequence
  Description of Artificial Sequence: Synthetic oligonucleotide
  Sense strand starting at position 3373 of SEQ ID NO: 1885217
aagggaugagcguauccua

SEQ ID NO: 2325307 - RNA, 19 nt, Artificial Sequence
  Description of Artificial Sequence: Synthetic oligonucleotide
  Antisense strand to SEQ ID NO: 2325306
uaggauacgcucaucccuu

SEQ ID NO: 2325308 - RNA, 19 nt, Artificial Sequence
  Description of Artificial Sequence: Synthetic oligonucleotide
  Sense strand starting at position 3382 of SEQ ID NO: 1885217
gcguauccuaaugaaauag

SEQ ID NO: 2325309 - RNA, 19 nt, Artificial Sequence
  Description of Artificial Sequence: Synthetic oligonucleotide
  Antisense strand to SEQ ID NO: 2325308
cuauuucauuaggauacgc

SEQ ID NO: 2325310 - RNA, 19 nt, Artificial Sequence
  Description of Artificial Sequence: Synthetic oligonucleotide
  Sense strand starting at position 3481 of SEQ ID NO: 1885217
aucauuauugcaggcuaaa

SEQ ID NO: 2325311 - RNA, 19 nt, Artificial Sequence
  Description of Artificial Sequence: Synthetic oligonucleotide
  Antisense strand to SEQ ID NO: 2325310
uuuagccugcaauaaugau

SEQ ID NO: 2325312 - RNA, 19 nt, Artificial Sequence
  Description of Artificial Sequence: Synthetic oligonucleotide
  Sense strand starting at position 3484 of SEQ ID NO: 1885217
auuauugcaggcuaaauga

SEQ ID NO: 2325313 - RNA, 19 nt, Artificial Sequence
  Description of Artificial Sequence: Synthetic oligonucleotide
  Antisense strand to SEQ ID NO: 2325312
ucauuuagccugcaauaau

SEQ ID NO: 2325314 - RNA, 19 nt, Artificial Sequence
  Description of Artificial Sequence: Synthetic oligonucleotide
  Sense strand starting at position 3676 of SEQ ID NO: 1885217
guguaagugauagacuaga

SEQ ID NO: 2325315 - RNA, 19 nt, Artificial Sequence
  Description of Artificial Sequence: Synthetic oligonucleotide
  Antisense strand to SEQ ID NO: 2325314
ucuagucuaucacuuacac

SEQ ID NO: 2325316 - RNA, 19 nt, Artificial Sequence
  Description of Artificial Sequence: Synthetic oligonucleotide
  Sense strand starting at position 3749 of SEQ ID NO: 1885217
aauacuuuccagugugaug

SEQ ID NO: 2325317 - RNA, 19 nt, Artificial Sequence
  Description of Artificial Sequence: Synthetic oligonucleotide
  Antisense strand to SEQ ID NO: 2325316
caucacacuggaaaguauu

SEQ ID NO: 2325318 - RNA, 19 nt, Artificial Sequence
  Description of Artificial Sequence: Synthetic oligonucleotide
  Sense strand starting at position 3751 of SEQ ID NO: 1885217
uacuuuccagugugaugga

SEQ ID NO: 2325319 - RNA, 19 nt, Artificial Sequence
  Description of Artificial Sequence: Synthetic oligonucleotide
  Antisense strand to SEQ ID NO: 2325318
uccaucacacuggaaagua

SEQ ID NO: 2325320 - RNA, 19 nt, Artificial Sequence
  Description of Artificial Sequence: Synthetic oligonucleotide
  Sense strand starting at position 3756 of SEQ ID NO: 1885217
uccagugugauggauuaag

SEQ ID NO: 2325321 - RNA, 19 nt, Artificial Sequence
  Description of Artificial Sequence: Synthetic oligonucleotide
  Antisense strand to SEQ ID NO: 2325320
cuuaauccaucacacugga

SEQ ID NO: 2325322 - RNA, 19 nt, Artificial Sequence
  Description of Artificial Sequence: Synthetic oligonucleotide
  Sense strand starting at position 3940 of SEQ ID NO: 1885217
aguuaaauuugggaaauag

SEQ ID NO: 2325323 - RNA, 19 nt, Artificial Sequence
  Description of Artificial Sequence: Synthetic oligonucleotide
  Antisense strand to SEQ ID NO: 2325322
cuauuucccaaauuuaacu

SEQ ID NO: 2325324 - RNA, 19 nt, Artificial Sequence
  Description of Artificial Sequence: Synthetic oligonucleotide
  Sense strand starting at position 381 of SEQ ID NO: 1885216
gcgguacacaaugaaguau

SEQ ID NO: 2325325 - RNA, 19 nt, Artificial Sequence
  Description of Artificial Sequence: Synthetic oligonucleotide
  Antisense strand to SEQ ID NO: 2325324
auacuucauuguguaccgc

SEQ ID NO: 2325326 - RNA, 19 nt, Artificial Sequence
  Description of Artificial Sequence: Synthetic oligonucleotide
  Sense strand starting at position 974 of SEQ ID NO: 1885216
gaauaagaauguuuguaac

SEQ ID NO: 2325327 - RNA, 19 nt, Artificial Sequence
  Description of Artificial Sequence: Synthetic oligonucleotide
  Antisense strand to SEQ ID NO: 2325326
guuacaaacauucuuauuc

SEQ ID NO: 2325328 - RNA, 19 nt, Artificial Sequence
  Description of Artificial Sequence: Synthetic oligonucleotide
  Sense strand starting at position 976 of SEQ ID NO: 1885216
auaagaauguuuguaacac

SEQ ID NO: 2325329 - RNA, 19 nt, Artificial Sequence
  Description of Artificial Sequence: Synthetic oligonucleotide
  Antisense strand to SEQ ID NO: 2325328
guguuacaaacauucuuau

SEQ ID NO: 2325330 - RNA, 19 nt, Artificial Sequence
  Description of Artificial Sequence: Synthetic oligonucleotide
  Sense strand starting at position 1250 of SEQ ID NO: 1885216
aguauaagcuuaucugauu

SEQ ID NO: 2325331 - RNA, 19 nt, Artificial Sequence
  Description of Artificial Sequence: Synthetic oligonucleotide
  Antisense strand to SEQ ID NO: 2325330
aaucagauaagcuuauacu

SEQ ID NO: 2325332 - RNA, 19 nt, Artificial Sequence
  Description of Artificial Sequence: Synthetic oligonucleotide
  Sense strand starting at position 1261 of SEQ ID NO: 1885216
aucugauucccagguuauu

SEQ ID NO: 2325333 - RNA, 19 nt, Artificial Sequence
  Description of Artificial Sequence: Synthetic oligonucleotide
  Antisense strand to SEQ ID NO: 2325332
aauaaccugggaaucagau

SEQ ID NO: 2325334 - RNA, 19 nt, Artificial Sequence
  Description of Artificial Sequence: Synthetic oligonucleotide
  Sense strand starting at position 1467 of SEQ ID NO: 1885216
aucacuaggcauugaauaa

SEQ ID NO: 2325335 - RNA, 19 nt, Artificial Sequence
  Description of Artificial Sequence: Synthetic oligonucleotide
  Antisense strand to SEQ ID NO: 2325334
uuauucaaugccuagugau

SEQ ID NO: 2325336 - RNA, 19 nt, Artificial Sequence
  Description of Artificial Sequence: Synthetic oligonucleotide
  Sense strand starting at position 1478 of SEQ ID NO: 1885216
uugaauaauugcuuguaac

SEQ ID NO: 2325337 - RNA, 19 nt, Artificial Sequence
  Description of Artificial Sequence: Synthetic oligonucleotide
  Antisense strand to SEQ ID NO: 2325336
guuacaagcaauuauucaa

SEQ ID NO: 2325338 - RNA, 19 nt, Artificial Sequence
  Description of Artificial Sequence: Synthetic oligonucleotide
  Sense strand starting at position 1479 of SEQ ID NO: 1885216
ugaauaauugcuuguaaca

SEQ ID NO: 2325339 - RNA, 19 nt, Artificial Sequence
  Description of Artificial Sequence: Synthetic oligonucleotide
  Antisense strand to SEQ ID NO: 2325338
uguuacaagcaauuauuca

SEQ ID NO: 2325340 - RNA, 19 nt, Artificial Sequence
  Description of Artificial Sequence: Synthetic oligonucleotide
  Sense strand starting at position 1857 of SEQ ID NO: 1885216
acuuauaguuugcuauaga

SEQ ID NO: 2325341 - RNA, 19 nt, Artificial Sequence
  Description of Artificial Sequence: Synthetic oligonucleotide
  Antisense strand to SEQ ID NO: 2325340
ucuauagcaaacuauaagu

SEQ ID NO: 2325342 - RNA, 19 nt, Artificial Sequence
  Description of Artificial Sequence: Synthetic oligonucleotide
  Sense strand starting at position 1907 of SEQ ID NO: 1885216
agcuauagauuagugauca

SEQ ID NO: 2325343 - RNA, 19 nt, Artificial Sequence
  Description of Artificial Sequence: Synthetic oligonucleotide
  Antisense strand to SEQ ID NO: 2325342
ugaucacuaaucuauagcu

SEQ ID NO: 2325344 - RNA, 19 nt, Artificial Sequence
  Description of Artificial Sequence: Synthetic oligonucleotide
  Sense strand starting at position 2076 of SEQ ID NO: 1885216
cagugaccuguuuaagaac

SEQ ID NO: 2325345 - RNA, 19 nt, Artificial Sequence
  Description of Artificial Sequence: Synthetic oligonucleotide
  Antisense strand to SEQ ID NO: 2325344
guucuuaaacaggucacug

SEQ ID NO: 2325346 - RNA, 19 nt, Artificial Sequence
  Description of Artificial Sequence: Synthetic oligonucleotide
  Sense strand starting at position 2087 of SEQ ID NO: 1885216
uuaagaaccuguguugaca

SEQ ID NO: 2325347 - RNA, 19 nt, Artificial Sequence
  Description of Artificial Sequence: Synthetic oligonucleotide
  Antisense strand to SEQ ID NO: 2325346
ugucaacacagguucuuaa

SEQ ID NO: 2325348 - RNA, 19 nt, Artificial Sequence
  Description of Artificial Sequence: Synthetic oligonucleotide
  Sense strand starting at position 2214 of SEQ ID NO: 1885216
ucucuaaccugagcugaau

SEQ ID NO: 2325349 - RNA, 19 nt, Artificial Sequence
  Description of Artificial Sequence: Synthetic oligonucleotide
  Antisense strand to SEQ ID NO: 2325348
auucagcucagguuagaga

SEQ ID NO: 2325350 - RNA, 19 nt, Artificial Sequence
  Description of Artificial Sequence: Synthetic oligonucleotide
  Sense strand starting at position 2223 of SEQ ID NO: 1885216
ugagcugaauacuuaacau

SEQ ID NO: 2325351 - RNA, 19 nt, Artificial Sequence
  Description of Artificial Sequence: Synthetic oligonucleotide
  Antisense strand to SEQ ID NO: 2325350
auguuaaguauucagcuca

SEQ ID NO: 2325352 - RNA, 19 nt, Artificial Sequence
  Description of Artificial Sequence: Synthetic oligonucleotide
  Sense strand starting at position 2738 of SEQ ID NO: 1885216
ugacaaauguggucauggu

SEQ ID NO: 2325353 - RNA, 19 nt, Artificial Sequence
  Description of Artificial Sequence: Synthetic oligonucleotide
  Antisense strand to SEQ ID NO: 2325352
accaugaccacauuuguca

SEQ ID NO: 2325354 - RNA, 19 nt, Artificial Sequence
  Description of Artificial Sequence: Synthetic oligonucleotide
  Sense strand starting at position 2739 of SEQ ID NO: 1885216
gacaaauguggucaugguc

SEQ ID NO: 2325355 - RNA, 19 nt, Artificial Sequence
  Description of Artificial Sequence: Synthetic oligonucleotide
  Antisense strand to SEQ ID NO: 2325354
gaccaugaccacauuuguc

SEQ ID NO: 2325356 - RNA, 19 nt, Artificial Sequence
  Description of Artificial Sequence: Synthetic oligonucleotide
  Sense strand starting at position 2742 of SEQ ID NO: 1885216
aaauguggucauggucaua

SEQ ID NO: 2325357 - RNA, 19 nt, Artificial Sequence
  Description of Artificial Sequence: Synthetic oligonucleotide
  Antisense strand to SEQ ID NO: 2325356
uaugaccaugaccacauuu

SEQ ID NO: 2325358 - RNA, 19 nt, Artificial Sequence
  Description of Artificial Sequence: Synthetic oligonucleotide
  Sense strand starting at position 2745 of SEQ ID NO: 1885216
uguggucauggucauagaa

SEQ ID NO: 2325359 - RNA, 19 nt, Artificial Sequence
  Description of Artificial Sequence: Synthetic oligonucleotide
  Antisense strand to SEQ ID NO: 2325358
uucuaugaccaugaccaca

SEQ ID NO: 2325360 - RNA, 19 nt, Artificial Sequence
  Description of Artificial Sequence: Synthetic oligonucleotide
  Sense strand starting at position 2840 of SEQ ID NO: 1885216
gugcaaaggguguguauuu

SEQ ID NO: 2325361 - RNA, 19 nt, Artificial Sequence
  Description of Artificial Sequence: Synthetic oligonucleotide
  Antisense strand to SEQ ID NO: 2325360
aaauacacacccuuugcac

SEQ ID NO: 2325362 - RNA, 19 nt, Artificial Sequence
  Description of Artificial Sequence: Synthetic oligonucleotide
  Sense strand starting at position 2986 of SEQ ID NO: 1885216
ccugauuuguggcaauuuc

SEQ ID NO: 2325363 - RNA, 19 nt, Artificial Sequence
  Description of Artificial Sequence: Synthetic oligonucleotide
  Antisense strand to SEQ ID NO: 2325362
gaaauugccacaaaucagg

SEQ ID NO: 2325364 - RNA, 19 nt, Artificial Sequence
  Description of Artificial Sequence: Synthetic oligonucleotide
  Sense strand starting at position 3002 of SEQ ID NO: 1885216
uuccuuucuggauaucuga

SEQ ID NO: 2325365 - RNA, 19 nt, Artificial Sequence
  Description of Artificial Sequence: Synthetic oligonucleotide
  Antisense strand to SEQ ID NO: 2325364
ucagauauccagaaaggaa

SEQ ID NO: 2325366 - RNA, 19 nt, Artificial Sequence
  Description of Artificial Sequence: Synthetic oligonucleotide
  Sense strand starting at position 3034 of SEQ ID NO: 1885216
ucuguauaucuauagcaca

SEQ ID NO: 2325367 - RNA, 19 nt, Artificial Sequence
  Description of Artificial Sequence: Synthetic oligonucleotide
  Antisense strand to SEQ ID NO: 2325366
ugugcuauagauauacaga

SEQ ID NO: 2325368 - RNA, 19 nt, Artificial Sequence
  Description of Artificial Sequence: Synthetic oligonucleotide
  Sense strand starting at position 3052 of SEQ ID NO: 1885216
acucuaucuccagaguacu

SEQ ID NO: 2325369 - RNA, 19 nt, Artificial Sequence
  Description of Artificial Sequence: Synthetic oligonucleotide
  Antisense strand to SEQ ID NO: 2325368
aguacucuggagauagagu

SEQ ID NO: 2325370 - RNA, 19 nt, Artificial Sequence
  Description of Artificial Sequence: Synthetic oligonucleotide
  Sense strand starting at position 3060 of SEQ ID NO: 1885216
uccagaguacuguggagau

SEQ ID NO: 2325371 - RNA, 19 nt, Artificial Sequence
  Description of Artificial Sequence: Synthetic oligonucleotide
  Antisense strand to SEQ ID NO: 2325370
aucuccacaguacucugga

SEQ ID NO: 2325372 - RNA, 19 nt, Artificial Sequence
  Description of Artificial Sequence: Synthetic oligonucleotide
  Sense strand starting at position 3101 of SEQ ID NO: 1885216
guaagaauccagcaaaggu

SEQ ID NO: 2325373 - RNA, 19 nt, Artificial Sequence
  Description of Artificial Sequence: Synthetic oligonucleotide
  Antisense strand to SEQ ID NO: 2325372
accuuugcuggauucuuac

SEQ ID NO: 2325374 - RNA, 19 nt, Artificial Sequence
  Description of Artificial Sequence: Synthetic oligonucleotide
  Sense strand starting at position 3110 of SEQ ID NO: 1885216
cagcaaaggucacuggaua

SEQ ID NO: 2325375 - RNA, 19 nt, Artificial Sequence
  Description of Artificial Sequence: Synthetic oligonucleotide
  Antisense strand to SEQ ID NO: 2325374
uauccagugaccuuugcug

SEQ ID NO: 2325376 - RNA, 19 nt, Artificial Sequence
  Description of Artificial Sequence: Synthetic oligonucleotide
  Sense strand starting at position 3231 of SEQ ID NO: 1885216
cuagucuuacaguaucuau

SEQ ID NO: 2325377 - RNA, 19 nt, Artificial Sequence
  Description of Artificial Sequence: Synthetic oligonucleotide
  Antisense strand to SEQ ID NO: 2325376
auagauacuguaagacuag

SEQ ID NO: 2325378 - RNA, 19 nt, Artificial Sequence
  Description of Artificial Sequence: Synthetic oligonucleotide
  Sense strand starting at position 3234 of SEQ ID NO: 1885216
gucuuacaguaucuauaug

SEQ ID NO: 2325379 - RNA, 19 nt, Artificial Sequence
  Description of Artificial Sequence: Synthetic oligonucleotide
  Antisense strand to SEQ ID NO: 2325378
cauauagauacuguaagac

SEQ ID NO: 2325380 - RNA, 19 nt, Artificial Sequence
  Description of Artificial Sequence: Synthetic oligonucleotide
  Sense strand starting at position 3245 of SEQ ID NO: 1885216
ucuauaugaugucccagaa

SEQ ID NO: 2325381 - RNA, 19 nt, Artificial Sequence
  Description of Artificial Sequence: Synthetic oligonucleotide
  Antisense strand to SEQ ID NO: 2325380
uucugggacaucauauaga

SEQ ID NO: 2325382 - RNA, 19 nt, Artificial Sequence
  Description of Artificial Sequence: Synthetic oligonucleotide
  Sense strand starting at position 3376 of SEQ ID NO: 1885216
gucuauuucuaggauuaag

SEQ ID NO: 2325383 - RNA, 19 nt, Artificial Sequence
  Description of Artificial Sequence: Synthetic oligonucleotide
  Antisense strand to SEQ ID NO: 2325382
cuuaauccuagaaauagac

SEQ ID NO: 2325384 - RNA, 19 nt, Artificial Sequence
  Description of Artificial Sequence: Synthetic oligonucleotide
  Sense strand starting at position 3387 of SEQ ID NO: 1885216
ggauuaagggaugagcgua

SEQ ID NO: 2325385 - RNA, 19 nt, Artificial Sequence
  Description of Artificial Sequence: Synthetic oligonucleotide
  Antisense strand to SEQ ID NO: 2325384
uacgcucaucccuuaaucc

SEQ ID NO: 2325386 - RNA, 19 nt, Artificial Sequence
  Description of Artificial Sequence: Synthetic oligonucleotide
  Sense strand starting at position 3392 of SEQ ID NO: 1885216
aagggaugagcguauccua

SEQ ID NO: 2325387 - RNA, 19 nt, Artificial Sequence
  Description of Artificial Sequence: Synthetic oligonucleotide
  Antisense strand to SEQ ID NO: 2325386
uaggauacgcucaucccuu

SEQ ID NO: 2325388 - RNA, 19 nt, Artificial Sequence
  Description of Artificial Sequence: Synthetic oligonucleotide
  Sense strand starting at position 3401 of SEQ ID NO: 1885216
gcguauccuaaugaaauag

SEQ ID NO: 2325389 - RNA, 19 nt, Artificial Sequence
  Description of Artificial Sequence: Synthetic oligonucleotide
  Antisense strand to SEQ ID NO: 2325388
cuauuucauuaggauacgc

SEQ ID NO: 2325390 - RNA, 19 nt, Artificial Sequence
  Description of Artificial Sequence: Synthetic oligonucleotide
  Sense strand starting at position 3500 of SEQ ID NO: 1885216
aucauuauugcaggcuaaa

SEQ ID NO: 2325391 - RNA, 19 nt, Artificial Sequence
  Description of Artificial Sequence: Synthetic oligonucleotide
  Antisense strand to SEQ ID NO: 2325390
uuuagccugcaauaaugau

SEQ ID NO: 2325392 - RNA, 19 nt, Artificial Sequence
  Description of Artificial Sequence: Synthetic oligonucleotide
  Sense strand starting at position 3503 of SEQ ID NO: 1885216
auuauugcaggcuaaauga

SEQ ID NO: 2325393 - RNA, 19 nt, Artificial Sequence
  Description of Artificial Sequence: Synthetic oligonucleotide
  Antisense strand to SEQ ID NO: 2325392
ucauuuagccugcaauaau

SEQ ID NO: 2325394 - RNA, 19 nt, Artificial Sequence
  Description of Artificial Sequence: Synthetic oligonucleotide
  Sense strand starting at position 3695 of SEQ ID NO: 1885216
guguaagugauagacuaga

SEQ ID NO: 2325395 - RNA, 19 nt, Artificial Sequence
  Description of Artificial Sequence: Synthetic oligonucleotide
  Antisense strand to SEQ ID NO: 2325394
ucuagucuaucacuuacac

SEQ ID NO: 2325396 - RNA, 19 nt, Artificial Sequence
  Description of Artificial Sequence: Synthetic oligonucleotide
  Sense strand starting at position 3768 of SEQ ID NO: 1885216
aauacuuuccagugugaug

SEQ ID NO: 2325397 - RNA, 19 nt, Artificial Sequence
  Description of Artificial Sequence: Synthetic oligonucleotide
  Antisense strand to SEQ ID NO: 2325396
caucacacuggaaaguauu

SEQ ID NO: 2325398 - RNA, 19 nt, Artificial Sequence
  Description of Artificial Sequence: Synthetic oligonucleotide
  Sense strand starting at position 3770 of SEQ ID NO: 1885216
uacuuuccagugugaugga

SEQ ID NO: 2325399 - RNA, 19 nt, Artificial Sequence
  Description of Artificial Sequence: Synthetic oligonucleotide
  Antisense strand to SEQ ID NO: 2325398
uccaucacacuggaaagua

SEQ ID NO: 2325400 - RNA, 19 nt, Artificial Sequence
  Description of Artificial Sequence: Synthetic oligonucleotide
  Sense strand starting at position 3775 of SEQ ID NO: 1885216
uccagugugauggauuaag

SEQ ID NO: 2325401 - RNA, 19 nt, Artificial Sequence
  Description of Artificial Sequence: Synthetic oligonucleotide
  Antisense strand to SEQ ID NO: 2325400
cuuaauccaucacacugga

SEQ ID NO: 2325402 - RNA, 19 nt, Artificial Sequence
  Description of Artificial Sequence: Synthetic oligonucleotide
  Sense strand starting at position 3959 of SEQ ID NO: 1885216
aguuaaauuugggaaauag

SEQ ID NO: 2325403 - RNA, 19 nt, Artificial Sequence
  Description of Artificial Sequence: Synthetic oligonucleotide
  Antisense strand to SEQ ID NO: 2325402
cuauuucccaaauuuaacu

SEQ ID NO: 2325404 - RNA, 19 nt, Artificial Sequence
  Description of Artificial Sequence: Synthetic oligonucleotide
  Sense strand starting at position 13 of SEQ ID NO: 1885219
gaaagaguguaccugaaca

SEQ ID NO: 2325405 - RNA, 19 nt, Artificial Sequence
  Description of Artificial Sequence: Synthetic oligonucleotide
  Antisense strand to SEQ ID NO: 2325404
uguucagguacacucuuuc

SEQ ID NO: 2325406 - RNA, 19 nt, Artificial Sequence
  Description of Artificial Sequence: Synthetic oligonucleotide
  Sense strand starting at position 88 of SEQ ID NO: 1885219
uuggaaagcuuuccuuuaa

SEQ ID NO: 2325407 - RNA, 19 nt, Artificial Sequence
  Description of Artificial Sequence: Synthetic oligonucleotide
  Antisense strand to SEQ ID NO: 2325406
uuaaaggaaagcuuuccaa

SEQ ID NO: 2325408 - RNA, 19 nt, Artificial Sequence
  Description of Artificial Sequence: Synthetic oligonucleotide
  Sense strand starting at position 89 of SEQ ID NO: 1885219
uggaaagcuuuccuuuaag

SEQ ID NO: 2325409 - RNA, 19 nt, Artificial Sequence
  Description of Artificial Sequence: Synthetic oligonucleotide
  Antisense strand to SEQ ID NO: 2325408
cuuaaaggaaagcuuucca

SEQ ID NO: 2325410 - RNA, 19 nt, Artificial Sequence
  Description of Artificial Sequence: Synthetic oligonucleotide
  Sense strand starting at position 254 of SEQ ID NO: 1885219
cccuuacguguagaaucua

SEQ ID NO: 2325411 - RNA, 19 nt, Artificial Sequence
  Description of Artificial Sequence: Synthetic oligonucleotide
  Antisense strand to SEQ ID NO: 2325410
uagauucuacacguaaggg

SEQ ID NO: 2325412 - RNA, 19 nt, Artificial Sequence
  Description of Artificial Sequence: Synthetic oligonucleotide
  Sense strand starting at position 300 of SEQ ID NO: 1885219
gcacaaagauaguuacaga

SEQ ID NO: 2325413 - RNA, 19 nt, Artificial Sequence
  Description of Artificial Sequence: Synthetic oligonucleotide
  Antisense strand to SEQ ID NO: 2325412
ucuguaacuaucuuugugc

SEQ ID NO: 2325414 - RNA, 19 nt, Artificial Sequence
  Description of Artificial Sequence: Synthetic oligonucleotide
  Sense strand starting at position 340 of SEQ ID NO: 1885219
gcgagauuauggucaaaug

SEQ ID NO: 2325415 - RNA, 19 nt, Artificial Sequence
  Description of Artificial Sequence: Synthetic oligonucleotide
  Antisense strand to SEQ ID NO: 2325414
cauuugaccauaaucucgc

SEQ ID NO: 2325416 - RNA, 19 nt, Artificial Sequence
  Description of Artificial Sequence: Synthetic oligonucleotide
  Sense strand starting at position 495 of SEQ ID NO: 1885219
uguguuugagagcauaagu

SEQ ID NO: 2325417 - RNA, 19 nt, Artificial Sequence
  Description of Artificial Sequence: Synthetic oligonucleotide
  Antisense strand to SEQ ID NO: 2325416
acuuaugcucucaaacaca

SEQ ID NO: 2325418 - RNA, 19 nt, Artificial Sequence
  Description of Artificial Sequence: Synthetic oligonucleotide
  Sense strand starting at position 500 of SEQ ID NO: 1885219
uugagagcauaaguauauu

SEQ ID NO: 2325419 - RNA, 19 nt, Artificial Sequence
  Description of Artificial Sequence: Synthetic oligonucleotide
  Antisense strand to SEQ ID NO: 2325418
aauauacuuaugcucucaa

SEQ ID NO: 2325420 - RNA, 19 nt, Artificial Sequence
  Description of Artificial Sequence: Synthetic oligonucleotide
  Sense strand starting at position 729 of SEQ ID NO: 1885219
gguguaauaacuugaaagu

SEQ ID NO: 2325421 - RNA, 19 nt, Artificial Sequence
  Description of Artificial Sequence: Synthetic oligonucleotide
  Antisense strand to SEQ ID NO: 2325420
acuuucaaguuauuacacc

SEQ ID NO: 2325422 - RNA, 19 nt, Artificial Sequence
  Description of Artificial Sequence: Synthetic oligonucleotide
  Sense strand starting at position 730 of SEQ ID NO: 1885219
guguaauaacuugaaaguu

SEQ ID NO: 2325423 - RNA, 19 nt, Artificial Sequence
  Description of Artificial Sequence: Synthetic oligonucleotide
  Antisense strand to SEQ ID NO: 2325422
aacuuucaaguuauuacac

SEQ ID NO: 2325424 - RNA, 19 nt, Artificial Sequence
  Description of Artificial Sequence: Synthetic oligonucleotide
  Sense strand starting at position 1066 of SEQ ID NO: 1885219
agugauaguaugggaauag

SEQ ID NO: 2325425 - RNA, 19 nt, Artificial Sequence
  Description of Artificial Sequence: Synthetic oligonucleotide
  Antisense strand to SEQ ID NO: 2325424
cuauucccauacuaucacu

SEQ ID NO: 2325426 - RNA, 19 nt, Artificial Sequence
  Description of Artificial Sequence: Synthetic oligonucleotide
  Sense strand starting at position 1145 of SEQ ID NO: 1885219
agaaucgauuucuacuuaa

SEQ ID NO: 2325427 - RNA, 19 nt, Artificial Sequence
  Description of Artificial Sequence: Synthetic oligonucleotide
  Antisense strand to SEQ ID NO: 2325426
uuaaguagaaaucgauucu

SEQ ID NO: 2325428 - RNA, 19 nt, Artificial Sequence
  Description of Artificial Sequence: Synthetic oligonucleotide
  Sense strand starting at position 1430 of SEQ ID NO: 1885219
guuuaacaagguuguagau

SEQ ID NO: 2325429 - RNA, 19 nt, Artificial Sequence
  Description of Artificial Sequence: Synthetic oligonucleotide
  Antisense strand to SEQ ID NO: 2325428
aucuacaaccuuguuaaac

SEQ ID NO: 2325430 - RNA, 19 nt, Artificial Sequence
  Description of Artificial Sequence: Synthetic oligonucleotide
  Sense strand starting at position 1662 of SEQ ID NO: 1885219
augacaauagugugaaaua

SEQ ID NO: 2325431 - RNA, 19 nt, Artificial Sequence
  Description of Artificial Sequence: Synthetic oligonucleotide
  Antisense strand to SEQ ID NO: 2325430
uauuucacacuauugucau

SEQ ID NO: 2325432 - RNA, 19 nt, Artificial Sequence
  Description of Artificial Sequence: Synthetic oligonucleotide
  Sense strand starting at position 1673 of SEQ ID NO: 1885219
gugaaauaaugauucuuuc

SEQ ID NO: 2325433 - RNA, 19 nt, Artificial Sequence
  Description of Artificial Sequence: Synthetic oligonucleotide
  Antisense strand to SEQ ID NO: 2325432
gaaagaaucauuauuucac

SEQ ID NO: 2325434 - RNA, 19 nt, Artificial Sequence
  Description of Artificial Sequence: Synthetic oligonucleotide
  Sense strand starting at position 1688 of SEQ ID NO: 1885219
uuucuaaauugaucagugu

SEQ ID NO: 2325435 - RNA, 19 nt, Artificial Sequence
  Description of Artificial Sequence: Synthetic oligonucleotide
  Antisense strand to SEQ ID NO: 2325434
acacugaucaauuuagaaa

SEQ ID NO: 2325436 - RNA, 19 nt, Artificial Sequence
  Description of Artificial Sequence: Synthetic oligonucleotide
  Sense strand starting at position 1689 of SEQ ID NO: 1885219
uucuaaauugaucaguguu

SEQ ID NO: 2325437 - RNA, 19 nt, Artificial Sequence
  Description of Artificial Sequence: Synthetic oligonucleotide
  Antisense strand to SEQ ID NO: 2325436
aacacugaucaauuuagaa

SEQ ID NO: 2325438 - RNA, 19 nt, Artificial Sequence
  Description of Artificial Sequence: Synthetic oligonucleotide
  Sense strand starting at position 1926 of SEQ ID NO: 1885219
uguggaaccucauuauaug

SEQ ID NO: 2325439 - RNA, 19 nt, Artificial Sequence
  Description of Artificial Sequence: Synthetic oligonucleotide
  Antisense strand to SEQ ID NO: 2325438
cauauaaugagguuccaca

SEQ ID NO: 2325440 - RNA, 19 nt, Artificial Sequence
  Description of Artificial Sequence: Synthetic oligonucleotide
  Sense strand starting at position 1950 of SEQ ID NO: 1885219
auuggcaugccauaucaau

SEQ ID NO: 2325441 - RNA, 19 nt, Artificial Sequence
  Description of Artificial Sequence: Synthetic oligonucleotide
  Antisense strand to SEQ ID NO: 2325440
auugauauggcaugccaau

SEQ ID NO: 2325442 - RNA, 19 nt, Artificial Sequence
  Description of Artificial Sequence: Synthetic oligonucleotide
  Sense strand starting at position 2153 of SEQ ID NO: 1885219
aggaaauguuguguuuaau

SEQ ID NO: 2325443 - RNA, 19 nt, Artificial Sequence
  Description of Artificial Sequence: Synthetic oligonucleotide
  Antisense strand to SEQ ID NO: 2325442
auuaaacacaacauuuccu

SEQ ID NO: 2325444 - RNA, 19 nt, Artificial Sequence
  Description of Artificial Sequence: Synthetic oligonucleotide
  Sense strand starting at position 2214 of SEQ ID NO: 1885219
gcaagaagcuagguuacaa

SEQ ID NO: 2325445 - RNA, 19 nt, Artificial Sequence
  Description of Artificial Sequence: Synthetic oligonucleotide
  Antisense strand to SEQ ID NO: 2325444
uuguaaccuagcuucuugc

SEQ ID NO: 2325446 - RNA, 19 nt, Artificial Sequence
  Description of Artificial Sequence: Synthetic oligonucleotide
  Sense strand starting at position 2225 of SEQ ID NO: 1885219
gguuacaaacuuggauaau

SEQ ID NO: 2325447 - RNA, 19 nt, Artificial Sequence
  Description of Artificial Sequence: Synthetic oligonucleotide
  Antisense strand to SEQ ID NO: 2325446
auuauccaaguuuguaacc

SEQ ID NO: 2325448 - RNA, 19 nt, Artificial Sequence
  Description of Artificial Sequence: Synthetic oligonucleotide
  Sense strand starting at position 2500 of SEQ ID NO: 1885219
uggagaagauguguaucua

SEQ ID NO: 2325449 - RNA, 19 nt, Artificial Sequence
  Description of Artificial Sequence: Synthetic oligonucleotide
  Antisense strand to SEQ ID NO: 2325448
uagauacacaucuucucca

SEQ ID NO: 2325450 - RNA, 19 nt, Artificial Sequence
  Description of Artificial Sequence: Synthetic oligonucleotide
  Sense strand starting at position 2504 of SEQ ID NO: 1885219
gaagauguguaucuauggu

SEQ ID NO: 2325451 - RNA, 19 nt, Artificial Sequence
  Description of Artificial Sequence: Synthetic oligonucleotide
  Antisense strand to SEQ ID NO: 2325450
accauagauacacaucuuc

SEQ ID NO: 2325452 - RNA, 19 nt, Artificial Sequence
  Description of Artificial Sequence: Synthetic oligonucleotide
  Sense strand starting at position 2513 of SEQ ID NO: 1885219
uaucuauggugucuugaua

SEQ ID NO: 2325453 - RNA, 19 nt, Artificial Sequence
  Description of Artificial Sequence: Synthetic oligonucleotide
  Antisense strand to SEQ ID NO: 2325452
uaucaagacaccauagaua

SEQ ID NO: 2325454 - RNA, 19 nt, Artificial Sequence
  Description of Artificial Sequence: Synthetic oligonucleotide
  Sense strand starting at position 2526 of SEQ ID NO: 1885219
uugauauaucacuggugga

SEQ ID NO: 2325455 - RNA, 19 nt, Artificial Sequence
  Description of Artificial Sequence: Synthetic oligonucleotide
  Antisense strand to SEQ ID NO: 2325454
uccaccagugauauaucaa

SEQ ID NO: 2325456 - RNA, 19 nt, Artificial Sequence
  Description of Artificial Sequence: Synthetic oligonucleotide
  Sense strand starting at position 2527 of SEQ ID NO: 1885219
ugauauaucacugguggaa

SEQ ID NO: 2325457 - RNA, 19 nt, Artificial Sequence
  Description of Artificial Sequence: Synthetic oligonucleotide
  Antisense strand to SEQ ID NO: 2325456
uuccaccagugauauauca

SEQ ID NO: 2325458 - RNA, 19 nt, Artificial Sequence
  Description of Artificial Sequence: Synthetic oligonucleotide
  Sense strand starting at position 2530 of SEQ ID NO: 1885219
uauaucacugguggaagua

SEQ ID NO: 2325459 - RNA, 19 nt, Artificial Sequence
  Description of Artificial Sequence: Synthetic oligonucleotide
  Antisense strand to SEQ ID NO: 2325458
uacuuccaccagugauaua

SEQ ID NO: 2325460 - RNA, 19 nt, Artificial Sequence
  Description of Artificial Sequence: Synthetic oligonucleotide
  Sense strand starting at position 2539 of SEQ ID NO: 1885219
gguggaaguauacauuagu

SEQ ID NO: 2325461 - RNA, 19 nt, Artificial Sequence
  Description of Artificial Sequence: Synthetic oligonucleotide
  Antisense strand to SEQ ID NO: 2325460
acuaauguauacuuccacc

SEQ ID NO: 2325462 - RNA, 19 nt, Artificial Sequence
  Description of Artificial Sequence: Synthetic oligonucleotide
  Sense strand starting at position 2638 of SEQ ID NO: 1885219
guauauauccaagagcaac

SEQ ID NO: 2325463 - RNA, 19 nt, Artificial Sequence
  Description of Artificial Sequence: Synthetic oligonucleotide
  Antisense strand to SEQ ID NO: 2325462
guugcucuuggauauauac

SEQ ID NO: 2325464 - RNA, 19 nt, Artificial Sequence
  Description of Artificial Sequence: Synthetic oligonucleotide
  Sense strand starting at position 3112 of SEQ ID NO: 1885219
cugccagauagucauacga

SEQ ID NO: 2325465 - RNA, 19 nt, Artificial Sequence
  Description of Artificial Sequence: Synthetic oligonucleotide
  Antisense strand to SEQ ID NO: 2325464
ucguaugacuaucuggcag

SEQ ID NO: 2325466 - RNA, 19 nt, Artificial Sequence
  Description of Artificial Sequence: Synthetic oligonucleotide
  Sense strand starting at position 3120 of SEQ ID NO: 1885219
uagucauacgaugauacga

SEQ ID NO: 2325467 - RNA, 19 nt, Artificial Sequence
  Description of Artificial Sequence: Synthetic oligonucleotide
  Antisense strand to SEQ ID NO: 2325466
ucguaucaucguaugacua

SEQ ID NO: 2325468 - RNA, 19 nt, Artificial Sequence
  Description of Artificial Sequence: Synthetic oligonucleotide
  Sense strand starting at position 3291 of SEQ ID NO: 1885219
uggaaagauucucaauuug

SEQ ID NO: 2325469 - RNA, 19 nt, Artificial Sequence
  Description of Artificial Sequence: Synthetic oligonucleotide
  Antisense strand to SEQ ID NO: 2325468
caaauugagaaucuuucca

SEQ ID NO: 2325470 - RNA, 19 nt, Artificial Sequence
  Description of Artificial Sequence: Synthetic oligonucleotide
  Sense strand starting at position 3332 of SEQ ID NO: 1885219
guaagauugaaaggaagcu

SEQ ID NO: 2325471 - RNA, 19 nt, Artificial Sequence
  Description of Artificial Sequence: Synthetic oligonucleotide
  Antisense strand to SEQ ID NO: 2325470
agcuuccuuucaaucuuac

SEQ ID NO: 2325472 - RNA, 19 nt, Artificial Sequence
  Description of Artificial Sequence: Synthetic oligonucleotide
  Sense strand starting at position 3527 of SEQ ID NO: 1885219
ugauuacagccuuagcaau

SEQ ID NO: 2325473 - RNA, 19 nt, Artificial Sequence
  Description of Artificial Sequence: Synthetic oligonucleotide
  Antisense strand to SEQ ID NO: 2325472
auugcuaaggcuguaauca

SEQ ID NO: 2325474 - RNA, 19 nt, Artificial Sequence
  Description of Artificial Sequence: Synthetic oligonucleotide
  Sense strand starting at position 3555 of SEQ ID NO: 1885219
uggcuaaauguugacuuua

SEQ ID NO: 2325475 - RNA, 19 nt, Artificial Sequence
  Description of Artificial Sequence: Synthetic oligonucleotide
  Antisense strand to SEQ ID NO: 2325474
uaaagucaacauuuagcca

SEQ ID NO: 2325476 - RNA, 19 nt, Artificial Sequence
  Description of Artificial Sequence: Synthetic oligonucleotide
  Sense strand starting at position 3595 of SEQ ID NO: 1885219
gguaauaaaugauucucua

SEQ ID NO: 2325477 - RNA, 19 nt, Artificial Sequence
  Description of Artificial Sequence: Synthetic oligonucleotide
  Antisense strand to SEQ ID NO: 2325476
uagagaaucauuuauuacc

SEQ ID NO: 2325478 - RNA, 19 nt, Artificial Sequence
  Description of Artificial Sequence: Synthetic oligonucleotide
  Sense strand starting at position 3916 of SEQ ID NO: 1885219
ucaucauguggugauuaca

SEQ ID NO: 2325479 - RNA, 19 nt, Artificial Sequence
  Description of Artificial Sequence: Synthetic oligonucleotide
  Antisense strand to SEQ ID NO: 2325478
uguaaucaccacaugauga

SEQ ID NO: 2325480 - RNA, 19 nt, Artificial Sequence
  Description of Artificial Sequence: Synthetic oligonucleotide
  Sense strand starting at position 3951 of SEQ ID NO: 1885219
gaacuuguaggcuguaaag

SEQ ID NO: 2325481 - RNA, 19 nt, Artificial Sequence
  Description of Artificial Sequence: Synthetic oligonucleotide
  Antisense strand to SEQ ID NO: 2325480
cuuuacagccuacaaguuc

SEQ ID NO: 2325482 - RNA, 19 nt, Artificial Sequence
  Description of Artificial Sequence: Synthetic oligonucleotide
  Sense strand starting at position 3975 of SEQ ID NO: 1885219
gcucuauaacuugacaagu

SEQ ID NO: 2325483 - RNA, 19 nt, Artificial Sequence
  Description of Artificial Sequence: Synthetic oligonucleotide
  Antisense strand to SEQ ID NO: 2325482
acuugucaaguuauagagc

SEQ ID NO: 2325484 - RNA, 19 nt, Artificial Sequence
  Description of Artificial Sequence: Synthetic oligonucleotide
  Sense strand starting at position 160 of SEQ ID NO: 1885220
gguaaaggguagucuaacu

SEQ ID NO: 2325485 - RNA, 19 nt, Artificial Sequence
  Description of Artificial Sequence: Synthetic oligonucleotide
  Antisense strand to SEQ ID NO: 2325484
aguuagacuacccuuuacc

SEQ ID NO: 2325486 - RNA, 19 nt, Artificial Sequence
  Description of Artificial Sequence: Synthetic oligonucleotide
  Sense strand starting at position 165 of SEQ ID NO: 1885220
aggguagucuaacucacaa

SEQ ID NO: 2325487 - RNA, 19 nt, Artificial Sequence
  Description of Artificial Sequence: Synthetic oligonucleotide
  Antisense strand to SEQ ID NO: 2325486
uugugaguuagacuacccu

SEQ ID NO: 2325488 - RNA, 19 nt, Artificial Sequence
  Description of Artificial Sequence: Synthetic oligonucleotide
  Sense strand starting at position 235 of SEQ ID NO: 1885220
ggucauauuauuggaauag

SEQ ID NO: 2325489 - RNA, 19 nt, Artificial Sequence
  Description of Artificial Sequence: Synthetic oligonucleotide
  Antisense strand to SEQ ID NO: 2325488
cuauuccaauaauaugacc

SEQ ID NO: 2325490 - RNA, 19 nt, Artificial Sequence
  Description of Artificial Sequence: Synthetic oligonucleotide
  Sense strand starting at position 548 of SEQ ID NO: 1885220
cgcaacagauucuuugaaa

SEQ ID NO: 2325491 - RNA, 19 nt, Artificial Sequence
  Description of Artificial Sequence: Synthetic oligonucleotide
  Antisense strand to SEQ ID NO: 2325490
uuucaaagaaucuguugcg

SEQ ID NO: 2325492 - RNA, 19 nt, Artificial Sequence
  Description of Artificial Sequence: Synthetic oligonucleotide
  Sense strand starting at position 549 of SEQ ID NO: 1885220
gcaacagauucuuugaaac

SEQ ID NO: 2325493 - RNA, 19 nt, Artificial Sequence
  Description of Artificial Sequence: Synthetic oligonucleotide
  Antisense strand to SEQ ID NO: 2325492
guuucaaagaaucuguugc

SEQ ID NO: 2325494 - RNA, 19 nt, Artificial Sequence
  Description of Artificial Sequence: Synthetic oligonucleotide
  Sense strand starting at position 688 of SEQ ID NO: 1885220
ggcuauauuuaugcaugca

SEQ ID NO: 2325495 - RNA, 19 nt, Artificial Sequence
  Description of Artificial Sequence: Synthetic oligonucleotide
  Antisense strand to SEQ ID NO: 2325494
ugcaugcauaaauauagcc

SEQ ID NO: 2325496 - RNA, 19 nt, Artificial Sequence
  Description of Artificial Sequence: Synthetic oligonucleotide
  Sense strand starting at position 773 of SEQ ID NO: 1885220
uugagcaagcuuuggaaga

SEQ ID NO: 2325497 - RNA, 19 nt, Artificial Sequence
  Description of Artificial Sequence: Synthetic oligonucleotide
  Antisense strand to SEQ ID NO: 2325496
ucuuccaaagcuugcucaa

SEQ ID NO: 2325498 - RNA, 19 nt, Artificial Sequence
  Description of Artificial Sequence: Synthetic oligonucleotide
  Sense strand starting at position 906 of SEQ ID NO: 1885220
ggaacuuacgaagguucga

SEQ ID NO: 2325499 - RNA, 19 nt, Artificial Sequence
  Description of Artificial Sequence: Synthetic oligonucleotide
  Antisense strand to SEQ ID NO: 2325498
ucgaaccuucguaaguucc

SEQ ID NO: 2325500 - RNA, 19 nt, Artificial Sequence
  Description of Artificial Sequence: Synthetic oligonucleotide
  Sense strand starting at position 969 of SEQ ID NO: 1885220
gugugacccaguuguauuu

SEQ ID NO: 2325501 - RNA, 19 nt, Artificial Sequence
  Description of Artificial Sequence: Synthetic oligonucleotide
  Antisense strand to SEQ ID NO: 2325500
aaauacaacugggucacac

SEQ ID NO: 2325502 - RNA, 19 nt, Artificial Sequence
  Description of Artificial Sequence: Synthetic oligonucleotide
  Sense strand starting at position 1075 of SEQ ID NO: 1885220
aauagcagccuuggaagau

SEQ ID NO: 2325503 - RNA, 19 nt, Artificial Sequence
  Description of Artificial Sequence: Synthetic oligonucleotide
  Antisense strand to SEQ ID NO: 2325502
aucuuccaaggcugcuauu

SEQ ID NO: 2325504 - RNA, 19 nt, Artificial Sequence
  Description of Artificial Sequence: Synthetic oligonucleotide
  Sense strand starting at position 1085 of SEQ ID NO: 1885220
uuggaagauccuggaguca

SEQ ID NO: 2325505 - RNA, 19 nt, Artificial Sequence
  Description of Artificial Sequence: Synthetic oligonucleotide
  Antisense strand to SEQ ID NO: 2325504
ugacuccaggaucuuccaa

SEQ ID NO: 2325506 - RNA, 19 nt, Artificial Sequence
  Description of Artificial Sequence: Synthetic oligonucleotide
  Sense strand starting at position 1262 of SEQ ID NO: 1885220
gugaaucaccggcauaauu

SEQ ID NO: 2325507 - RNA, 19 nt, Artificial Sequence
  Description of Artificial Sequence: Synthetic oligonucleotide
  Antisense strand to SEQ ID NO: 2325506
aauuaugccggugauucac

SEQ ID NO: 2325508 - RNA, 19 nt, Artificial Sequence
  Description of Artificial Sequence: Synthetic oligonucleotide
  Sense strand starting at position 1279 of SEQ ID NO: 1885220
uuggaauucuaaccucgaa

SEQ ID NO: 2325509 - RNA, 19 nt, Artificial Sequence
  Description of Artificial Sequence: Synthetic oligonucleotide
  Antisense strand to SEQ ID NO: 2325508
uucgagguuagaauuccaa

SEQ ID NO: 2325510 - RNA, 19 nt, Artificial Sequence
  Description of Artificial Sequence: Synthetic oligonucleotide
  Sense strand starting at position 1397 of SEQ ID NO: 1885220
gcagaacgaugagucagaa

SEQ ID NO: 2325511 - RNA, 19 nt, Artificial Sequence
  Description of Artificial Sequence: Synthetic oligonucleotide
  Antisense strand to SEQ ID NO: 2325510
uucugacucaucguucugc

SEQ ID NO: 2325512 - RNA, 19 nt, Artificial Sequence
  Description of Artificial Sequence: Synthetic oligonucleotide
  Sense strand starting at position 1507 of SEQ ID NO: 1885220
gugucacuugauuauaaac

SEQ ID NO: 2325513 - RNA, 19 nt, Artificial Sequence
  Description of Artificial Sequence: Synthetic oligonucleotide
  Antisense strand to SEQ ID NO: 2325512
guuuauaaucaagugacac

SEQ ID NO: 2325514 - RNA, 19 nt, Artificial Sequence
  Description of Artificial Sequence: Synthetic oligonucleotide
  Sense strand starting at position 1641 of SEQ ID NO: 1885220
uccacuaucgggcaaacau

SEQ ID NO: 2325515 - RNA, 19 nt, Artificial Sequence
  Description of Artificial Sequence: Synthetic oligonucleotide
  Antisense strand to SEQ ID NO: 2325514
auguuugcccgauagugga

SEQ ID NO: 2325516 - RNA, 19 nt, Artificial Sequence
  Description of Artificial Sequence: Synthetic oligonucleotide
  Sense strand starting at position 1720 of SEQ ID NO: 1885220
cuuagaguccaguggaaag

SEQ ID NO: 2325517 - RNA, 19 nt, Artificial Sequence
  Description of Artificial Sequence: Synthetic oligonucleotide
  Antisense strand to SEQ ID NO: 2325516
cuuuccacuggacucuaag

SEQ ID NO: 2325518 - RNA, 19 nt, Artificial Sequence
  Description of Artificial Sequence: Synthetic oligonucleotide
  Sense strand starting at position 1786 of SEQ ID NO: 1885220
auacauagguaugucuaua

SEQ ID NO: 2325519 - RNA, 19 nt, Artificial Sequence
  Description of Artificial Sequence: Synthetic oligonucleotide
  Antisense strand to SEQ ID NO: 2325518
uauagacauaccuauguau

SEQ ID NO: 2325520 - RNA, 19 nt, Artificial Sequence
  Description of Artificial Sequence: Synthetic oligonucleotide
  Sense strand starting at position 2030 of SEQ ID NO: 1885220
accaguuaacagggugaga

SEQ ID NO: 2325521 - RNA, 19 nt, Artificial Sequence
  Description of Artificial Sequence: Synthetic oligonucleotide
  Antisense strand to SEQ ID NO: 2325520
ucucacccuguuaacuggu

SEQ ID NO: 2325522 - RNA, 19 nt, Artificial Sequence
  Description of Artificial Sequence: Synthetic oligonucleotide
  Sense strand starting at position 2168 of SEQ ID NO: 1885220
augucucagugaccuagaa

SEQ ID NO: 2325523 - RNA, 19 nt, Artificial Sequence
  Description of Artificial Sequence: Synthetic oligonucleotide
  Antisense strand to SEQ ID NO: 2325522
uucuaggucacugagacau

SEQ ID NO: 2325524 - RNA, 19 nt, Artificial Sequence
  Description of Artificial Sequence: Synthetic oligonucleotide
  Sense strand starting at position 2204 of SEQ ID NO: 1885220
ggugcagcagugcuuuaau

SEQ ID NO: 2325525 - RNA, 19 nt, Artificial Sequence
  Description of Artificial Sequence: Synthetic oligonucleotide
  Antisense strand to SEQ ID NO: 2325524
auuaaagcacugcugcacc

SEQ ID NO: 2325526 - RNA, 19 nt, Artificial Sequence
  Description of Artificial Sequence: Synthetic oligonucleotide
  Sense strand starting at position 2261 of SEQ ID NO: 1885220
ggaguggugucacugagag

SEQ ID NO: 2325527 - RNA, 19 nt, Artificial Sequence
  Description of Artificial Sequence: Synthetic oligonucleotide
  Antisense strand to SEQ ID NO: 2325526
cucucagugacaccacucc

SEQ ID NO: 2325528 - RNA, 19 nt, Artificial Sequence
  Description of Artificial Sequence: Synthetic oligonucleotide
  Sense strand starting at position 2263 of SEQ ID NO: 1885220
aguggugucacugagagga

SEQ ID NO: 2325529 - RNA, 19 nt, Artificial Sequence
  Description of Artificial Sequence: Synthetic oligonucleotide
  Antisense strand to SEQ ID NO: 2325528
uccucucagugacaccacu

SEQ ID NO: 2325530 - RNA, 19 nt, Artificial Sequence
  Description of Artificial Sequence: Synthetic oligonucleotide
  Sense strand starting at position 2341 of SEQ ID NO: 1885220
gcacaaggucacugggauu

SEQ ID NO: 2325531 - RNA, 19 nt, Artificial Sequence
  Description of Artificial Sequence: Synthetic oligonucleotide
  Antisense strand to SEQ ID NO: 2325530
aaucccagugaccuugugc

SEQ ID NO: 2325532 - RNA, 19 nt, Artificial Sequence
  Description of Artificial Sequence: Synthetic oligonucleotide
  Sense strand starting at position 2352 of SEQ ID NO: 1885220
cugggauugccugaagcuu

SEQ ID NO: 2325533 - RNA, 19 nt, Artificial Sequence
  Description of Artificial Sequence: Synthetic oligonucleotide
  Antisense strand to SEQ ID NO: 2325532
aagcuucaggcaaucccag

SEQ ID NO: 2325534 - RNA, 19 nt, Artificial Sequence
  Description of Artificial Sequence: Synthetic oligonucleotide
  Sense strand starting at position 2650 of SEQ ID NO: 1885220
accagaucccuuuguggga

SEQ ID NO: 2325535 - RNA, 19 nt, Artificial Sequence
  Description of Artificial Sequence: Synthetic oligonucleotide
  Antisense strand to SEQ ID NO: 2325534
ucccacaaagggaucuggu

SEQ ID NO: 2325536 - RNA, 19 nt, Artificial Sequence
  Description of Artificial Sequence: Synthetic oligonucleotide
  Sense strand starting at position 2654 of SEQ ID NO: 1885220
gaucccuuugugggacuau

SEQ ID NO: 2325537 - RNA, 19 nt, Artificial Sequence
  Description of Artificial Sequence: Synthetic oligonucleotide
  Antisense strand to SEQ ID NO: 2325536
auagucccacaaagggauc

SEQ ID NO: 2325538 - RNA, 19 nt, Artificial Sequence
  Description of Artificial Sequence: Synthetic oligonucleotide
  Sense strand starting at position 2783 of SEQ ID NO: 1885220
uggugaccgauuuguuauc

SEQ ID NO: 2325539 - RNA, 19 nt, Artificial Sequence
  Description of Artificial Sequence: Synthetic oligonucleotide
  Antisense strand to SEQ ID NO: 2325538
gauaacaaaucggucacca

SEQ ID NO: 2325540 - RNA, 19 nt, Artificial Sequence
  Description of Artificial Sequence: Synthetic oligonucleotide
  Sense strand starting at position 2847 of SEQ ID NO: 1885220
ugaagagcuuuccucaaag

SEQ ID NO: 2325541 - RNA, 19 nt, Artificial Sequence
  Description of Artificial Sequence: Synthetic oligonucleotide
  Antisense strand to SEQ ID NO: 2325540
cuuugaggaaagcucuuca

SEQ ID NO: 2325542 - RNA, 19 nt, Artificial Sequence
  Description of Artificial Sequence: Synthetic oligonucleotide
  Sense strand starting at position 3024 of SEQ ID NO: 1885220
uguuguuauagggauuccu

SEQ ID NO: 2325543 - RNA, 19 nt, Artificial Sequence
  Description of Artificial Sequence: Synthetic oligonucleotide
  Antisense strand to SEQ ID NO: 2325542
aggaaucccuauaacaaca

SEQ ID NO: 2325544 - RNA, 19 nt, Artificial Sequence
  Description of Artificial Sequence: Synthetic oligonucleotide
  Sense strand starting at position 3093 of SEQ ID NO: 1885220
uggcuuccucaagagacau

SEQ ID NO: 2325545 - RNA, 19 nt, Artificial Sequence
  Description of Artificial Sequence: Synthetic oligonucleotide
  Antisense strand to SEQ ID NO: 2325544
augucucuugaggaagcca

SEQ ID NO: 2325546 - RNA, 19 nt, Artificial Sequence
  Description of Artificial Sequence: Synthetic oligonucleotide
  Sense strand starting at position 3136 of SEQ ID NO: 1885220
ucaggaaacugcuuacuca

SEQ ID NO: 2325547 - RNA, 19 nt, Artificial Sequence
  Description of Artificial Sequence: Synthetic oligonucleotide
  Antisense strand to SEQ ID NO: 2325546
ugaguaagcaguuuccuga

SEQ ID NO: 2325548 - RNA, 19 nt, Artificial Sequence
  Description of Artificial Sequence: Synthetic oligonucleotide
  Sense strand starting at position 3139 of SEQ ID NO: 1885220
ggaaacugcuuacucaauu

SEQ ID NO: 2325549 - RNA, 19 nt, Artificial Sequence
  Description of Artificial Sequence: Synthetic oligonucleotide
  Antisense strand to SEQ ID NO: 2325548
aauugaguaagcaguuucc

SEQ ID NO: 2325550 - RNA, 19 nt, Artificial Sequence
  Description of Artificial Sequence: Synthetic oligonucleotide
  Sense strand starting at position 3227 of SEQ ID NO: 1885220
uuuaauugugcugaacaga

SEQ ID NO: 2325551 - RNA, 19 nt, Artificial Sequence
  Description of Artificial Sequence: Synthetic oligonucleotide
  Antisense strand to SEQ ID NO: 2325550
ucuguucagcacaauuaaa

SEQ ID NO: 2325552 - RNA, 19 nt, Artificial Sequence
  Description of Artificial Sequence: Synthetic oligonucleotide
  Sense strand starting at position 3466 of SEQ ID NO: 1885220
auugcuuuacuggacauca

SEQ ID NO: 2325553 - RNA, 19 nt, Artificial Sequence
  Description of Artificial Sequence: Synthetic oligonucleotide
  Antisense strand to SEQ ID NO: 2325552
ugauguccaguaaagcaau

SEQ ID NO: 2325554 - RNA, 19 nt, Artificial Sequence
  Description of Artificial Sequence: Synthetic oligonucleotide
  Sense strand starting at position 3468 of SEQ ID NO: 1885220
ugcuuuacuggacaucaua

SEQ ID NO: 2325555 - RNA, 19 nt, Artificial Sequence
  Description of Artificial Sequence: Synthetic oligonucleotide
  Antisense strand to SEQ ID NO: 2325554
uaugauguccaguaaagca

SEQ ID NO: 2325556 - RNA, 19 nt, Artificial Sequence
  Description of Artificial Sequence: Synthetic oligonucleotide
  Sense strand starting at position 3527 of SEQ ID NO: 1885220
guggauguuggguauaagu

SEQ ID NO: 2325557 - RNA, 19 nt, Artificial Sequence
  Description of Artificial Sequence: Synthetic oligonucleotide
  Antisense strand to SEQ ID NO: 2325556
acuuauacccaacauccac

SEQ ID NO: 2325558 - RNA, 19 nt, Artificial Sequence
  Description of Artificial Sequence: Synthetic oligonucleotide
  Sense strand starting at position 3529 of SEQ ID NO: 1885220
ggauguuggguauaaguaa

SEQ ID NO: 2325559 - RNA, 19 nt, Artificial Sequence
  Description of Artificial Sequence: Synthetic oligonucleotide
  Antisense strand to SEQ ID NO: 2325558
uuacuuauacccaacaucc

SEQ ID NO: 2325560 - RNA, 19 nt, Artificial Sequence
  Description of Artificial Sequence: Synthetic oligonucleotide
  Sense strand starting at position 3544 of SEQ ID NO: 1885220
guaaauuagcaacagguga

SEQ ID NO: 2325561 - RNA, 19 nt, Artificial Sequence
  Description of Artificial Sequence: Synthetic oligonucleotide
  Antisense strand to SEQ ID NO: 2325560
ucaccuguugcuaauuuac

SEQ ID NO: 2325562 - RNA, 19 nt, Artificial Sequence
  Description of Artificial Sequence: Synthetic oligonucleotide
  Sense strand starting at position 3615 of SEQ ID NO: 1885220
uugcaaugucaaggaagga

SEQ ID NO: 2325563 - RNA, 19 nt, Artificial Sequence
  Description of Artificial Sequence: Synthetic oligonucleotide
  Antisense strand to SEQ ID NO: 2325562
uccuuccuugacauugcaa

SEQ ID NO: 2325564 - RNA, 19 nt, Artificial Sequence
  Description of Artificial Sequence: Synthetic oligonucleotide
  Sense strand starting at position 83 of SEQ ID NO: 1885221
guaagaaacuaugucucaa

SEQ ID NO: 2325565 - RNA, 19 nt, Artificial Sequence
  Description of Artificial Sequence: Synthetic oligonucleotide
  Antisense strand to SEQ ID NO: 2325564
uugagacauaguuucuuac

SEQ ID NO: 2325566 - RNA, 19 nt, Artificial Sequence
  Description of Artificial Sequence: Synthetic oligonucleotide
  Sense strand starting at position 144 of SEQ ID NO: 1885221
ccuagauauccugaugccu

SEQ ID NO: 2325567 - RNA, 19 nt, Artificial Sequence
  Description of Artificial Sequence: Synthetic oligonucleotide
  Antisense strand to SEQ ID NO: 2325566
aggcaucaggauaucuagg

SEQ ID NO: 2325568 - RNA, 19 nt, Artificial Sequence
  Description of Artificial Sequence: Synthetic oligonucleotide
  Sense strand starting at position 196 of SEQ ID NO: 1885221
gguggacauguguagaaca

SEQ ID NO: 2325569 - RNA, 19 nt, Artificial Sequence
  Description of Artificial Sequence: Synthetic oligonucleotide
  Antisense strand to SEQ ID NO: 2325568
uguucuacacauguccacc

SEQ ID NO: 2325570 - RNA, 19 nt, Artificial Sequence
  Description of Artificial Sequence: Synthetic oligonucleotide
  Sense strand starting at position 201 of SEQ ID NO: 1885221
acauguguagaacaucauu

SEQ ID NO: 2325571 - RNA, 19 nt, Artificial Sequence
  Description of Artificial Sequence: Synthetic oligonucleotide
  Antisense strand to SEQ ID NO: 2325570
aaugauguucuacacaugu

SEQ ID NO: 2325572 - RNA, 19 nt, Artificial Sequence
  Description of Artificial Sequence: Synthetic oligonucleotide
  Sense strand starting at position 204 of SEQ ID NO: 1885221
uguguagaacaucauucua

SEQ ID NO: 2325573 - RNA, 19 nt, Artificial Sequence
  Description of Artificial Sequence: Synthetic oligonucleotide
  Antisense strand to SEQ ID NO: 2325572
uagaaugauguucuacaca

SEQ ID NO: 2325574 - RNA, 19 nt, Artificial Sequence
  Description of Artificial Sequence: Synthetic oligonucleotide
  Sense strand starting at position 206 of SEQ ID NO: 1885221
uguagaacaucauucuaug

SEQ ID NO: 2325575 - RNA, 19 nt, Artificial Sequence
  Description of Artificial Sequence: Synthetic oligonucleotide
  Antisense strand to SEQ ID NO: 2325574
cauagaaugauguucuaca

SEQ ID NO: 2325576 - RNA, 19 nt, Artificial Sequence
  Description of Artificial Sequence: Synthetic oligonucleotide
  Sense strand starting at position 212 of SEQ ID NO: 1885221
acaucauucuaugcagaug

SEQ ID NO: 2325577 - RNA, 19 nt, Artificial Sequence
  Description of Artificial Sequence: Synthetic oligonucleotide
  Antisense strand to SEQ ID NO: 2325576
caucugcauagaaugaugu

SEQ ID NO: 2325578 - RNA, 19 nt, Artificial Sequence
  Description of Artificial Sequence: Synthetic oligonucleotide
  Sense strand starting at position 301 of SEQ ID NO: 1885221
ccaggaauggauugugagu

SEQ ID NO: 2325579 - RNA, 19 nt, Artificial Sequence
  Description of Artificial Sequence: Synthetic oligonucleotide
  Antisense strand to SEQ ID NO: 2325578
acucacaauccauuccugg

SEQ ID NO: 2325580 - RNA, 19 nt, Artificial Sequence
  Description of Artificial Sequence: Synthetic oligonucleotide
  Sense strand starting at position 306 of SEQ ID NO: 1885221
aauggauugugagucuuga

SEQ ID NO: 2325581 - RNA, 19 nt, Artificial Sequence
  Description of Artificial Sequence: Synthetic oligonucleotide
  Antisense strand to SEQ ID NO: 2325580
ucaagacucacaauccauu

SEQ ID NO: 2325582 - RNA, 19 nt, Artificial Sequence
  Description of Artificial Sequence: Synthetic oligonucleotide
  Sense strand starting at position 316 of SEQ ID NO: 1885221
gagucuugacuuugauaau

SEQ ID NO: 2325583 - RNA, 19 nt, Artificial Sequence
  Description of Artificial Sequence: Synthetic oligonucleotide
  Antisense strand to SEQ ID NO: 2325582
auuaucaaagucaagacuc

SEQ ID NO: 2325584 - RNA, 19 nt, Artificial Sequence
  Description of Artificial Sequence: Synthetic oligonucleotide
  Sense strand starting at position 391 of SEQ ID NO: 1885221
uuaagagaacgugguuaaa

SEQ ID NO: 2325585 - RNA, 19 nt, Artificial Sequence
  Description of Artificial Sequence: Synthetic oligonucleotide
  Antisense strand to SEQ ID NO: 2325584
uuuaaccacguucucuuaa

SEQ ID NO: 2325586 - RNA, 19 nt, Artificial Sequence
  Description of Artificial Sequence: Synthetic oligonucleotide
  Sense strand starting at position 393 of SEQ ID NO: 1885221
aagagaacgugguuaaaua

SEQ ID NO: 2325587 - RNA, 19 nt, Artificial Sequence
  Description of Artificial Sequence: Synthetic oligonucleotide
  Antisense strand to SEQ ID NO: 2325586
uauuuaaccacguucucuu

SEQ ID NO: 2325588 - RNA, 19 nt, Artificial Sequence
  Description of Artificial Sequence: Synthetic oligonucleotide
  Sense strand starting at position 419 of SEQ ID NO: 1885221
ccaaauuucuuguggauuu

SEQ ID NO: 2325589 - RNA, 19 nt, Artificial Sequence
  Description of Artificial Sequence: Synthetic oligonucleotide
  Antisense strand to SEQ ID NO: 2325588
aaauccacaagaaauuugg

SEQ ID NO: 2325590 - RNA, 19 nt, Artificial Sequence
  Description of Artificial Sequence: Synthetic oligonucleotide
  Sense strand starting at position 500 of SEQ ID NO: 1885221
gccuauuucuuguuguaga

SEQ ID NO: 2325591 - RNA, 19 nt, Artificial Sequence
  Description of Artificial Sequence: Synthetic oligonucleotide
  Antisense strand to SEQ ID NO: 2325590
ucuacaacaagaaauaggc

SEQ ID NO: 2325592 - RNA, 19 nt, Artificial Sequence
  Description of Artificial Sequence: Synthetic oligonucleotide
  Sense strand starting at position 643 of SEQ ID NO: 1885221
cccauuggucacuauuaga

SEQ ID NO: 2325593 - RNA, 19 nt, Artificial Sequence
  Description of Artificial Sequence: Synthetic oligonucleotide
  Antisense strand to SEQ ID NO: 2325592
ucuaauagugaccaauggg

SEQ ID NO: 2325594 - RNA, 19 nt, Artificial Sequence
  Description of Artificial Sequence: Synthetic oligonucleotide
  Sense strand starting at position 717 of SEQ ID NO: 1885221
caaacacaucagggaguuu

SEQ ID NO: 2325595 - RNA, 19 nt, Artificial Sequence
  Description of Artificial Sequence: Synthetic oligonucleotide
  Antisense strand to SEQ ID NO: 2325594
aaacucccugauguguuug

SEQ ID NO: 2325596 - RNA, 19 nt, Artificial Sequence
  Description of Artificial Sequence: Synthetic oligonucleotide
  Sense strand starting at position 726 of SEQ ID NO: 1885221
cagggaguuuacuccuaag

SEQ ID NO: 2325597 - RNA, 19 nt, Artificial Sequence
  Description of Artificial Sequence: Synthetic oligonucleotide
  Antisense strand to SEQ ID NO: 2325596
cuuaggaguaaacucccug

SEQ ID NO: 2325598 - RNA, 19 nt, Artificial Sequence
  Description of Artificial Sequence: Synthetic oligonucleotide
  Sense strand starting at position 838 of SEQ ID NO: 1885221
agagguguugcauaagauu

SEQ ID NO: 2325599 - RNA, 19 nt, Artificial Sequence
  Description of Artificial Sequence: Synthetic oligonucleotide
  Antisense strand to SEQ ID NO: 2325598
aaucuuaugcaacaccucu

SEQ ID NO: 2325600 - RNA, 19 nt, Artificial Sequence
  Description of Artificial Sequence: Synthetic oligonucleotide
  Sense strand starting at position 944 of SEQ ID NO: 1885221
uccugucuuguuuagagaa

SEQ ID NO: 2325601 - RNA, 19 nt, Artificial Sequence
  Description of Artificial Sequence: Synthetic oligonucleotide
  Antisense strand to SEQ ID NO: 2325600
uucucuaaacaagacagga

SEQ ID NO: 2325602 - RNA, 19 nt, Artificial Sequence
  Description of Artificial Sequence: Synthetic oligonucleotide
  Sense strand starting at position 1030 of SEQ ID NO: 1885221
auuggaaauugucuuuauc

SEQ ID NO: 2325603 - RNA, 19 nt, Artificial Sequence
  Description of Artificial Sequence: Synthetic oligonucleotide
  Antisense strand to SEQ ID NO: 2325602
gauaaagacaauuuccaau

SEQ ID NO: 2325604 - RNA, 19 nt, Artificial Sequence
  Description of Artificial Sequence: Synthetic oligonucleotide
  Sense strand starting at position 1032 of SEQ ID NO: 1885221
uggaaauugucuuuaucuc

SEQ ID NO: 2325605 - RNA, 19 nt, Artificial Sequence
  Description of Artificial Sequence: Synthetic oligonucleotide
  Antisense strand to SEQ ID NO: 2325604
gagauaaagacaauuucca

SEQ ID NO: 2325606 - RNA, 19 nt, Artificial Sequence
  Description of Artificial Sequence: Synthetic oligonucleotide
  Sense strand starting at position 1033 of SEQ ID NO: 1885221
ggaaauugucuuuaucucu

SEQ ID NO: 2325607 - RNA, 19 nt, Artificial Sequence
  Description of Artificial Sequence: Synthetic oligonucleotide
  Antisense strand to SEQ ID NO: 2325606
agagauaaagacaauuucc

SEQ ID NO: 2325608 - RNA, 19 nt, Artificial Sequence
  Description of Artificial Sequence: Synthetic oligonucleotide
  Sense strand starting at position 1426 of SEQ ID NO: 1885221
aucuuugugggccauagau

SEQ ID NO: 2325609 - RNA, 19 nt, Artificial Sequence
  Description of Artificial Sequence: Synthetic oligonucleotide
  Antisense strand to SEQ ID NO: 2325608
aucuauggcccacaaagau

SEQ ID NO: 2325610 - RNA, 19 nt, Artificial Sequence
  Description of Artificial Sequence: Synthetic oligonucleotide
  Sense strand starting at position 1428 of SEQ ID NO: 1885221
cuuugugggccauagauaa

SEQ ID NO: 2325611 - RNA, 19 nt, Artificial Sequence
  Description of Artificial Sequence: Synthetic oligonucleotide
  Antisense strand to SEQ ID NO: 2325610
uuaucuauggcccacaaag

SEQ ID NO: 2325612 - RNA, 19 nt, Artificial Sequence
  Description of Artificial Sequence: Synthetic oligonucleotide
  Sense strand starting at position 1497 of SEQ ID NO: 1885221
ucacuuugagaguggauaa

SEQ ID NO: 2325613 - RNA, 19 nt, Artificial Sequence
  Description of Artificial Sequence: Synthetic oligonucleotide
  Antisense strand to SEQ ID NO: 2325612
uuauccacucucaaaguga

SEQ ID NO: 2325614 - RNA, 19 nt, Artificial Sequence
  Description of Artificial Sequence: Synthetic oligonucleotide
  Sense strand starting at position 1650 of SEQ ID NO: 1885221
uuaacaguuugacugauua

SEQ ID NO: 2325615 - RNA, 19 nt, Artificial Sequence
  Description of Artificial Sequence: Synthetic oligonucleotide
  Antisense strand to SEQ ID NO: 2325614
uaaucagucaaacuguuaa

SEQ ID NO: 2325616 - RNA, 19 nt, Artificial Sequence
  Description of Artificial Sequence: Synthetic oligonucleotide
  Sense strand starting at position 1851 of SEQ ID NO: 1885221
aauggauuaugguuauaug

SEQ ID NO: 2325617 - RNA, 19 nt, Artificial Sequence
  Description of Artificial Sequence: Synthetic oligonucleotide
  Antisense strand to SEQ ID NO: 2325616
cauauaaccauaauccauu

SEQ ID NO: 2325618 - RNA, 19 nt, Artificial Sequence
  Description of Artificial Sequence: Synthetic oligonucleotide
  Sense strand starting at position 1852 of SEQ ID NO: 1885221
auggauuaugguuauaugu

SEQ ID NO: 2325619 - RNA, 19 nt, Artificial Sequence
  Description of Artificial Sequence: Synthetic oligonucleotide
  Antisense strand to SEQ ID NO: 2325618
acauauaaccauaauccau

SEQ ID NO: 2325620 - RNA, 19 nt, Artificial Sequence
  Description of Artificial Sequence: Synthetic oligonucleotide
  Sense strand starting at position 2008 of SEQ ID NO: 1885221
caaggaaaugagugcaugu

SEQ ID NO: 2325621 - RNA, 19 nt, Artificial Sequence
  Description of Artificial Sequence: Synthetic oligonucleotide
  Antisense strand to SEQ ID NO: 2325620
acaugcacucauuuccuug

SEQ ID NO: 2325622 - RNA, 19 nt, Artificial Sequence
  Description of Artificial Sequence: Synthetic oligonucleotide
  Sense strand starting at position 2226 of SEQ ID NO: 1885221
gaaugagaauggccuguca

SEQ ID NO: 2325623 - RNA, 19 nt, Artificial Sequence
  Description of Artificial Sequence: Synthetic oligonucleotide
  Antisense strand to SEQ ID NO: 2325622
ugacaggccauucucauuc

SEQ ID NO: 2325624 - RNA, 19 nt, Artificial Sequence
  Description of Artificial Sequence: Synthetic oligonucleotide
  Sense strand starting at position 2228 of SEQ ID NO: 1885221
augagaauggccugucaaa

SEQ ID NO: 2325625 - RNA, 19 nt, Artificial Sequence
  Description of Artificial Sequence: Synthetic oligonucleotide
  Antisense strand to SEQ ID NO: 2325624
uuugacaggccauucucau

SEQ ID NO: 2325626 - RNA, 19 nt, Artificial Sequence
  Description of Artificial Sequence: Synthetic oligonucleotide
  Sense strand starting at position 2880 of SEQ ID NO: 1885221
ugguuaauauaaguucuca

SEQ ID NO: 2325627 - RNA, 19 nt, Artificial Sequence
  Description of Artificial Sequence: Synthetic oligonucleotide
  Antisense strand to SEQ ID NO: 2325626
ugagaacuuauauuaacca

SEQ ID NO: 2325628 - RNA, 19 nt, Artificial Sequence
  Description of Artificial Sequence: Synthetic oligonucleotide
  Sense strand starting at position 3338 of SEQ ID NO: 1885221
ucuugaccacccuggaaau

SEQ ID NO: 2325629 - RNA, 19 nt, Artificial Sequence
  Description of Artificial Sequence: Synthetic oligonucleotide
  Antisense strand to SEQ ID NO: 2325628
auuuccaggguggucaaga

SEQ ID NO: 2325630 - RNA, 19 nt, Artificial Sequence
  Description of Artificial Sequence: Synthetic oligonucleotide
  Sense strand starting at position 3339 of SEQ ID NO: 1885221
cuugaccacccuggaaaua

SEQ ID NO: 2325631 - RNA, 19 nt, Artificial Sequence
  Description of Artificial Sequence: Synthetic oligonucleotide
  Antisense strand to SEQ ID NO: 2325630
uauuuccaggguggucaag

SEQ ID NO: 2325632 - RNA, 19 nt, Artificial Sequence
  Description of Artificial Sequence: Synthetic oligonucleotide
  Sense strand starting at position 3498 of SEQ ID NO: 1885221
agcacaucuggcuguauuu

SEQ ID NO: 2325633 - RNA, 19 nt, Artificial Sequence
  Description of Artificial Sequence: Synthetic oligonucleotide
  Antisense strand to SEQ ID NO: 2325632
aaauacagccagaugugcu

SEQ ID NO: 2325634 - RNA, 19 nt, Artificial Sequence
  Description of Artificial Sequence: Synthetic oligonucleotide
  Sense strand starting at position 3559 of SEQ ID NO: 1885221
ugguguuagcuugugucau

SEQ ID NO: 2325635 - RNA, 19 nt, Artificial Sequence
  Description of Artificial Sequence: Synthetic oligonucleotide
  Antisense strand to SEQ ID NO: 2325634
augacacaagcuaacacca

SEQ ID NO: 2325636 - RNA, 19 nt, Artificial Sequence
  Description of Artificial Sequence: Synthetic oligonucleotide
  Sense strand starting at position 3769 of SEQ ID NO: 1885221
guggcuauuugguugacau

SEQ ID NO: 2325637 - RNA, 19 nt, Artificial Sequence
  Description of Artificial Sequence: Synthetic oligonucleotide
  Antisense strand to SEQ ID NO: 2325636
augucaaccaaauagccac

SEQ ID NO: 2325638 - RNA, 19 nt, Artificial Sequence
  Description of Artificial Sequence: Synthetic oligonucleotide
  Sense strand starting at position 3780 of SEQ ID NO: 1885221
guugacauauacuucucau

SEQ ID NO: 2325639 - RNA, 19 nt, Artificial Sequence
  Description of Artificial Sequence: Synthetic oligonucleotide
  Antisense strand to SEQ ID NO: 2325638
augagaaguauaugucaac

SEQ ID NO: 2325640 - RNA, 19 nt, Artificial Sequence
  Description of Artificial Sequence: Synthetic oligonucleotide
  Sense strand starting at position 3895 of SEQ ID NO: 1885221
gguacauuaaauuguugga

SEQ ID NO: 2325641 - RNA, 19 nt, Artificial Sequence
  Description of Artificial Sequence: Synthetic oligonucleotide
  Antisense strand to SEQ ID NO: 2325640
uccaacaauuuaauguacc

SEQ ID NO: 2325642 - RNA, 19 nt, Artificial Sequence
  Description of Artificial Sequence: Synthetic oligonucleotide
  Sense strand starting at position 3925 of SEQ ID NO: 1885221
cacucucuugaaugugaga

SEQ ID NO: 2325643 - RNA, 19 nt, Artificial Sequence
  Description of Artificial Sequence: Synthetic oligonucleotide
  Antisense strand to SEQ ID NO: 2325642
ucucacauucaagagagug

SEQ ID NO: 2325644 - RNA, 19 nt, Artificial Sequence
  Description of Artificial Sequence: Synthetic oligonucleotide
  Sense strand starting at position 188 of SEQ ID NO: 1885222
cgccucaguccucagggau

SEQ ID NO: 2325645 - RNA, 19 nt, Artificial Sequence
  Description of Artificial Sequence: Synthetic oligonucleotide
  Antisense strand to SEQ ID NO: 2325644
aucccugaggacugaggcg

SEQ ID NO: 2325646 - RNA, 19 nt, Artificial Sequence
  Description of Artificial Sequence: Synthetic oligonucleotide
  Sense strand starting at position 214 of SEQ ID NO: 1885222
acugcaucuugugugacaa

SEQ ID NO: 2325647 - RNA, 19 nt, Artificial Sequence
  Description of Artificial Sequence: Synthetic oligonucleotide
  Antisense strand to SEQ ID NO: 2325646
uugucacacaagaugcagu

SEQ ID NO: 2325648 - RNA, 19 nt, Artificial Sequence
  Description of Artificial Sequence: Synthetic oligonucleotide
  Sense strand starting at position 224 of SEQ ID NO: 1885222
gugugacaauuuccuccuu

SEQ ID NO: 2325649 - RNA, 19 nt, Artificial Sequence
  Description of Artificial Sequence: Synthetic oligonucleotide
  Antisense strand to SEQ ID NO: 2325648
aaggaggaaauugucacac

SEQ ID NO: 2325650 - RNA, 19 nt, Artificial Sequence
  Description of Artificial Sequence: Synthetic oligonucleotide
  Sense strand starting at position 240 of SEQ ID NO: 1885222
cuucuuuaagggugaauaa

SEQ ID NO: 2325651 - RNA, 19 nt, Artificial Sequence
  Description of Artificial Sequence: Synthetic oligonucleotide
  Antisense strand to SEQ ID NO: 2325650
uuauucacccuuaaagaag

SEQ ID NO: 2325652 - RNA, 19 nt, Artificial Sequence
  Description of Artificial Sequence: Synthetic oligonucleotide
  Sense strand starting at position 629 of SEQ ID NO: 1885222
guggguuccuacccagagu

SEQ ID NO: 2325653 - RNA, 19 nt, Artificial Sequence
  Description of Artificial Sequence: Synthetic oligonucleotide
  Antisense strand to SEQ ID NO: 2325652
acucuggguaggaacccac

SEQ ID NO: 2325654 - RNA, 19 nt, Artificial Sequence
  Description of Artificial Sequence: Synthetic oligonucleotide
  Sense strand starting at position 793 of SEQ ID NO: 1885222
ggcugcuggauccaugaca

SEQ ID NO: 2325655 - RNA, 19 nt, Artificial Sequence
  Description of Artificial Sequence: Synthetic oligonucleotide
  Antisense strand to SEQ ID NO: 2325654
ugucauggauccagcagcc

SEQ ID NO: 2325656 - RNA, 19 nt, Artificial Sequence
  Description of Artificial Sequence: Synthetic oligonucleotide
  Sense strand starting at position 805 of SEQ ID NO: 1885222
caugacaguucugugcuua

SEQ ID NO: 2325657 - RNA, 19 nt, Artificial Sequence
  Description of Artificial Sequence: Synthetic oligonucleotide
  Antisense strand to SEQ ID NO: 2325656
uaagcacagaacugucaug

SEQ ID NO: 2325658 - RNA, 19 nt, Artificial Sequence
  Description of Artificial Sequence: Synthetic oligonucleotide
  Sense strand starting at position 810 of SEQ ID NO: 1885222
caguucugugcuuaguaau

SEQ ID NO: 2325659 - RNA, 19 nt, Artificial Sequence
  Description of Artificial Sequence: Synthetic oligonucleotide
  Antisense strand to SEQ ID NO: 2325658
auuacuaagcacagaacug

SEQ ID NO: 2325660 - RNA, 19 nt, Artificial Sequence
  Description of Artificial Sequence: Synthetic oligonucleotide
  Sense strand starting at position 830 of SEQ ID NO: 1885222
ggagccaccuggucaguua

SEQ ID NO: 2325661 - RNA, 19 nt, Artificial Sequence
  Description of Artificial Sequence: Synthetic oligonucleotide
  Antisense strand to SEQ ID NO: 2325660
uaacugaccagguggcucc

SEQ ID NO: 2325662 - RNA, 19 nt, Artificial Sequence
  Description of Artificial Sequence: Synthetic oligonucleotide
  Sense strand starting at position 831 of SEQ ID NO: 1885222
gagccaccuggucaguuau

SEQ ID NO: 2325663 - RNA, 19 nt, Artificial Sequence
  Description of Artificial Sequence: Synthetic oligonucleotide
  Antisense strand to SEQ ID NO: 2325662
auaacugaccagguggcuc

SEQ ID NO: 2325664 - RNA, 19 nt, Artificial Sequence
  Description of Artificial Sequence: Synthetic oligonucleotide
  Sense strand starting at position 954 of SEQ ID NO: 1885222
ggagccaucuccuuuccca

SEQ ID NO: 2325665 - RNA, 19 nt, Artificial Sequence
  Description of Artificial Sequence: Synthetic oligonucleotide
  Antisense strand to SEQ ID NO: 2325664
ugggaaaggagauggcucc

SEQ ID NO: 2325666 - RNA, 19 nt, Artificial Sequence
  Description of Artificial Sequence: Synthetic oligonucleotide
  Sense strand starting at position 993 of SEQ ID NO: 1885222
ucaagaaacuuaguguggu

SEQ ID NO: 2325667 - RNA, 19 nt, Artificial Sequence
  Description of Artificial Sequence: Synthetic oligonucleotide
  Antisense strand to SEQ ID NO: 2325666
accacacuaaguuucuuga

SEQ ID NO: 2325668 - RNA, 19 nt, Artificial Sequence
  Description of Artificial Sequence: Synthetic oligonucleotide
  Sense strand starting at position 1053 of SEQ ID NO: 1885222
ggcggauuaguugagcuca

SEQ ID NO: 2325669 - RNA, 19 nt, Artificial Sequence
  Description of Artificial Sequence: Synthetic oligonucleotide
  Antisense strand to SEQ ID NO: 2325668
ugagcucaacuaauccgcc

SEQ ID NO: 2325670 - RNA, 19 nt, Artificial Sequence
  Description of Artificial Sequence: Synthetic oligonucleotide
  Sense strand starting at position 1127 of SEQ ID NO: 1885222
cguaaauuagcccaggcau

SEQ ID NO: 2325671 - RNA, 19 nt, Artificial Sequence
  Description of Artificial Sequence: Synthetic oligonucleotide
  Antisense strand to SEQ ID NO: 2325670
augccugggcuaauuuacg

SEQ ID NO: 2325672 - RNA, 19 nt, Artificial Sequence
  Description of Artificial Sequence: Synthetic oligonucleotide
  Sense strand starting at position 1268 of SEQ ID NO: 1885222
gugagacccuguguuaaau

SEQ ID NO: 2325673 - RNA, 19 nt, Artificial Sequence
  Description of Artificial Sequence: Synthetic oligonucleotide
  Antisense strand to SEQ ID NO: 2325672
auuuaacacagggucucac

SEQ ID NO: 2325674 - RNA, 19 nt, Artificial Sequence
  Description of Artificial Sequence: Synthetic oligonucleotide
  Sense strand starting at position 1487 of SEQ ID NO: 1885222
uggucacucuagucugaaa

SEQ ID NO: 2325675 - RNA, 19 nt, Artificial Sequence
  Description of Artificial Sequence: Synthetic oligonucleotide
  Antisense strand to SEQ ID NO: 2325674
uuucagacuagagugacca

SEQ ID NO: 2325676 - RNA, 19 nt, Artificial Sequence
  Description of Artificial Sequence: Synthetic oligonucleotide
  Sense strand starting at position 1489 of SEQ ID NO: 1885222
gucacucuagucugaaaua

SEQ ID NO: 2325677 - RNA, 19 nt, Artificial Sequence
  Description of Artificial Sequence: Synthetic oligonucleotide
  Antisense strand to SEQ ID NO: 2325676
uauuucagacuagagugac

SEQ ID NO: 2325678 - RNA, 19 nt, Artificial Sequence
  Description of Artificial Sequence: Synthetic oligonucleotide
  Sense strand starting at position 1603 of SEQ ID NO: 1885222
gagaaauaaugugcucuga

SEQ ID NO: 2325679 - RNA, 19 nt, Artificial Sequence
  Description of Artificial Sequence: Synthetic oligonucleotide
  Antisense strand to SEQ ID NO: 2325678
ucagagcacauuauuucuc

SEQ ID NO: 2325680 - RNA, 19 nt, Artificial Sequence
  Description of Artificial Sequence: Synthetic oligonucleotide
  Sense strand starting at position 1605 of SEQ ID NO: 1885222
gaaauaaugugcucugagg

SEQ ID NO: 2325681 - RNA, 19 nt, Artificial Sequence
  Description of Artificial Sequence: Synthetic oligonucleotide
  Antisense strand to SEQ ID NO: 2325680
ccucagagcacauuauuuc

SEQ ID NO: 2325682 - RNA, 19 nt, Artificial Sequence
  Description of Artificial Sequence: Synthetic oligonucleotide
  Sense strand starting at position 1607 of SEQ ID NO: 1885222
aauaaugugcucugaggca

SEQ ID NO: 2325683 - RNA, 19 nt, Artificial Sequence
  Description of Artificial Sequence: Synthetic oligonucleotide
  Antisense strand to SEQ ID NO: 2325682
ugccucagagcacauuauu

SEQ ID NO: 2325684 - RNA, 19 nt, Artificial Sequence
  Description of Artificial Sequence: Synthetic oligonucleotide
  Sense strand starting at position 1612 of SEQ ID NO: 1885222
ugugcucugaggcauugaa

SEQ ID NO: 2325685 - RNA, 19 nt, Artificial Sequence
  Description of Artificial Sequence: Synthetic oligonucleotide
  Antisense strand to SEQ ID NO: 2325684
uucaaugccucagagcaca

SEQ ID NO: 2325686 - RNA, 19 nt, Artificial Sequence
  Description of Artificial Sequence: Synthetic oligonucleotide
  Sense strand starting at position 2166 of SEQ ID NO: 1885222
agcugacaacucgagguuu

SEQ ID NO: 2325687 - RNA, 19 nt, Artificial Sequence
  Description of Artificial Sequence: Synthetic oligonucleotide
  Antisense strand to SEQ ID NO: 2325686
aaaccucgaguugucagcu

SEQ ID NO: 2325688 - RNA, 19 nt, Artificial Sequence
  Description of Artificial Sequence: Synthetic oligonucleotide
  Sense strand starting at position 2168 of SEQ ID NO: 1885222
cugacaacucgagguuuau

SEQ ID NO: 2325689 - RNA, 19 nt, Artificial Sequence
  Description of Artificial Sequence: Synthetic oligonucleotide
  Antisense strand to SEQ ID NO: 2325688
auaaaccucgaguugucag

SEQ ID NO: 2325690 - RNA, 19 nt, Artificial Sequence
  Description of Artificial Sequence: Synthetic oligonucleotide
  Sense strand starting at position 2215 of SEQ ID NO: 1885222
uguccuuuaucucugagga

SEQ ID NO: 2325691 - RNA, 19 nt, Artificial Sequence
  Description of Artificial Sequence: Synthetic oligonucleotide
  Antisense strand to SEQ ID NO: 2325690
uccucagagauaaaggaca

SEQ ID NO: 2325692 - RNA, 19 nt, Artificial Sequence
  Description of Artificial Sequence: Synthetic oligonucleotide
  Sense strand starting at position 2216 of SEQ ID NO: 1885222
guccuuuaucucugaggag

SEQ ID NO: 2325693 - RNA, 19 nt, Artificial Sequence
  Description of Artificial Sequence: Synthetic oligonucleotide
  Antisense strand to SEQ ID NO: 2325692
cuccucagagauaaaggac

SEQ ID NO: 2325694 - RNA, 19 nt, Artificial Sequence
  Description of Artificial Sequence: Synthetic oligonucleotide
  Sense strand starting at position 2234 of SEQ ID NO: 1885222
gucucaauuuauucugucu

SEQ ID NO: 2325695 - RNA, 19 nt, Artificial Sequence
  Description of Artificial Sequence: Synthetic oligonucleotide
  Antisense strand to SEQ ID NO: 2325694
agacagaauaaauugagac

SEQ ID NO: 2325696 - RNA, 19 nt, Artificial Sequence
  Description of Artificial Sequence: Synthetic oligonucleotide
  Sense strand starting at position 2337 of SEQ ID NO: 1885222
ggcagaguugccuccgcua

SEQ ID NO: 2325697 - RNA, 19 nt, Artificial Sequence
  Description of Artificial Sequence: Synthetic oligonucleotide
  Antisense strand to SEQ ID NO: 2325696
uagcggaggcaacucugcc

SEQ ID NO: 2325698 - RNA, 19 nt, Artificial Sequence
  Description of Artificial Sequence: Synthetic oligonucleotide
  Sense strand starting at position 2663 of SEQ ID NO: 1885222
cagaaacccgugggugauu

SEQ ID NO: 2325699 - RNA, 19 nt, Artificial Sequence
  Description of Artificial Sequence: Synthetic oligonucleotide
  Antisense strand to SEQ ID NO: 2325698
aaucacccacggguuucug

SEQ ID NO: 2325700 - RNA, 19 nt, Artificial Sequence
  Description of Artificial Sequence: Synthetic oligonucleotide
  Sense strand starting at position 3035 of SEQ ID NO: 1885222
ggagaaucagcacgggaca

SEQ ID NO: 2325701 - RNA, 19 nt, Artificial Sequence
  Description of Artificial Sequence: Synthetic oligonucleotide
  Antisense strand to SEQ ID NO: 2325700
ugucccgugcugauucucc

SEQ ID NO: 2325702 - RNA, 19 nt, Artificial Sequence
  Description of Artificial Sequence: Synthetic oligonucleotide
  Sense strand starting at position 3154 of SEQ ID NO: 1885222
guguguaugcuggaaggca

SEQ ID NO: 2325703 - RNA, 19 nt, Artificial Sequence
  Description of Artificial Sequence: Synthetic oligonucleotide
  Antisense strand to SEQ ID NO: 2325702
ugccuuccagcauacacac

SEQ ID NO: 2325704 - RNA, 19 nt, Artificial Sequence
  Description of Artificial Sequence: Synthetic oligonucleotide
  Sense strand starting at position 3428 of SEQ ID NO: 1885222
gcuguuaguaacuagugga

SEQ ID NO: 2325705 - RNA, 19 nt, Artificial Sequence
  Description of Artificial Sequence: Synthetic oligonucleotide
  Antisense strand to SEQ ID NO: 2325704
uccacuaguuacuaacagc

SEQ ID NO: 2325706 - RNA, 19 nt, Artificial Sequence
  Description of Artificial Sequence: Synthetic oligonucleotide
  Sense strand starting at position 3432 of SEQ ID NO: 1885222
uuaguaacuaguggaguga

SEQ ID NO: 2325707 - RNA, 19 nt, Artificial Sequence
  Description of Artificial Sequence: Synthetic oligonucleotide
  Antisense strand to SEQ ID NO: 2325706
ucacuccacuaguuacuaa

SEQ ID NO: 2325708 - RNA, 19 nt, Artificial Sequence
  Description of Artificial Sequence: Synthetic oligonucleotide
  Sense strand starting at position 3682 of SEQ ID NO: 1885222
gagugcguuccuggcauuu

SEQ ID NO: 2325709 - RNA, 19 nt, Artificial Sequence
  Description of Artificial Sequence: Synthetic oligonucleotide
  Antisense strand to SEQ ID NO: 2325708
aaaugccaggaacgcacuc

SEQ ID NO: 2325710 - RNA, 19 nt, Artificial Sequence
  Description of Artificial Sequence: Synthetic oligonucleotide
  Sense strand starting at position 3740 of SEQ ID NO: 1885222
gcuuaaacguuucuaggag

SEQ ID NO: 2325711 - RNA, 19 nt, Artificial Sequence
  Description of Artificial Sequence: Synthetic oligonucleotide
  Antisense strand to SEQ ID NO: 2325710
cuccuagaaacguuuaagc

SEQ ID NO: 2325712 - RNA, 19 nt, Artificial Sequence
  Description of Artificial Sequence: Synthetic oligonucleotide
  Sense strand starting at position 3776 of SEQ ID NO: 1885222
ucgcgaugggugguucgaa

SEQ ID NO: 2325713 - RNA, 19 nt, Artificial Sequence
  Description of Artificial Sequence: Synthetic oligonucleotide
  Antisense strand to SEQ ID NO: 2325712
uucgaaccacccaucgcga

SEQ ID NO: 2325714 - RNA, 19 nt, Artificial Sequence
  Description of Artificial Sequence: Synthetic oligonucleotide
  Sense strand starting at position 3867 of SEQ ID NO: 1885222
ugcaguuugagugaacguu

SEQ ID NO: 2325715 - RNA, 19 nt, Artificial Sequence
  Description of Artificial Sequence: Synthetic oligonucleotide
  Antisense strand to SEQ ID NO: 2325714
aacguucacucaaacugca

SEQ ID NO: 2325716 - RNA, 19 nt, Artificial Sequence
  Description of Artificial Sequence: Synthetic oligonucleotide
  Sense strand starting at position 3874 of SEQ ID NO: 1885222
ugagugaacguuuggagga

SEQ ID NO: 2325717 - RNA, 19 nt, Artificial Sequence
  Description of Artificial Sequence: Synthetic oligonucleotide
  Antisense strand to SEQ ID NO: 2325716
uccuccaaacguucacuca

SEQ ID NO: 2325718 - RNA, 19 nt, Artificial Sequence
  Description of Artificial Sequence: Synthetic oligonucleotide
  Sense strand starting at position 3939 of SEQ ID NO: 1885222
gugaaugcucccgaggaga

SEQ ID NO: 2325719 - RNA, 19 nt, Artificial Sequence
  Description of Artificial Sequence: Synthetic oligonucleotide
  Antisense strand to SEQ ID NO: 2325718
ucuccucgggagcauucac

SEQ ID NO: 2325720 - RNA, 19 nt, Artificial Sequence
  Description of Artificial Sequence: Synthetic oligonucleotide
  Sense strand starting at position 3941 of SEQ ID NO: 1885222
gaaugcucccgaggagaaa

SEQ ID NO: 2325721 - RNA, 19 nt, Artificial Sequence
  Description of Artificial Sequence: Synthetic oligonucleotide
  Antisense strand to SEQ ID NO: 2325720
uuucuccucgggagcauuc

SEQ ID NO: 2325722 - RNA, 19 nt, Artificial Sequence
  Description of Artificial Sequence: Synthetic oligonucleotide
  Sense strand starting at position 3974 of SEQ ID NO: 1885222
ugaggagcgcccugugaaa

SEQ ID NO: 2325723 - RNA, 19 nt, Artificial Sequence
  Description of Artificial Sequence: Synthetic oligonucleotide
  Antisense strand to SEQ ID NO: 2325722
uuucacagggcgcuccuca

SEQ ID NO: 2325724 - RNA, 19 nt, Artificial Sequence
  Description of Artificial Sequence: Synthetic oligonucleotide
  Sense strand starting at position 52 of SEQ ID NO: 1885223
cagagaugguguguuaacu

SEQ ID NO: 2325725 - RNA, 19 nt, Artificial Sequence
  Description of Artificial Sequence: Synthetic oligonucleotide
  Antisense strand to SEQ ID NO: 2325724
aguuaacacaccaucucug

SEQ ID NO: 2325726 - RNA, 19 nt, Artificial Sequence
  Description of Artificial Sequence: Synthetic oligonucleotide
  Sense strand starting at position 58 of SEQ ID NO: 1885223
ugguguguuaacuaucaca

SEQ ID NO: 2325727 - RNA, 19 nt, Artificial Sequence
  Description of Artificial Sequence: Synthetic oligonucleotide
  Antisense strand to SEQ ID NO: 2325726
ugugauaguuaacacacca

SEQ ID NO: 2325728 - RNA, 19 nt, Artificial Sequence
  Description of Artificial Sequence: Synthetic oligonucleotide
  Sense strand starting at position 279 of SEQ ID NO: 1885223
ucaggaaguaagugucauu

SEQ ID NO: 2325729 - RNA, 19 nt, Artificial Sequence
  Description of Artificial Sequence: Synthetic oligonucleotide
  Antisense strand to SEQ ID NO: 2325728
aaugacacuuacuuccuga

SEQ ID NO: 2325730 - RNA, 19 nt, Artificial Sequence
  Description of Artificial Sequence: Synthetic oligonucleotide
  Sense strand starting at position 342 of SEQ ID NO: 1885223
ggagguauuuaacaaacac

SEQ ID NO: 2325731 - RNA, 19 nt, Artificial Sequence
  Description of Artificial Sequence: Synthetic oligonucleotide
  Antisense strand to SEQ ID NO: 2325730
guguuuguuaaauaccucc

SEQ ID NO: 2325732 - RNA, 19 nt, Artificial Sequence
  Description of Artificial Sequence: Synthetic oligonucleotide
  Sense strand starting at position 546 of SEQ ID NO: 1885223
guguguaacaagggaaacu

SEQ ID NO: 2325733 - RNA, 19 nt, Artificial Sequence
  Description of Artificial Sequence: Synthetic oligonucleotide
  Antisense strand to SEQ ID NO: 2325732
aguuucccuuguuacacac

SEQ ID NO: 2325734 - RNA, 19 nt, Artificial Sequence
  Description of Artificial Sequence: Synthetic oligonucleotide
  Sense strand starting at position 686 of SEQ ID NO: 1885223
cagcauuugucuuuggugu

SEQ ID NO: 2325735 - RNA, 19 nt, Artificial Sequence
  Description of Artificial Sequence: Synthetic oligonucleotide
  Antisense strand to SEQ ID NO: 2325734
acaccaaagacaaaugcug

SEQ ID NO: 2325736 - RNA, 19 nt, Artificial Sequence
  Description of Artificial Sequence: Synthetic oligonucleotide
  Sense strand starting at position 732 of SEQ ID NO: 1885223
guuaaucauuuagagaccu

SEQ ID NO: 2325737 - RNA, 19 nt, Artificial Sequence
  Description of Artificial Sequence: Synthetic oligonucleotide
  Antisense strand to SEQ ID NO: 2325736
aggucucuaaaugauuaac

SEQ ID NO: 2325738 - RNA, 19 nt, Artificial Sequence
  Description of Artificial Sequence: Synthetic oligonucleotide
  Sense strand starting at position 740 of SEQ ID NO: 1885223
uuuagagaccuugagcuua

SEQ ID NO: 2325739 - RNA, 19 nt, Artificial Sequence
  Description of Artificial Sequence: Synthetic oligonucleotide
  Antisense strand to SEQ ID NO: 2325738
uaagcucaaggucucuaaa

SEQ ID NO: 2325740 - RNA, 19 nt, Artificial Sequence
  Description of Artificial Sequence: Synthetic oligonucleotide
  Sense strand starting at position 742 of SEQ ID NO: 1885223
uagagaccuugagcuuaua

SEQ ID NO: 2325741 - RNA, 19 nt, Artificial Sequence
  Description of Artificial Sequence: Synthetic oligonucleotide
  Antisense strand to SEQ ID NO: 2325740
uauaagcucaaggucucua

SEQ ID NO: 2325742 - RNA, 19 nt, Artificial Sequence
  Description of Artificial Sequence: Synthetic oligonucleotide
  Sense strand starting at position 864 of SEQ ID NO: 1885223
caauguaucccacacgaug

SEQ ID NO: 2325743 - RNA, 19 nt, Artificial Sequence
  Description of Artificial Sequence: Synthetic oligonucleotide
  Antisense strand to SEQ ID NO: 2325742
caucgugugggauacauug

SEQ ID NO: 2325744 - RNA, 19 nt, Artificial Sequence
  Description of Artificial Sequence: Synthetic oligonucleotide
  Sense strand starting at position 1073 of SEQ ID NO: 1885223
cucucauuugcuggugaca

SEQ ID NO: 2325745 - RNA, 19 nt, Artificial Sequence
  Description of Artificial Sequence: Synthetic oligonucleotide
  Antisense strand to SEQ ID NO: 2325744
ugucaccagcaaaugagag

SEQ ID NO: 2325746 - RNA, 19 nt, Artificial Sequence
  Description of Artificial Sequence: Synthetic oligonucleotide
  Sense strand starting at position 1178 of SEQ ID NO: 1885223
aauguuaagguuuagccaa

SEQ ID NO: 2325747 - RNA, 19 nt, Artificial Sequence
  Description of Artificial Sequence: Synthetic oligonucleotide
  Antisense strand to SEQ ID NO: 2325746
uuggcuaaaccuuaacauu

SEQ ID NO: 2325748 - RNA, 19 nt, Artificial Sequence
  Description of Artificial Sequence: Synthetic oligonucleotide
  Sense strand starting at position 1396 of SEQ ID NO: 1885223
ggguaaauugccuaaccuc

SEQ ID NO: 2325749 - RNA, 19 nt, Artificial Sequence
  Description of Artificial Sequence: Synthetic oligonucleotide
  Antisense strand to SEQ ID NO: 2325748
gagguuaggcaauuuaccc

SEQ ID NO: 2325750 - RNA, 19 nt, Artificial Sequence
  Description of Artificial Sequence: Synthetic oligonucleotide
  Sense strand starting at position 1543 of SEQ ID NO: 1885223
uuauuugcuguuugacuca

SEQ ID NO: 2325751 - RNA, 19 nt, Artificial Sequence
  Description of Artificial Sequence: Synthetic oligonucleotide
  Antisense strand to SEQ ID NO: 2325750
ugagucaaacagcaaauaa

SEQ ID NO: 2325752 - RNA, 19 nt, Artificial Sequence
  Description of Artificial Sequence: Synthetic oligonucleotide
  Sense strand starting at position 1555 of SEQ ID NO: 1885223
ugacucaagccagaucuua

SEQ ID NO: 2325753 - RNA, 19 nt, Artificial Sequence
  Description of Artificial Sequence: Synthetic oligonucleotide
  Antisense strand to SEQ ID NO: 2325752
uaagaucuggcuugaguca

SEQ ID NO: 2325754 - RNA, 19 nt, Artificial Sequence
  Description of Artificial Sequence: Synthetic oligonucleotide
  Sense strand starting at position 1638 of SEQ ID NO: 1885223
guaagcauuaaaugaggua

SEQ ID NO: 2325755 - RNA, 19 nt, Artificial Sequence
  Description of Artificial Sequence: Synthetic oligonucleotide
  Antisense strand to SEQ ID NO: 2325754
uaccucauuuaaugcuuac

SEQ ID NO: 2325756 - RNA, 19 nt, Artificial Sequence
  Description of Artificial Sequence: Synthetic oligonucleotide
  Sense strand starting at position 1654 of SEQ ID NO: 1885223
guaauacgugugagguacu

SEQ ID NO: 2325757 - RNA, 19 nt, Artificial Sequence
  Description of Artificial Sequence: Synthetic oligonucleotide
  Antisense strand to SEQ ID NO: 2325756
aguaccucacacguauuac

SEQ ID NO: 2325758 - RNA, 19 nt, Artificial Sequence
  Description of Artificial Sequence: Synthetic oligonucleotide
  Sense strand starting at position 1666 of SEQ ID NO: 1885223
agguacuuggcacauagua

SEQ ID NO: 2325759 - RNA, 19 nt, Artificial Sequence
  Description of Artificial Sequence: Synthetic oligonucleotide
  Antisense strand to SEQ ID NO: 2325758
uacuaugugccaaguaccu

SEQ ID NO: 2325760 - RNA, 19 nt, Artificial Sequence
  Description of Artificial Sequence: Synthetic oligonucleotide
  Sense strand starting at position 1679 of SEQ ID NO: 1885223
auaguaagcgcucaggaaa

SEQ ID NO: 2325761 - RNA, 19 nt, Artificial Sequence
  Description of Artificial Sequence: Synthetic oligonucleotide
  Antisense strand to SEQ ID NO: 2325760
uuuccugagcgcuuacuau

SEQ ID NO: 2325762 - RNA, 19 nt, Artificial Sequence
  Description of Artificial Sequence: Synthetic oligonucleotide
  Sense strand starting at position 2195 of SEQ ID NO: 1885223
ggaagacugccuuguagau

SEQ ID NO: 2325763 - RNA, 19 nt, Artificial Sequence
  Description of Artificial Sequence: Synthetic oligonucleotide
  Antisense strand to SEQ ID NO: 2325762
aucuacaaggcagucuucc

SEQ ID NO: 2325764 - RNA, 19 nt, Artificial Sequence
  Description of Artificial Sequence: Synthetic oligonucleotide
  Sense strand starting at position 2210 of SEQ ID NO: 1885223
agaugaggcugucuauuga

SEQ ID NO: 2325765 - RNA, 19 nt, Artificial Sequence
  Description of Artificial Sequence: Synthetic oligonucleotide
  Antisense strand to SEQ ID NO: 2325764
ucaauagacagccucaucu

SEQ ID NO: 2325766 - RNA, 19 nt, Artificial Sequence
  Description of Artificial Sequence: Synthetic oligonucleotide
  Sense strand starting at position 2249 of SEQ ID NO: 1885223
uuaauuaaaccacguugga

SEQ ID NO: 2325767 - RNA, 19 nt, Artificial Sequence
  Description of Artificial Sequence: Synthetic oligonucleotide
  Antisense strand to SEQ ID NO: 2325766
uccaacgugguuuaauuaa

SEQ ID NO: 2325768 - RNA, 19 nt, Artificial Sequence
  Description of Artificial Sequence: Synthetic oligonucleotide
  Sense strand starting at position 2310 of SEQ ID NO: 1885223
cagugucauaaugggaagu

SEQ ID NO: 2325769 - RNA, 19 nt, Artificial Sequence
  Description of Artificial Sequence: Synthetic oligonucleotide
  Antisense strand to SEQ ID NO: 2325768
acuucccauuaugacacug

SEQ ID NO: 2325770 - RNA, 19 nt, Artificial Sequence
  Description of Artificial Sequence: Synthetic oligonucleotide
  Sense strand starting at position 2419 of SEQ ID NO: 1885223
auuacuuguggucagaggu

SEQ ID NO: 2325771 - RNA, 19 nt, Artificial Sequence
  Description of Artificial Sequence: Synthetic oligonucleotide
  Antisense strand to SEQ ID NO: 2325770
accucugaccacaaguaau

SEQ ID NO: 2325772 - RNA, 19 nt, Artificial Sequence
  Description of Artificial Sequence: Synthetic oligonucleotide
  Sense strand starting at position 2425 of SEQ ID NO: 1885223
uguggucagaggugagaaa

SEQ ID NO: 2325773 - RNA, 19 nt, Artificial Sequence
  Description of Artificial Sequence: Synthetic oligonucleotide
  Antisense strand to SEQ ID NO: 2325772
uuucucaccucugaccaca

SEQ ID NO: 2325774 - RNA, 19 nt, Artificial Sequence
  Description of Artificial Sequence: Synthetic oligonucleotide
  Sense strand starting at position 2589 of SEQ ID NO: 1885223
gcacuagagggaugugacu

SEQ ID NO: 2325775 - RNA, 19 nt, Artificial Sequence
  Description of Artificial Sequence: Synthetic oligonucleotide
  Antisense strand to SEQ ID NO: 2325774
agucacaucccucuagugc

SEQ ID NO: 2325776 - RNA, 19 nt, Artificial Sequence
  Description of Artificial Sequence: Synthetic oligonucleotide
  Sense strand starting at position 2596 of SEQ ID NO: 1885223
agggaugugacucaugguu

SEQ ID NO: 2325777 - RNA, 19 nt, Artificial Sequence
  Description of Artificial Sequence: Synthetic oligonucleotide
  Antisense strand to SEQ ID NO: 2325776
aaccaugagucacaucccu

SEQ ID NO: 2325778 - RNA, 19 nt, Artificial Sequence
  Description of Artificial Sequence: Synthetic oligonucleotide
  Sense strand starting at position 2733 of SEQ ID NO: 1885223
gcugaaagauucuucccuu

SEQ ID NO: 2325779 - RNA, 19 nt, Artificial Sequence
  Description of Artificial Sequence: Synthetic oligonucleotide
  Antisense strand to SEQ ID NO: 2325778
aagggaagaaucuuucagc

SEQ ID NO: 2325780 - RNA, 19 nt, Artificial Sequence
  Description of Artificial Sequence: Synthetic oligonucleotide
  Sense strand starting at position 2817 of SEQ ID NO: 1885223
ugucacucuccuuagaaag

SEQ ID NO: 2325781 - RNA, 19 nt, Artificial Sequence
  Description of Artificial Sequence: Synthetic oligonucleotide
  Antisense strand to SEQ ID NO: 2325780
cuuucuaaggagagugaca

SEQ ID NO: 2325782 - RNA, 19 nt, Artificial Sequence
  Description of Artificial Sequence: Synthetic oligonucleotide
  Sense strand starting at position 2831 of SEQ ID NO: 1885223
gaaagacuuccugguccuc

SEQ ID NO: 2325783 - RNA, 19 nt, Artificial Sequence
  Description of Artificial Sequence: Synthetic oligonucleotide
  Antisense strand to SEQ ID NO: 2325782
gaggaccaggaagucuuuc

SEQ ID NO: 2325784 - RNA, 19 nt, Artificial Sequence
  Description of Artificial Sequence: Synthetic oligonucleotide
  Sense strand starting at position 3304 of SEQ ID NO: 1885223
gguggaaauuaggcuuucu

SEQ ID NO: 2325785 - RNA, 19 nt, Artificial Sequence
  Description of Artificial Sequence: Synthetic oligonucleotide
  Antisense strand to SEQ ID NO: 2325784
agaaagccuaauuuccacc

SEQ ID NO: 2325786 - RNA, 19 nt, Artificial Sequence
  Description of Artificial Sequence: Synthetic oligonucleotide
  Sense strand starting at position 3450 of SEQ ID NO: 1885223
gggucuuuccuguaacaac

SEQ ID NO: 2325787 - RNA, 19 nt, Artificial Sequence
  Description of Artificial Sequence: Synthetic oligonucleotide
  Antisense strand to SEQ ID NO: 2325786
guuguuacaggaaagaccc

SEQ ID NO: 2325788 - RNA, 19 nt, Artificial Sequence
  Description of Artificial Sequence: Synthetic oligonucleotide
  Sense strand starting at position 3500 of SEQ ID NO: 1885223
cugggugaauaccauuuga

SEQ ID NO: 2325789 - RNA, 19 nt, Artificial Sequence
  Description of Artificial Sequence: Synthetic oligonucleotide
  Antisense strand to SEQ ID NO: 2325788
ucaaaugguauucacccag

SEQ ID NO: 2325790 - RNA, 19 nt, Artificial Sequence
  Description of Artificial Sequence: Synthetic oligonucleotide
  Sense strand starting at position 3528 of SEQ ID NO: 1885223
uguauaugacaguggagua

SEQ ID NO: 2325791 - RNA, 19 nt, Artificial Sequence
  Description of Artificial Sequence: Synthetic oligonucleotide
  Antisense strand to SEQ ID NO: 2325790
uacuccacugucauauaca

SEQ ID NO: 2325792 - RNA, 19 nt, Artificial Sequence
  Description of Artificial Sequence: Synthetic oligonucleotide
  Sense strand starting at position 3529 of SEQ ID NO: 1885223
guauaugacaguggaguaa

SEQ ID NO: 2325793 - RNA, 19 nt, Artificial Sequence
  Description of Artificial Sequence: Synthetic oligonucleotide
  Antisense strand to SEQ ID NO: 2325792
uuacuccacugucauauac

SEQ ID NO: 2325794 - RNA, 19 nt, Artificial Sequence
  Description of Artificial Sequence: Synthetic oligonucleotide
  Sense strand starting at position 3540 of SEQ ID NO: 1885223
uggaguaauuaucccucuu

SEQ ID NO: 2325795 - RNA, 19 nt, Artificial Sequence
  Description of Artificial Sequence: Synthetic oligonucleotide
  Antisense strand to SEQ ID NO: 2325794
aagagggauaauuacucca

SEQ ID NO: 2325796 - RNA, 19 nt, Artificial Sequence
  Description of Artificial Sequence: Synthetic oligonucleotide
  Sense strand starting at position 3949 of SEQ ID NO: 1885223
ggaacaucucuguggucau

SEQ ID NO: 2325797 - RNA, 19 nt, Artificial Sequence
  Description of Artificial Sequence: Synthetic oligonucleotide
  Antisense strand to SEQ ID NO: 2325796
augaccacagagauguucc

SEQ ID NO: 2325798 - RNA, 19 nt, Artificial Sequence
  Description of Artificial Sequence: Synthetic oligonucleotide
  Sense strand starting at position 3952 of SEQ ID NO: 1885223
acaucucuguggucaugga

SEQ ID NO: 2325799 - RNA, 19 nt, Artificial Sequence
  Description of Artificial Sequence: Synthetic oligonucleotide
  Antisense strand to SEQ ID NO: 2325798
uccaugaccacagagaugu

SEQ ID NO: 2325800 - RNA, 19 nt, Artificial Sequence
  Description of Artificial Sequence: Synthetic oligonucleotide
  Sense strand starting at position 3953 of SEQ ID NO: 1885223
caucucuguggucauggaa

SEQ ID NO: 2325801 - RNA, 19 nt, Artificial Sequence
  Description of Artificial Sequence: Synthetic oligonucleotide
  Antisense strand to SEQ ID NO: 2325800
uuccaugaccacagagaug

SEQ ID NO: 2325802 - RNA, 19 nt, Artificial Sequence
  Description of Artificial Sequence: Synthetic oligonucleotide
  Sense strand starting at position 3956 of SEQ ID NO: 1885223
cucuguggucauggaaauu

SEQ ID NO: 2325803 - RNA, 19 nt, Artificial Sequence
  Description of Artificial Sequence: Synthetic oligonucleotide
  Antisense strand to SEQ ID NO: 2325802
aauuuccaugaccacagag

SEQ ID NO: 2325804 - RNA, 19 nt, Artificial Sequence
  Description of Artificial Sequence: Synthetic oligonucleotide
  Sense strand starting at position 274 of SEQ ID NO: 1885224
ggucaugaaguccauauau

SEQ ID NO: 2325805 - RNA, 19 nt, Artificial Sequence
  Description of Artificial Sequence: Synthetic oligonucleotide
  Antisense strand to SEQ ID NO: 2325804
auauauggacuucaugacc

SEQ ID NO: 2325806 - RNA, 19 nt, Artificial Sequence
  Description of Artificial Sequence: Synthetic oligonucleotide
  Sense strand starting at position 375 of SEQ ID NO: 1885224
gagagugacagcugagagu

SEQ ID NO: 2325807 - RNA, 19 nt, Artificial Sequence
  Description of Artificial Sequence: Synthetic oligonucleotide
  Antisense strand to SEQ ID NO: 2325806
acucucagcugucacucuc

SEQ ID NO: 2325808 - RNA, 19 nt, Artificial Sequence
  Description of Artificial Sequence: Synthetic oligonucleotide
  Sense strand starting at position 629 of SEQ ID NO: 1885224
ucagaaucucuauggauuc

SEQ ID NO: 2325809 - RNA, 19 nt, Artificial Sequence
  Description of Artificial Sequence: Synthetic oligonucleotide
  Antisense strand to SEQ ID NO: 2325808
gaauccauagagauucuga

SEQ ID NO: 2325810 - RNA, 19 nt, Artificial Sequence
  Description of Artificial Sequence: Synthetic oligonucleotide
  Sense strand starting at position 818 of SEQ ID NO: 1885224
ggagguguccagcaagaug

SEQ ID NO: 2325811 - RNA, 19 nt, Artificial Sequence
  Description of Artificial Sequence: Synthetic oligonucleotide
  Antisense strand to SEQ ID NO: 2325810
caucuugcuggacaccucc

SEQ ID NO: 2325812 - RNA, 19 nt, Artificial Sequence
  Description of Artificial Sequence: Synthetic oligonucleotide
  Sense strand starting at position 957 of SEQ ID NO: 1885224
ccugguguacgauauuaau

SEQ ID NO: 2325813 - RNA, 19 nt, Artificial Sequence
  Description of Artificial Sequence: Synthetic oligonucleotide
  Antisense strand to SEQ ID NO: 2325812
auuaauaucguacaccagg

SEQ ID NO: 2325814 - RNA, 19 nt, Artificial Sequence
  Description of Artificial Sequence: Synthetic oligonucleotide
  Sense strand starting at position 1024 of SEQ ID NO: 1885224
uuucuaggcauaugagaag

SEQ ID NO: 2325815 - RNA, 19 nt, Artificial Sequence
  Description of Artificial Sequence: Synthetic oligonucleotide
  Antisense strand to SEQ ID NO: 2325814
cuucucauaugccuagaaa

SEQ ID NO: 2325816 - RNA, 19 nt, Artificial Sequence
  Description of Artificial Sequence: Synthetic oligonucleotide
  Sense strand starting at position 1236 of SEQ ID NO: 1885224
ugagauaacuuaccuuugu

SEQ ID NO: 2325817 - RNA, 19 nt, Artificial Sequence
  Description of Artificial Sequence: Synthetic oligonucleotide
  Antisense strand to SEQ ID NO: 2325816
acaaagguaaguuaucuca

SEQ ID NO: 2325818 - RNA, 19 nt, Artificial Sequence
  Description of Artificial Sequence: Synthetic oligonucleotide
  Sense strand starting at position 1249 of SEQ ID NO: 1885224
cuuuguuaacuguagaacu

SEQ ID NO: 2325819 - RNA, 19 nt, Artificial Sequence
  Description of Artificial Sequence: Synthetic oligonucleotide
  Antisense strand to SEQ ID NO: 2325818
aguucuacaguuaacaaag

SEQ ID NO: 2325820 - RNA, 19 nt, Artificial Sequence
  Description of Artificial Sequence: Synthetic oligonucleotide
  Sense strand starting at position 1251 of SEQ ID NO: 1885224
uuguuaacuguagaacuaa

SEQ ID NO: 2325821 - RNA, 19 nt, Artificial Sequence
  Description of Artificial Sequence: Synthetic oligonucleotide
  Antisense strand to SEQ ID NO: 2325820
uuaguucuacaguuaacaa

SEQ ID NO: 2325822 - RNA, 19 nt, Artificial Sequence
  Description of Artificial Sequence: Synthetic oligonucleotide
  Sense strand starting at position 1282 of SEQ ID NO: 1885224
ccaccagauuaucuacagu

SEQ ID NO: 2325823 - RNA, 19 nt, Artificial Sequence
  Description of Artificial Sequence: Synthetic oligonucleotide
  Antisense strand to SEQ ID NO: 2325822
acuguagauaaucuggugg

SEQ ID NO: 2325824 - RNA, 19 nt, Artificial Sequence
  Description of Artificial Sequence: Synthetic oligonucleotide
  Sense strand starting at position 1578 of SEQ ID NO: 1885224
guuaacacaucagucugaa

SEQ ID NO: 2325825 - RNA, 19 nt, Artificial Sequence
  Description of Artificial Sequence: Synthetic oligonucleotide
  Antisense strand to SEQ ID NO: 2325824
uucagacugauguguuaac

SEQ ID NO: 2325826 - RNA, 19 nt, Artificial Sequence
  Description of Artificial Sequence: Synthetic oligonucleotide
  Sense strand starting at position 1679 of SEQ ID NO: 1885224
ggcuguuaccgcaguggga

SEQ ID NO: 2325827 - RNA, 19 nt, Artificial Sequence
  Description of Artificial Sequence: Synthetic oligonucleotide
  Antisense strand to SEQ ID NO: 2325826
ucccacugcgguaacagcc

SEQ ID NO: 2325828 - RNA, 19 nt, Artificial Sequence
  Description of Artificial Sequence: Synthetic oligonucleotide
  Sense strand starting at position 1834 of SEQ ID NO: 1885224
cuuagugcugcuguagcaa

SEQ ID NO: 2325829 - RNA, 19 nt, Artificial Sequence
  Description of Artificial Sequence: Synthetic oligonucleotide
  Antisense strand to SEQ ID NO: 2325828
uugcuacagcagcacuaag

SEQ ID NO: 2325830 - RNA, 19 nt, Artificial Sequence
  Description of Artificial Sequence: Synthetic oligonucleotide
  Sense strand starting at position 2082 of SEQ ID NO: 1885224
caagguagccaguacagau

SEQ ID NO: 2325831 - RNA, 19 nt, Artificial Sequence
  Description of Artificial Sequence: Synthetic oligonucleotide
  Antisense strand to SEQ ID NO: 2325830
aucuguacuggcuaccuug

SEQ ID NO: 2325832 - RNA, 19 nt, Artificial Sequence
  Description of Artificial Sequence: Synthetic oligonucleotide
  Sense strand starting at position 2160 of SEQ ID NO: 1885224
uaaggaaaucugugauuac

SEQ ID NO: 2325833 - RNA, 19 nt, Artificial Sequence
  Description of Artificial Sequence: Synthetic oligonucleotide
  Antisense strand to SEQ ID NO: 2325832
guaaucacagauuuccuua

SEQ ID NO: 2325834 - RNA, 19 nt, Artificial Sequence
  Description of Artificial Sequence: Synthetic oligonucleotide
  Sense strand starting at position 2163 of SEQ ID NO: 1885224
ggaaaucugugauuacauu

SEQ ID NO: 2325835 - RNA, 19 nt, Artificial Sequence
  Description of Artificial Sequence: Synthetic oligonucleotide
  Antisense strand to SEQ ID NO: 2325834
aauguaaucacagauuucc

SEQ ID NO: 2325836 - RNA, 19 nt, Artificial Sequence
  Description of Artificial Sequence: Synthetic oligonucleotide
  Sense strand starting at position 2190 of SEQ ID NO: 1885224
cuggauaauccagggcacu

SEQ ID NO: 2325837 - RNA, 19 nt, Artificial Sequence
  Description of Artificial Sequence: Synthetic oligonucleotide
  Antisense strand to SEQ ID NO: 2325836
agugcccuggauuauccag

SEQ ID NO: 2325838 - RNA, 19 nt, Artificial Sequence
  Description of Artificial Sequence: Synthetic oligonucleotide
  Sense strand starting at position 2427 of SEQ ID NO: 1885224
gugaauauaucaucgggaa

SEQ ID NO: 2325839 - RNA, 19 nt, Artificial Sequence
  Description of Artificial Sequence: Synthetic oligonucleotide
  Antisense strand to SEQ ID NO: 2325838
uucccgaugauauauucac

SEQ ID NO: 2325840 - RNA, 19 nt, Artificial Sequence
  Description of Artificial Sequence: Synthetic oligonucleotide
  Sense strand starting at position 2431 of SEQ ID NO: 1885224
auauaucaucgggaaguuu

SEQ ID NO: 2325841 - RNA, 19 nt, Artificial Sequence
  Description of Artificial Sequence: Synthetic oligonucleotide
  Antisense strand to SEQ ID NO: 2325840
aaacuucccgaugauauau

SEQ ID NO: 2325842 - RNA, 19 nt, Artificial Sequence
  Description of Artificial Sequence: Synthetic oligonucleotide
  Sense strand starting at position 2453 of SEQ ID NO: 1885224
gcuuauuuggcuggaucca

SEQ ID NO: 2325843 - RNA, 19 nt, Artificial Sequence
  Description of Artificial Sequence: Synthetic oligonucleotide
  Antisense strand to SEQ ID NO: 2325842
uggauccagccaaauaagc

SEQ ID NO: 2325844 - RNA, 19 nt, Artificial Sequence
  Description of Artificial Sequence: Synthetic oligonucleotide
  Sense strand starting at position 2629 of SEQ ID NO: 1885224
uggucugacuuauucuaau

SEQ ID NO: 2325845 - RNA, 19 nt, Artificial Sequence
  Description of Artificial Sequence: Synthetic oligonucleotide
  Antisense strand to SEQ ID NO: 2325844
auuagaauaagucagacca

SEQ ID NO: 2325846 - RNA, 19 nt, Artificial Sequence
  Description of Artificial Sequence: Synthetic oligonucleotide
  Sense strand starting at position 2672 of SEQ ID NO: 1885224
uguguaauccagcaaauua

SEQ ID NO: 2325847 - RNA, 19 nt, Artificial Sequence
  Description of Artificial Sequence: Synthetic oligonucleotide
  Antisense strand to SEQ ID NO: 2325846
uaauuugcuggauuacaca

SEQ ID NO: 2325848 - RNA, 19 nt, Artificial Sequence
  Description of Artificial Sequence: Synthetic oligonucleotide
  Sense strand starting at position 2987 of SEQ ID NO: 1885224
aagacauaguguuuguaca

SEQ ID NO: 2325849 - RNA, 19 nt, Artificial Sequence
  Description of Artificial Sequence: Synthetic oligonucleotide
  Antisense strand to SEQ ID NO: 2325848
uguacaaacacuaugucuu

SEQ ID NO: 2325850 - RNA, 19 nt, Artificial Sequence
  Description of Artificial Sequence: Synthetic oligonucleotide
  Sense strand starting at position 3048 of SEQ ID NO: 1885224
uugggauaauuaccucuuu

SEQ ID NO: 2325851 - RNA, 19 nt, Artificial Sequence
  Description of Artificial Sequence: Synthetic oligonucleotide
  Antisense strand to SEQ ID NO: 2325850
aaagagguaauuaucccaa

SEQ ID NO: 2325852 - RNA, 19 nt, Artificial Sequence
  Description of Artificial Sequence: Synthetic oligonucleotide
  Sense strand starting at position 3161 of SEQ ID NO: 1885224
auagguuaauuuggaggaa

SEQ ID NO: 2325853 - RNA, 19 nt, Artificial Sequence
  Description of Artificial Sequence: Synthetic oligonucleotide
  Antisense strand to SEQ ID NO: 2325852
uuccuccaaauuaaccuau

SEQ ID NO: 2325854 - RNA, 19 nt, Artificial Sequence
  Description of Artificial Sequence: Synthetic oligonucleotide
  Sense strand starting at position 3162 of SEQ ID NO: 1885224
uagguuaauuuggaggaaa

SEQ ID NO: 2325855 - RNA, 19 nt, Artificial Sequence
  Description of Artificial Sequence: Synthetic oligonucleotide
  Antisense strand to SEQ ID NO: 2325854
uuuccuccaaauuaaccua

SEQ ID NO: 2325856 - RNA, 19 nt, Artificial Sequence
  Description of Artificial Sequence: Synthetic oligonucleotide
  Sense strand starting at position 3294 of SEQ ID NO: 1885224
ggcauugugcauuaaagac

SEQ ID NO: 2325857 - RNA, 19 nt, Artificial Sequence
  Description of Artificial Sequence: Synthetic oligonucleotide
  Antisense strand to SEQ ID NO: 2325856
gucuuuaaugcacaaugcc

SEQ ID NO: 2325858 - RNA, 19 nt, Artificial Sequence
  Description of Artificial Sequence: Synthetic oligonucleotide
  Sense strand starting at position 3325 of SEQ ID NO: 1885224
auaacugguccuuagcauu

SEQ ID NO: 2325859 - RNA, 19 nt, Artificial Sequence
  Description of Artificial Sequence: Synthetic oligonucleotide
  Antisense strand to SEQ ID NO: 2325858
aaugcuaaggaccaguuau

SEQ ID NO: 2325860 - RNA, 19 nt, Artificial Sequence
  Description of Artificial Sequence: Synthetic oligonucleotide
  Sense strand starting at position 3370 of SEQ ID NO: 1885224
ccagucuucccauagauag

SEQ ID NO: 2325861 - RNA, 19 nt, Artificial Sequence
  Description of Artificial Sequence: Synthetic oligonucleotide
  Antisense strand to SEQ ID NO: 2325860
cuaucuaugggaagacugg

SEQ ID NO: 2325862 - RNA, 19 nt, Artificial Sequence
  Description of Artificial Sequence: Synthetic oligonucleotide
  Sense strand starting at position 3519 of SEQ ID NO: 1885224
agccuugagcagcaaugaa

SEQ ID NO: 2325863 - RNA, 19 nt, Artificial Sequence
  Description of Artificial Sequence: Synthetic oligonucleotide
  Antisense strand to SEQ ID NO: 2325862
uucauugcugcucaaggcu

SEQ ID NO: 2325864 - RNA, 19 nt, Artificial Sequence
  Description of Artificial Sequence: Synthetic oligonucleotide
  Sense strand starting at position 3563 of SEQ ID NO: 1885224
uucugaagugaggaaguuu

SEQ ID NO: 2325865 - RNA, 19 nt, Artificial Sequence
  Description of Artificial Sequence: Synthetic oligonucleotide
  Antisense strand to SEQ ID NO: 2325864
aaacuuccucacuucagaa

SEQ ID NO: 2325866 - RNA, 19 nt, Artificial Sequence
  Description of Artificial Sequence: Synthetic oligonucleotide
  Sense strand starting at position 3692 of SEQ ID NO: 1885224
cugugugacauuuggcaac

SEQ ID NO: 2325867 - RNA, 19 nt, Artificial Sequence
  Description of Artificial Sequence: Synthetic oligonucleotide
  Antisense strand to SEQ ID NO: 2325866
guugccaaaugucacacag

SEQ ID NO: 2325868 - RNA, 19 nt, Artificial Sequence
  Description of Artificial Sequence: Synthetic oligonucleotide
  Sense strand starting at position 3694 of SEQ ID NO: 1885224
gugugacauuuggcaacuu

SEQ ID NO: 2325869 - RNA, 19 nt, Artificial Sequence
  Description of Artificial Sequence: Synthetic oligonucleotide
  Antisense strand to SEQ ID NO: 2325868
aaguugccaaaugucacac

SEQ ID NO: 2325870 - RNA, 19 nt, Artificial Sequence
  Description of Artificial Sequence: Synthetic oligonucleotide
  Sense strand starting at position 3798 of SEQ ID NO: 1885224
ugagcucaucuguauaaag

SEQ ID NO: 2325871 - RNA, 19 nt, Artificial Sequence
  Description of Artificial Sequence: Synthetic oligonucleotide
  Antisense strand to SEQ ID NO: 2325870
cuuuauacagaugagcuca

SEQ ID NO: 2325872 - RNA, 19 nt, Artificial Sequence
  Description of Artificial Sequence: Synthetic oligonucleotide
  Sense strand starting at position 3800 of SEQ ID NO: 1885224
agcucaucuguauaaagca

SEQ ID NO: 2325873 - RNA, 19 nt, Artificial Sequence
  Description of Artificial Sequence: Synthetic oligonucleotide
  Antisense strand to SEQ ID NO: 2325872
ugcuuuauacagaugagcu

SEQ ID NO: 2325874 - RNA, 19 nt, Artificial Sequence
  Description of Artificial Sequence: Synthetic oligonucleotide
  Sense strand starting at position 3853 of SEQ ID NO: 1885224
guaaguauuugauuguguu

SEQ ID NO: 2325875 - RNA, 19 nt, Artificial Sequence
  Description of Artificial Sequence: Synthetic oligonucleotide
  Antisense strand to SEQ ID NO: 2325874
aacacaaucaaauacuuac

SEQ ID NO: 2325876 - RNA, 19 nt, Artificial Sequence
  Description of Artificial Sequence: Synthetic oligonucleotide
  Sense strand starting at position 3904 of SEQ ID NO: 1885224
augacauaguccucccuga

SEQ ID NO: 2325877 - RNA, 19 nt, Artificial Sequence
  Description of Artificial Sequence: Synthetic oligonucleotide
  Antisense strand to SEQ ID NO: 2325876
ucagggaggacuaugucau

SEQ ID NO: 2325878 - RNA, 19 nt, Artificial Sequence
  Description of Artificial Sequence: Synthetic oligonucleotide
  Sense strand starting at position 3933 of SEQ ID NO: 1885224
gcauguaaagauggaugau

SEQ ID NO: 2325879 - RNA, 19 nt, Artificial Sequence
  Description of Artificial Sequence: Synthetic oligonucleotide
  Antisense strand to SEQ ID NO: 2325878
aucauccaucuuuacaugc

SEQ ID NO: 2325880 - RNA, 19 nt, Artificial Sequence
  Description of Artificial Sequence: Synthetic oligonucleotide
  Sense strand starting at position 3972 of SEQ ID NO: 1885224
gagaaagggcucugucuag

SEQ ID NO: 2325881 - RNA, 19 nt, Artificial Sequence
  Description of Artificial Sequence: Synthetic oligonucleotide
  Antisense strand to SEQ ID NO: 2325880
cuagacagagcccuuucuc

SEQ ID NO: 2325882 - RNA, 19 nt, Artificial Sequence
  Description of Artificial Sequence: Synthetic oligonucleotide
  Sense strand starting at position 3976 of SEQ ID NO: 1885224
aagggcucugucuagggaa

SEQ ID NO: 2325883 - RNA, 19 nt, Artificial Sequence
  Description of Artificial Sequence: Synthetic oligonucleotide
  Antisense strand to SEQ ID NO: 2325882
uucccuagacagagcccuu

SEQ ID NO: 2325884 - RNA, 19 nt, Artificial Sequence
  Description of Artificial Sequence: Synthetic oligonucleotide
  Sense strand starting at position 21 of SEQ ID NO: 1885225
cucuacugucuagaucuca

SEQ ID NO: 2325885 - RNA, 19 nt, Artificial Sequence
  Description of Artificial Sequence: Synthetic oligonucleotide
  Antisense strand to SEQ ID NO: 2325884
ugagaucuagacaguagag

SEQ ID NO: 2325886 - RNA, 19 nt, Artificial Sequence
  Description of Artificial Sequence: Synthetic oligonucleotide
  Sense strand starting at position 110 of SEQ ID NO: 1885225
ucaggaagcccucagcaau

SEQ ID NO: 2325887 - RNA, 19 nt, Artificial Sequence
  Description of Artificial Sequence: Synthetic oligonucleotide
  Antisense strand to SEQ ID NO: 2325886
auugcugagggcuuccuga

SEQ ID NO: 2325888 - RNA, 19 nt, Artificial Sequence
  Description of Artificial Sequence: Synthetic oligonucleotide
  Sense strand starting at position 224 of SEQ ID NO: 1885225
ccuuuaagacaguguuucu

SEQ ID NO: 2325889 - RNA, 19 nt, Artificial Sequence
  Description of Artificial Sequence: Synthetic oligonucleotide
  Antisense strand to SEQ ID NO: 2325888
agaaacacugucuuaaagg

SEQ ID NO: 2325890 - RNA, 19 nt, Artificial Sequence
  Description of Artificial Sequence: Synthetic oligonucleotide
  Sense strand starting at position 227 of SEQ ID NO: 1885225
uuaagacaguguuucuuaa

SEQ ID NO: 2325891 - RNA, 19 nt, Artificial Sequence
  Description of Artificial Sequence: Synthetic oligonucleotide
  Antisense strand to SEQ ID NO: 2325890
uuaagaaacacugucuuaa

SEQ ID NO: 2325892 - RNA, 19 nt, Artificial Sequence
  Description of Artificial Sequence: Synthetic oligonucleotide
  Sense strand starting at position 277 of SEQ ID NO: 1885225
uucuuaugauccuagagaa

SEQ ID NO: 2325893 - RNA, 19 nt, Artificial Sequence
  Description of Artificial Sequence: Synthetic oligonucleotide
  Antisense strand to SEQ ID NO: 2325892
uucucuaggaucauaagaa

SEQ ID NO: 2325894 - RNA, 19 nt, Artificial Sequence
  Description of Artificial Sequence: Synthetic oligonucleotide
  Sense strand starting at position 372 of SEQ ID NO: 1885225
uuaugcaaaugaucaaguu

SEQ ID NO: 2325895 - RNA, 19 nt, Artificial Sequence
  Description of Artificial Sequence: Synthetic oligonucleotide
  Antisense strand to SEQ ID NO: 2325894
aacuugaucauuugcauaa

SEQ ID NO: 2325896 - RNA, 19 nt, Artificial Sequence
  Description of Artificial Sequence: Synthetic oligonucleotide
  Sense strand starting at position 437 of SEQ ID NO: 1885225
gccauagaacucugauucu

SEQ ID NO: 2325897 - RNA, 19 nt, Artificial Sequence
  Description of Artificial Sequence: Synthetic oligonucleotide
  Antisense strand to SEQ ID NO: 2325896
agaaucagaguucuauggc

SEQ ID NO: 2325898 - RNA, 19 nt, Artificial Sequence
  Description of Artificial Sequence: Synthetic oligonucleotide
  Sense strand starting at position 461 of SEQ ID NO: 1885225
ucagaucuaugauccguuu

SEQ ID NO: 2325899 - RNA, 19 nt, Artificial Sequence
  Description of Artificial Sequence: Synthetic oligonucleotide
  Antisense strand to SEQ ID NO: 2325898
aaacggaucauagaucuga

SEQ ID NO: 2325900 - RNA, 19 nt, Artificial Sequence
  Description of Artificial Sequence: Synthetic oligonucleotide
  Sense strand starting at position 464 of SEQ ID NO: 1885225
gaucuaugauccguuuaag

SEQ ID NO: 2325901 - RNA, 19 nt, Artificial Sequence
  Description of Artificial Sequence: Synthetic oligonucleotide
  Antisense strand to SEQ ID NO: 2325900
cuuaaacggaucauagauc

SEQ ID NO: 2325902 - RNA, 19 nt, Artificial Sequence
  Description of Artificial Sequence: Synthetic oligonucleotide
  Sense strand starting at position 467 of SEQ ID NO: 1885225
cuaugauccguuuaagaaa

SEQ ID NO: 2325903 - RNA, 19 nt, Artificial Sequence
  Description of Artificial Sequence: Synthetic oligonucleotide
  Antisense strand to SEQ ID NO: 2325902
uuucuuaaacggaucauag

SEQ ID NO: 2325904 - RNA, 19 nt, Artificial Sequence
  Description of Artificial Sequence: Synthetic oligonucleotide
  Sense strand starting at position 559 of SEQ ID NO: 1885225
uuuggugucuaacaacuuu

SEQ ID NO: 2325905 - RNA, 19 nt, Artificial Sequence
  Description of Artificial Sequence: Synthetic oligonucleotide
  Antisense strand to SEQ ID NO: 2325904
aaaguuguuagacaccaaa

SEQ ID NO: 2325906 - RNA, 19 nt, Artificial Sequence
  Description of Artificial Sequence: Synthetic oligonucleotide
  Sense strand starting at position 572 of SEQ ID NO: 1885225
aacuuucugccuuggagua

SEQ ID NO: 2325907 - RNA, 19 nt, Artificial Sequence
  Description of Artificial Sequence: Synthetic oligonucleotide
  Antisense strand to SEQ ID NO: 2325906
uacuccaaggcagaaaguu

SEQ ID NO: 2325908 - RNA, 19 nt, Artificial Sequence
  Description of Artificial Sequence: Synthetic oligonucleotide
  Sense strand starting at position 584 of SEQ ID NO: 1885225
uggaguagcuaguaauaug

SEQ ID NO: 2325909 - RNA, 19 nt, Artificial Sequence
  Description of Artificial Sequence: Synthetic oligonucleotide
  Antisense strand to SEQ ID NO: 2325908
cauauuacuagcuacucca

SEQ ID NO: 2325910 - RNA, 19 nt, Artificial Sequence
  Description of Artificial Sequence: Synthetic oligonucleotide
  Sense strand starting at position 620 of SEQ ID NO: 1885225
acauaagcucuuugaagac

SEQ ID NO: 2325911 - RNA, 19 nt, Artificial Sequence
  Description of Artificial Sequence: Synthetic oligonucleotide
  Antisense strand to SEQ ID NO: 2325910
gucuucaaagagcuuaugu

SEQ ID NO: 2325912 - RNA, 19 nt, Artificial Sequence
  Description of Artificial Sequence: Synthetic oligonucleotide
  Sense strand starting at position 1333 of SEQ ID NO: 1885225
auucuauggcucuaaguaa

SEQ ID NO: 2325913 - RNA, 19 nt, Artificial Sequence
  Description of Artificial Sequence: Synthetic oligonucleotide
  Antisense strand to SEQ ID NO: 2325912
uuacuuagagccauagaau

SEQ ID NO: 2325914 - RNA, 19 nt, Artificial Sequence
  Description of Artificial Sequence: Synthetic oligonucleotide
  Sense strand starting at position 1355 of SEQ ID NO: 1885225
cggcaagagacagguuauu

SEQ ID NO: 2325915 - RNA, 19 nt, Artificial Sequence
  Description of Artificial Sequence: Synthetic oligonucleotide
  Antisense strand to SEQ ID NO: 2325914
aauaaccugucucuugccg

SEQ ID NO: 2325916 - RNA, 19 nt, Artificial Sequence
  Description of Artificial Sequence: Synthetic oligonucleotide
  Sense strand starting at position 1369 of SEQ ID NO: 1885225
uuauuucuuugguaagauc

SEQ ID NO: 2325917 - RNA, 19 nt, Artificial Sequence
  Description of Artificial Sequence: Synthetic oligonucleotide
  Antisense strand to SEQ ID NO: 2325916
gaucuuaccaaagaaauaa

SEQ ID NO: 2325918 - RNA, 19 nt, Artificial Sequence
  Description of Artificial Sequence: Synthetic oligonucleotide
  Sense strand starting at position 1372 of SEQ ID NO: 1885225
uuucuuugguaagaucagu

SEQ ID NO: 2325919 - RNA, 19 nt, Artificial Sequence
  Description of Artificial Sequence: Synthetic oligonucleotide
  Antisense strand to SEQ ID NO: 2325918
acugaucuuaccaaagaaa

SEQ ID NO: 2325920 - RNA, 19 nt, Artificial Sequence
  Description of Artificial Sequence: Synthetic oligonucleotide
  Sense strand starting at position 1388 of SEQ ID NO: 1885225
aguuguauuucccagagaa

SEQ ID NO: 2325921 - RNA, 19 nt, Artificial Sequence
  Description of Artificial Sequence: Synthetic oligonucleotide
  Antisense strand to SEQ ID NO: 2325920
uucucugggaaauacaacu

SEQ ID NO: 2325922 - RNA, 19 nt, Artificial Sequence
  Description of Artificial Sequence: Synthetic oligonucleotide
  Sense strand starting at position 1820 of SEQ ID NO: 1885225
ccagguguuuguccacuuu

SEQ ID NO: 2325923 - RNA, 19 nt, Artificial Sequence
  Description of Artificial Sequence: Synthetic oligonucleotide
  Antisense strand to SEQ ID NO: 2325922
aaaguggacaaacaccugg

SEQ ID NO: 2325924 - RNA, 19 nt, Artificial Sequence
  Description of Artificial Sequence: Synthetic oligonucleotide
  Sense strand starting at position 1826 of SEQ ID NO: 1885225
guuuguccacuuuacucaa

SEQ ID NO: 2325925 - RNA, 19 nt, Artificial Sequence
  Description of Artificial Sequence: Synthetic oligonucleotide
  Antisense strand to SEQ ID NO: 2325924
uugaguaaaguggacaaac

SEQ ID NO: 2325926 - RNA, 19 nt, Artificial Sequence
  Description of Artificial Sequence: Synthetic oligonucleotide
  Sense strand starting at position 2108 of SEQ ID NO: 1885225
gccucugcgcgugcucaau

SEQ ID NO: 2325927 - RNA, 19 nt, Artificial Sequence
  Description of Artificial Sequence: Synthetic oligonucleotide
  Antisense strand to SEQ ID NO: 2325926
auugagcacgcgcagaggc

SEQ ID NO: 2325928 - RNA, 19 nt, Artificial Sequence
  Description of Artificial Sequence: Synthetic oligonucleotide
  Sense strand starting at position 2110 of SEQ ID NO: 1885225
cucugcgcgugcucaauaa

SEQ ID NO: 2325929 - RNA, 19 nt, Artificial Sequence
  Description of Artificial Sequence: Synthetic oligonucleotide
  Antisense strand to SEQ ID NO: 2325928
uuauugagcacgcgcagag

SEQ ID NO: 2325930 - RNA, 19 nt, Artificial Sequence
  Description of Artificial Sequence: Synthetic oligonucleotide
  Sense strand starting at position 2114 of SEQ ID NO: 1885225
gcgcgugcucaauaacugu

SEQ ID NO: 2325931 - RNA, 19 nt, Artificial Sequence
  Description of Artificial Sequence: Synthetic oligonucleotide
  Antisense strand to SEQ ID NO: 2325930
acaguuauugagcacgcgc

SEQ ID NO: 2325932 - RNA, 19 nt, Artificial Sequence
  Description of Artificial Sequence: Synthetic oligonucleotide
  Sense strand starting at position 2163 of SEQ ID NO: 1885225
cccugagcuguuuaaauau

SEQ ID NO: 2325933 - RNA, 19 nt, Artificial Sequence
  Description of Artificial Sequence: Synthetic oligonucleotide
  Antisense strand to SEQ ID NO: 2325932
auauuuaaacagcucaggg

SEQ ID NO: 2325934 - RNA, 19 nt, Artificial Sequence
  Description of Artificial Sequence: Synthetic oligonucleotide
  Sense strand starting at position 2636 of SEQ ID NO: 1885225
ggaguuuccucucaacuau

SEQ ID NO: 2325935 - RNA, 19 nt, Artificial Sequence
  Description of Artificial Sequence: Synthetic oligonucleotide
  Antisense strand to SEQ ID NO: 2325934
auaguugagaggaaacucc

SEQ ID NO: 2325936 - RNA, 19 nt, Artificial Sequence
  Description of Artificial Sequence: Synthetic oligonucleotide
  Sense strand starting at position 2825 of SEQ ID NO: 1885225
ccaucuuacuguuccugau

SEQ ID NO: 2325937 - RNA, 19 nt, Artificial Sequence
  Description of Artificial Sequence: Synthetic oligonucleotide
  Antisense strand to SEQ ID NO: 2325936
aucaggaacaguaagaugg

SEQ ID NO: 2325938 - RNA, 19 nt, Artificial Sequence
  Description of Artificial Sequence: Synthetic oligonucleotide
  Sense strand starting at position 2828 of SEQ ID NO: 1885225
ucuuacuguuccugauaga

SEQ ID NO: 2325939 - RNA, 19 nt, Artificial Sequence
  Description of Artificial Sequence: Synthetic oligonucleotide
  Antisense strand to SEQ ID NO: 2325938
ucuaucaggaacaguaaga

SEQ ID NO: 2325940 - RNA, 19 nt, Artificial Sequence
  Description of Artificial Sequence: Synthetic oligonucleotide
  Sense strand starting at position 2829 of SEQ ID NO: 1885225
cuuacuguuccugauagac

SEQ ID NO: 2325941 - RNA, 19 nt, Artificial Sequence
  Description of Artificial Sequence: Synthetic oligonucleotide
  Antisense strand to SEQ ID NO: 2325940
gucuaucaggaacaguaag

SEQ ID NO: 2325942 - RNA, 19 nt, Artificial Sequence
  Description of Artificial Sequence: Synthetic oligonucleotide
  Sense strand starting at position 3323 of SEQ ID NO: 1885225
cagguauaugcuggucacu

SEQ ID NO: 2325943 - RNA, 19 nt, Artificial Sequence
  Description of Artificial Sequence: Synthetic oligonucleotide
  Antisense strand to SEQ ID NO: 2325942
agugaccagcauauaccug

SEQ ID NO: 2325944 - RNA, 19 nt, Artificial Sequence
  Description of Artificial Sequence: Synthetic oligonucleotide
  Sense strand starting at position 3325 of SEQ ID NO: 1885225
gguauaugcuggucacuuu

SEQ ID NO: 2325945 - RNA, 19 nt, Artificial Sequence
  Description of Artificial Sequence: Synthetic oligonucleotide
  Antisense strand to SEQ ID NO: 2325944
aaagugaccagcauauacc

SEQ ID NO: 2325946 - RNA, 19 nt, Artificial Sequence
  Description of Artificial Sequence: Synthetic oligonucleotide
  Sense strand starting at position 3356 of SEQ ID NO: 1885225
cuaugcuaucaagguaaca

SEQ ID NO: 2325947 - RNA, 19 nt, Artificial Sequence
  Description of Artificial Sequence: Synthetic oligonucleotide
  Antisense strand to SEQ ID NO: 2325946
uguuaccuugauagcauag

SEQ ID NO: 2325948 - RNA, 19 nt, Artificial Sequence
  Description of Artificial Sequence: Synthetic oligonucleotide
  Sense strand starting at position 3798 of SEQ ID NO: 1885225
caggauuggucuugucaga

SEQ ID NO: 2325949 - RNA, 19 nt, Artificial Sequence
  Description of Artificial Sequence: Synthetic oligonucleotide
  Antisense strand to SEQ ID NO: 2325948
ucugacaagaccaauccug

SEQ ID NO: 2325950 - RNA, 19 nt, Artificial Sequence
  Description of Artificial Sequence: Synthetic oligonucleotide
  Sense strand starting at position 3808 of SEQ ID NO: 1885225
cuugucagauucguccuaa

SEQ ID NO: 2325951 - RNA, 19 nt, Artificial Sequence
  Description of Artificial Sequence: Synthetic oligonucleotide
  Antisense strand to SEQ ID NO: 2325950
uuaggacgaaucugacaag

SEQ ID NO: 2325952 - RNA, 19 nt, Artificial Sequence
  Description of Artificial Sequence: Synthetic oligonucleotide
  Sense strand starting at position 3809 of SEQ ID NO: 1885225
uugucagauucguccuaag

SEQ ID NO: 2325953 - RNA, 19 nt, Artificial Sequence
  Description of Artificial Sequence: Synthetic oligonucleotide
  Antisense strand to SEQ ID NO: 2325952
cuuaggacgaaucugacaa

SEQ ID NO: 2325954 - RNA, 19 nt, Artificial Sequence
  Description of Artificial Sequence: Synthetic oligonucleotide
  Sense strand starting at position 3812 of SEQ ID NO: 1885225
ucagauucguccuaagagg

SEQ ID NO: 2325955 - RNA, 19 nt, Artificial Sequence
  Description of Artificial Sequence: Synthetic oligonucleotide
  Antisense strand to SEQ ID NO: 2325954
ccucuuaggacgaaucuga

SEQ ID NO: 2325956 - RNA, 19 nt, Artificial Sequence
  Description of Artificial Sequence: Synthetic oligonucleotide
  Sense strand starting at position 3912 of SEQ ID NO: 1885225
gguauuagauuagguagua

SEQ ID NO: 2325957 - RNA, 19 nt, Artificial Sequence
  Description of Artificial Sequence: Synthetic oligonucleotide
  Antisense strand to SEQ ID NO: 2325956
uacuaccuaaucuaauacc

SEQ ID NO: 2325958 - RNA, 19 nt, Artificial Sequence
  Description of Artificial Sequence: Synthetic oligonucleotide
  Sense strand starting at position 3913 of SEQ ID NO: 1885225
guauuagauuagguaguaa

SEQ ID NO: 2325959 - RNA, 19 nt, Artificial Sequence
  Description of Artificial Sequence: Synthetic oligonucleotide
  Antisense strand to SEQ ID NO: 2325958
uuacuaccuaaucuaauac

SEQ ID NO: 2325960 - RNA, 19 nt, Artificial Sequence
  Description of Artificial Sequence: Synthetic oligonucleotide
  Sense strand starting at position 3926 of SEQ ID NO: 1885225
uaguaaauuugucagugaa

SEQ ID NO: 2325961 - RNA, 19 nt, Artificial Sequence
  Description of Artificial Sequence: Synthetic oligonucleotide
  Antisense strand to SEQ ID NO: 2325960
uucacugacaaauuuacua

SEQ ID NO: 2325962 - RNA, 19 nt, Artificial Sequence
  Description of Artificial Sequence: Synthetic oligonucleotide
  Sense strand starting at position 3945 of SEQ ID NO: 1885225
guuauaaaguauuaaggca

SEQ ID NO: 2325963 - RNA, 19 nt, Artificial Sequence
  Description of Artificial Sequence: Synthetic oligonucleotide
  Antisense strand to SEQ ID NO: 2325962
ugccuuaauacuuuauaac

SEQ ID NO: 2325964 - RNA, 19 nt, Artificial Sequence
  Description of Artificial Sequence: Synthetic oligonucleotide
  Sense strand starting at position 164 of SEQ ID NO: 1885226
cugugugaauuugcagauu

SEQ ID NO: 2325965 - RNA, 19 nt, Artificial Sequence
  Description of Artificial Sequence: Synthetic oligonucleotide
  Antisense strand to SEQ ID NO: 2325964
aaucugcaaauucacacag

SEQ ID NO: 2325966 - RNA, 19 nt, Artificial Sequence
  Description of Artificial Sequence: Synthetic oligonucleotide
  Sense strand starting at position 540 of SEQ ID NO: 1885226
gugaacaaacagugacuua

SEQ ID NO: 2325967 - RNA, 19 nt, Artificial Sequence
  Description of Artificial Sequence: Synthetic oligonucleotide
  Antisense strand to SEQ ID NO: 2325966
uaagucacuguuuguucac

SEQ ID NO: 2325968 - RNA, 19 nt, Artificial Sequence
  Description of Artificial Sequence: Synthetic oligonucleotide
  Sense strand starting at position 617 of SEQ ID NO: 1885226
cuagaagggcagugauaau

SEQ ID NO: 2325969 - RNA, 19 nt, Artificial Sequence
  Description of Artificial Sequence: Synthetic oligonucleotide
  Antisense strand to SEQ ID NO: 2325968
auuaucacugcccuucuag

SEQ ID NO: 2325970 - RNA, 19 nt, Artificial Sequence
  Description of Artificial Sequence: Synthetic oligonucleotide
  Sense strand starting at position 708 of SEQ ID NO: 1885226
gccaaaugauaugcucaau

SEQ ID NO: 2325971 - RNA, 19 nt, Artificial Sequence
  Description of Artificial Sequence: Synthetic oligonucleotide
  Antisense strand to SEQ ID NO: 2325970
auugagcauaucauuuggc

SEQ ID NO: 2325972 - RNA, 19 nt, Artificial Sequence
  Description of Artificial Sequence: Synthetic oligonucleotide
  Sense strand starting at position 714 of SEQ ID NO: 1885226
ugauaugcucaaugcauuu

SEQ ID NO: 2325973 - RNA, 19 nt, Artificial Sequence
  Description of Artificial Sequence: Synthetic oligonucleotide
  Antisense strand to SEQ ID NO: 2325972
aaaugcauugagcauauca

SEQ ID NO: 2325974 - RNA, 19 nt, Artificial Sequence
  Description of Artificial Sequence: Synthetic oligonucleotide
  Sense strand starting at position 823 of SEQ ID NO: 1885226
uuuaauagucauggcugga

SEQ ID NO: 2325975 - RNA, 19 nt, Artificial Sequence
  Description of Artificial Sequence: Synthetic oligonucleotide
  Antisense strand to SEQ ID NO: 2325974
uccagccaugacuauuaaa

SEQ ID NO: 2325976 - RNA, 19 nt, Artificial Sequence
  Description of Artificial Sequence: Synthetic oligonucleotide
  Sense strand starting at position 947 of SEQ ID NO: 1885226
cugagaaacuuucuauguc

SEQ ID NO: 2325977 - RNA, 19 nt, Artificial Sequence
  Description of Artificial Sequence: Synthetic oligonucleotide
  Antisense strand to SEQ ID NO: 2325976
gacauagaaaguuucucag

SEQ ID NO: 2325978 - RNA, 19 nt, Artificial Sequence
  Description of Artificial Sequence: Synthetic oligonucleotide
  Sense strand starting at position 950 of SEQ ID NO: 1885226
agaaacuuucuaugucugu

SEQ ID NO: 2325979 - RNA, 19 nt, Artificial Sequence
  Description of Artificial Sequence: Synthetic oligonucleotide
  Antisense strand to SEQ ID NO: 2325978
acagacauagaaaguuucu

SEQ ID NO: 2325980 - RNA, 19 nt, Artificial Sequence
  Description of Artificial Sequence: Synthetic oligonucleotide
  Sense strand starting at position 1119 of SEQ ID NO: 1885226
uacugauuggcuugguaaa

SEQ ID NO: 2325981 - RNA, 19 nt, Artificial Sequence
  Description of Artificial Sequence: Synthetic oligonucleotide
  Antisense strand to SEQ ID NO: 2325980
uuuaccaagccaaucagua

SEQ ID NO: 2325982 - RNA, 19 nt, Artificial Sequence
  Description of Artificial Sequence: Synthetic oligonucleotide
  Sense strand starting at position 1120 of SEQ ID NO: 1885226
acugauuggcuugguaaau

SEQ ID NO: 2325983 - RNA, 19 nt, Artificial Sequence
  Description of Artificial Sequence: Synthetic oligonucleotide
  Antisense strand to SEQ ID NO: 2325982
auuuaccaagccaaucagu

SEQ ID NO: 2325984 - RNA, 19 nt, Artificial Sequence
  Description of Artificial Sequence: Synthetic oligonucleotide
  Sense strand starting at position 1149 of SEQ ID NO: 1885226
auuccuaaaucagcuguga

SEQ ID NO: 2325985 - RNA, 19 nt, Artificial Sequence
  Description of Artificial Sequence: Synthetic oligonucleotide
  Antisense strand to SEQ ID NO: 2325984
ucacagcugauuuaggaau

SEQ ID NO: 2325986 - RNA, 19 nt, Artificial Sequence
  Description of Artificial Sequence: Synthetic oligonucleotide
  Sense strand starting at position 1240 of SEQ ID NO: 1885226
agcagauguuaacuaguau

SEQ ID NO: 2325987 - RNA, 19 nt, Artificial Sequence
  Description of Artificial Sequence: Synthetic oligonucleotide
  Antisense strand to SEQ ID NO: 2325986
auacuaguuaacaucugcu

SEQ ID NO: 2325988 - RNA, 19 nt, Artificial Sequence
  Description of Artificial Sequence: Synthetic oligonucleotide
  Sense strand starting at position 1293 of SEQ ID NO: 1885226
aggacacaguccuuucuua

SEQ ID NO: 2325989 - RNA, 19 nt, Artificial Sequence
  Description of Artificial Sequence: Synthetic oligonucleotide
  Antisense strand to SEQ ID NO: 2325988
uaagaaaggacuguguccu

SEQ ID NO: 2325990 - RNA, 19 nt, Artificial Sequence
  Description of Artificial Sequence: Synthetic oligonucleotide
  Sense strand starting at position 1379 of SEQ ID NO: 1885226
gagguuaucgcauaccuac

SEQ ID NO: 2325991 - RNA, 19 nt, Artificial Sequence
  Description of Artificial Sequence: Synthetic oligonucleotide
  Antisense strand to SEQ ID NO: 2325990
guagguaugcgauaaccuc

SEQ ID NO: 2325992 - RNA, 19 nt, Artificial Sequence
  Description of Artificial Sequence: Synthetic oligonucleotide
  Sense strand starting at position 1399 of SEQ ID NO: 1885226
gugucucagagucauucca

SEQ ID NO: 2325993 - RNA, 19 nt, Artificial Sequence
  Description of Artificial Sequence: Synthetic oligonucleotide
  Antisense strand to SEQ ID NO: 2325992
uggaaugacucugagacac

SEQ ID NO: 2325994 - RNA, 19 nt, Artificial Sequence
  Description of Artificial Sequence: Synthetic oligonucleotide
  Sense strand starting at position 1401 of SEQ ID NO: 1885226
gucucagagucauuccaca

SEQ ID NO: 2325995 - RNA, 19 nt, Artificial Sequence
  Description of Artificial Sequence: Synthetic oligonucleotide
  Antisense strand to SEQ ID NO: 2325994
uguggaaugacucugagac

SEQ ID NO: 2325996 - RNA, 19 nt, Artificial Sequence
  Description of Artificial Sequence: Synthetic oligonucleotide
  Sense strand starting at position 1678 of SEQ ID NO: 1885226
cccuuagacucagugaaga

SEQ ID NO: 2325997 - RNA, 19 nt, Artificial Sequence
  Description of Artificial Sequence: Synthetic oligonucleotide
  Antisense strand to SEQ ID NO: 2325996
ucuucacugagucuaaggg

SEQ ID NO: 2325998 - RNA, 19 nt, Artificial Sequence
  Description of Artificial Sequence: Synthetic oligonucleotide
  Sense strand starting at position 1777 of SEQ ID NO: 1885226
auuggcaucuuccuaagaa

SEQ ID NO: 2325999 - RNA, 19 nt, Artificial Sequence
  Description of Artificial Sequence: Synthetic oligonucleotide
  Antisense strand to SEQ ID NO: 2325998
uucuuaggaagaugccaau

SEQ ID NO: 2326000 - RNA, 19 nt, Artificial Sequence
  Description of Artificial Sequence: Synthetic oligonucleotide
  Sense strand starting at position 1818 of SEQ ID NO: 1885226
aggacugucucuccaacuu

SEQ ID NO: 2326001 - RNA, 19 nt, Artificial Sequence
  Description of Artificial Sequence: Synthetic oligonucleotide
  Antisense strand to SEQ ID NO: 2326000
aaguuggagagacaguccu

SEQ ID NO: 2326002 - RNA, 19 nt, Artificial Sequence
  Description of Artificial Sequence: Synthetic oligonucleotide
  Sense strand starting at position 2151 of SEQ ID NO: 1885226
cugggagcuguggaaacau

SEQ ID NO: 2326003 - RNA, 19 nt, Artificial Sequence
  Description of Artificial Sequence: Synthetic oligonucleotide
  Antisense strand to SEQ ID NO: 2326002
auguuuccacagcucccag

SEQ ID NO: 2326004 - RNA, 19 nt, Artificial Sequence
  Description of Artificial Sequence: Synthetic oligonucleotide
  Sense strand starting at position 2187 of SEQ ID NO: 1885226
uaggaauucccgcgggaaa

SEQ ID NO: 2326005 - RNA, 19 nt, Artificial Sequence
  Description of Artificial Sequence: Synthetic oligonucleotide
  Antisense strand to SEQ ID NO: 2326004
uuucccgcgggaauuccua

SEQ ID NO: 2326006 - RNA, 19 nt, Artificial Sequence
  Description of Artificial Sequence: Synthetic oligonucleotide
  Sense strand starting at position 2188 of SEQ ID NO: 1885226
aggaauucccgcgggaaac

SEQ ID NO: 2326007 - RNA, 19 nt, Artificial Sequence
  Description of Artificial Sequence: Synthetic oligonucleotide
  Antisense strand to SEQ ID NO: 2326006
guuucccgcgggaauuccu

SEQ ID NO: 2326008 - RNA, 19 nt, Artificial Sequence
  Description of Artificial Sequence: Synthetic oligonucleotide
  Sense strand starting at position 2189 of SEQ ID NO: 1885226
ggaauucccgcgggaaaca

SEQ ID NO: 2326009 - RNA, 19 nt, Artificial Sequence
  Description of Artificial Sequence: Synthetic oligonucleotide
  Antisense strand to SEQ ID NO: 2326008
uguuucccgcgggaauucc

SEQ ID NO: 2326010 - RNA, 19 nt, Artificial Sequence
  Description of Artificial Sequence: Synthetic oligonucleotide
  Sense strand starting at position 2190 of SEQ ID NO: 1885226
gaauucccgcgggaaacau

SEQ ID NO: 2326011 - RNA, 19 nt, Artificial Sequence
  Description of Artificial Sequence: Synthetic oligonucleotide
  Antisense strand to SEQ ID NO: 2326010
auguuucccgcgggaauuc

SEQ ID NO: 2326012 - RNA, 19 nt, Artificial Sequence
  Description of Artificial Sequence: Synthetic oligonucleotide
  Sense strand starting at position 2227 of SEQ ID NO: 1885226
gcacuaaaccuagggacuu

SEQ ID NO: 2326013 - RNA, 19 nt, Artificial Sequence
  Description of Artificial Sequence: Synthetic oligonucleotide
  Antisense strand to SEQ ID NO: 2326012
aagucccuagguuuagugc

SEQ ID NO: 2326014 - RNA, 19 nt, Artificial Sequence
  Description of Artificial Sequence: Synthetic oligonucleotide
  Sense strand starting at position 2413 of SEQ ID NO: 1885226
ggauuaaauugauuccgag

SEQ ID NO: 2326015 - RNA, 19 nt, Artificial Sequence
  Description of Artificial Sequence: Synthetic oligonucleotide
  Antisense strand to SEQ ID NO: 2326014
cucggaaucaauuuaaucc

SEQ ID NO: 2326016 - RNA, 19 nt, Artificial Sequence
  Description of Artificial Sequence: Synthetic oligonucleotide
  Sense strand starting at position 2440 of SEQ ID NO: 1885226
gacggccagaucugagaua

SEQ ID NO: 2326017 - RNA, 19 nt, Artificial Sequence
  Description of Artificial Sequence: Synthetic oligonucleotide
  Antisense strand to SEQ ID NO: 2326016
uaucucagaucuggccguc

SEQ ID NO: 2326018 - RNA, 19 nt, Artificial Sequence
  Description of Artificial Sequence: Synthetic oligonucleotide
  Sense strand starting at position 2493 of SEQ ID NO: 1885226
ugucauaaacuuuguaaca

SEQ ID NO: 2326019 - RNA, 19 nt, Artificial Sequence
  Description of Artificial Sequence: Synthetic oligonucleotide
  Antisense strand to SEQ ID NO: 2326018
uguuacaaaguuuaugaca

SEQ ID NO: 2326020 - RNA, 19 nt, Artificial Sequence
  Description of Artificial Sequence: Synthetic oligonucleotide
  Sense strand starting at position 2494 of SEQ ID NO: 1885226
gucauaaacuuuguaacag

SEQ ID NO: 2326021 - RNA, 19 nt, Artificial Sequence
  Description of Artificial Sequence: Synthetic oligonucleotide
  Antisense strand to SEQ ID NO: 2326020
cuguuacaaaguuuaugac

SEQ ID NO: 2326022 - RNA, 19 nt, Artificial Sequence
  Description of Artificial Sequence: Synthetic oligonucleotide
  Sense strand starting at position 2548 of SEQ ID NO: 1885226
ggcuguugugugucuguau

SEQ ID NO: 2326023 - RNA, 19 nt, Artificial Sequence
  Description of Artificial Sequence: Synthetic oligonucleotide
  Antisense strand to SEQ ID NO: 2326022
auacagacacacaacagcc

SEQ ID NO: 2326024 - RNA, 19 nt, Artificial Sequence
  Description of Artificial Sequence: Synthetic oligonucleotide
  Sense strand starting at position 2613 of SEQ ID NO: 1885226
agaagugccagagauucuu

SEQ ID NO: 2326025 - RNA, 19 nt, Artificial Sequence
  Description of Artificial Sequence: Synthetic oligonucleotide
  Antisense strand to SEQ ID NO: 2326024
aagaaucucuggcacuucu

SEQ ID NO: 2326026 - RNA, 19 nt, Artificial Sequence
  Description of Artificial Sequence: Synthetic oligonucleotide
  Sense strand starting at position 2619 of SEQ ID NO: 1885226
gccagagauucuuuauuga

SEQ ID NO: 2326027 - RNA, 19 nt, Artificial Sequence
  Description of Artificial Sequence: Synthetic oligonucleotide
  Antisense strand to SEQ ID NO: 2326026
ucaauaaagaaucucuggc

SEQ ID NO: 2326028 - RNA, 19 nt, Artificial Sequence
  Description of Artificial Sequence: Synthetic oligonucleotide
  Sense strand starting at position 2816 of SEQ ID NO: 1885226
guugucauuucgguggaaa

SEQ ID NO: 2326029 - RNA, 19 nt, Artificial Sequence
  Description of Artificial Sequence: Synthetic oligonucleotide
  Antisense strand to SEQ ID NO: 2326028
uuuccaccgaaaugacaac

SEQ ID NO: 2326030 - RNA, 19 nt, Artificial Sequence
  Description of Artificial Sequence: Synthetic oligonucleotide
  Sense strand starting at position 3144 of SEQ ID NO: 1885226
cacagauggugguuccuua

SEQ ID NO: 2326031 - RNA, 19 nt, Artificial Sequence
  Description of Artificial Sequence: Synthetic oligonucleotide
  Antisense strand to SEQ ID NO: 2326030
uaaggaaccaccaucugug

SEQ ID NO: 2326032 - RNA, 19 nt, Artificial Sequence
  Description of Artificial Sequence: Synthetic oligonucleotide
  Sense strand starting at position 3148 of SEQ ID NO: 1885226
gauggugguuccuuaagau

SEQ ID NO: 2326033 - RNA, 19 nt, Artificial Sequence
  Description of Artificial Sequence: Synthetic oligonucleotide
  Antisense strand to SEQ ID NO: 2326032
aucuuaaggaaccaccauc

SEQ ID NO: 2326034 - RNA, 19 nt, Artificial Sequence
  Description of Artificial Sequence: Synthetic oligonucleotide
  Sense strand starting at position 3314 of SEQ ID NO: 1885226
uuauguacagcacaugaua

SEQ ID NO: 2326035 - RNA, 19 nt, Artificial Sequence
  Description of Artificial Sequence: Synthetic oligonucleotide
  Antisense strand to SEQ ID NO: 2326034
uaucaugugcuguacauaa

SEQ ID NO: 2326036 - RNA, 19 nt, Artificial Sequence
  Description of Artificial Sequence: Synthetic oligonucleotide
  Sense strand starting at position 3629 of SEQ ID NO: 1885226
uaauguaugggcuaaugua

SEQ ID NO: 2326037 - RNA, 19 nt, Artificial Sequence
  Description of Artificial Sequence: Synthetic oligonucleotide
  Antisense strand to SEQ ID NO: 2326036
uacauuagcccauacauua

SEQ ID NO: 2326038 - RNA, 19 nt, Artificial Sequence
  Description of Artificial Sequence: Synthetic oligonucleotide
  Sense strand starting at position 3759 of SEQ ID NO: 1885226
guuuaugaaggcuauagua

SEQ ID NO: 2326039 - RNA, 19 nt, Artificial Sequence
  Description of Artificial Sequence: Synthetic oligonucleotide
  Antisense strand to SEQ ID NO: 2326038
uacuauagccuucauaaac

SEQ ID NO: 2326040 - RNA, 19 nt, Artificial Sequence
  Description of Artificial Sequence: Synthetic oligonucleotide
  Sense strand starting at position 3761 of SEQ ID NO: 1885226
uuaugaaggcuauaguagu

SEQ ID NO: 2326041 - RNA, 19 nt, Artificial Sequence
  Description of Artificial Sequence: Synthetic oligonucleotide
  Antisense strand to SEQ ID NO: 2326040
acuacuauagccuucauaa

SEQ ID NO: 2326042 - RNA, 19 nt, Artificial Sequence
  Description of Artificial Sequence: Synthetic oligonucleotide
  Sense strand starting at position 3924 of SEQ ID NO: 1885226
uguacacaauguuuagaua

SEQ ID NO: 2326043 - RNA, 19 nt, Artificial Sequence
  Description of Artificial Sequence: Synthetic oligonucleotide
  Antisense strand to SEQ ID NO: 2326042
uaucuaaacauuguguaca

SEQ ID NO: 2326044 - RNA, 19 nt, Artificial Sequence
  Description of Artificial Sequence: Synthetic oligonucleotide
  Sense strand starting at position 1 of SEQ ID NO: 1885227
auguaauuccuacaacagu

SEQ ID NO: 2326045 - RNA, 19 nt, Artificial Sequence
  Description of Artificial Sequence: Synthetic oligonucleotide
  Antisense strand to SEQ ID NO: 2326044
acuguuguaggaauuacau

SEQ ID NO: 2326046 - RNA, 19 nt, Artificial Sequence
  Description of Artificial Sequence: Synthetic oligonucleotide
  Sense strand starting at position 157 of SEQ ID NO: 1885227
ugaugaacugaguggguau

SEQ ID NO: 2326047 - RNA, 19 nt, Artificial Sequence
  Description of Artificial Sequence: Synthetic oligonucleotide
  Antisense strand to SEQ ID NO: 2326046
auacccacucaguucauca

SEQ ID NO: 2326048 - RNA, 19 nt, Artificial Sequence
  Description of Artificial Sequence: Synthetic oligonucleotide
  Sense strand starting at position 158 of SEQ ID NO: 1885227
gaugaacugaguggguauu

SEQ ID NO: 2326049 - RNA, 19 nt, Artificial Sequence
  Description of Artificial Sequence: Synthetic oligonucleotide
  Antisense strand to SEQ ID NO: 2326048
aauacccacucaguucauc

SEQ ID NO: 2326050 - RNA, 19 nt, Artificial Sequence
  Description of Artificial Sequence: Synthetic oligonucleotide
  Sense strand starting at position 164 of SEQ ID NO: 1885227
cugaguggguauuuguuau

SEQ ID NO: 2326051 - RNA, 19 nt, Artificial Sequence
  Description of Artificial Sequence: Synthetic oligonucleotide
  Antisense strand to SEQ ID NO: 2326050
auaacaaauacccacucag

SEQ ID NO: 2326052 - RNA, 19 nt, Artificial Sequence
  Description of Artificial Sequence: Synthetic oligonucleotide
  Sense strand starting at position 181 of SEQ ID NO: 1885227
auuccuaggguuugagagu

SEQ ID NO: 2326053 - RNA, 19 nt, Artificial Sequence
  Description of Artificial Sequence: Synthetic oligonucleotide
  Antisense strand to SEQ ID NO: 2326052
acucucaaacccuaggaau

SEQ ID NO: 2326054 - RNA, 19 nt, Artificial Sequence
  Description of Artificial Sequence: Synthetic oligonucleotide
  Sense strand starting at position 194 of SEQ ID NO: 1885227
gagaguugccaucacuuaa

SEQ ID NO: 2326055 - RNA, 19 nt, Artificial Sequence
  Description of Artificial Sequence: Synthetic oligonucleotide
  Antisense strand to SEQ ID NO: 2326054
uuaagugauggcaacucuc

SEQ ID NO: 2326056 - RNA, 19 nt, Artificial Sequence
  Description of Artificial Sequence: Synthetic oligonucleotide
  Sense strand starting at position 207 of SEQ ID NO: 1885227
acuuaacagguauggauau

SEQ ID NO: 2326057 - RNA, 19 nt, Artificial Sequence
  Description of Artificial Sequence: Synthetic oligonucleotide
  Antisense strand to SEQ ID NO: 2326056
auauccauaccuguuaagu

SEQ ID NO: 2326058 - RNA, 19 nt, Artificial Sequence
  Description of Artificial Sequence: Synthetic oligonucleotide
  Sense strand starting at position 233 of SEQ ID NO: 1885227
caaucuuauggaggcugau

SEQ ID NO: 2326059 - RNA, 19 nt, Artificial Sequence
  Description of Artificial Sequence: Synthetic oligonucleotide
  Antisense strand to SEQ ID NO: 2326058
aucagccuccauaagauug

SEQ ID NO: 2326060 - RNA, 19 nt, Artificial Sequence
  Description of Artificial Sequence: Synthetic oligonucleotide
  Sense strand starting at position 236 of SEQ ID NO: 1885227
ucuuauggaggcugauuau

SEQ ID NO: 2326061 - RNA, 19 nt, Artificial Sequence
  Description of Artificial Sequence: Synthetic oligonucleotide
  Antisense strand to SEQ ID NO: 2326060
auaaucagccuccauaaga

SEQ ID NO: 2326062 - RNA, 19 nt, Artificial Sequence
  Description of Artificial Sequence: Synthetic oligonucleotide
  Sense strand starting at position 275 of SEQ ID NO: 1885227
gugcacuaacucugaaauu

SEQ ID NO: 2326063 - RNA, 19 nt, Artificial Sequence
  Description of Artificial Sequence: Synthetic oligonucleotide
  Antisense strand to SEQ ID NO: 2326062
aauuucagaguuagugcac

SEQ ID NO: 2326064 - RNA, 19 nt, Artificial Sequence
  Description of Artificial Sequence: Synthetic oligonucleotide
  Sense strand starting at position 308 of SEQ ID NO: 1885227
uguguauacacagguauca

SEQ ID NO: 2326065 - RNA, 19 nt, Artificial Sequence
  Description of Artificial Sequence: Synthetic oligonucleotide
  Antisense strand to SEQ ID NO: 2326064
ugauaccuguguauacaca

SEQ ID NO: 2326066 - RNA, 19 nt, Artificial Sequence
  Description of Artificial Sequence: Synthetic oligonucleotide
  Sense strand starting at position 493 of SEQ ID NO: 1885227
guugaagaaaugugccuaa

SEQ ID NO: 2326067 - RNA, 19 nt, Artificial Sequence
  Description of Artificial Sequence: Synthetic oligonucleotide
  Antisense strand to SEQ ID NO: 2326066
uuaggcacauuucuucaac

SEQ ID NO: 2326068 - RNA, 19 nt, Artificial Sequence
  Description of Artificial Sequence: Synthetic oligonucleotide
  Sense strand starting at position 506 of SEQ ID NO: 1885227
gccuaacuagaaugugauc

SEQ ID NO: 2326069 - RNA, 19 nt, Artificial Sequence
  Description of Artificial Sequence: Synthetic oligonucleotide
  Antisense strand to SEQ ID NO: 2326068
gaucacauucuaguuaggc

SEQ ID NO: 2326070 - RNA, 19 nt, Artificial Sequence
  Description of Artificial Sequence: Synthetic oligonucleotide
  Sense strand starting at position 668 of SEQ ID NO: 1885227
ccaggagcccugcaugaaa

SEQ ID NO: 2326071 - RNA, 19 nt, Artificial Sequence
  Description of Artificial Sequence: Synthetic oligonucleotide
  Antisense strand to SEQ ID NO: 2326070
uuucaugcagggcuccugg

SEQ ID NO: 2326072 - RNA, 19 nt, Artificial Sequence
  Description of Artificial Sequence: Synthetic oligonucleotide
  Sense strand starting at position 670 of SEQ ID NO: 1885227
aggagcccugcaugaaauu

SEQ ID NO: 2326073 - RNA, 19 nt, Artificial Sequence
  Description of Artificial Sequence: Synthetic oligonucleotide
  Antisense strand to SEQ ID NO: 2326072
aauuucaugcagggcuccu

SEQ ID NO: 2326074 - RNA, 19 nt, Artificial Sequence
  Description of Artificial Sequence: Synthetic oligonucleotide
  Sense strand starting at position 803 of SEQ ID NO: 1885227
aucacugagcucugauagu

SEQ ID NO: 2326075 - RNA, 19 nt, Artificial Sequence
  Description of Artificial Sequence: Synthetic oligonucleotide
  Antisense strand to SEQ ID NO: 2326074
acuaucagagcucagugau

SEQ ID NO: 2326076 - RNA, 19 nt, Artificial Sequence
  Description of Artificial Sequence: Synthetic oligonucleotide
  Sense strand starting at position 810 of SEQ ID NO: 1885227
agcucugauagugaguaau

SEQ ID NO: 2326077 - RNA, 19 nt, Artificial Sequence
  Description of Artificial Sequence: Synthetic oligonucleotide
  Antisense strand to SEQ ID NO: 2326076
auuacucacuaucagagcu

SEQ ID NO: 2326078 - RNA, 19 nt, Artificial Sequence
  Description of Artificial Sequence: Synthetic oligonucleotide
  Sense strand starting at position 812 of SEQ ID NO: 1885227
cucugauagugaguaauga

SEQ ID NO: 2326079 - RNA, 19 nt, Artificial Sequence
  Description of Artificial Sequence: Synthetic oligonucleotide
  Antisense strand to SEQ ID NO: 2326078
ucauuacucacuaucagag

SEQ ID NO: 2326080 - RNA, 19 nt, Artificial Sequence
  Description of Artificial Sequence: Synthetic oligonucleotide
  Sense strand starting at position 1016 of SEQ ID NO: 1885227
aggagagcuguuuacccau

SEQ ID NO: 2326081 - RNA, 19 nt, Artificial Sequence
  Description of Artificial Sequence: Synthetic oligonucleotide
  Antisense strand to SEQ ID NO: 2326080
auggguaaacagcucuccu

SEQ ID NO: 2326082 - RNA, 19 nt, Artificial Sequence
  Description of Artificial Sequence: Synthetic oligonucleotide
  Sense strand starting at position 1492 of SEQ ID NO: 1885227
uuccauuaagcagaguuau

SEQ ID NO: 2326083 - RNA, 19 nt, Artificial Sequence
  Description of Artificial Sequence: Synthetic oligonucleotide
  Antisense strand to SEQ ID NO: 2326082
auaacucugcuuaauggaa

SEQ ID NO: 2326084 - RNA, 19 nt, Artificial Sequence
  Description of Artificial Sequence: Synthetic oligonucleotide
  Sense strand starting at position 1647 of SEQ ID NO: 1885227
agcugaggugagcaaacau

SEQ ID NO: 2326085 - RNA, 19 nt, Artificial Sequence
  Description of Artificial Sequence: Synthetic oligonucleotide
  Antisense strand to SEQ ID NO: 2326084
auguuugcucaccucagcu

SEQ ID NO: 2326086 - RNA, 19 nt, Artificial Sequence
  Description of Artificial Sequence: Synthetic oligonucleotide
  Sense strand starting at position 1664 of SEQ ID NO: 1885227
auaccugaucaugguggaa

SEQ ID NO: 2326087 - RNA, 19 nt, Artificial Sequence
  Description of Artificial Sequence: Synthetic oligonucleotide
  Antisense strand to SEQ ID NO: 2326086
uuccaccaugaucagguau

SEQ ID NO: 2326088 - RNA, 19 nt, Artificial Sequence
  Description of Artificial Sequence: Synthetic oligonucleotide
  Sense strand starting at position 2332 of SEQ ID NO: 1885227
cuaagauauuugcaggaag

SEQ ID NO: 2326089 - RNA, 19 nt, Artificial Sequence
  Description of Artificial Sequence: Synthetic oligonucleotide
  Antisense strand to SEQ ID NO: 2326088
cuuccugcaaauaucuuag

SEQ ID NO: 2326090 - RNA, 19 nt, Artificial Sequence
  Description of Artificial Sequence: Synthetic oligonucleotide
  Sense strand starting at position 2605 of SEQ ID NO: 1885227
acaguauuacuuugauauc

SEQ ID NO: 2326091 - RNA, 19 nt, Artificial Sequence
  Description of Artificial Sequence: Synthetic oligonucleotide
  Antisense strand to SEQ ID NO: 2326090
gauaucaaaguaauacugu

SEQ ID NO: 2326092 - RNA, 19 nt, Artificial Sequence
  Description of Artificial Sequence: Synthetic oligonucleotide
  Sense strand starting at position 2669 of SEQ ID NO: 1885227
guuggcaaguucccagaaa

SEQ ID NO: 2326093 - RNA, 19 nt, Artificial Sequence
  Description of Artificial Sequence: Synthetic oligonucleotide
  Antisense strand to SEQ ID NO: 2326092
uuucugggaacuugccaac

SEQ ID NO: 2326094 - RNA, 19 nt, Artificial Sequence
  Description of Artificial Sequence: Synthetic oligonucleotide
  Sense strand starting at position 2713 of SEQ ID NO: 1885227
accucaauguugucccaaa

SEQ ID NO: 2326095 - RNA, 19 nt, Artificial Sequence
  Description of Artificial Sequence: Synthetic oligonucleotide
  Antisense strand to SEQ ID NO: 2326094
uuugggacaacauugaggu

SEQ ID NO: 2326096 - RNA, 19 nt, Artificial Sequence
  Description of Artificial Sequence: Synthetic oligonucleotide
  Sense strand starting at position 2753 of SEQ ID NO: 1885227
ccaaucagguuuguaacua

SEQ ID NO: 2326097 - RNA, 19 nt, Artificial Sequence
  Description of Artificial Sequence: Synthetic oligonucleotide
  Antisense strand to SEQ ID NO: 2326096
uaguuacaaaccugauugg

SEQ ID NO: 2326098 - RNA, 19 nt, Artificial Sequence
  Description of Artificial Sequence: Synthetic oligonucleotide
  Sense strand starting at position 2945 of SEQ ID NO: 1885227
gauugaauagcugaaguuu

SEQ ID NO: 2326099 - RNA, 19 nt, Artificial Sequence
  Description of Artificial Sequence: Synthetic oligonucleotide
  Antisense strand to SEQ ID NO: 2326098
aaacuucagcuauucaauc

SEQ ID NO: 2326100 - RNA, 19 nt, Artificial Sequence
  Description of Artificial Sequence: Synthetic oligonucleotide
  Sense strand starting at position 2953 of SEQ ID NO: 1885227
agcugaaguuuaccuagaa

SEQ ID NO: 2326101 - RNA, 19 nt, Artificial Sequence
  Description of Artificial Sequence: Synthetic oligonucleotide
  Antisense strand to SEQ ID NO: 2326100
uucuagguaaacuucagcu

SEQ ID NO: 2326102 - RNA, 19 nt, Artificial Sequence
  Description of Artificial Sequence: Synthetic oligonucleotide
  Sense strand starting at position 2954 of SEQ ID NO: 1885227
gcugaaguuuaccuagaaa

SEQ ID NO: 2326103 - RNA, 19 nt, Artificial Sequence
  Description of Artificial Sequence: Synthetic oligonucleotide
  Antisense strand to SEQ ID NO: 2326102
uuucuagguaaacuucagc

SEQ ID NO: 2326104 - RNA, 19 nt, Artificial Sequence
  Description of Artificial Sequence: Synthetic oligonucleotide
  Sense strand starting at position 3006 of SEQ ID NO: 1885227
auuagagaauuugacugau

SEQ ID NO: 2326105 - RNA, 19 nt, Artificial Sequence
  Description of Artificial Sequence: Synthetic oligonucleotide
  Antisense strand to SEQ ID NO: 2326104
aucagucaaauucucuaau

SEQ ID NO: 2326106 - RNA, 19 nt, Artificial Sequence
  Description of Artificial Sequence: Synthetic oligonucleotide
  Sense strand starting at position 3320 of SEQ ID NO: 1885227
cucgaaauugaguggcaga

SEQ ID NO: 2326107 - RNA, 19 nt, Artificial Sequence
  Description of Artificial Sequence: Synthetic oligonucleotide
  Antisense strand to SEQ ID NO: 2326106
ucugccacucaauuucgag

SEQ ID NO: 2326108 - RNA, 19 nt, Artificial Sequence
  Description of Artificial Sequence: Synthetic oligonucleotide
  Sense strand starting at position 3321 of SEQ ID NO: 1885227
ucgaaauugaguggcagaa

SEQ ID NO: 2326109 - RNA, 19 nt, Artificial Sequence
  Description of Artificial Sequence: Synthetic oligonucleotide
  Antisense strand to SEQ ID NO: 2326108
uucugccacucaauuucga

SEQ ID NO: 2326110 - RNA, 19 nt, Artificial Sequence
  Description of Artificial Sequence: Synthetic oligonucleotide
  Sense strand starting at position 3495 of SEQ ID NO: 1885227
agcauauuaugucuuugaa

SEQ ID NO: 2326111 - RNA, 19 nt, Artificial Sequence
  Description of Artificial Sequence: Synthetic oligonucleotide
  Antisense strand to SEQ ID NO: 2326110
uucaaagacauaauaugcu

SEQ ID NO: 2326112 - RNA, 19 nt, Artificial Sequence
  Description of Artificial Sequence: Synthetic oligonucleotide
  Sense strand starting at position 3509 of SEQ ID NO: 1885227
uugaaucagcaguacuaua

SEQ ID NO: 2326113 - RNA, 19 nt, Artificial Sequence
  Description of Artificial Sequence: Synthetic oligonucleotide
  Antisense strand to SEQ ID NO: 2326112
uauaguacugcugauucaa

SEQ ID NO: 2326114 - RNA, 19 nt, Artificial Sequence
  Description of Artificial Sequence: Synthetic oligonucleotide
  Sense strand starting at position 3612 of SEQ ID NO: 1885227
gaagcagaauuguuucuca

SEQ ID NO: 2326115 - RNA, 19 nt, Artificial Sequence
  Description of Artificial Sequence: Synthetic oligonucleotide
  Antisense strand to SEQ ID NO: 2326114
ugagaaacaauucugcuuc

SEQ ID NO: 2326116 - RNA, 19 nt, Artificial Sequence
  Description of Artificial Sequence: Synthetic oligonucleotide
  Sense strand starting at position 3750 of SEQ ID NO: 1885227
accuccugugucuggaaga

SEQ ID NO: 2326117 - RNA, 19 nt, Artificial Sequence
  Description of Artificial Sequence: Synthetic oligonucleotide
  Antisense strand to SEQ ID NO: 2326116
ucuuccagacacaggaggu

SEQ ID NO: 2326118 - RNA, 19 nt, Artificial Sequence
  Description of Artificial Sequence: Synthetic oligonucleotide
  Sense strand starting at position 3820 of SEQ ID NO: 1885227
gucugacucagccaagaag

SEQ ID NO: 2326119 - RNA, 19 nt, Artificial Sequence
  Description of Artificial Sequence: Synthetic oligonucleotide
  Antisense strand to SEQ ID NO: 2326118
cuucuuggcugagucagac

SEQ ID NO: 2326120 - RNA, 19 nt, Artificial Sequence
  Description of Artificial Sequence: Synthetic oligonucleotide
  Sense strand starting at position 3868 of SEQ ID NO: 1885227
ggauacucauaugauuuau

SEQ ID NO: 2326121 - RNA, 19 nt, Artificial Sequence
  Description of Artificial Sequence: Synthetic oligonucleotide
  Antisense strand to SEQ ID NO: 2326120
auaaaucauaugaguaucc

SEQ ID NO: 2326122 - RNA, 19 nt, Artificial Sequence
  Description of Artificial Sequence: Synthetic oligonucleotide
  Sense strand starting at position 3917 of SEQ ID NO: 1885227
agaagaugccauuaguauu

SEQ ID NO: 2326123 - RNA, 19 nt, Artificial Sequence
  Description of Artificial Sequence: Synthetic oligonucleotide
  Antisense strand to SEQ ID NO: 2326122
aauacuaauggcaucuucu

SEQ ID NO: 2326124 - RNA, 19 nt, Artificial Sequence
  Description of Artificial Sequence: Synthetic oligonucleotide
  Sense strand starting at position 167 of SEQ ID NO: 1885228
ggguuuacccugugacaau

SEQ ID NO: 2326125 - RNA, 19 nt, Artificial Sequence
  Description of Artificial Sequence: Synthetic oligonucleotide
  Antisense strand to SEQ ID NO: 2326124
auugucacaggguaaaccc

SEQ ID NO: 2326126 - RNA, 19 nt, Artificial Sequence
  Description of Artificial Sequence: Synthetic oligonucleotide
  Sense strand starting at position 617 of SEQ ID NO: 1885228
agcacuuaucuggaaagua

SEQ ID NO: 2326127 - RNA, 19 nt, Artificial Sequence
  Description of Artificial Sequence: Synthetic oligonucleotide
  Antisense strand to SEQ ID NO: 2326126
uacuuuccagauaagugcu

SEQ ID NO: 2326128 - RNA, 19 nt, Artificial Sequence
  Description of Artificial Sequence: Synthetic oligonucleotide
  Sense strand starting at position 633 of SEQ ID NO: 1885228
guagcaagugcucaauaaa

SEQ ID NO: 2326129 - RNA, 19 nt, Artificial Sequence
  Description of Artificial Sequence: Synthetic oligonucleotide
  Antisense strand to SEQ ID NO: 2326128
uuuauugagcacuugcuac

SEQ ID NO: 2326130 - RNA, 19 nt, Artificial Sequence
  Description of Artificial Sequence: Synthetic oligonucleotide
  Sense strand starting at position 722 of SEQ ID NO: 1885228
agguucuguagugagaaca

SEQ ID NO: 2326131 - RNA, 19 nt, Artificial Sequence
  Description of Artificial Sequence: Synthetic oligonucleotide
  Antisense strand to SEQ ID NO: 2326130
uguucucacuacagaaccu

SEQ ID NO: 2326132 - RNA, 19 nt, Artificial Sequence
  Description of Artificial Sequence: Synthetic oligonucleotide
  Sense strand starting at position 794 of SEQ ID NO: 1885228
cuguauggucuguaaaccu

SEQ ID NO: 2326133 - RNA, 19 nt, Artificial Sequence
  Description of Artificial Sequence: Synthetic oligonucleotide
  Antisense strand to SEQ ID NO: 2326132
agguuuacagaccauacag

SEQ ID NO: 2326134 - RNA, 19 nt, Artificial Sequence
  Description of Artificial Sequence: Synthetic oligonucleotide
  Sense strand starting at position 856 of SEQ ID NO: 1885228
gaaggauaggugugaaggu

SEQ ID NO: 2326135 - RNA, 19 nt, Artificial Sequence
  Description of Artificial Sequence: Synthetic oligonucleotide
  Antisense strand to SEQ ID NO: 2326134
accuucacaccuauccuuc

SEQ ID NO: 2326136 - RNA, 19 nt, Artificial Sequence
  Description of Artificial Sequence: Synthetic oligonucleotide
  Sense strand starting at position 1270 of SEQ ID NO: 1885228
uugacuuuccucugagggu

SEQ ID NO: 2326137 - RNA, 19 nt, Artificial Sequence
  Description of Artificial Sequence: Synthetic oligonucleotide
  Antisense strand to SEQ ID NO: 2326136
acccucagaggaaagucaa

SEQ ID NO: 2326138 - RNA, 19 nt, Artificial Sequence
  Description of Artificial Sequence: Synthetic oligonucleotide
  Sense strand starting at position 1315 of SEQ ID NO: 1885228
uccuuauuugcgggaccau

SEQ ID NO: 2326139 - RNA, 19 nt, Artificial Sequence
  Description of Artificial Sequence: Synthetic oligonucleotide
  Antisense strand to SEQ ID NO: 2326138
auggucccgcaaauaagga

SEQ ID NO: 2326140 - RNA, 19 nt, Artificial Sequence
  Description of Artificial Sequence: Synthetic oligonucleotide
  Sense strand starting at position 1427 of SEQ ID NO: 1885228
agguuucugcagcaaacau

SEQ ID NO: 2326141 - RNA, 19 nt, Artificial Sequence
  Description of Artificial Sequence: Synthetic oligonucleotide
  Antisense strand to SEQ ID NO: 2326140
auguuugcugcagaaaccu

SEQ ID NO: 2326142 - RNA, 19 nt, Artificial Sequence
  Description of Artificial Sequence: Synthetic oligonucleotide
  Sense strand starting at position 1595 of SEQ ID NO: 1885228
gaaggaaagugauccaugu

SEQ ID NO: 2326143 - RNA, 19 nt, Artificial Sequence
  Description of Artificial Sequence: Synthetic oligonucleotide
  Antisense strand to SEQ ID NO: 2326142
acauggaucacuuuccuuc

SEQ ID NO: 2326144 - RNA, 19 nt, Artificial Sequence
  Description of Artificial Sequence: Synthetic oligonucleotide
  Sense strand starting at position 1599 of SEQ ID NO: 1885228
gaaagugauccauguggau

SEQ ID NO: 2326145 - RNA, 19 nt, Artificial Sequence
  Description of Artificial Sequence: Synthetic oligonucleotide
  Antisense strand to SEQ ID NO: 2326144
auccacauggaucacuuuc

SEQ ID NO: 2326146 - RNA, 19 nt, Artificial Sequence
  Description of Artificial Sequence: Synthetic oligonucleotide
  Sense strand starting at position 1656 of SEQ ID NO: 1885228
accacuugccuuugagaac

SEQ ID NO: 2326147 - RNA, 19 nt, Artificial Sequence
  Description of Artificial Sequence: Synthetic oligonucleotide
  Antisense strand to SEQ ID NO: 2326146
guucucaaaggcaaguggu

SEQ ID NO: 2326148 - RNA, 19 nt, Artificial Sequence
  Description of Artificial Sequence: Synthetic oligonucleotide
  Sense strand starting at position 1737 of SEQ ID NO: 1885228
guguguccugcauccucua

SEQ ID NO: 2326149 - RNA, 19 nt, Artificial Sequence
  Description of Artificial Sequence: Synthetic oligonucleotide
  Antisense strand to SEQ ID NO: 2326148
uagaggaugcaggacacac

SEQ ID NO: 2326150 - RNA, 19 nt, Artificial Sequence
  Description of Artificial Sequence: Synthetic oligonucleotide
  Sense strand starting at position 1781 of SEQ ID NO: 1885228
ucaggucaaugcuugagaa

SEQ ID NO: 2326151 - RNA, 19 nt, Artificial Sequence
  Description of Artificial Sequence: Synthetic oligonucleotide
  Antisense strand to SEQ ID NO: 2326150
uucucaagcauugaccuga

SEQ ID NO: 2326152 - RNA, 19 nt, Artificial Sequence
  Description of Artificial Sequence: Synthetic oligonucleotide
  Sense strand starting at position 1782 of SEQ ID NO: 1885228
caggucaaugcuugagaag

SEQ ID NO: 2326153 - RNA, 19 nt, Artificial Sequence
  Description of Artificial Sequence: Synthetic oligonucleotide
  Antisense strand to SEQ ID NO: 2326152
cuucucaagcauugaccug

SEQ ID NO: 2326154 - RNA, 19 nt, Artificial Sequence
  Description of Artificial Sequence: Synthetic oligonucleotide
  Sense strand starting at position 1783 of SEQ ID NO: 1885228
aggucaaugcuugagaagu

SEQ ID NO: 2326155 - RNA, 19 nt, Artificial Sequence
  Description of Artificial Sequence: Synthetic oligonucleotide
  Antisense strand to SEQ ID NO: 2326154
acuucucaagcauugaccu

SEQ ID NO: 2326156 - RNA, 19 nt, Artificial Sequence
  Description of Artificial Sequence: Synthetic oligonucleotide
  Sense strand starting at position 1800 of SEQ ID NO: 1885228
guguaagcucugccaagca

SEQ ID NO: 2326157 - RNA, 19 nt, Artificial Sequence
  Description of Artificial Sequence: Synthetic oligonucleotide
  Antisense strand to SEQ ID NO: 2326156
ugcuuggcagagcuuacac

SEQ ID NO: 2326158 - RNA, 19 nt, Artificial Sequence
  Description of Artificial Sequence: Synthetic oligonucleotide
  Sense strand starting at position 2114 of SEQ ID NO: 1885228
ccaagauauuacguaauaa

SEQ ID NO: 2326159 - RNA, 19 nt, Artificial Sequence
  Description of Artificial Sequence: Synthetic oligonucleotide
  Antisense strand to SEQ ID NO: 2326158
uuauuacguaauaucuugg

SEQ ID NO: 2326160 - RNA, 19 nt, Artificial Sequence
  Description of Artificial Sequence: Synthetic oligonucleotide
  Sense strand starting at position 2135 of SEQ ID NO: 1885228
cccugaugcucucugggaa

SEQ ID NO: 2326161 - RNA, 19 nt, Artificial Sequence
  Description of Artificial Sequence: Synthetic oligonucleotide
  Antisense strand to SEQ ID NO: 2326160
uucccagagagcaucaggg

SEQ ID NO: 2326162 - RNA, 19 nt, Artificial Sequence
  Description of Artificial Sequence: Synthetic oligonucleotide
  Sense strand starting at position 2207 of SEQ ID NO: 1885228
gauugcuugguguauagaa

SEQ ID NO: 2326163 - RNA, 19 nt, Artificial Sequence
  Description of Artificial Sequence: Synthetic oligonucleotide
  Antisense strand to SEQ ID NO: 2326162
uucuauacaccaagcaauc

SEQ ID NO: 2326164 - RNA, 19 nt, Artificial Sequence
  Description of Artificial Sequence: Synthetic oligonucleotide
  Sense strand starting at position 2215 of SEQ ID NO: 1885228
gguguauagaaguagcacu

SEQ ID NO: 2326165 - RNA, 19 nt, Artificial Sequence
  Description of Artificial Sequence: Synthetic oligonucleotide
  Antisense strand to SEQ ID NO: 2326164
agugcuacuucuauacacc

SEQ ID NO: 2326166 - RNA, 19 nt, Artificial Sequence
  Description of Artificial Sequence: Synthetic oligonucleotide
  Sense strand starting at position 2323 of SEQ ID NO: 1885228
gcauguugggagaguuguu

SEQ ID NO: 2326167 - RNA, 19 nt, Artificial Sequence
  Description of Artificial Sequence: Synthetic oligonucleotide
  Antisense strand to SEQ ID NO: 2326166
aacaacucucccaacaugc

SEQ ID NO: 2326168 - RNA, 19 nt, Artificial Sequence
  Description of Artificial Sequence: Synthetic oligonucleotide
  Sense strand starting at position 2405 of SEQ ID NO: 1885228
caugucaggaggugaguua

SEQ ID NO: 2326169 - RNA, 19 nt, Artificial Sequence
  Description of Artificial Sequence: Synthetic oligonucleotide
  Antisense strand to SEQ ID NO: 2326168
uaacucaccuccugacaug

SEQ ID NO: 2326170 - RNA, 19 nt, Artificial Sequence
  Description of Artificial Sequence: Synthetic oligonucleotide
  Sense strand starting at position 2412 of SEQ ID NO: 1885228
ggaggugaguuaucagaag

SEQ ID NO: 2326171 - RNA, 19 nt, Artificial Sequence
  Description of Artificial Sequence: Synthetic oligonucleotide
  Antisense strand to SEQ ID NO: 2326170
cuucugauaacucaccucc

SEQ ID NO: 2326172 - RNA, 19 nt, Artificial Sequence
  Description of Artificial Sequence: Synthetic oligonucleotide
  Sense strand starting at position 2693 of SEQ ID NO: 1885228
gucccaacuccuuaguuua

SEQ ID NO: 2326173 - RNA, 19 nt, Artificial Sequence
  Description of Artificial Sequence: Synthetic oligonucleotide
  Antisense strand to SEQ ID NO: 2326172
uaaacuaaggaguugggac

SEQ ID NO: 2326174 - RNA, 19 nt, Artificial Sequence
  Description of Artificial Sequence: Synthetic oligonucleotide
  Sense strand starting at position 2710 of SEQ ID NO: 1885228
uacucuuuguggguaacaa

SEQ ID NO: 2326175 - RNA, 19 nt, Artificial Sequence
  Description of Artificial Sequence: Synthetic oligonucleotide
  Antisense strand to SEQ ID NO: 2326174
uuguuacccacaaagagua

SEQ ID NO: 2326176 - RNA, 19 nt, Artificial Sequence
  Description of Artificial Sequence: Synthetic oligonucleotide
  Sense strand starting at position 2711 of SEQ ID NO: 1885228
acucuuuguggguaacaag

SEQ ID NO: 2326177 - RNA, 19 nt, Artificial Sequence
  Description of Artificial Sequence: Synthetic oligonucleotide
  Antisense strand to SEQ ID NO: 2326176
cuuguuacccacaaagagu

SEQ ID NO: 2326178 - RNA, 19 nt, Artificial Sequence
  Description of Artificial Sequence: Synthetic oligonucleotide
  Sense strand starting at position 2771 of SEQ ID NO: 1885228
cagagaaggccucauuguu

SEQ ID NO: 2326179 - RNA, 19 nt, Artificial Sequence
  Description of Artificial Sequence: Synthetic oligonucleotide
  Antisense strand to SEQ ID NO: 2326178
aacaaugaggccuucucug

SEQ ID NO: 2326180 - RNA, 19 nt, Artificial Sequence
  Description of Artificial Sequence: Synthetic oligonucleotide
  Sense strand starting at position 2776 of SEQ ID NO: 1885228
aaggccucauuguuagaaa

SEQ ID NO: 2326181 - RNA, 19 nt, Artificial Sequence
  Description of Artificial Sequence: Synthetic oligonucleotide
  Antisense strand to SEQ ID NO: 2326180
uuucuaacaaugaggccuu

SEQ ID NO: 2326182 - RNA, 19 nt, Artificial Sequence
  Description of Artificial Sequence: Synthetic oligonucleotide
  Sense strand starting at position 2847 of SEQ ID NO: 1885228
gcacuugaauaguuggaaa

SEQ ID NO: 2326183 - RNA, 19 nt, Artificial Sequence
  Description of Artificial Sequence: Synthetic oligonucleotide
  Antisense strand to SEQ ID NO: 2326182
uuuccaacuauucaagugc

SEQ ID NO: 2326184 - RNA, 19 nt, Artificial Sequence
  Description of Artificial Sequence: Synthetic oligonucleotide
  Sense strand starting at position 2890 of SEQ ID NO: 1885228
gagacuugcucagauuuga

SEQ ID NO: 2326185 - RNA, 19 nt, Artificial Sequence
  Description of Artificial Sequence: Synthetic oligonucleotide
  Antisense strand to SEQ ID NO: 2326184
ucaaaucugagcaagucuc

SEQ ID NO: 2326186 - RNA, 19 nt, Artificial Sequence
  Description of Artificial Sequence: Synthetic oligonucleotide
  Sense strand starting at position 2938 of SEQ ID NO: 1885228
guagacucuugacuguaga

SEQ ID NO: 2326187 - RNA, 19 nt, Artificial Sequence
  Description of Artificial Sequence: Synthetic oligonucleotide
  Antisense strand to SEQ ID NO: 2326186
ucuacagucaagagucuac

SEQ ID NO: 2326188 - RNA, 19 nt, Artificial Sequence
  Description of Artificial Sequence: Synthetic oligonucleotide
  Sense strand starting at position 3499 of SEQ ID NO: 1885228
aauaauguguuacuuggau

SEQ ID NO: 2326189 - RNA, 19 nt, Artificial Sequence
  Description of Artificial Sequence: Synthetic oligonucleotide
  Antisense strand to SEQ ID NO: 2326188
auccaaguaacacauuauu

SEQ ID NO: 2326190 - RNA, 19 nt, Artificial Sequence
  Description of Artificial Sequence: Synthetic oligonucleotide
  Sense strand starting at position 3523 of SEQ ID NO: 1885228
ugaaauuuccguugguuua

SEQ ID NO: 2326191 - RNA, 19 nt, Artificial Sequence
  Description of Artificial Sequence: Synthetic oligonucleotide
  Antisense strand to SEQ ID NO: 2326190
uaaaccaacggaaauuuca

SEQ ID NO: 2326192 - RNA, 19 nt, Artificial Sequence
  Description of Artificial Sequence: Synthetic oligonucleotide
  Sense strand starting at position 3524 of SEQ ID NO: 1885228
gaaauuuccguugguuuau

SEQ ID NO: 2326193 - RNA, 19 nt, Artificial Sequence
  Description of Artificial Sequence: Synthetic oligonucleotide
  Antisense strand to SEQ ID NO: 2326192
auaaaccaacggaaauuuc

SEQ ID NO: 2326194 - RNA, 19 nt, Artificial Sequence
  Description of Artificial Sequence: Synthetic oligonucleotide
  Sense strand starting at position 3525 of SEQ ID NO: 1885228
aaauuuccguugguuuauu

SEQ ID NO: 2326195 - RNA, 19 nt, Artificial Sequence
  Description of Artificial Sequence: Synthetic oligonucleotide
  Antisense strand to SEQ ID NO: 2326194
aauaaaccaacggaaauuu

SEQ ID NO: 2326196 - RNA, 19 nt, Artificial Sequence
  Description of Artificial Sequence: Synthetic oligonucleotide
  Sense strand starting at position 3574 of SEQ ID NO: 1885228
gggcuaaacuauccuuaaa

SEQ ID NO: 2326197 - RNA, 19 nt, Artificial Sequence
  Description of Artificial Sequence: Synthetic oligonucleotide
  Antisense strand to SEQ ID NO: 2326196
uuuaaggauaguuuagccc

SEQ ID NO: 2326198 - RNA, 19 nt, Artificial Sequence
  Description of Artificial Sequence: Synthetic oligonucleotide
  Sense strand starting at position 3770 of SEQ ID NO: 1885228
ggguuuguccagcugugca

SEQ ID NO: 2326199 - RNA, 19 nt, Artificial Sequence
  Description of Artificial Sequence: Synthetic oligonucleotide
  Antisense strand to SEQ ID NO: 2326198
ugcacagcuggacaaaccc

SEQ ID NO: 2326200 - RNA, 19 nt, Artificial Sequence
  Description of Artificial Sequence: Synthetic oligonucleotide
  Sense strand starting at position 3877 of SEQ ID NO: 1885228
auggcaucauugcuaaaug

SEQ ID NO: 2326201 - RNA, 19 nt, Artificial Sequence
  Description of Artificial Sequence: Synthetic oligonucleotide
  Antisense strand to SEQ ID NO: 2326200
cauuuagcaaugaugccau

SEQ ID NO: 2326202 - RNA, 19 nt, Artificial Sequence
  Description of Artificial Sequence: Synthetic oligonucleotide
  Sense strand starting at position 3970 of SEQ ID NO: 1885228
auuacuguuucccuugaca

SEQ ID NO: 2326203 - RNA, 19 nt, Artificial Sequence
  Description of Artificial Sequence: Synthetic oligonucleotide
  Antisense strand to SEQ ID NO: 2326202
ugucaagggaaacaguaau

SEQ ID NO: 2326204 - RNA, 19 nt, Artificial Sequence
  Description of Artificial Sequence: Synthetic oligonucleotide
  Sense strand starting at position 159 of SEQ ID NO: 1885229
agaucuuauuuccaaagag

SEQ ID NO: 2326205 - RNA, 19 nt, Artificial Sequence
  Description of Artificial Sequence: Synthetic oligonucleotide
  Antisense strand to SEQ ID NO: 2326204
cucuuuggaaauaagaucu

SEQ ID NO: 2326206 - RNA, 19 nt, Artificial Sequence
  Description of Artificial Sequence: Synthetic oligonucleotide
  Sense strand starting at position 273 of SEQ ID NO: 1885229
agguucuuuguguaacaca

SEQ ID NO: 2326207 - RNA, 19 nt, Artificial Sequence
  Description of Artificial Sequence: Synthetic oligonucleotide
  Antisense strand to SEQ ID NO: 2326206
uguguuacacaaagaaccu

SEQ ID NO: 2326208 - RNA, 19 nt, Artificial Sequence
  Description of Artificial Sequence: Synthetic oligonucleotide
  Sense strand starting at position 548 of SEQ ID NO: 1885229
ccgagaccuuccuuccuga

SEQ ID NO: 2326209 - RNA, 19 nt, Artificial Sequence
  Description of Artificial Sequence: Synthetic oligonucleotide
  Antisense strand to SEQ ID NO: 2326208
ucaggaaggaaggucucgg

SEQ ID NO: 2326210 - RNA, 19 nt, Artificial Sequence
  Description of Artificial Sequence: Synthetic oligonucleotide
  Sense strand starting at position 590 of SEQ ID NO: 1885229
aacagugacugcccaaaga

SEQ ID NO: 2326211 - RNA, 19 nt, Artificial Sequence
  Description of Artificial Sequence: Synthetic oligonucleotide
  Antisense strand to SEQ ID NO: 2326210
ucuuugggcagucacuguu

SEQ ID NO: 2326212 - RNA, 19 nt, Artificial Sequence
  Description of Artificial Sequence: Synthetic oligonucleotide
  Sense strand starting at position 636 of SEQ ID NO: 1885229
ucaugcugccuagaacaaa

SEQ ID NO: 2326213 - RNA, 19 nt, Artificial Sequence
  Description of Artificial Sequence: Synthetic oligonucleotide
  Antisense strand to SEQ ID NO: 2326212
uuuguucuaggcagcauga

SEQ ID NO: 2326214 - RNA, 19 nt, Artificial Sequence
  Description of Artificial Sequence: Synthetic oligonucleotide
  Sense strand starting at position 655 of SEQ ID NO: 1885229
gcugcaguuguguuuagua

SEQ ID NO: 2326215 - RNA, 19 nt, Artificial Sequence
  Description of Artificial Sequence: Synthetic oligonucleotide
  Antisense strand to SEQ ID NO: 2326214
uacuaaacacaacugcagc

SEQ ID NO: 2326216 - RNA, 19 nt, Artificial Sequence
  Description of Artificial Sequence: Synthetic oligonucleotide
  Sense strand starting at position 670 of SEQ ID NO: 1885229
aguaaagguuuaucaaaug

SEQ ID NO: 2326217 - RNA, 19 nt, Artificial Sequence
  Description of Artificial Sequence: Synthetic oligonucleotide
  Antisense strand to SEQ ID NO: 2326216
cauuugauaaaccuuuacu

SEQ ID NO: 2326218 - RNA, 19 nt, Artificial Sequence
  Description of Artificial Sequence: Synthetic oligonucleotide
  Sense strand starting at position 689 of SEQ ID NO: 1885229
gaugaagacuggucacuau

SEQ ID NO: 2326219 - RNA, 19 nt, Artificial Sequence
  Description of Artificial Sequence: Synthetic oligonucleotide
  Antisense strand to SEQ ID NO: 2326218
auagugaccagucuucauc

SEQ ID NO: 2326220 - RNA, 19 nt, Artificial Sequence
  Description of Artificial Sequence: Synthetic oligonucleotide
  Sense strand starting at position 692 of SEQ ID NO: 1885229
gaagacuggucacuauuag

SEQ ID NO: 2326221 - RNA, 19 nt, Artificial Sequence
  Description of Artificial Sequence: Synthetic oligonucleotide
  Antisense strand to SEQ ID NO: 2326220
cuaauagugaccagucuuc

SEQ ID NO: 2326222 - RNA, 19 nt, Artificial Sequence
  Description of Artificial Sequence: Synthetic oligonucleotide
  Sense strand starting at position 693 of SEQ ID NO: 1885229
aagacuggucacuauuagu

SEQ ID NO: 2326223 - RNA, 19 nt, Artificial Sequence
  Description of Artificial Sequence: Synthetic oligonucleotide
  Antisense strand to SEQ ID NO: 2326222
acuaauagugaccagucuu

SEQ ID NO: 2326224 - RNA, 19 nt, Artificial Sequence
  Description of Artificial Sequence: Synthetic oligonucleotide
  Sense strand starting at position 772 of SEQ ID NO: 1885229
ggcugauaucaggaacugu

SEQ ID NO: 2326225 - RNA, 19 nt, Artificial Sequence
  Description of Artificial Sequence: Synthetic oligonucleotide
  Antisense strand to SEQ ID NO: 2326224
acaguuccugauaucagcc

SEQ ID NO: 2326226 - RNA, 19 nt, Artificial Sequence
  Description of Artificial Sequence: Synthetic oligonucleotide
  Sense strand starting at position 1104 of SEQ ID NO: 1885229
ugcuaauaaccauaguuag

SEQ ID NO: 2326227 - RNA, 19 nt, Artificial Sequence
  Description of Artificial Sequence: Synthetic oligonucleotide
  Antisense strand to SEQ ID NO: 2326226
cuaacuaugguuauuagca

SEQ ID NO: 2326228 - RNA, 19 nt, Artificial Sequence
  Description of Artificial Sequence: Synthetic oligonucleotide
  Sense strand starting at position 1138 of SEQ ID NO: 1885229
guguguggcaugcuuguau

SEQ ID NO: 2326229 - RNA, 19 nt, Artificial Sequence
  Description of Artificial Sequence: Synthetic oligonucleotide
  Antisense strand to SEQ ID NO: 2326228
auacaagcaugccacacac

SEQ ID NO: 2326230 - RNA, 19 nt, Artificial Sequence
  Description of Artificial Sequence: Synthetic oligonucleotide
  Sense strand starting at position 1157 of SEQ ID NO: 1885229
uguguaugugaguagggaa

SEQ ID NO: 2326231 - RNA, 19 nt, Artificial Sequence
  Description of Artificial Sequence: Synthetic oligonucleotide
  Antisense strand to SEQ ID NO: 2326230
uucccuacucacauacaca

SEQ ID NO: 2326232 - RNA, 19 nt, Artificial Sequence
  Description of Artificial Sequence: Synthetic oligonucleotide
  Sense strand starting at position 1174 of SEQ ID NO: 1885229
aaugcacgugcguuaaagu

SEQ ID NO: 2326233 - RNA, 19 nt, Artificial Sequence
  Description of Artificial Sequence: Synthetic oligonucleotide
  Antisense strand to SEQ ID NO: 2326232
acuuuaacgcacgugcauu

SEQ ID NO: 2326234 - RNA, 19 nt, Artificial Sequence
  Description of Artificial Sequence: Synthetic oligonucleotide
  Sense strand starting at position 1256 of SEQ ID NO: 1885229
gccaaagcuguguaagaag

SEQ ID NO: 2326235 - RNA, 19 nt, Artificial Sequence
  Description of Artificial Sequence: Synthetic oligonucleotide
  Antisense strand to SEQ ID NO: 2326234
cuucuuacacagcuuuggc

SEQ ID NO: 2326236 - RNA, 19 nt, Artificial Sequence
  Description of Artificial Sequence: Synthetic oligonucleotide
  Sense strand starting at position 1283 of SEQ ID NO: 1885229
guaauuacuccgcacaaau

SEQ ID NO: 2326237 - RNA, 19 nt, Artificial Sequence
  Description of Artificial Sequence: Synthetic oligonucleotide
  Antisense strand to SEQ ID NO: 2326236
auuugugcggaguaauuac

SEQ ID NO: 2326238 - RNA, 19 nt, Artificial Sequence
  Description of Artificial Sequence: Synthetic oligonucleotide
  Sense strand starting at position 1991 of SEQ ID NO: 1885229
aguguuacuugcuuaauuu

SEQ ID NO: 2326239 - RNA, 19 nt, Artificial Sequence
  Description of Artificial Sequence: Synthetic oligonucleotide
  Antisense strand to SEQ ID NO: 2326238
aaauuaagcaaguaacacu

SEQ ID NO: 2326240 - RNA, 19 nt, Artificial Sequence
  Description of Artificial Sequence: Synthetic oligonucleotide
  Sense strand starting at position 2443 of SEQ ID NO: 1885229
cagauacacggcugaugaa

SEQ ID NO: 2326241 - RNA, 19 nt, Artificial Sequence
  Description of Artificial Sequence: Synthetic oligonucleotide
  Antisense strand to SEQ ID NO: 2326240
uucaucagccguguaucug

SEQ ID NO: 2326242 - RNA, 19 nt, Artificial Sequence
  Description of Artificial Sequence: Synthetic oligonucleotide
  Sense strand starting at position 2527 of SEQ ID NO: 1885229
uugaucuuacauuggaaca

SEQ ID NO: 2326243 - RNA, 19 nt, Artificial Sequence
  Description of Artificial Sequence: Synthetic oligonucleotide
  Antisense strand to SEQ ID NO: 2326242
uguuccaauguaagaucaa

SEQ ID NO: 2326244 - RNA, 19 nt, Artificial Sequence
  Description of Artificial Sequence: Synthetic oligonucleotide
  Sense strand starting at position 2598 of SEQ ID NO: 1885229
aggaaucucucauuccaug

SEQ ID NO: 2326245 - RNA, 19 nt, Artificial Sequence
  Description of Artificial Sequence: Synthetic oligonucleotide
  Antisense strand to SEQ ID NO: 2326244
cauggaaugagagauuccu

SEQ ID NO: 2326246 - RNA, 19 nt, Artificial Sequence
  Description of Artificial Sequence: Synthetic oligonucleotide
  Sense strand starting at position 2618 of SEQ ID NO: 1885229
cugcauuugccggaauucu

SEQ ID NO: 2326247 - RNA, 19 nt, Artificial Sequence
  Description of Artificial Sequence: Synthetic oligonucleotide
  Antisense strand to SEQ ID NO: 2326246
agaauuccggcaaaugcag

SEQ ID NO: 2326248 - RNA, 19 nt, Artificial Sequence
  Description of Artificial Sequence: Synthetic oligonucleotide
  Sense strand starting at position 2748 of SEQ ID NO: 1885229
ggaggacaguguucaucau

SEQ ID NO: 2326249 - RNA, 19 nt, Artificial Sequence
  Description of Artificial Sequence: Synthetic oligonucleotide
  Antisense strand to SEQ ID NO: 2326248
augaugaacacuguccucc

SEQ ID NO: 2326250 - RNA, 19 nt, Artificial Sequence
  Description of Artificial Sequence: Synthetic oligonucleotide
  Sense strand starting at position 2792 of SEQ ID NO: 1885229
agucauuauauagagcgau

SEQ ID NO: 2326251 - RNA, 19 nt, Artificial Sequence
  Description of Artificial Sequence: Synthetic oligonucleotide
  Antisense strand to SEQ ID NO: 2326250
aucgcucuauauaaugacu

SEQ ID NO: 2326252 - RNA, 19 nt, Artificial Sequence
  Description of Artificial Sequence: Synthetic oligonucleotide
  Sense strand starting at position 2973 of SEQ ID NO: 1885229
cuaguauuaccguauuugu

SEQ ID NO: 2326253 - RNA, 19 nt, Artificial Sequence
  Description of Artificial Sequence: Synthetic oligonucleotide
  Antisense strand to SEQ ID NO: 2326252
acaaauacgguaauacuag

SEQ ID NO: 2326254 - RNA, 19 nt, Artificial Sequence
  Description of Artificial Sequence: Synthetic oligonucleotide
  Sense strand starting at position 2976 of SEQ ID NO: 1885229
guauuaccguauuugugau

SEQ ID NO: 2326255 - RNA, 19 nt, Artificial Sequence
  Description of Artificial Sequence: Synthetic oligonucleotide
  Antisense strand to SEQ ID NO: 2326254
aucacaaauacgguaauac

SEQ ID NO: 2326256 - RNA, 19 nt, Artificial Sequence
  Description of Artificial Sequence: Synthetic oligonucleotide
  Sense strand starting at position 3059 of SEQ ID NO: 1885229
uguuguaagcuauaucaaa

SEQ ID NO: 2326257 - RNA, 19 nt, Artificial Sequence
  Description of Artificial Sequence: Synthetic oligonucleotide
  Antisense strand to SEQ ID NO: 2326256
uuugauauagcuuacaaca

SEQ ID NO: 2326258 - RNA, 19 nt, Artificial Sequence
  Description of Artificial Sequence: Synthetic oligonucleotide
  Sense strand starting at position 3175 of SEQ ID NO: 1885229
gaagaaacagauuguuucu

SEQ ID NO: 2326259 - RNA, 19 nt, Artificial Sequence
  Description of Artificial Sequence: Synthetic oligonucleotide
  Antisense strand to SEQ ID NO: 2326258
agaaacaaucuguuucuuc

SEQ ID NO: 2326260 - RNA, 19 nt, Artificial Sequence
  Description of Artificial Sequence: Synthetic oligonucleotide
  Sense strand starting at position 3177 of SEQ ID NO: 1885229
agaaacagauuguuucuuu

SEQ ID NO: 2326261 - RNA, 19 nt, Artificial Sequence
  Description of Artificial Sequence: Synthetic oligonucleotide
  Antisense strand to SEQ ID NO: 2326260
aaagaaacaaucuguuucu

SEQ ID NO: 2326262 - RNA, 19 nt, Artificial Sequence
  Description of Artificial Sequence: Synthetic oligonucleotide
  Sense strand starting at position 3230 of SEQ ID NO: 1885229
gaaguuaaccacgguuaga

SEQ ID NO: 2326263 - RNA, 19 nt, Artificial Sequence
  Description of Artificial Sequence: Synthetic oligonucleotide
  Antisense strand to SEQ ID NO: 2326262
ucuaaccgugguuaacuuc

SEQ ID NO: 2326264 - RNA, 19 nt, Artificial Sequence
  Description of Artificial Sequence: Synthetic oligonucleotide
  Sense strand starting at position 3240 of SEQ ID NO: 1885229
acgguuagaucauccacau

SEQ ID NO: 2326265 - RNA, 19 nt, Artificial Sequence
  Description of Artificial Sequence: Synthetic oligonucleotide
  Antisense strand to SEQ ID NO: 2326264
auguggaugaucuaaccgu

SEQ ID NO: 2326266 - RNA, 19 nt, Artificial Sequence
  Description of Artificial Sequence: Synthetic oligonucleotide
  Sense strand starting at position 3259 of SEQ ID NO: 1885229
ugauacagaugccugauaa

SEQ ID NO: 2326267 - RNA, 19 nt, Artificial Sequence
  Description of Artificial Sequence: Synthetic oligonucleotide
  Antisense strand to SEQ ID NO: 2326266
uuaucaggcaucuguauca

SEQ ID NO: 2326268 - RNA, 19 nt, Artificial Sequence
  Description of Artificial Sequence: Synthetic oligonucleotide
  Sense strand starting at position 3378 of SEQ ID NO: 1885229
gagaguaaacaagguucuu

SEQ ID NO: 2326269 - RNA, 19 nt, Artificial Sequence
  Description of Artificial Sequence: Synthetic oligonucleotide
  Antisense strand to SEQ ID NO: 2326268
aagaaccuuguuuacucuc

SEQ ID NO: 2326270 - RNA, 19 nt, Artificial Sequence
  Description of Artificial Sequence: Synthetic oligonucleotide
  Sense strand starting at position 3560 of SEQ ID NO: 1885229
aggaauauauccgugaaau

SEQ ID NO: 2326271 - RNA, 19 nt, Artificial Sequence
  Description of Artificial Sequence: Synthetic oligonucleotide
  Antisense strand to SEQ ID NO: 2326270
auuucacggauauauuccu

SEQ ID NO: 2326272 - RNA, 19 nt, Artificial Sequence
  Description of Artificial Sequence: Synthetic oligonucleotide
  Sense strand starting at position 3561 of SEQ ID NO: 1885229
ggaauauauccgugaaaug

SEQ ID NO: 2326273 - RNA, 19 nt, Artificial Sequence
  Description of Artificial Sequence: Synthetic oligonucleotide
  Antisense strand to SEQ ID NO: 2326272
cauuucacggauauauucc

SEQ ID NO: 2326274 - RNA, 19 nt, Artificial Sequence
  Description of Artificial Sequence: Synthetic oligonucleotide
  Sense strand starting at position 3562 of SEQ ID NO: 1885229
gaauauauccgugaaaugu

SEQ ID NO: 2326275 - RNA, 19 nt, Artificial Sequence
  Description of Artificial Sequence: Synthetic oligonucleotide
  Antisense strand to SEQ ID NO: 2326274
acauuucacggauauauuc

SEQ ID NO: 2326276 - RNA, 19 nt, Artificial Sequence
  Description of Artificial Sequence: Synthetic oligonucleotide
  Sense strand starting at position 3744 of SEQ ID NO: 1885229
agcugaaacucagcacuua

SEQ ID NO: 2326277 - RNA, 19 nt, Artificial Sequence
  Description of Artificial Sequence: Synthetic oligonucleotide
  Antisense strand to SEQ ID NO: 2326276
uaagugcugaguuucagcu

SEQ ID NO: 2326278 - RNA, 19 nt, Artificial Sequence
  Description of Artificial Sequence: Synthetic oligonucleotide
  Sense strand starting at position 3775 of SEQ ID NO: 1885229
auguuauaacucggaacac

SEQ ID NO: 2326279 - RNA, 19 nt, Artificial Sequence
  Description of Artificial Sequence: Synthetic oligonucleotide
  Antisense strand to SEQ ID NO: 2326278
guguuccgaguuauaacau

SEQ ID NO: 2326280 - RNA, 19 nt, Artificial Sequence
  Description of Artificial Sequence: Synthetic oligonucleotide
  Sense strand starting at position 3913 of SEQ ID NO: 1885229
agaagcagacuuugucaau

SEQ ID NO: 2326281 - RNA, 19 nt, Artificial Sequence
  Description of Artificial Sequence: Synthetic oligonucleotide
  Antisense strand to SEQ ID NO: 2326280
auugacaaagucugcuucu

SEQ ID NO: 2326282 - RNA, 19 nt, Artificial Sequence
  Description of Artificial Sequence: Synthetic oligonucleotide
  Sense strand starting at position 3938 of SEQ ID NO: 1885229
uggagagaguguccuaaag

SEQ ID NO: 2326283 - RNA, 19 nt, Artificial Sequence
  Description of Artificial Sequence: Synthetic oligonucleotide
  Antisense strand to SEQ ID NO: 2326282
cuuuaggacacucucucca

SEQ ID NO: 2326284 - RNA, 19 nt, Artificial Sequence
  Description of Artificial Sequence: Synthetic oligonucleotide
  Sense strand starting at position 81 of SEQ ID NO: 1885230
agaacuuuacugcaaguga

SEQ ID NO: 2326285 - RNA, 19 nt, Artificial Sequence
  Description of Artificial Sequence: Synthetic oligonucleotide
  Antisense strand to SEQ ID NO: 2326284
ucacuugcaguaaaguucu

SEQ ID NO: 2326286 - RNA, 19 nt, Artificial Sequence
  Description of Artificial Sequence: Synthetic oligonucleotide
  Sense strand starting at position 253 of SEQ ID NO: 1885230
gcugaaacucugcaugcau

SEQ ID NO: 2326287 - RNA, 19 nt, Artificial Sequence
  Description of Artificial Sequence: Synthetic oligonucleotide
  Antisense strand to SEQ ID NO: 2326286
augcaugcagaguuucagc

SEQ ID NO: 2326288 - RNA, 19 nt, Artificial Sequence
  Description of Artificial Sequence: Synthetic oligonucleotide
  Sense strand starting at position 255 of SEQ ID NO: 1885230
ugaaacucugcaugcauua

SEQ ID NO: 2326289 - RNA, 19 nt, Artificial Sequence
  Description of Artificial Sequence: Synthetic oligonucleotide
  Antisense strand to SEQ ID NO: 2326288
uaaugcaugcagaguuuca

SEQ ID NO: 2326290 - RNA, 19 nt, Artificial Sequence
  Description of Artificial Sequence: Synthetic oligonucleotide
  Sense strand starting at position 326 of SEQ ID NO: 1885230
ucuuucugucucuaugagu

SEQ ID NO: 2326291 - RNA, 19 nt, Artificial Sequence
  Description of Artificial Sequence: Synthetic oligonucleotide
  Antisense strand to SEQ ID NO: 2326290
acucauagagacagaaaga

SEQ ID NO: 2326292 - RNA, 19 nt, Artificial Sequence
  Description of Artificial Sequence: Synthetic oligonucleotide
  Sense strand starting at position 341 of SEQ ID NO: 1885230
gagucugacuacuccaagu

SEQ ID NO: 2326293 - RNA, 19 nt, Artificial Sequence
  Description of Artificial Sequence: Synthetic oligonucleotide
  Antisense strand to SEQ ID NO: 2326292
acuuggaguagucagacuc

SEQ ID NO: 2326294 - RNA, 19 nt, Artificial Sequence
  Description of Artificial Sequence: Synthetic oligonucleotide
  Sense strand starting at position 343 of SEQ ID NO: 1885230
gucugacuacuccaaguac

SEQ ID NO: 2326295 - RNA, 19 nt, Artificial Sequence
  Description of Artificial Sequence: Synthetic oligonucleotide
  Antisense strand to SEQ ID NO: 2326294
guacuuggaguagucagac

SEQ ID NO: 2326296 - RNA, 19 nt, Artificial Sequence
  Description of Artificial Sequence: Synthetic oligonucleotide
  Sense strand starting at position 370 of SEQ ID NO: 1885230
gguggaaucacaugguauu

SEQ ID NO: 2326297 - RNA, 19 nt, Artificial Sequence
  Description of Artificial Sequence: Synthetic oligonucleotide
  Antisense strand to SEQ ID NO: 2326296
aauaccaugugauuccacc

SEQ ID NO: 2326298 - RNA, 19 nt, Artificial Sequence
  Description of Artificial Sequence: Synthetic oligonucleotide
  Sense strand starting at position 373 of SEQ ID NO: 1885230
ggaaucacaugguauuuau

SEQ ID NO: 2326299 - RNA, 19 nt, Artificial Sequence
  Description of Artificial Sequence: Synthetic oligonucleotide
  Antisense strand to SEQ ID NO: 2326298
auaaauaccaugugauucc

SEQ ID NO: 2326300 - RNA, 19 nt, Artificial Sequence
  Description of Artificial Sequence: Synthetic oligonucleotide
  Sense strand starting at position 384 of SEQ ID NO: 1885230
guauuuauccuucggugac

SEQ ID NO: 2326301 - RNA, 19 nt, Artificial Sequence
  Description of Artificial Sequence: Synthetic oligonucleotide
  Antisense strand to SEQ ID NO: 2326300
gucaccgaaggauaaauac

SEQ ID NO: 2326302 - RNA, 19 nt, Artificial Sequence
  Description of Artificial Sequence: Synthetic oligonucleotide
  Sense strand starting at position 403 of SEQ ID NO: 1885230
cggguuauuucacuuagug

SEQ ID NO: 2326303 - RNA, 19 nt, Artificial Sequence
  Description of Artificial Sequence: Synthetic oligonucleotide
  Antisense strand to SEQ ID NO: 2326302
cacuaagugaaauaacccg

SEQ ID NO: 2326304 - RNA, 19 nt, Artificial Sequence
  Description of Artificial Sequence: Synthetic oligonucleotide
  Sense strand starting at position 517 of SEQ ID NO: 1885230
aggucaauuacggauccuu

SEQ ID NO: 2326305 - RNA, 19 nt, Artificial Sequence
  Description of Artificial Sequence: Synthetic oligonucleotide
  Antisense strand to SEQ ID NO: 2326304
aaggauccguaauugaccu

SEQ ID NO: 2326306 - RNA, 19 nt, Artificial Sequence
  Description of Artificial Sequence: Synthetic oligonucleotide
  Sense strand starting at position 655 of SEQ ID NO: 1885230
gccagucaaucaguggauu

SEQ ID NO: 2326307 - RNA, 19 nt, Artificial Sequence
  Description of Artificial Sequence: Synthetic oligonucleotide
  Antisense strand to SEQ ID NO: 2326306
aauccacugauugacuggc

SEQ ID NO: 2326308 - RNA, 19 nt, Artificial Sequence
  Description of Artificial Sequence: Synthetic oligonucleotide
  Sense strand starting at position 800 of SEQ ID NO: 1885230
uggugacauccugaguaag

SEQ ID NO: 2326309 - RNA, 19 nt, Artificial Sequence
  Description of Artificial Sequence: Synthetic oligonucleotide
  Antisense strand to SEQ ID NO: 2326308
cuuacucaggaugucacca

SEQ ID NO: 2326310 - RNA, 19 nt, Artificial Sequence
  Description of Artificial Sequence: Synthetic oligonucleotide
  Sense strand starting at position 802 of SEQ ID NO: 1885230
gugacauccugaguaaguc

SEQ ID NO: 2326311 - RNA, 19 nt, Artificial Sequence
  Description of Artificial Sequence: Synthetic oligonucleotide
  Antisense strand to SEQ ID NO: 2326310
gacuuacucaggaugucac

SEQ ID NO: 2326312 - RNA, 19 nt, Artificial Sequence
  Description of Artificial Sequence: Synthetic oligonucleotide
  Sense strand starting at position 803 of SEQ ID NO: 1885230
ugacauccugaguaaguca

SEQ ID NO: 2326313 - RNA, 19 nt, Artificial Sequence
  Description of Artificial Sequence: Synthetic oligonucleotide
  Antisense strand to SEQ ID NO: 2326312
ugacuuacucaggauguca

SEQ ID NO: 2326314 - RNA, 19 nt, Artificial Sequence
  Description of Artificial Sequence: Synthetic oligonucleotide
  Sense strand starting at position 937 of SEQ ID NO: 1885230
ccugguaaguucucaacaa

SEQ ID NO: 2326315 - RNA, 19 nt, Artificial Sequence
  Description of Artificial Sequence: Synthetic oligonucleotide
  Antisense strand to SEQ ID NO: 2326314
uuguugagaacuuaccagg

SEQ ID NO: 2326316 - RNA, 19 nt, Artificial Sequence
  Description of Artificial Sequence: Synthetic oligonucleotide
  Sense strand starting at position 1067 of SEQ ID NO: 1885230
cucugaggaucacuuacau

SEQ ID NO: 2326317 - RNA, 19 nt, Artificial Sequence
  Description of Artificial Sequence: Synthetic oligonucleotide
  Antisense strand to SEQ ID NO: 2326316
auguaagugauccucagag

SEQ ID NO: 2326318 - RNA, 19 nt, Artificial Sequence
  Description of Artificial Sequence: Synthetic oligonucleotide
  Sense strand starting at position 1100 of SEQ ID NO: 1885230
acacuaaauuucugggaau

SEQ ID NO: 2326319 - RNA, 19 nt, Artificial Sequence
  Description of Artificial Sequence: Synthetic oligonucleotide
  Antisense strand to SEQ ID NO: 2326318
auucccagaaauuuagugu

SEQ ID NO: 2326320 - RNA, 19 nt, Artificial Sequence
  Description of Artificial Sequence: Synthetic oligonucleotide
  Sense strand starting at position 1103 of SEQ ID NO: 1885230
cuaaauuucugggaauucu

SEQ ID NO: 2326321 - RNA, 19 nt, Artificial Sequence
  Description of Artificial Sequence: Synthetic oligonucleotide
  Antisense strand to SEQ ID NO: 2326320
agaauucccagaaauuuag

SEQ ID NO: 2326322 - RNA, 19 nt, Artificial Sequence
  Description of Artificial Sequence: Synthetic oligonucleotide
  Sense strand starting at position 1645 of SEQ ID NO: 1885230
ucagaaauuucucaaggac

SEQ ID NO: 2326323 - RNA, 19 nt, Artificial Sequence
  Description of Artificial Sequence: Synthetic oligonucleotide
  Antisense strand to SEQ ID NO: 2326322
guccuugagaaauuucuga

SEQ ID NO: 2326324 - RNA, 19 nt, Artificial Sequence
  Description of Artificial Sequence: Synthetic oligonucleotide
  Sense strand starting at position 1659 of SEQ ID NO: 1885230
aggacucaguguuuacuuu

SEQ ID NO: 2326325 - RNA, 19 nt, Artificial Sequence
  Description of Artificial Sequence: Synthetic oligonucleotide
  Antisense strand to SEQ ID NO: 2326324
aaaguaaacacugaguccu

SEQ ID NO: 2326326 - RNA, 19 nt, Artificial Sequence
  Description of Artificial Sequence: Synthetic oligonucleotide
  Sense strand starting at position 1912 of SEQ ID NO: 1885230
gagauugugagguaaaguu

SEQ ID NO: 2326327 - RNA, 19 nt, Artificial Sequence
  Description of Artificial Sequence: Synthetic oligonucleotide
  Antisense strand to SEQ ID NO: 2326326
aacuuuaccucacaaucuc

SEQ ID NO: 2326328 - RNA, 19 nt, Artificial Sequence
  Description of Artificial Sequence: Synthetic oligonucleotide
  Sense strand starting at position 2340 of SEQ ID NO: 1885230
ccauauaugucuguaggga

SEQ ID NO: 2326329 - RNA, 19 nt, Artificial Sequence
  Description of Artificial Sequence: Synthetic oligonucleotide
  Antisense strand to SEQ ID NO: 2326328
ucccuacagacauauaugg

SEQ ID NO: 2326330 - RNA, 19 nt, Artificial Sequence
  Description of Artificial Sequence: Synthetic oligonucleotide
  Sense strand starting at position 2420 of SEQ ID NO: 1885230
ucagaugucuuacccuaua

SEQ ID NO: 2326331 - RNA, 19 nt, Artificial Sequence
  Description of Artificial Sequence: Synthetic oligonucleotide
  Antisense strand to SEQ ID NO: 2326330
uauaggguaagacaucuga

SEQ ID NO: 2326332 - RNA, 19 nt, Artificial Sequence
  Description of Artificial Sequence: Synthetic oligonucleotide
  Sense strand starting at position 2729 of SEQ ID NO: 1885230
gcaaguguagcaugaaaga

SEQ ID NO: 2326333 - RNA, 19 nt, Artificial Sequence
  Description of Artificial Sequence: Synthetic oligonucleotide
  Antisense strand to SEQ ID NO: 2326332
ucuuucaugcuacacuugc

SEQ ID NO: 2326334 - RNA, 19 nt, Artificial Sequence
  Description of Artificial Sequence: Synthetic oligonucleotide
  Sense strand starting at position 2767 of SEQ ID NO: 1885230
ccucuugucuaagcagaca

SEQ ID NO: 2326335 - RNA, 19 nt, Artificial Sequence
  Description of Artificial Sequence: Synthetic oligonucleotide
  Antisense strand to SEQ ID NO: 2326334
ugucugcuuagacaagagg

SEQ ID NO: 2326336 - RNA, 19 nt, Artificial Sequence
  Description of Artificial Sequence: Synthetic oligonucleotide
  Sense strand starting at position 2837 of SEQ ID NO: 1885230
agugaccuugcucaccaau

SEQ ID NO: 2326337 - RNA, 19 nt, Artificial Sequence
  Description of Artificial Sequence: Synthetic oligonucleotide
  Antisense strand to SEQ ID NO: 2326336
auuggugagcaaggucacu

SEQ ID NO: 2326338 - RNA, 19 nt, Artificial Sequence
  Description of Artificial Sequence: Synthetic oligonucleotide
  Sense strand starting at position 2896 of SEQ ID NO: 1885230
aucugauaccuuugaauga

SEQ ID NO: 2326339 - RNA, 19 nt, Artificial Sequence
  Description of Artificial Sequence: Synthetic oligonucleotide
  Antisense strand to SEQ ID NO: 2326338
ucauucaaagguaucagau

SEQ ID NO: 2326340 - RNA, 19 nt, Artificial Sequence
  Description of Artificial Sequence: Synthetic oligonucleotide
  Sense strand starting at position 2949 of SEQ ID NO: 1885230
auggcaguaaucugaagaa

SEQ ID NO: 2326341 - RNA, 19 nt, Artificial Sequence
  Description of Artificial Sequence: Synthetic oligonucleotide
  Antisense strand to SEQ ID NO: 2326340
uucuucagauuacugccau

SEQ ID NO: 2326342 - RNA, 19 nt, Artificial Sequence
  Description of Artificial Sequence: Synthetic oligonucleotide
  Sense strand starting at position 2968 of SEQ ID NO: 1885230
ucuagaggaugauaagaaa

SEQ ID NO: 2326343 - RNA, 19 nt, Artificial Sequence
  Description of Artificial Sequence: Synthetic oligonucleotide
  Antisense strand to SEQ ID NO: 2326342
uuucuuaucauccucuaga

SEQ ID NO: 2326344 - RNA, 19 nt, Artificial Sequence
  Description of Artificial Sequence: Synthetic oligonucleotide
  Sense strand starting at position 3062 of SEQ ID NO: 1885230
cccagauagcauugacuga

SEQ ID NO: 2326345 - RNA, 19 nt, Artificial Sequence
  Description of Artificial Sequence: Synthetic oligonucleotide
  Antisense strand to SEQ ID NO: 2326344
ucagucaaugcuaucuggg

SEQ ID NO: 2326346 - RNA, 19 nt, Artificial Sequence
  Description of Artificial Sequence: Synthetic oligonucleotide
  Sense strand starting at position 3130 of SEQ ID NO: 1885230
aagucuccucagugacaag

SEQ ID NO: 2326347 - RNA, 19 nt, Artificial Sequence
  Description of Artificial Sequence: Synthetic oligonucleotide
  Antisense strand to SEQ ID NO: 2326346
cuugucacugaggagacuu

SEQ ID NO: 2326348 - RNA, 19 nt, Artificial Sequence
  Description of Artificial Sequence: Synthetic oligonucleotide
  Sense strand starting at position 3283 of SEQ ID NO: 1885230
agaucuugccaggacuacu

SEQ ID NO: 2326349 - RNA, 19 nt, Artificial Sequence
  Description of Artificial Sequence: Synthetic oligonucleotide
  Antisense strand to SEQ ID NO: 2326348
aguaguccuggcaagaucu

SEQ ID NO: 2326350 - RNA, 19 nt, Artificial Sequence
  Description of Artificial Sequence: Synthetic oligonucleotide
  Sense strand starting at position 3479 of SEQ ID NO: 1885230
aguucugucauuuggaugu

SEQ ID NO: 2326351 - RNA, 19 nt, Artificial Sequence
  Description of Artificial Sequence: Synthetic oligonucleotide
  Antisense strand to SEQ ID NO: 2326350
acauccaaaugacagaacu

SEQ ID NO: 2326352 - RNA, 19 nt, Artificial Sequence
  Description of Artificial Sequence: Synthetic oligonucleotide
  Sense strand starting at position 3524 of SEQ ID NO: 1885230
uaaguaaggcuuugaugga

SEQ ID NO: 2326353 - RNA, 19 nt, Artificial Sequence
  Description of Artificial Sequence: Synthetic oligonucleotide
  Antisense strand to SEQ ID NO: 2326352
uccaucaaagccuuacuua

SEQ ID NO: 2326354 - RNA, 19 nt, Artificial Sequence
  Description of Artificial Sequence: Synthetic oligonucleotide
  Sense strand starting at position 3531 of SEQ ID NO: 1885230
ggcuuugauggacaucuuu

SEQ ID NO: 2326355 - RNA, 19 nt, Artificial Sequence
  Description of Artificial Sequence: Synthetic oligonucleotide
  Antisense strand to SEQ ID NO: 2326354
aaagauguccaucaaagcc

SEQ ID NO: 2326356 - RNA, 19 nt, Artificial Sequence
  Description of Artificial Sequence: Synthetic oligonucleotide
  Sense strand starting at position 3665 of SEQ ID NO: 1885230
ugauucuacuuacuuagga

SEQ ID NO: 2326357 - RNA, 19 nt, Artificial Sequence
  Description of Artificial Sequence: Synthetic oligonucleotide
  Antisense strand to SEQ ID NO: 2326356
uccuaaguaaguagaauca

SEQ ID NO: 2326358 - RNA, 19 nt, Artificial Sequence
  Description of Artificial Sequence: Synthetic oligonucleotide
  Sense strand starting at position 3763 of SEQ ID NO: 1885230
cauguuaaagauugaagcu

SEQ ID NO: 2326359 - RNA, 19 nt, Artificial Sequence
  Description of Artificial Sequence: Synthetic oligonucleotide
  Antisense strand to SEQ ID NO: 2326358
agcuucaaucuuuaacaug

SEQ ID NO: 2326360 - RNA, 19 nt, Artificial Sequence
  Description of Artificial Sequence: Synthetic oligonucleotide
  Sense strand starting at position 3925 of SEQ ID NO: 1885230
aaauaagugucacugagga

SEQ ID NO: 2326361 - RNA, 19 nt, Artificial Sequence
  Description of Artificial Sequence: Synthetic oligonucleotide
  Antisense strand to SEQ ID NO: 2326360
uccucagugacacuuauuu

SEQ ID NO: 2326362 - RNA, 19 nt, Artificial Sequence
  Description of Artificial Sequence: Synthetic oligonucleotide
  Sense strand starting at position 3930 of SEQ ID NO: 1885230
agugucacugaggaaaguu

SEQ ID NO: 2326363 - RNA, 19 nt, Artificial Sequence
  Description of Artificial Sequence: Synthetic oligonucleotide
  Antisense strand to SEQ ID NO: 2326362
aacuuuccucagugacacu

SEQ ID NO: 2326364 - RNA, 19 nt, Artificial Sequence
  Description of Artificial Sequence: Synthetic oligonucleotide
  Sense strand starting at position 885 of SEQ ID NO: 1885231
ggaauauuaugggcaccau

SEQ ID NO: 2326365 - RNA, 19 nt, Artificial Sequence
  Description of Artificial Sequence: Synthetic oligonucleotide
  Antisense strand to SEQ ID NO: 2326364
auggugcccauaauauucc

SEQ ID NO: 2326366 - RNA, 19 nt, Artificial Sequence
  Description of Artificial Sequence: Synthetic oligonucleotide
  Sense strand starting at position 897 of SEQ ID NO: 1885231
gcaccaugauguguaauag

SEQ ID NO: 2326367 - RNA, 19 nt, Artificial Sequence
  Description of Artificial Sequence: Synthetic oligonucleotide
  Antisense strand to SEQ ID NO: 2326366
cuauuacacaucauggugc

SEQ ID NO: 2326368 - RNA, 19 nt, Artificial Sequence
  Description of Artificial Sequence: Synthetic oligonucleotide
  Sense strand starting at position 1021 of SEQ ID NO: 1885231
cuucuaagagguugacuuu

SEQ ID NO: 2326369 - RNA, 19 nt, Artificial Sequence
  Description of Artificial Sequence: Synthetic oligonucleotide
  Antisense strand to SEQ ID NO: 2326368
aaagucaaccucuuagaag

SEQ ID NO: 2326370 - RNA, 19 nt, Artificial Sequence
  Description of Artificial Sequence: Synthetic oligonucleotide
  Sense strand starting at position 1077 of SEQ ID NO: 1885231
cuauuuguaugccugacuu

SEQ ID NO: 2326371 - RNA, 19 nt, Artificial Sequence
  Description of Artificial Sequence: Synthetic oligonucleotide
  Antisense strand to SEQ ID NO: 2326370
aagucaggcauacaaauag

SEQ ID NO: 2326372 - RNA, 19 nt, Artificial Sequence
  Description of Artificial Sequence: Synthetic oligonucleotide
  Sense strand starting at position 1090 of SEQ ID NO: 1885231
ugacuuauuugucuuagca

SEQ ID NO: 2326373 - RNA, 19 nt, Artificial Sequence
  Description of Artificial Sequence: Synthetic oligonucleotide
  Antisense strand to SEQ ID NO: 2326372
ugcuaagacaaauaaguca

SEQ ID NO: 2326374 - RNA, 19 nt, Artificial Sequence
  Description of Artificial Sequence: Synthetic oligonucleotide
  Sense strand starting at position 1105 of SEQ ID NO: 1885231
agcauaauauccuuugagu

SEQ ID NO: 2326375 - RNA, 19 nt, Artificial Sequence
  Description of Artificial Sequence: Synthetic oligonucleotide
  Antisense strand to SEQ ID NO: 2326374
acucaaaggauauuaugcu

SEQ ID NO: 2326376 - RNA, 19 nt, Artificial Sequence
  Description of Artificial Sequence: Synthetic oligonucleotide
  Sense strand starting at position 1380 of SEQ ID NO: 1885231
cuugguuacuucucugaag

SEQ ID NO: 2326377 - RNA, 19 nt, Artificial Sequence
  Description of Artificial Sequence: Synthetic oligonucleotide
  Antisense strand to SEQ ID NO: 2326376
cuucagagaaguaaccaag

SEQ ID NO: 2326378 - RNA, 19 nt, Artificial Sequence
  Description of Artificial Sequence: Synthetic oligonucleotide
  Sense strand starting at position 1381 of SEQ ID NO: 1885231
uugguuacuucucugaaga

SEQ ID NO: 2326379 - RNA, 19 nt, Artificial Sequence
  Description of Artificial Sequence: Synthetic oligonucleotide
  Antisense strand to SEQ ID NO: 2326378
ucuucagagaaguaaccaa

SEQ ID NO: 2326380 - RNA, 19 nt, Artificial Sequence
  Description of Artificial Sequence: Synthetic oligonucleotide
  Sense strand starting at position 1382 of SEQ ID NO: 1885231
ugguuacuucucugaagac

SEQ ID NO: 2326381 - RNA, 19 nt, Artificial Sequence
  Description of Artificial Sequence: Synthetic oligonucleotide
  Antisense strand to SEQ ID NO: 2326380
gucuucagagaaguaacca

SEQ ID NO: 2326382 - RNA, 19 nt, Artificial Sequence
  Description of Artificial Sequence: Synthetic oligonucleotide
  Sense strand starting at position 1423 of SEQ ID NO: 1885231
uucuaaguuacugggaguu

SEQ ID NO: 2326383 - RNA, 19 nt, Artificial Sequence
  Description of Artificial Sequence: Synthetic oligonucleotide
  Antisense strand to SEQ ID NO: 2326382
aacucccaguaacuuagaa

SEQ ID NO: 2326384 - RNA, 19 nt, Artificial Sequence
  Description of Artificial Sequence: Synthetic oligonucleotide
  Sense strand starting at position 1429 of SEQ ID NO: 1885231
guuacugggaguuagaauu

SEQ ID NO: 2326385 - RNA, 19 nt, Artificial Sequence
  Description of Artificial Sequence: Synthetic oligonucleotide
  Antisense strand to SEQ ID NO: 2326384
aauucuaacucccaguaac

SEQ ID NO: 2326386 - RNA, 19 nt, Artificial Sequence
  Description of Artificial Sequence: Synthetic oligonucleotide
  Sense strand starting at position 1846 of SEQ ID NO: 1885231
cuauaaacuguguaacuca

SEQ ID NO: 2326387 - RNA, 19 nt, Artificial Sequence
  Description of Artificial Sequence: Synthetic oligonucleotide
  Antisense strand to SEQ ID NO: 2326386
ugaguuacacaguuuauag

SEQ ID NO: 2326388 - RNA, 19 nt, Artificial Sequence
  Description of Artificial Sequence: Synthetic oligonucleotide
  Sense strand starting at position 2640 of SEQ ID NO: 1885231
uuccuauuggcucagauag

SEQ ID NO: 2326389 - RNA, 19 nt, Artificial Sequence
  Description of Artificial Sequence: Synthetic oligonucleotide
  Antisense strand to SEQ ID NO: 2326388
cuaucugagccaauaggaa

SEQ ID NO: 2326390 - RNA, 19 nt, Artificial Sequence
  Description of Artificial Sequence: Synthetic oligonucleotide
  Sense strand starting at position 2765 of SEQ ID NO: 1885231
auauuacuggauugugaaa

SEQ ID NO: 2326391 - RNA, 19 nt, Artificial Sequence
  Description of Artificial Sequence: Synthetic oligonucleotide
  Antisense strand to SEQ ID NO: 2326390
uuucacaauccaguaauau

SEQ ID NO: 2326392 - RNA, 19 nt, Artificial Sequence
  Description of Artificial Sequence: Synthetic oligonucleotide
  Sense strand starting at position 2790 of SEQ ID NO: 1885231
uucuuucuacuggaauguu

SEQ ID NO: 2326393 - RNA, 19 nt, Artificial Sequence
  Description of Artificial Sequence: Synthetic oligonucleotide
  Antisense strand to SEQ ID NO: 2326392
aacauuccaguagaaagaa

SEQ ID NO: 2326394 - RNA, 19 nt, Artificial Sequence
  Description of Artificial Sequence: Synthetic oligonucleotide
  Sense strand starting at position 2852 of SEQ ID NO: 1885231
uguguagacuacccauuaa

SEQ ID NO: 2326395 - RNA, 19 nt, Artificial Sequence
  Description of Artificial Sequence: Synthetic oligonucleotide
  Antisense strand to SEQ ID NO: 2326394
uuaauggguagucuacaca

SEQ ID NO: 2326396 - RNA, 19 nt, Artificial Sequence
  Description of Artificial Sequence: Synthetic oligonucleotide
  Sense strand starting at position 2893 of SEQ ID NO: 1885231
guuugaagccuugaagauu

SEQ ID NO: 2326397 - RNA, 19 nt, Artificial Sequence
  Description of Artificial Sequence: Synthetic oligonucleotide
  Antisense strand to SEQ ID NO: 2326396
aaucuucaaggcuucaaac

SEQ ID NO: 2326398 - RNA, 19 nt, Artificial Sequence
  Description of Artificial Sequence: Synthetic oligonucleotide
  Sense strand starting at position 2946 of SEQ ID NO: 1885231
auguuucguccugaaacuu

SEQ ID NO: 2326399 - RNA, 19 nt, Artificial Sequence
  Description of Artificial Sequence: Synthetic oligonucleotide
  Antisense strand to SEQ ID NO: 2326398
aaguuucaggacgaaacau

SEQ ID NO: 2326400 - RNA, 19 nt, Artificial Sequence
  Description of Artificial Sequence: Synthetic oligonucleotide
  Sense strand starting at position 3066 of SEQ ID NO: 1885231
agcagaacuaauuguugga

SEQ ID NO: 2326401 - RNA, 19 nt, Artificial Sequence
  Description of Artificial Sequence: Synthetic oligonucleotide
  Antisense strand to SEQ ID NO: 2326400
uccaacaauuaguucugcu

SEQ ID NO: 2326402 - RNA, 19 nt, Artificial Sequence
  Description of Artificial Sequence: Synthetic oligonucleotide
  Sense strand starting at position 3068 of SEQ ID NO: 1885231
cagaacuaauuguuggauu

SEQ ID NO: 2326403 - RNA, 19 nt, Artificial Sequence
  Description of Artificial Sequence: Synthetic oligonucleotide
  Antisense strand to SEQ ID NO: 2326402
aauccaacaauuaguucug

SEQ ID NO: 2326404 - RNA, 19 nt, Artificial Sequence
  Description of Artificial Sequence: Synthetic oligonucleotide
  Sense strand starting at position 3145 of SEQ ID NO: 1885231
caugauacauugcugguaa

SEQ ID NO: 2326405 - RNA, 19 nt, Artificial Sequence
  Description of Artificial Sequence: Synthetic oligonucleotide
  Antisense strand to SEQ ID NO: 2326404
uuaccagcaauguaucaug

SEQ ID NO: 2326406 - RNA, 19 nt, Artificial Sequence
  Description of Artificial Sequence: Synthetic oligonucleotide
  Sense strand starting at position 3147 of SEQ ID NO: 1885231
ugauacauugcugguaaau

SEQ ID NO: 2326407 - RNA, 19 nt, Artificial Sequence
  Description of Artificial Sequence: Synthetic oligonucleotide
  Antisense strand to SEQ ID NO: 2326406
auuuaccagcaauguauca

SEQ ID NO: 2326408 - RNA, 19 nt, Artificial Sequence
  Description of Artificial Sequence: Synthetic oligonucleotide
  Sense strand starting at position 3265 of SEQ ID NO: 1885231
gaguguguacucuagguau

SEQ ID NO: 2326409 - RNA, 19 nt, Artificial Sequence
  Description of Artificial Sequence: Synthetic oligonucleotide
  Antisense strand to SEQ ID NO: 2326408
auaccuagaguacacacuc

SEQ ID NO: 2326410 - RNA, 19 nt, Artificial Sequence
  Description of Artificial Sequence: Synthetic oligonucleotide
  Sense strand starting at position 3278 of SEQ ID NO: 1885231
agguauugucuuuaucaua

SEQ ID NO: 2326411 - RNA, 19 nt, Artificial Sequence
  Description of Artificial Sequence: Synthetic oligonucleotide
  Antisense strand to SEQ ID NO: 2326410
uaugauaaagacaauaccu

SEQ ID NO: 2326412 - RNA, 19 nt, Artificial Sequence
  Description of Artificial Sequence: Synthetic oligonucleotide
  Sense strand starting at position 3316 of SEQ ID NO: 1885231
gauuuccuguaauagagaa

SEQ ID NO: 2326413 - RNA, 19 nt, Artificial Sequence
  Description of Artificial Sequence: Synthetic oligonucleotide
  Antisense strand to SEQ ID NO: 2326412
uucucuauuacaggaaauc

SEQ ID NO: 2326414 - RNA, 19 nt, Artificial Sequence
  Description of Artificial Sequence: Synthetic oligonucleotide
  Sense strand starting at position 3350 of SEQ ID NO: 1885231
cuuaaugagaggugcugau

SEQ ID NO: 2326415 - RNA, 19 nt, Artificial Sequence
  Description of Artificial Sequence: Synthetic oligonucleotide
  Antisense strand to SEQ ID NO: 2326414
aucagcaccucucauuaag

SEQ ID NO: 2326416 - RNA, 19 nt, Artificial Sequence
  Description of Artificial Sequence: Synthetic oligonucleotide
  Sense strand starting at position 3369 of SEQ ID NO: 1885231
gcgaaaugacccuagcuuu

SEQ ID NO: 2326417 - RNA, 19 nt, Artificial Sequence
  Description of Artificial Sequence: Synthetic oligonucleotide
  Antisense strand to SEQ ID NO: 2326416
aaagcuagggucauuucgc

SEQ ID NO: 2326418 - RNA, 19 nt, Artificial Sequence
  Description of Artificial Sequence: Synthetic oligonucleotide
  Sense strand starting at position 3532 of SEQ ID NO: 1885231
gguuuauuccucuaaauug

SEQ ID NO: 2326419 - RNA, 19 nt, Artificial Sequence
  Description of Artificial Sequence: Synthetic oligonucleotide
  Antisense strand to SEQ ID NO: 2326418
caauuuagaggaauaaacc

SEQ ID NO: 2326420 - RNA, 19 nt, Artificial Sequence
  Description of Artificial Sequence: Synthetic oligonucleotide
  Sense strand starting at position 3540 of SEQ ID NO: 1885231
ccucuaaauugucuguaaa

SEQ ID NO: 2326421 - RNA, 19 nt, Artificial Sequence
  Description of Artificial Sequence: Synthetic oligonucleotide
  Antisense strand to SEQ ID NO: 2326420
uuuacagacaauuuagagg

SEQ ID NO: 2326422 - RNA, 19 nt, Artificial Sequence
  Description of Artificial Sequence: Synthetic oligonucleotide
  Sense strand starting at position 3541 of SEQ ID NO: 1885231
cucuaaauugucuguaaac

SEQ ID NO: 2326423 - RNA, 19 nt, Artificial Sequence
  Description of Artificial Sequence: Synthetic oligonucleotide
  Antisense strand to SEQ ID NO: 2326422
guuuacagacaauuuagag

SEQ ID NO: 2326424 - RNA, 19 nt, Artificial Sequence
  Description of Artificial Sequence: Synthetic oligonucleotide
  Sense strand starting at position 3542 of SEQ ID NO: 1885231
ucuaaauugucuguaaaca

SEQ ID NO: 2326425 - RNA, 19 nt, Artificial Sequence
  Description of Artificial Sequence: Synthetic oligonucleotide
  Antisense strand to SEQ ID NO: 2326424
uguuuacagacaauuuaga

SEQ ID NO: 2326426 - RNA, 19 nt, Artificial Sequence
  Description of Artificial Sequence: Synthetic oligonucleotide
  Sense strand starting at position 3543 of SEQ ID NO: 1885231
cuaaauugucuguaaacag

SEQ ID NO: 2326427 - RNA, 19 nt, Artificial Sequence
  Description of Artificial Sequence: Synthetic oligonucleotide
  Antisense strand to SEQ ID NO: 2326426
cuguuuacagacaauuuag

SEQ ID NO: 2326428 - RNA, 19 nt, Artificial Sequence
  Description of Artificial Sequence: Synthetic oligonucleotide
  Sense strand starting at position 3683 of SEQ ID NO: 1885231
acugaacugccucaugaau

SEQ ID NO: 2326429 - RNA, 19 nt, Artificial Sequence
  Description of Artificial Sequence: Synthetic oligonucleotide
  Antisense strand to SEQ ID NO: 2326428
auucaugaggcaguucagu

SEQ ID NO: 2326430 - RNA, 19 nt, Artificial Sequence
  Description of Artificial Sequence: Synthetic oligonucleotide
  Sense strand starting at position 3705 of SEQ ID NO: 1885231
acucauagggacugaucuu

SEQ ID NO: 2326431 - RNA, 19 nt, Artificial Sequence
  Description of Artificial Sequence: Synthetic oligonucleotide
  Antisense strand to SEQ ID NO: 2326430
aagaucagucccuaugagu

SEQ ID NO: 2326432 - RNA, 19 nt, Artificial Sequence
  Description of Artificial Sequence: Synthetic oligonucleotide
  Sense strand starting at position 3712 of SEQ ID NO: 1885231
gggacugaucuuggguaaa

SEQ ID NO: 2326433 - RNA, 19 nt, Artificial Sequence
  Description of Artificial Sequence: Synthetic oligonucleotide
  Antisense strand to SEQ ID NO: 2326432
uuuacccaagaucaguccc

SEQ ID NO: 2326434 - RNA, 19 nt, Artificial Sequence
  Description of Artificial Sequence: Synthetic oligonucleotide
  Sense strand starting at position 3714 of SEQ ID NO: 1885231
gacugaucuuggguaaaca

SEQ ID NO: 2326435 - RNA, 19 nt, Artificial Sequence
  Description of Artificial Sequence: Synthetic oligonucleotide
  Antisense strand to SEQ ID NO: 2326434
uguuuacccaagaucaguc

SEQ ID NO: 2326436 - RNA, 19 nt, Artificial Sequence
  Description of Artificial Sequence: Synthetic oligonucleotide
  Sense strand starting at position 3748 of SEQ ID NO: 1885231
gcagacaggcucuaugaca

SEQ ID NO: 2326437 - RNA, 19 nt, Artificial Sequence
  Description of Artificial Sequence: Synthetic oligonucleotide
  Antisense strand to SEQ ID NO: 2326436
ugucauagagccugucugc

SEQ ID NO: 2326438 - RNA, 19 nt, Artificial Sequence
  Description of Artificial Sequence: Synthetic oligonucleotide
  Sense strand starting at position 3772 of SEQ ID NO: 1885231
cagguuagauagucugaga

SEQ ID NO: 2326439 - RNA, 19 nt, Artificial Sequence
  Description of Artificial Sequence: Synthetic oligonucleotide
  Antisense strand to SEQ ID NO: 2326438
ucucagacuaucuaaccug

SEQ ID NO: 2326440 - RNA, 19 nt, Artificial Sequence
  Description of Artificial Sequence: Synthetic oligonucleotide
  Sense strand starting at position 3785 of SEQ ID NO: 1885231
cugagaaaucauugugaau

SEQ ID NO: 2326441 - RNA, 19 nt, Artificial Sequence
  Description of Artificial Sequence: Synthetic oligonucleotide
  Antisense strand to SEQ ID NO: 2326440
auucacaaugauuucucag

SEQ ID NO: 2326442 - RNA, 19 nt, Artificial Sequence
  Description of Artificial Sequence: Synthetic oligonucleotide
  Sense strand starting at position 3981 of SEQ ID NO: 1885231
uuguuaugucuugaucaug

SEQ ID NO: 2326443 - RNA, 19 nt, Artificial Sequence
  Description of Artificial Sequence: Synthetic oligonucleotide
  Antisense strand to SEQ ID NO: 2326442
caugaucaagacauaacaa

SEQ ID NO: 2326444 - RNA, 19 nt, Artificial Sequence
  Description of Artificial Sequence: Synthetic oligonucleotide
  Sense strand starting at position 11 of SEQ ID NO: 1885232
ucagauuucugugccucua

SEQ ID NO: 2326445 - RNA, 19 nt, Artificial Sequence
  Description of Artificial Sequence: Synthetic oligonucleotide
  Antisense strand to SEQ ID NO: 2326444
uagaggcacagaaaucuga

SEQ ID NO: 2326446 - RNA, 19 nt, Artificial Sequence
  Description of Artificial Sequence: Synthetic oligonucleotide
  Sense strand starting at position 377 of SEQ ID NO: 1885232
agaucuucugaauguuaca

SEQ ID NO: 2326447 - RNA, 19 nt, Artificial Sequence
  Description of Artificial Sequence: Synthetic oligonucleotide
  Antisense strand to SEQ ID NO: 2326446
uguaacauucagaagaucu

SEQ ID NO: 2326448 - RNA, 19 nt, Artificial Sequence
  Description of Artificial Sequence: Synthetic oligonucleotide
  Sense strand starting at position 694 of SEQ ID NO: 1885232
cggagaaauuugagguugu

SEQ ID NO: 2326449 - RNA, 19 nt, Artificial Sequence
  Description of Artificial Sequence: Synthetic oligonucleotide
  Antisense strand to SEQ ID NO: 2326448
acaaccucaaauuucuccg

SEQ ID NO: 2326450 - RNA, 19 nt, Artificial Sequence
  Description of Artificial Sequence: Synthetic oligonucleotide
  Sense strand starting at position 799 of SEQ ID NO: 1885232
uaucucuuacuguacgaga

SEQ ID NO: 2326451 - RNA, 19 nt, Artificial Sequence
  Description of Artificial Sequence: Synthetic oligonucleotide
  Antisense strand to SEQ ID NO: 2326450
ucucguacaguaagagaua

SEQ ID NO: 2326452 - RNA, 19 nt, Artificial Sequence
  Description of Artificial Sequence: Synthetic oligonucleotide
  Sense strand starting at position 1098 of SEQ ID NO: 1885232
uuggaaaugucccuuaucu

SEQ ID NO: 2326453 - RNA, 19 nt, Artificial Sequence
  Description of Artificial Sequence: Synthetic oligonucleotide
  Antisense strand to SEQ ID NO: 2326452
agauaagggacauuuccaa

SEQ ID NO: 2326454 - RNA, 19 nt, Artificial Sequence
  Description of Artificial Sequence: Synthetic oligonucleotide
  Sense strand starting at position 1100 of SEQ ID NO: 1885232
ggaaaugucccuuaucugu

SEQ ID NO: 2326455 - RNA, 19 nt, Artificial Sequence
  Description of Artificial Sequence: Synthetic oligonucleotide
  Antisense strand to SEQ ID NO: 2326454
acagauaagggacauuucc

SEQ ID NO: 2326456 - RNA, 19 nt, Artificial Sequence
  Description of Artificial Sequence: Synthetic oligonucleotide
  Sense strand starting at position 1172 of SEQ ID NO: 1885232
aagauuaagggaugugucu

SEQ ID NO: 2326457 - RNA, 19 nt, Artificial Sequence
  Description of Artificial Sequence: Synthetic oligonucleotide
  Antisense strand to SEQ ID NO: 2326456
agacacaucccuuaaucuu

SEQ ID NO: 2326458 - RNA, 19 nt, Artificial Sequence
  Description of Artificial Sequence: Synthetic oligonucleotide
  Sense strand starting at position 1179 of SEQ ID NO: 1885232
agggaugugucucugauga

SEQ ID NO: 2326459 - RNA, 19 nt, Artificial Sequence
  Description of Artificial Sequence: Synthetic oligonucleotide
  Antisense strand to SEQ ID NO: 2326458
ucaucagagacacaucccu

SEQ ID NO: 2326460 - RNA, 19 nt, Artificial Sequence
  Description of Artificial Sequence: Synthetic oligonucleotide
  Sense strand starting at position 1184 of SEQ ID NO: 1885232
ugugucucugaugaauaag

SEQ ID NO: 2326461 - RNA, 19 nt, Artificial Sequence
  Description of Artificial Sequence: Synthetic oligonucleotide
  Antisense strand to SEQ ID NO: 2326460
cuuauucaucagagacaca

SEQ ID NO: 2326462 - RNA, 19 nt, Artificial Sequence
  Description of Artificial Sequence: Synthetic oligonucleotide
  Sense strand starting at position 1293 of SEQ ID NO: 1885232
agcaaaggcgaacauuauu

SEQ ID NO: 2326463 - RNA, 19 nt, Artificial Sequence
  Description of Artificial Sequence: Synthetic oligonucleotide
  Antisense strand to SEQ ID NO: 2326462
aauaauguucgccuuugcu

SEQ ID NO: 2326464 - RNA, 19 nt, Artificial Sequence
  Description of Artificial Sequence: Synthetic oligonucleotide
  Sense strand starting at position 1521 of SEQ ID NO: 1885232
gcaagaugcagugauuaau

SEQ ID NO: 2326465 - RNA, 19 nt, Artificial Sequence
  Description of Artificial Sequence: Synthetic oligonucleotide
  Antisense strand to SEQ ID NO: 2326464
auuaaucacugcaucuugc

SEQ ID NO: 2326466 - RNA, 19 nt, Artificial Sequence
  Description of Artificial Sequence: Synthetic oligonucleotide
  Sense strand starting at position 1524 of SEQ ID NO: 1885232
agaugcagugauuaauauu

SEQ ID NO: 2326467 - RNA, 19 nt, Artificial Sequence
  Description of Artificial Sequence: Synthetic oligonucleotide
  Antisense strand to SEQ ID NO: 2326466
aauauuaaucacugcaucu

SEQ ID NO: 2326468 - RNA, 19 nt, Artificial Sequence
  Description of Artificial Sequence: Synthetic oligonucleotide
  Sense strand starting at position 1586 of SEQ ID NO: 1885232
agagaaaguucuguaugau

SEQ ID NO: 2326469 - RNA, 19 nt, Artificial Sequence
  Description of Artificial Sequence: Synthetic oligonucleotide
  Antisense strand to SEQ ID NO: 2326468
aucauacagaacuuucucu

SEQ ID NO: 2326470 - RNA, 19 nt, Artificial Sequence
  Description of Artificial Sequence: Synthetic oligonucleotide
  Sense strand starting at position 1589 of SEQ ID NO: 1885232
gaaaguucuguaugauaga

SEQ ID NO: 2326471 - RNA, 19 nt, Artificial Sequence
  Description of Artificial Sequence: Synthetic oligonucleotide
  Antisense strand to SEQ ID NO: 2326470
ucuaucauacagaacuuuc

SEQ ID NO: 2326472 - RNA, 19 nt, Artificial Sequence
  Description of Artificial Sequence: Synthetic oligonucleotide
  Sense strand starting at position 1734 of SEQ ID NO: 1885232
auguaaacucaauguaucu

SEQ ID NO: 2326473 - RNA, 19 nt, Artificial Sequence
  Description of Artificial Sequence: Synthetic oligonucleotide
  Antisense strand to SEQ ID NO: 2326472
agauacauugaguuuacau

SEQ ID NO: 2326474 - RNA, 19 nt, Artificial Sequence
  Description of Artificial Sequence: Synthetic oligonucleotide
  Sense strand starting at position 2177 of SEQ ID NO: 1885232
auuguuaagcacugaagga

SEQ ID NO: 2326475 - RNA, 19 nt, Artificial Sequence
  Description of Artificial Sequence: Synthetic oligonucleotide
  Antisense strand to SEQ ID NO: 2326474
uccuucagugcuuaacaau

SEQ ID NO: 2326476 - RNA, 19 nt, Artificial Sequence
  Description of Artificial Sequence: Synthetic oligonucleotide
  Sense strand starting at position 2299 of SEQ ID NO: 1885232
agaaauauguuuccagacu

SEQ ID NO: 2326477 - RNA, 19 nt, Artificial Sequence
  Description of Artificial Sequence: Synthetic oligonucleotide
  Antisense strand to SEQ ID NO: 2326476
agucuggaaacauauuucu

SEQ ID NO: 2326478 - RNA, 19 nt, Artificial Sequence
  Description of Artificial Sequence: Synthetic oligonucleotide
  Sense strand starting at position 2308 of SEQ ID NO: 1885232
uuuccagacuucucaguga

SEQ ID NO: 2326479 - RNA, 19 nt, Artificial Sequence
  Description of Artificial Sequence: Synthetic oligonucleotide
  Antisense strand to SEQ ID NO: 2326478
ucacugagaagucuggaaa

SEQ ID NO: 2326480 - RNA, 19 nt, Artificial Sequence
  Description of Artificial Sequence: Synthetic oligonucleotide
  Sense strand starting at position 2312 of SEQ ID NO: 1885232
cagacuucucagugagaau

SEQ ID NO: 2326481 - RNA, 19 nt, Artificial Sequence
  Description of Artificial Sequence: Synthetic oligonucleotide
  Antisense strand to SEQ ID NO: 2326480
auucucacugagaagucug

SEQ ID NO: 2326482 - RNA, 19 nt, Artificial Sequence
  Description of Artificial Sequence: Synthetic oligonucleotide
  Sense strand starting at position 2332 of SEQ ID NO: 1885232
gcauuuggguaccuguuau

SEQ ID NO: 2326483 - RNA, 19 nt, Artificial Sequence
  Description of Artificial Sequence: Synthetic oligonucleotide
  Antisense strand to SEQ ID NO: 2326482
auaacagguacccaaaugc

SEQ ID NO: 2326484 - RNA, 19 nt, Artificial Sequence
  Description of Artificial Sequence: Synthetic oligonucleotide
  Sense strand starting at position 2347 of SEQ ID NO: 1885232
uuauauuucuaguuggcca

SEQ ID NO: 2326485 - RNA, 19 nt, Artificial Sequence
  Description of Artificial Sequence: Synthetic oligonucleotide
  Antisense strand to SEQ ID NO: 2326484
uggccaacuagaaauauaa

SEQ ID NO: 2326486 - RNA, 19 nt, Artificial Sequence
  Description of Artificial Sequence: Synthetic oligonucleotide
  Sense strand starting at position 2492 of SEQ ID NO: 1885232
gugugacuauaucuggaga

SEQ ID NO: 2326487 - RNA, 19 nt, Artificial Sequence
  Description of Artificial Sequence: Synthetic oligonucleotide
  Antisense strand to SEQ ID NO: 2326486
ucuccagauauagucacac

SEQ ID NO: 2326488 - RNA, 19 nt, Artificial Sequence
  Description of Artificial Sequence: Synthetic oligonucleotide
  Sense strand starting at position 2567 of SEQ ID NO: 1885232
ccaauaagacuauggucuu

SEQ ID NO: 2326489 - RNA, 19 nt, Artificial Sequence
  Description of Artificial Sequence: Synthetic oligonucleotide
  Antisense strand to SEQ ID NO: 2326488
aagaccauagucuuauugg

SEQ ID NO: 2326490 - RNA, 19 nt, Artificial Sequence
  Description of Artificial Sequence: Synthetic oligonucleotide
  Sense strand starting at position 2570 of SEQ ID NO: 1885232
auaagacuauggucuuaca

SEQ ID NO: 2326491 - RNA, 19 nt, Artificial Sequence
  Description of Artificial Sequence: Synthetic oligonucleotide
  Antisense strand to SEQ ID NO: 2326490
uguaagaccauagucuuau

SEQ ID NO: 2326492 - RNA, 19 nt, Artificial Sequence
  Description of Artificial Sequence: Synthetic oligonucleotide
  Sense strand starting at position 2668 of SEQ ID NO: 1885232
gggagucugcacuagaauc

SEQ ID NO: 2326493 - RNA, 19 nt, Artificial Sequence
  Description of Artificial Sequence: Synthetic oligonucleotide
  Antisense strand to SEQ ID NO: 2326492
gauucuagugcagacuccc

SEQ ID NO: 2326494 - RNA, 19 nt, Artificial Sequence
  Description of Artificial Sequence: Synthetic oligonucleotide
  Sense strand starting at position 2721 of SEQ ID NO: 1885232
ucuccagaccugugaacaa

SEQ ID NO: 2326495 - RNA, 19 nt, Artificial Sequence
  Description of Artificial Sequence: Synthetic oligonucleotide
  Antisense strand to SEQ ID NO: 2326494
uuguucacaggucuggaga

SEQ ID NO: 2326496 - RNA, 19 nt, Artificial Sequence
  Description of Artificial Sequence: Synthetic oligonucleotide
  Sense strand starting at position 2891 of SEQ ID NO: 1885232
uggaaauauuauucccugu

SEQ ID NO: 2326497 - RNA, 19 nt, Artificial Sequence
  Description of Artificial Sequence: Synthetic oligonucleotide
  Antisense strand to SEQ ID NO: 2326496
acagggaauaauauuucca

SEQ ID NO: 2326498 - RNA, 19 nt, Artificial Sequence
  Description of Artificial Sequence: Synthetic oligonucleotide
  Sense strand starting at position 2918 of SEQ ID NO: 1885232
ugguguuaugacuacucau

SEQ ID NO: 2326499 - RNA, 19 nt, Artificial Sequence
  Description of Artificial Sequence: Synthetic oligonucleotide
  Antisense strand to SEQ ID NO: 2326498
augaguagucauaacacca

SEQ ID NO: 2326500 - RNA, 19 nt, Artificial Sequence
  Description of Artificial Sequence: Synthetic oligonucleotide
  Sense strand starting at position 2921 of SEQ ID NO: 1885232
uguuaugacuacucaugga

SEQ ID NO: 2326501 - RNA, 19 nt, Artificial Sequence
  Description of Artificial Sequence: Synthetic oligonucleotide
  Antisense strand to SEQ ID NO: 2326500
uccaugaguagucauaaca

SEQ ID NO: 2326502 - RNA, 19 nt, Artificial Sequence
  Description of Artificial Sequence: Synthetic oligonucleotide
  Sense strand starting at position 3004 of SEQ ID NO: 1885232
cuuguaccauaagugauua

SEQ ID NO: 2326503 - RNA, 19 nt, Artificial Sequence
  Description of Artificial Sequence: Synthetic oligonucleotide
  Antisense strand to SEQ ID NO: 2326502
uaaucacuuaugguacaag

SEQ ID NO: 2326504 - RNA, 19 nt, Artificial Sequence
  Description of Artificial Sequence: Synthetic oligonucleotide
  Sense strand starting at position 3042 of SEQ ID NO: 1885232
gccagacacuggucuaaau

SEQ ID NO: 2326505 - RNA, 19 nt, Artificial Sequence
  Description of Artificial Sequence: Synthetic oligonucleotide
  Antisense strand to SEQ ID NO: 2326504
auuuagaccagugucuggc

SEQ ID NO: 2326506 - RNA, 19 nt, Artificial Sequence
  Description of Artificial Sequence: Synthetic oligonucleotide
  Sense strand starting at position 3156 of SEQ ID NO: 1885232
uugccaagguuauuaauaa

SEQ ID NO: 2326507 - RNA, 19 nt, Artificial Sequence
  Description of Artificial Sequence: Synthetic oligonucleotide
  Antisense strand to SEQ ID NO: 2326506
uuauuaauaaccuuggcaa

SEQ ID NO: 2326508 - RNA, 19 nt, Artificial Sequence
  Description of Artificial Sequence: Synthetic oligonucleotide
  Sense strand starting at position 3202 of SEQ ID NO: 1885232
aggaaagucugguuucaga

SEQ ID NO: 2326509 - RNA, 19 nt, Artificial Sequence
  Description of Artificial Sequence: Synthetic oligonucleotide
  Antisense strand to SEQ ID NO: 2326508
ucugaaaccagacuuuccu

SEQ ID NO: 2326510 - RNA, 19 nt, Artificial Sequence
  Description of Artificial Sequence: Synthetic oligonucleotide
  Sense strand starting at position 3241 of SEQ ID NO: 1885232
uguuaucuugccuaugaaa

SEQ ID NO: 2326511 - RNA, 19 nt, Artificial Sequence
  Description of Artificial Sequence: Synthetic oligonucleotide
  Antisense strand to SEQ ID NO: 2326510
uuucauaggcaagauaaca

SEQ ID NO: 2326512 - RNA, 19 nt, Artificial Sequence
  Description of Artificial Sequence: Synthetic oligonucleotide
  Sense strand starting at position 3346 of SEQ ID NO: 1885232
acagaauggccauguaauu

SEQ ID NO: 2326513 - RNA, 19 nt, Artificial Sequence
  Description of Artificial Sequence: Synthetic oligonucleotide
  Antisense strand to SEQ ID NO: 2326512
aauuacauggccauucugu

SEQ ID NO: 2326514 - RNA, 19 nt, Artificial Sequence
  Description of Artificial Sequence: Synthetic oligonucleotide
  Sense strand starting at position 3477 of SEQ ID NO: 1885232
ggugguauuuaagaagaac

SEQ ID NO: 2326515 - RNA, 19 nt, Artificial Sequence
  Description of Artificial Sequence: Synthetic oligonucleotide
  Antisense strand to SEQ ID NO: 2326514
guucuucuuaaauaccacc

SEQ ID NO: 2326516 - RNA, 19 nt, Artificial Sequence
  Description of Artificial Sequence: Synthetic oligonucleotide
  Sense strand starting at position 3515 of SEQ ID NO: 1885232
gugguuaacagcuacugaa

SEQ ID NO: 2326517 - RNA, 19 nt, Artificial Sequence
  Description of Artificial Sequence: Synthetic oligonucleotide
  Antisense strand to SEQ ID NO: 2326516
uucaguagcuguuaaccac

SEQ ID NO: 2326518 - RNA, 19 nt, Artificial Sequence
  Description of Artificial Sequence: Synthetic oligonucleotide
  Sense strand starting at position 3543 of SEQ ID NO: 1885232
guguguuugagagaagcag

SEQ ID NO: 2326519 - RNA, 19 nt, Artificial Sequence
  Description of Artificial Sequence: Synthetic oligonucleotide
  Antisense strand to SEQ ID NO: 2326518
cugcuucucucaaacacac

SEQ ID NO: 2326520 - RNA, 19 nt, Artificial Sequence
  Description of Artificial Sequence: Synthetic oligonucleotide
  Sense strand starting at position 3623 of SEQ ID NO: 1885232
augcuuuacccaggaacua

SEQ ID NO: 2326521 - RNA, 19 nt, Artificial Sequence
  Description of Artificial Sequence: Synthetic oligonucleotide
  Antisense strand to SEQ ID NO: 2326520
uaguuccuggguaaagcau

SEQ ID NO: 2326522 - RNA, 19 nt, Artificial Sequence
  Description of Artificial Sequence: Synthetic oligonucleotide
  Sense strand starting at position 3841 of SEQ ID NO: 1885232
aauuaauguugacuuugga

SEQ ID NO: 2326523 - RNA, 19 nt, Artificial Sequence
  Description of Artificial Sequence: Synthetic oligonucleotide
  Antisense strand to SEQ ID NO: 2326522
uccaaagucaacauuaauu

SEQ ID NO: 2326524 - RNA, 19 nt, Artificial Sequence
  Description of Artificial Sequence: Synthetic oligonucleotide
  Sense strand starting at position 201 of SEQ ID NO: 1885233
guagaagacacauguuggu

SEQ ID NO: 2326525 - RNA, 19 nt, Artificial Sequence
  Description of Artificial Sequence: Synthetic oligonucleotide
  Antisense strand to SEQ ID NO: 2326524
accaacaugugucuucuac

SEQ ID NO: 2326526 - RNA, 19 nt, Artificial Sequence
  Description of Artificial Sequence: Synthetic oligonucleotide
  Sense strand starting at position 287 of SEQ ID NO: 1885233
gauggaguuuccucagaaa

SEQ ID NO: 2326527 - RNA, 19 nt, Artificial Sequence
  Description of Artificial Sequence: Synthetic oligonucleotide
  Antisense strand to SEQ ID NO: 2326526
uuucugaggaaacuccauc

SEQ ID NO: 2326528 - RNA, 19 nt, Artificial Sequence
  Description of Artificial Sequence: Synthetic oligonucleotide
  Sense strand starting at position 348 of SEQ ID NO: 1885233
agguauuuauuccaaagga

SEQ ID NO: 2326529 - RNA, 19 nt, Artificial Sequence
  Description of Artificial Sequence: Synthetic oligonucleotide
  Antisense strand to SEQ ID NO: 2326528
uccuuuggaauaaauaccu

SEQ ID NO: 2326530 - RNA, 19 nt, Artificial Sequence
  Description of Artificial Sequence: Synthetic oligonucleotide
  Sense strand starting at position 1141 of SEQ ID NO: 1885233
guagccauuguggauauua

SEQ ID NO: 2326531 - RNA, 19 nt, Artificial Sequence
  Description of Artificial Sequence: Synthetic oligonucleotide
  Antisense strand to SEQ ID NO: 2326530
uaauauccacaauggcuac

SEQ ID NO: 2326532 - RNA, 19 nt, Artificial Sequence
  Description of Artificial Sequence: Synthetic oligonucleotide
  Sense strand starting at position 1143 of SEQ ID NO: 1885233
agccauuguggauauuaga

SEQ ID NO: 2326533 - RNA, 19 nt, Artificial Sequence
  Description of Artificial Sequence: Synthetic oligonucleotide
  Antisense strand to SEQ ID NO: 2326532
ucuaauauccacaauggcu

SEQ ID NO: 2326534 - RNA, 19 nt, Artificial Sequence
  Description of Artificial Sequence: Synthetic oligonucleotide
  Sense strand starting at position 1223 of SEQ ID NO: 1885233
aaguuaguuaccuguggag

SEQ ID NO: 2326535 - RNA, 19 nt, Artificial Sequence
  Description of Artificial Sequence: Synthetic oligonucleotide
  Antisense strand to SEQ ID NO: 2326534
cuccacagguaacuaacuu

SEQ ID NO: 2326536 - RNA, 19 nt, Artificial Sequence
  Description of Artificial Sequence: Synthetic oligonucleotide
  Sense strand starting at position 1227 of SEQ ID NO: 1885233
uaguuaccuguggaguaaa

SEQ ID NO: 2326537 - RNA, 19 nt, Artificial Sequence
  Description of Artificial Sequence: Synthetic oligonucleotide
  Antisense strand to SEQ ID NO: 2326536
uuuacuccacagguaacua

SEQ ID NO: 2326538 - RNA, 19 nt, Artificial Sequence
  Description of Artificial Sequence: Synthetic oligonucleotide
  Sense strand starting at position 1285 of SEQ ID NO: 1885233
acauucuggcaguauuaag

SEQ ID NO: 2326539 - RNA, 19 nt, Artificial Sequence
  Description of Artificial Sequence: Synthetic oligonucleotide
  Antisense strand to SEQ ID NO: 2326538
cuuaauacugccagaaugu

SEQ ID NO: 2326540 - RNA, 19 nt, Artificial Sequence
  Description of Artificial Sequence: Synthetic oligonucleotide
  Sense strand starting at position 1373 of SEQ ID NO: 1885233
acgcauuaauuugcacuua

SEQ ID NO: 2326541 - RNA, 19 nt, Artificial Sequence
  Description of Artificial Sequence: Synthetic oligonucleotide
  Antisense strand to SEQ ID NO: 2326540
uaagugcaaauuaaugcgu

SEQ ID NO: 2326542 - RNA, 19 nt, Artificial Sequence
  Description of Artificial Sequence: Synthetic oligonucleotide
  Sense strand starting at position 1399 of SEQ ID NO: 1885233
ggcauauagguccaagacu

SEQ ID NO: 2326543 - RNA, 19 nt, Artificial Sequence
  Description of Artificial Sequence: Synthetic oligonucleotide
  Antisense strand to SEQ ID NO: 2326542
agucuuggaccuauaugcc

SEQ ID NO: 2326544 - RNA, 19 nt, Artificial Sequence
  Description of Artificial Sequence: Synthetic oligonucleotide
  Sense strand starting at position 1468 of SEQ ID NO: 1885233
ugaugauaauuguuggauu

SEQ ID NO: 2326545 - RNA, 19 nt, Artificial Sequence
  Description of Artificial Sequence: Synthetic oligonucleotide
  Antisense strand to SEQ ID NO: 2326544
aauccaacaauuaucauca

SEQ ID NO: 2326546 - RNA, 19 nt, Artificial Sequence
  Description of Artificial Sequence: Synthetic oligonucleotide
  Sense strand starting at position 1479 of SEQ ID NO: 1885233
guuggauuccaaugagaau

SEQ ID NO: 2326547 - RNA, 19 nt, Artificial Sequence
  Description of Artificial Sequence: Synthetic oligonucleotide
  Antisense strand to SEQ ID NO: 2326546
auucucauuggaauccaac

SEQ ID NO: 2326548 - RNA, 19 nt, Artificial Sequence
  Description of Artificial Sequence: Synthetic oligonucleotide
  Sense strand starting at position 1499 of SEQ ID NO: 1885233
gaaguaaagucuuugugau

SEQ ID NO: 2326549 - RNA, 19 nt, Artificial Sequence
  Description of Artificial Sequence: Synthetic oligonucleotide
  Antisense strand to SEQ ID NO: 2326548
aucacaaagacuuuacuuc

SEQ ID NO: 2326550 - RNA, 19 nt, Artificial Sequence
  Description of Artificial Sequence: Synthetic oligonucleotide
  Sense strand starting at position 1579 of SEQ ID NO: 1885233
cggcuuguuagggagagaa

SEQ ID NO: 2326551 - RNA, 19 nt, Artificial Sequence
  Description of Artificial Sequence: Synthetic oligonucleotide
  Antisense strand to SEQ ID NO: 2326550
uucucucccuaacaagccg

SEQ ID NO: 2326552 - RNA, 19 nt, Artificial Sequence
  Description of Artificial Sequence: Synthetic oligonucleotide
  Sense strand starting at position 1769 of SEQ ID NO: 1885233
agaaucagacugcauugua

SEQ ID NO: 2326553 - RNA, 19 nt, Artificial Sequence
  Description of Artificial Sequence: Synthetic oligonucleotide
  Antisense strand to SEQ ID NO: 2326552
uacaaugcagucugauucu

SEQ ID NO: 2326554 - RNA, 19 nt, Artificial Sequence
  Description of Artificial Sequence: Synthetic oligonucleotide
  Sense strand starting at position 1772 of SEQ ID NO: 1885233
aucagacugcauuguaaau

SEQ ID NO: 2326555 - RNA, 19 nt, Artificial Sequence
  Description of Artificial Sequence: Synthetic oligonucleotide
  Antisense strand to SEQ ID NO: 2326554
auuuacaaugcagucugau

SEQ ID NO: 2326556 - RNA, 19 nt, Artificial Sequence
  Description of Artificial Sequence: Synthetic oligonucleotide
  Sense strand starting at position 1920 of SEQ ID NO: 1885233
uuuguuugccagcaaacaa

SEQ ID NO: 2326557 - RNA, 19 nt, Artificial Sequence
  Description of Artificial Sequence: Synthetic oligonucleotide
  Antisense strand to SEQ ID NO: 2326556
uuguuugcuggcaaacaaa

SEQ ID NO: 2326558 - RNA, 19 nt, Artificial Sequence
  Description of Artificial Sequence: Synthetic oligonucleotide
  Sense strand starting at position 2047 of SEQ ID NO: 1885233
ugcaguuuccagggacaac

SEQ ID NO: 2326559 - RNA, 19 nt, Artificial Sequence
  Description of Artificial Sequence: Synthetic oligonucleotide
  Antisense strand to SEQ ID NO: 2326558
guugucccuggaaacugca

SEQ ID NO: 2326560 - RNA, 19 nt, Artificial Sequence
  Description of Artificial Sequence: Synthetic oligonucleotide
  Sense strand starting at position 2048 of SEQ ID NO: 1885233
gcaguuuccagggacaaca

SEQ ID NO: 2326561 - RNA, 19 nt, Artificial Sequence
  Description of Artificial Sequence: Synthetic oligonucleotide
  Antisense strand to SEQ ID NO: 2326560
uguugucccuggaaacugc

SEQ ID NO: 2326562 - RNA, 19 nt, Artificial Sequence
  Description of Artificial Sequence: Synthetic oligonucleotide
  Sense strand starting at position 2072 of SEQ ID NO: 1885233
auuugugugcuggauugca

SEQ ID NO: 2326563 - RNA, 19 nt, Artificial Sequence
  Description of Artificial Sequence: Synthetic oligonucleotide
  Antisense strand to SEQ ID NO: 2326562
ugcaauccagcacacaaau

SEQ ID NO: 2326564 - RNA, 19 nt, Artificial Sequence
  Description of Artificial Sequence: Synthetic oligonucleotide
  Sense strand starting at position 2081 of SEQ ID NO: 1885233
cuggauugcauuuguguua

SEQ ID NO: 2326565 - RNA, 19 nt, Artificial Sequence
  Description of Artificial Sequence: Synthetic oligonucleotide
  Antisense strand to SEQ ID NO: 2326564
uaacacaaaugcaauccag

SEQ ID NO: 2326566 - RNA, 19 nt, Artificial Sequence
  Description of Artificial Sequence: Synthetic oligonucleotide
  Sense strand starting at position 2082 of SEQ ID NO: 1885233
uggauugcauuuguguuau

SEQ ID NO: 2326567 - RNA, 19 nt, Artificial Sequence
  Description of Artificial Sequence: Synthetic oligonucleotide
  Antisense strand to SEQ ID NO: 2326566
auaacacaaaugcaaucca

SEQ ID NO: 2326568 - RNA, 19 nt, Artificial Sequence
  Description of Artificial Sequence: Synthetic oligonucleotide
  Sense strand starting at position 2179 of SEQ ID NO: 1885233
gauauuguuugugccauuu

SEQ ID NO: 2326569 - RNA, 19 nt, Artificial Sequence
  Description of Artificial Sequence: Synthetic oligonucleotide
  Antisense strand to SEQ ID NO: 2326568
aaauggcacaaacaauauc

SEQ ID NO: 2326570 - RNA, 19 nt, Artificial Sequence
  Description of Artificial Sequence: Synthetic oligonucleotide
  Sense strand starting at position 2276 of SEQ ID NO: 1885233
acuauagugauaugggcaa

SEQ ID NO: 2326571 - RNA, 19 nt, Artificial Sequence
  Description of Artificial Sequence: Synthetic oligonucleotide
  Antisense strand to SEQ ID NO: 2326570
uugcccauaucacuauagu

SEQ ID NO: 2326572 - RNA, 19 nt, Artificial Sequence
  Description of Artificial Sequence: Synthetic oligonucleotide
  Sense strand starting at position 2375 of SEQ ID NO: 1885233
auuugagguuuagaagaca

SEQ ID NO: 2326573 - RNA, 19 nt, Artificial Sequence
  Description of Artificial Sequence: Synthetic oligonucleotide
  Antisense strand to SEQ ID NO: 2326572
ugucuucuaaaccucaaau

SEQ ID NO: 2326574 - RNA, 19 nt, Artificial Sequence
  Description of Artificial Sequence: Synthetic oligonucleotide
  Sense strand starting at position 2531 of SEQ ID NO: 1885233
uguuguaugauauggaagu

SEQ ID NO: 2326575 - RNA, 19 nt, Artificial Sequence
  Description of Artificial Sequence: Synthetic oligonucleotide
  Antisense strand to SEQ ID NO: 2326574
acuuccauaucauacaaca

SEQ ID NO: 2326576 - RNA, 19 nt, Artificial Sequence
  Description of Artificial Sequence: Synthetic oligonucleotide
  Sense strand starting at position 2638 of SEQ ID NO: 1885233
cugcucugaccucaaagua

SEQ ID NO: 2326577 - RNA, 19 nt, Artificial Sequence
  Description of Artificial Sequence: Synthetic oligonucleotide
  Antisense strand to SEQ ID NO: 2326576
uacuuugaggucagagcag

SEQ ID NO: 2326578 - RNA, 19 nt, Artificial Sequence
  Description of Artificial Sequence: Synthetic oligonucleotide
  Sense strand starting at position 2820 of SEQ ID NO: 1885233
aguuuaacacagugagcaa

SEQ ID NO: 2326579 - RNA, 19 nt, Artificial Sequence
  Description of Artificial Sequence: Synthetic oligonucleotide
  Antisense strand to SEQ ID NO: 2326578
uugcucacuguguuaaacu

SEQ ID NO: 2326580 - RNA, 19 nt, Artificial Sequence
  Description of Artificial Sequence: Synthetic oligonucleotide
  Sense strand starting at position 2841 of SEQ ID NO: 1885233
uuuaaagacuuggcaauga

SEQ ID NO: 2326581 - RNA, 19 nt, Artificial Sequence
  Description of Artificial Sequence: Synthetic oligonucleotide
  Antisense strand to SEQ ID NO: 2326580
ucauugccaagucuuuaaa

SEQ ID NO: 2326582 - RNA, 19 nt, Artificial Sequence
  Description of Artificial Sequence: Synthetic oligonucleotide
  Sense strand starting at position 2881 of SEQ ID NO: 1885233
caaugaauuguggaaugcu

SEQ ID NO: 2326583 - RNA, 19 nt, Artificial Sequence
  Description of Artificial Sequence: Synthetic oligonucleotide
  Antisense strand to SEQ ID NO: 2326582
agcauuccacaauucauug

SEQ ID NO: 2326584 - RNA, 19 nt, Artificial Sequence
  Description of Artificial Sequence: Synthetic oligonucleotide
  Sense strand starting at position 2884 of SEQ ID NO: 1885233
ugaauuguggaaugcuaca

SEQ ID NO: 2326585 - RNA, 19 nt, Artificial Sequence
  Description of Artificial Sequence: Synthetic oligonucleotide
  Antisense strand to SEQ ID NO: 2326584
uguagcauuccacaauuca

SEQ ID NO: 2326586 - RNA, 19 nt, Artificial Sequence
  Description of Artificial Sequence: Synthetic oligonucleotide
  Sense strand starting at position 2889 of SEQ ID NO: 1885233
uguggaaugcuacauauua

SEQ ID NO: 2326587 - RNA, 19 nt, Artificial Sequence
  Description of Artificial Sequence: Synthetic oligonucleotide
  Antisense strand to SEQ ID NO: 2326586
uaauauguagcauuccaca

SEQ ID NO: 2326588 - RNA, 19 nt, Artificial Sequence
  Description of Artificial Sequence: Synthetic oligonucleotide
  Sense strand starting at position 3034 of SEQ ID NO: 1885233
gagagauugucacuauccu

SEQ ID NO: 2326589 - RNA, 19 nt, Artificial Sequence
  Description of Artificial Sequence: Synthetic oligonucleotide
  Antisense strand to SEQ ID NO: 2326588
aggauagugacaaucucuc

SEQ ID NO: 2326590 - RNA, 19 nt, Artificial Sequence
  Description of Artificial Sequence: Synthetic oligonucleotide
  Sense strand starting at position 3340 of SEQ ID NO: 1885233
ugggauauuagauggcauu

SEQ ID NO: 2326591 - RNA, 19 nt, Artificial Sequence
  Description of Artificial Sequence: Synthetic oligonucleotide
  Antisense strand to SEQ ID NO: 2326590
aaugccaucuaauauccca

SEQ ID NO: 2326592 - RNA, 19 nt, Artificial Sequence
  Description of Artificial Sequence: Synthetic oligonucleotide
  Sense strand starting at position 3341 of SEQ ID NO: 1885233
gggauauuagauggcauua

SEQ ID NO: 2326593 - RNA, 19 nt, Artificial Sequence
  Description of Artificial Sequence: Synthetic oligonucleotide
  Antisense strand to SEQ ID NO: 2326592
uaaugccaucuaauauccc

SEQ ID NO: 2326594 - RNA, 19 nt, Artificial Sequence
  Description of Artificial Sequence: Synthetic oligonucleotide
  Sense strand starting at position 3369 of SEQ ID NO: 1885233
caggucaugagcugaaagu

SEQ ID NO: 2326595 - RNA, 19 nt, Artificial Sequence
  Description of Artificial Sequence: Synthetic oligonucleotide
  Antisense strand to SEQ ID NO: 2326594
acuuucagcucaugaccug

SEQ ID NO: 2326596 - RNA, 19 nt, Artificial Sequence
  Description of Artificial Sequence: Synthetic oligonucleotide
  Sense strand starting at position 3370 of SEQ ID NO: 1885233
aggucaugagcugaaaguu

SEQ ID NO: 2326597 - RNA, 19 nt, Artificial Sequence
  Description of Artificial Sequence: Synthetic oligonucleotide
  Antisense strand to SEQ ID NO: 2326596
aacuuucagcucaugaccu

SEQ ID NO: 2326598 - RNA, 19 nt, Artificial Sequence
  Description of Artificial Sequence: Synthetic oligonucleotide
  Sense strand starting at position 3378 of SEQ ID NO: 1885233
agcugaaaguuacuauagu

SEQ ID NO: 2326599 - RNA, 19 nt, Artificial Sequence
  Description of Artificial Sequence: Synthetic oligonucleotide
  Antisense strand to SEQ ID NO: 2326598
acuauaguaacuuucagcu

SEQ ID NO: 2326600 - RNA, 19 nt, Artificial Sequence
  Description of Artificial Sequence: Synthetic oligonucleotide
  Sense strand starting at position 3610 of SEQ ID NO: 1885233
uuaugcauuguguaacuga

SEQ ID NO: 2326601 - RNA, 19 nt, Artificial Sequence
  Description of Artificial Sequence: Synthetic oligonucleotide
  Antisense strand to SEQ ID NO: 2326600
ucaguuacacaaugcauaa

SEQ ID NO: 2326602 - RNA, 19 nt, Artificial Sequence
  Description of Artificial Sequence: Synthetic oligonucleotide
  Sense strand starting at position 3636 of SEQ ID NO: 1885233
gccauacagcuuuagauaa

SEQ ID NO: 2326603 - RNA, 19 nt, Artificial Sequence
  Description of Artificial Sequence: Synthetic oligonucleotide
  Antisense strand to SEQ ID NO: 2326602
uuaucuaaagcuguauggc

SEQ ID NO: 2326604 - RNA, 19 nt, Artificial Sequence
  Description of Artificial Sequence: Synthetic oligonucleotide
  Sense strand starting at position 22 of SEQ ID NO: 1885234
aguggagaaucuguaauuc

SEQ ID NO: 2326605 - RNA, 19 nt, Artificial Sequence
  Description of Artificial Sequence: Synthetic oligonucleotide
  Antisense strand to SEQ ID NO: 2326604
gaauuacagauucuccacu

SEQ ID NO: 2326606 - RNA, 19 nt, Artificial Sequence
  Description of Artificial Sequence: Synthetic oligonucleotide
  Sense strand starting at position 69 of SEQ ID NO: 1885234
ccaagagacuaucugguuu

SEQ ID NO: 2326607 - RNA, 19 nt, Artificial Sequence
  Description of Artificial Sequence: Synthetic oligonucleotide
  Antisense strand to SEQ ID NO: 2326606
aaaccagauagucucuugg

SEQ ID NO: 2326608 - RNA, 19 nt, Artificial Sequence
  Description of Artificial Sequence: Synthetic oligonucleotide
  Sense strand starting at position 73 of SEQ ID NO: 1885234
gagacuaucugguuuaaug

SEQ ID NO: 2326609 - RNA, 19 nt, Artificial Sequence
  Description of Artificial Sequence: Synthetic oligonucleotide
  Antisense strand to SEQ ID NO: 2326608
cauuaaaccagauagucuc

SEQ ID NO: 2326610 - RNA, 19 nt, Artificial Sequence
  Description of Artificial Sequence: Synthetic oligonucleotide
  Sense strand starting at position 75 of SEQ ID NO: 1885234
gacuaucugguuuaaugua

SEQ ID NO: 2326611 - RNA, 19 nt, Artificial Sequence
  Description of Artificial Sequence: Synthetic oligonucleotide
  Antisense strand to SEQ ID NO: 2326610
uacauuaaaccagauaguc

SEQ ID NO: 2326612 - RNA, 19 nt, Artificial Sequence
  Description of Artificial Sequence: Synthetic oligonucleotide
  Sense strand starting at position 176 of SEQ ID NO: 1885234
cugaaacauguauguauau

SEQ ID NO: 2326613 - RNA, 19 nt, Artificial Sequence
  Description of Artificial Sequence: Synthetic oligonucleotide
  Antisense strand to SEQ ID NO: 2326612
auauacauacauguuucag

SEQ ID NO: 2326614 - RNA, 19 nt, Artificial Sequence
  Description of Artificial Sequence: Synthetic oligonucleotide
  Sense strand starting at position 345 of SEQ ID NO: 1885234
caucguaaacaagagugau

SEQ ID NO: 2326615 - RNA, 19 nt, Artificial Sequence
  Description of Artificial Sequence: Synthetic oligonucleotide
  Antisense strand to SEQ ID NO: 2326614
aucacucuuguuuacgaug

SEQ ID NO: 2326616 - RNA, 19 nt, Artificial Sequence
  Description of Artificial Sequence: Synthetic oligonucleotide
  Sense strand starting at position 348 of SEQ ID NO: 1885234
cguaaacaagagugauaaa

SEQ ID NO: 2326617 - RNA, 19 nt, Artificial Sequence
  Description of Artificial Sequence: Synthetic oligonucleotide
  Antisense strand to SEQ ID NO: 2326616
uuuaucacucuuguuuacg

SEQ ID NO: 2326618 - RNA, 19 nt, Artificial Sequence
  Description of Artificial Sequence: Synthetic oligonucleotide
  Sense strand starting at position 459 of SEQ ID NO: 1885234
aagugugaguaucuagaaa

SEQ ID NO: 2326619 - RNA, 19 nt, Artificial Sequence
  Description of Artificial Sequence: Synthetic oligonucleotide
  Antisense strand to SEQ ID NO: 2326618
uuucuagauacucacacuu

SEQ ID NO: 2326620 - RNA, 19 nt, Artificial Sequence
  Description of Artificial Sequence: Synthetic oligonucleotide
  Sense strand starting at position 471 of SEQ ID NO: 1885234
cuagaaagcuuccugaacu

SEQ ID NO: 2326621 - RNA, 19 nt, Artificial Sequence
  Description of Artificial Sequence: Synthetic oligonucleotide
  Antisense strand to SEQ ID NO: 2326620
aguucaggaagcuuucuag

SEQ ID NO: 2326622 - RNA, 19 nt, Artificial Sequence
  Description of Artificial Sequence: Synthetic oligonucleotide
  Sense strand starting at position 481 of SEQ ID NO: 1885234
uccugaacuggaugacuuu

SEQ ID NO: 2326623 - RNA, 19 nt, Artificial Sequence
  Description of Artificial Sequence: Synthetic oligonucleotide
  Antisense strand to SEQ ID NO: 2326622
aaagucauccaguucagga

SEQ ID NO: 2326624 - RNA, 19 nt, Artificial Sequence
  Description of Artificial Sequence: Synthetic oligonucleotide
  Sense strand starting at position 540 of SEQ ID NO: 1885234
guaauaugaagaugaagcu

SEQ ID NO: 2326625 - RNA, 19 nt, Artificial Sequence
  Description of Artificial Sequence: Synthetic oligonucleotide
  Antisense strand to SEQ ID NO: 2326624
agcuucaucuucauauuac

SEQ ID NO: 2326626 - RNA, 19 nt, Artificial Sequence
  Description of Artificial Sequence: Synthetic oligonucleotide
  Sense strand starting at position 549 of SEQ ID NO: 1885234
agaugaagcuggguaaaua

SEQ ID NO: 2326627 - RNA, 19 nt, Artificial Sequence
  Description of Artificial Sequence: Synthetic oligonucleotide
  Antisense strand to SEQ ID NO: 2326626
uauuuacccagcuucaucu

SEQ ID NO: 2326628 - RNA, 19 nt, Artificial Sequence
  Description of Artificial Sequence: Synthetic oligonucleotide
  Sense strand starting at position 929 of SEQ ID NO: 1885234
agccauaaacucuagagua

SEQ ID NO: 2326629 - RNA, 19 nt, Artificial Sequence
  Description of Artificial Sequence: Synthetic oligonucleotide
  Antisense strand to SEQ ID NO: 2326628
uacucuagaguuuauggcu

SEQ ID NO: 2326630 - RNA, 19 nt, Artificial Sequence
  Description of Artificial Sequence: Synthetic oligonucleotide
  Sense strand starting at position 985 of SEQ ID NO: 1885234
ggaguuuaccuugaguauc

SEQ ID NO: 2326631 - RNA, 19 nt, Artificial Sequence
  Description of Artificial Sequence: Synthetic oligonucleotide
  Antisense strand to SEQ ID NO: 2326630
gauacucaagguaaacucc

SEQ ID NO: 2326632 - RNA, 19 nt, Artificial Sequence
  Description of Artificial Sequence: Synthetic oligonucleotide
  Sense strand starting at position 1107 of SEQ ID NO: 1885234
aucaauggagacugcaaua

SEQ ID NO: 2326633 - RNA, 19 nt, Artificial Sequence
  Description of Artificial Sequence: Synthetic oligonucleotide
  Antisense strand to SEQ ID NO: 2326632
uauugcagucuccauugau

SEQ ID NO: 2326634 - RNA, 19 nt, Artificial Sequence
  Description of Artificial Sequence: Synthetic oligonucleotide
  Sense strand starting at position 1785 of SEQ ID NO: 1885234
cuuccaccagagugauauu

SEQ ID NO: 2326635 - RNA, 19 nt, Artificial Sequence
  Description of Artificial Sequence: Synthetic oligonucleotide
  Antisense strand to SEQ ID NO: 2326634
aauaucacucugguggaag

SEQ ID NO: 2326636 - RNA, 19 nt, Artificial Sequence
  Description of Artificial Sequence: Synthetic oligonucleotide
  Sense strand starting at position 2209 of SEQ ID NO: 1885234
aaagcaaugcaugauguau

SEQ ID NO: 2326637 - RNA, 19 nt, Artificial Sequence
  Description of Artificial Sequence: Synthetic oligonucleotide
  Antisense strand to SEQ ID NO: 2326636
auacaucaugcauugcuuu

SEQ ID NO: 2326638 - RNA, 19 nt, Artificial Sequence
  Description of Artificial Sequence: Synthetic oligonucleotide
  Sense strand starting at position 2533 of SEQ ID NO: 1885234
guaaguguucuuuaaacaa

SEQ ID NO: 2326639 - RNA, 19 nt, Artificial Sequence
  Description of Artificial Sequence: Synthetic oligonucleotide
  Antisense strand to SEQ ID NO: 2326638
uuguuuaaagaacacuuac

SEQ ID NO: 2326640 - RNA, 19 nt, Artificial Sequence
  Description of Artificial Sequence: Synthetic oligonucleotide
  Sense strand starting at position 2572 of SEQ ID NO: 1885234
cuuccaaaugcuuggagaa

SEQ ID NO: 2326641 - RNA, 19 nt, Artificial Sequence
  Description of Artificial Sequence: Synthetic oligonucleotide
  Antisense strand to SEQ ID NO: 2326640
uucuccaagcauuuggaag

SEQ ID NO: 2326642 - RNA, 19 nt, Artificial Sequence
  Description of Artificial Sequence: Synthetic oligonucleotide
  Sense strand starting at position 2573 of SEQ ID NO: 1885234
uuccaaaugcuuggagaac

SEQ ID NO: 2326643 - RNA, 19 nt, Artificial Sequence
  Description of Artificial Sequence: Synthetic oligonucleotide
  Antisense strand to SEQ ID NO: 2326642
guucuccaagcauuuggaa

SEQ ID NO: 2326644 - RNA, 19 nt, Artificial Sequence
  Description of Artificial Sequence: Synthetic oligonucleotide
  Sense strand starting at position 2595 of SEQ ID NO: 1885234
uucucaaguccggaauaaa

SEQ ID NO: 2326645 - RNA, 19 nt, Artificial Sequence
  Description of Artificial Sequence: Synthetic oligonucleotide
  Antisense strand to SEQ ID NO: 2326644
uuuauuccggacuugagaa

SEQ ID NO: 2326646 - RNA, 19 nt, Artificial Sequence
  Description of Artificial Sequence: Synthetic oligonucleotide
  Sense strand starting at position 2776 of SEQ ID NO: 1885234
cacuaagcuguugaguaga

SEQ ID NO: 2326647 - RNA, 19 nt, Artificial Sequence
  Description of Artificial Sequence: Synthetic oligonucleotide
  Antisense strand to SEQ ID NO: 2326646
ucuacucaacagcuuagug

SEQ ID NO: 2326648 - RNA, 19 nt, Artificial Sequence
  Description of Artificial Sequence: Synthetic oligonucleotide
  Sense strand starting at position 2779 of SEQ ID NO: 1885234
uaagcuguugaguagauua

SEQ ID NO: 2326649 - RNA, 19 nt, Artificial Sequence
  Description of Artificial Sequence: Synthetic oligonucleotide
  Antisense strand to SEQ ID NO: 2326648
uaaucuacucaacagcuua

SEQ ID NO: 2326650 - RNA, 19 nt, Artificial Sequence
  Description of Artificial Sequence: Synthetic oligonucleotide
  Sense strand starting at position 2781 of SEQ ID NO: 1885234
agcuguugaguagauuaaa

SEQ ID NO: 2326651 - RNA, 19 nt, Artificial Sequence
  Description of Artificial Sequence: Synthetic oligonucleotide
  Antisense strand to SEQ ID NO: 2326650
uuuaaucuacucaacagcu

SEQ ID NO: 2326652 - RNA, 19 nt, Artificial Sequence
  Description of Artificial Sequence: Synthetic oligonucleotide
  Sense strand starting at position 2824 of SEQ ID NO: 1885234
agaacaguacuguaccuua

SEQ ID NO: 2326653 - RNA, 19 nt, Artificial Sequence
  Description of Artificial Sequence: Synthetic oligonucleotide
  Antisense strand to SEQ ID NO: 2326652
uaagguacaguacuguucu

SEQ ID NO: 2326654 - RNA, 19 nt, Artificial Sequence
  Description of Artificial Sequence: Synthetic oligonucleotide
  Sense strand starting at position 3056 of SEQ ID NO: 1885234
aguugagucuuugcauuuc

SEQ ID NO: 2326655 - RNA, 19 nt, Artificial Sequence
  Description of Artificial Sequence: Synthetic oligonucleotide
  Antisense strand to SEQ ID NO: 2326654
gaaaugcaaagacucaacu

SEQ ID NO: 2326656 - RNA, 19 nt, Artificial Sequence
  Description of Artificial Sequence: Synthetic oligonucleotide
  Sense strand starting at position 3074 of SEQ ID NO: 1885234
cauccuccagagugagaau

SEQ ID NO: 2326657 - RNA, 19 nt, Artificial Sequence
  Description of Artificial Sequence: Synthetic oligonucleotide
  Antisense strand to SEQ ID NO: 2326656
auucucacucuggaggaug

SEQ ID NO: 2326658 - RNA, 19 nt, Artificial Sequence
  Description of Artificial Sequence: Synthetic oligonucleotide
  Sense strand starting at position 3115 of SEQ ID NO: 1885234
gggaaauuaugucuuucua

SEQ ID NO: 2326659 - RNA, 19 nt, Artificial Sequence
  Description of Artificial Sequence: Synthetic oligonucleotide
  Antisense strand to SEQ ID NO: 2326658
uagaaagacauaauuuccc

SEQ ID NO: 2326660 - RNA, 19 nt, Artificial Sequence
  Description of Artificial Sequence: Synthetic oligonucleotide
  Sense strand starting at position 3142 of SEQ ID NO: 1885234
ccuuuauaggucgauuauu

SEQ ID NO: 2326661 - RNA, 19 nt, Artificial Sequence
  Description of Artificial Sequence: Synthetic oligonucleotide
  Antisense strand to SEQ ID NO: 2326660
aauaaucgaccuauaaagg

SEQ ID NO: 2326662 - RNA, 19 nt, Artificial Sequence
  Description of Artificial Sequence: Synthetic oligonucleotide
  Sense strand starting at position 3334 of SEQ ID NO: 1885234
agaagaacaugucugagua

SEQ ID NO: 2326663 - RNA, 19 nt, Artificial Sequence
  Description of Artificial Sequence: Synthetic oligonucleotide
  Antisense strand to SEQ ID NO: 2326662
uacucagacauguucuucu

SEQ ID NO: 2326664 - RNA, 19 nt, Artificial Sequence
  Description of Artificial Sequence: Synthetic oligonucleotide
  Sense strand starting at position 3335 of SEQ ID NO: 1885234
gaagaacaugucugaguau

SEQ ID NO: 2326665 - RNA, 19 nt, Artificial Sequence
  Description of Artificial Sequence: Synthetic oligonucleotide
  Antisense strand to SEQ ID NO: 2326664
auacucagacauguucuuc

SEQ ID NO: 2326666 - RNA, 19 nt, Artificial Sequence
  Description of Artificial Sequence: Synthetic oligonucleotide
  Sense strand starting at position 3338 of SEQ ID NO: 1885234
gaacaugucugaguauuac

SEQ ID NO: 2326667 - RNA, 19 nt, Artificial Sequence
  Description of Artificial Sequence: Synthetic oligonucleotide
  Antisense strand to SEQ ID NO: 2326666
guaauacucagacauguuc

SEQ ID NO: 2326668 - RNA, 19 nt, Artificial Sequence
  Description of Artificial Sequence: Synthetic oligonucleotide
  Sense strand starting at position 3449 of SEQ ID NO: 1885234
guacuuacaggucauuauu

SEQ ID NO: 2326669 - RNA, 19 nt, Artificial Sequence
  Description of Artificial Sequence: Synthetic oligonucleotide
  Antisense strand to SEQ ID NO: 2326668
aauaaugaccuguaaguac

SEQ ID NO: 2326670 - RNA, 19 nt, Artificial Sequence
  Description of Artificial Sequence: Synthetic oligonucleotide
  Sense strand starting at position 3519 of SEQ ID NO: 1885234
aguguaucugcauagacua

SEQ ID NO: 2326671 - RNA, 19 nt, Artificial Sequence
  Description of Artificial Sequence: Synthetic oligonucleotide
  Antisense strand to SEQ ID NO: 2326670
uagucuaugcagauacacu

SEQ ID NO: 2326672 - RNA, 19 nt, Artificial Sequence
  Description of Artificial Sequence: Synthetic oligonucleotide
  Sense strand starting at position 3564 of SEQ ID NO: 1885234
ccuugauuccugcagauaa

SEQ ID NO: 2326673 - RNA, 19 nt, Artificial Sequence
  Description of Artificial Sequence: Synthetic oligonucleotide
  Antisense strand to SEQ ID NO: 2326672
uuaucugcaggaaucaagg

SEQ ID NO: 2326674 - RNA, 19 nt, Artificial Sequence
  Description of Artificial Sequence: Synthetic oligonucleotide
  Sense strand starting at position 3566 of SEQ ID NO: 1885234
uugauuccugcagauaauu

SEQ ID NO: 2326675 - RNA, 19 nt, Artificial Sequence
  Description of Artificial Sequence: Synthetic oligonucleotide
  Antisense strand to SEQ ID NO: 2326674
aauuaucugcaggaaucaa

SEQ ID NO: 2326676 - RNA, 19 nt, Artificial Sequence
  Description of Artificial Sequence: Synthetic oligonucleotide
  Sense strand starting at position 3637 of SEQ ID NO: 1885234
aagggugaguaguugacau

SEQ ID NO: 2326677 - RNA, 19 nt, Artificial Sequence
  Description of Artificial Sequence: Synthetic oligonucleotide
  Antisense strand to SEQ ID NO: 2326676
augucaacuacucacccuu

SEQ ID NO: 2326678 - RNA, 19 nt, Artificial Sequence
  Description of Artificial Sequence: Synthetic oligonucleotide
  Sense strand starting at position 3639 of SEQ ID NO: 1885234
gggugaguaguugacauga

SEQ ID NO: 2326679 - RNA, 19 nt, Artificial Sequence
  Description of Artificial Sequence: Synthetic oligonucleotide
  Antisense strand to SEQ ID NO: 2326678
ucaugucaacuacucaccc

SEQ ID NO: 2326680 - RNA, 19 nt, Artificial Sequence
  Description of Artificial Sequence: Synthetic oligonucleotide
  Sense strand starting at position 3720 of SEQ ID NO: 1885234
cugaaccuucugggauaua

SEQ ID NO: 2326681 - RNA, 19 nt, Artificial Sequence
  Description of Artificial Sequence: Synthetic oligonucleotide
  Antisense strand to SEQ ID NO: 2326680
uauaucccagaagguucag

SEQ ID NO: 2326682 - RNA, 19 nt, Artificial Sequence
  Description of Artificial Sequence: Synthetic oligonucleotide
  Sense strand starting at position 3761 of SEQ ID NO: 1885234
ugucaucaagaauguagau

SEQ ID NO: 2326683 - RNA, 19 nt, Artificial Sequence
  Description of Artificial Sequence: Synthetic oligonucleotide
  Antisense strand to SEQ ID NO: 2326682
aucuacauucuugaugaca

SEQ ID NO: 2326684 - RNA, 19 nt, Artificial Sequence
  Description of Artificial Sequence: Synthetic oligonucleotide
  Sense strand starting at position 2 of SEQ ID NO: 1885235
aucaucucagucugacaga

SEQ ID NO: 2326685 - RNA, 19 nt, Artificial Sequence
  Description of Artificial Sequence: Synthetic oligonucleotide
  Antisense strand to SEQ ID NO: 2326684
ucugucagacugagaugau

SEQ ID NO: 2326686 - RNA, 19 nt, Artificial Sequence
  Description of Artificial Sequence: Synthetic oligonucleotide
  Sense strand starting at position 340 of SEQ ID NO: 1885235
gagagacgcucugucucaa

SEQ ID NO: 2326687 - RNA, 19 nt, Artificial Sequence
  Description of Artificial Sequence: Synthetic oligonucleotide
  Antisense strand to SEQ ID NO: 2326686
uugagacagagcgucucuc

SEQ ID NO: 2326688 - RNA, 19 nt, Artificial Sequence
  Description of Artificial Sequence: Synthetic oligonucleotide
  Sense strand starting at position 425 of SEQ ID NO: 1885235
gagcacaugcuguaagauu

SEQ ID NO: 2326689 - RNA, 19 nt, Artificial Sequence
  Description of Artificial Sequence: Synthetic oligonucleotide
  Antisense strand to SEQ ID NO: 2326688
aaucuuacagcaugugcuc

SEQ ID NO: 2326690 - RNA, 19 nt, Artificial Sequence
  Description of Artificial Sequence: Synthetic oligonucleotide
  Sense strand starting at position 448 of SEQ ID NO: 1885235
ccuaaacuaugaguggaua

SEQ ID NO: 2326691 - RNA, 19 nt, Artificial Sequence
  Description of Artificial Sequence: Synthetic oligonucleotide
  Antisense strand to SEQ ID NO: 2326690
uauccacucauaguuuagg

SEQ ID NO: 2326692 - RNA, 19 nt, Artificial Sequence
  Description of Artificial Sequence: Synthetic oligonucleotide
  Sense strand starting at position 520 of SEQ ID NO: 1885235
ugucaaagcuaguuugauu

SEQ ID NO: 2326693 - RNA, 19 nt, Artificial Sequence
  Description of Artificial Sequence: Synthetic oligonucleotide
  Antisense strand to SEQ ID NO: 2326692
aaucaaacuagcuuugaca

SEQ ID NO: 2326694 - RNA, 19 nt, Artificial Sequence
  Description of Artificial Sequence: Synthetic oligonucleotide
  Sense strand starting at position 535 of SEQ ID NO: 1885235
gauuccuagcaggauucua

SEQ ID NO: 2326695 - RNA, 19 nt, Artificial Sequence
  Description of Artificial Sequence: Synthetic oligonucleotide
  Antisense strand to SEQ ID NO: 2326694
uagaauccugcuaggaauc

SEQ ID NO: 2326696 - RNA, 19 nt, Artificial Sequence
  Description of Artificial Sequence: Synthetic oligonucleotide
  Sense strand starting at position 543 of SEQ ID NO: 1885235
gcaggauucuagguuaaac

SEQ ID NO: 2326697 - RNA, 19 nt, Artificial Sequence
  Description of Artificial Sequence: Synthetic oligonucleotide
  Antisense strand to SEQ ID NO: 2326696
guuuaaccuagaauccugc

SEQ ID NO: 2326698 - RNA, 19 nt, Artificial Sequence
  Description of Artificial Sequence: Synthetic oligonucleotide
  Sense strand starting at position 571 of SEQ ID NO: 1885235
uucucagaccucuggaaua

SEQ ID NO: 2326699 - RNA, 19 nt, Artificial Sequence
  Description of Artificial Sequence: Synthetic oligonucleotide
  Antisense strand to SEQ ID NO: 2326698
uauuccagaggucugagaa

SEQ ID NO: 2326700 - RNA, 19 nt, Artificial Sequence
  Description of Artificial Sequence: Synthetic oligonucleotide
  Sense strand starting at position 609 of SEQ ID NO: 1885235
ccacauuguccugaaagug

SEQ ID NO: 2326701 - RNA, 19 nt, Artificial Sequence
  Description of Artificial Sequence: Synthetic oligonucleotide
  Antisense strand to SEQ ID NO: 2326700
cacuuucaggacaaugugg

SEQ ID NO: 2326702 - RNA, 19 nt, Artificial Sequence
  Description of Artificial Sequence: Synthetic oligonucleotide
  Sense strand starting at position 619 of SEQ ID NO: 1885235
cugaaaguguuccugacug

SEQ ID NO: 2326703 - RNA, 19 nt, Artificial Sequence
  Description of Artificial Sequence: Synthetic oligonucleotide
  Antisense strand to SEQ ID NO: 2326702
cagucaggaacacuuucag

SEQ ID NO: 2326704 - RNA, 19 nt, Artificial Sequence
  Description of Artificial Sequence: Synthetic oligonucleotide
  Sense strand starting at position 621 of SEQ ID NO: 1885235
gaaaguguuccugacuguc

SEQ ID NO: 2326705 - RNA, 19 nt, Artificial Sequence
  Description of Artificial Sequence: Synthetic oligonucleotide
  Antisense strand to SEQ ID NO: 2326704
gacagucaggaacacuuuc

SEQ ID NO: 2326706 - RNA, 19 nt, Artificial Sequence
  Description of Artificial Sequence: Synthetic oligonucleotide
  Sense strand starting at position 724 of SEQ ID NO: 1885235
cccaccugguucuuggaaa

SEQ ID NO: 2326707 - RNA, 19 nt, Artificial Sequence
  Description of Artificial Sequence: Synthetic oligonucleotide
  Antisense strand to SEQ ID NO: 2326706
uuuccaagaaccagguggg

SEQ ID NO: 2326708 - RNA, 19 nt, Artificial Sequence
  Description of Artificial Sequence: Synthetic oligonucleotide
  Sense strand starting at position 731 of SEQ ID NO: 1885235
gguucuuggaaaugaacca

SEQ ID NO: 2326709 - RNA, 19 nt, Artificial Sequence
  Description of Artificial Sequence: Synthetic oligonucleotide
  Antisense strand to SEQ ID NO: 2326708
ugguucauuuccaagaacc

SEQ ID NO: 2326710 - RNA, 19 nt, Artificial Sequence
  Description of Artificial Sequence: Synthetic oligonucleotide
  Sense strand starting at position 800 of SEQ ID NO: 1885235
aggaaagaauguuauuuga

SEQ ID NO: 2326711 - RNA, 19 nt, Artificial Sequence
  Description of Artificial Sequence: Synthetic oligonucleotide
  Antisense strand to SEQ ID NO: 2326710
ucaaauaacauucuuuccu

SEQ ID NO: 2326712 - RNA, 19 nt, Artificial Sequence
  Description of Artificial Sequence: Synthetic oligonucleotide
  Sense strand starting at position 883 of SEQ ID NO: 1885235
gaggaauuagugugcucau

SEQ ID NO: 2326713 - RNA, 19 nt, Artificial Sequence
  Description of Artificial Sequence: Synthetic oligonucleotide
  Antisense strand to SEQ ID NO: 2326712
augagcacacuaauuccuc

SEQ ID NO: 2326714 - RNA, 19 nt, Artificial Sequence
  Description of Artificial Sequence: Synthetic oligonucleotide
  Sense strand starting at position 884 of SEQ ID NO: 1885235
aggaauuagugugcucaua

SEQ ID NO: 2326715 - RNA, 19 nt, Artificial Sequence
  Description of Artificial Sequence: Synthetic oligonucleotide
  Antisense strand to SEQ ID NO: 2326714
uaugagcacacuaauuccu

SEQ ID NO: 2326716 - RNA, 19 nt, Artificial Sequence
  Description of Artificial Sequence: Synthetic oligonucleotide
  Sense strand starting at position 886 of SEQ ID NO: 1885235
gaauuagugugcucauaaa

SEQ ID NO: 2326717 - RNA, 19 nt, Artificial Sequence
  Description of Artificial Sequence: Synthetic oligonucleotide
  Antisense strand to SEQ ID NO: 2326716
uuuaugagcacacuaauuc

SEQ ID NO: 2326718 - RNA, 19 nt, Artificial Sequence
  Description of Artificial Sequence: Synthetic oligonucleotide
  Sense strand starting at position 1107 of SEQ ID NO: 1885235
cagugauguccucaugcuu

SEQ ID NO: 2326719 - RNA, 19 nt, Artificial Sequence
  Description of Artificial Sequence: Synthetic oligonucleotide
  Antisense strand to SEQ ID NO: 2326718
aagcaugaggacaucacug

SEQ ID NO: 2326720 - RNA, 19 nt, Artificial Sequence
  Description of Artificial Sequence: Synthetic oligonucleotide
  Sense strand starting at position 1157 of SEQ ID NO: 1885235
aacgaaaguccaugaaugu

SEQ ID NO: 2326721 - RNA, 19 nt, Artificial Sequence
  Description of Artificial Sequence: Synthetic oligonucleotide
  Antisense strand to SEQ ID NO: 2326720
acauucauggacuuucguu

SEQ ID NO: 2326722 - RNA, 19 nt, Artificial Sequence
  Description of Artificial Sequence: Synthetic oligonucleotide
  Sense strand starting at position 1334 of SEQ ID NO: 1885235
aaggaaacaugccucguaa

SEQ ID NO: 2326723 - RNA, 19 nt, Artificial Sequence
  Description of Artificial Sequence: Synthetic oligonucleotide
  Antisense strand to SEQ ID NO: 2326722
uuacgaggcauguuuccuu

SEQ ID NO: 2326724 - RNA, 19 nt, Artificial Sequence
  Description of Artificial Sequence: Synthetic oligonucleotide
  Sense strand starting at position 1633 of SEQ ID NO: 1885235
cagaauggguuuccuuaca

SEQ ID NO: 2326725 - RNA, 19 nt, Artificial Sequence
  Description of Artificial Sequence: Synthetic oligonucleotide
  Antisense strand to SEQ ID NO: 2326724
uguaaggaaacccauucug

SEQ ID NO: 2326726 - RNA, 19 nt, Artificial Sequence
  Description of Artificial Sequence: Synthetic oligonucleotide
  Sense strand starting at position 1664 of SEQ ID NO: 1885235
ggcagauguugccugaaag

SEQ ID NO: 2326727 - RNA, 19 nt, Artificial Sequence
  Description of Artificial Sequence: Synthetic oligonucleotide
  Antisense strand to SEQ ID NO: 2326726
cuuucaggcaacaucugcc

SEQ ID NO: 2326728 - RNA, 19 nt, Artificial Sequence
  Description of Artificial Sequence: Synthetic oligonucleotide
  Sense strand starting at position 1665 of SEQ ID NO: 1885235
gcagauguugccugaaaga

SEQ ID NO: 2326729 - RNA, 19 nt, Artificial Sequence
  Description of Artificial Sequence: Synthetic oligonucleotide
  Antisense strand to SEQ ID NO: 2326728
ucuuucaggcaacaucugc

SEQ ID NO: 2326730 - RNA, 19 nt, Artificial Sequence
  Description of Artificial Sequence: Synthetic oligonucleotide
  Sense strand starting at position 1781 of SEQ ID NO: 1885235
ucaaaugcuggugagaacu

SEQ ID NO: 2326731 - RNA, 19 nt, Artificial Sequence
  Description of Artificial Sequence: Synthetic oligonucleotide
  Antisense strand to SEQ ID NO: 2326730
aguucucaccagcauuuga

SEQ ID NO: 2326732 - RNA, 19 nt, Artificial Sequence
  Description of Artificial Sequence: Synthetic oligonucleotide
  Sense strand starting at position 2016 of SEQ ID NO: 1885235
agaauuugccguugcuuga

SEQ ID NO: 2326733 - RNA, 19 nt, Artificial Sequence
  Description of Artificial Sequence: Synthetic oligonucleotide
  Antisense strand to SEQ ID NO: 2326732
ucaagcaacggcaaauucu

SEQ ID NO: 2326734 - RNA, 19 nt, Artificial Sequence
  Description of Artificial Sequence: Synthetic oligonucleotide
  Sense strand starting at position 2231 of SEQ ID NO: 1885235
cuuacugguguguauauua

SEQ ID NO: 2326735 - RNA, 19 nt, Artificial Sequence
  Description of Artificial Sequence: Synthetic oligonucleotide
  Antisense strand to SEQ ID NO: 2326734
uaauauacacaccaguaag

SEQ ID NO: 2326736 - RNA, 19 nt, Artificial Sequence
  Description of Artificial Sequence: Synthetic oligonucleotide
  Sense strand starting at position 2715 of SEQ ID NO: 1885235
cuccgcaaucuuuacugua

SEQ ID NO: 2326737 - RNA, 19 nt, Artificial Sequence
  Description of Artificial Sequence: Synthetic oligonucleotide
  Antisense strand to SEQ ID NO: 2326736
uacaguaaagauugcggag

SEQ ID NO: 2326738 - RNA, 19 nt, Artificial Sequence
  Description of Artificial Sequence: Synthetic oligonucleotide
  Sense strand starting at position 2770 of SEQ ID NO: 1885235
aucgauagcucaucuuuac

SEQ ID NO: 2326739 - RNA, 19 nt, Artificial Sequence
  Description of Artificial Sequence: Synthetic oligonucleotide
  Antisense strand to SEQ ID NO: 2326738
guaaagaugagcuaucgau

SEQ ID NO: 2326740 - RNA, 19 nt, Artificial Sequence
  Description of Artificial Sequence: Synthetic oligonucleotide
  Sense strand starting at position 2890 of SEQ ID NO: 1885235
gagccaaacgcaugacuau

SEQ ID NO: 2326741 - RNA, 19 nt, Artificial Sequence
  Description of Artificial Sequence: Synthetic oligonucleotide
  Antisense strand to SEQ ID NO: 2326740
auagucaugcguuuggcuc

SEQ ID NO: 2326742 - RNA, 19 nt, Artificial Sequence
  Description of Artificial Sequence: Synthetic oligonucleotide
  Sense strand starting at position 2891 of SEQ ID NO: 1885235
agccaaacgcaugacuauu

SEQ ID NO: 2326743 - RNA, 19 nt, Artificial Sequence
  Description of Artificial Sequence: Synthetic oligonucleotide
  Antisense strand to SEQ ID NO: 2326742
aauagucaugcguuuggcu

SEQ ID NO: 2326744 - RNA, 19 nt, Artificial Sequence
  Description of Artificial Sequence: Synthetic oligonucleotide
  Sense strand starting at position 2940 of SEQ ID NO: 1885235
uguacuugucauuaucuca

SEQ ID NO: 2326745 - RNA, 19 nt, Artificial Sequence
  Description of Artificial Sequence: Synthetic oligonucleotide
  Antisense strand to SEQ ID NO: 2326744
ugagauaaugacaaguaca

SEQ ID NO: 2326746 - RNA, 19 nt, Artificial Sequence
  Description of Artificial Sequence: Synthetic oligonucleotide
  Sense strand starting at position 3021 of SEQ ID NO: 1885235
ccgaguguucguccuuaac

SEQ ID NO: 2326747 - RNA, 19 nt, Artificial Sequence
  Description of Artificial Sequence: Synthetic oligonucleotide
  Antisense strand to SEQ ID NO: 2326746
guuaaggacgaacacucgg

SEQ ID NO: 2326748 - RNA, 19 nt, Artificial Sequence
  Description of Artificial Sequence: Synthetic oligonucleotide
  Sense strand starting at position 3034 of SEQ ID NO: 1885235
cuuaacuuuggcgaguaaa

SEQ ID NO: 2326749 - RNA, 19 nt, Artificial Sequence
  Description of Artificial Sequence: Synthetic oligonucleotide
  Antisense strand to SEQ ID NO: 2326748
uuuacucgccaaaguuaag

SEQ ID NO: 2326750 - RNA, 19 nt, Artificial Sequence
  Description of Artificial Sequence: Synthetic oligonucleotide
  Sense strand starting at position 3279 of SEQ ID NO: 1885235
acgccuagccaagagaauu

SEQ ID NO: 2326751 - RNA, 19 nt, Artificial Sequence
  Description of Artificial Sequence: Synthetic oligonucleotide
  Antisense strand to SEQ ID NO: 2326750
aauucucuuggcuaggcgu

SEQ ID NO: 2326752 - RNA, 19 nt, Artificial Sequence
  Description of Artificial Sequence: Synthetic oligonucleotide
  Sense strand starting at position 3336 of SEQ ID NO: 1885235
agagacuugaugugcuauu

SEQ ID NO: 2326753 - RNA, 19 nt, Artificial Sequence
  Description of Artificial Sequence: Synthetic oligonucleotide
  Antisense strand to SEQ ID NO: 2326752
aauagcacaucaagucucu

SEQ ID NO: 2326754 - RNA, 19 nt, Artificial Sequence
  Description of Artificial Sequence: Synthetic oligonucleotide
  Sense strand starting at position 3456 of SEQ ID NO: 1885235
agacauccuuuagcagaca

SEQ ID NO: 2326755 - RNA, 19 nt, Artificial Sequence
  Description of Artificial Sequence: Synthetic oligonucleotide
  Antisense strand to SEQ ID NO: 2326754
ugucugcuaaaggaugucu

SEQ ID NO: 2326756 - RNA, 19 nt, Artificial Sequence
  Description of Artificial Sequence: Synthetic oligonucleotide
  Sense strand starting at position 3494 of SEQ ID NO: 1885235
ugaugcaucugaguugcaa

SEQ ID NO: 2326757 - RNA, 19 nt, Artificial Sequence
  Description of Artificial Sequence: Synthetic oligonucleotide
  Antisense strand to SEQ ID NO: 2326756
uugcaacucagaugcauca

SEQ ID NO: 2326758 - RNA, 19 nt, Artificial Sequence
  Description of Artificial Sequence: Synthetic oligonucleotide
  Sense strand starting at position 3594 of SEQ ID NO: 1885235
caucgaaguuguucucaaa

SEQ ID NO: 2326759 - RNA, 19 nt, Artificial Sequence
  Description of Artificial Sequence: Synthetic oligonucleotide
  Antisense strand to SEQ ID NO: 2326758
uuugagaacaacuucgaug

SEQ ID NO: 2326760 - RNA, 19 nt, Artificial Sequence
  Description of Artificial Sequence: Synthetic oligonucleotide
  Sense strand starting at position 3723 of SEQ ID NO: 1885235
ugguuuaucuuucuuacuu

SEQ ID NO: 2326761 - RNA, 19 nt, Artificial Sequence
  Description of Artificial Sequence: Synthetic oligonucleotide
  Antisense strand to SEQ ID NO: 2326760
aaguaagaaagauaaacca

SEQ ID NO: 2326762 - RNA, 19 nt, Artificial Sequence
  Description of Artificial Sequence: Synthetic oligonucleotide
  Sense strand starting at position 3724 of SEQ ID NO: 1885235
gguuuaucuuucuuacuuu

SEQ ID NO: 2326763 - RNA, 19 nt, Artificial Sequence
  Description of Artificial Sequence: Synthetic oligonucleotide
  Antisense strand to SEQ ID NO: 2326762
aaaguaagaaagauaaacc

SEQ ID NO: 2326764 - RNA, 19 nt, Artificial Sequence
  Description of Artificial Sequence: Synthetic oligonucleotide
  Sense strand starting at position 30 of SEQ ID NO: 1885236
gggaaauagcuguggauaa

SEQ ID NO: 2326765 - RNA, 19 nt, Artificial Sequence
  Description of Artificial Sequence: Synthetic oligonucleotide
  Antisense strand to SEQ ID NO: 2326764
uuauccacagcuauuuccc

SEQ ID NO: 2326766 - RNA, 19 nt, Artificial Sequence
  Description of Artificial Sequence: Synthetic oligonucleotide
  Sense strand starting at position 32 of SEQ ID NO: 1885236
gaaauagcuguggauaagu

SEQ ID NO: 2326767 - RNA, 19 nt, Artificial Sequence
  Description of Artificial Sequence: Synthetic oligonucleotide
  Antisense strand to SEQ ID NO: 2326766
acuuauccacagcuauuuc

SEQ ID NO: 2326768 - RNA, 19 nt, Artificial Sequence
  Description of Artificial Sequence: Synthetic oligonucleotide
  Sense strand starting at position 34 of SEQ ID NO: 1885236
aauagcuguggauaaguua

SEQ ID NO: 2326769 - RNA, 19 nt, Artificial Sequence
  Description of Artificial Sequence: Synthetic oligonucleotide
  Antisense strand to SEQ ID NO: 2326768
uaacuuauccacagcuauu

SEQ ID NO: 2326770 - RNA, 19 nt, Artificial Sequence
  Description of Artificial Sequence: Synthetic oligonucleotide
  Sense strand starting at position 371 of SEQ ID NO: 1885236
gcauuuaaccuauggcacu

SEQ ID NO: 2326771 - RNA, 19 nt, Artificial Sequence
  Description of Artificial Sequence: Synthetic oligonucleotide
  Antisense strand to SEQ ID NO: 2326770
agugccauagguuaaaugc

SEQ ID NO: 2326772 - RNA, 19 nt, Artificial Sequence
  Description of Artificial Sequence: Synthetic oligonucleotide
  Sense strand starting at position 450 of SEQ ID NO: 1885236
cugugauauuaaucuuagg

SEQ ID NO: 2326773 - RNA, 19 nt, Artificial Sequence
  Description of Artificial Sequence: Synthetic oligonucleotide
  Antisense strand to SEQ ID NO: 2326772
ccuaagauuaauaucacag

SEQ ID NO: 2326774 - RNA, 19 nt, Artificial Sequence
  Description of Artificial Sequence: Synthetic oligonucleotide
  Sense strand starting at position 474 of SEQ ID NO: 1885236
ggaaaucucauaggagcau

SEQ ID NO: 2326775 - RNA, 19 nt, Artificial Sequence
  Description of Artificial Sequence: Synthetic oligonucleotide
  Antisense strand to SEQ ID NO: 2326774
augcuccuaugagauuucc

SEQ ID NO: 2326776 - RNA, 19 nt, Artificial Sequence
  Description of Artificial Sequence: Synthetic oligonucleotide
  Sense strand starting at position 503 of SEQ ID NO: 1885236
uaaugaagacuuuagcugu

SEQ ID NO: 2326777 - RNA, 19 nt, Artificial Sequence
  Description of Artificial Sequence: Synthetic oligonucleotide
  Antisense strand to SEQ ID NO: 2326776
acagcuaaagucuucauua

SEQ ID NO: 2326778 - RNA, 19 nt, Artificial Sequence
  Description of Artificial Sequence: Synthetic oligonucleotide
  Sense strand starting at position 597 of SEQ ID NO: 1885236
gggucaugccaucaaccaa

SEQ ID NO: 2326779 - RNA, 19 nt, Artificial Sequence
  Description of Artificial Sequence: Synthetic oligonucleotide
  Antisense strand to SEQ ID NO: 2326778
uugguugauggcaugaccc

SEQ ID NO: 2326780 - RNA, 19 nt, Artificial Sequence
  Description of Artificial Sequence: Synthetic oligonucleotide
  Sense strand starting at position 661 of SEQ ID NO: 1885236
aagauccuaugguuuguaa

SEQ ID NO: 2326781 - RNA, 19 nt, Artificial Sequence
  Description of Artificial Sequence: Synthetic oligonucleotide
  Antisense strand to SEQ ID NO: 2326780
uuacaaaccauaggaucuu

SEQ ID NO: 2326782 - RNA, 19 nt, Artificial Sequence
  Description of Artificial Sequence: Synthetic oligonucleotide
  Sense strand starting at position 668 of SEQ ID NO: 1885236
uaugguuuguaacuagaag

SEQ ID NO: 2326783 - RNA, 19 nt, Artificial Sequence
  Description of Artificial Sequence: Synthetic oligonucleotide
  Antisense strand to SEQ ID NO: 2326782
cuucuaguuacaaaccaua

SEQ ID NO: 2326784 - RNA, 19 nt, Artificial Sequence
  Description of Artificial Sequence: Synthetic oligonucleotide
  Sense strand starting at position 908 of SEQ ID NO: 1885236
acuguuaauugggcaggaa

SEQ ID NO: 2326785 - RNA, 19 nt, Artificial Sequence
  Description of Artificial Sequence: Synthetic oligonucleotide
  Antisense strand to SEQ ID NO: 2326784
uuccugcccaauuaacagu

SEQ ID NO: 2326786 - RNA, 19 nt, Artificial Sequence
  Description of Artificial Sequence: Synthetic oligonucleotide
  Sense strand starting at position 957 of SEQ ID NO: 1885236
uucugauggcuuuggaaga

SEQ ID NO: 2326787 - RNA, 19 nt, Artificial Sequence
  Description of Artificial Sequence: Synthetic oligonucleotide
  Antisense strand to SEQ ID NO: 2326786
ucuuccaaagccaucagaa

SEQ ID NO: 2326788 - RNA, 19 nt, Artificial Sequence
  Description of Artificial Sequence: Synthetic oligonucleotide
  Sense strand starting at position 964 of SEQ ID NO: 1885236
ggcuuuggaagauaucugu

SEQ ID NO: 2326789 - RNA, 19 nt, Artificial Sequence
  Description of Artificial Sequence: Synthetic oligonucleotide
  Antisense strand to SEQ ID NO: 2326788
acagauaucuuccaaagcc

SEQ ID NO: 2326790 - RNA, 19 nt, Artificial Sequence
  Description of Artificial Sequence: Synthetic oligonucleotide
  Sense strand starting at position 971 of SEQ ID NO: 1885236
gaagauaucugucuguauu

SEQ ID NO: 2326791 - RNA, 19 nt, Artificial Sequence
  Description of Artificial Sequence: Synthetic oligonucleotide
  Antisense strand to SEQ ID NO: 2326790
aauacagacagauaucuuc

SEQ ID NO: 2326792 - RNA, 19 nt, Artificial Sequence
  Description of Artificial Sequence: Synthetic oligonucleotide
  Sense strand starting at position 1062 of SEQ ID NO: 1885236
gugugugaugcugauauuu

SEQ ID NO: 2326793 - RNA, 19 nt, Artificial Sequence
  Description of Artificial Sequence: Synthetic oligonucleotide
  Antisense strand to SEQ ID NO: 2326792
aaauaucagcaucacacac

SEQ ID NO: 2326794 - RNA, 19 nt, Artificial Sequence
  Description of Artificial Sequence: Synthetic oligonucleotide
  Sense strand starting at position 1346 of SEQ ID NO: 1885236
auuagauauguaugcacau

SEQ ID NO: 2326795 - RNA, 19 nt, Artificial Sequence
  Description of Artificial Sequence: Synthetic oligonucleotide
  Antisense strand to SEQ ID NO: 2326794
augugcauacauaucuaau

SEQ ID NO: 2326796 - RNA, 19 nt, Artificial Sequence
  Description of Artificial Sequence: Synthetic oligonucleotide
  Sense strand starting at position 1347 of SEQ ID NO: 1885236
uuagauauguaugcacaua

SEQ ID NO: 2326797 - RNA, 19 nt, Artificial Sequence
  Description of Artificial Sequence: Synthetic oligonucleotide
  Antisense strand to SEQ ID NO: 2326796
uaugugcauacauaucuaa

SEQ ID NO: 2326798 - RNA, 19 nt, Artificial Sequence
  Description of Artificial Sequence: Synthetic oligonucleotide
  Sense strand starting at position 1418 of SEQ ID NO: 1885236
uauguaugagaucaggcua

SEQ ID NO: 2326799 - RNA, 19 nt, Artificial Sequence
  Description of Artificial Sequence: Synthetic oligonucleotide
  Antisense strand to SEQ ID NO: 2326798
uagccugaucucauacaua

SEQ ID NO: 2326800 - RNA, 19 nt, Artificial Sequence
  Description of Artificial Sequence: Synthetic oligonucleotide
  Sense strand starting at position 1459 of SEQ ID NO: 1885236
ucaguaucugagcacacau

SEQ ID NO: 2326801 - RNA, 19 nt, Artificial Sequence
  Description of Artificial Sequence: Synthetic oligonucleotide
  Antisense strand to SEQ ID NO: 2326800
augugugcucagauacuga

SEQ ID NO: 2326802 - RNA, 19 nt, Artificial Sequence
  Description of Artificial Sequence: Synthetic oligonucleotide
  Sense strand starting at position 1830 of SEQ ID NO: 1885236
cuggaaauauugcuaagga

SEQ ID NO: 2326803 - RNA, 19 nt, Artificial Sequence
  Description of Artificial Sequence: Synthetic oligonucleotide
  Antisense strand to SEQ ID NO: 2326802
uccuuagcaauauuuccag

SEQ ID NO: 2326804 - RNA, 19 nt, Artificial Sequence
  Description of Artificial Sequence: Synthetic oligonucleotide
  Sense strand starting at position 1903 of SEQ ID NO: 1885236
cucccucugguauagauau

SEQ ID NO: 2326805 - RNA, 19 nt, Artificial Sequence
  Description of Artificial Sequence: Synthetic oligonucleotide
  Antisense strand to SEQ ID NO: 2326804
auaucuauaccagagggag

SEQ ID NO: 2326806 - RNA, 19 nt, Artificial Sequence
  Description of Artificial Sequence: Synthetic oligonucleotide
  Sense strand starting at position 1909 of SEQ ID NO: 1885236
cugguauagauauguauga

SEQ ID NO: 2326807 - RNA, 19 nt, Artificial Sequence
  Description of Artificial Sequence: Synthetic oligonucleotide
  Antisense strand to SEQ ID NO: 2326806
ucauacauaucuauaccag

SEQ ID NO: 2326808 - RNA, 19 nt, Artificial Sequence
  Description of Artificial Sequence: Synthetic oligonucleotide
  Sense strand starting at position 1989 of SEQ ID NO: 1885236
gagcucaaaguccagaauu

SEQ ID NO: 2326809 - RNA, 19 nt, Artificial Sequence
  Description of Artificial Sequence: Synthetic oligonucleotide
  Antisense strand to SEQ ID NO: 2326808
aauucuggacuuugagcuc

SEQ ID NO: 2326810 - RNA, 19 nt, Artificial Sequence
  Description of Artificial Sequence: Synthetic oligonucleotide
  Sense strand starting at position 2008 of SEQ ID NO: 1885236
cagaaucucugagugauag

SEQ ID NO: 2326811 - RNA, 19 nt, Artificial Sequence
  Description of Artificial Sequence: Synthetic oligonucleotide
  Antisense strand to SEQ ID NO: 2326810
cuaucacucagagauucug

SEQ ID NO: 2326812 - RNA, 19 nt, Artificial Sequence
  Description of Artificial Sequence: Synthetic oligonucleotide
  Sense strand starting at position 2014 of SEQ ID NO: 1885236
cucugagugauagaauugu

SEQ ID NO: 2326813 - RNA, 19 nt, Artificial Sequence
  Description of Artificial Sequence: Synthetic oligonucleotide
  Antisense strand to SEQ ID NO: 2326812
acaauucuaucacucagag

SEQ ID NO: 2326814 - RNA, 19 nt, Artificial Sequence
  Description of Artificial Sequence: Synthetic oligonucleotide
  Sense strand starting at position 2059 of SEQ ID NO: 1885236
ccaggacccgcauagauau

SEQ ID NO: 2326815 - RNA, 19 nt, Artificial Sequence
  Description of Artificial Sequence: Synthetic oligonucleotide
  Antisense strand to SEQ ID NO: 2326814
auaucuaugcggguccugg

SEQ ID NO: 2326816 - RNA, 19 nt, Artificial Sequence
  Description of Artificial Sequence: Synthetic oligonucleotide
  Sense strand starting at position 2091 of SEQ ID NO: 1885236
gcucaaaucgcugauauaa

SEQ ID NO: 2326817 - RNA, 19 nt, Artificial Sequence
  Description of Artificial Sequence: Synthetic oligonucleotide
  Antisense strand to SEQ ID NO: 2326816
uuauaucagcgauuugagc

SEQ ID NO: 2326818 - RNA, 19 nt, Artificial Sequence
  Description of Artificial Sequence: Synthetic oligonucleotide
  Sense strand starting at position 2301 of SEQ ID NO: 1885236
gguugaauccuuggauaca

SEQ ID NO: 2326819 - RNA, 19 nt, Artificial Sequence
  Description of Artificial Sequence: Synthetic oligonucleotide
  Antisense strand to SEQ ID NO: 2326818
uguauccaaggauucaacc

SEQ ID NO: 2326820 - RNA, 19 nt, Artificial Sequence
  Description of Artificial Sequence: Synthetic oligonucleotide
  Sense strand starting at position 2366 of SEQ ID NO: 1885236
cucccauagcuuuggaaac

SEQ ID NO: 2326821 - RNA, 19 nt, Artificial Sequence
  Description of Artificial Sequence: Synthetic oligonucleotide
  Antisense strand to SEQ ID NO: 2326820
guuuccaaagcuaugggag

SEQ ID NO: 2326822 - RNA, 19 nt, Artificial Sequence
  Description of Artificial Sequence: Synthetic oligonucleotide
  Sense strand starting at position 2522 of SEQ ID NO: 1885236
ucugcucuccuggaggauu

SEQ ID NO: 2326823 - RNA, 19 nt, Artificial Sequence
  Description of Artificial Sequence: Synthetic oligonucleotide
  Antisense strand to SEQ ID NO: 2326822
aauccuccaggagagcaga

SEQ ID NO: 2326824 - RNA, 19 nt, Artificial Sequence
  Description of Artificial Sequence: Synthetic oligonucleotide
  Sense strand starting at position 2609 of SEQ ID NO: 1885236
ccuucuugggcucauauaa

SEQ ID NO: 2326825 - RNA, 19 nt, Artificial Sequence
  Description of Artificial Sequence: Synthetic oligonucleotide
  Antisense strand to SEQ ID NO: 2326824
uuauaugagcccaagaagg

SEQ ID NO: 2326826 - RNA, 19 nt, Artificial Sequence
  Description of Artificial Sequence: Synthetic oligonucleotide
  Sense strand starting at position 2830 of SEQ ID NO: 1885236
guguuaguuaguuagacaa

SEQ ID NO: 2326827 - RNA, 19 nt, Artificial Sequence
  Description of Artificial Sequence: Synthetic oligonucleotide
  Antisense strand to SEQ ID NO: 2326826
uugucuaacuaacuaacac

SEQ ID NO: 2326828 - RNA, 19 nt, Artificial Sequence
  Description of Artificial Sequence: Synthetic oligonucleotide
  Sense strand starting at position 3053 of SEQ ID NO: 1885236
auccguauuucuuuacacu

SEQ ID NO: 2326829 - RNA, 19 nt, Artificial Sequence
  Description of Artificial Sequence: Synthetic oligonucleotide
  Antisense strand to SEQ ID NO: 2326828
aguguaaagaaauacggau

SEQ ID NO: 2326830 - RNA, 19 nt, Artificial Sequence
  Description of Artificial Sequence: Synthetic oligonucleotide
  Sense strand starting at position 3121 of SEQ ID NO: 1885236
cuaucuggauuugaugaga

SEQ ID NO: 2326831 - RNA, 19 nt, Artificial Sequence
  Description of Artificial Sequence: Synthetic oligonucleotide
  Antisense strand to SEQ ID NO: 2326830
ucucaucaaauccagauag

SEQ ID NO: 2326832 - RNA, 19 nt, Artificial Sequence
  Description of Artificial Sequence: Synthetic oligonucleotide
  Sense strand starting at position 3212 of SEQ ID NO: 1885236
guuugaucuuuacccuaag

SEQ ID NO: 2326833 - RNA, 19 nt, Artificial Sequence
  Description of Artificial Sequence: Synthetic oligonucleotide
  Antisense strand to SEQ ID NO: 2326832
cuuaggguaaagaucaaac

SEQ ID NO: 2326834 - RNA, 19 nt, Artificial Sequence
  Description of Artificial Sequence: Synthetic oligonucleotide
  Sense strand starting at position 3215 of SEQ ID NO: 1885236
ugaucuuuacccuaaggca

SEQ ID NO: 2326835 - RNA, 19 nt, Artificial Sequence
  Description of Artificial Sequence: Synthetic oligonucleotide
  Antisense strand to SEQ ID NO: 2326834
ugccuuaggguaaagauca

SEQ ID NO: 2326836 - RNA, 19 nt, Artificial Sequence
  Description of Artificial Sequence: Synthetic oligonucleotide
  Sense strand starting at position 3361 of SEQ ID NO: 1885236
uuuaccauuuaggauugaa

SEQ ID NO: 2326837 - RNA, 19 nt, Artificial Sequence
  Description of Artificial Sequence: Synthetic oligonucleotide
  Antisense strand to SEQ ID NO: 2326836
uucaauccuaaaugguaaa

SEQ ID NO: 2326838 - RNA, 19 nt, Artificial Sequence
  Description of Artificial Sequence: Synthetic oligonucleotide
  Sense strand starting at position 3507 of SEQ ID NO: 1885236
gcgaccagcacagauaaau

SEQ ID NO: 2326839 - RNA, 19 nt, Artificial Sequence
  Description of Artificial Sequence: Synthetic oligonucleotide
  Antisense strand to SEQ ID NO: 2326838
auuuaucugugcuggucgc

SEQ ID NO: 2326840 - RNA, 19 nt, Artificial Sequence
  Description of Artificial Sequence: Synthetic oligonucleotide
  Sense strand starting at position 3599 of SEQ ID NO: 1885236
gggacagucuuaccaaaug

SEQ ID NO: 2326841 - RNA, 19 nt, Artificial Sequence
  Description of Artificial Sequence: Synthetic oligonucleotide
  Antisense strand to SEQ ID NO: 2326840
cauuugguaagacuguccc

SEQ ID NO: 2326842 - RNA, 19 nt, Artificial Sequence
  Description of Artificial Sequence: Synthetic oligonucleotide
  Sense strand starting at position 3714 of SEQ ID NO: 1885236
uuuaucagagcccauugau

SEQ ID NO: 2326843 - RNA, 19 nt, Artificial Sequence
  Description of Artificial Sequence: Synthetic oligonucleotide
  Antisense strand to SEQ ID NO: 2326842
aucaaugggcucugauaaa

SEQ ID NO: 2326844 - RNA, 19 nt, Artificial Sequence
  Description of Artificial Sequence: Synthetic oligonucleotide
  Sense strand starting at position 136 of SEQ ID NO: 1885237
ugcccauggguugaaacaa

SEQ ID NO: 2326845 - RNA, 19 nt, Artificial Sequence
  Description of Artificial Sequence: Synthetic oligonucleotide
  Antisense strand to SEQ ID NO: 2326844
uuguuucaacccaugggca

SEQ ID NO: 2326846 - RNA, 19 nt, Artificial Sequence
  Description of Artificial Sequence: Synthetic oligonucleotide
  Sense strand starting at position 174 of SEQ ID NO: 1885237
ucacguagauaacuauuau

SEQ ID NO: 2326847 - RNA, 19 nt, Artificial Sequence
  Description of Artificial Sequence: Synthetic oligonucleotide
  Antisense strand to SEQ ID NO: 2326846
auaauaguuaucuacguga

SEQ ID NO: 2326848 - RNA, 19 nt, Artificial Sequence
  Description of Artificial Sequence: Synthetic oligonucleotide
  Sense strand starting at position 411 of SEQ ID NO: 1885237
gagguacucuggcccugau

SEQ ID NO: 2326849 - RNA, 19 nt, Artificial Sequence
  Description of Artificial Sequence: Synthetic oligonucleotide
  Antisense strand to SEQ ID NO: 2326848
aucagggccagaguaccuc

SEQ ID NO: 2326850 - RNA, 19 nt, Artificial Sequence
  Description of Artificial Sequence: Synthetic oligonucleotide
  Sense strand starting at position 418 of SEQ ID NO: 1885237
ucuggcccugaucauuaua

SEQ ID NO: 2326851 - RNA, 19 nt, Artificial Sequence
  Description of Artificial Sequence: Synthetic oligonucleotide
  Antisense strand to SEQ ID NO: 2326850
uauaaugaucagggccaga

SEQ ID NO: 2326852 - RNA, 19 nt, Artificial Sequence
  Description of Artificial Sequence: Synthetic oligonucleotide
  Sense strand starting at position 421 of SEQ ID NO: 1885237
ggcccugaucauuauauga

SEQ ID NO: 2326853 - RNA, 19 nt, Artificial Sequence
  Description of Artificial Sequence: Synthetic oligonucleotide
  Antisense strand to SEQ ID NO: 2326852
ucauauaaugaucagggcc

SEQ ID NO: 2326854 - RNA, 19 nt, Artificial Sequence
  Description of Artificial Sequence: Synthetic oligonucleotide
  Sense strand starting at position 457 of SEQ ID NO: 1885237
gcagucacaucacugacaa

SEQ ID NO: 2326855 - RNA, 19 nt, Artificial Sequence
  Description of Artificial Sequence: Synthetic oligonucleotide
  Antisense strand to SEQ ID NO: 2326854
uugucagugaugugacugc

SEQ ID NO: 2326856 - RNA, 19 nt, Artificial Sequence
  Description of Artificial Sequence: Synthetic oligonucleotide
  Sense strand starting at position 483 of SEQ ID NO: 1885237
agcuguauuagguaugaaa

SEQ ID NO: 2326857 - RNA, 19 nt, Artificial Sequence
  Description of Artificial Sequence: Synthetic oligonucleotide
  Antisense strand to SEQ ID NO: 2326856
uuucauaccuaauacagcu

SEQ ID NO: 2326858 - RNA, 19 nt, Artificial Sequence
  Description of Artificial Sequence: Synthetic oligonucleotide
  Sense strand starting at position 485 of SEQ ID NO: 1885237
cuguauuagguaugaaaca

SEQ ID NO: 2326859 - RNA, 19 nt, Artificial Sequence
  Description of Artificial Sequence: Synthetic oligonucleotide
  Antisense strand to SEQ ID NO: 2326858
uguuucauaccuaauacag

SEQ ID NO: 2326860 - RNA, 19 nt, Artificial Sequence
  Description of Artificial Sequence: Synthetic oligonucleotide
  Sense strand starting at position 528 of SEQ ID NO: 1885237
guaguuccuagggaucuau

SEQ ID NO: 2326861 - RNA, 19 nt, Artificial Sequence
  Description of Artificial Sequence: Synthetic oligonucleotide
  Antisense strand to SEQ ID NO: 2326860
auagaucccuaggaacuac

SEQ ID NO: 2326862 - RNA, 19 nt, Artificial Sequence
  Description of Artificial Sequence: Synthetic oligonucleotide
  Sense strand starting at position 537 of SEQ ID NO: 1885237
agggaucuauggccuccaa

SEQ ID NO: 2326863 - RNA, 19 nt, Artificial Sequence
  Description of Artificial Sequence: Synthetic oligonucleotide
  Antisense strand to SEQ ID NO: 2326862
uuggaggccauagaucccu

SEQ ID NO: 2326864 - RNA, 19 nt, Artificial Sequence
  Description of Artificial Sequence: Synthetic oligonucleotide
  Sense strand starting at position 643 of SEQ ID NO: 1885237
gcauuagaauguuucugag

SEQ ID NO: 2326865 - RNA, 19 nt, Artificial Sequence
  Description of Artificial Sequence: Synthetic oligonucleotide
  Antisense strand to SEQ ID NO: 2326864
cucagaaacauucuaaugc

SEQ ID NO: 2326866 - RNA, 19 nt, Artificial Sequence
  Description of Artificial Sequence: Synthetic oligonucleotide
  Sense strand starting at position 645 of SEQ ID NO: 1885237
auuagaauguuucugagaa

SEQ ID NO: 2326867 - RNA, 19 nt, Artificial Sequence
  Description of Artificial Sequence: Synthetic oligonucleotide
  Antisense strand to SEQ ID NO: 2326866
uucucagaaacauucuaau

SEQ ID NO: 2326868 - RNA, 19 nt, Artificial Sequence
  Description of Artificial Sequence: Synthetic oligonucleotide
  Sense strand starting at position 764 of SEQ ID NO: 1885237
ugaauaaggaggugugguu

SEQ ID NO: 2326869 - RNA, 19 nt, Artificial Sequence
  Description of Artificial Sequence: Synthetic oligonucleotide
  Antisense strand to SEQ ID NO: 2326868
aaccacaccuccuuauuca

SEQ ID NO: 2326870 - RNA, 19 nt, Artificial Sequence
  Description of Artificial Sequence: Synthetic oligonucleotide
  Sense strand starting at position 888 of SEQ ID NO: 1885237
gagcuagacugacuauauu

SEQ ID NO: 2326871 - RNA, 19 nt, Artificial Sequence
  Description of Artificial Sequence: Synthetic oligonucleotide
  Antisense strand to SEQ ID NO: 2326870
aauauagucagucuagcuc

SEQ ID NO: 2326872 - RNA, 19 nt, Artificial Sequence
  Description of Artificial Sequence: Synthetic oligonucleotide
  Sense strand starting at position 965 of SEQ ID NO: 1885237
ucauaucuuuggguuacuu

SEQ ID NO: 2326873 - RNA, 19 nt, Artificial Sequence
  Description of Artificial Sequence: Synthetic oligonucleotide
  Antisense strand to SEQ ID NO: 2326872
aaguaacccaaagauauga

SEQ ID NO: 2326874 - RNA, 19 nt, Artificial Sequence
  Description of Artificial Sequence: Synthetic oligonucleotide
  Sense strand starting at position 1057 of SEQ ID NO: 1885237
gcuauugcuacugaggacu

SEQ ID NO: 2326875 - RNA, 19 nt, Artificial Sequence
  Description of Artificial Sequence: Synthetic oligonucleotide
  Antisense strand to SEQ ID NO: 2326874
aguccucaguagcaauagc

SEQ ID NO: 2326876 - RNA, 19 nt, Artificial Sequence
  Description of Artificial Sequence: Synthetic oligonucleotide
  Sense strand starting at position 1097 of SEQ ID NO: 1885237
cccuaauuccuauguaagg

SEQ ID NO: 2326877 - RNA, 19 nt, Artificial Sequence
  Description of Artificial Sequence: Synthetic oligonucleotide
  Antisense strand to SEQ ID NO: 2326876
ccuuacauaggaauuaggg

SEQ ID NO: 2326878 - RNA, 19 nt, Artificial Sequence
  Description of Artificial Sequence: Synthetic oligonucleotide
  Sense strand starting at position 1200 of SEQ ID NO: 1885237
auuugauucuggcauaaca

SEQ ID NO: 2326879 - RNA, 19 nt, Artificial Sequence
  Description of Artificial Sequence: Synthetic oligonucleotide
  Antisense strand to SEQ ID NO: 2326878
uguuaugccagaaucaaau

SEQ ID NO: 2326880 - RNA, 19 nt, Artificial Sequence
  Description of Artificial Sequence: Synthetic oligonucleotide
  Sense strand starting at position 2217 of SEQ ID NO: 1885237
uggcguagccauuccuuua

SEQ ID NO: 2326881 - RNA, 19 nt, Artificial Sequence
  Description of Artificial Sequence: Synthetic oligonucleotide
  Antisense strand to SEQ ID NO: 2326880
uaaaggaauggcuacgcca

SEQ ID NO: 2326882 - RNA, 19 nt, Artificial Sequence
  Description of Artificial Sequence: Synthetic oligonucleotide
  Sense strand starting at position 2218 of SEQ ID NO: 1885237
ggcguagccauuccuuuau

SEQ ID NO: 2326883 - RNA, 19 nt, Artificial Sequence
  Description of Artificial Sequence: Synthetic oligonucleotide
  Antisense strand to SEQ ID NO: 2326882
auaaaggaauggcuacgcc

SEQ ID NO: 2326884 - RNA, 19 nt, Artificial Sequence
  Description of Artificial Sequence: Synthetic oligonucleotide
  Sense strand starting at position 2433 of SEQ ID NO: 1885237
ccguguuuagucuauagau

SEQ ID NO: 2326885 - RNA, 19 nt, Artificial Sequence
  Description of Artificial Sequence: Synthetic oligonucleotide
  Antisense strand to SEQ ID NO: 2326884
aucuauagacuaaacacgg

SEQ ID NO: 2326886 - RNA, 19 nt, Artificial Sequence
  Description of Artificial Sequence: Synthetic oligonucleotide
  Sense strand starting at position 2435 of SEQ ID NO: 1885237
guguuuagucuauagaucu

SEQ ID NO: 2326887 - RNA, 19 nt, Artificial Sequence
  Description of Artificial Sequence: Synthetic oligonucleotide
  Antisense strand to SEQ ID NO: 2326886
agaucuauagacuaaacac

SEQ ID NO: 2326888 - RNA, 19 nt, Artificial Sequence
  Description of Artificial Sequence: Synthetic oligonucleotide
  Sense strand starting at position 2442 of SEQ ID NO: 1885237
gucuauagaucuucuguau

SEQ ID NO: 2326889 - RNA, 19 nt, Artificial Sequence
  Description of Artificial Sequence: Synthetic oligonucleotide
  Antisense strand to SEQ ID NO: 2326888
auacagaagaucuauagac

SEQ ID NO: 2326890 - RNA, 19 nt, Artificial Sequence
  Description of Artificial Sequence: Synthetic oligonucleotide
  Sense strand starting at position 2611 of SEQ ID NO: 1885237
aggacuuauguauauucuu

SEQ ID NO: 2326891 - RNA, 19 nt, Artificial Sequence
  Description of Artificial Sequence: Synthetic oligonucleotide
  Antisense strand to SEQ ID NO: 2326890
aagaauauacauaaguccu

SEQ ID NO: 2326892 - RNA, 19 nt, Artificial Sequence
  Description of Artificial Sequence: Synthetic oligonucleotide
  Sense strand starting at position 2640 of SEQ ID NO: 1885237
uucugaguaccauguauua

SEQ ID NO: 2326893 - RNA, 19 nt, Artificial Sequence
  Description of Artificial Sequence: Synthetic oligonucleotide
  Antisense strand to SEQ ID NO: 2326892
uaauacaugguacucagaa

SEQ ID NO: 2326894 - RNA, 19 nt, Artificial Sequence
  Description of Artificial Sequence: Synthetic oligonucleotide
  Sense strand starting at position 2661 of SEQ ID NO: 1885237
ugcugcuaugacuaaauau

SEQ ID NO: 2326895 - RNA, 19 nt, Artificial Sequence
  Description of Artificial Sequence: Synthetic oligonucleotide
  Antisense strand to SEQ ID NO: 2326894
auauuuagucauagcagca

SEQ ID NO: 2326896 - RNA, 19 nt, Artificial Sequence
  Description of Artificial Sequence: Synthetic oligonucleotide
  Sense strand starting at position 2719 of SEQ ID NO: 1885237
ggugcaaaguaauuaaaug

SEQ ID NO: 2326897 - RNA, 19 nt, Artificial Sequence
  Description of Artificial Sequence: Synthetic oligonucleotide
  Antisense strand to SEQ ID NO: 2326896
cauuuaauuacuuugcacc

SEQ ID NO: 2326898 - RNA, 19 nt, Artificial Sequence
  Description of Artificial Sequence: Synthetic oligonucleotide
  Sense strand starting at position 2767 of SEQ ID NO: 1885237
uguguugaauucucauuag

SEQ ID NO: 2326899 - RNA, 19 nt, Artificial Sequence
  Description of Artificial Sequence: Synthetic oligonucleotide
  Antisense strand to SEQ ID NO: 2326898
cuaaugagaauucaacaca

SEQ ID NO: 2326900 - RNA, 19 nt, Artificial Sequence
  Description of Artificial Sequence: Synthetic oligonucleotide
  Sense strand starting at position 2770 of SEQ ID NO: 1885237
guugaauucucauuaguuu

SEQ ID NO: 2326901 - RNA, 19 nt, Artificial Sequence
  Description of Artificial Sequence: Synthetic oligonucleotide
  Antisense strand to SEQ ID NO: 2326900
aaacuaaugagaauucaac

SEQ ID NO: 2326902 - RNA, 19 nt, Artificial Sequence
  Description of Artificial Sequence: Synthetic oligonucleotide
  Sense strand starting at position 2963 of SEQ ID NO: 1885237
ccuauauagucugaauuug

SEQ ID NO: 2326903 - RNA, 19 nt, Artificial Sequence
  Description of Artificial Sequence: Synthetic oligonucleotide
  Antisense strand to SEQ ID NO: 2326902
caaauucagacuauauagg

SEQ ID NO: 2326904 - RNA, 19 nt, Artificial Sequence
  Description of Artificial Sequence: Synthetic oligonucleotide
  Sense strand starting at position 2973 of SEQ ID NO: 1885237
cugaauuuguuguugguua

SEQ ID NO: 2326905 - RNA, 19 nt, Artificial Sequence
  Description of Artificial Sequence: Synthetic oligonucleotide
  Antisense strand to SEQ ID NO: 2326904
uaaccaacaacaaauucag

SEQ ID NO: 2326906 - RNA, 19 nt, Artificial Sequence
  Description of Artificial Sequence: Synthetic oligonucleotide
  Sense strand starting at position 2986 of SEQ ID NO: 1885237
ugguuaauuucuucugcca

SEQ ID NO: 2326907 - RNA, 19 nt, Artificial Sequence
  Description of Artificial Sequence: Synthetic oligonucleotide
  Antisense strand to SEQ ID NO: 2326906
uggcagaagaaauuaacca

SEQ ID NO: 2326908 - RNA, 19 nt, Artificial Sequence
  Description of Artificial Sequence: Synthetic oligonucleotide
  Sense strand starting at position 3185 of SEQ ID NO: 1885237
uuaguugugccauauuauu

SEQ ID NO: 2326909 - RNA, 19 nt, Artificial Sequence
  Description of Artificial Sequence: Synthetic oligonucleotide
  Antisense strand to SEQ ID NO: 2326908
aauaauauggcacaacuaa

SEQ ID NO: 2326910 - RNA, 19 nt, Artificial Sequence
  Description of Artificial Sequence: Synthetic oligonucleotide
  Sense strand starting at position 3317 of SEQ ID NO: 1885237
uuguaucaagaguauacua

SEQ ID NO: 2326911 - RNA, 19 nt, Artificial Sequence
  Description of Artificial Sequence: Synthetic oligonucleotide
  Antisense strand to SEQ ID NO: 2326910
uaguauacucuugauacaa

SEQ ID NO: 2326912 - RNA, 19 nt, Artificial Sequence
  Description of Artificial Sequence: Synthetic oligonucleotide
  Sense strand starting at position 3319 of SEQ ID NO: 1885237
guaucaagaguauacuagu

SEQ ID NO: 2326913 - RNA, 19 nt, Artificial Sequence
  Description of Artificial Sequence: Synthetic oligonucleotide
  Antisense strand to SEQ ID NO: 2326912
acuaguauacucuugauac

SEQ ID NO: 2326914 - RNA, 19 nt, Artificial Sequence
  Description of Artificial Sequence: Synthetic oligonucleotide
  Sense strand starting at position 3721 of SEQ ID NO: 1885237
uugggagaguguguaauca

SEQ ID NO: 2326915 - RNA, 19 nt, Artificial Sequence
  Description of Artificial Sequence: Synthetic oligonucleotide
  Antisense strand to SEQ ID NO: 2326914
ugauuacacacucucccaa

SEQ ID NO: 2326916 - RNA, 19 nt, Artificial Sequence
  Description of Artificial Sequence: Synthetic oligonucleotide
  Sense strand starting at position 3744 of SEQ ID NO: 1885237
gccuauuaaguuuauaugu

SEQ ID NO: 2326917 - RNA, 19 nt, Artificial Sequence
  Description of Artificial Sequence: Synthetic oligonucleotide
  Antisense strand to SEQ ID NO: 2326916
acauauaaacuuaauaggc

SEQ ID NO: 2326918 - RNA, 19 nt, Artificial Sequence
  Description of Artificial Sequence: Synthetic oligonucleotide
  Sense strand starting at position 3851 of SEQ ID NO: 1885237
acaauuuacucaugggaag

SEQ ID NO: 2326919 - RNA, 19 nt, Artificial Sequence
  Description of Artificial Sequence: Synthetic oligonucleotide
  Antisense strand to SEQ ID NO: 2326918
cuucccaugaguaaauugu

SEQ ID NO: 2326920 - RNA, 19 nt, Artificial Sequence
  Description of Artificial Sequence: Synthetic oligonucleotide
  Sense strand starting at position 3896 of SEQ ID NO: 1885237
auaugucucuaauuaugag

SEQ ID NO: 2326921 - RNA, 19 nt, Artificial Sequence
  Description of Artificial Sequence: Synthetic oligonucleotide
  Antisense strand to SEQ ID NO: 2326920
cucauaauuagagacauau

SEQ ID NO: 2326922 - RNA, 19 nt, Artificial Sequence
  Description of Artificial Sequence: Synthetic oligonucleotide
  Sense strand starting at position 3964 of SEQ ID NO: 1885237
gcuaguauacuacaugauu

SEQ ID NO: 2326923 - RNA, 19 nt, Artificial Sequence
  Description of Artificial Sequence: Synthetic oligonucleotide
  Antisense strand to SEQ ID NO: 2326922
aaucauguaguauacuagc

SEQ ID NO: 2326924 - RNA, 19 nt, Artificial Sequence
  Description of Artificial Sequence: Synthetic oligonucleotide
  Sense strand starting at position 9 of SEQ ID NO: 1885238
aauuaaauugacuguggua

SEQ ID NO: 2326925 - RNA, 19 nt, Artificial Sequence
  Description of Artificial Sequence: Synthetic oligonucleotide
  Antisense strand to SEQ ID NO: 2326924
uaccacagucaauuuaauu

SEQ ID NO: 2326926 - RNA, 19 nt, Artificial Sequence
  Description of Artificial Sequence: Synthetic oligonucleotide
  Sense strand starting at position 11 of SEQ ID NO: 1885238
uuaaauugacugugguauu

SEQ ID NO: 2326927 - RNA, 19 nt, Artificial Sequence
  Description of Artificial Sequence: Synthetic oligonucleotide
  Antisense strand to SEQ ID NO: 2326926
aauaccacagucaauuuaa

SEQ ID NO: 2326928 - RNA, 19 nt, Artificial Sequence
  Description of Artificial Sequence: Synthetic oligonucleotide
  Sense strand starting at position 59 of SEQ ID NO: 1885238
agagaaauaaugugggucu

SEQ ID NO: 2326929 - RNA, 19 nt, Artificial Sequence
  Description of Artificial Sequence: Synthetic oligonucleotide
  Antisense strand to SEQ ID NO: 2326928
agacccacauuauuucucu

SEQ ID NO: 2326930 - RNA, 19 nt, Artificial Sequence
  Description of Artificial Sequence: Synthetic oligonucleotide
  Sense strand starting at position 61 of SEQ ID NO: 1885238
agaaauaaugugggucuua

SEQ ID NO: 2326931 - RNA, 19 nt, Artificial Sequence
  Description of Artificial Sequence: Synthetic oligonucleotide
  Antisense strand to SEQ ID NO: 2326930
uaagacccacauuauuucu

SEQ ID NO: 2326932 - RNA, 19 nt, Artificial Sequence
  Description of Artificial Sequence: Synthetic oligonucleotide
  Sense strand starting at position 62 of SEQ ID NO: 1885238
gaaauaaugugggucuuaa

SEQ ID NO: 2326933 - RNA, 19 nt, Artificial Sequence
  Description of Artificial Sequence: Synthetic oligonucleotide
  Antisense strand to SEQ ID NO: 2326932
uuaagacccacauuauuuc

SEQ ID NO: 2326934 - RNA, 19 nt, Artificial Sequence
  Description of Artificial Sequence: Synthetic oligonucleotide
  Sense strand starting at position 122 of SEQ ID NO: 1885238
aguagugagaauuaauguu

SEQ ID NO: 2326935 - RNA, 19 nt, Artificial Sequence
  Description of Artificial Sequence: Synthetic oligonucleotide
  Antisense strand to SEQ ID NO: 2326934
aacauuaauucucacuacu

SEQ ID NO: 2326936 - RNA, 19 nt, Artificial Sequence
  Description of Artificial Sequence: Synthetic oligonucleotide
  Sense strand starting at position 527 of SEQ ID NO: 1885238
uguauauacucacuuguaa

SEQ ID NO: 2326937 - RNA, 19 nt, Artificial Sequence
  Description of Artificial Sequence: Synthetic oligonucleotide
  Antisense strand to SEQ ID NO: 2326936
uuacaagugaguauauaca

SEQ ID NO: 2326938 - RNA, 19 nt, Artificial Sequence
  Description of Artificial Sequence: Synthetic oligonucleotide
  Sense strand starting at position 861 of SEQ ID NO: 1885238
cccacucugcuugggaauu

SEQ ID NO: 2326939 - RNA, 19 nt, Artificial Sequence
  Description of Artificial Sequence: Synthetic oligonucleotide
  Antisense strand to SEQ ID NO: 2326938
aauucccaagcagaguggg

SEQ ID NO: 2326940 - RNA, 19 nt, Artificial Sequence
  Description of Artificial Sequence: Synthetic oligonucleotide
  Sense strand starting at position 943 of SEQ ID NO: 1885238
guaauacuccagugauaaa

SEQ ID NO: 2326941 - RNA, 19 nt, Artificial Sequence
  Description of Artificial Sequence: Synthetic oligonucleotide
  Antisense strand to SEQ ID NO: 2326940
uuuaucacuggaguauuac

SEQ ID NO: 2326942 - RNA, 19 nt, Artificial Sequence
  Description of Artificial Sequence: Synthetic oligonucleotide
  Sense strand starting at position 1078 of SEQ ID NO: 1885238
acucaacguuucucuagaa

SEQ ID NO: 2326943 - RNA, 19 nt, Artificial Sequence
  Description of Artificial Sequence: Synthetic oligonucleotide
  Antisense strand to SEQ ID NO: 2326942
uucuagagaaacguugagu

SEQ ID NO: 2326944 - RNA, 19 nt, Artificial Sequence
  Description of Artificial Sequence: Synthetic oligonucleotide
  Sense strand starting at position 1079 of SEQ ID NO: 1885238
cucaacguuucucuagaaa

SEQ ID NO: 2326945 - RNA, 19 nt, Artificial Sequence
  Description of Artificial Sequence: Synthetic oligonucleotide
  Antisense strand to SEQ ID NO: 2326944
uuucuagagaaacguugag

SEQ ID NO: 2326946 - RNA, 19 nt, Artificial Sequence
  Description of Artificial Sequence: Synthetic oligonucleotide
  Sense strand starting at position 1082 of SEQ ID NO: 1885238
aacguuucucuagaaagug

SEQ ID NO: 2326947 - RNA, 19 nt, Artificial Sequence
  Description of Artificial Sequence: Synthetic oligonucleotide
  Antisense strand to SEQ ID NO: 2326946
cacuuucuagagaaacguu

SEQ ID NO: 2326948 - RNA, 19 nt, Artificial Sequence
  Description of Artificial Sequence: Synthetic oligonucleotide
  Sense strand starting at position 1285 of SEQ ID NO: 1885238
ucacgucaaguuugagaua

SEQ ID NO: 2326949 - RNA, 19 nt, Artificial Sequence
  Description of Artificial Sequence: Synthetic oligonucleotide
  Antisense strand to SEQ ID NO: 2326948
uaucucaaacuugacguga

SEQ ID NO: 2326950 - RNA, 19 nt, Artificial Sequence
  Description of Artificial Sequence: Synthetic oligonucleotide
  Sense strand starting at position 1321 of SEQ ID NO: 1885238
ugaguaggcaauugguaaa

SEQ ID NO: 2326951 - RNA, 19 nt, Artificial Sequence
  Description of Artificial Sequence: Synthetic oligonucleotide
  Antisense strand to SEQ ID NO: 2326950
uuuaccaauugccuacuca

SEQ ID NO: 2326952 - RNA, 19 nt, Artificial Sequence
  Description of Artificial Sequence: Synthetic oligonucleotide
  Sense strand starting at position 1387 of SEQ ID NO: 1885238
uggagugaguauucugagu

SEQ ID NO: 2326953 - RNA, 19 nt, Artificial Sequence
  Description of Artificial Sequence: Synthetic oligonucleotide
  Antisense strand to SEQ ID NO: 2326952
acucagaauacucacucca

SEQ ID NO: 2326954 - RNA, 19 nt, Artificial Sequence
  Description of Artificial Sequence: Synthetic oligonucleotide
  Sense strand starting at position 1392 of SEQ ID NO: 1885238
ugaguauucugaguuccug

SEQ ID NO: 2326955 - RNA, 19 nt, Artificial Sequence
  Description of Artificial Sequence: Synthetic oligonucleotide
  Antisense strand to SEQ ID NO: 2326954
caggaacucagaauacuca

SEQ ID NO: 2326956 - RNA, 19 nt, Artificial Sequence
  Description of Artificial Sequence: Synthetic oligonucleotide
  Sense strand starting at position 1400 of SEQ ID NO: 1885238
cugaguuccugucucuaaa

SEQ ID NO: 2326957 - RNA, 19 nt, Artificial Sequence
  Description of Artificial Sequence: Synthetic oligonucleotide
  Antisense strand to SEQ ID NO: 2326956
uuuagagacaggaacucag

SEQ ID NO: 2326958 - RNA, 19 nt, Artificial Sequence
  Description of Artificial Sequence: Synthetic oligonucleotide
  Sense strand starting at position 1403 of SEQ ID NO: 1885238
aguuccugucucuaaaggu

SEQ ID NO: 2326959 - RNA, 19 nt, Artificial Sequence
  Description of Artificial Sequence: Synthetic oligonucleotide
  Antisense strand to SEQ ID NO: 2326958
accuuuagagacaggaacu

SEQ ID NO: 2326960 - RNA, 19 nt, Artificial Sequence
  Description of Artificial Sequence: Synthetic oligonucleotide
  Sense strand starting at position 1412 of SEQ ID NO: 1885238
cucuaaaggugcucaaaua

SEQ ID NO: 2326961 - RNA, 19 nt, Artificial Sequence
  Description of Artificial Sequence: Synthetic oligonucleotide
  Antisense strand to SEQ ID NO: 2326960
uauuugagcaccuuuagag

SEQ ID NO: 2326962 - RNA, 19 nt, Artificial Sequence
  Description of Artificial Sequence: Synthetic oligonucleotide
  Sense strand starting at position 1466 of SEQ ID NO: 1885238
uguuacauagauugcaauu

SEQ ID NO: 2326963 - RNA, 19 nt, Artificial Sequence
  Description of Artificial Sequence: Synthetic oligonucleotide
  Antisense strand to SEQ ID NO: 2326962
aauugcaaucuauguaaca

SEQ ID NO: 2326964 - RNA, 19 nt, Artificial Sequence
  Description of Artificial Sequence: Synthetic oligonucleotide
  Sense strand starting at position 1477 of SEQ ID NO: 1885238
uugcaauucugauuugcgu

SEQ ID NO: 2326965 - RNA, 19 nt, Artificial Sequence
  Description of Artificial Sequence: Synthetic oligonucleotide
  Antisense strand to SEQ ID NO: 2326964
acgcaaaucagaauugcaa

SEQ ID NO: 2326966 - RNA, 19 nt, Artificial Sequence
  Description of Artificial Sequence: Synthetic oligonucleotide
  Sense strand starting at position 1484 of SEQ ID NO: 1885238
ucugauuugcguuggaaua

SEQ ID NO: 2326967 - RNA, 19 nt, Artificial Sequence
  Description of Artificial Sequence: Synthetic oligonucleotide
  Antisense strand to SEQ ID NO: 2326966
uauuccaacgcaaaucaga

SEQ ID NO: 2326968 - RNA, 19 nt, Artificial Sequence
  Description of Artificial Sequence: Synthetic oligonucleotide
  Sense strand starting at position 1505 of SEQ ID NO: 1885238
uuaccucugugauuccaga

SEQ ID NO: 2326969 - RNA, 19 nt, Artificial Sequence
  Description of Artificial Sequence: Synthetic oligonucleotide
  Antisense strand to SEQ ID NO: 2326968
ucuggaaucacagagguaa

SEQ ID NO: 2326970 - RNA, 19 nt, Artificial Sequence
  Description of Artificial Sequence: Synthetic oligonucleotide
  Sense strand starting at position 2709 of SEQ ID NO: 1885238
gugggaguugacggugaga

SEQ ID NO: 2326971 - RNA, 19 nt, Artificial Sequence
  Description of Artificial Sequence: Synthetic oligonucleotide
  Antisense strand to SEQ ID NO: 2326970
ucucaccgucaacucccac

SEQ ID NO: 2326972 - RNA, 19 nt, Artificial Sequence
  Description of Artificial Sequence: Synthetic oligonucleotide
  Sense strand starting at position 2711 of SEQ ID NO: 1885238
gggaguugacggugagaac

SEQ ID NO: 2326973 - RNA, 19 nt, Artificial Sequence
  Description of Artificial Sequence: Synthetic oligonucleotide
  Antisense strand to SEQ ID NO: 2326972
guucucaccgucaacuccc

SEQ ID NO: 2326974 - RNA, 19 nt, Artificial Sequence
  Description of Artificial Sequence: Synthetic oligonucleotide
  Sense strand starting at position 2836 of SEQ ID NO: 1885238
accugaaugacggguuaau

SEQ ID NO: 2326975 - RNA, 19 nt, Artificial Sequence
  Description of Artificial Sequence: Synthetic oligonucleotide
  Antisense strand to SEQ ID NO: 2326974
auuaacccgucauucaggu

SEQ ID NO: 2326976 - RNA, 19 nt, Artificial Sequence
  Description of Artificial Sequence: Synthetic oligonucleotide
  Sense strand starting at position 3010 of SEQ ID NO: 1885238
aguuaagagucuuucuaau

SEQ ID NO: 2326977 - RNA, 19 nt, Artificial Sequence
  Description of Artificial Sequence: Synthetic oligonucleotide
  Antisense strand to SEQ ID NO: 2326976
auuagaaagacucuuaacu

SEQ ID NO: 2326978 - RNA, 19 nt, Artificial Sequence
  Description of Artificial Sequence: Synthetic oligonucleotide
  Sense strand starting at position 3012 of SEQ ID NO: 1885238
uuaagagucuuucuaaugg

SEQ ID NO: 2326979 - RNA, 19 nt, Artificial Sequence
  Description of Artificial Sequence: Synthetic oligonucleotide
  Antisense strand to SEQ ID NO: 2326978
ccauuagaaagacucuuaa

SEQ ID NO: 2326980 - RNA, 19 nt, Artificial Sequence
  Description of Artificial Sequence: Synthetic oligonucleotide
  Sense strand starting at position 3020 of SEQ ID NO: 1885238
cuuucuaaugggcaaacau

SEQ ID NO: 2326981 - RNA, 19 nt, Artificial Sequence
  Description of Artificial Sequence: Synthetic oligonucleotide
  Antisense strand to SEQ ID NO: 2326980
auguuugcccauuagaaag

SEQ ID NO: 2326982 - RNA, 19 nt, Artificial Sequence
  Description of Artificial Sequence: Synthetic oligonucleotide
  Sense strand starting at position 3114 of SEQ ID NO: 1885238
auuguuucccuugagacac

SEQ ID NO: 2326983 - RNA, 19 nt, Artificial Sequence
  Description of Artificial Sequence: Synthetic oligonucleotide
  Antisense strand to SEQ ID NO: 2326982
gugucucaagggaaacaau

SEQ ID NO: 2326984 - RNA, 19 nt, Artificial Sequence
  Description of Artificial Sequence: Synthetic oligonucleotide
  Sense strand starting at position 3215 of SEQ ID NO: 1885238
uugcuuaagacguaagaau

SEQ ID NO: 2326985 - RNA, 19 nt, Artificial Sequence
  Description of Artificial Sequence: Synthetic oligonucleotide
  Antisense strand to SEQ ID NO: 2326984
auucuuacgucuuaagcaa

SEQ ID NO: 2326986 - RNA, 19 nt, Artificial Sequence
  Description of Artificial Sequence: Synthetic oligonucleotide
  Sense strand starting at position 3334 of SEQ ID NO: 1885238
gacauuuguuuagauaaug

SEQ ID NO: 2326987 - RNA, 19 nt, Artificial Sequence
  Description of Artificial Sequence: Synthetic oligonucleotide
  Antisense strand to SEQ ID NO: 2326986
cauuaucuaaacaaauguc

SEQ ID NO: 2326988 - RNA, 19 nt, Artificial Sequence
  Description of Artificial Sequence: Synthetic oligonucleotide
  Sense strand starting at position 3342 of SEQ ID NO: 1885238
uuuagauaaugucuugguu

SEQ ID NO: 2326989 - RNA, 19 nt, Artificial Sequence
  Description of Artificial Sequence: Synthetic oligonucleotide
  Antisense strand to SEQ ID NO: 2326988
aaccaagacauuaucuaaa

SEQ ID NO: 2326990 - RNA, 19 nt, Artificial Sequence
  Description of Artificial Sequence: Synthetic oligonucleotide
  Sense strand starting at position 3346 of SEQ ID NO: 1885238
gauaaugucuugguuguga

SEQ ID NO: 2326991 - RNA, 19 nt, Artificial Sequence
  Description of Artificial Sequence: Synthetic oligonucleotide
  Antisense strand to SEQ ID NO: 2326990
ucacaaccaagacauuauc

SEQ ID NO: 2326992 - RNA, 19 nt, Artificial Sequence
  Description of Artificial Sequence: Synthetic oligonucleotide
  Sense strand starting at position 3348 of SEQ ID NO: 1885238
uaaugucuugguugugaga

SEQ ID NO: 2326993 - RNA, 19 nt, Artificial Sequence
  Description of Artificial Sequence: Synthetic oligonucleotide
  Antisense strand to SEQ ID NO: 2326992
ucucacaaccaagacauua

SEQ ID NO: 2326994 - RNA, 19 nt, Artificial Sequence
  Description of Artificial Sequence: Synthetic oligonucleotide
  Sense strand starting at position 3355 of SEQ ID NO: 1885238
uugguugugagagacaauu

SEQ ID NO: 2326995 - RNA, 19 nt, Artificial Sequence
  Description of Artificial Sequence: Synthetic oligonucleotide
  Antisense strand to SEQ ID NO: 2326994
aauugucucucacaaccaa

SEQ ID NO: 2326996 - RNA, 19 nt, Artificial Sequence
  Description of Artificial Sequence: Synthetic oligonucleotide
  Sense strand starting at position 3397 of SEQ ID NO: 1885238
ucuguugugagacagcuau

SEQ ID NO: 2326997 - RNA, 19 nt, Artificial Sequence
  Description of Artificial Sequence: Synthetic oligonucleotide
  Antisense strand to SEQ ID NO: 2326996
auagcugucucacaacaga

SEQ ID NO: 2326998 - RNA, 19 nt, Artificial Sequence
  Description of Artificial Sequence: Synthetic oligonucleotide
  Sense strand starting at position 3403 of SEQ ID NO: 1885238
gugagacagcuauaauauu

SEQ ID NO: 2326999 - RNA, 19 nt, Artificial Sequence
  Description of Artificial Sequence: Synthetic oligonucleotide
  Antisense strand to SEQ ID NO: 2326998
aauauuauagcugucucac

SEQ ID NO: 2327000 - RNA, 19 nt, Artificial Sequence
  Description of Artificial Sequence: Synthetic oligonucleotide
  Sense strand starting at position 3575 of SEQ ID NO: 1885238
ccaagugauguugauagua

SEQ ID NO: 2327001 - RNA, 19 nt, Artificial Sequence
  Description of Artificial Sequence: Synthetic oligonucleotide
  Antisense strand to SEQ ID NO: 2327000
uacuaucaacaucacuugg

SEQ ID NO: 2327002 - RNA, 19 nt, Artificial Sequence
  Description of Artificial Sequence: Synthetic oligonucleotide
  Sense strand starting at position 3761 of SEQ ID NO: 1885238
aaggaaagucugugauacu

SEQ ID NO: 2327003 - RNA, 19 nt, Artificial Sequence
  Description of Artificial Sequence: Synthetic oligonucleotide
  Antisense strand to SEQ ID NO: 2327002
aguaucacagacuuuccuu

SEQ ID NO: 2327004 - RNA, 19 nt, Artificial Sequence
  Description of Artificial Sequence: Synthetic oligonucleotide
  Sense strand starting at position 188 of SEQ ID NO: 1885239
guuaguuauuucuuuaguc

SEQ ID NO: 2327005 - RNA, 19 nt, Artificial Sequence
  Description of Artificial Sequence: Synthetic oligonucleotide
  Antisense strand to SEQ ID NO: 2327004
gacuaaagaaauaacuaac

SEQ ID NO: 2327006 - RNA, 19 nt, Artificial Sequence
  Description of Artificial Sequence: Synthetic oligonucleotide
  Sense strand starting at position 283 of SEQ ID NO: 1885239
gcaauuugcuaguuguuag

SEQ ID NO: 2327007 - RNA, 19 nt, Artificial Sequence
  Description of Artificial Sequence: Synthetic oligonucleotide
  Antisense strand to SEQ ID NO: 2327006
cuaacaacuagcaaauugc

SEQ ID NO: 2327008 - RNA, 19 nt, Artificial Sequence
  Description of Artificial Sequence: Synthetic oligonucleotide
  Sense strand starting at position 286 of SEQ ID NO: 1885239
auuugcuaguuguuagaca

SEQ ID NO: 2327009 - RNA, 19 nt, Artificial Sequence
  Description of Artificial Sequence: Synthetic oligonucleotide
  Antisense strand to SEQ ID NO: 2327008
ugucuaacaacuagcaaau

SEQ ID NO: 2327010 - RNA, 19 nt, Artificial Sequence
  Description of Artificial Sequence: Synthetic oligonucleotide
  Sense strand starting at position 345 of SEQ ID NO: 1885239
uguaaaguggcauacucau

SEQ ID NO: 2327011 - RNA, 19 nt, Artificial Sequence
  Description of Artificial Sequence: Synthetic oligonucleotide
  Antisense strand to SEQ ID NO: 2327010
augaguaugccacuuuaca

SEQ ID NO: 2327012 - RNA, 19 nt, Artificial Sequence
  Description of Artificial Sequence: Synthetic oligonucleotide
  Sense strand starting at position 813 of SEQ ID NO: 1885239
gugugcuuguugaugguca

SEQ ID NO: 2327013 - RNA, 19 nt, Artificial Sequence
  Description of Artificial Sequence: Synthetic oligonucleotide
  Antisense strand to SEQ ID NO: 2327012
ugaccaucaacaagcacac

SEQ ID NO: 2327014 - RNA, 19 nt, Artificial Sequence
  Description of Artificial Sequence: Synthetic oligonucleotide
  Sense strand starting at position 897 of SEQ ID NO: 1885239
gaaugcuauaaggguggua

SEQ ID NO: 2327015 - RNA, 19 nt, Artificial Sequence
  Description of Artificial Sequence: Synthetic oligonucleotide
  Antisense strand to SEQ ID NO: 2327014
uaccacccuuauagcauuc

SEQ ID NO: 2327016 - RNA, 19 nt, Artificial Sequence
  Description of Artificial Sequence: Synthetic oligonucleotide
  Sense strand starting at position 899 of SEQ ID NO: 1885239
augcuauaagggugguaaa

SEQ ID NO: 2327017 - RNA, 19 nt, Artificial Sequence
  Description of Artificial Sequence: Synthetic oligonucleotide
  Antisense strand to SEQ ID NO: 2327016
uuuaccacccuuauagcau

SEQ ID NO: 2327018 - RNA, 19 nt, Artificial Sequence
  Description of Artificial Sequence: Synthetic oligonucleotide
  Sense strand starting at position 1232 of SEQ ID NO: 1885239
uuggcauucccacaaguaa

SEQ ID NO: 2327019 - RNA, 19 nt, Artificial Sequence
  Description of Artificial Sequence: Synthetic oligonucleotide
  Antisense strand to SEQ ID NO: 2327018
uuacuugugggaaugccaa

SEQ ID NO: 2327020 - RNA, 19 nt, Artificial Sequence
  Description of Artificial Sequence: Synthetic oligonucleotide
  Sense strand starting at position 1282 of SEQ ID NO: 1885239
uggcaauaucuugacagug

SEQ ID NO: 2327021 - RNA, 19 nt, Artificial Sequence
  Description of Artificial Sequence: Synthetic oligonucleotide
  Antisense strand to SEQ ID NO: 2327020
cacugucaagauauugcca

SEQ ID NO: 2327022 - RNA, 19 nt, Artificial Sequence
  Description of Artificial Sequence: Synthetic oligonucleotide
  Sense strand starting at position 1287 of SEQ ID NO: 1885239
auaucuugacagugauuac

SEQ ID NO: 2327023 - RNA, 19 nt, Artificial Sequence
  Description of Artificial Sequence: Synthetic oligonucleotide
  Antisense strand to SEQ ID NO: 2327022
guaaucacugucaagauau

SEQ ID NO: 2327024 - RNA, 19 nt, Artificial Sequence
  Description of Artificial Sequence: Synthetic oligonucleotide
  Sense strand starting at position 1375 of SEQ ID NO: 1885239
ccaauaucccuuuggagaa

SEQ ID NO: 2327025 - RNA, 19 nt, Artificial Sequence
  Description of Artificial Sequence: Synthetic oligonucleotide
  Antisense strand to SEQ ID NO: 2327024
uucuccaaagggauauugg

SEQ ID NO: 2327026 - RNA, 19 nt, Artificial Sequence
  Description of Artificial Sequence: Synthetic oligonucleotide
  Sense strand starting at position 1441 of SEQ ID NO: 1885239
agaguuuccauaggacagu

SEQ ID NO: 2327027 - RNA, 19 nt, Artificial Sequence
  Description of Artificial Sequence: Synthetic oligonucleotide
  Antisense strand to SEQ ID NO: 2327026
acuguccuauggaaacucu

SEQ ID NO: 2327028 - RNA, 19 nt, Artificial Sequence
  Description of Artificial Sequence: Synthetic oligonucleotide
  Sense strand starting at position 1515 of SEQ ID NO: 1885239
aaugaagauuguguauucu

SEQ ID NO: 2327029 - RNA, 19 nt, Artificial Sequence
  Description of Artificial Sequence: Synthetic oligonucleotide
  Antisense strand to SEQ ID NO: 2327028
agaauacacaaucuucauu

SEQ ID NO: 2327030 - RNA, 19 nt, Artificial Sequence
  Description of Artificial Sequence: Synthetic oligonucleotide
  Sense strand starting at position 1519 of SEQ ID NO: 1885239
aagauuguguauucucaga

SEQ ID NO: 2327031 - RNA, 19 nt, Artificial Sequence
  Description of Artificial Sequence: Synthetic oligonucleotide
  Antisense strand to SEQ ID NO: 2327030
ucugagaauacacaaucuu

SEQ ID NO: 2327032 - RNA, 19 nt, Artificial Sequence
  Description of Artificial Sequence: Synthetic oligonucleotide
  Sense strand starting at position 1616 of SEQ ID NO: 1885239
auuagcuuucuauagaguu

SEQ ID NO: 2327033 - RNA, 19 nt, Artificial Sequence
  Description of Artificial Sequence: Synthetic oligonucleotide
  Antisense strand to SEQ ID NO: 2327032
aacucuauagaaagcuaau

SEQ ID NO: 2327034 - RNA, 19 nt, Artificial Sequence
  Description of Artificial Sequence: Synthetic oligonucleotide
  Sense strand starting at position 2274 of SEQ ID NO: 1885239
agacaugagccaugaaguc

SEQ ID NO: 2327035 - RNA, 19 nt, Artificial Sequence
  Description of Artificial Sequence: Synthetic oligonucleotide
  Antisense strand to SEQ ID NO: 2327034
gacuucauggcucaugucu

SEQ ID NO: 2327036 - RNA, 19 nt, Artificial Sequence
  Description of Artificial Sequence: Synthetic oligonucleotide
  Sense strand starting at position 2455 of SEQ ID NO: 1885239
acagaaguuugccuugaaa

SEQ ID NO: 2327037 - RNA, 19 nt, Artificial Sequence
  Description of Artificial Sequence: Synthetic oligonucleotide
  Antisense strand to SEQ ID NO: 2327036
uuucaaggcaaacuucugu

SEQ ID NO: 2327038 - RNA, 19 nt, Artificial Sequence
  Description of Artificial Sequence: Synthetic oligonucleotide
  Sense strand starting at position 2458 of SEQ ID NO: 1885239
gaaguuugccuugaaacuu

SEQ ID NO: 2327039 - RNA, 19 nt, Artificial Sequence
  Description of Artificial Sequence: Synthetic oligonucleotide
  Antisense strand to SEQ ID NO: 2327038
aaguuucaaggcaaacuuc

SEQ ID NO: 2327040 - RNA, 19 nt, Artificial Sequence
  Description of Artificial Sequence: Synthetic oligonucleotide
  Sense strand starting at position 2590 of SEQ ID NO: 1885239
agguucuuccaccagugau

SEQ ID NO: 2327041 - RNA, 19 nt, Artificial Sequence
  Description of Artificial Sequence: Synthetic oligonucleotide
  Antisense strand to SEQ ID NO: 2327040
aucacugguggaagaaccu

SEQ ID NO: 2327042 - RNA, 19 nt, Artificial Sequence
  Description of Artificial Sequence: Synthetic oligonucleotide
  Sense strand starting at position 2673 of SEQ ID NO: 1885239
gucucuucggaacacaauu

SEQ ID NO: 2327043 - RNA, 19 nt, Artificial Sequence
  Description of Artificial Sequence: Synthetic oligonucleotide
  Antisense strand to SEQ ID NO: 2327042
aauuguguuccgaagagac

SEQ ID NO: 2327044 - RNA, 19 nt, Artificial Sequence
  Description of Artificial Sequence: Synthetic oligonucleotide
  Sense strand starting at position 2689 of SEQ ID NO: 1885239
auuugaucuuuggacaaau

SEQ ID NO: 2327045 - RNA, 19 nt, Artificial Sequence
  Description of Artificial Sequence: Synthetic oligonucleotide
  Antisense strand to SEQ ID NO: 2327044
auuuguccaaagaucaaau

SEQ ID NO: 2327046 - RNA, 19 nt, Artificial Sequence
  Description of Artificial Sequence: Synthetic oligonucleotide
  Sense strand starting at position 2702 of SEQ ID NO: 1885239
acaaauaugugccuccaga

SEQ ID NO: 2327047 - RNA, 19 nt, Artificial Sequence
  Description of Artificial Sequence: Synthetic oligonucleotide
  Antisense strand to SEQ ID NO: 2327046
ucuggaggcacauauuugu

SEQ ID NO: 2327048 - RNA, 19 nt, Artificial Sequence
  Description of Artificial Sequence: Synthetic oligonucleotide
  Sense strand starting at position 2751 of SEQ ID NO: 1885239
ugucuuauugcauugcagu

SEQ ID NO: 2327049 - RNA, 19 nt, Artificial Sequence
  Description of Artificial Sequence: Synthetic oligonucleotide
  Antisense strand to SEQ ID NO: 2327048
acugcaaugcaauaagaca

SEQ ID NO: 2327050 - RNA, 19 nt, Artificial Sequence
  Description of Artificial Sequence: Synthetic oligonucleotide
  Sense strand starting at position 2797 of SEQ ID NO: 1885239
acuuaaaugcaugauagua

SEQ ID NO: 2327051 - RNA, 19 nt, Artificial Sequence
  Description of Artificial Sequence: Synthetic oligonucleotide
  Antisense strand to SEQ ID NO: 2327050
uacuaucaugcauuuaagu

SEQ ID NO: 2327052 - RNA, 19 nt, Artificial Sequence
  Description of Artificial Sequence: Synthetic oligonucleotide
  Sense strand starting at position 2920 of SEQ ID NO: 1885239
gugguuaugaggcagaaau

SEQ ID NO: 2327053 - RNA, 19 nt, Artificial Sequence
  Description of Artificial Sequence: Synthetic oligonucleotide
  Antisense strand to SEQ ID NO: 2327052
auuucugccucauaaccac

SEQ ID NO: 2327054 - RNA, 19 nt, Artificial Sequence
  Description of Artificial Sequence: Synthetic oligonucleotide
  Sense strand starting at position 2927 of SEQ ID NO: 1885239
ugaggcagaaauuguuaaa

SEQ ID NO: 2327055 - RNA, 19 nt, Artificial Sequence
  Description of Artificial Sequence: Synthetic oligonucleotide
  Antisense strand to SEQ ID NO: 2327054
uuuaacaauuucugccuca

SEQ ID NO: 2327056 - RNA, 19 nt, Artificial Sequence
  Description of Artificial Sequence: Synthetic oligonucleotide
  Sense strand starting at position 2940 of SEQ ID NO: 1885239
guuaaaucaguggagcaga

SEQ ID NO: 2327057 - RNA, 19 nt, Artificial Sequence
  Description of Artificial Sequence: Synthetic oligonucleotide
  Antisense strand to SEQ ID NO: 2327056
ucugcuccacugauuuaac

SEQ ID NO: 2327058 - RNA, 19 nt, Artificial Sequence
  Description of Artificial Sequence: Synthetic oligonucleotide
  Sense strand starting at position 2994 of SEQ ID NO: 1885239
ugcuauaauggugaaugca

SEQ ID NO: 2327059 - RNA, 19 nt, Artificial Sequence
  Description of Artificial Sequence: Synthetic oligonucleotide
  Antisense strand to SEQ ID NO: 2327058
ugcauucaccauuauagca

SEQ ID NO: 2327060 - RNA, 19 nt, Artificial Sequence
  Description of Artificial Sequence: Synthetic oligonucleotide
  Sense strand starting at position 3025 of SEQ ID NO: 1885239
uuugucuaagccuauggaa

SEQ ID NO: 2327061 - RNA, 19 nt, Artificial Sequence
  Description of Artificial Sequence: Synthetic oligonucleotide
  Antisense strand to SEQ ID NO: 2327060
uuccauaggcuuagacaaa

SEQ ID NO: 2327062 - RNA, 19 nt, Artificial Sequence
  Description of Artificial Sequence: Synthetic oligonucleotide
  Sense strand starting at position 3044 of SEQ ID NO: 1885239
uguacaccaccauaaguua

SEQ ID NO: 2327063 - RNA, 19 nt, Artificial Sequence
  Description of Artificial Sequence: Synthetic oligonucleotide
  Antisense strand to SEQ ID NO: 2327062
uaacuuauggugguguaca

SEQ ID NO: 2327064 - RNA, 19 nt, Artificial Sequence
  Description of Artificial Sequence: Synthetic oligonucleotide
  Sense strand starting at position 3055 of SEQ ID NO: 1885239
auaaguuaacccuauugua

SEQ ID NO: 2327065 - RNA, 19 nt, Artificial Sequence
  Description of Artificial Sequence: Synthetic oligonucleotide
  Antisense strand to SEQ ID NO: 2327064
uacaauaggguuaacuuau

SEQ ID NO: 2327066 - RNA, 19 nt, Artificial Sequence
  Description of Artificial Sequence: Synthetic oligonucleotide
  Sense strand starting at position 3212 of SEQ ID NO: 1885239
cuaccucauuugucuguga

SEQ ID NO: 2327067 - RNA, 19 nt, Artificial Sequence
  Description of Artificial Sequence: Synthetic oligonucleotide
  Antisense strand to SEQ ID NO: 2327066
ucacagacaaaugagguag

SEQ ID NO: 2327068 - RNA, 19 nt, Artificial Sequence
  Description of Artificial Sequence: Synthetic oligonucleotide
  Sense strand starting at position 3216 of SEQ ID NO: 1885239
cucauuugucugugaaccu

SEQ ID NO: 2327069 - RNA, 19 nt, Artificial Sequence
  Description of Artificial Sequence: Synthetic oligonucleotide
  Antisense strand to SEQ ID NO: 2327068
agguucacagacaaaugag

SEQ ID NO: 2327070 - RNA, 19 nt, Artificial Sequence
  Description of Artificial Sequence: Synthetic oligonucleotide
  Sense strand starting at position 3296 of SEQ ID NO: 1885239
cuuuguuaggguuauuaug

SEQ ID NO: 2327071 - RNA, 19 nt, Artificial Sequence
  Description of Artificial Sequence: Synthetic oligonucleotide
  Antisense strand to SEQ ID NO: 2327070
cauaauaacccuaacaaag

SEQ ID NO: 2327072 - RNA, 19 nt, Artificial Sequence
  Description of Artificial Sequence: Synthetic oligonucleotide
  Sense strand starting at position 3302 of SEQ ID NO: 1885239
uaggguuauuaugucuaga

SEQ ID NO: 2327073 - RNA, 19 nt, Artificial Sequence
  Description of Artificial Sequence: Synthetic oligonucleotide
  Antisense strand to SEQ ID NO: 2327072
ucuagacauaauaacccua

SEQ ID NO: 2327074 - RNA, 19 nt, Artificial Sequence
  Description of Artificial Sequence: Synthetic oligonucleotide
  Sense strand starting at position 3304 of SEQ ID NO: 1885239
ggguuauuaugucuagagg

SEQ ID NO: 2327075 - RNA, 19 nt, Artificial Sequence
  Description of Artificial Sequence: Synthetic oligonucleotide
  Antisense strand to SEQ ID NO: 2327074
ccucuagacauaauaaccc

SEQ ID NO: 2327076 - RNA, 19 nt, Artificial Sequence
  Description of Artificial Sequence: Synthetic oligonucleotide
  Sense strand starting at position 3305 of SEQ ID NO: 1885239
gguuauuaugucuagagga

SEQ ID NO: 2327077 - RNA, 19 nt, Artificial Sequence
  Description of Artificial Sequence: Synthetic oligonucleotide
  Antisense strand to SEQ ID NO: 2327076
uccucuagacauaauaacc

SEQ ID NO: 2327078 - RNA, 19 nt, Artificial Sequence
  Description of Artificial Sequence: Synthetic oligonucleotide
  Sense strand starting at position 3788 of SEQ ID NO: 1885239
ugauauugaguuuacuugu

SEQ ID NO: 2327079 - RNA, 19 nt, Artificial Sequence
  Description of Artificial Sequence: Synthetic oligonucleotide
  Antisense strand to SEQ ID NO: 2327078
acaaguaaacucaauauca

SEQ ID NO: 2327080 - RNA, 19 nt, Artificial Sequence
  Description of Artificial Sequence: Synthetic oligonucleotide
  Sense strand starting at position 3796 of SEQ ID NO: 1885239
aguuuacuuguauagaaug

SEQ ID NO: 2327081 - RNA, 19 nt, Artificial Sequence
  Description of Artificial Sequence: Synthetic oligonucleotide
  Antisense strand to SEQ ID NO: 2327080
cauucuauacaaguaaacu

SEQ ID NO: 2327082 - RNA, 19 nt, Artificial Sequence
  Description of Artificial Sequence: Synthetic oligonucleotide
  Sense strand starting at position 3812 of SEQ ID NO: 1885239
augcucauugcggagauga

SEQ ID NO: 2327083 - RNA, 19 nt, Artificial Sequence
  Description of Artificial Sequence: Synthetic oligonucleotide
  Antisense strand to SEQ ID NO: 2327082
ucaucuccgcaaugagcau

SEQ ID NO: 2327084 - RNA, 19 nt, Artificial Sequence
  Description of Artificial Sequence: Synthetic oligonucleotide
  Sense strand starting at position 132 of SEQ ID NO: 1885240
uguguauagacauaucguu

SEQ ID NO: 2327085 - RNA, 19 nt, Artificial Sequence
  Description of Artificial Sequence: Synthetic oligonucleotide
  Antisense strand to SEQ ID NO: 2327084
aacgauaugucuauacaca

SEQ ID NO: 2327086 - RNA, 19 nt, Artificial Sequence
  Description of Artificial Sequence: Synthetic oligonucleotide
  Sense strand starting at position 272 of SEQ ID NO: 1885240
aggucuagugagcauguau

SEQ ID NO: 2327087 - RNA, 19 nt, Artificial Sequence
  Description of Artificial Sequence: Synthetic oligonucleotide
  Antisense strand to SEQ ID NO: 2327086
auacaugcucacuagaccu

SEQ ID NO: 2327088 - RNA, 19 nt, Artificial Sequence
  Description of Artificial Sequence: Synthetic oligonucleotide
  Sense strand starting at position 285 of SEQ ID NO: 1885240
auguauugaacuggucaga

SEQ ID NO: 2327089 - RNA, 19 nt, Artificial Sequence
  Description of Artificial Sequence: Synthetic oligonucleotide
  Antisense strand to SEQ ID NO: 2327088
ucugaccaguucaauacau

SEQ ID NO: 2327090 - RNA, 19 nt, Artificial Sequence
  Description of Artificial Sequence: Synthetic oligonucleotide
  Sense strand starting at position 447 of SEQ ID NO: 1885240
ugugcucuucugucgaguu

SEQ ID NO: 2327091 - RNA, 19 nt, Artificial Sequence
  Description of Artificial Sequence: Synthetic oligonucleotide
  Antisense strand to SEQ ID NO: 2327090
aacucgacagaagagcaca

SEQ ID NO: 2327092 - RNA, 19 nt, Artificial Sequence
  Description of Artificial Sequence: Synthetic oligonucleotide
  Sense strand starting at position 605 of SEQ ID NO: 1885240
agaaacaucucucuguugu

SEQ ID NO: 2327093 - RNA, 19 nt, Artificial Sequence
  Description of Artificial Sequence: Synthetic oligonucleotide
  Antisense strand to SEQ ID NO: 2327092
acaacagagagauguuucu

SEQ ID NO: 2327094 - RNA, 19 nt, Artificial Sequence
  Description of Artificial Sequence: Synthetic oligonucleotide
  Sense strand starting at position 654 of SEQ ID NO: 1885240
ccacuccuguccuucuaga

SEQ ID NO: 2327095 - RNA, 19 nt, Artificial Sequence
  Description of Artificial Sequence: Synthetic oligonucleotide
  Antisense strand to SEQ ID NO: 2327094
ucuagaaggacaggagugg

SEQ ID NO: 2327096 - RNA, 19 nt, Artificial Sequence
  Description of Artificial Sequence: Synthetic oligonucleotide
  Sense strand starting at position 734 of SEQ ID NO: 1885240
uuaauauuagguuggugga

SEQ ID NO: 2327097 - RNA, 19 nt, Artificial Sequence
  Description of Artificial Sequence: Synthetic oligonucleotide
  Antisense strand to SEQ ID NO: 2327096
uccaccaaccuaauauuaa

SEQ ID NO: 2327098 - RNA, 19 nt, Artificial Sequence
  Description of Artificial Sequence: Synthetic oligonucleotide
  Sense strand starting at position 847 of SEQ ID NO: 1885240
cguggcaaaccucaggaua

SEQ ID NO: 2327099 - RNA, 19 nt, Artificial Sequence
  Description of Artificial Sequence: Synthetic oligonucleotide
  Antisense strand to SEQ ID NO: 2327098
uauccugagguuugccacg

SEQ ID NO: 2327100 - RNA, 19 nt, Artificial Sequence
  Description of Artificial Sequence: Synthetic oligonucleotide
  Sense strand starting at position 908 of SEQ ID NO: 1885240
agagacugauguucagagu

SEQ ID NO: 2327101 - RNA, 19 nt, Artificial Sequence
  Description of Artificial Sequence: Synthetic oligonucleotide
  Antisense strand to SEQ ID NO: 2327100
acucugaacaucagucucu

SEQ ID NO: 2327102 - RNA, 19 nt, Artificial Sequence
  Description of Artificial Sequence: Synthetic oligonucleotide
  Sense strand starting at position 1002 of SEQ ID NO: 1885240
gcucucuagccagaucauu

SEQ ID NO: 2327103 - RNA, 19 nt, Artificial Sequence
  Description of Artificial Sequence: Synthetic oligonucleotide
  Antisense strand to SEQ ID NO: 2327102
aaugaucuggcuagagagc

SEQ ID NO: 2327104 - RNA, 19 nt, Artificial Sequence
  Description of Artificial Sequence: Synthetic oligonucleotide
  Sense strand starting at position 1991 of SEQ ID NO: 1885240
ucacgagggucguuagaaa

SEQ ID NO: 2327105 - RNA, 19 nt, Artificial Sequence
  Description of Artificial Sequence: Synthetic oligonucleotide
  Antisense strand to SEQ ID NO: 2327104
uuucuaacgacccucguga

SEQ ID NO: 2327106 - RNA, 19 nt, Artificial Sequence
  Description of Artificial Sequence: Synthetic oligonucleotide
  Sense strand starting at position 2175 of SEQ ID NO: 1885240
augcaacuccaugggaauu

SEQ ID NO: 2327107 - RNA, 19 nt, Artificial Sequence
  Description of Artificial Sequence: Synthetic oligonucleotide
  Antisense strand to SEQ ID NO: 2327106
aauucccauggaguugcau

SEQ ID NO: 2327108 - RNA, 19 nt, Artificial Sequence
  Description of Artificial Sequence: Synthetic oligonucleotide
  Sense strand starting at position 2248 of SEQ ID NO: 1885240
ugagcaacauguucuuauu

SEQ ID NO: 2327109 - RNA, 19 nt, Artificial Sequence
  Description of Artificial Sequence: Synthetic oligonucleotide
  Antisense strand to SEQ ID NO: 2327108
aauaagaacauguugcuca

SEQ ID NO: 2327110 - RNA, 19 nt, Artificial Sequence
  Description of Artificial Sequence: Synthetic oligonucleotide
  Sense strand starting at position 2425 of SEQ ID NO: 1885240
guggauuuguguuuguugu

SEQ ID NO: 2327111 - RNA, 19 nt, Artificial Sequence
  Description of Artificial Sequence: Synthetic oligonucleotide
  Antisense strand to SEQ ID NO: 2327110
acaacaaacacaaauccac

SEQ ID NO: 2327112 - RNA, 19 nt, Artificial Sequence
  Description of Artificial Sequence: Synthetic oligonucleotide
  Sense strand starting at position 2426 of SEQ ID NO: 1885240
uggauuuguguuuguuguu

SEQ ID NO: 2327113 - RNA, 19 nt, Artificial Sequence
  Description of Artificial Sequence: Synthetic oligonucleotide
  Antisense strand to SEQ ID NO: 2327112
aacaacaaacacaaaucca

SEQ ID NO: 2327114 - RNA, 19 nt, Artificial Sequence
  Description of Artificial Sequence: Synthetic oligonucleotide
  Sense strand starting at position 2427 of SEQ ID NO: 1885240
ggauuuguguuuguuguuu

SEQ ID NO: 2327115 - RNA, 19 nt, Artificial Sequence
  Description of Artificial Sequence: Synthetic oligonucleotide
  Antisense strand to SEQ ID NO: 2327114
aaacaacaaacacaaaucc

SEQ ID NO: 2327116 - RNA, 19 nt, Artificial Sequence
  Description of Artificial Sequence: Synthetic oligonucleotide
  Sense strand starting at position 2492 of SEQ ID NO: 1885240
uuugguguucuguauauau

SEQ ID NO: 2327117 - RNA, 19 nt, Artificial Sequence
  Description of Artificial Sequence: Synthetic oligonucleotide
  Antisense strand to SEQ ID NO: 2327116
auauauacagaacaccaaa

SEQ ID NO: 2327118 - RNA, 19 nt, Artificial Sequence
  Description of Artificial Sequence: Synthetic oligonucleotide
  Sense strand starting at position 2494 of SEQ ID NO: 1885240
ugguguucuguauauauug

SEQ ID NO: 2327119 - RNA, 19 nt, Artificial Sequence
  Description of Artificial Sequence: Synthetic oligonucleotide
  Antisense strand to SEQ ID NO: 2327118
caauauauacagaacacca

SEQ ID NO: 2327120 - RNA, 19 nt, Artificial Sequence
  Description of Artificial Sequence: Synthetic oligonucleotide
  Sense strand starting at position 2496 of SEQ ID NO: 1885240
guguucuguauauauugaa

SEQ ID NO: 2327121 - RNA, 19 nt, Artificial Sequence
  Description of Artificial Sequence: Synthetic oligonucleotide
  Antisense strand to SEQ ID NO: 2327120
uucaauauauacagaacac

SEQ ID NO: 2327122 - RNA, 19 nt, Artificial Sequence
  Description of Artificial Sequence: Synthetic oligonucleotide
  Sense strand starting at position 2609 of SEQ ID NO: 1885240
aucggagaccagugaucua

SEQ ID NO: 2327123 - RNA, 19 nt, Artificial Sequence
  Description of Artificial Sequence: Synthetic oligonucleotide
  Antisense strand to SEQ ID NO: 2327122
uagaucacuggucuccgau

SEQ ID NO: 2327124 - RNA, 19 nt, Artificial Sequence
  Description of Artificial Sequence: Synthetic oligonucleotide
  Sense strand starting at position 2622 of SEQ ID NO: 1885240
gaucuaaaggaacgguaua

SEQ ID NO: 2327125 - RNA, 19 nt, Artificial Sequence
  Description of Artificial Sequence: Synthetic oligonucleotide
  Antisense strand to SEQ ID NO: 2327124
uauaccguuccuuuagauc

SEQ ID NO: 2327126 - RNA, 19 nt, Artificial Sequence
  Description of Artificial Sequence: Synthetic oligonucleotide
  Sense strand starting at position 2661 of SEQ ID NO: 1885240
uucugaggucugcauuugu

SEQ ID NO: 2327127 - RNA, 19 nt, Artificial Sequence
  Description of Artificial Sequence: Synthetic oligonucleotide
  Antisense strand to SEQ ID NO: 2327126
acaaaugcagaccucagaa

SEQ ID NO: 2327128 - RNA, 19 nt, Artificial Sequence
  Description of Artificial Sequence: Synthetic oligonucleotide
  Sense strand starting at position 2714 of SEQ ID NO: 1885240
ggcaaugaauuccuccaua

SEQ ID NO: 2327129 - RNA, 19 nt, Artificial Sequence
  Description of Artificial Sequence: Synthetic oligonucleotide
  Antisense strand to SEQ ID NO: 2327128
uauggaggaauucauugcc

SEQ ID NO: 2327130 - RNA, 19 nt, Artificial Sequence
  Description of Artificial Sequence: Synthetic oligonucleotide
  Sense strand starting at position 2814 of SEQ ID NO: 1885240
guaauugccagaggaaguc

SEQ ID NO: 2327131 - RNA, 19 nt, Artificial Sequence
  Description of Artificial Sequence: Synthetic oligonucleotide
  Antisense strand to SEQ ID NO: 2327130
gacuuccucuggcaauuac

SEQ ID NO: 2327132 - RNA, 19 nt, Artificial Sequence
  Description of Artificial Sequence: Synthetic oligonucleotide
  Sense strand starting at position 2923 of SEQ ID NO: 1885240
gagaccuggguguggaaau

SEQ ID NO: 2327133 - RNA, 19 nt, Artificial Sequence
  Description of Artificial Sequence: Synthetic oligonucleotide
  Antisense strand to SEQ ID NO: 2327132
auuuccacacccaggucuc

SEQ ID NO: 2327134 - RNA, 19 nt, Artificial Sequence
  Description of Artificial Sequence: Synthetic oligonucleotide
  Sense strand starting at position 2972 of SEQ ID NO: 1885240
uauugagaguguccuauaa

SEQ ID NO: 2327135 - RNA, 19 nt, Artificial Sequence
  Description of Artificial Sequence: Synthetic oligonucleotide
  Antisense strand to SEQ ID NO: 2327134
uuauaggacacucucaaua

SEQ ID NO: 2327136 - RNA, 19 nt, Artificial Sequence
  Description of Artificial Sequence: Synthetic oligonucleotide
  Sense strand starting at position 2976 of SEQ ID NO: 1885240
gagaguguccuauaagcac

SEQ ID NO: 2327137 - RNA, 19 nt, Artificial Sequence
  Description of Artificial Sequence: Synthetic oligonucleotide
  Antisense strand to SEQ ID NO: 2327136
gugcuuauaggacacucuc

SEQ ID NO: 2327138 - RNA, 19 nt, Artificial Sequence
  Description of Artificial Sequence: Synthetic oligonucleotide
  Sense strand starting at position 2995 of SEQ ID NO: 1885240
ggugcugagccacauacuu

SEQ ID NO: 2327139 - RNA, 19 nt, Artificial Sequence
  Description of Artificial Sequence: Synthetic oligonucleotide
  Antisense strand to SEQ ID NO: 2327138
aaguauguggcucagcacc

SEQ ID NO: 2327140 - RNA, 19 nt, Artificial Sequence
  Description of Artificial Sequence: Synthetic oligonucleotide
  Sense strand starting at position 3005 of SEQ ID NO: 1885240
cacauacuuugggugauaa

SEQ ID NO: 2327141 - RNA, 19 nt, Artificial Sequence
  Description of Artificial Sequence: Synthetic oligonucleotide
  Antisense strand to SEQ ID NO: 2327140
uuaucacccaaaguaugug

SEQ ID NO: 2327142 - RNA, 19 nt, Artificial Sequence
  Description of Artificial Sequence: Synthetic oligonucleotide
  Sense strand starting at position 3006 of SEQ ID NO: 1885240
acauacuuugggugauaag

SEQ ID NO: 2327143 - RNA, 19 nt, Artificial Sequence
  Description of Artificial Sequence: Synthetic oligonucleotide
  Antisense strand to SEQ ID NO: 2327142
cuuaucacccaaaguaugu

SEQ ID NO: 2327144 - RNA, 19 nt, Artificial Sequence
  Description of Artificial Sequence: Synthetic oligonucleotide
  Sense strand starting at position 3076 of SEQ ID NO: 1885240
uguacauaccuguauauug

SEQ ID NO: 2327145 - RNA, 19 nt, Artificial Sequence
  Description of Artificial Sequence: Synthetic oligonucleotide
  Antisense strand to SEQ ID NO: 2327144
caauauacagguauguaca

SEQ ID NO: 2327146 - RNA, 19 nt, Artificial Sequence
  Description of Artificial Sequence: Synthetic oligonucleotide
  Sense strand starting at position 3119 of SEQ ID NO: 1885240
gugguagguaaccaaugua

SEQ ID NO: 2327147 - RNA, 19 nt, Artificial Sequence
  Description of Artificial Sequence: Synthetic oligonucleotide
  Antisense strand to SEQ ID NO: 2327146
uacauugguuaccuaccac

SEQ ID NO: 2327148 - RNA, 19 nt, Artificial Sequence
  Description of Artificial Sequence: Synthetic oligonucleotide
  Sense strand starting at position 3122 of SEQ ID NO: 1885240
guagguaaccaauguauag

SEQ ID NO: 2327149 - RNA, 19 nt, Artificial Sequence
  Description of Artificial Sequence: Synthetic oligonucleotide
  Antisense strand to SEQ ID NO: 2327148
cuauacauugguuaccuac

SEQ ID NO: 2327150 - RNA, 19 nt, Artificial Sequence
  Description of Artificial Sequence: Synthetic oligonucleotide
  Sense strand starting at position 3188 of SEQ ID NO: 1885240
ggaagaucuugcuugucua

SEQ ID NO: 2327151 - RNA, 19 nt, Artificial Sequence
  Description of Artificial Sequence: Synthetic oligonucleotide
  Antisense strand to SEQ ID NO: 2327150
uagacaagcaagaucuucc

SEQ ID NO: 2327152 - RNA, 19 nt, Artificial Sequence
  Description of Artificial Sequence: Synthetic oligonucleotide
  Sense strand starting at position 3448 of SEQ ID NO: 1885240
gguuaaaggcaggaucuuu

SEQ ID NO: 2327153 - RNA, 19 nt, Artificial Sequence
  Description of Artificial Sequence: Synthetic oligonucleotide
  Antisense strand to SEQ ID NO: 2327152
aaagauccugccuuuaacc

SEQ ID NO: 2327154 - RNA, 19 nt, Artificial Sequence
  Description of Artificial Sequence: Synthetic oligonucleotide
  Sense strand starting at position 3508 of SEQ ID NO: 1885240
gggagacuucuugguucca

SEQ ID NO: 2327155 - RNA, 19 nt, Artificial Sequence
  Description of Artificial Sequence: Synthetic oligonucleotide
  Antisense strand to SEQ ID NO: 2327154
uggaaccaagaagucuccc

SEQ ID NO: 2327156 - RNA, 19 nt, Artificial Sequence
  Description of Artificial Sequence: Synthetic oligonucleotide
  Sense strand starting at position 3510 of SEQ ID NO: 1885240
gagacuucuugguuccaga

SEQ ID NO: 2327157 - RNA, 19 nt, Artificial Sequence
  Description of Artificial Sequence: Synthetic oligonucleotide
  Antisense strand to SEQ ID NO: 2327156
ucuggaaccaagaagucuc

SEQ ID NO: 2327158 - RNA, 19 nt, Artificial Sequence
  Description of Artificial Sequence: Synthetic oligonucleotide
  Sense strand starting at position 3550 of SEQ ID NO: 1885240
uugucuaaucauuaguuga

SEQ ID NO: 2327159 - RNA, 19 nt, Artificial Sequence
  Description of Artificial Sequence: Synthetic oligonucleotide
  Antisense strand to SEQ ID NO: 2327158
ucaacuaaugauuagacaa

SEQ ID NO: 2327160 - RNA, 19 nt, Artificial Sequence
  Description of Artificial Sequence: Synthetic oligonucleotide
  Sense strand starting at position 3880 of SEQ ID NO: 1885240
uuguuaauaugcucaaaga

SEQ ID NO: 2327161 - RNA, 19 nt, Artificial Sequence
  Description of Artificial Sequence: Synthetic oligonucleotide
  Antisense strand to SEQ ID NO: 2327160
ucuuugagcauauuaacaa

SEQ ID NO: 2327162 - RNA, 19 nt, Artificial Sequence
  Description of Artificial Sequence: Synthetic oligonucleotide
  Sense strand starting at position 3881 of SEQ ID NO: 1885240
uguuaauaugcucaaagaa

SEQ ID NO: 2327163 - RNA, 19 nt, Artificial Sequence
  Description of Artificial Sequence: Synthetic oligonucleotide
  Antisense strand to SEQ ID NO: 2327162
uucuuugagcauauuaaca

SEQ ID NO: 2327164 - RNA, 19 nt, Artificial Sequence
  Description of Artificial Sequence: Synthetic oligonucleotide
  Sense strand starting at position 49 of SEQ ID NO: 1885241
acaugcauuuguguguaca

SEQ ID NO: 2327165 - RNA, 19 nt, Artificial Sequence
  Description of Artificial Sequence: Synthetic oligonucleotide
  Antisense strand to SEQ ID NO: 2327164
uguacacacaaaugcaugu

SEQ ID NO: 2327166 - RNA, 19 nt, Artificial Sequence
  Description of Artificial Sequence: Synthetic oligonucleotide
  Sense strand starting at position 50 of SEQ ID NO: 1885241
caugcauuuguguguacau

SEQ ID NO: 2327167 - RNA, 19 nt, Artificial Sequence
  Description of Artificial Sequence: Synthetic oligonucleotide
  Antisense strand to SEQ ID NO: 2327166
auguacacacaaaugcaug

SEQ ID NO: 2327168 - RNA, 19 nt, Artificial Sequence
  Description of Artificial Sequence: Synthetic oligonucleotide
  Sense strand starting at position 250 of SEQ ID NO: 1885241
uguguauagacauaucguu

SEQ ID NO: 2327169 - RNA, 19 nt, Artificial Sequence
  Description of Artificial Sequence: Synthetic oligonucleotide
  Antisense strand to SEQ ID NO: 2327168
aacgauaugucuauacaca

SEQ ID NO: 2327170 - RNA, 19 nt, Artificial Sequence
  Description of Artificial Sequence: Synthetic oligonucleotide
  Sense strand starting at position 390 of SEQ ID NO: 1885241
aggucuagugagcauguau

SEQ ID NO: 2327171 - RNA, 19 nt, Artificial Sequence
  Description of Artificial Sequence: Synthetic oligonucleotide
  Antisense strand to SEQ ID NO: 2327170
auacaugcucacuagaccu

SEQ ID NO: 2327172 - RNA, 19 nt, Artificial Sequence
  Description of Artificial Sequence: Synthetic oligonucleotide
  Sense strand starting at position 403 of SEQ ID NO: 1885241
auguauugaacuggucaga

SEQ ID NO: 2327173 - RNA, 19 nt, Artificial Sequence
  Description of Artificial Sequence: Synthetic oligonucleotide
  Antisense strand to SEQ ID NO: 2327172
ucugaccaguucaauacau

SEQ ID NO: 2327174 - RNA, 19 nt, Artificial Sequence
  Description of Artificial Sequence: Synthetic oligonucleotide
  Sense strand starting at position 565 of SEQ ID NO: 1885241
ugugcucuucugucgaguu

SEQ ID NO: 2327175 - RNA, 19 nt, Artificial Sequence
  Description of Artificial Sequence: Synthetic oligonucleotide
  Antisense strand to SEQ ID NO: 2327174
aacucgacagaagagcaca

SEQ ID NO: 2327176 - RNA, 19 nt, Artificial Sequence
  Description of Artificial Sequence: Synthetic oligonucleotide
  Sense strand starting at position 723 of SEQ ID NO: 1885241
agaaacaucucucuguugu

SEQ ID NO: 2327177 - RNA, 19 nt, Artificial Sequence
  Description of Artificial Sequence: Synthetic oligonucleotide
  Antisense strand to SEQ ID NO: 2327176
acaacagagagauguuucu

SEQ ID NO: 2327178 - RNA, 19 nt, Artificial Sequence
  Description of Artificial Sequence: Synthetic oligonucleotide
  Sense strand starting at position 772 of SEQ ID NO: 1885241
ccacuccuguccuucuaga

SEQ ID NO: 2327179 - RNA, 19 nt, Artificial Sequence
  Description of Artificial Sequence: Synthetic oligonucleotide
  Antisense strand to SEQ ID NO: 2327178
ucuagaaggacaggagugg

SEQ ID NO: 2327180 - RNA, 19 nt, Artificial Sequence
  Description of Artificial Sequence: Synthetic oligonucleotide
  Sense strand starting at position 852 of SEQ ID NO: 1885241
uuaauauuagguuggugga

SEQ ID NO: 2327181 - RNA, 19 nt, Artificial Sequence
  Description of Artificial Sequence: Synthetic oligonucleotide
  Antisense strand to SEQ ID NO: 2327180
uccaccaaccuaauauuaa

SEQ ID NO: 2327182 - RNA, 19 nt, Artificial Sequence
  Description of Artificial Sequence: Synthetic oligonucleotide
  Sense strand starting at position 965 of SEQ ID NO: 1885241
cguggcaaaccucaggaua

SEQ ID NO: 2327183 - RNA, 19 nt, Artificial Sequence
  Description of Artificial Sequence: Synthetic oligonucleotide
  Antisense strand to SEQ ID NO: 2327182
uauccugagguuugccacg

SEQ ID NO: 2327184 - RNA, 19 nt, Artificial Sequence
  Description of Artificial Sequence: Synthetic oligonucleotide
  Sense strand starting at position 1026 of SEQ ID NO: 1885241
agagacugauguucagagu

SEQ ID NO: 2327185 - RNA, 19 nt, Artificial Sequence
  Description of Artificial Sequence: Synthetic oligonucleotide
  Antisense strand to SEQ ID NO: 2327184
acucugaacaucagucucu

SEQ ID NO: 2327186 - RNA, 19 nt, Artificial Sequence
  Description of Artificial Sequence: Synthetic oligonucleotide
  Sense strand starting at position 1120 of SEQ ID NO: 1885241
gcucucuagccagaucauu

SEQ ID NO: 2327187 - RNA, 19 nt, Artificial Sequence
  Description of Artificial Sequence: Synthetic oligonucleotide
  Antisense strand to SEQ ID NO: 2327186
aaugaucuggcuagagagc

SEQ ID NO: 2327188 - RNA, 19 nt, Artificial Sequence
  Description of Artificial Sequence: Synthetic oligonucleotide
  Sense strand starting at position 2109 of SEQ ID NO: 1885241
ucacgagggucguuagaaa

SEQ ID NO: 2327189 - RNA, 19 nt, Artificial Sequence
  Description of Artificial Sequence: Synthetic oligonucleotide
  Antisense strand to SEQ ID NO: 2327188
uuucuaacgacccucguga

SEQ ID NO: 2327190 - RNA, 19 nt, Artificial Sequence
  Description of Artificial Sequence: Synthetic oligonucleotide
  Sense strand starting at position 2293 of SEQ ID NO: 1885241
augcaacuccaugggaauu

SEQ ID NO: 2327191 - RNA, 19 nt, Artificial Sequence
  Description of Artificial Sequence: Synthetic oligonucleotide
  Antisense strand to SEQ ID NO: 2327190
aauucccauggaguugcau

SEQ ID NO: 2327192 - RNA, 19 nt, Artificial Sequence
  Description of Artificial Sequence: Synthetic oligonucleotide
  Sense strand starting at position 2366 of SEQ ID NO: 1885241
ugagcaacauguucuuauu

SEQ ID NO: 2327193 - RNA, 19 nt, Artificial Sequence
  Description of Artificial Sequence: Synthetic oligonucleotide
  Antisense strand to SEQ ID NO: 2327192
aauaagaacauguugcuca

SEQ ID NO: 2327194 - RNA, 19 nt, Artificial Sequence
  Description of Artificial Sequence: Synthetic oligonucleotide
  Sense strand starting at position 2543 of SEQ ID NO: 1885241
guggauuuguguuuguugu

SEQ ID NO: 2327195 - RNA, 19 nt, Artificial Sequence
  Description of Artificial Sequence: Synthetic oligonucleotide
  Antisense strand to SEQ ID NO: 2327194
acaacaaacacaaauccac

SEQ ID NO: 2327196 - RNA, 19 nt, Artificial Sequence
  Description of Artificial Sequence: Synthetic oligonucleotide
  Sense strand starting at position 2544 of SEQ ID NO: 1885241
uggauuuguguuuguuguu

SEQ ID NO: 2327197 - RNA, 19 nt, Artificial Sequence
  Description of Artificial Sequence: Synthetic oligonucleotide
  Antisense strand to SEQ ID NO: 2327196
aacaacaaacacaaaucca

SEQ ID NO: 2327198 - RNA, 19 nt, Artificial Sequence
  Description of Artificial Sequence: Synthetic oligonucleotide
  Sense strand starting at position 2545 of SEQ ID NO: 1885241
ggauuuguguuuguuguuu

SEQ ID NO: 2327199 - RNA, 19 nt, Artificial Sequence
  Description of Artificial Sequence: Synthetic oligonucleotide
  Antisense strand to SEQ ID NO: 2327198
aaacaacaaacacaaaucc

SEQ ID NO: 2327200 - RNA, 19 nt, Artificial Sequence
  Description of Artificial Sequence: Synthetic oligonucleotide
  Sense strand starting at position 2610 of SEQ ID NO: 1885241
uuugguguucuguauauau

SEQ ID NO: 2327201 - RNA, 19 nt, Artificial Sequence
  Description of Artificial Sequence: Synthetic oligonucleotide
  Antisense strand to SEQ ID NO: 2327200
auauauacagaacaccaaa

SEQ ID NO: 2327202 - RNA, 19 nt, Artificial Sequence
  Description of Artificial Sequence: Synthetic oligonucleotide
  Sense strand starting at position 2612 of SEQ ID NO: 1885241
ugguguucuguauauauug

SEQ ID NO: 2327203 - RNA, 19 nt, Artificial Sequence
  Description of Artificial Sequence: Synthetic oligonucleotide
  Antisense strand to SEQ ID NO: 2327202
caauauauacagaacacca

SEQ ID NO: 2327204 - RNA, 19 nt, Artificial Sequence
  Description of Artificial Sequence: Synthetic oligonucleotide
  Sense strand starting at position 2614 of SEQ ID NO: 1885241
guguucuguauauauugaa

SEQ ID NO: 2327205 - RNA, 19 nt, Artificial Sequence
  Description of Artificial Sequence: Synthetic oligonucleotide
  Antisense strand to SEQ ID NO: 2327204
uucaauauauacagaacac

SEQ ID NO: 2327206 - RNA, 19 nt, Artificial Sequence
  Description of Artificial Sequence: Synthetic oligonucleotide
  Sense strand starting at position 2727 of SEQ ID NO: 1885241
aucggagaccagugaucua

SEQ ID NO: 2327207 - RNA, 19 nt, Artificial Sequence
  Description of Artificial Sequence: Synthetic oligonucleotide
  Antisense strand to SEQ ID NO: 2327206
uagaucacuggucuccgau

SEQ ID NO: 2327208 - RNA, 19 nt, Artificial Sequence
  Description of Artificial Sequence: Synthetic oligonucleotide
  Sense strand starting at position 2740 of SEQ ID NO: 1885241
gaucuaaaggaacgguaua

SEQ ID NO: 2327209 - RNA, 19 nt, Artificial Sequence
  Description of Artificial Sequence: Synthetic oligonucleotide
  Antisense strand to SEQ ID NO: 2327208
uauaccguuccuuuagauc

SEQ ID NO: 2327210 - RNA, 19 nt, Artificial Sequence
  Description of Artificial Sequence: Synthetic oligonucleotide
  Sense strand starting at position 2779 of SEQ ID NO: 1885241
uucugaggucugcauuugu

SEQ ID NO: 2327211 - RNA, 19 nt, Artificial Sequence
  Description of Artificial Sequence: Synthetic oligonucleotide
  Antisense strand to SEQ ID NO: 2327210
acaaaugcagaccucagaa

SEQ ID NO: 2327212 - RNA, 19 nt, Artificial Sequence
  Description of Artificial Sequence: Synthetic oligonucleotide
  Sense strand starting at position 2832 of SEQ ID NO: 1885241
ggcaaugaauuccuccaua

SEQ ID NO: 2327213 - RNA, 19 nt, Artificial Sequence
  Description of Artificial Sequence: Synthetic oligonucleotide
  Antisense strand to SEQ ID NO: 2327212
uauggaggaauucauugcc

SEQ ID NO: 2327214 - RNA, 19 nt, Artificial Sequence
  Description of Artificial Sequence: Synthetic oligonucleotide
  Sense strand starting at position 2932 of SEQ ID NO: 1885241
guaauugccagaggaaguc

SEQ ID NO: 2327215 - RNA, 19 nt, Artificial Sequence
  Description of Artificial Sequence: Synthetic oligonucleotide
  Antisense strand to SEQ ID NO: 2327214
gacuuccucuggcaauuac

SEQ ID NO: 2327216 - RNA, 19 nt, Artificial Sequence
  Description of Artificial Sequence: Synthetic oligonucleotide
  Sense strand starting at position 3041 of SEQ ID NO: 1885241
gagaccuggguguggaaau

SEQ ID NO: 2327217 - RNA, 19 nt, Artificial Sequence
  Description of Artificial Sequence: Synthetic oligonucleotide
  Antisense strand to SEQ ID NO: 2327216
auuuccacacccaggucuc

SEQ ID NO: 2327218 - RNA, 19 nt, Artificial Sequence
  Description of Artificial Sequence: Synthetic oligonucleotide
  Sense strand starting at position 3090 of SEQ ID NO: 1885241
uauugagaguguccuauaa

SEQ ID NO: 2327219 - RNA, 19 nt, Artificial Sequence
  Description of Artificial Sequence: Synthetic oligonucleotide
  Antisense strand to SEQ ID NO: 2327218
uuauaggacacucucaaua

SEQ ID NO: 2327220 - RNA, 19 nt, Artificial Sequence
  Description of Artificial Sequence: Synthetic oligonucleotide
  Sense strand starting at position 3094 of SEQ ID NO: 1885241
gagaguguccuauaagcac

SEQ ID NO: 2327221 - RNA, 19 nt, Artificial Sequence
  Description of Artificial Sequence: Synthetic oligonucleotide
  Antisense strand to SEQ ID NO: 2327220
gugcuuauaggacacucuc

SEQ ID NO: 2327222 - RNA, 19 nt, Artificial Sequence
  Description of Artificial Sequence: Synthetic oligonucleotide
  Sense strand starting at position 3113 of SEQ ID NO: 1885241
ggugcugagccacauacuu

SEQ ID NO: 2327223 - RNA, 19 nt, Artificial Sequence
  Description of Artificial Sequence: Synthetic oligonucleotide
  Antisense strand to SEQ ID NO: 2327222
aaguauguggcucagcacc

SEQ ID NO: 2327224 - RNA, 19 nt, Artificial Sequence
  Description of Artificial Sequence: Synthetic oligonucleotide
  Sense strand starting at position 3123 of SEQ ID NO: 1885241
cacauacuuugggugauaa

SEQ ID NO: 2327225 - RNA, 19 nt, Artificial Sequence
  Description of Artificial Sequence: Synthetic oligonucleotide
  Antisense strand to SEQ ID NO: 2327224
uuaucacccaaaguaugug

SEQ ID NO: 2327226 - RNA, 19 nt, Artificial Sequence
  Description of Artificial Sequence: Synthetic oligonucleotide
  Sense strand starting at position 3124 of SEQ ID NO: 1885241
acauacuuugggugauaag

SEQ ID NO: 2327227 - RNA, 19 nt, Artificial Sequence
  Description of Artificial Sequence: Synthetic oligonucleotide
  Antisense strand to SEQ ID NO: 2327226
cuuaucacccaaaguaugu

SEQ ID NO: 2327228 - RNA, 19 nt, Artificial Sequence
  Description of Artificial Sequence: Synthetic oligonucleotide
  Sense strand starting at position 3194 of SEQ ID NO: 1885241
uguacauaccuguauauug

SEQ ID NO: 2327229 - RNA, 19 nt, Artificial Sequence
  Description of Artificial Sequence: Synthetic oligonucleotide
  Antisense strand to SEQ ID NO: 2327228
caauauacagguauguaca

SEQ ID NO: 2327230 - RNA, 19 nt, Artificial Sequence
  Description of Artificial Sequence: Synthetic oligonucleotide
  Sense strand starting at position 3237 of SEQ ID NO: 1885241
gugguagguaaccaaugua

SEQ ID NO: 2327231 - RNA, 19 nt, Artificial Sequence
  Description of Artificial Sequence: Synthetic oligonucleotide
  Antisense strand to SEQ ID NO: 2327230
uacauugguuaccuaccac

SEQ ID NO: 2327232 - RNA, 19 nt, Artificial Sequence
  Description of Artificial Sequence: Synthetic oligonucleotide
  Sense strand starting at position 3240 of SEQ ID NO: 1885241
guagguaaccaauguauag

SEQ ID NO: 2327233 - RNA, 19 nt, Artificial Sequence
  Description of Artificial Sequence: Synthetic oligonucleotide
  Antisense strand to SEQ ID NO: 2327232
cuauacauugguuaccuac

SEQ ID NO: 2327234 - RNA, 19 nt, Artificial Sequence
  Description of Artificial Sequence: Synthetic oligonucleotide
  Sense strand starting at position 3306 of SEQ ID NO: 1885241
ggaagaucuugcuugucua

SEQ ID NO: 2327235 - RNA, 19 nt, Artificial Sequence
  Description of Artificial Sequence: Synthetic oligonucleotide
  Antisense strand to SEQ ID NO: 2327234
uagacaagcaagaucuucc

SEQ ID NO: 2327236 - RNA, 19 nt, Artificial Sequence
  Description of Artificial Sequence: Synthetic oligonucleotide
  Sense strand starting at position 3566 of SEQ ID NO: 1885241
gguuaaaggcaggaucuuu

SEQ ID NO: 2327237 - RNA, 19 nt, Artificial Sequence
  Description of Artificial Sequence: Synthetic oligonucleotide
  Antisense strand to SEQ ID NO: 2327236
aaagauccugccuuuaacc

SEQ ID NO: 2327238 - RNA, 19 nt, Artificial Sequence
  Description of Artificial Sequence: Synthetic oligonucleotide
  Sense strand starting at position 3626 of SEQ ID NO: 1885241
gggagacuucuugguucca

SEQ ID NO: 2327239 - RNA, 19 nt, Artificial Sequence
  Description of Artificial Sequence: Synthetic oligonucleotide
  Antisense strand to SEQ ID NO: 2327238
uggaaccaagaagucuccc

SEQ ID NO: 2327240 - RNA, 19 nt, Artificial Sequence
  Description of Artificial Sequence: Synthetic oligonucleotide
  Sense strand starting at position 3628 of SEQ ID NO: 1885241
gagacuucuugguuccaga

SEQ ID NO: 2327241 - RNA, 19 nt, Artificial Sequence
  Description of Artificial Sequence: Synthetic oligonucleotide
  Antisense strand to SEQ ID NO: 2327240
ucuggaaccaagaagucuc

SEQ ID NO: 2327242 - RNA, 19 nt, Artificial Sequence
  Description of Artificial Sequence: Synthetic oligonucleotide
  Sense strand starting at position 3668 of SEQ ID NO: 1885241
uugucuaaucauuaguuga

SEQ ID NO: 2327243 - RNA, 19 nt, Artificial Sequence
  Description of Artificial Sequence: Synthetic oligonucleotide
  Antisense strand to SEQ ID NO: 2327242
ucaacuaaugauuagacaa

SEQ ID NO: 2327244 - RNA, 19 nt, Artificial Sequence
  Description of Artificial Sequence: Synthetic oligonucleotide
  Sense strand starting at position 135 of SEQ ID NO: 1885242
gaaaguagugaguaagcau

SEQ ID NO: 2327245 - RNA, 19 nt, Artificial Sequence
  Description of Artificial Sequence: Synthetic oligonucleotide
  Antisense strand to SEQ ID NO: 2327244
augcuuacucacuacuuuc

SEQ ID NO: 2327246 - RNA, 19 nt, Artificial Sequence
  Description of Artificial Sequence: Synthetic oligonucleotide
  Sense strand starting at position 138 of SEQ ID NO: 1885242
aguagugaguaagcauaaa

SEQ ID NO: 2327247 - RNA, 19 nt, Artificial Sequence
  Description of Artificial Sequence: Synthetic oligonucleotide
  Antisense strand to SEQ ID NO: 2327246
uuuaugcuuacucacuacu

SEQ ID NO: 2327248 - RNA, 19 nt, Artificial Sequence
  Description of Artificial Sequence: Synthetic oligonucleotide
  Sense strand starting at position 220 of SEQ ID NO: 1885242
aaagaaacagugugcuauu

SEQ ID NO: 2327249 - RNA, 19 nt, Artificial Sequence
  Description of Artificial Sequence: Synthetic oligonucleotide
  Antisense strand to SEQ ID NO: 2327248
aauagcacacuguuucuuu

SEQ ID NO: 2327250 - RNA, 19 nt, Artificial Sequence
  Description of Artificial Sequence: Synthetic oligonucleotide
  Sense strand starting at position 268 of SEQ ID NO: 1885242
guaacuugguauuucuagu

SEQ ID NO: 2327251 - RNA, 19 nt, Artificial Sequence
  Description of Artificial Sequence: Synthetic oligonucleotide
  Antisense strand to SEQ ID NO: 2327250
acuagaaauaccaaguuac

SEQ ID NO: 2327252 - RNA, 19 nt, Artificial Sequence
  Description of Artificial Sequence: Synthetic oligonucleotide
  Sense strand starting at position 357 of SEQ ID NO: 1885242
cuucguaaucaugaauuaa

SEQ ID NO: 2327253 - RNA, 19 nt, Artificial Sequence
  Description of Artificial Sequence: Synthetic oligonucleotide
  Antisense strand to SEQ ID NO: 2327252
uuaauucaugauuacgaag

SEQ ID NO: 2327254 - RNA, 19 nt, Artificial Sequence
  Description of Artificial Sequence: Synthetic oligonucleotide
  Sense strand starting at position 427 of SEQ ID NO: 1885242
gcaaccaugcuguaauaga

SEQ ID NO: 2327255 - RNA, 19 nt, Artificial Sequence
  Description of Artificial Sequence: Synthetic oligonucleotide
  Antisense strand to SEQ ID NO: 2327254
ucuauuacagcaugguugc

SEQ ID NO: 2327256 - RNA, 19 nt, Artificial Sequence
  Description of Artificial Sequence: Synthetic oligonucleotide
  Sense strand starting at position 435 of SEQ ID NO: 1885242
gcuguaauagaucacaaua

SEQ ID NO: 2327257 - RNA, 19 nt, Artificial Sequence
  Description of Artificial Sequence: Synthetic oligonucleotide
  Antisense strand to SEQ ID NO: 2327256
uauugugaucuauuacagc

SEQ ID NO: 2327258 - RNA, 19 nt, Artificial Sequence
  Description of Artificial Sequence: Synthetic oligonucleotide
  Sense strand starting at position 448 of SEQ ID NO: 1885242
acaauagaugguuggugaa

SEQ ID NO: 2327259 - RNA, 19 nt, Artificial Sequence
  Description of Artificial Sequence: Synthetic oligonucleotide
  Antisense strand to SEQ ID NO: 2327258
uucaccaaccaucuauugu

SEQ ID NO: 2327260 - RNA, 19 nt, Artificial Sequence
  Description of Artificial Sequence: Synthetic oligonucleotide
  Sense strand starting at position 469 of SEQ ID NO: 1885242
agaggaggcugucuuugaa

SEQ ID NO: 2327261 - RNA, 19 nt, Artificial Sequence
  Description of Artificial Sequence: Synthetic oligonucleotide
  Antisense strand to SEQ ID NO: 2327260
uucaaagacagccuccucu

SEQ ID NO: 2327262 - RNA, 19 nt, Artificial Sequence
  Description of Artificial Sequence: Synthetic oligonucleotide
  Sense strand starting at position 476 of SEQ ID NO: 1885242
gcugucuuugaauagaaac

SEQ ID NO: 2327263 - RNA, 19 nt, Artificial Sequence
  Description of Artificial Sequence: Synthetic oligonucleotide
  Antisense strand to SEQ ID NO: 2327262
guuucuauucaaagacagc

SEQ ID NO: 2327264 - RNA, 19 nt, Artificial Sequence
  Description of Artificial Sequence: Synthetic oligonucleotide
  Sense strand starting at position 534 of SEQ ID NO: 1885242
uguaaagguuaagccaaau

SEQ ID NO: 2327265 - RNA, 19 nt, Artificial Sequence
  Description of Artificial Sequence: Synthetic oligonucleotide
  Antisense strand to SEQ ID NO: 2327264
auuuggcuuaaccuuuaca

SEQ ID NO: 2327266 - RNA, 19 nt, Artificial Sequence
  Description of Artificial Sequence: Synthetic oligonucleotide
  Sense strand starting at position 545 of SEQ ID NO: 1885242
agccaaaugugacucaaac

SEQ ID NO: 2327267 - RNA, 19 nt, Artificial Sequence
  Description of Artificial Sequence: Synthetic oligonucleotide
  Antisense strand to SEQ ID NO: 2327266
guuugagucacauuuggcu

SEQ ID NO: 2327268 - RNA, 19 nt, Artificial Sequence
  Description of Artificial Sequence: Synthetic oligonucleotide
  Sense strand starting at position 1066 of SEQ ID NO: 1885242
aguccuaugucaguaaaga

SEQ ID NO: 2327269 - RNA, 19 nt, Artificial Sequence
  Description of Artificial Sequence: Synthetic oligonucleotide
  Antisense strand to SEQ ID NO: 2327268
ucuuuacugacauaggacu

SEQ ID NO: 2327270 - RNA, 19 nt, Artificial Sequence
  Description of Artificial Sequence: Synthetic oligonucleotide
  Sense strand starting at position 1095 of SEQ ID NO: 1885242
ugaaaucaguuucugacaa

SEQ ID NO: 2327271 - RNA, 19 nt, Artificial Sequence
  Description of Artificial Sequence: Synthetic oligonucleotide
  Antisense strand to SEQ ID NO: 2327270
uugucagaaacugauuuca

SEQ ID NO: 2327272 - RNA, 19 nt, Artificial Sequence
  Description of Artificial Sequence: Synthetic oligonucleotide
  Sense strand starting at position 1290 of SEQ ID NO: 1885242
gcaauacaucggcagaaau

SEQ ID NO: 2327273 - RNA, 19 nt, Artificial Sequence
  Description of Artificial Sequence: Synthetic oligonucleotide
  Antisense strand to SEQ ID NO: 2327272
auuucugccgauguauugc

SEQ ID NO: 2327274 - RNA, 19 nt, Artificial Sequence
  Description of Artificial Sequence: Synthetic oligonucleotide
  Sense strand starting at position 1397 of SEQ ID NO: 1885242
augucauagcauuaaagac

SEQ ID NO: 2327275 - RNA, 19 nt, Artificial Sequence
  Description of Artificial Sequence: Synthetic oligonucleotide
  Antisense strand to SEQ ID NO: 2327274
gucuuuaaugcuaugacau

SEQ ID NO: 2327276 - RNA, 19 nt, Artificial Sequence
  Description of Artificial Sequence: Synthetic oligonucleotide
  Sense strand starting at position 1525 of SEQ ID NO: 1885242
guguaaguugauuaucauu

SEQ ID NO: 2327277 - RNA, 19 nt, Artificial Sequence
  Description of Artificial Sequence: Synthetic oligonucleotide
  Antisense strand to SEQ ID NO: 2327276
aaugauaaucaacuuacac

SEQ ID NO: 2327278 - RNA, 19 nt, Artificial Sequence
  Description of Artificial Sequence: Synthetic oligonucleotide
  Sense strand starting at position 1575 of SEQ ID NO: 1885242
agcuauaauuagguacauu

SEQ ID NO: 2327279 - RNA, 19 nt, Artificial Sequence
  Description of Artificial Sequence: Synthetic oligonucleotide
  Antisense strand to SEQ ID NO: 2327278
aauguaccuaauuauagcu

SEQ ID NO: 2327280 - RNA, 19 nt, Artificial Sequence
  Description of Artificial Sequence: Synthetic oligonucleotide
  Sense strand starting at position 1617 of SEQ ID NO: 1885242
auauaacauuuacggagaa

SEQ ID NO: 2327281 - RNA, 19 nt, Artificial Sequence
  Description of Artificial Sequence: Synthetic oligonucleotide
  Antisense strand to SEQ ID NO: 2327280
uucuccguaaauguuauau

SEQ ID NO: 2327282 - RNA, 19 nt, Artificial Sequence
  Description of Artificial Sequence: Synthetic oligonucleotide
  Sense strand starting at position 1632 of SEQ ID NO: 1885242
agaacauauuauguacgaa

SEQ ID NO: 2327283 - RNA, 19 nt, Artificial Sequence
  Description of Artificial Sequence: Synthetic oligonucleotide
  Antisense strand to SEQ ID NO: 2327282
uucguacauaauauguucu

SEQ ID NO: 2327284 - RNA, 19 nt, Artificial Sequence
  Description of Artificial Sequence: Synthetic oligonucleotide
  Sense strand starting at position 1635 of SEQ ID NO: 1885242
acauauuauguacgaagaa

SEQ ID NO: 2327285 - RNA, 19 nt, Artificial Sequence
  Description of Artificial Sequence: Synthetic oligonucleotide
  Antisense strand to SEQ ID NO: 2327284
uucuucguacauaauaugu

SEQ ID NO: 2327286 - RNA, 19 nt, Artificial Sequence
  Description of Artificial Sequence: Synthetic oligonucleotide
  Sense strand starting at position 1720 of SEQ ID NO: 1885242
caggguuagcaaggguaga

SEQ ID NO: 2327287 - RNA, 19 nt, Artificial Sequence
  Description of Artificial Sequence: Synthetic oligonucleotide
  Antisense strand to SEQ ID NO: 2327286
ucuacccuugcuaacccug

SEQ ID NO: 2327288 - RNA, 19 nt, Artificial Sequence
  Description of Artificial Sequence: Synthetic oligonucleotide
  Sense strand starting at position 1721 of SEQ ID NO: 1885242
aggguuagcaaggguagaa

SEQ ID NO: 2327289 - RNA, 19 nt, Artificial Sequence
  Description of Artificial Sequence: Synthetic oligonucleotide
  Antisense strand to SEQ ID NO: 2327288
uucuacccuugcuaacccu

SEQ ID NO: 2327290 - RNA, 19 nt, Artificial Sequence
  Description of Artificial Sequence: Synthetic oligonucleotide
  Sense strand starting at position 1883 of SEQ ID NO: 1885242
cuggcagucauagaguuaa

SEQ ID NO: 2327291 - RNA, 19 nt, Artificial Sequence
  Description of Artificial Sequence: Synthetic oligonucleotide
  Antisense strand to SEQ ID NO: 2327290
uuaacucuaugacugccag

SEQ ID NO: 2327292 - RNA, 19 nt, Artificial Sequence
  Description of Artificial Sequence: Synthetic oligonucleotide
  Sense strand starting at position 1938 of SEQ ID NO: 1885242
aaagcuguagguggaauua

SEQ ID NO: 2327293 - RNA, 19 nt, Artificial Sequence
  Description of Artificial Sequence: Synthetic oligonucleotide
  Antisense strand to SEQ ID NO: 2327292
uaauuccaccuacagcuuu

SEQ ID NO: 2327294 - RNA, 19 nt, Artificial Sequence
  Description of Artificial Sequence: Synthetic oligonucleotide
  Sense strand starting at position 2051 of SEQ ID NO: 1885242
uguuaaugagcucacaaag

SEQ ID NO: 2327295 - RNA, 19 nt, Artificial Sequence
  Description of Artificial Sequence: Synthetic oligonucleotide
  Antisense strand to SEQ ID NO: 2327294
cuuugugagcucauuaaca

SEQ ID NO: 2327296 - RNA, 19 nt, Artificial Sequence
  Description of Artificial Sequence: Synthetic oligonucleotide
  Sense strand starting at position 2150 of SEQ ID NO: 1885242
ucaaauacgcaucaggaau

SEQ ID NO: 2327297 - RNA, 19 nt, Artificial Sequence
  Description of Artificial Sequence: Synthetic oligonucleotide
  Antisense strand to SEQ ID NO: 2327296
auuccugaugcguauuuga

SEQ ID NO: 2327298 - RNA, 19 nt, Artificial Sequence
  Description of Artificial Sequence: Synthetic oligonucleotide
  Sense strand starting at position 2389 of SEQ ID NO: 1885242
gcucauugccaauauuaug

SEQ ID NO: 2327299 - RNA, 19 nt, Artificial Sequence
  Description of Artificial Sequence: Synthetic oligonucleotide
  Antisense strand to SEQ ID NO: 2327298
cauaauauuggcaaugagc

SEQ ID NO: 2327300 - RNA, 19 nt, Artificial Sequence
  Description of Artificial Sequence: Synthetic oligonucleotide
  Sense strand starting at position 2397 of SEQ ID NO: 1885242
ccaauauuauggcuuagau

SEQ ID NO: 2327301 - RNA, 19 nt, Artificial Sequence
  Description of Artificial Sequence: Synthetic oligonucleotide
  Antisense strand to SEQ ID NO: 2327300
aucuaagccauaauauugg

SEQ ID NO: 2327302 - RNA, 19 nt, Artificial Sequence
  Description of Artificial Sequence: Synthetic oligonucleotide
  Sense strand starting at position 2493 of SEQ ID NO: 1885242
cuuugacuguaucucugaa

SEQ ID NO: 2327303 - RNA, 19 nt, Artificial Sequence
  Description of Artificial Sequence: Synthetic oligonucleotide
  Antisense strand to SEQ ID NO: 2327302
uucagagauacagucaaag

SEQ ID NO: 2327304 - RNA, 19 nt, Artificial Sequence
  Description of Artificial Sequence: Synthetic oligonucleotide
  Sense strand starting at position 2517 of SEQ ID NO: 1885242
auuaucuaccugugaaaug

SEQ ID NO: 2327305 - RNA, 19 nt, Artificial Sequence
  Description of Artificial Sequence: Synthetic oligonucleotide
  Antisense strand to SEQ ID NO: 2327304
cauuucacagguagauaau

SEQ ID NO: 2327306 - RNA, 19 nt, Artificial Sequence
  Description of Artificial Sequence: Synthetic oligonucleotide
  Sense strand starting at position 2570 of SEQ ID NO: 1885242
auaugaaaguucucgaauu

SEQ ID NO: 2327307 - RNA, 19 nt, Artificial Sequence
  Description of Artificial Sequence: Synthetic oligonucleotide
  Antisense strand to SEQ ID NO: 2327306
aauucgagaacuuucauau

SEQ ID NO: 2327308 - RNA, 19 nt, Artificial Sequence
  Description of Artificial Sequence: Synthetic oligonucleotide
  Sense strand starting at position 2572 of SEQ ID NO: 1885242
augaaaguucucgaauucu

SEQ ID NO: 2327309 - RNA, 19 nt, Artificial Sequence
  Description of Artificial Sequence: Synthetic oligonucleotide
  Antisense strand to SEQ ID NO: 2327308
agaauucgagaacuuucau

SEQ ID NO: 2327310 - RNA, 19 nt, Artificial Sequence
  Description of Artificial Sequence: Synthetic oligonucleotide
  Sense strand starting at position 2751 of SEQ ID NO: 1885242
uuuaaagggugauuacaua

SEQ ID NO: 2327311 - RNA, 19 nt, Artificial Sequence
  Description of Artificial Sequence: Synthetic oligonucleotide
  Antisense strand to SEQ ID NO: 2327310
uauguaaucacccuuuaaa

SEQ ID NO: 2327312 - RNA, 19 nt, Artificial Sequence
  Description of Artificial Sequence: Synthetic oligonucleotide
  Sense strand starting at position 3459 of SEQ ID NO: 1885242
acuguagaggcuuauauuc

SEQ ID NO: 2327313 - RNA, 19 nt, Artificial Sequence
  Description of Artificial Sequence: Synthetic oligonucleotide
  Antisense strand to SEQ ID NO: 2327312
gaauauaagccucuacagu

SEQ ID NO: 2327314 - RNA, 19 nt, Artificial Sequence
  Description of Artificial Sequence: Synthetic oligonucleotide
  Sense strand starting at position 3590 of SEQ ID NO: 1885242
uccagagagggcuguuaaa

SEQ ID NO: 2327315 - RNA, 19 nt, Artificial Sequence
  Description of Artificial Sequence: Synthetic oligonucleotide
  Antisense strand to SEQ ID NO: 2327314
uuuaacagcccucucugga

SEQ ID NO: 2327316 - RNA, 19 nt, Artificial Sequence
  Description of Artificial Sequence: Synthetic oligonucleotide
  Sense strand starting at position 3643 of SEQ ID NO: 1885242
acgguuggccaugaaacau

SEQ ID NO: 2327317 - RNA, 19 nt, Artificial Sequence
  Description of Artificial Sequence: Synthetic oligonucleotide
  Antisense strand to SEQ ID NO: 2327316
auguuucauggccaaccgu

SEQ ID NO: 2327318 - RNA, 19 nt, Artificial Sequence
  Description of Artificial Sequence: Synthetic oligonucleotide
  Sense strand starting at position 3654 of SEQ ID NO: 1885242
ugaaacaugguuugaaauu

SEQ ID NO: 2327319 - RNA, 19 nt, Artificial Sequence
  Description of Artificial Sequence: Synthetic oligonucleotide
  Antisense strand to SEQ ID NO: 2327318
aauuucaaaccauguuuca

SEQ ID NO: 2327320 - RNA, 19 nt, Artificial Sequence
  Description of Artificial Sequence: Synthetic oligonucleotide
  Sense strand starting at position 3703 of SEQ ID NO: 1885242
guaucccuucuguaugaau

SEQ ID NO: 2327321 - RNA, 19 nt, Artificial Sequence
  Description of Artificial Sequence: Synthetic oligonucleotide
  Antisense strand to SEQ ID NO: 2327320
auucauacagaagggauac

SEQ ID NO: 2327322 - RNA, 19 nt, Artificial Sequence
  Description of Artificial Sequence: Synthetic oligonucleotide
  Sense strand starting at position 3921 of SEQ ID NO: 1885242
ucaugugggccugauacaa

SEQ ID NO: 2327323 - RNA, 19 nt, Artificial Sequence
  Description of Artificial Sequence: Synthetic oligonucleotide
  Antisense strand to SEQ ID NO: 2327322
uuguaucaggcccacauga

SEQ ID NO: 2327324 - RNA, 19 nt, Artificial Sequence
  Description of Artificial Sequence: Synthetic oligonucleotide
  Sense strand starting at position 415 of SEQ ID NO: 1885243
aaggauguugcuggauaga

SEQ ID NO: 2327325 - RNA, 19 nt, Artificial Sequence
  Description of Artificial Sequence: Synthetic oligonucleotide
  Antisense strand to SEQ ID NO: 2327324
ucuauccagcaacauccuu

SEQ ID NO: 2327326 - RNA, 19 nt, Artificial Sequence
  Description of Artificial Sequence: Synthetic oligonucleotide
  Sense strand starting at position 418 of SEQ ID NO: 1885243
gauguugcuggauagaauu

SEQ ID NO: 2327327 - RNA, 19 nt, Artificial Sequence
  Description of Artificial Sequence: Synthetic oligonucleotide
  Antisense strand to SEQ ID NO: 2327326
aauucuauccagcaacauc

SEQ ID NO: 2327328 - RNA, 19 nt, Artificial Sequence
  Description of Artificial Sequence: Synthetic oligonucleotide
  Sense strand starting at position 578 of SEQ ID NO: 1885243
guggguuuggaggagaagu

SEQ ID NO: 2327329 - RNA, 19 nt, Artificial Sequence
  Description of Artificial Sequence: Synthetic oligonucleotide
  Antisense strand to SEQ ID NO: 2327328
acuucuccuccaaacccac

SEQ ID NO: 2327330 - RNA, 19 nt, Artificial Sequence
  Description of Artificial Sequence: Synthetic oligonucleotide
  Sense strand starting at position 610 of SEQ ID NO: 1885243
ggcaauuuccucuguuaau

SEQ ID NO: 2327331 - RNA, 19 nt, Artificial Sequence
  Description of Artificial Sequence: Synthetic oligonucleotide
  Antisense strand to SEQ ID NO: 2327330
auuaacagaggaaauugcc

SEQ ID NO: 2327332 - RNA, 19 nt, Artificial Sequence
  Description of Artificial Sequence: Synthetic oligonucleotide
  Sense strand starting at position 664 of SEQ ID NO: 1885243
ucauaacauuggcuguuaa

SEQ ID NO: 2327333 - RNA, 19 nt, Artificial Sequence
  Description of Artificial Sequence: Synthetic oligonucleotide
  Antisense strand to SEQ ID NO: 2327332
uuaacagccaauguuauga

SEQ ID NO: 2327334 - RNA, 19 nt, Artificial Sequence
  Description of Artificial Sequence: Synthetic oligonucleotide
  Sense strand starting at position 893 of SEQ ID NO: 1885243
ggucaaagaucuuucuaga

SEQ ID NO: 2327335 - RNA, 19 nt, Artificial Sequence
  Description of Artificial Sequence: Synthetic oligonucleotide
  Antisense strand to SEQ ID NO: 2327334
ucuagaaagaucuuugacc

SEQ ID NO: 2327336 - RNA, 19 nt, Artificial Sequence
  Description of Artificial Sequence: Synthetic oligonucleotide
  Sense strand starting at position 1045 of SEQ ID NO: 1885243
ucagaauaauauguccuga

SEQ ID NO: 2327337 - RNA, 19 nt, Artificial Sequence
  Description of Artificial Sequence: Synthetic oligonucleotide
  Antisense strand to SEQ ID NO: 2327336
ucaggacauauuauucuga

SEQ ID NO: 2327338 - RNA, 19 nt, Artificial Sequence
  Description of Artificial Sequence: Synthetic oligonucleotide
  Sense strand starting at position 1333 of SEQ ID NO: 1885243
guuggaggaaugugauaaa

SEQ ID NO: 2327339 - RNA, 19 nt, Artificial Sequence
  Description of Artificial Sequence: Synthetic oligonucleotide
  Antisense strand to SEQ ID NO: 2327338
uuuaucacauuccuccaac

SEQ ID NO: 2327340 - RNA, 19 nt, Artificial Sequence
  Description of Artificial Sequence: Synthetic oligonucleotide
  Sense strand starting at position 1430 of SEQ ID NO: 1885243
gcaaauaaacggcaauuaa

SEQ ID NO: 2327341 - RNA, 19 nt, Artificial Sequence
  Description of Artificial Sequence: Synthetic oligonucleotide
  Antisense strand to SEQ ID NO: 2327340
uuaauugccguuuauuugc

SEQ ID NO: 2327342 - RNA, 19 nt, Artificial Sequence
  Description of Artificial Sequence: Synthetic oligonucleotide
  Sense strand starting at position 1652 of SEQ ID NO: 1885243
uugaaagaaaucuguguug

SEQ ID NO: 2327343 - RNA, 19 nt, Artificial Sequence
  Description of Artificial Sequence: Synthetic oligonucleotide
  Antisense strand to SEQ ID NO: 2327342
caacacagauuucuuucaa

SEQ ID NO: 2327344 - RNA, 19 nt, Artificial Sequence
  Description of Artificial Sequence: Synthetic oligonucleotide
  Sense strand starting at position 1654 of SEQ ID NO: 1885243
gaaagaaaucuguguugaa

SEQ ID NO: 2327345 - RNA, 19 nt, Artificial Sequence
  Description of Artificial Sequence: Synthetic oligonucleotide
  Antisense strand to SEQ ID NO: 2327344
uucaacacagauuucuuuc

SEQ ID NO: 2327346 - RNA, 19 nt, Artificial Sequence
  Description of Artificial Sequence: Synthetic oligonucleotide
  Sense strand starting at position 1655 of SEQ ID NO: 1885243
aaagaaaucuguguugaag

SEQ ID NO: 2327347 - RNA, 19 nt, Artificial Sequence
  Description of Artificial Sequence: Synthetic oligonucleotide
  Antisense strand to SEQ ID NO: 2327346
cuucaacacagauuucuuu

SEQ ID NO: 2327348 - RNA, 19 nt, Artificial Sequence
  Description of Artificial Sequence: Synthetic oligonucleotide
  Sense strand starting at position 1765 of SEQ ID NO: 1885243
ugggauguuggcuauugau

SEQ ID NO: 2327349 - RNA, 19 nt, Artificial Sequence
  Description of Artificial Sequence: Synthetic oligonucleotide
  Antisense strand to SEQ ID NO: 2327348
aucaauagccaacauccca

SEQ ID NO: 2327350 - RNA, 19 nt, Artificial Sequence
  Description of Artificial Sequence: Synthetic oligonucleotide
  Sense strand starting at position 1868 of SEQ ID NO: 1885243
caaauaacgcaagggauua

SEQ ID NO: 2327351 - RNA, 19 nt, Artificial Sequence
  Description of Artificial Sequence: Synthetic oligonucleotide
  Antisense strand to SEQ ID NO: 2327350
uaaucccuugcguuauuug

SEQ ID NO: 2327352 - RNA, 19 nt, Artificial Sequence
  Description of Artificial Sequence: Synthetic oligonucleotide
  Sense strand starting at position 1878 of SEQ ID NO: 1885243
aagggauuaccaugucuca

SEQ ID NO: 2327353 - RNA, 19 nt, Artificial Sequence
  Description of Artificial Sequence: Synthetic oligonucleotide
  Antisense strand to SEQ ID NO: 2327352
ugagacaugguaaucccuu

SEQ ID NO: 2327354 - RNA, 19 nt, Artificial Sequence
  Description of Artificial Sequence: Synthetic oligonucleotide
  Sense strand starting at position 1881 of SEQ ID NO: 1885243
ggauuaccaugucucagaa

SEQ ID NO: 2327355 - RNA, 19 nt, Artificial Sequence
  Description of Artificial Sequence: Synthetic oligonucleotide
  Antisense strand to SEQ ID NO: 2327354
uucugagacaugguaaucc

SEQ ID NO: 2327356 - RNA, 19 nt, Artificial Sequence
  Description of Artificial Sequence: Synthetic oligonucleotide
  Sense strand starting at position 1891 of SEQ ID NO: 1885243
gucucagaaguuuggaaca

SEQ ID NO: 2327357 - RNA, 19 nt, Artificial Sequence
  Description of Artificial Sequence: Synthetic oligonucleotide
  Antisense strand to SEQ ID NO: 2327356
uguuccaaacuucugagac

SEQ ID NO: 2327358 - RNA, 19 nt, Artificial Sequence
  Description of Artificial Sequence: Synthetic oligonucleotide
  Sense strand starting at position 1953 of SEQ ID NO: 1885243
ugcgcuuucgguucucaca

SEQ ID NO: 2327359 - RNA, 19 nt, Artificial Sequence
  Description of Artificial Sequence: Synthetic oligonucleotide
  Antisense strand to SEQ ID NO: 2327358
ugugagaaccgaaagcgca

SEQ ID NO: 2327360 - RNA, 19 nt, Artificial Sequence
  Description of Artificial Sequence: Synthetic oligonucleotide
  Sense strand starting at position 2088 of SEQ ID NO: 1885243
cccauucuagccugggaaa

SEQ ID NO: 2327361 - RNA, 19 nt, Artificial Sequence
  Description of Artificial Sequence: Synthetic oligonucleotide
  Antisense strand to SEQ ID NO: 2327360
uuucccaggcuagaauggg

SEQ ID NO: 2327362 - RNA, 19 nt, Artificial Sequence
  Description of Artificial Sequence: Synthetic oligonucleotide
  Sense strand starting at position 2089 of SEQ ID NO: 1885243
ccauucuagccugggaaau

SEQ ID NO: 2327363 - RNA, 19 nt, Artificial Sequence
  Description of Artificial Sequence: Synthetic oligonucleotide
  Antisense strand to SEQ ID NO: 2327362
auuucccaggcuagaaugg

SEQ ID NO: 2327364 - RNA, 19 nt, Artificial Sequence
  Description of Artificial Sequence: Synthetic oligonucleotide
  Sense strand starting at position 2231 of SEQ ID NO: 1885243
uucuguucuaucggaagaa

SEQ ID NO: 2327365 - RNA, 19 nt, Artificial Sequence
  Description of Artificial Sequence: Synthetic oligonucleotide
  Antisense strand to SEQ ID NO: 2327364
uucuuccgauagaacagaa

SEQ ID NO: 2327366 - RNA, 19 nt, Artificial Sequence
  Description of Artificial Sequence: Synthetic oligonucleotide
  Sense strand starting at position 2375 of SEQ ID NO: 1885243
ccaagcugaggucaauuau

SEQ ID NO: 2327367 - RNA, 19 nt, Artificial Sequence
  Description of Artificial Sequence: Synthetic oligonucleotide
  Antisense strand to SEQ ID NO: 2327366
auaauugaccucagcuugg

SEQ ID NO: 2327368 - RNA, 19 nt, Artificial Sequence
  Description of Artificial Sequence: Synthetic oligonucleotide
  Sense strand starting at position 2385 of SEQ ID NO: 1885243
gucaauuauccaggguaau

SEQ ID NO: 2327369 - RNA, 19 nt, Artificial Sequence
  Description of Artificial Sequence: Synthetic oligonucleotide
  Antisense strand to SEQ ID NO: 2327368
auuacccuggauaauugac

SEQ ID NO: 2327370 - RNA, 19 nt, Artificial Sequence
  Description of Artificial Sequence: Synthetic oligonucleotide
  Sense strand starting at position 2386 of SEQ ID NO: 1885243
ucaauuauccaggguaaua

SEQ ID NO: 2327371 - RNA, 19 nt, Artificial Sequence
  Description of Artificial Sequence: Synthetic oligonucleotide
  Antisense strand to SEQ ID NO: 2327370
uauuacccuggauaauuga

SEQ ID NO: 2327372 - RNA, 19 nt, Artificial Sequence
  Description of Artificial Sequence: Synthetic oligonucleotide
  Sense strand starting at position 2430 of SEQ ID NO: 1885243
agauuaaguguuggagcaa

SEQ ID NO: 2327373 - RNA, 19 nt, Artificial Sequence
  Description of Artificial Sequence: Synthetic oligonucleotide
  Antisense strand to SEQ ID NO: 2327372
uugcuccaacacuuaaucu

SEQ ID NO: 2327374 - RNA, 19 nt, Artificial Sequence
  Description of Artificial Sequence: Synthetic oligonucleotide
  Sense strand starting at position 2519 of SEQ ID NO: 1885243
uucuguacauugguaggaa

SEQ ID NO: 2327375 - RNA, 19 nt, Artificial Sequence
  Description of Artificial Sequence: Synthetic oligonucleotide
  Antisense strand to SEQ ID NO: 2327374
uuccuaccaauguacagaa

SEQ ID NO: 2327376 - RNA, 19 nt, Artificial Sequence
  Description of Artificial Sequence: Synthetic oligonucleotide
  Sense strand starting at position 2522 of SEQ ID NO: 1885243
uguacauugguaggaagaa

SEQ ID NO: 2327377 - RNA, 19 nt, Artificial Sequence
  Description of Artificial Sequence: Synthetic oligonucleotide
  Antisense strand to SEQ ID NO: 2327376
uucuuccuaccaauguaca

SEQ ID NO: 2327378 - RNA, 19 nt, Artificial Sequence
  Description of Artificial Sequence: Synthetic oligonucleotide
  Sense strand starting at position 2918 of SEQ ID NO: 1885243
cugccaacucuuuggaaua

SEQ ID NO: 2327379 - RNA, 19 nt, Artificial Sequence
  Description of Artificial Sequence: Synthetic oligonucleotide
  Antisense strand to SEQ ID NO: 2327378
uauuccaaagaguuggcag

SEQ ID NO: 2327380 - RNA, 19 nt, Artificial Sequence
  Description of Artificial Sequence: Synthetic oligonucleotide
  Sense strand starting at position 3146 of SEQ ID NO: 1885243
ggguccucuagugaaauag

SEQ ID NO: 2327381 - RNA, 19 nt, Artificial Sequence
  Description of Artificial Sequence: Synthetic oligonucleotide
  Antisense strand to SEQ ID NO: 2327380
cuauuucacuagaggaccc

SEQ ID NO: 2327382 - RNA, 19 nt, Artificial Sequence
  Description of Artificial Sequence: Synthetic oligonucleotide
  Sense strand starting at position 3155 of SEQ ID NO: 1885243
agugaaauagcuuauucca

SEQ ID NO: 2327383 - RNA, 19 nt, Artificial Sequence
  Description of Artificial Sequence: Synthetic oligonucleotide
  Antisense strand to SEQ ID NO: 2327382
uggaauaagcuauuucacu

SEQ ID NO: 2327384 - RNA, 19 nt, Artificial Sequence
  Description of Artificial Sequence: Synthetic oligonucleotide
  Sense strand starting at position 3317 of SEQ ID NO: 1885243
cucacuuaagucuaaguca

SEQ ID NO: 2327385 - RNA, 19 nt, Artificial Sequence
  Description of Artificial Sequence: Synthetic oligonucleotide
  Antisense strand to SEQ ID NO: 2327384
ugacuuagacuuaagugag

SEQ ID NO: 2327386 - RNA, 19 nt, Artificial Sequence
  Description of Artificial Sequence: Synthetic oligonucleotide
  Sense strand starting at position 3320 of SEQ ID NO: 1885243
acuuaagucuaagucagau

SEQ ID NO: 2327387 - RNA, 19 nt, Artificial Sequence
  Description of Artificial Sequence: Synthetic oligonucleotide
  Antisense strand to SEQ ID NO: 2327386
aucugacuuagacuuaagu

SEQ ID NO: 2327388 - RNA, 19 nt, Artificial Sequence
  Description of Artificial Sequence: Synthetic oligonucleotide
  Sense strand starting at position 3338 of SEQ ID NO: 1885243
ugucauguccuagaagaac

SEQ ID NO: 2327389 - RNA, 19 nt, Artificial Sequence
  Description of Artificial Sequence: Synthetic oligonucleotide
  Antisense strand to SEQ ID NO: 2327388
guucuucuaggacaugaca

SEQ ID NO: 2327390 - RNA, 19 nt, Artificial Sequence
  Description of Artificial Sequence: Synthetic oligonucleotide
  Sense strand starting at position 3559 of SEQ ID NO: 1885243
guuuauuaacuguaccaac

SEQ ID NO: 2327391 - RNA, 19 nt, Artificial Sequence
  Description of Artificial Sequence: Synthetic oligonucleotide
  Antisense strand to SEQ ID NO: 2327390
guugguacaguuaauaaac

SEQ ID NO: 2327392 - RNA, 19 nt, Artificial Sequence
  Description of Artificial Sequence: Synthetic oligonucleotide
  Sense strand starting at position 3721 of SEQ ID NO: 1885243
ucuaaagagaauuagcguu

SEQ ID NO: 2327393 - RNA, 19 nt, Artificial Sequence
  Description of Artificial Sequence: Synthetic oligonucleotide
  Antisense strand to SEQ ID NO: 2327392
aacgcuaauucucuuuaga

SEQ ID NO: 2327394 - RNA, 19 nt, Artificial Sequence
  Description of Artificial Sequence: Synthetic oligonucleotide
  Sense strand starting at position 3774 of SEQ ID NO: 1885243
guuagauaugauugaacac

SEQ ID NO: 2327395 - RNA, 19 nt, Artificial Sequence
  Description of Artificial Sequence: Synthetic oligonucleotide
  Antisense strand to SEQ ID NO: 2327394
guguucaaucauaucuaac

SEQ ID NO: 2327396 - RNA, 19 nt, Artificial Sequence
  Description of Artificial Sequence: Synthetic oligonucleotide
  Sense strand starting at position 3809 of SEQ ID NO: 1885243
aucugaaagugacuucugu

SEQ ID NO: 2327397 - RNA, 19 nt, Artificial Sequence
  Description of Artificial Sequence: Synthetic oligonucleotide
  Antisense strand to SEQ ID NO: 2327396
acagaagucacuuucagau

SEQ ID NO: 2327398 - RNA, 19 nt, Artificial Sequence
  Description of Artificial Sequence: Synthetic oligonucleotide
  Sense strand starting at position 3816 of SEQ ID NO: 1885243
agugacuucuguccuagaa

SEQ ID NO: 2327399 - RNA, 19 nt, Artificial Sequence
  Description of Artificial Sequence: Synthetic oligonucleotide
  Antisense strand to SEQ ID NO: 2327398
uucuaggacagaagucacu

SEQ ID NO: 2327400 - RNA, 19 nt, Artificial Sequence
  Description of Artificial Sequence: Synthetic oligonucleotide
  Sense strand starting at position 3820 of SEQ ID NO: 1885243
acuucuguccuagaaaguu

SEQ ID NO: 2327401 - RNA, 19 nt, Artificial Sequence
  Description of Artificial Sequence: Synthetic oligonucleotide
  Antisense strand to SEQ ID NO: 2327400
aacuuucuaggacagaagu

SEQ ID NO: 2327402 - RNA, 19 nt, Artificial Sequence
  Description of Artificial Sequence: Synthetic oligonucleotide
  Sense strand starting at position 3963 of SEQ ID NO: 1885243
caacuauuugcauggacgu

SEQ ID NO: 2327403 - RNA, 19 nt, Artificial Sequence
  Description of Artificial Sequence: Synthetic oligonucleotide
  Antisense strand to SEQ ID NO: 2327402
acguccaugcaaauaguug

SEQ ID NO: 2327404 - RNA, 19 nt, Artificial Sequence
  Description of Artificial Sequence: Synthetic oligonucleotide
  Sense strand starting at position 79 of SEQ ID NO: 1885244
auagcaauccaguaauagu

SEQ ID NO: 2327405 - RNA, 19 nt, Artificial Sequence
  Description of Artificial Sequence: Synthetic oligonucleotide
  Antisense strand to SEQ ID NO: 2327404
acuauuacuggauugcuau

SEQ ID NO: 2327406 - RNA, 19 nt, Artificial Sequence
  Description of Artificial Sequence: Synthetic oligonucleotide
  Sense strand starting at position 148 of SEQ ID NO: 1885244
gcaugauguacguaauacc

SEQ ID NO: 2327407 - RNA, 19 nt, Artificial Sequence
  Description of Artificial Sequence: Synthetic oligonucleotide
  Antisense strand to SEQ ID NO: 2327406
gguauuacguacaucaugc

SEQ ID NO: 2327408 - RNA, 19 nt, Artificial Sequence
  Description of Artificial Sequence: Synthetic oligonucleotide
  Sense strand starting at position 157 of SEQ ID NO: 1885244
acguaauacccauguaaca

SEQ ID NO: 2327409 - RNA, 19 nt, Artificial Sequence
  Description of Artificial Sequence: Synthetic oligonucleotide
  Antisense strand to SEQ ID NO: 2327408
uguuacauggguauuacgu

SEQ ID NO: 2327410 - RNA, 19 nt, Artificial Sequence
  Description of Artificial Sequence: Synthetic oligonucleotide
  Sense strand starting at position 233 of SEQ ID NO: 1885244
guuuguaucuuaccucaaa

SEQ ID NO: 2327411 - RNA, 19 nt, Artificial Sequence
  Description of Artificial Sequence: Synthetic oligonucleotide
  Antisense strand to SEQ ID NO: 2327410
uuugagguaagauacaaac

SEQ ID NO: 2327412 - RNA, 19 nt, Artificial Sequence
  Description of Artificial Sequence: Synthetic oligonucleotide
  Sense strand starting at position 264 of SEQ ID NO: 1885244
cuugcaucuguagaaacua

SEQ ID NO: 2327413 - RNA, 19 nt, Artificial Sequence
  Description of Artificial Sequence: Synthetic oligonucleotide
  Antisense strand to SEQ ID NO: 2327412
uaguuucuacagaugcaag

SEQ ID NO: 2327414 - RNA, 19 nt, Artificial Sequence
  Description of Artificial Sequence: Synthetic oligonucleotide
  Sense strand starting at position 305 of SEQ ID NO: 1885244
uuuccuuauuucuaggaag

SEQ ID NO: 2327415 - RNA, 19 nt, Artificial Sequence
  Description of Artificial Sequence: Synthetic oligonucleotide
  Antisense strand to SEQ ID NO: 2327414
cuuccuagaaauaaggaaa

SEQ ID NO: 2327416 - RNA, 19 nt, Artificial Sequence
  Description of Artificial Sequence: Synthetic oligonucleotide
  Sense strand starting at position 308 of SEQ ID NO: 1885244
ccuuauuucuaggaagaaa

SEQ ID NO: 2327417 - RNA, 19 nt, Artificial Sequence
  Description of Artificial Sequence: Synthetic oligonucleotide
  Antisense strand to SEQ ID NO: 2327416
uuucuuccuagaaauaagg

SEQ ID NO: 2327418 - RNA, 19 nt, Artificial Sequence
  Description of Artificial Sequence: Synthetic oligonucleotide
  Sense strand starting at position 629 of SEQ ID NO: 1885244
ccuugaagaucugugacca

SEQ ID NO: 2327419 - RNA, 19 nt, Artificial Sequence
  Description of Artificial Sequence: Synthetic oligonucleotide
  Antisense strand to SEQ ID NO: 2327418
uggucacagaucuucaagg

SEQ ID NO: 2327420 - RNA, 19 nt, Artificial Sequence
  Description of Artificial Sequence: Synthetic oligonucleotide
  Sense strand starting at position 630 of SEQ ID NO: 1885244
cuugaagaucugugaccau

SEQ ID NO: 2327421 - RNA, 19 nt, Artificial Sequence
  Description of Artificial Sequence: Synthetic oligonucleotide
  Antisense strand to SEQ ID NO: 2327420
auggucacagaucuucaag

SEQ ID NO: 2327422 - RNA, 19 nt, Artificial Sequence
  Description of Artificial Sequence: Synthetic oligonucleotide
  Sense strand starting at position 657 of SEQ ID NO: 1885244
uggaccuuaucaguuuaaa

SEQ ID NO: 2327423 - RNA, 19 nt, Artificial Sequence
  Description of Artificial Sequence: Synthetic oligonucleotide
  Antisense strand to SEQ ID NO: 2327422
uuuaaacugauaaggucca

SEQ ID NO: 2327424 - RNA, 19 nt, Artificial Sequence
  Description of Artificial Sequence: Synthetic oligonucleotide
  Sense strand starting at position 671 of SEQ ID NO: 1885244
uuaaaugguucuuuaacga

SEQ ID NO: 2327425 - RNA, 19 nt, Artificial Sequence
  Description of Artificial Sequence: Synthetic oligonucleotide
  Antisense strand to SEQ ID NO: 2327424
ucguuaaagaaccauuuaa

SEQ ID NO: 2327426 - RNA, 19 nt, Artificial Sequence
  Description of Artificial Sequence: Synthetic oligonucleotide
  Sense strand starting at position 723 of SEQ ID NO: 1885244
aauaaauaccguuguugau

SEQ ID NO: 2327427 - RNA, 19 nt, Artificial Sequence
  Description of Artificial Sequence: Synthetic oligonucleotide
  Antisense strand to SEQ ID NO: 2327426
aucaacaacgguauuuauu

SEQ ID NO: 2327428 - RNA, 19 nt, Artificial Sequence
  Description of Artificial Sequence: Synthetic oligonucleotide
  Sense strand starting at position 730 of SEQ ID NO: 1885244
accguuguugaucauuauu

SEQ ID NO: 2327429 - RNA, 19 nt, Artificial Sequence
  Description of Artificial Sequence: Synthetic oligonucleotide
  Antisense strand to SEQ ID NO: 2327428
aauaaugaucaacaacggu

SEQ ID NO: 2327430 - RNA, 19 nt, Artificial Sequence
  Description of Artificial Sequence: Synthetic oligonucleotide
  Sense strand starting at position 732 of SEQ ID NO: 1885244
cguuguugaucauuauuug

SEQ ID NO: 2327431 - RNA, 19 nt, Artificial Sequence
  Description of Artificial Sequence: Synthetic oligonucleotide
  Antisense strand to SEQ ID NO: 2327430
caaauaaugaucaacaacg

SEQ ID NO: 2327432 - RNA, 19 nt, Artificial Sequence
  Description of Artificial Sequence: Synthetic oligonucleotide
  Sense strand starting at position 933 of SEQ ID NO: 1885244
ugguccauaucuguuggau

SEQ ID NO: 2327433 - RNA, 19 nt, Artificial Sequence
  Description of Artificial Sequence: Synthetic oligonucleotide
  Antisense strand to SEQ ID NO: 2327432
auccaacagauauggacca

SEQ ID NO: 2327434 - RNA, 19 nt, Artificial Sequence
  Description of Artificial Sequence: Synthetic oligonucleotide
  Sense strand starting at position 936 of SEQ ID NO: 1885244
uccauaucuguuggauaau

SEQ ID NO: 2327435 - RNA, 19 nt, Artificial Sequence
  Description of Artificial Sequence: Synthetic oligonucleotide
  Antisense strand to SEQ ID NO: 2327434
auuauccaacagauaugga

SEQ ID NO: 2327436 - RNA, 19 nt, Artificial Sequence
  Description of Artificial Sequence: Synthetic oligonucleotide
  Sense strand starting at position 939 of SEQ ID NO: 1885244
auaucuguuggauaaugua

SEQ ID NO: 2327437 - RNA, 19 nt, Artificial Sequence
  Description of Artificial Sequence: Synthetic oligonucleotide
  Antisense strand to SEQ ID NO: 2327436
uacauuauccaacagauau

SEQ ID NO: 2327438 - RNA, 19 nt, Artificial Sequence
  Description of Artificial Sequence: Synthetic oligonucleotide
  Sense strand starting at position 1060 of SEQ ID NO: 1885244
ccgcaaguaugaucacaaa

SEQ ID NO: 2327439 - RNA, 19 nt, Artificial Sequence
  Description of Artificial Sequence: Synthetic oligonucleotide
  Antisense strand to SEQ ID NO: 2327438
uuugugaucauacuugcgg

SEQ ID NO: 2327440 - RNA, 19 nt, Artificial Sequence
  Description of Artificial Sequence: Synthetic oligonucleotide
  Sense strand starting at position 1091 of SEQ ID NO: 1885244
cuuaguaucagugaggcga

SEQ ID NO: 2327441 - RNA, 19 nt, Artificial Sequence
  Description of Artificial Sequence: Synthetic oligonucleotide
  Antisense strand to SEQ ID NO: 2327440
ucgccucacugauacuaag

SEQ ID NO: 2327442 - RNA, 19 nt, Artificial Sequence
  Description of Artificial Sequence: Synthetic oligonucleotide
  Sense strand starting at position 1102 of SEQ ID NO: 1885244
ugaggcgagccauaaauaa

SEQ ID NO: 2327443 - RNA, 19 nt, Artificial Sequence
  Description of Artificial Sequence: Synthetic oligonucleotide
  Antisense strand to SEQ ID NO: 2327442
uuauuuauggcucgccuca

SEQ ID NO: 2327444 - RNA, 19 nt, Artificial Sequence
  Description of Artificial Sequence: Synthetic oligonucleotide
  Sense strand starting at position 1349 of SEQ ID NO: 1885244
aagugauugugucuaugga

SEQ ID NO: 2327445 - RNA, 19 nt, Artificial Sequence
  Description of Artificial Sequence: Synthetic oligonucleotide
  Antisense strand to SEQ ID NO: 2327444
uccauagacacaaucacuu

SEQ ID NO: 2327446 - RNA, 19 nt, Artificial Sequence
  Description of Artificial Sequence: Synthetic oligonucleotide
  Sense strand starting at position 1350 of SEQ ID NO: 1885244
agugauugugucuauggaa

SEQ ID NO: 2327447 - RNA, 19 nt, Artificial Sequence
  Description of Artificial Sequence: Synthetic oligonucleotide
  Antisense strand to SEQ ID NO: 2327446
uuccauagacacaaucacu

SEQ ID NO: 2327448 - RNA, 19 nt, Artificial Sequence
  Description of Artificial Sequence: Synthetic oligonucleotide
  Sense strand starting at position 1435 of SEQ ID NO: 1885244
uuuccaagauaaguaaguu

SEQ ID NO: 2327449 - RNA, 19 nt, Artificial Sequence
  Description of Artificial Sequence: Synthetic oligonucleotide
  Antisense strand to SEQ ID NO: 2327448
aacuuacuuaucuuggaaa

SEQ ID NO: 2327450 - RNA, 19 nt, Artificial Sequence
  Description of Artificial Sequence: Synthetic oligonucleotide
  Sense strand starting at position 1603 of SEQ ID NO: 1885244
uuacuuacucgccaggaca

SEQ ID NO: 2327451 - RNA, 19 nt, Artificial Sequence
  Description of Artificial Sequence: Synthetic oligonucleotide
  Antisense strand to SEQ ID NO: 2327450
uguccuggcgaguaaguaa

SEQ ID NO: 2327452 - RNA, 19 nt, Artificial Sequence
  Description of Artificial Sequence: Synthetic oligonucleotide
  Sense strand starting at position 1671 of SEQ ID NO: 1885244
acauuaagccguguugcuu

SEQ ID NO: 2327453 - RNA, 19 nt, Artificial Sequence
  Description of Artificial Sequence: Synthetic oligonucleotide
  Antisense strand to SEQ ID NO: 2327452
aagcaacacggcuuaaugu

SEQ ID NO: 2327454 - RNA, 19 nt, Artificial Sequence
  Description of Artificial Sequence: Synthetic oligonucleotide
  Sense strand starting at position 1672 of SEQ ID NO: 1885244
cauuaagccguguugcuuu

SEQ ID NO: 2327455 - RNA, 19 nt, Artificial Sequence
  Description of Artificial Sequence: Synthetic oligonucleotide
  Antisense strand to SEQ ID NO: 2327454
aaagcaacacggcuuaaug

SEQ ID NO: 2327456 - RNA, 19 nt, Artificial Sequence
  Description of Artificial Sequence: Synthetic oligonucleotide
  Sense strand starting at position 1841 of SEQ ID NO: 1885244
ccaauaauucuguagguca

SEQ ID NO: 2327457 - RNA, 19 nt, Artificial Sequence
  Description of Artificial Sequence: Synthetic oligonucleotide
  Antisense strand to SEQ ID NO: 2327456
ugaccuacagaauuauugg

SEQ ID NO: 2327458 - RNA, 19 nt, Artificial Sequence
  Description of Artificial Sequence: Synthetic oligonucleotide
  Sense strand starting at position 1886 of SEQ ID NO: 1885244
uugguaagaccggaucguu

SEQ ID NO: 2327459 - RNA, 19 nt, Artificial Sequence
  Description of Artificial Sequence: Synthetic oligonucleotide
  Antisense strand to SEQ ID NO: 2327458
aacgauccggucuuaccaa

SEQ ID NO: 2327460 - RNA, 19 nt, Artificial Sequence
  Description of Artificial Sequence: Synthetic oligonucleotide
  Sense strand starting at position 1891 of SEQ ID NO: 1885244
aagaccggaucguuuaaga

SEQ ID NO: 2327461 - RNA, 19 nt, Artificial Sequence
  Description of Artificial Sequence: Synthetic oligonucleotide
  Antisense strand to SEQ ID NO: 2327460
ucuuaaacgauccggucuu

SEQ ID NO: 2327462 - RNA, 19 nt, Artificial Sequence
  Description of Artificial Sequence: Synthetic oligonucleotide
  Sense strand starting at position 2139 of SEQ ID NO: 1885244
auuccaauugcagagaagu

SEQ ID NO: 2327463 - RNA, 19 nt, Artificial Sequence
  Description of Artificial Sequence: Synthetic oligonucleotide
  Antisense strand to SEQ ID NO: 2327462
acuucucugcaauuggaau

SEQ ID NO: 2327464 - RNA, 19 nt, Artificial Sequence
  Description of Artificial Sequence: Synthetic oligonucleotide
  Sense strand starting at position 2160 of SEQ ID NO: 1885244
gcuccaucccuugauugga

SEQ ID NO: 2327465 - RNA, 19 nt, Artificial Sequence
  Description of Artificial Sequence: Synthetic oligonucleotide
  Antisense strand to SEQ ID NO: 2327464
uccaaucaagggauggagc

SEQ ID NO: 2327466 - RNA, 19 nt, Artificial Sequence
  Description of Artificial Sequence: Synthetic oligonucleotide
  Sense strand starting at position 2168 of SEQ ID NO: 1885244
ccuugauuggagugaauga

SEQ ID NO: 2327467 - RNA, 19 nt, Artificial Sequence
  Description of Artificial Sequence: Synthetic oligonucleotide
  Antisense strand to SEQ ID NO: 2327466
ucauucacuccaaucaagg

SEQ ID NO: 2327468 - RNA, 19 nt, Artificial Sequence
  Description of Artificial Sequence: Synthetic oligonucleotide
  Sense strand starting at position 2318 of SEQ ID NO: 1885244
agacuagaacuuuguguug

SEQ ID NO: 2327469 - RNA, 19 nt, Artificial Sequence
  Description of Artificial Sequence: Synthetic oligonucleotide
  Antisense strand to SEQ ID NO: 2327468
caacacaaaguucuagucu

SEQ ID NO: 2327470 - RNA, 19 nt, Artificial Sequence
  Description of Artificial Sequence: Synthetic oligonucleotide
  Sense strand starting at position 2449 of SEQ ID NO: 1885244
ugcaguugagaagaaaugu

SEQ ID NO: 2327471 - RNA, 19 nt, Artificial Sequence
  Description of Artificial Sequence: Synthetic oligonucleotide
  Antisense strand to SEQ ID NO: 2327470
acauuucuucucaacugca

SEQ ID NO: 2327472 - RNA, 19 nt, Artificial Sequence
  Description of Artificial Sequence: Synthetic oligonucleotide
  Sense strand starting at position 2483 of SEQ ID NO: 1885244
ugucaccauguggaaauua

SEQ ID NO: 2327473 - RNA, 19 nt, Artificial Sequence
  Description of Artificial Sequence: Synthetic oligonucleotide
  Antisense strand to SEQ ID NO: 2327472
uaauuuccacauggugaca

SEQ ID NO: 2327474 - RNA, 19 nt, Artificial Sequence
  Description of Artificial Sequence: Synthetic oligonucleotide
  Sense strand starting at position 3071 of SEQ ID NO: 1885244
ggccgugcggcccuuaauu

SEQ ID NO: 2327475 - RNA, 19 nt, Artificial Sequence
  Description of Artificial Sequence: Synthetic oligonucleotide
  Antisense strand to SEQ ID NO: 2327474
aauuaagggccgcacggcc

SEQ ID NO: 2327476 - RNA, 19 nt, Artificial Sequence
  Description of Artificial Sequence: Synthetic oligonucleotide
  Sense strand starting at position 3303 of SEQ ID NO: 1885244
aaagcauugguccaucaag

SEQ ID NO: 2327477 - RNA, 19 nt, Artificial Sequence
  Description of Artificial Sequence: Synthetic oligonucleotide
  Antisense strand to SEQ ID NO: 2327476
cuugauggaccaaugcuuu

SEQ ID NO: 2327478 - RNA, 19 nt, Artificial Sequence
  Description of Artificial Sequence: Synthetic oligonucleotide
  Sense strand starting at position 3371 of SEQ ID NO: 1885244
uggcuuauggcuuauaaug

SEQ ID NO: 2327479 - RNA, 19 nt, Artificial Sequence
  Description of Artificial Sequence: Synthetic oligonucleotide
  Antisense strand to SEQ ID NO: 2327478
cauuauaagccauaagcca

SEQ ID NO: 2327480 - RNA, 19 nt, Artificial Sequence
  Description of Artificial Sequence: Synthetic oligonucleotide
  Sense strand starting at position 3391 of SEQ ID NO: 1885244
gggaaucugguccaugguu

SEQ ID NO: 2327481 - RNA, 19 nt, Artificial Sequence
  Description of Artificial Sequence: Synthetic oligonucleotide
  Antisense strand to SEQ ID NO: 2327480
aaccauggaccagauuccc

SEQ ID NO: 2327482 - RNA, 19 nt, Artificial Sequence
  Description of Artificial Sequence: Synthetic oligonucleotide
  Sense strand starting at position 3634 of SEQ ID NO: 1885244
acuuacuguugauuaacga

SEQ ID NO: 2327483 - RNA, 19 nt, Artificial Sequence
  Description of Artificial Sequence: Synthetic oligonucleotide
  Antisense strand to SEQ ID NO: 2327482
ucguuaaucaacaguaagu

SEQ ID NO: 2327484 - RNA, 19 nt, Artificial Sequence
  Description of Artificial Sequence: Synthetic oligonucleotide
  Sense strand starting at position 311 of SEQ ID NO: 1885245
gccugaccuugauuuguau

SEQ ID NO: 2327485 - RNA, 19 nt, Artificial Sequence
  Description of Artificial Sequence: Synthetic oligonucleotide
  Antisense strand to SEQ ID NO: 2327484
auacaaaucaaggucaggc

SEQ ID NO: 2327486 - RNA, 19 nt, Artificial Sequence
  Description of Artificial Sequence: Synthetic oligonucleotide
  Sense strand starting at position 417 of SEQ ID NO: 1885245
ucaaucuuacaguauguuu

SEQ ID NO: 2327487 - RNA, 19 nt, Artificial Sequence
  Description of Artificial Sequence: Synthetic oligonucleotide
  Antisense strand to SEQ ID NO: 2327486
aaacauacuguaagauuga

SEQ ID NO: 2327488 - RNA, 19 nt, Artificial Sequence
  Description of Artificial Sequence: Synthetic oligonucleotide
  Sense strand starting at position 598 of SEQ ID NO: 1885245
aacuauuauugugugaaug

SEQ ID NO: 2327489 - RNA, 19 nt, Artificial Sequence
  Description of Artificial Sequence: Synthetic oligonucleotide
  Antisense strand to SEQ ID NO: 2327488
cauucacacaauaauaguu

SEQ ID NO: 2327490 - RNA, 19 nt, Artificial Sequence
  Description of Artificial Sequence: Synthetic oligonucleotide
  Sense strand starting at position 609 of SEQ ID NO: 1885245
ugugaaugucuacaucuuu

SEQ ID NO: 2327491 - RNA, 19 nt, Artificial Sequence
  Description of Artificial Sequence: Synthetic oligonucleotide
  Antisense strand to SEQ ID NO: 2327490
aaagauguagacauucaca

SEQ ID NO: 2327492 - RNA, 19 nt, Artificial Sequence
  Description of Artificial Sequence: Synthetic oligonucleotide
  Sense strand starting at position 702 of SEQ ID NO: 1885245
ggucaucuuguaggauuga

SEQ ID NO: 2327493 - RNA, 19 nt, Artificial Sequence
  Description of Artificial Sequence: Synthetic oligonucleotide
  Antisense strand to SEQ ID NO: 2327492
ucaauccuacaagaugacc

SEQ ID NO: 2327494 - RNA, 19 nt, Artificial Sequence
  Description of Artificial Sequence: Synthetic oligonucleotide
  Sense strand starting at position 735 of SEQ ID NO: 1885245
uguagugucguucuuuguu

SEQ ID NO: 2327495 - RNA, 19 nt, Artificial Sequence
  Description of Artificial Sequence: Synthetic oligonucleotide
  Antisense strand to SEQ ID NO: 2327494
aacaaagaacgacacuaca

SEQ ID NO: 2327496 - RNA, 19 nt, Artificial Sequence
  Description of Artificial Sequence: Synthetic oligonucleotide
  Sense strand starting at position 778 of SEQ ID NO: 1885245
agucuauucuaucugacau

SEQ ID NO: 2327497 - RNA, 19 nt, Artificial Sequence
  Description of Artificial Sequence: Synthetic oligonucleotide
  Antisense strand to SEQ ID NO: 2327496
augucagauagaauagacu

SEQ ID NO: 2327498 - RNA, 19 nt, Artificial Sequence
  Description of Artificial Sequence: Synthetic oligonucleotide
  Sense strand starting at position 813 of SEQ ID NO: 1885245
gcuccuuuauguuccauuu

SEQ ID NO: 2327499 - RNA, 19 nt, Artificial Sequence
  Description of Artificial Sequence: Synthetic oligonucleotide
  Antisense strand to SEQ ID NO: 2327498
aaauggaacauaaaggagc

SEQ ID NO: 2327500 - RNA, 19 nt, Artificial Sequence
  Description of Artificial Sequence: Synthetic oligonucleotide
  Sense strand starting at position 856 of SEQ ID NO: 1885245
uuaccuugagucuauggau

SEQ ID NO: 2327501 - RNA, 19 nt, Artificial Sequence
  Description of Artificial Sequence: Synthetic oligonucleotide
  Antisense strand to SEQ ID NO: 2327500
auccauagacucaagguaa

SEQ ID NO: 2327502 - RNA, 19 nt, Artificial Sequence
  Description of Artificial Sequence: Synthetic oligonucleotide
  Sense strand starting at position 907 of SEQ ID NO: 1885245
uggagauggaugggucuuu

SEQ ID NO: 2327503 - RNA, 19 nt, Artificial Sequence
  Description of Artificial Sequence: Synthetic oligonucleotide
  Antisense strand to SEQ ID NO: 2327502
aaagacccauccaucucca

SEQ ID NO: 2327504 - RNA, 19 nt, Artificial Sequence
  Description of Artificial Sequence: Synthetic oligonucleotide
  Sense strand starting at position 1016 of SEQ ID NO: 1885245
ugauccuaucaugaaguuu

SEQ ID NO: 2327505 - RNA, 19 nt, Artificial Sequence
  Description of Artificial Sequence: Synthetic oligonucleotide
  Antisense strand to SEQ ID NO: 2327504
aaacuucaugauaggauca

SEQ ID NO: 2327506 - RNA, 19 nt, Artificial Sequence
  Description of Artificial Sequence: Synthetic oligonucleotide
  Sense strand starting at position 1110 of SEQ ID NO: 1885245
ccugguaacagguauuguu

SEQ ID NO: 2327507 - RNA, 19 nt, Artificial Sequence
  Description of Artificial Sequence: Synthetic oligonucleotide
  Antisense strand to SEQ ID NO: 2327506
aacaauaccuguuaccagg

SEQ ID NO: 2327508 - RNA, 19 nt, Artificial Sequence
  Description of Artificial Sequence: Synthetic oligonucleotide
  Sense strand starting at position 1152 of SEQ ID NO: 1885245
uucuaaggaucucuuguga

SEQ ID NO: 2327509 - RNA, 19 nt, Artificial Sequence
  Description of Artificial Sequence: Synthetic oligonucleotide
  Antisense strand to SEQ ID NO: 2327508
ucacaagagauccuuagaa

SEQ ID NO: 2327510 - RNA, 19 nt, Artificial Sequence
  Description of Artificial Sequence: Synthetic oligonucleotide
  Sense strand starting at position 1237 of SEQ ID NO: 1885245
auguaugaagcuuaguaug

SEQ ID NO: 2327511 - RNA, 19 nt, Artificial Sequence
  Description of Artificial Sequence: Synthetic oligonucleotide
  Antisense strand to SEQ ID NO: 2327510
cauacuaagcuucauacau

SEQ ID NO: 2327512 - RNA, 19 nt, Artificial Sequence
  Description of Artificial Sequence: Synthetic oligonucleotide
  Sense strand starting at position 1252 of SEQ ID NO: 1885245
uaugacagggugugaaauu

SEQ ID NO: 2327513 - RNA, 19 nt, Artificial Sequence
  Description of Artificial Sequence: Synthetic oligonucleotide
  Antisense strand to SEQ ID NO: 2327512
aauuucacacccugucaua

SEQ ID NO: 2327514 - RNA, 19 nt, Artificial Sequence
  Description of Artificial Sequence: Synthetic oligonucleotide
  Sense strand starting at position 1262 of SEQ ID NO: 1885245
ugugaaauucuuggucaga

SEQ ID NO: 2327515 - RNA, 19 nt, Artificial Sequence
  Description of Artificial Sequence: Synthetic oligonucleotide
  Antisense strand to SEQ ID NO: 2327514
ucugaccaagaauuucaca

SEQ ID NO: 2327516 - RNA, 19 nt, Artificial Sequence
  Description of Artificial Sequence: Synthetic oligonucleotide
  Sense strand starting at position 1263 of SEQ ID NO: 1885245
gugaaauucuuggucagag

SEQ ID NO: 2327517 - RNA, 19 nt, Artificial Sequence
  Description of Artificial Sequence: Synthetic oligonucleotide
  Antisense strand to SEQ ID NO: 2327516
cucugaccaagaauuucac

SEQ ID NO: 2327518 - RNA, 19 nt, Artificial Sequence
  Description of Artificial Sequence: Synthetic oligonucleotide
  Sense strand starting at position 1264 of SEQ ID NO: 1885245
ugaaauucuuggucagagu

SEQ ID NO: 2327519 - RNA, 19 nt, Artificial Sequence
  Description of Artificial Sequence: Synthetic oligonucleotide
  Antisense strand to SEQ ID NO: 2327518
acucugaccaagaauuuca

SEQ ID NO: 2327520 - RNA, 19 nt, Artificial Sequence
  Description of Artificial Sequence: Synthetic oligonucleotide
  Sense strand starting at position 1265 of SEQ ID NO: 1885245
gaaauucuuggucagaguu

SEQ ID NO: 2327521 - RNA, 19 nt, Artificial Sequence
  Description of Artificial Sequence: Synthetic oligonucleotide
  Antisense strand to SEQ ID NO: 2327520
aacucugaccaagaauuuc

SEQ ID NO: 2327522 - RNA, 19 nt, Artificial Sequence
  Description of Artificial Sequence: Synthetic oligonucleotide
  Sense strand starting at position 1498 of SEQ ID NO: 1885245
gaauuucuuguaugugcau

SEQ ID NO: 2327523 - RNA, 19 nt, Artificial Sequence
  Description of Artificial Sequence: Synthetic oligonucleotide
  Antisense strand to SEQ ID NO: 2327522
augcacauacaagaaauuc

SEQ ID NO: 2327524 - RNA, 19 nt, Artificial Sequence
  Description of Artificial Sequence: Synthetic oligonucleotide
  Sense strand starting at position 1908 of SEQ ID NO: 1885245
guguguugauuugcaaucu

SEQ ID NO: 2327525 - RNA, 19 nt, Artificial Sequence
  Description of Artificial Sequence: Synthetic oligonucleotide
  Antisense strand to SEQ ID NO: 2327524
agauugcaaaucaacacac

SEQ ID NO: 2327526 - RNA, 19 nt, Artificial Sequence
  Description of Artificial Sequence: Synthetic oligonucleotide
  Sense strand starting at position 1920 of SEQ ID NO: 1885245
gcaaucuuaccuugaauug

SEQ ID NO: 2327527 - RNA, 19 nt, Artificial Sequence
  Description of Artificial Sequence: Synthetic oligonucleotide
  Antisense strand to SEQ ID NO: 2327526
caauucaagguaagauugc

SEQ ID NO: 2327528 - RNA, 19 nt, Artificial Sequence
  Description of Artificial Sequence: Synthetic oligonucleotide
  Sense strand starting at position 2272 of SEQ ID NO: 1885245
aggugaagagcuggauagu

SEQ ID NO: 2327529 - RNA, 19 nt, Artificial Sequence
  Description of Artificial Sequence: Synthetic oligonucleotide
  Antisense strand to SEQ ID NO: 2327528
acuauccagcucuucaccu

SEQ ID NO: 2327530 - RNA, 19 nt, Artificial Sequence
  Description of Artificial Sequence: Synthetic oligonucleotide
  Sense strand starting at position 2545 of SEQ ID NO: 1885245
acuguagucuaucuccaga

SEQ ID NO: 2327531 - RNA, 19 nt, Artificial Sequence
  Description of Artificial Sequence: Synthetic oligonucleotide
  Antisense strand to SEQ ID NO: 2327530
ucuggagauagacuacagu

SEQ ID NO: 2327532 - RNA, 19 nt, Artificial Sequence
  Description of Artificial Sequence: Synthetic oligonucleotide
  Sense strand starting at position 2548 of SEQ ID NO: 1885245
guagucuaucuccagacca

SEQ ID NO: 2327533 - RNA, 19 nt, Artificial Sequence
  Description of Artificial Sequence: Synthetic oligonucleotide
  Antisense strand to SEQ ID NO: 2327532
uggucuggagauagacuac

SEQ ID NO: 2327534 - RNA, 19 nt, Artificial Sequence
  Description of Artificial Sequence: Synthetic oligonucleotide
  Sense strand starting at position 2565 of SEQ ID NO: 1885245
cacagugugguugauugaa

SEQ ID NO: 2327535 - RNA, 19 nt, Artificial Sequence
  Description of Artificial Sequence: Synthetic oligonucleotide
  Antisense strand to SEQ ID NO: 2327534
uucaaucaaccacacugug

SEQ ID NO: 2327536 - RNA, 19 nt, Artificial Sequence
  Description of Artificial Sequence: Synthetic oligonucleotide
  Sense strand starting at position 2567 of SEQ ID NO: 1885245
cagugugguugauugaaag

SEQ ID NO: 2327537 - RNA, 19 nt, Artificial Sequence
  Description of Artificial Sequence: Synthetic oligonucleotide
  Antisense strand to SEQ ID NO: 2327536
cuuucaaucaaccacacug

SEQ ID NO: 2327538 - RNA, 19 nt, Artificial Sequence
  Description of Artificial Sequence: Synthetic oligonucleotide
  Sense strand starting at position 2628 of SEQ ID NO: 1885245
uuucuuugggccuaucauu

SEQ ID NO: 2327539 - RNA, 19 nt, Artificial Sequence
  Description of Artificial Sequence: Synthetic oligonucleotide
  Antisense strand to SEQ ID NO: 2327538
aaugauaggcccaaagaaa

SEQ ID NO: 2327540 - RNA, 19 nt, Artificial Sequence
  Description of Artificial Sequence: Synthetic oligonucleotide
  Sense strand starting at position 2651 of SEQ ID NO: 1885245
ucacuaugauuaucaugua

SEQ ID NO: 2327541 - RNA, 19 nt, Artificial Sequence
  Description of Artificial Sequence: Synthetic oligonucleotide
  Antisense strand to SEQ ID NO: 2327540
uacaugauaaucauaguga

SEQ ID NO: 2327542 - RNA, 19 nt, Artificial Sequence
  Description of Artificial Sequence: Synthetic oligonucleotide
  Sense strand starting at position 2725 of SEQ ID NO: 1885245
acgguuguucuccaagauu

SEQ ID NO: 2327543 - RNA, 19 nt, Artificial Sequence
  Description of Artificial Sequence: Synthetic oligonucleotide
  Antisense strand to SEQ ID NO: 2327542
aaucuuggagaacaaccgu

SEQ ID NO: 2327544 - RNA, 19 nt, Artificial Sequence
  Description of Artificial Sequence: Synthetic oligonucleotide
  Sense strand starting at position 2734 of SEQ ID NO: 1885245
cuccaagauuguguacauu

SEQ ID NO: 2327545 - RNA, 19 nt, Artificial Sequence
  Description of Artificial Sequence: Synthetic oligonucleotide
  Antisense strand to SEQ ID NO: 2327544
aauguacacaaucuuggag

SEQ ID NO: 2327546 - RNA, 19 nt, Artificial Sequence
  Description of Artificial Sequence: Synthetic oligonucleotide
  Sense strand starting at position 2829 of SEQ ID NO: 1885245
augacauacugcuugagaa

SEQ ID NO: 2327547 - RNA, 19 nt, Artificial Sequence
  Description of Artificial Sequence: Synthetic oligonucleotide
  Antisense strand to SEQ ID NO: 2327546
uucucaagcaguaugucau

SEQ ID NO: 2327548 - RNA, 19 nt, Artificial Sequence
  Description of Artificial Sequence: Synthetic oligonucleotide
  Sense strand starting at position 2830 of SEQ ID NO: 1885245
ugacauacugcuugagaaa

SEQ ID NO: 2327549 - RNA, 19 nt, Artificial Sequence
  Description of Artificial Sequence: Synthetic oligonucleotide
  Antisense strand to SEQ ID NO: 2327548
uuucucaagcaguauguca

SEQ ID NO: 2327550 - RNA, 19 nt, Artificial Sequence
  Description of Artificial Sequence: Synthetic oligonucleotide
  Sense strand starting at position 3006 of SEQ ID NO: 1885245
gggaaucagacaugcuucu

SEQ ID NO: 2327551 - RNA, 19 nt, Artificial Sequence
  Description of Artificial Sequence: Synthetic oligonucleotide
  Antisense strand to SEQ ID NO: 2327550
agaagcaugucugauuccc

SEQ ID NO: 2327552 - RNA, 19 nt, Artificial Sequence
  Description of Artificial Sequence: Synthetic oligonucleotide
  Sense strand starting at position 3061 of SEQ ID NO: 1885245
gccauucugaauuggagga

SEQ ID NO: 2327553 - RNA, 19 nt, Artificial Sequence
  Description of Artificial Sequence: Synthetic oligonucleotide
  Antisense strand to SEQ ID NO: 2327552
uccuccaauucagaauggc

SEQ ID NO: 2327554 - RNA, 19 nt, Artificial Sequence
  Description of Artificial Sequence: Synthetic oligonucleotide
  Sense strand starting at position 3074 of SEQ ID NO: 1885245
ggaggaugauggucuagcu

SEQ ID NO: 2327555 - RNA, 19 nt, Artificial Sequence
  Description of Artificial Sequence: Synthetic oligonucleotide
  Antisense strand to SEQ ID NO: 2327554
agcuagaccaucauccucc

SEQ ID NO: 2327556 - RNA, 19 nt, Artificial Sequence
  Description of Artificial Sequence: Synthetic oligonucleotide
  Sense strand starting at position 3636 of SEQ ID NO: 1885245
gggcauucgagucacaucu

SEQ ID NO: 2327557 - RNA, 19 nt, Artificial Sequence
  Description of Artificial Sequence: Synthetic oligonucleotide
  Antisense strand to SEQ ID NO: 2327556
agaugugacucgaaugccc

SEQ ID NO: 2327558 - RNA, 19 nt, Artificial Sequence
  Description of Artificial Sequence: Synthetic oligonucleotide
  Sense strand starting at position 3696 of SEQ ID NO: 1885245
gcacuaucauaggcauuga

SEQ ID NO: 2327559 - RNA, 19 nt, Artificial Sequence
  Description of Artificial Sequence: Synthetic oligonucleotide
  Antisense strand to SEQ ID NO: 2327558
ucaaugccuaugauagugc

SEQ ID NO: 2327560 - RNA, 19 nt, Artificial Sequence
  Description of Artificial Sequence: Synthetic oligonucleotide
  Sense strand starting at position 3919 of SEQ ID NO: 1885245
ucacuugagguccaucauu

SEQ ID NO: 2327561 - RNA, 19 nt, Artificial Sequence
  Description of Artificial Sequence: Synthetic oligonucleotide
  Antisense strand to SEQ ID NO: 2327560
aaugauggaccucaaguga

SEQ ID NO: 2327562 - RNA, 19 nt, Artificial Sequence
  Description of Artificial Sequence: Synthetic oligonucleotide
  Sense strand starting at position 3976 of SEQ ID NO: 1885245
ggcuccauuggguaacagu

SEQ ID NO: 2327563 - RNA, 19 nt, Artificial Sequence
  Description of Artificial Sequence: Synthetic oligonucleotide
  Antisense strand to SEQ ID NO: 2327562
acuguuacccaauggagcc

SEQ ID NO: 2327564 - RNA, 19 nt, Artificial Sequence
  Description of Artificial Sequence: Synthetic oligonucleotide
  Sense strand starting at position 172 of SEQ ID NO: 1885246
agagguggcaugugaguuu

SEQ ID NO: 2327565 - RNA, 19 nt, Artificial Sequence
  Description of Artificial Sequence: Synthetic oligonucleotide
  Antisense strand to SEQ ID NO: 2327564
aaacucacaugccaccucu

SEQ ID NO: 2327566 - RNA, 19 nt, Artificial Sequence
  Description of Artificial Sequence: Synthetic oligonucleotide
  Sense strand starting at position 201 of SEQ ID NO: 1885246
aucucucagcccugaguuu

SEQ ID NO: 2327567 - RNA, 19 nt, Artificial Sequence
  Description of Artificial Sequence: Synthetic oligonucleotide
  Antisense strand to SEQ ID NO: 2327566
aaacucagggcugagagau

SEQ ID NO: 2327568 - RNA, 19 nt, Artificial Sequence
  Description of Artificial Sequence: Synthetic oligonucleotide
  Sense strand starting at position 279 of SEQ ID NO: 1885246
acgagaucaugugcauaaa

SEQ ID NO: 2327569 - RNA, 19 nt, Artificial Sequence
  Description of Artificial Sequence: Synthetic oligonucleotide
  Antisense strand to SEQ ID NO: 2327568
uuuaugcacaugaucucgu

SEQ ID NO: 2327570 - RNA, 19 nt, Artificial Sequence
  Description of Artificial Sequence: Synthetic oligonucleotide
  Sense strand starting at position 378 of SEQ ID NO: 1885246
augauuuguguugguuaau

SEQ ID NO: 2327571 - RNA, 19 nt, Artificial Sequence
  Description of Artificial Sequence: Synthetic oligonucleotide
  Antisense strand to SEQ ID NO: 2327570
auuaaccaacacaaaucau

SEQ ID NO: 2327572 - RNA, 19 nt, Artificial Sequence
  Description of Artificial Sequence: Synthetic oligonucleotide
  Sense strand starting at position 379 of SEQ ID NO: 1885246
ugauuuguguugguuaauu

SEQ ID NO: 2327573 - RNA, 19 nt, Artificial Sequence
  Description of Artificial Sequence: Synthetic oligonucleotide
  Antisense strand to SEQ ID NO: 2327572
aauuaaccaacacaaauca

SEQ ID NO: 2327574 - RNA, 19 nt, Artificial Sequence
  Description of Artificial Sequence: Synthetic oligonucleotide
  Sense strand starting at position 415 of SEQ ID NO: 1885246
uggagaaguucucugcaau

SEQ ID NO: 2327575 - RNA, 19 nt, Artificial Sequence
  Description of Artificial Sequence: Synthetic oligonucleotide
  Antisense strand to SEQ ID NO: 2327574
auugcagagaacuucucca

SEQ ID NO: 2327576 - RNA, 19 nt, Artificial Sequence
  Description of Artificial Sequence: Synthetic oligonucleotide
  Sense strand starting at position 416 of SEQ ID NO: 1885246
ggagaaguucucugcaaua

SEQ ID NO: 2327577 - RNA, 19 nt, Artificial Sequence
  Description of Artificial Sequence: Synthetic oligonucleotide
  Antisense strand to SEQ ID NO: 2327576
uauugcagagaacuucucc

SEQ ID NO: 2327578 - RNA, 19 nt, Artificial Sequence
  Description of Artificial Sequence: Synthetic oligonucleotide
  Sense strand starting at position 480 of SEQ ID NO: 1885246
uucuguauucuguaggcau

SEQ ID NO: 2327579 - RNA, 19 nt, Artificial Sequence
  Description of Artificial Sequence: Synthetic oligonucleotide
  Antisense strand to SEQ ID NO: 2327578
augccuacagaauacagaa

SEQ ID NO: 2327580 - RNA, 19 nt, Artificial Sequence
  Description of Artificial Sequence: Synthetic oligonucleotide
  Sense strand starting at position 482 of SEQ ID NO: 1885246
cuguauucuguaggcauuu

SEQ ID NO: 2327581 - RNA, 19 nt, Artificial Sequence
  Description of Artificial Sequence: Synthetic oligonucleotide
  Antisense strand to SEQ ID NO: 2327580
aaaugccuacagaauacag

SEQ ID NO: 2327582 - RNA, 19 nt, Artificial Sequence
  Description of Artificial Sequence: Synthetic oligonucleotide
  Sense strand starting at position 483 of SEQ ID NO: 1885246
uguauucuguaggcauuua

SEQ ID NO: 2327583 - RNA, 19 nt, Artificial Sequence
  Description of Artificial Sequence: Synthetic oligonucleotide
  Antisense strand to SEQ ID NO: 2327582
uaaaugccuacagaauaca

SEQ ID NO: 2327584 - RNA, 19 nt, Artificial Sequence
  Description of Artificial Sequence: Synthetic oligonucleotide
  Sense strand starting at position 491 of SEQ ID NO: 1885246
guaggcauuuaaggaaauu

SEQ ID NO: 2327585 - RNA, 19 nt, Artificial Sequence
  Description of Artificial Sequence: Synthetic oligonucleotide
  Antisense strand to SEQ ID NO: 2327584
aauuuccuuaaaugccuac

SEQ ID NO: 2327586 - RNA, 19 nt, Artificial Sequence
  Description of Artificial Sequence: Synthetic oligonucleotide
  Sense strand starting at position 1293 of SEQ ID NO: 1885246
ugacaaggcuuccuaacuu

SEQ ID NO: 2327587 - RNA, 19 nt, Artificial Sequence
  Description of Artificial Sequence: Synthetic oligonucleotide
  Antisense strand to SEQ ID NO: 2327586
aaguuaggaagccuuguca

SEQ ID NO: 2327588 - RNA, 19 nt, Artificial Sequence
  Description of Artificial Sequence: Synthetic oligonucleotide
  Sense strand starting at position 1321 of SEQ ID NO: 1885246
ggacauucacguuauggua

SEQ ID NO: 2327589 - RNA, 19 nt, Artificial Sequence
  Description of Artificial Sequence: Synthetic oligonucleotide
  Antisense strand to SEQ ID NO: 2327588
uaccauaacgugaaugucc

SEQ ID NO: 2327590 - RNA, 19 nt, Artificial Sequence
  Description of Artificial Sequence: Synthetic oligonucleotide
  Sense strand starting at position 1363 of SEQ ID NO: 1885246
cggagucauagucaucaaa

SEQ ID NO: 2327591 - RNA, 19 nt, Artificial Sequence
  Description of Artificial Sequence: Synthetic oligonucleotide
  Antisense strand to SEQ ID NO: 2327590
uuugaugacuaugacuccg

SEQ ID NO: 2327592 - RNA, 19 nt, Artificial Sequence
  Description of Artificial Sequence: Synthetic oligonucleotide
  Sense strand starting at position 1365 of SEQ ID NO: 1885246
gagucauagucaucaaagg

SEQ ID NO: 2327593 - RNA, 19 nt, Artificial Sequence
  Description of Artificial Sequence: Synthetic oligonucleotide
  Antisense strand to SEQ ID NO: 2327592
ccuuugaugacuaugacuc

SEQ ID NO: 2327594 - RNA, 19 nt, Artificial Sequence
  Description of Artificial Sequence: Synthetic oligonucleotide
  Sense strand starting at position 1366 of SEQ ID NO: 1885246
agucauagucaucaaaggu

SEQ ID NO: 2327595 - RNA, 19 nt, Artificial Sequence
  Description of Artificial Sequence: Synthetic oligonucleotide
  Antisense strand to SEQ ID NO: 2327594
accuuugaugacuaugacu

SEQ ID NO: 2327596 - RNA, 19 nt, Artificial Sequence
  Description of Artificial Sequence: Synthetic oligonucleotide
  Sense strand starting at position 1492 of SEQ ID NO: 1885246
uccucagugucuucuuuaa

SEQ ID NO: 2327597 - RNA, 19 nt, Artificial Sequence
  Description of Artificial Sequence: Synthetic oligonucleotide
  Antisense strand to SEQ ID NO: 2327596
uuaaagaagacacugagga

SEQ ID NO: 2327598 - RNA, 19 nt, Artificial Sequence
  Description of Artificial Sequence: Synthetic oligonucleotide
  Sense strand starting at position 2011 of SEQ ID NO: 1885246
gcgugcuugguguuuggau

SEQ ID NO: 2327599 - RNA, 19 nt, Artificial Sequence
  Description of Artificial Sequence: Synthetic oligonucleotide
  Antisense strand to SEQ ID NO: 2327598
auccaaacaccaagcacgc

SEQ ID NO: 2327600 - RNA, 19 nt, Artificial Sequence
  Description of Artificial Sequence: Synthetic oligonucleotide
  Sense strand starting at position 2054 of SEQ ID NO: 1885246
gcguuccucauugcucaga

SEQ ID NO: 2327601 - RNA, 19 nt, Artificial Sequence
  Description of Artificial Sequence: Synthetic oligonucleotide
  Antisense strand to SEQ ID NO: 2327600
ucugagcaaugaggaacgc

SEQ ID NO: 2327602 - RNA, 19 nt, Artificial Sequence
  Description of Artificial Sequence: Synthetic oligonucleotide
  Sense strand starting at position 2056 of SEQ ID NO: 1885246
guuccucauugcucagaau

SEQ ID NO: 2327603 - RNA, 19 nt, Artificial Sequence
  Description of Artificial Sequence: Synthetic oligonucleotide
  Antisense strand to SEQ ID NO: 2327602
auucugagcaaugaggaac

SEQ ID NO: 2327604 - RNA, 19 nt, Artificial Sequence
  Description of Artificial Sequence: Synthetic oligonucleotide
  Sense strand starting at position 2057 of SEQ ID NO: 1885246
uuccucauugcucagaaug

SEQ ID NO: 2327605 - RNA, 19 nt, Artificial Sequence
  Description of Artificial Sequence: Synthetic oligonucleotide
  Antisense strand to SEQ ID NO: 2327604
cauucugagcaaugaggaa

SEQ ID NO: 2327606 - RNA, 19 nt, Artificial Sequence
  Description of Artificial Sequence: Synthetic oligonucleotide
  Sense strand starting at position 2210 of SEQ ID NO: 1885246
ggugguauccacgggcaga

SEQ ID NO: 2327607 - RNA, 19 nt, Artificial Sequence
  Description of Artificial Sequence: Synthetic oligonucleotide
  Antisense strand to SEQ ID NO: 2327606
ucugcccguggauaccacc

SEQ ID NO: 2327608 - RNA, 19 nt, Artificial Sequence
  Description of Artificial Sequence: Synthetic oligonucleotide
  Sense strand starting at position 2211 of SEQ ID NO: 1885246
gugguauccacgggcagaa

SEQ ID NO: 2327609 - RNA, 19 nt, Artificial Sequence
  Description of Artificial Sequence: Synthetic oligonucleotide
  Antisense strand to SEQ ID NO: 2327608
uucugcccguggauaccac

SEQ ID NO: 2327610 - RNA, 19 nt, Artificial Sequence
  Description of Artificial Sequence: Synthetic oligonucleotide
  Sense strand starting at position 3220 of SEQ ID NO: 1885246
accagucuuauugguuagu

SEQ ID NO: 2327611 - RNA, 19 nt, Artificial Sequence
  Description of Artificial Sequence: Synthetic oligonucleotide
  Antisense strand to SEQ ID NO: 2327610
acuaaccaauaagacuggu

SEQ ID NO: 2327612 - RNA, 19 nt, Artificial Sequence
  Description of Artificial Sequence: Synthetic oligonucleotide
  Sense strand starting at position 3222 of SEQ ID NO: 1885246
cagucuuauugguuaguuu

SEQ ID NO: 2327613 - RNA, 19 nt, Artificial Sequence
  Description of Artificial Sequence: Synthetic oligonucleotide
  Antisense strand to SEQ ID NO: 2327612
aaacuaaccaauaagacug

SEQ ID NO: 2327614 - RNA, 19 nt, Artificial Sequence
  Description of Artificial Sequence: Synthetic oligonucleotide
  Sense strand starting at position 3233 of SEQ ID NO: 1885246
guuaguuugcuuugaauga

SEQ ID NO: 2327615 - RNA, 19 nt, Artificial Sequence
  Description of Artificial Sequence: Synthetic oligonucleotide
  Antisense strand to SEQ ID NO: 2327614
ucauucaaagcaaacuaac

SEQ ID NO: 2327616 - RNA, 19 nt, Artificial Sequence
  Description of Artificial Sequence: Synthetic oligonucleotide
  Sense strand starting at position 3237 of SEQ ID NO: 1885246
guuugcuuugaaugaagac

SEQ ID NO: 2327617 - RNA, 19 nt, Artificial Sequence
  Description of Artificial Sequence: Synthetic oligonucleotide
  Antisense strand to SEQ ID NO: 2327616
gucuucauucaaagcaaac

SEQ ID NO: 2327618 - RNA, 19 nt, Artificial Sequence
  Description of Artificial Sequence: Synthetic oligonucleotide
  Sense strand starting at position 3389 of SEQ ID NO: 1885246
cuauguguagcaugagaca

SEQ ID NO: 2327619 - RNA, 19 nt, Artificial Sequence
  Description of Artificial Sequence: Synthetic oligonucleotide
  Antisense strand to SEQ ID NO: 2327618
ugucucaugcuacacauag

SEQ ID NO: 2327620 - RNA, 19 nt, Artificial Sequence
  Description of Artificial Sequence: Synthetic oligonucleotide
  Sense strand starting at position 3456 of SEQ ID NO: 1885246
uuguccauuugucugucaa

SEQ ID NO: 2327621 - RNA, 19 nt, Artificial Sequence
  Description of Artificial Sequence: Synthetic oligonucleotide
  Antisense strand to SEQ ID NO: 2327620
uugacagacaaauggacaa

SEQ ID NO: 2327622 - RNA, 19 nt, Artificial Sequence
  Description of Artificial Sequence: Synthetic oligonucleotide
  Sense strand starting at position 3457 of SEQ ID NO: 1885246
uguccauuugucugucaau

SEQ ID NO: 2327623 - RNA, 19 nt, Artificial Sequence
  Description of Artificial Sequence: Synthetic oligonucleotide
  Antisense strand to SEQ ID NO: 2327622
auugacagacaaauggaca

SEQ ID NO: 2327624 - RNA, 19 nt, Artificial Sequence
  Description of Artificial Sequence: Synthetic oligonucleotide
  Sense strand starting at position 3458 of SEQ ID NO: 1885246
guccauuugucugucaaug

SEQ ID NO: 2327625 - RNA, 19 nt, Artificial Sequence
  Description of Artificial Sequence: Synthetic oligonucleotide
  Antisense strand to SEQ ID NO: 2327624
cauugacagacaaauggac

SEQ ID NO: 2327626 - RNA, 19 nt, Artificial Sequence
  Description of Artificial Sequence: Synthetic oligonucleotide
  Sense strand starting at position 3463 of SEQ ID NO: 1885246
uuugucugucaauggaaau

SEQ ID NO: 2327627 - RNA, 19 nt, Artificial Sequence
  Description of Artificial Sequence: Synthetic oligonucleotide
  Antisense strand to SEQ ID NO: 2327626
auuuccauugacagacaaa

SEQ ID NO: 2327628 - RNA, 19 nt, Artificial Sequence
  Description of Artificial Sequence: Synthetic oligonucleotide
  Sense strand starting at position 3494 of SEQ ID NO: 1885246
cgcuucuuggcuguuauga

SEQ ID NO: 2327629 - RNA, 19 nt, Artificial Sequence
  Description of Artificial Sequence: Synthetic oligonucleotide
  Antisense strand to SEQ ID NO: 2327628
ucauaacagccaagaagcg

SEQ ID NO: 2327630 - RNA, 19 nt, Artificial Sequence
  Description of Artificial Sequence: Synthetic oligonucleotide
  Sense strand starting at position 3659 of SEQ ID NO: 1885246
gggaccaguuaugugacuu

SEQ ID NO: 2327631 - RNA, 19 nt, Artificial Sequence
  Description of Artificial Sequence: Synthetic oligonucleotide
  Antisense strand to SEQ ID NO: 2327630
aagucacauaacugguccc

SEQ ID NO: 2327632 - RNA, 19 nt, Artificial Sequence
  Description of Artificial Sequence: Synthetic oligonucleotide
  Sense strand starting at position 3660 of SEQ ID NO: 1885246
ggaccaguuaugugacuua

SEQ ID NO: 2327633 - RNA, 19 nt, Artificial Sequence
  Description of Artificial Sequence: Synthetic oligonucleotide
  Antisense strand to SEQ ID NO: 2327632
uaagucacauaacuggucc

SEQ ID NO: 2327634 - RNA, 19 nt, Artificial Sequence
  Description of Artificial Sequence: Synthetic oligonucleotide
  Sense strand starting at position 3671 of SEQ ID NO: 1885246
gugacuuacccaugguaaa

SEQ ID NO: 2327635 - RNA, 19 nt, Artificial Sequence
  Description of Artificial Sequence: Synthetic oligonucleotide
  Antisense strand to SEQ ID NO: 2327634
uuuaccauggguaagucac

SEQ ID NO: 2327636 - RNA, 19 nt, Artificial Sequence
  Description of Artificial Sequence: Synthetic oligonucleotide
  Sense strand starting at position 3690 of SEQ ID NO: 1885246
augauuuggugguaauagu

SEQ ID NO: 2327637 - RNA, 19 nt, Artificial Sequence
  Description of Artificial Sequence: Synthetic oligonucleotide
  Antisense strand to SEQ ID NO: 2327636
acuauuaccaccaaaucau

SEQ ID NO: 2327638 - RNA, 19 nt, Artificial Sequence
  Description of Artificial Sequence: Synthetic oligonucleotide
  Sense strand starting at position 3697 of SEQ ID NO: 1885246
ggugguaauagucacuaac

SEQ ID NO: 2327639 - RNA, 19 nt, Artificial Sequence
  Description of Artificial Sequence: Synthetic oligonucleotide
  Antisense strand to SEQ ID NO: 2327638
guuagugacuauuaccacc

SEQ ID NO: 2327640 - RNA, 19 nt, Artificial Sequence
  Description of Artificial Sequence: Synthetic oligonucleotide
  Sense strand starting at position 3699 of SEQ ID NO: 1885246
ugguaauagucacuaacac

SEQ ID NO: 2327641 - RNA, 19 nt, Artificial Sequence
  Description of Artificial Sequence: Synthetic oligonucleotide
  Antisense strand to SEQ ID NO: 2327640
guguuagugacuauuacca

SEQ ID NO: 2327642 - RNA, 19 nt, Artificial Sequence
  Description of Artificial Sequence: Synthetic oligonucleotide
  Sense strand starting at position 3700 of SEQ ID NO: 1885246
gguaauagucacuaacacu

SEQ ID NO: 2327643 - RNA, 19 nt, Artificial Sequence
  Description of Artificial Sequence: Synthetic oligonucleotide
  Antisense strand to SEQ ID NO: 2327642
aguguuagugacuauuacc

SEQ ID NO: 2327644 - RNA, 19 nt, Artificial Sequence
  Description of Artificial Sequence: Synthetic oligonucleotide
  Sense strand starting at position 175 of SEQ ID NO: 1885247
uccuguccucuggauggua

SEQ ID NO: 2327645 - RNA, 19 nt, Artificial Sequence
  Description of Artificial Sequence: Synthetic oligonucleotide
  Antisense strand to SEQ ID NO: 2327644
uaccauccagaggacagga

SEQ ID NO: 2327646 - RNA, 19 nt, Artificial Sequence
  Description of Artificial Sequence: Synthetic oligonucleotide
  Sense strand starting at position 264 of SEQ ID NO: 1885247
agaaauauucccuggaucu

SEQ ID NO: 2327647 - RNA, 19 nt, Artificial Sequence
  Description of Artificial Sequence: Synthetic oligonucleotide
  Antisense strand to SEQ ID NO: 2327646
agauccagggaauauuucu

SEQ ID NO: 2327648 - RNA, 19 nt, Artificial Sequence
  Description of Artificial Sequence: Synthetic oligonucleotide
  Sense strand starting at position 909 of SEQ ID NO: 1885247
agacaaggcuuguuggaaa

SEQ ID NO: 2327649 - RNA, 19 nt, Artificial Sequence
  Description of Artificial Sequence: Synthetic oligonucleotide
  Antisense strand to SEQ ID NO: 2327648
uuuccaacaagccuugucu

SEQ ID NO: 2327650 - RNA, 19 nt, Artificial Sequence
  Description of Artificial Sequence: Synthetic oligonucleotide
  Sense strand starting at position 1271 of SEQ ID NO: 1885247
uuuguaccuggguaguaaa

SEQ ID NO: 2327651 - RNA, 19 nt, Artificial Sequence
  Description of Artificial Sequence: Synthetic oligonucleotide
  Antisense strand to SEQ ID NO: 2327650
uuuacuacccagguacaaa

SEQ ID NO: 2327652 - RNA, 19 nt, Artificial Sequence
  Description of Artificial Sequence: Synthetic oligonucleotide
  Sense strand starting at position 1443 of SEQ ID NO: 1885247
gaguuugauuaauuggaac

SEQ ID NO: 2327653 - RNA, 19 nt, Artificial Sequence
  Description of Artificial Sequence: Synthetic oligonucleotide
  Antisense strand to SEQ ID NO: 2327652
guuccaauuaaucaaacuc

SEQ ID NO: 2327654 - RNA, 19 nt, Artificial Sequence
  Description of Artificial Sequence: Synthetic oligonucleotide
  Sense strand starting at position 1467 of SEQ ID NO: 1885247
uuuagaagccgcgucuuau

SEQ ID NO: 2327655 - RNA, 19 nt, Artificial Sequence
  Description of Artificial Sequence: Synthetic oligonucleotide
  Antisense strand to SEQ ID NO: 2327654
auaagacgcggcuucuaaa

SEQ ID NO: 2327656 - RNA, 19 nt, Artificial Sequence
  Description of Artificial Sequence: Synthetic oligonucleotide
  Sense strand starting at position 1468 of SEQ ID NO: 1885247
uuagaagccgcgucuuauu

SEQ ID NO: 2327657 - RNA, 19 nt, Artificial Sequence
  Description of Artificial Sequence: Synthetic oligonucleotide
  Antisense strand to SEQ ID NO: 2327656
aauaagacgcggcuucuaa

SEQ ID NO: 2327658 - RNA, 19 nt, Artificial Sequence
  Description of Artificial Sequence: Synthetic oligonucleotide
  Sense strand starting at position 1478 of SEQ ID NO: 1885247
cgucuuauugaauauacag

SEQ ID NO: 2327659 - RNA, 19 nt, Artificial Sequence
  Description of Artificial Sequence: Synthetic oligonucleotide
  Antisense strand to SEQ ID NO: 2327658
cuguauauucaauaagacg

SEQ ID NO: 2327660 - RNA, 19 nt, Artificial Sequence
  Description of Artificial Sequence: Synthetic oligonucleotide
  Sense strand starting at position 1546 of SEQ ID NO: 1885247
cauuaagagucugccuaga

SEQ ID NO: 2327661 - RNA, 19 nt, Artificial Sequence
  Description of Artificial Sequence: Synthetic oligonucleotide
  Antisense strand to SEQ ID NO: 2327660
ucuaggcagacucuuaaug

SEQ ID NO: 2327662 - RNA, 19 nt, Artificial Sequence
  Description of Artificial Sequence: Synthetic oligonucleotide
  Sense strand starting at position 1548 of SEQ ID NO: 1885247
uuaagagucugccuagaua

SEQ ID NO: 2327663 - RNA, 19 nt, Artificial Sequence
  Description of Artificial Sequence: Synthetic oligonucleotide
  Antisense strand to SEQ ID NO: 2327662
uaucuaggcagacucuuaa

SEQ ID NO: 2327664 - RNA, 19 nt, Artificial Sequence
  Description of Artificial Sequence: Synthetic oligonucleotide
  Sense strand starting at position 1563 of SEQ ID NO: 1885247
gauagugugagcuaauuag

SEQ ID NO: 2327665 - RNA, 19 nt, Artificial Sequence
  Description of Artificial Sequence: Synthetic oligonucleotide
  Antisense strand to SEQ ID NO: 2327664
cuaauuagcucacacuauc

SEQ ID NO: 2327666 - RNA, 19 nt, Artificial Sequence
  Description of Artificial Sequence: Synthetic oligonucleotide
  Sense strand starting at position 1631 of SEQ ID NO: 1885247
guucccuuagcucaggaaa

SEQ ID NO: 2327667 - RNA, 19 nt, Artificial Sequence
  Description of Artificial Sequence: Synthetic oligonucleotide
  Antisense strand to SEQ ID NO: 2327666
uuuccugagcuaagggaac

SEQ ID NO: 2327668 - RNA, 19 nt, Artificial Sequence
  Description of Artificial Sequence: Synthetic oligonucleotide
  Sense strand starting at position 1732 of SEQ ID NO: 1885247
uaaagaagucaucggucaa

SEQ ID NO: 2327669 - RNA, 19 nt, Artificial Sequence
  Description of Artificial Sequence: Synthetic oligonucleotide
  Antisense strand to SEQ ID NO: 2327668
uugaccgaugacuucuuua

SEQ ID NO: 2327670 - RNA, 19 nt, Artificial Sequence
  Description of Artificial Sequence: Synthetic oligonucleotide
  Sense strand starting at position 1872 of SEQ ID NO: 1885247
ggcuaaagguggcuuagaa

SEQ ID NO: 2327671 - RNA, 19 nt, Artificial Sequence
  Description of Artificial Sequence: Synthetic oligonucleotide
  Antisense strand to SEQ ID NO: 2327670
uucuaagccaccuuuagcc

SEQ ID NO: 2327672 - RNA, 19 nt, Artificial Sequence
  Description of Artificial Sequence: Synthetic oligonucleotide
  Sense strand starting at position 1880 of SEQ ID NO: 1885247
guggcuuagaaguaaagua

SEQ ID NO: 2327673 - RNA, 19 nt, Artificial Sequence
  Description of Artificial Sequence: Synthetic oligonucleotide
  Antisense strand to SEQ ID NO: 2327672
uacuuuacuucuaagccac

SEQ ID NO: 2327674 - RNA, 19 nt, Artificial Sequence
  Description of Artificial Sequence: Synthetic oligonucleotide
  Sense strand starting at position 1988 of SEQ ID NO: 1885247
auauucguaucacugggaa

SEQ ID NO: 2327675 - RNA, 19 nt, Artificial Sequence
  Description of Artificial Sequence: Synthetic oligonucleotide
  Antisense strand to SEQ ID NO: 2327674
uucccagugauacgaauau

SEQ ID NO: 2327676 - RNA, 19 nt, Artificial Sequence
  Description of Artificial Sequence: Synthetic oligonucleotide
  Sense strand starting at position 1990 of SEQ ID NO: 1885247
auucguaucacugggaaag

SEQ ID NO: 2327677 - RNA, 19 nt, Artificial Sequence
  Description of Artificial Sequence: Synthetic oligonucleotide
  Antisense strand to SEQ ID NO: 2327676
cuuucccagugauacgaau

SEQ ID NO: 2327678 - RNA, 19 nt, Artificial Sequence
  Description of Artificial Sequence: Synthetic oligonucleotide
  Sense strand starting at position 2067 of SEQ ID NO: 1885247
gagcgugaggucaguguau

SEQ ID NO: 2327679 - RNA, 19 nt, Artificial Sequence
  Description of Artificial Sequence: Synthetic oligonucleotide
  Antisense strand to SEQ ID NO: 2327678
auacacugaccucacgcuc

SEQ ID NO: 2327680 - RNA, 19 nt, Artificial Sequence
  Description of Artificial Sequence: Synthetic oligonucleotide
  Sense strand starting at position 2221 of SEQ ID NO: 1885247
gcgcguaauccugucaagg

SEQ ID NO: 2327681 - RNA, 19 nt, Artificial Sequence
  Description of Artificial Sequence: Synthetic oligonucleotide
  Antisense strand to SEQ ID NO: 2327680
ccuugacaggauuacgcgc

SEQ ID NO: 2327682 - RNA, 19 nt, Artificial Sequence
  Description of Artificial Sequence: Synthetic oligonucleotide
  Sense strand starting at position 2222 of SEQ ID NO: 1885247
cgcguaauccugucaaggu

SEQ ID NO: 2327683 - RNA, 19 nt, Artificial Sequence
  Description of Artificial Sequence: Synthetic oligonucleotide
  Antisense strand to SEQ ID NO: 2327682
accuugacaggauuacgcg

SEQ ID NO: 2327684 - RNA, 19 nt, Artificial Sequence
  Description of Artificial Sequence: Synthetic oligonucleotide
  Sense strand starting at position 2229 of SEQ ID NO: 1885247
uccugucaagguuggaaga

SEQ ID NO: 2327685 - RNA, 19 nt, Artificial Sequence
  Description of Artificial Sequence: Synthetic oligonucleotide
  Antisense strand to SEQ ID NO: 2327684
ucuuccaaccuugacagga

SEQ ID NO: 2327686 - RNA, 19 nt, Artificial Sequence
  Description of Artificial Sequence: Synthetic oligonucleotide
  Sense strand starting at position 2845 of SEQ ID NO: 1885247
guggguucuauugaacaac

SEQ ID NO: 2327687 - RNA, 19 nt, Artificial Sequence
  Description of Artificial Sequence: Synthetic oligonucleotide
  Antisense strand to SEQ ID NO: 2327686
guuguucaauagaacccac

SEQ ID NO: 2327688 - RNA, 19 nt, Artificial Sequence
  Description of Artificial Sequence: Synthetic oligonucleotide
  Sense strand starting at position 3032 of SEQ ID NO: 1885247
ggaacaggguaaucaguuu

SEQ ID NO: 2327689 - RNA, 19 nt, Artificial Sequence
  Description of Artificial Sequence: Synthetic oligonucleotide
  Antisense strand to SEQ ID NO: 2327688
aaacugauuacccuguucc

SEQ ID NO: 2327690 - RNA, 19 nt, Artificial Sequence
  Description of Artificial Sequence: Synthetic oligonucleotide
  Sense strand starting at position 3128 of SEQ ID NO: 1885247
ggagcugugcagagugcua

SEQ ID NO: 2327691 - RNA, 19 nt, Artificial Sequence
  Description of Artificial Sequence: Synthetic oligonucleotide
  Antisense strand to SEQ ID NO: 2327690
uagcacucugcacagcucc

SEQ ID NO: 2327692 - RNA, 19 nt, Artificial Sequence
  Description of Artificial Sequence: Synthetic oligonucleotide
  Sense strand starting at position 3238 of SEQ ID NO: 1885247
ucaugacugcccuaauuga

SEQ ID NO: 2327693 - RNA, 19 nt, Artificial Sequence
  Description of Artificial Sequence: Synthetic oligonucleotide
  Antisense strand to SEQ ID NO: 2327692
ucaauuagggcagucauga

SEQ ID NO: 2327694 - RNA, 19 nt, Artificial Sequence
  Description of Artificial Sequence: Synthetic oligonucleotide
  Sense strand starting at position 3285 of SEQ ID NO: 1885247
guuccaauugaucagcuaa

SEQ ID NO: 2327695 - RNA, 19 nt, Artificial Sequence
  Description of Artificial Sequence: Synthetic oligonucleotide
  Antisense strand to SEQ ID NO: 2327694
uuagcugaucaauuggaac

SEQ ID NO: 2327696 - RNA, 19 nt, Artificial Sequence
  Description of Artificial Sequence: Synthetic oligonucleotide
  Sense strand starting at position 3326 of SEQ ID NO: 1885247
uccaguugaucagcuaaca

SEQ ID NO: 2327697 - RNA, 19 nt, Artificial Sequence
  Description of Artificial Sequence: Synthetic oligonucleotide
  Antisense strand to SEQ ID NO: 2327696
uguuagcugaucaacugga

SEQ ID NO: 2327698 - RNA, 19 nt, Artificial Sequence
  Description of Artificial Sequence: Synthetic oligonucleotide
  Sense strand starting at position 3392 of SEQ ID NO: 1885247
aaucacgacuggucuaaau

SEQ ID NO: 2327699 - RNA, 19 nt, Artificial Sequence
  Description of Artificial Sequence: Synthetic oligonucleotide
  Antisense strand to SEQ ID NO: 2327698
auuuagaccagucgugauu

SEQ ID NO: 2327700 - RNA, 19 nt, Artificial Sequence
  Description of Artificial Sequence: Synthetic oligonucleotide
  Sense strand starting at position 3394 of SEQ ID NO: 1885247
ucacgacuggucuaaauga

SEQ ID NO: 2327701 - RNA, 19 nt, Artificial Sequence
  Description of Artificial Sequence: Synthetic oligonucleotide
  Antisense strand to SEQ ID NO: 2327700
ucauuuagaccagucguga

SEQ ID NO: 2327702 - RNA, 19 nt, Artificial Sequence
  Description of Artificial Sequence: Synthetic oligonucleotide
  Sense strand starting at position 3401 of SEQ ID NO: 1885247
uggucuaaaugaucagcua

SEQ ID NO: 2327703 - RNA, 19 nt, Artificial Sequence
  Description of Artificial Sequence: Synthetic oligonucleotide
  Antisense strand to SEQ ID NO: 2327702
uagcugaucauuuagacca

SEQ ID NO: 2327704 - RNA, 19 nt, Artificial Sequence
  Description of Artificial Sequence: Synthetic oligonucleotide
  Sense strand starting at position 3402 of SEQ ID NO: 1885247
ggucuaaaugaucagcuaa

SEQ ID NO: 2327705 - RNA, 19 nt, Artificial Sequence
  Description of Artificial Sequence: Synthetic oligonucleotide
  Antisense strand to SEQ ID NO: 2327704
uuagcugaucauuuagacc

SEQ ID NO: 2327706 - RNA, 19 nt, Artificial Sequence
  Description of Artificial Sequence: Synthetic oligonucleotide
  Sense strand starting at position 3440 of SEQ ID NO: 1885247
ugcacuaauugaucagcaa

SEQ ID NO: 2327707 - RNA, 19 nt, Artificial Sequence
  Description of Artificial Sequence: Synthetic oligonucleotide
  Antisense strand to SEQ ID NO: 2327706
uugcugaucaauuagugca

SEQ ID NO: 2327708 - RNA, 19 nt, Artificial Sequence
  Description of Artificial Sequence: Synthetic oligonucleotide
  Sense strand starting at position 3441 of SEQ ID NO: 1885247
gcacuaauugaucagcaaa

SEQ ID NO: 2327709 - RNA, 19 nt, Artificial Sequence
  Description of Artificial Sequence: Synthetic oligonucleotide
  Antisense strand to SEQ ID NO: 2327708
uuugcugaucaauuagugc

SEQ ID NO: 2327710 - RNA, 19 nt, Artificial Sequence
  Description of Artificial Sequence: Synthetic oligonucleotide
  Sense strand starting at position 3480 of SEQ ID NO: 1885247
gugcuaauugaucagcuaa

SEQ ID NO: 2327711 - RNA, 19 nt, Artificial Sequence
  Description of Artificial Sequence: Synthetic oligonucleotide
  Antisense strand to SEQ ID NO: 2327710
uuagcugaucaauuagcac

SEQ ID NO: 2327712 - RNA, 19 nt, Artificial Sequence
  Description of Artificial Sequence: Synthetic oligonucleotide
  Sense strand starting at position 3482 of SEQ ID NO: 1885247
gcuaauugaucagcuaaca

SEQ ID NO: 2327713 - RNA, 19 nt, Artificial Sequence
  Description of Artificial Sequence: Synthetic oligonucleotide
  Antisense strand to SEQ ID NO: 2327712
uguuagcugaucaauuagc

SEQ ID NO: 2327714 - RNA, 19 nt, Artificial Sequence
  Description of Artificial Sequence: Synthetic oligonucleotide
  Sense strand starting at position 3500 of SEQ ID NO: 1885247
agucuaugcagucauggau

SEQ ID NO: 2327715 - RNA, 19 nt, Artificial Sequence
  Description of Artificial Sequence: Synthetic oligonucleotide
  Antisense strand to SEQ ID NO: 2327714
auccaugacugcauagacu

SEQ ID NO: 2327716 - RNA, 19 nt, Artificial Sequence
  Description of Artificial Sequence: Synthetic oligonucleotide
  Sense strand starting at position 3557 of SEQ ID NO: 1885247
uguacuaauugaucagcua

SEQ ID NO: 2327717 - RNA, 19 nt, Artificial Sequence
  Description of Artificial Sequence: Synthetic oligonucleotide
  Antisense strand to SEQ ID NO: 2327716
uagcugaucaauuaguaca

SEQ ID NO: 2327718 - RNA, 19 nt, Artificial Sequence
  Description of Artificial Sequence: Synthetic oligonucleotide
  Sense strand starting at position 3560 of SEQ ID NO: 1885247
acuaauugaucagcuagca

SEQ ID NO: 2327719 - RNA, 19 nt, Artificial Sequence
  Description of Artificial Sequence: Synthetic oligonucleotide
  Antisense strand to SEQ ID NO: 2327718
ugcuagcugaucaauuagu

SEQ ID NO: 2327720 - RNA, 19 nt, Artificial Sequence
  Description of Artificial Sequence: Synthetic oligonucleotide
  Sense strand starting at position 3596 of SEQ ID NO: 1885247
ugcuccaauugaucagaau

SEQ ID NO: 2327721 - RNA, 19 nt, Artificial Sequence
  Description of Artificial Sequence: Synthetic oligonucleotide
  Antisense strand to SEQ ID NO: 2327720
auucugaucaauuggagca

SEQ ID NO: 2327722 - RNA, 19 nt, Artificial Sequence
  Description of Artificial Sequence: Synthetic oligonucleotide
  Sense strand starting at position 3607 of SEQ ID NO: 1885247
aucagaaugccaugaagca

SEQ ID NO: 2327723 - RNA, 19 nt, Artificial Sequence
  Description of Artificial Sequence: Synthetic oligonucleotide
  Antisense strand to SEQ ID NO: 2327722
ugcuucauggcauucugau

SEQ ID NO: 2327724 - RNA, 19 nt, Artificial Sequence
  Description of Artificial Sequence: Synthetic oligonucleotide
  Sense strand starting at position 2839 of SEQ ID NO: 1885249
ccgcaaagcuucucagaca

SEQ ID NO: 2327725 - RNA, 19 nt, Artificial Sequence
  Description of Artificial Sequence: Synthetic oligonucleotide
  Antisense strand to SEQ ID NO: 2327724
ugucugagaagcuuugcgg

SEQ ID NO: 2327726 - RNA, 19 nt, Artificial Sequence
  Description of Artificial Sequence: Synthetic oligonucleotide
  Sense strand starting at position 3817 of SEQ ID NO: 1885249
aucagacauccugaguugu

SEQ ID NO: 2327727 - RNA, 19 nt, Artificial Sequence
  Description of Artificial Sequence: Synthetic oligonucleotide
  Antisense strand to SEQ ID NO: 2327726
acaacucaggaugucugau

SEQ ID NO: 2327728 - RNA, 19 nt, Artificial Sequence
  Description of Artificial Sequence: Synthetic oligonucleotide
  Sense strand starting at position 3005 of SEQ ID NO: 1885248
ccgcaaagcuucucagaca

SEQ ID NO: 2327729 - RNA, 19 nt, Artificial Sequence
  Description of Artificial Sequence: Synthetic oligonucleotide
  Antisense strand to SEQ ID NO: 2327728
ugucugagaagcuuugcgg

SEQ ID NO: 2327730 - RNA, 19 nt, Artificial Sequence
  Description of Artificial Sequence: Synthetic oligonucleotide
  Sense strand starting at position 3983 of SEQ ID NO: 1885248
aucagacauccugaguugu

SEQ ID NO: 2327731 - RNA, 19 nt, Artificial Sequence
  Description of Artificial Sequence: Synthetic oligonucleotide
  Antisense strand to SEQ ID NO: 2327730
acaacucaggaugucugau

SEQ ID NO: 2327732 - RNA, 19 nt, Artificial Sequence
  Description of Artificial Sequence: Synthetic oligonucleotide
  Sense strand starting at position 90 of SEQ ID NO: 1885250
guaacucugagagguaguu

SEQ ID NO: 2327733 - RNA, 19 nt, Artificial Sequence
  Description of Artificial Sequence: Synthetic oligonucleotide
  Antisense strand to SEQ ID NO: 2327732
aacuaccucucagaguuac

SEQ ID NO: 2327734 - RNA, 19 nt, Artificial Sequence
  Description of Artificial Sequence: Synthetic oligonucleotide
  Sense strand starting at position 96 of SEQ ID NO: 1885250
cugagagguaguuaugauu

SEQ ID NO: 2327735 - RNA, 19 nt, Artificial Sequence
  Description of Artificial Sequence: Synthetic oligonucleotide
  Antisense strand to SEQ ID NO: 2327734
aaucauaacuaccucucag

SEQ ID NO: 2327736 - RNA, 19 nt, Artificial Sequence
  Description of Artificial Sequence: Synthetic oligonucleotide
  Sense strand starting at position 135 of SEQ ID NO: 1885250
gucaaaugucaaggcuaug

SEQ ID NO: 2327737 - RNA, 19 nt, Artificial Sequence
  Description of Artificial Sequence: Synthetic oligonucleotide
  Antisense strand to SEQ ID NO: 2327736
cauagccuugacauuugac

SEQ ID NO: 2327738 - RNA, 19 nt, Artificial Sequence
  Description of Artificial Sequence: Synthetic oligonucleotide
  Sense strand starting at position 156 of SEQ ID NO: 1885250
cucagucagccuuauaucu

SEQ ID NO: 2327739 - RNA, 19 nt, Artificial Sequence
  Description of Artificial Sequence: Synthetic oligonucleotide
  Antisense strand to SEQ ID NO: 2327738
agauauaaggcugacugag

SEQ ID NO: 2327740 - RNA, 19 nt, Artificial Sequence
  Description of Artificial Sequence: Synthetic oligonucleotide
  Sense strand starting at position 161 of SEQ ID NO: 1885250
ucagccuuauaucugggaa

SEQ ID NO: 2327741 - RNA, 19 nt, Artificial Sequence
  Description of Artificial Sequence: Synthetic oligonucleotide
  Antisense strand to SEQ ID NO: 2327740
uucccagauauaaggcuga

SEQ ID NO: 2327742 - RNA, 19 nt, Artificial Sequence
  Description of Artificial Sequence: Synthetic oligonucleotide
  Sense strand starting at position 164 of SEQ ID NO: 1885250
gccuuauaucugggaacag

SEQ ID NO: 2327743 - RNA, 19 nt, Artificial Sequence
  Description of Artificial Sequence: Synthetic oligonucleotide
  Antisense strand to SEQ ID NO: 2327742
cuguucccagauauaaggc

SEQ ID NO: 2327744 - RNA, 19 nt, Artificial Sequence
  Description of Artificial Sequence: Synthetic oligonucleotide
  Sense strand starting at position 228 of SEQ ID NO: 1885250
uugcuuauacagugaaacu

SEQ ID NO: 2327745 - RNA, 19 nt, Artificial Sequence
  Description of Artificial Sequence: Synthetic oligonucleotide
  Antisense strand to SEQ ID NO: 2327744
aguuucacuguauaagcaa

SEQ ID NO: 2327746 - RNA, 19 nt, Artificial Sequence
  Description of Artificial Sequence: Synthetic oligonucleotide
  Sense strand starting at position 328 of SEQ ID NO: 1885250
acuaucaucgaguguacaa

SEQ ID NO: 2327747 - RNA, 19 nt, Artificial Sequence
  Description of Artificial Sequence: Synthetic oligonucleotide
  Antisense strand to SEQ ID NO: 2327746
uuguacacucgaugauagu

SEQ ID NO: 2327748 - RNA, 19 nt, Artificial Sequence
  Description of Artificial Sequence: Synthetic oligonucleotide
  Sense strand starting at position 348 of SEQ ID NO: 1885250
auuguuacauuguccaaua

SEQ ID NO: 2327749 - RNA, 19 nt, Artificial Sequence
  Description of Artificial Sequence: Synthetic oligonucleotide
  Antisense strand to SEQ ID NO: 2327748
uauuggacaauguaacaau

SEQ ID NO: 2327750 - RNA, 19 nt, Artificial Sequence
  Description of Artificial Sequence: Synthetic oligonucleotide
  Sense strand starting at position 349 of SEQ ID NO: 1885250
uuguuacauuguccaauaa

SEQ ID NO: 2327751 - RNA, 19 nt, Artificial Sequence
  Description of Artificial Sequence: Synthetic oligonucleotide
  Antisense strand to SEQ ID NO: 2327750
uuauuggacaauguaacaa

SEQ ID NO: 2327752 - RNA, 19 nt, Artificial Sequence
  Description of Artificial Sequence: Synthetic oligonucleotide
  Sense strand starting at position 350 of SEQ ID NO: 1885250
uguuacauuguccaauaaa

SEQ ID NO: 2327753 - RNA, 19 nt, Artificial Sequence
  Description of Artificial Sequence: Synthetic oligonucleotide
  Antisense strand to SEQ ID NO: 2327752
uuuauuggacaauguaaca

SEQ ID NO: 2327754 - RNA, 19 nt, Artificial Sequence
  Description of Artificial Sequence: Synthetic oligonucleotide
  Sense strand starting at position 360 of SEQ ID NO: 1885250
uccaauaaaucaguaguua

SEQ ID NO: 2327755 - RNA, 19 nt, Artificial Sequence
  Description of Artificial Sequence: Synthetic oligonucleotide
  Antisense strand to SEQ ID NO: 2327754
uaacuacugauuuauugga

SEQ ID NO: 2327756 - RNA, 19 nt, Artificial Sequence
  Description of Artificial Sequence: Synthetic oligonucleotide
  Sense strand starting at position 364 of SEQ ID NO: 1885250
auaaaucaguaguuaccaa

SEQ ID NO: 2327757 - RNA, 19 nt, Artificial Sequence
  Description of Artificial Sequence: Synthetic oligonucleotide
  Antisense strand to SEQ ID NO: 2327756
uugguaacuacugauuuau

SEQ ID NO: 2327758 - RNA, 19 nt, Artificial Sequence
  Description of Artificial Sequence: Synthetic oligonucleotide
  Sense strand starting at position 581 of SEQ ID NO: 1885250
caacauaugugaguguuua

SEQ ID NO: 2327759 - RNA, 19 nt, Artificial Sequence
  Description of Artificial Sequence: Synthetic oligonucleotide
  Antisense strand to SEQ ID NO: 2327758
uaaacacucacauauguug

SEQ ID NO: 2327760 - RNA, 19 nt, Artificial Sequence
  Description of Artificial Sequence: Synthetic oligonucleotide
  Sense strand starting at position 582 of SEQ ID NO: 1885250
aacauaugugaguguuuau

SEQ ID NO: 2327761 - RNA, 19 nt, Artificial Sequence
  Description of Artificial Sequence: Synthetic oligonucleotide
  Antisense strand to SEQ ID NO: 2327760
auaaacacucacauauguu

SEQ ID NO: 2327762 - RNA, 19 nt, Artificial Sequence
  Description of Artificial Sequence: Synthetic oligonucleotide
  Sense strand starting at position 816 of SEQ ID NO: 1885250
uucguuauuuccuuccuuu

SEQ ID NO: 2327763 - RNA, 19 nt, Artificial Sequence
  Description of Artificial Sequence: Synthetic oligonucleotide
  Antisense strand to SEQ ID NO: 2327762
aaaggaaggaaauaacgaa

SEQ ID NO: 2327764 - RNA, 19 nt, Artificial Sequence
  Description of Artificial Sequence: Synthetic oligonucleotide
  Sense strand starting at position 870 of SEQ ID NO: 1885250
gcaaauguauuugcuucua

SEQ ID NO: 2327765 - RNA, 19 nt, Artificial Sequence
  Description of Artificial Sequence: Synthetic oligonucleotide
  Antisense strand to SEQ ID NO: 2327764
uagaagcaaauacauuugc

SEQ ID NO: 2327766 - RNA, 19 nt, Artificial Sequence
  Description of Artificial Sequence: Synthetic oligonucleotide
  Sense strand starting at position 1580 of SEQ ID NO: 1885250
ugcgauggccauuacuaua

SEQ ID NO: 2327767 - RNA, 19 nt, Artificial Sequence
  Description of Artificial Sequence: Synthetic oligonucleotide
  Antisense strand to SEQ ID NO: 2327766
uauaguaauggccaucgca

SEQ ID NO: 2327768 - RNA, 19 nt, Artificial Sequence
  Description of Artificial Sequence: Synthetic oligonucleotide
  Sense strand starting at position 1697 of SEQ ID NO: 1885250
ucagauugguauccugaaa

SEQ ID NO: 2327769 - RNA, 19 nt, Artificial Sequence
  Description of Artificial Sequence: Synthetic oligonucleotide
  Antisense strand to SEQ ID NO: 2327768
uuucaggauaccaaucuga

SEQ ID NO: 2327770 - RNA, 19 nt, Artificial Sequence
  Description of Artificial Sequence: Synthetic oligonucleotide
  Sense strand starting at position 1838 of SEQ ID NO: 1885250
ugagacgguccucagugau

SEQ ID NO: 2327771 - RNA, 19 nt, Artificial Sequence
  Description of Artificial Sequence: Synthetic oligonucleotide
  Antisense strand to SEQ ID NO: 2327770
aucacugaggaccgucuca

SEQ ID NO: 2327772 - RNA, 19 nt, Artificial Sequence
  Description of Artificial Sequence: Synthetic oligonucleotide
  Sense strand starting at position 1919 of SEQ ID NO: 1885250
ugacccacuucucuggaau

SEQ ID NO: 2327773 - RNA, 19 nt, Artificial Sequence
  Description of Artificial Sequence: Synthetic oligonucleotide
  Antisense strand to SEQ ID NO: 2327772
auuccagagaaguggguca

SEQ ID NO: 2327774 - RNA, 19 nt, Artificial Sequence
  Description of Artificial Sequence: Synthetic oligonucleotide
  Sense strand starting at position 1950 of SEQ ID NO: 1885250
aagugauuguaugugacuu

SEQ ID NO: 2327775 - RNA, 19 nt, Artificial Sequence
  Description of Artificial Sequence: Synthetic oligonucleotide
  Antisense strand to SEQ ID NO: 2327774
aagucacauacaaucacuu

SEQ ID NO: 2327776 - RNA, 19 nt, Artificial Sequence
  Description of Artificial Sequence: Synthetic oligonucleotide
  Sense strand starting at position 1951 of SEQ ID NO: 1885250
agugauuguaugugacuua

SEQ ID NO: 2327777 - RNA, 19 nt, Artificial Sequence
  Description of Artificial Sequence: Synthetic oligonucleotide
  Antisense strand to SEQ ID NO: 2327776
uaagucacauacaaucacu

SEQ ID NO: 2327778 - RNA, 19 nt, Artificial Sequence
  Description of Artificial Sequence: Synthetic oligonucleotide
  Sense strand starting at position 1954 of SEQ ID NO: 1885250
gauuguaugugacuuacua

SEQ ID NO: 2327779 - RNA, 19 nt, Artificial Sequence
  Description of Artificial Sequence: Synthetic oligonucleotide
  Antisense strand to SEQ ID NO: 2327778
uaguaagucacauacaauc

SEQ ID NO: 2327780 - RNA, 19 nt, Artificial Sequence
  Description of Artificial Sequence: Synthetic oligonucleotide
  Sense strand starting at position 1962 of SEQ ID NO: 1885250
gugacuuacuagguuacca

SEQ ID NO: 2327781 - RNA, 19 nt, Artificial Sequence
  Description of Artificial Sequence: Synthetic oligonucleotide
  Antisense strand to SEQ ID NO: 2327780
ugguaaccuaguaagucac

SEQ ID NO: 2327782 - RNA, 19 nt, Artificial Sequence
  Description of Artificial Sequence: Synthetic oligonucleotide
  Sense strand starting at position 2066 of SEQ ID NO: 1885250
gcccuauggagagguacau

SEQ ID NO: 2327783 - RNA, 19 nt, Artificial Sequence
  Description of Artificial Sequence: Synthetic oligonucleotide
  Antisense strand to SEQ ID NO: 2327782
auguaccucuccauagggc

SEQ ID NO: 2327784 - RNA, 19 nt, Artificial Sequence
  Description of Artificial Sequence: Synthetic oligonucleotide
  Sense strand starting at position 2154 of SEQ ID NO: 1885250
ccaacaaaugcaugaguga

SEQ ID NO: 2327785 - RNA, 19 nt, Artificial Sequence
  Description of Artificial Sequence: Synthetic oligonucleotide
  Antisense strand to SEQ ID NO: 2327784
ucacucaugcauuuguugg

SEQ ID NO: 2327786 - RNA, 19 nt, Artificial Sequence
  Description of Artificial Sequence: Synthetic oligonucleotide
  Sense strand starting at position 2307 of SEQ ID NO: 1885250
gacaucguguuuguuauuu

SEQ ID NO: 2327787 - RNA, 19 nt, Artificial Sequence
  Description of Artificial Sequence: Synthetic oligonucleotide
  Antisense strand to SEQ ID NO: 2327786
aaauaacaaacacgauguc

SEQ ID NO: 2327788 - RNA, 19 nt, Artificial Sequence
  Description of Artificial Sequence: Synthetic oligonucleotide
  Sense strand starting at position 2678 of SEQ ID NO: 1885250
uuaauaauguggcuuaaug

SEQ ID NO: 2327789 - RNA, 19 nt, Artificial Sequence
  Description of Artificial Sequence: Synthetic oligonucleotide
  Antisense strand to SEQ ID NO: 2327788
cauuaagccacauuauuaa

SEQ ID NO: 2327790 - RNA, 19 nt, Artificial Sequence
  Description of Artificial Sequence: Synthetic oligonucleotide
  Sense strand starting at position 2824 of SEQ ID NO: 1885250
uguguauaauugucacaau

SEQ ID NO: 2327791 - RNA, 19 nt, Artificial Sequence
  Description of Artificial Sequence: Synthetic oligonucleotide
  Antisense strand to SEQ ID NO: 2327790
auugugacaauuauacaca

SEQ ID NO: 2327792 - RNA, 19 nt, Artificial Sequence
  Description of Artificial Sequence: Synthetic oligonucleotide
  Sense strand starting at position 2883 of SEQ ID NO: 1885250
uguauauaccuagaugguc

SEQ ID NO: 2327793 - RNA, 19 nt, Artificial Sequence
  Description of Artificial Sequence: Synthetic oligonucleotide
  Antisense strand to SEQ ID NO: 2327792
gaccaucuagguauauaca

SEQ ID NO: 2327794 - RNA, 19 nt, Artificial Sequence
  Description of Artificial Sequence: Synthetic oligonucleotide
  Sense strand starting at position 2888 of SEQ ID NO: 1885250
auaccuagauggucagauu

SEQ ID NO: 2327795 - RNA, 19 nt, Artificial Sequence
  Description of Artificial Sequence: Synthetic oligonucleotide
  Antisense strand to SEQ ID NO: 2327794
aaucugaccaucuagguau

SEQ ID NO: 2327796 - RNA, 19 nt, Artificial Sequence
  Description of Artificial Sequence: Synthetic oligonucleotide
  Sense strand starting at position 2900 of SEQ ID NO: 1885250
ucagauugugaaugauguu

SEQ ID NO: 2327797 - RNA, 19 nt, Artificial Sequence
  Description of Artificial Sequence: Synthetic oligonucleotide
  Antisense strand to SEQ ID NO: 2327796
aacaucauucacaaucuga

SEQ ID NO: 2327798 - RNA, 19 nt, Artificial Sequence
  Description of Artificial Sequence: Synthetic oligonucleotide
  Sense strand starting at position 2958 of SEQ ID NO: 1885250
ugacaauauguaugcaaug

SEQ ID NO: 2327799 - RNA, 19 nt, Artificial Sequence
  Description of Artificial Sequence: Synthetic oligonucleotide
  Antisense strand to SEQ ID NO: 2327798
cauugcauacauauuguca

SEQ ID NO: 2327800 - RNA, 19 nt, Artificial Sequence
  Description of Artificial Sequence: Synthetic oligonucleotide
  Sense strand starting at position 2959 of SEQ ID NO: 1885250
gacaauauguaugcaaugu

SEQ ID NO: 2327801 - RNA, 19 nt, Artificial Sequence
  Description of Artificial Sequence: Synthetic oligonucleotide
  Antisense strand to SEQ ID NO: 2327800
acauugcauacauauuguc

SEQ ID NO: 2327802 - RNA, 19 nt, Artificial Sequence
  Description of Artificial Sequence: Synthetic oligonucleotide
  Sense strand starting at position 3108 of SEQ ID NO: 1885250
ggcucugcaguguugugau

SEQ ID NO: 2327803 - RNA, 19 nt, Artificial Sequence
  Description of Artificial Sequence: Synthetic oligonucleotide
  Antisense strand to SEQ ID NO: 2327802
aucacaacacugcagagcc

SEQ ID NO: 2327804 - RNA, 19 nt, Artificial Sequence
  Description of Artificial Sequence: Synthetic oligonucleotide
  Sense strand starting at position 3537 of SEQ ID NO: 1885250
aaagauguguauuccagaa

SEQ ID NO: 2327805 - RNA, 19 nt, Artificial Sequence
  Description of Artificial Sequence: Synthetic oligonucleotide
  Antisense strand to SEQ ID NO: 2327804
uucuggaauacacaucuuu

SEQ ID NO: 2327806 - RNA, 19 nt, Artificial Sequence
  Description of Artificial Sequence: Synthetic oligonucleotide
  Sense strand starting at position 3541 of SEQ ID NO: 1885250
auguguauuccagaauaca

SEQ ID NO: 2327807 - RNA, 19 nt, Artificial Sequence
  Description of Artificial Sequence: Synthetic oligonucleotide
  Antisense strand to SEQ ID NO: 2327806
uguauucuggaauacacau

SEQ ID NO: 2327808 - RNA, 19 nt, Artificial Sequence
  Description of Artificial Sequence: Synthetic oligonucleotide
  Sense strand starting at position 3737 of SEQ ID NO: 1885250
ccuagaaacugggucuacu

SEQ ID NO: 2327809 - RNA, 19 nt, Artificial Sequence
  Description of Artificial Sequence: Synthetic oligonucleotide
  Antisense strand to SEQ ID NO: 2327808
aguagacccaguuucuagg

SEQ ID NO: 2327810 - RNA, 19 nt, Artificial Sequence
  Description of Artificial Sequence: Synthetic oligonucleotide
  Sense strand starting at position 3749 of SEQ ID NO: 1885250
gucuacugagcugaguaau

SEQ ID NO: 2327811 - RNA, 19 nt, Artificial Sequence
  Description of Artificial Sequence: Synthetic oligonucleotide
  Antisense strand to SEQ ID NO: 2327810
auuacucagcucaguagac

SEQ ID NO: 2327812 - RNA, 19 nt, Artificial Sequence
  Description of Artificial Sequence: Synthetic oligonucleotide
  Sense strand starting at position 118 of SEQ ID NO: 1885251
auuuaaguuggcugugcua

SEQ ID NO: 2327813 - RNA, 19 nt, Artificial Sequence
  Description of Artificial Sequence: Synthetic oligonucleotide
  Antisense strand to SEQ ID NO: 2327812
uagcacagccaacuuaaau

SEQ ID NO: 2327814 - RNA, 19 nt, Artificial Sequence
  Description of Artificial Sequence: Synthetic oligonucleotide
  Sense strand starting at position 320 of SEQ ID NO: 1885251
auaauaucucaacguagaa

SEQ ID NO: 2327815 - RNA, 19 nt, Artificial Sequence
  Description of Artificial Sequence: Synthetic oligonucleotide
  Antisense strand to SEQ ID NO: 2327814
uucuacguugagauauuau

SEQ ID NO: 2327816 - RNA, 19 nt, Artificial Sequence
  Description of Artificial Sequence: Synthetic oligonucleotide
  Sense strand starting at position 380 of SEQ ID NO: 1885251
guauaaugguaaucaaaug

SEQ ID NO: 2327817 - RNA, 19 nt, Artificial Sequence
  Description of Artificial Sequence: Synthetic oligonucleotide
  Antisense strand to SEQ ID NO: 2327816
cauuugauuaccauuauac

SEQ ID NO: 2327818 - RNA, 19 nt, Artificial Sequence
  Description of Artificial Sequence: Synthetic oligonucleotide
  Sense strand starting at position 513 of SEQ ID NO: 1885251
ccucuugacggugauaaug

SEQ ID NO: 2327819 - RNA, 19 nt, Artificial Sequence
  Description of Artificial Sequence: Synthetic oligonucleotide
  Antisense strand to SEQ ID NO: 2327818
cauuaucaccgucaagagg

SEQ ID NO: 2327820 - RNA, 19 nt, Artificial Sequence
  Description of Artificial Sequence: Synthetic oligonucleotide
  Sense strand starting at position 850 of SEQ ID NO: 1885251
cgggaaaguuaaucagaac

SEQ ID NO: 2327821 - RNA, 19 nt, Artificial Sequence
  Description of Artificial Sequence: Synthetic oligonucleotide
  Antisense strand to SEQ ID NO: 2327820
guucugauuaacuuucccg

SEQ ID NO: 2327822 - RNA, 19 nt, Artificial Sequence
  Description of Artificial Sequence: Synthetic oligonucleotide
  Sense strand starting at position 902 of SEQ ID NO: 1885251
auguaaucauauccucgaa

SEQ ID NO: 2327823 - RNA, 19 nt, Artificial Sequence
  Description of Artificial Sequence: Synthetic oligonucleotide
  Antisense strand to SEQ ID NO: 2327822
uucgaggauaugauuacau

SEQ ID NO: 2327824 - RNA, 19 nt, Artificial Sequence
  Description of Artificial Sequence: Synthetic oligonucleotide
  Sense strand starting at position 904 of SEQ ID NO: 1885251
guaaucauauccucgaaga

SEQ ID NO: 2327825 - RNA, 19 nt, Artificial Sequence
  Description of Artificial Sequence: Synthetic oligonucleotide
  Antisense strand to SEQ ID NO: 2327824
ucuucgaggauaugauuac

SEQ ID NO: 2327826 - RNA, 19 nt, Artificial Sequence
  Description of Artificial Sequence: Synthetic oligonucleotide
  Sense strand starting at position 909 of SEQ ID NO: 1885251
cauauccucgaagagguua

SEQ ID NO: 2327827 - RNA, 19 nt, Artificial Sequence
  Description of Artificial Sequence: Synthetic oligonucleotide
  Antisense strand to SEQ ID NO: 2327826
uaaccucuucgaggauaug

SEQ ID NO: 2327828 - RNA, 19 nt, Artificial Sequence
  Description of Artificial Sequence: Synthetic oligonucleotide
  Sense strand starting at position 923 of SEQ ID NO: 1885251
gguuauauagugugaaauu

SEQ ID NO: 2327829 - RNA, 19 nt, Artificial Sequence
  Description of Artificial Sequence: Synthetic oligonucleotide
  Antisense strand to SEQ ID NO: 2327828
aauuucacacuauauaacc

SEQ ID NO: 2327830 - RNA, 19 nt, Artificial Sequence
  Description of Artificial Sequence: Synthetic oligonucleotide
  Sense strand starting at position 1215 of SEQ ID NO: 1885251
cuacucgcagaauaauuau

SEQ ID NO: 2327831 - RNA, 19 nt, Artificial Sequence
  Description of Artificial Sequence: Synthetic oligonucleotide
  Antisense strand to SEQ ID NO: 2327830
auaauuauucugcgaguag

SEQ ID NO: 2327832 - RNA, 19 nt, Artificial Sequence
  Description of Artificial Sequence: Synthetic oligonucleotide
  Sense strand starting at position 1398 of SEQ ID NO: 1885251
aucauugaucauugucaag

SEQ ID NO: 2327833 - RNA, 19 nt, Artificial Sequence
  Description of Artificial Sequence: Synthetic oligonucleotide
  Antisense strand to SEQ ID NO: 2327832
cuugacaaugaucaaugau

SEQ ID NO: 2327834 - RNA, 19 nt, Artificial Sequence
  Description of Artificial Sequence: Synthetic oligonucleotide
  Sense strand starting at position 1400 of SEQ ID NO: 1885251
cauugaucauugucaagag

SEQ ID NO: 2327835 - RNA, 19 nt, Artificial Sequence
  Description of Artificial Sequence: Synthetic oligonucleotide
  Antisense strand to SEQ ID NO: 2327834
cucuugacaaugaucaaug

SEQ ID NO: 2327836 - RNA, 19 nt, Artificial Sequence
  Description of Artificial Sequence: Synthetic oligonucleotide
  Sense strand starting at position 1511 of SEQ ID NO: 1885251
ucauguaaugccuaaagga

SEQ ID NO: 2327837 - RNA, 19 nt, Artificial Sequence
  Description of Artificial Sequence: Synthetic oligonucleotide
  Antisense strand to SEQ ID NO: 2327836
uccuuuaggcauuacauga

SEQ ID NO: 2327838 - RNA, 19 nt, Artificial Sequence
  Description of Artificial Sequence: Synthetic oligonucleotide
  Sense strand starting at position 1539 of SEQ ID NO: 1885251
aauagaacaucaguuacga

SEQ ID NO: 2327839 - RNA, 19 nt, Artificial Sequence
  Description of Artificial Sequence: Synthetic oligonucleotide
  Antisense strand to SEQ ID NO: 2327838
ucguaacugauguucuauu

SEQ ID NO: 2327840 - RNA, 19 nt, Artificial Sequence
  Description of Artificial Sequence: Synthetic oligonucleotide
  Sense strand starting at position 1730 of SEQ ID NO: 1885251
uguugaaggacaugcaaau

SEQ ID NO: 2327841 - RNA, 19 nt, Artificial Sequence
  Description of Artificial Sequence: Synthetic oligonucleotide
  Antisense strand to SEQ ID NO: 2327840
auuugcauguccuucaaca

SEQ ID NO: 2327842 - RNA, 19 nt, Artificial Sequence
  Description of Artificial Sequence: Synthetic oligonucleotide
  Sense strand starting at position 1756 of SEQ ID NO: 1885251
ugagcaguacuuuacuaca

SEQ ID NO: 2327843 - RNA, 19 nt, Artificial Sequence
  Description of Artificial Sequence: Synthetic oligonucleotide
  Antisense strand to SEQ ID NO: 2327842
uguaguaaaguacugcuca

SEQ ID NO: 2327844 - RNA, 19 nt, Artificial Sequence
  Description of Artificial Sequence: Synthetic oligonucleotide
  Sense strand starting at position 1977 of SEQ ID NO: 1885251
cugacauugguggagucua

SEQ ID NO: 2327845 - RNA, 19 nt, Artificial Sequence
  Description of Artificial Sequence: Synthetic oligonucleotide
  Antisense strand to SEQ ID NO: 2327844
uagacuccaccaaugucag

SEQ ID NO: 2327846 - RNA, 19 nt, Artificial Sequence
  Description of Artificial Sequence: Synthetic oligonucleotide
  Sense strand starting at position 2028 of SEQ ID NO: 1885251
aagugacugcuugaacuau

SEQ ID NO: 2327847 - RNA, 19 nt, Artificial Sequence
  Description of Artificial Sequence: Synthetic oligonucleotide
  Antisense strand to SEQ ID NO: 2327846
auaguucaagcagucacuu

SEQ ID NO: 2327848 - RNA, 19 nt, Artificial Sequence
  Description of Artificial Sequence: Synthetic oligonucleotide
  Sense strand starting at position 2075 of SEQ ID NO: 1885251
auucuaugacuaugucaua

SEQ ID NO: 2327849 - RNA, 19 nt, Artificial Sequence
  Description of Artificial Sequence: Synthetic oligonucleotide
  Antisense strand to SEQ ID NO: 2327848
uaugacauagucauagaau

SEQ ID NO: 2327850 - RNA, 19 nt, Artificial Sequence
  Description of Artificial Sequence: Synthetic oligonucleotide
  Sense strand starting at position 2124 of SEQ ID NO: 1885251
uagaauucuuguucuugga

SEQ ID NO: 2327851 - RNA, 19 nt, Artificial Sequence
  Description of Artificial Sequence: Synthetic oligonucleotide
  Antisense strand to SEQ ID NO: 2327850
uccaagaacaagaauucua

SEQ ID NO: 2327852 - RNA, 19 nt, Artificial Sequence
  Description of Artificial Sequence: Synthetic oligonucleotide
  Sense strand starting at position 2126 of SEQ ID NO: 1885251
gaauucuuguucuuggaac

SEQ ID NO: 2327853 - RNA, 19 nt, Artificial Sequence
  Description of Artificial Sequence: Synthetic oligonucleotide
  Antisense strand to SEQ ID NO: 2327852
guuccaagaacaagaauuc

SEQ ID NO: 2327854 - RNA, 19 nt, Artificial Sequence
  Description of Artificial Sequence: Synthetic oligonucleotide
  Sense strand starting at position 2172 of SEQ ID NO: 1885251
cuaugugaugcucaaguca

SEQ ID NO: 2327855 - RNA, 19 nt, Artificial Sequence
  Description of Artificial Sequence: Synthetic oligonucleotide
  Antisense strand to SEQ ID NO: 2327854
ugacuugagcaucacauag

SEQ ID NO: 2327856 - RNA, 19 nt, Artificial Sequence
  Description of Artificial Sequence: Synthetic oligonucleotide
  Sense strand starting at position 2181 of SEQ ID NO: 1885251
gcucaagucacauggaaug

SEQ ID NO: 2327857 - RNA, 19 nt, Artificial Sequence
  Description of Artificial Sequence: Synthetic oligonucleotide
  Antisense strand to SEQ ID NO: 2327856
cauuccaugugacuugagc

SEQ ID NO: 2327858 - RNA, 19 nt, Artificial Sequence
  Description of Artificial Sequence: Synthetic oligonucleotide
  Sense strand starting at position 2186 of SEQ ID NO: 1885251
agucacauggaaugguuaa

SEQ ID NO: 2327859 - RNA, 19 nt, Artificial Sequence
  Description of Artificial Sequence: Synthetic oligonucleotide
  Antisense strand to SEQ ID NO: 2327858
uuaaccauuccaugugacu

SEQ ID NO: 2327860 - RNA, 19 nt, Artificial Sequence
  Description of Artificial Sequence: Synthetic oligonucleotide
  Sense strand starting at position 2187 of SEQ ID NO: 1885251
gucacauggaaugguuaaa

SEQ ID NO: 2327861 - RNA, 19 nt, Artificial Sequence
  Description of Artificial Sequence: Synthetic oligonucleotide
  Antisense strand to SEQ ID NO: 2327860
uuuaaccauuccaugugac

SEQ ID NO: 2327862 - RNA, 19 nt, Artificial Sequence
  Description of Artificial Sequence: Synthetic oligonucleotide
  Sense strand starting at position 2429 of SEQ ID NO: 1885251
aagaaugguuuagugacau

SEQ ID NO: 2327863 - RNA, 19 nt, Artificial Sequence
  Description of Artificial Sequence: Synthetic oligonucleotide
  Antisense strand to SEQ ID NO: 2327862
augucacuaaaccauucuu

SEQ ID NO: 2327864 - RNA, 19 nt, Artificial Sequence
  Description of Artificial Sequence: Synthetic oligonucleotide
  Sense strand starting at position 2476 of SEQ ID NO: 1885251
gugaguuaucaugauaccu

SEQ ID NO: 2327865 - RNA, 19 nt, Artificial Sequence
  Description of Artificial Sequence: Synthetic oligonucleotide
  Antisense strand to SEQ ID NO: 2327864
agguaucaugauaacucac

SEQ ID NO: 2327866 - RNA, 19 nt, Artificial Sequence
  Description of Artificial Sequence: Synthetic oligonucleotide
  Sense strand starting at position 2604 of SEQ ID NO: 1885251
gaggccuucccggaaauca

SEQ ID NO: 2327867 - RNA, 19 nt, Artificial Sequence
  Description of Artificial Sequence: Synthetic oligonucleotide
  Antisense strand to SEQ ID NO: 2327866
ugauuuccgggaaggccuc

SEQ ID NO: 2327868 - RNA, 19 nt, Artificial Sequence
  Description of Artificial Sequence: Synthetic oligonucleotide
  Sense strand starting at position 3072 of SEQ ID NO: 1885251
augauauaguguuugacac

SEQ ID NO: 2327869 - RNA, 19 nt, Artificial Sequence
  Description of Artificial Sequence: Synthetic oligonucleotide
  Antisense strand to SEQ ID NO: 2327868
gugucaaacacuauaucau

SEQ ID NO: 2327870 - RNA, 19 nt, Artificial Sequence
  Description of Artificial Sequence: Synthetic oligonucleotide
  Sense strand starting at position 3115 of SEQ ID NO: 1885251
auugguugaugauuguaau

SEQ ID NO: 2327871 - RNA, 19 nt, Artificial Sequence
  Description of Artificial Sequence: Synthetic oligonucleotide
  Antisense strand to SEQ ID NO: 2327870
auuacaaucaucaaccaau

SEQ ID NO: 2327872 - RNA, 19 nt, Artificial Sequence
  Description of Artificial Sequence: Synthetic oligonucleotide
  Sense strand starting at position 3116 of SEQ ID NO: 1885251
uugguugaugauuguaaua

SEQ ID NO: 2327873 - RNA, 19 nt, Artificial Sequence
  Description of Artificial Sequence: Synthetic oligonucleotide
  Antisense strand to SEQ ID NO: 2327872
uauuacaaucaucaaccaa

SEQ ID NO: 2327874 - RNA, 19 nt, Artificial Sequence
  Description of Artificial Sequence: Synthetic oligonucleotide
  Sense strand starting at position 3216 of SEQ ID NO: 1885251
gguguuuccagaggaggua

SEQ ID NO: 2327875 - RNA, 19 nt, Artificial Sequence
  Description of Artificial Sequence: Synthetic oligonucleotide
  Antisense strand to SEQ ID NO: 2327874
uaccuccucuggaaacacc

SEQ ID NO: 2327876 - RNA, 19 nt, Artificial Sequence
  Description of Artificial Sequence: Synthetic oligonucleotide
  Sense strand starting at position 3229 of SEQ ID NO: 1885251
gagguaguauuugaauuag

SEQ ID NO: 2327877 - RNA, 19 nt, Artificial Sequence
  Description of Artificial Sequence: Synthetic oligonucleotide
  Antisense strand to SEQ ID NO: 2327876
cuaauucaaauacuaccuc

SEQ ID NO: 2327878 - RNA, 19 nt, Artificial Sequence
  Description of Artificial Sequence: Synthetic oligonucleotide
  Sense strand starting at position 3238 of SEQ ID NO: 1885251
uuugaauuagacugaguac

SEQ ID NO: 2327879 - RNA, 19 nt, Artificial Sequence
  Description of Artificial Sequence: Synthetic oligonucleotide
  Antisense strand to SEQ ID NO: 2327878
guacucagucuaauucaaa

SEQ ID NO: 2327880 - RNA, 19 nt, Artificial Sequence
  Description of Artificial Sequence: Synthetic oligonucleotide
  Sense strand starting at position 3241 of SEQ ID NO: 1885251
gaauuagacugaguacagu

SEQ ID NO: 2327881 - RNA, 19 nt, Artificial Sequence
  Description of Artificial Sequence: Synthetic oligonucleotide
  Antisense strand to SEQ ID NO: 2327880
acuguacucagucuaauuc

SEQ ID NO: 2327882 - RNA, 19 nt, Artificial Sequence
  Description of Artificial Sequence: Synthetic oligonucleotide
  Sense strand starting at position 3269 of SEQ ID NO: 1885251
ucacuuauguggguagaca

SEQ ID NO: 2327883 - RNA, 19 nt, Artificial Sequence
  Description of Artificial Sequence: Synthetic oligonucleotide
  Antisense strand to SEQ ID NO: 2327882
ugucuacccacauaaguga

SEQ ID NO: 2327884 - RNA, 19 nt, Artificial Sequence
  Description of Artificial Sequence: Synthetic oligonucleotide
  Sense strand starting at position 3495 of SEQ ID NO: 1885251
agguacaucaugggacuuu

SEQ ID NO: 2327885 - RNA, 19 nt, Artificial Sequence
  Description of Artificial Sequence: Synthetic oligonucleotide
  Antisense strand to SEQ ID NO: 2327884
aaagucccaugauguaccu

SEQ ID NO: 2327886 - RNA, 19 nt, Artificial Sequence
  Description of Artificial Sequence: Synthetic oligonucleotide
  Sense strand starting at position 3587 of SEQ ID NO: 1885251
gugauuguggaagguuaga

SEQ ID NO: 2327887 - RNA, 19 nt, Artificial Sequence
  Description of Artificial Sequence: Synthetic oligonucleotide
  Antisense strand to SEQ ID NO: 2327886
ucuaaccuuccacaaucac

SEQ ID NO: 2327888 - RNA, 19 nt, Artificial Sequence
  Description of Artificial Sequence: Synthetic oligonucleotide
  Sense strand starting at position 3856 of SEQ ID NO: 1885251
uuauauauccuguaccugu

SEQ ID NO: 2327889 - RNA, 19 nt, Artificial Sequence
  Description of Artificial Sequence: Synthetic oligonucleotide
  Antisense strand to SEQ ID NO: 2327888
acagguacaggauauauaa

SEQ ID NO: 2327890 - RNA, 19 nt, Artificial Sequence
  Description of Artificial Sequence: Synthetic oligonucleotide
  Sense strand starting at position 3919 of SEQ ID NO: 1885251
acucaauccuuugucgaag

SEQ ID NO: 2327891 - RNA, 19 nt, Artificial Sequence
  Description of Artificial Sequence: Synthetic oligonucleotide
  Antisense strand to SEQ ID NO: 2327890
cuucgacaaaggauugagu

SEQ ID NO: 2327892 - RNA, 19 nt, Artificial Sequence
  Description of Artificial Sequence: Synthetic oligonucleotide
  Sense strand starting at position 48 of SEQ ID NO: 1885252
uaggaauuauacucugugu

SEQ ID NO: 2327893 - RNA, 19 nt, Artificial Sequence
  Description of Artificial Sequence: Synthetic oligonucleotide
  Antisense strand to SEQ ID NO: 2327892
acacagaguauaauuccua

SEQ ID NO: 2327894 - RNA, 19 nt, Artificial Sequence
  Description of Artificial Sequence: Synthetic oligonucleotide
  Sense strand starting at position 115 of SEQ ID NO: 1885252
aaauacucugugcaugagu

SEQ ID NO: 2327895 - RNA, 19 nt, Artificial Sequence
  Description of Artificial Sequence: Synthetic oligonucleotide
  Antisense strand to SEQ ID NO: 2327894
acucaugcacagaguauuu

SEQ ID NO: 2327896 - RNA, 19 nt, Artificial Sequence
  Description of Artificial Sequence: Synthetic oligonucleotide
  Sense strand starting at position 373 of SEQ ID NO: 1885252
guuuaucaacugcauaaga

SEQ ID NO: 2327897 - RNA, 19 nt, Artificial Sequence
  Description of Artificial Sequence: Synthetic oligonucleotide
  Antisense strand to SEQ ID NO: 2327896
ucuuaugcaguugauaaac

SEQ ID NO: 2327898 - RNA, 19 nt, Artificial Sequence
  Description of Artificial Sequence: Synthetic oligonucleotide
  Sense strand starting at position 516 of SEQ ID NO: 1885252
ggcuacaugcauuaucuca

SEQ ID NO: 2327899 - RNA, 19 nt, Artificial Sequence
  Description of Artificial Sequence: Synthetic oligonucleotide
  Antisense strand to SEQ ID NO: 2327898
ugagauaaugcauguagcc

SEQ ID NO: 2327900 - RNA, 19 nt, Artificial Sequence
  Description of Artificial Sequence: Synthetic oligonucleotide
  Sense strand starting at position 543 of SEQ ID NO: 1885252
cgacaacauccgcaucaaa

SEQ ID NO: 2327901 - RNA, 19 nt, Artificial Sequence
  Description of Artificial Sequence: Synthetic oligonucleotide
  Antisense strand to SEQ ID NO: 2327900
uuugaugcggauguugucg

SEQ ID NO: 2327902 - RNA, 19 nt, Artificial Sequence
  Description of Artificial Sequence: Synthetic oligonucleotide
  Sense strand starting at position 647 of SEQ ID NO: 1885252
uaauuugugccaggagcuu

SEQ ID NO: 2327903 - RNA, 19 nt, Artificial Sequence
  Description of Artificial Sequence: Synthetic oligonucleotide
  Antisense strand to SEQ ID NO: 2327902
aagcuccuggcacaaauua

SEQ ID NO: 2327904 - RNA, 19 nt, Artificial Sequence
  Description of Artificial Sequence: Synthetic oligonucleotide
  Sense strand starting at position 775 of SEQ ID NO: 1885252
agaguuaccugaccaagua

SEQ ID NO: 2327905 - RNA, 19 nt, Artificial Sequence
  Description of Artificial Sequence: Synthetic oligonucleotide
  Antisense strand to SEQ ID NO: 2327904
uacuuggucagguaacucu

SEQ ID NO: 2327906 - RNA, 19 nt, Artificial Sequence
  Description of Artificial Sequence: Synthetic oligonucleotide
  Sense strand starting at position 920 of SEQ ID NO: 1885252
auaggagaaugauagagau

SEQ ID NO: 2327907 - RNA, 19 nt, Artificial Sequence
  Description of Artificial Sequence: Synthetic oligonucleotide
  Antisense strand to SEQ ID NO: 2327906
aucucuaucauucuccuau

SEQ ID NO: 2327908 - RNA, 19 nt, Artificial Sequence
  Description of Artificial Sequence: Synthetic oligonucleotide
  Sense strand starting at position 949 of SEQ ID NO: 1885252
uugagauaucccuauguuu

SEQ ID NO: 2327909 - RNA, 19 nt, Artificial Sequence
  Description of Artificial Sequence: Synthetic oligonucleotide
  Antisense strand to SEQ ID NO: 2327908
aaacauagggauaucucaa

SEQ ID NO: 2327910 - RNA, 19 nt, Artificial Sequence
  Description of Artificial Sequence: Synthetic oligonucleotide
  Sense strand starting at position 1050 of SEQ ID NO: 1885252
aguacauaucuuuaucugu

SEQ ID NO: 2327911 - RNA, 19 nt, Artificial Sequence
  Description of Artificial Sequence: Synthetic oligonucleotide
  Antisense strand to SEQ ID NO: 2327910
acagauaaagauauguacu

SEQ ID NO: 2327912 - RNA, 19 nt, Artificial Sequence
  Description of Artificial Sequence: Synthetic oligonucleotide
  Sense strand starting at position 1072 of SEQ ID NO: 1885252
gguuuacucgugucugcuu

SEQ ID NO: 2327913 - RNA, 19 nt, Artificial Sequence
  Description of Artificial Sequence: Synthetic oligonucleotide
  Antisense strand to SEQ ID NO: 2327912
aagcagacacgaguaaacc

SEQ ID NO: 2327914 - RNA, 19 nt, Artificial Sequence
  Description of Artificial Sequence: Synthetic oligonucleotide
  Sense strand starting at position 1151 of SEQ ID NO: 1885252
cacugagauugugcaaauu

SEQ ID NO: 2327915 - RNA, 19 nt, Artificial Sequence
  Description of Artificial Sequence: Synthetic oligonucleotide
  Antisense strand to SEQ ID NO: 2327914
aauuugcacaaucucagug

SEQ ID NO: 2327916 - RNA, 19 nt, Artificial Sequence
  Description of Artificial Sequence: Synthetic oligonucleotide
  Sense strand starting at position 1174 of SEQ ID NO: 1885252
guagcuauggauuaauaua

SEQ ID NO: 2327917 - RNA, 19 nt, Artificial Sequence
  Description of Artificial Sequence: Synthetic oligonucleotide
  Antisense strand to SEQ ID NO: 2327916
uauauuaauccauagcuac

SEQ ID NO: 2327918 - RNA, 19 nt, Artificial Sequence
  Description of Artificial Sequence: Synthetic oligonucleotide
  Sense strand starting at position 1189 of SEQ ID NO: 1885252
uauaguuagagguacggaa

SEQ ID NO: 2327919 - RNA, 19 nt, Artificial Sequence
  Description of Artificial Sequence: Synthetic oligonucleotide
  Antisense strand to SEQ ID NO: 2327918
uuccguaccucuaacuaua

SEQ ID NO: 2327920 - RNA, 19 nt, Artificial Sequence
  Description of Artificial Sequence: Synthetic oligonucleotide
  Sense strand starting at position 1191 of SEQ ID NO: 1885252
uaguuagagguacggaauu

SEQ ID NO: 2327921 - RNA, 19 nt, Artificial Sequence
  Description of Artificial Sequence: Synthetic oligonucleotide
  Antisense strand to SEQ ID NO: 2327920
aauuccguaccucuaacua

SEQ ID NO: 2327922 - RNA, 19 nt, Artificial Sequence
  Description of Artificial Sequence: Synthetic oligonucleotide
  Sense strand starting at position 1265 of SEQ ID NO: 1885252
gagccaauuugucuggcuu

SEQ ID NO: 2327923 - RNA, 19 nt, Artificial Sequence
  Description of Artificial Sequence: Synthetic oligonucleotide
  Antisense strand to SEQ ID NO: 2327922
aagccagacaaauuggcuc

SEQ ID NO: 2327924 - RNA, 19 nt, Artificial Sequence
  Description of Artificial Sequence: Synthetic oligonucleotide
  Sense strand starting at position 1266 of SEQ ID NO: 1885252
agccaauuugucuggcuuu

SEQ ID NO: 2327925 - RNA, 19 nt, Artificial Sequence
  Description of Artificial Sequence: Synthetic oligonucleotide
  Antisense strand to SEQ ID NO: 2327924
aaagccagacaaauuggcu

SEQ ID NO: 2327926 - RNA, 19 nt, Artificial Sequence
  Description of Artificial Sequence: Synthetic oligonucleotide
  Sense strand starting at position 1502 of SEQ ID NO: 1885252
guuuacaucguggaaagaa

SEQ ID NO: 2327927 - RNA, 19 nt, Artificial Sequence
  Description of Artificial Sequence: Synthetic oligonucleotide
  Antisense strand to SEQ ID NO: 2327926
uucuuuccacgauguaaac

SEQ ID NO: 2327928 - RNA, 19 nt, Artificial Sequence
  Description of Artificial Sequence: Synthetic oligonucleotide
  Sense strand starting at position 1773 of SEQ ID NO: 1885252
uuggauuaggcccacauca

SEQ ID NO: 2327929 - RNA, 19 nt, Artificial Sequence
  Description of Artificial Sequence: Synthetic oligonucleotide
  Antisense strand to SEQ ID NO: 2327928
ugaugugggccuaauccaa

SEQ ID NO: 2327930 - RNA, 19 nt, Artificial Sequence
  Description of Artificial Sequence: Synthetic oligonucleotide
  Sense strand starting at position 1775 of SEQ ID NO: 1885252
ggauuaggcccacaucagu

SEQ ID NO: 2327931 - RNA, 19 nt, Artificial Sequence
  Description of Artificial Sequence: Synthetic oligonucleotide
  Antisense strand to SEQ ID NO: 2327930
acugaugugggccuaaucc

SEQ ID NO: 2327932 - RNA, 19 nt, Artificial Sequence
  Description of Artificial Sequence: Synthetic oligonucleotide
  Sense strand starting at position 1784 of SEQ ID NO: 1885252
ccacaucagugaccucauu

SEQ ID NO: 2327933 - RNA, 19 nt, Artificial Sequence
  Description of Artificial Sequence: Synthetic oligonucleotide
  Antisense strand to SEQ ID NO: 2327932
aaugaggucacugaugugg

SEQ ID NO: 2327934 - RNA, 19 nt, Artificial Sequence
  Description of Artificial Sequence: Synthetic oligonucleotide
  Sense strand starting at position 1898 of SEQ ID NO: 1885252
uauaauaggagauggugua

SEQ ID NO: 2327935 - RNA, 19 nt, Artificial Sequence
  Description of Artificial Sequence: Synthetic oligonucleotide
  Antisense strand to SEQ ID NO: 2327934
uacaccaucuccuauuaua

SEQ ID NO: 2327936 - RNA, 19 nt, Artificial Sequence
  Description of Artificial Sequence: Synthetic oligonucleotide
  Sense strand starting at position 1904 of SEQ ID NO: 1885252
aggagaugguguaaaggua

SEQ ID NO: 2327937 - RNA, 19 nt, Artificial Sequence
  Description of Artificial Sequence: Synthetic oligonucleotide
  Antisense strand to SEQ ID NO: 2327936
uaccuuuacaccaucuccu

SEQ ID NO: 2327938 - RNA, 19 nt, Artificial Sequence
  Description of Artificial Sequence: Synthetic oligonucleotide
  Sense strand starting at position 2003 of SEQ ID NO: 1885252
gggcaugggagagguaauu

SEQ ID NO: 2327939 - RNA, 19 nt, Artificial Sequence
  Description of Artificial Sequence: Synthetic oligonucleotide
  Antisense strand to SEQ ID NO: 2327938
aauuaccucucccaugccc

SEQ ID NO: 2327940 - RNA, 19 nt, Artificial Sequence
  Description of Artificial Sequence: Synthetic oligonucleotide
  Sense strand starting at position 2247 of SEQ ID NO: 1885252
guuugaaggaaauguauac

SEQ ID NO: 2327941 - RNA, 19 nt, Artificial Sequence
  Description of Artificial Sequence: Synthetic oligonucleotide
  Antisense strand to SEQ ID NO: 2327940
guauacauuuccuucaaac

SEQ ID NO: 2327942 - RNA, 19 nt, Artificial Sequence
  Description of Artificial Sequence: Synthetic oligonucleotide
  Sense strand starting at position 2372 of SEQ ID NO: 1885252
cagauagaguaacuguaau

SEQ ID NO: 2327943 - RNA, 19 nt, Artificial Sequence
  Description of Artificial Sequence: Synthetic oligonucleotide
  Antisense strand to SEQ ID NO: 2327942
auuacaguuacucuaucug

SEQ ID NO: 2327944 - RNA, 19 nt, Artificial Sequence
  Description of Artificial Sequence: Synthetic oligonucleotide
  Sense strand starting at position 2585 of SEQ ID NO: 1885252
auaaguuugagagguaugu

SEQ ID NO: 2327945 - RNA, 19 nt, Artificial Sequence
  Description of Artificial Sequence: Synthetic oligonucleotide
  Antisense strand to SEQ ID NO: 2327944
acauaccucucaaacuuau

SEQ ID NO: 2327946 - RNA, 19 nt, Artificial Sequence
  Description of Artificial Sequence: Synthetic oligonucleotide
  Sense strand starting at position 2587 of SEQ ID NO: 1885252
aaguuugagagguauguua

SEQ ID NO: 2327947 - RNA, 19 nt, Artificial Sequence
  Description of Artificial Sequence: Synthetic oligonucleotide
  Antisense strand to SEQ ID NO: 2327946
uaacauaccucucaaacuu

SEQ ID NO: 2327948 - RNA, 19 nt, Artificial Sequence
  Description of Artificial Sequence: Synthetic oligonucleotide
  Sense strand starting at position 2841 of SEQ ID NO: 1885252
aaugaauucuaagccggaa

SEQ ID NO: 2327949 - RNA, 19 nt, Artificial Sequence
  Description of Artificial Sequence: Synthetic oligonucleotide
  Antisense strand to SEQ ID NO: 2327948
uuccggcuuagaauucauu

SEQ ID NO: 2327950 - RNA, 19 nt, Artificial Sequence
  Description of Artificial Sequence: Synthetic oligonucleotide
  Sense strand starting at position 2844 of SEQ ID NO: 1885252
gaauucuaagccggaaaug

SEQ ID NO: 2327951 - RNA, 19 nt, Artificial Sequence
  Description of Artificial Sequence: Synthetic oligonucleotide
  Antisense strand to SEQ ID NO: 2327950
cauuuccggcuuagaauuc

SEQ ID NO: 2327952 - RNA, 19 nt, Artificial Sequence
  Description of Artificial Sequence: Synthetic oligonucleotide
  Sense strand starting at position 2845 of SEQ ID NO: 1885252
aauucuaagccggaaaugu

SEQ ID NO: 2327953 - RNA, 19 nt, Artificial Sequence
  Description of Artificial Sequence: Synthetic oligonucleotide
  Antisense strand to SEQ ID NO: 2327952
acauuuccggcuuagaauu

SEQ ID NO: 2327954 - RNA, 19 nt, Artificial Sequence
  Description of Artificial Sequence: Synthetic oligonucleotide
  Sense strand starting at position 2874 of SEQ ID NO: 1885252
gagcuaaagagucagaugu

SEQ ID NO: 2327955 - RNA, 19 nt, Artificial Sequence
  Description of Artificial Sequence: Synthetic oligonucleotide
  Antisense strand to SEQ ID NO: 2327954
acaucugacucuuuagcuc

SEQ ID NO: 2327956 - RNA, 19 nt, Artificial Sequence
  Description of Artificial Sequence: Synthetic oligonucleotide
  Sense strand starting at position 2969 of SEQ ID NO: 1885252
ucuuacauuucuguguuua

SEQ ID NO: 2327957 - RNA, 19 nt, Artificial Sequence
  Description of Artificial Sequence: Synthetic oligonucleotide
  Antisense strand to SEQ ID NO: 2327956
uaaacacagaaauguaaga

SEQ ID NO: 2327958 - RNA, 19 nt, Artificial Sequence
  Description of Artificial Sequence: Synthetic oligonucleotide
  Sense strand starting at position 2980 of SEQ ID NO: 1885252
uguguuuaggauuaggaau

SEQ ID NO: 2327959 - RNA, 19 nt, Artificial Sequence
  Description of Artificial Sequence: Synthetic oligonucleotide
  Antisense strand to SEQ ID NO: 2327958
auuccuaauccuaaacaca

SEQ ID NO: 2327960 - RNA, 19 nt, Artificial Sequence
  Description of Artificial Sequence: Synthetic oligonucleotide
  Sense strand starting at position 2992 of SEQ ID NO: 1885252
uaggaauuauucguacuga

SEQ ID NO: 2327961 - RNA, 19 nt, Artificial Sequence
  Description of Artificial Sequence: Synthetic oligonucleotide
  Antisense strand to SEQ ID NO: 2327960
ucaguacgaauaauuccua

SEQ ID NO: 2327962 - RNA, 19 nt, Artificial Sequence
  Description of Artificial Sequence: Synthetic oligonucleotide
  Sense strand starting at position 3220 of SEQ ID NO: 1885252
uugauacuacauugaguca

SEQ ID NO: 2327963 - RNA, 19 nt, Artificial Sequence
  Description of Artificial Sequence: Synthetic oligonucleotide
  Antisense strand to SEQ ID NO: 2327962
ugacucaauguaguaucaa

SEQ ID NO: 2327964 - RNA, 19 nt, Artificial Sequence
  Description of Artificial Sequence: Synthetic oligonucleotide
  Sense strand starting at position 3223 of SEQ ID NO: 1885252
auacuacauugagucauua

SEQ ID NO: 2327965 - RNA, 19 nt, Artificial Sequence
  Description of Artificial Sequence: Synthetic oligonucleotide
  Antisense strand to SEQ ID NO: 2327964
uaaugacucaauguaguau

SEQ ID NO: 2327966 - RNA, 19 nt, Artificial Sequence
  Description of Artificial Sequence: Synthetic oligonucleotide
  Sense strand starting at position 3308 of SEQ ID NO: 1885252
ugaaacaugucuuugaauu

SEQ ID NO: 2327967 - RNA, 19 nt, Artificial Sequence
  Description of Artificial Sequence: Synthetic oligonucleotide
  Antisense strand to SEQ ID NO: 2327966
aauucaaagacauguuuca

SEQ ID NO: 2327968 - RNA, 19 nt, Artificial Sequence
  Description of Artificial Sequence: Synthetic oligonucleotide
  Sense strand starting at position 3467 of SEQ ID NO: 1885252
gaaauaguggugcaucaag

SEQ ID NO: 2327969 - RNA, 19 nt, Artificial Sequence
  Description of Artificial Sequence: Synthetic oligonucleotide
  Antisense strand to SEQ ID NO: 2327968
cuugaugcaccacuauuuc

SEQ ID NO: 2327970 - RNA, 19 nt, Artificial Sequence
  Description of Artificial Sequence: Synthetic oligonucleotide
  Sense strand starting at position 3498 of SEQ ID NO: 1885252
cuaaccucaggcugaaauu

SEQ ID NO: 2327971 - RNA, 19 nt, Artificial Sequence
  Description of Artificial Sequence: Synthetic oligonucleotide
  Antisense strand to SEQ ID NO: 2327970
aauuucagccugagguuag

SEQ ID NO: 2327972 - RNA, 19 nt, Artificial Sequence
  Description of Artificial Sequence: Synthetic oligonucleotide
  Sense strand starting at position 60 of SEQ ID NO: 1885253
uagaucaguugagugacua

SEQ ID NO: 2327973 - RNA, 19 nt, Artificial Sequence
  Description of Artificial Sequence: Synthetic oligonucleotide
  Antisense strand to SEQ ID NO: 2327972
uagucacucaacugaucua

SEQ ID NO: 2327974 - RNA, 19 nt, Artificial Sequence
  Description of Artificial Sequence: Synthetic oligonucleotide
  Sense strand starting at position 64 of SEQ ID NO: 1885253
ucaguugagugacuacaau

SEQ ID NO: 2327975 - RNA, 19 nt, Artificial Sequence
  Description of Artificial Sequence: Synthetic oligonucleotide
  Antisense strand to SEQ ID NO: 2327974
auuguagucacucaacuga

SEQ ID NO: 2327976 - RNA, 19 nt, Artificial Sequence
  Description of Artificial Sequence: Synthetic oligonucleotide
  Sense strand starting at position 115 of SEQ ID NO: 1885253
gguccugauuugcucuauu

SEQ ID NO: 2327977 - RNA, 19 nt, Artificial Sequence
  Description of Artificial Sequence: Synthetic oligonucleotide
  Antisense strand to SEQ ID NO: 2327976
aauagagcaaaucaggacc

SEQ ID NO: 2327978 - RNA, 19 nt, Artificial Sequence
  Description of Artificial Sequence: Synthetic oligonucleotide
  Sense strand starting at position 141 of SEQ ID NO: 1885253
ccaagucauuugucauguu

SEQ ID NO: 2327979 - RNA, 19 nt, Artificial Sequence
  Description of Artificial Sequence: Synthetic oligonucleotide
  Antisense strand to SEQ ID NO: 2327978
aacaugacaaaugacuugg

SEQ ID NO: 2327980 - RNA, 19 nt, Artificial Sequence
  Description of Artificial Sequence: Synthetic oligonucleotide
  Sense strand starting at position 236 of SEQ ID NO: 1885253
uguaaaguucuuugaaaug

SEQ ID NO: 2327981 - RNA, 19 nt, Artificial Sequence
  Description of Artificial Sequence: Synthetic oligonucleotide
  Antisense strand to SEQ ID NO: 2327980
cauuucaaagaacuuuaca

SEQ ID NO: 2327982 - RNA, 19 nt, Artificial Sequence
  Description of Artificial Sequence: Synthetic oligonucleotide
  Sense strand starting at position 385 of SEQ ID NO: 1885253
gcuguaucucauuauauca

SEQ ID NO: 2327983 - RNA, 19 nt, Artificial Sequence
  Description of Artificial Sequence: Synthetic oligonucleotide
  Antisense strand to SEQ ID NO: 2327982
ugauauaaugagauacagc

SEQ ID NO: 2327984 - RNA, 19 nt, Artificial Sequence
  Description of Artificial Sequence: Synthetic oligonucleotide
  Sense strand starting at position 401 of SEQ ID NO: 1885253
ucagauccuuuaguuacua

SEQ ID NO: 2327985 - RNA, 19 nt, Artificial Sequence
  Description of Artificial Sequence: Synthetic oligonucleotide
  Antisense strand to SEQ ID NO: 2327984
uaguaacuaaaggaucuga

SEQ ID NO: 2327986 - RNA, 19 nt, Artificial Sequence
  Description of Artificial Sequence: Synthetic oligonucleotide
  Sense strand starting at position 459 of SEQ ID NO: 1885253
ucagaaguagguugacauu

SEQ ID NO: 2327987 - RNA, 19 nt, Artificial Sequence
  Description of Artificial Sequence: Synthetic oligonucleotide
  Antisense strand to SEQ ID NO: 2327986
aaugucaaccuacuucuga

SEQ ID NO: 2327988 - RNA, 19 nt, Artificial Sequence
  Description of Artificial Sequence: Synthetic oligonucleotide
  Sense strand starting at position 604 of SEQ ID NO: 1885253
gagcucacagaaugugaaa

SEQ ID NO: 2327989 - RNA, 19 nt, Artificial Sequence
  Description of Artificial Sequence: Synthetic oligonucleotide
  Antisense strand to SEQ ID NO: 2327988
uuucacauucugugagcuc

SEQ ID NO: 2327990 - RNA, 19 nt, Artificial Sequence
  Description of Artificial Sequence: Synthetic oligonucleotide
  Sense strand starting at position 732 of SEQ ID NO: 1885253
ucaggauuguggguaauaa

SEQ ID NO: 2327991 - RNA, 19 nt, Artificial Sequence
  Description of Artificial Sequence: Synthetic oligonucleotide
  Antisense strand to SEQ ID NO: 2327990
uuauuacccacaauccuga

SEQ ID NO: 2327992 - RNA, 19 nt, Artificial Sequence
  Description of Artificial Sequence: Synthetic oligonucleotide
  Sense strand starting at position 741 of SEQ ID NO: 1885253
uggguaauaaugggaggua

SEQ ID NO: 2327993 - RNA, 19 nt, Artificial Sequence
  Description of Artificial Sequence: Synthetic oligonucleotide
  Antisense strand to SEQ ID NO: 2327992
uaccucccauuauuaccca

SEQ ID NO: 2327994 - RNA, 19 nt, Artificial Sequence
  Description of Artificial Sequence: Synthetic oligonucleotide
  Sense strand starting at position 744 of SEQ ID NO: 1885253
guaauaaugggagguaagu

SEQ ID NO: 2327995 - RNA, 19 nt, Artificial Sequence
  Description of Artificial Sequence: Synthetic oligonucleotide
  Antisense strand to SEQ ID NO: 2327994
acuuaccucccauuauuac

SEQ ID NO: 2327996 - RNA, 19 nt, Artificial Sequence
  Description of Artificial Sequence: Synthetic oligonucleotide
  Sense strand starting at position 750 of SEQ ID NO: 1885253
augggagguaagugauaca

SEQ ID NO: 2327997 - RNA, 19 nt, Artificial Sequence
  Description of Artificial Sequence: Synthetic oligonucleotide
  Antisense strand to SEQ ID NO: 2327996
uguaucacuuaccucccau

SEQ ID NO: 2327998 - RNA, 19 nt, Artificial Sequence
  Description of Artificial Sequence: Synthetic oligonucleotide
  Sense strand starting at position 755 of SEQ ID NO: 1885253
agguaagugauacaagcau

SEQ ID NO: 2327999 - RNA, 19 nt, Artificial Sequence
  Description of Artificial Sequence: Synthetic oligonucleotide
  Antisense strand to SEQ ID NO: 2327998
augcuuguaucacuuaccu

SEQ ID NO: 2328000 - RNA, 19 nt, Artificial Sequence
  Description of Artificial Sequence: Synthetic oligonucleotide
  Sense strand starting at position 841 of SEQ ID NO: 1885253
gcagaaucuggaggacuua

SEQ ID NO: 2328001 - RNA, 19 nt, Artificial Sequence
  Description of Artificial Sequence: Synthetic oligonucleotide
  Antisense strand to SEQ ID NO: 2328000
uaaguccuccagauucugc

SEQ ID NO: 2328002 - RNA, 19 nt, Artificial Sequence
  Description of Artificial Sequence: Synthetic oligonucleotide
  Sense strand starting at position 861 of SEQ ID NO: 1885253
acaguacuucucuaaguac

SEQ ID NO: 2328003 - RNA, 19 nt, Artificial Sequence
  Description of Artificial Sequence: Synthetic oligonucleotide
  Antisense strand to SEQ ID NO: 2328002
guacuuagagaaguacugu

SEQ ID NO: 2328004 - RNA, 19 nt, Artificial Sequence
  Description of Artificial Sequence: Synthetic oligonucleotide
  Sense strand starting at position 1150 of SEQ ID NO: 1885253
ucuugaauuugacaaacag

SEQ ID NO: 2328005 - RNA, 19 nt, Artificial Sequence
  Description of Artificial Sequence: Synthetic oligonucleotide
  Antisense strand to SEQ ID NO: 2328004
cuguuugucaaauucaaga

SEQ ID NO: 2328006 - RNA, 19 nt, Artificial Sequence
  Description of Artificial Sequence: Synthetic oligonucleotide
  Sense strand starting at position 1384 of SEQ ID NO: 1885253
agauuaugcauuggaguca

SEQ ID NO: 2328007 - RNA, 19 nt, Artificial Sequence
  Description of Artificial Sequence: Synthetic oligonucleotide
  Antisense strand to SEQ ID NO: 2328006
ugacuccaaugcauaaucu

SEQ ID NO: 2328008 - RNA, 19 nt, Artificial Sequence
  Description of Artificial Sequence: Synthetic oligonucleotide
  Sense strand starting at position 1424 of SEQ ID NO: 1885253
auauaugaauuugggagaa

SEQ ID NO: 2328009 - RNA, 19 nt, Artificial Sequence
  Description of Artificial Sequence: Synthetic oligonucleotide
  Antisense strand to SEQ ID NO: 2328008
uucucccaaauucauauau

SEQ ID NO: 2328010 - RNA, 19 nt, Artificial Sequence
  Description of Artificial Sequence: Synthetic oligonucleotide
  Sense strand starting at position 1426 of SEQ ID NO: 1885253
auaugaauuugggagaagu

SEQ ID NO: 2328011 - RNA, 19 nt, Artificial Sequence
  Description of Artificial Sequence: Synthetic oligonucleotide
  Antisense strand to SEQ ID NO: 2328010
acuucucccaaauucauau

SEQ ID NO: 2328012 - RNA, 19 nt, Artificial Sequence
  Description of Artificial Sequence: Synthetic oligonucleotide
  Sense strand starting at position 1446 of SEQ ID NO: 1885253
aaugaagccugagucagau

SEQ ID NO: 2328013 - RNA, 19 nt, Artificial Sequence
  Description of Artificial Sequence: Synthetic oligonucleotide
  Antisense strand to SEQ ID NO: 2328012
aucugacucaggcuucauu

SEQ ID NO: 2328014 - RNA, 19 nt, Artificial Sequence
  Description of Artificial Sequence: Synthetic oligonucleotide
  Sense strand starting at position 1456 of SEQ ID NO: 1885253
gagucagaucaaugacagu

SEQ ID NO: 2328015 - RNA, 19 nt, Artificial Sequence
  Description of Artificial Sequence: Synthetic oligonucleotide
  Antisense strand to SEQ ID NO: 2328014
acugucauugaucugacuc

SEQ ID NO: 2328016 - RNA, 19 nt, Artificial Sequence
  Description of Artificial Sequence: Synthetic oligonucleotide
  Sense strand starting at position 1506 of SEQ ID NO: 1885253
agagguauauuugagagag

SEQ ID NO: 2328017 - RNA, 19 nt, Artificial Sequence
  Description of Artificial Sequence: Synthetic oligonucleotide
  Antisense strand to SEQ ID NO: 2328016
cucucucaaauauaccucu

SEQ ID NO: 2328018 - RNA, 19 nt, Artificial Sequence
  Description of Artificial Sequence: Synthetic oligonucleotide
  Sense strand starting at position 1508 of SEQ ID NO: 1885253
agguauauuugagagagug

SEQ ID NO: 2328019 - RNA, 19 nt, Artificial Sequence
  Description of Artificial Sequence: Synthetic oligonucleotide
  Antisense strand to SEQ ID NO: 2328018
cacucucucaaauauaccu

SEQ ID NO: 2328020 - RNA, 19 nt, Artificial Sequence
  Description of Artificial Sequence: Synthetic oligonucleotide
  Sense strand starting at position 1564 of SEQ ID NO: 1885253
gaaauuugguuucgauuua

SEQ ID NO: 2328021 - RNA, 19 nt, Artificial Sequence
  Description of Artificial Sequence: Synthetic oligonucleotide
  Antisense strand to SEQ ID NO: 2328020
uaaaucgaaaccaaauuuc

SEQ ID NO: 2328022 - RNA, 19 nt, Artificial Sequence
  Description of Artificial Sequence: Synthetic oligonucleotide
  Sense strand starting at position 1667 of SEQ ID NO: 1885253
cuucuuuccagauggugga

SEQ ID NO: 2328023 - RNA, 19 nt, Artificial Sequence
  Description of Artificial Sequence: Synthetic oligonucleotide
  Antisense strand to SEQ ID NO: 2328022
uccaccaucuggaaagaag

SEQ ID NO: 2328024 - RNA, 19 nt, Artificial Sequence
  Description of Artificial Sequence: Synthetic oligonucleotide
  Sense strand starting at position 1843 of SEQ ID NO: 1885253
uggcaacuagcugauaaga

SEQ ID NO: 2328025 - RNA, 19 nt, Artificial Sequence
  Description of Artificial Sequence: Synthetic oligonucleotide
  Antisense strand to SEQ ID NO: 2328024
ucuuaucagcuaguugcca

SEQ ID NO: 2328026 - RNA, 19 nt, Artificial Sequence
  Description of Artificial Sequence: Synthetic oligonucleotide
  Sense strand starting at position 1908 of SEQ ID NO: 1885253
uuaccuuuccacugaggau

SEQ ID NO: 2328027 - RNA, 19 nt, Artificial Sequence
  Description of Artificial Sequence: Synthetic oligonucleotide
  Antisense strand to SEQ ID NO: 2328026
auccucaguggaaagguaa

SEQ ID NO: 2328028 - RNA, 19 nt, Artificial Sequence
  Description of Artificial Sequence: Synthetic oligonucleotide
  Sense strand starting at position 2023 of SEQ ID NO: 1885253
ggaauagcugcaggcauuu

SEQ ID NO: 2328029 - RNA, 19 nt, Artificial Sequence
  Description of Artificial Sequence: Synthetic oligonucleotide
  Antisense strand to SEQ ID NO: 2328028
aaaugccugcagcuauucc

SEQ ID NO: 2328030 - RNA, 19 nt, Artificial Sequence
  Description of Artificial Sequence: Synthetic oligonucleotide
  Sense strand starting at position 2245 of SEQ ID NO: 1885253
agaacuguguucucaacca

SEQ ID NO: 2328031 - RNA, 19 nt, Artificial Sequence
  Description of Artificial Sequence: Synthetic oligonucleotide
  Antisense strand to SEQ ID NO: 2328030
ugguugagaacacaguucu

SEQ ID NO: 2328032 - RNA, 19 nt, Artificial Sequence
  Description of Artificial Sequence: Synthetic oligonucleotide
  Sense strand starting at position 2551 of SEQ ID NO: 1885253
ggcagaucuccaggucaaa

SEQ ID NO: 2328033 - RNA, 19 nt, Artificial Sequence
  Description of Artificial Sequence: Synthetic oligonucleotide
  Antisense strand to SEQ ID NO: 2328032
uuugaccuggagaucugcc

SEQ ID NO: 2328034 - RNA, 19 nt, Artificial Sequence
  Description of Artificial Sequence: Synthetic oligonucleotide
  Sense strand starting at position 2694 of SEQ ID NO: 1885253
auggaauaguggccugaau

SEQ ID NO: 2328035 - RNA, 19 nt, Artificial Sequence
  Description of Artificial Sequence: Synthetic oligonucleotide
  Antisense strand to SEQ ID NO: 2328034
auucaggccacuauuccau

SEQ ID NO: 2328036 - RNA, 19 nt, Artificial Sequence
  Description of Artificial Sequence: Synthetic oligonucleotide
  Sense strand starting at position 2696 of SEQ ID NO: 1885253
ggaauaguggccugaauca

SEQ ID NO: 2328037 - RNA, 19 nt, Artificial Sequence
  Description of Artificial Sequence: Synthetic oligonucleotide
  Antisense strand to SEQ ID NO: 2328036
ugauucaggccacuauucc

SEQ ID NO: 2328038 - RNA, 19 nt, Artificial Sequence
  Description of Artificial Sequence: Synthetic oligonucleotide
  Sense strand starting at position 2717 of SEQ ID NO: 1885253
cuaucuuuccuguacagag

SEQ ID NO: 2328039 - RNA, 19 nt, Artificial Sequence
  Description of Artificial Sequence: Synthetic oligonucleotide
  Antisense strand to SEQ ID NO: 2328038
cucuguacaggaaagauag

SEQ ID NO: 2328040 - RNA, 19 nt, Artificial Sequence
  Description of Artificial Sequence: Synthetic oligonucleotide
  Sense strand starting at position 2719 of SEQ ID NO: 1885253
aucuuuccuguacagagau

SEQ ID NO: 2328041 - RNA, 19 nt, Artificial Sequence
  Description of Artificial Sequence: Synthetic oligonucleotide
  Antisense strand to SEQ ID NO: 2328040
aucucuguacaggaaagau

SEQ ID NO: 2328042 - RNA, 19 nt, Artificial Sequence
  Description of Artificial Sequence: Synthetic oligonucleotide
  Sense strand starting at position 2775 of SEQ ID NO: 1885253
gauagaucuccaggcauuc

SEQ ID NO: 2328043 - RNA, 19 nt, Artificial Sequence
  Description of Artificial Sequence: Synthetic oligonucleotide
  Antisense strand to SEQ ID NO: 2328042
gaaugccuggagaucuauc

SEQ ID NO: 2328044 - RNA, 19 nt, Artificial Sequence
  Description of Artificial Sequence: Synthetic oligonucleotide
  Sense strand starting at position 2834 of SEQ ID NO: 1885253
acccuuucugggcauagau

SEQ ID NO: 2328045 - RNA, 19 nt, Artificial Sequence
  Description of Artificial Sequence: Synthetic oligonucleotide
  Antisense strand to SEQ ID NO: 2328044
aucuaugcccagaaagggu

SEQ ID NO: 2328046 - RNA, 19 nt, Artificial Sequence
  Description of Artificial Sequence: Synthetic oligonucleotide
  Sense strand starting at position 2848 of SEQ ID NO: 1885253
uagauuguagugcagauau

SEQ ID NO: 2328047 - RNA, 19 nt, Artificial Sequence
  Description of Artificial Sequence: Synthetic oligonucleotide
  Antisense strand to SEQ ID NO: 2328046
auaucugcacuacaaucua

SEQ ID NO: 2328048 - RNA, 19 nt, Artificial Sequence
  Description of Artificial Sequence: Synthetic oligonucleotide
  Sense strand starting at position 3507 of SEQ ID NO: 1885253
ugguuuauaggucaaacuu

SEQ ID NO: 2328049 - RNA, 19 nt, Artificial Sequence
  Description of Artificial Sequence: Synthetic oligonucleotide
  Antisense strand to SEQ ID NO: 2328048
aaguuugaccuauaaacca

SEQ ID NO: 2328050 - RNA, 19 nt, Artificial Sequence
  Description of Artificial Sequence: Synthetic oligonucleotide
  Sense strand starting at position 3910 of SEQ ID NO: 1885253
cauggauugcaaggaaucu

SEQ ID NO: 2328051 - RNA, 19 nt, Artificial Sequence
  Description of Artificial Sequence: Synthetic oligonucleotide
  Antisense strand to SEQ ID NO: 2328050
agauuccuugcaauccaug

SEQ ID NO: 2328052 - RNA, 19 nt, Artificial Sequence
  Description of Artificial Sequence: Synthetic oligonucleotide
  Sense strand starting at position 32 of SEQ ID NO: 1885254
aguagaaaugcucaacauu

SEQ ID NO: 2328053 - RNA, 19 nt, Artificial Sequence
  Description of Artificial Sequence: Synthetic oligonucleotide
  Antisense strand to SEQ ID NO: 2328052
aauguugagcauuucuacu

SEQ ID NO: 2328054 - RNA, 19 nt, Artificial Sequence
  Description of Artificial Sequence: Synthetic oligonucleotide
  Sense strand starting at position 569 of SEQ ID NO: 1885254
gugauagucuccucaauac

SEQ ID NO: 2328055 - RNA, 19 nt, Artificial Sequence
  Description of Artificial Sequence: Synthetic oligonucleotide
  Antisense strand to SEQ ID NO: 2328054
guauugaggagacuaucac

SEQ ID NO: 2328056 - RNA, 19 nt, Artificial Sequence
  Description of Artificial Sequence: Synthetic oligonucleotide
  Sense strand starting at position 599 of SEQ ID NO: 1885254
aguucucaagcuugagaug

SEQ ID NO: 2328057 - RNA, 19 nt, Artificial Sequence
  Description of Artificial Sequence: Synthetic oligonucleotide
  Antisense strand to SEQ ID NO: 2328056
caucucaagcuugagaacu

SEQ ID NO: 2328058 - RNA, 19 nt, Artificial Sequence
  Description of Artificial Sequence: Synthetic oligonucleotide
  Sense strand starting at position 693 of SEQ ID NO: 1885254
acaaauugagcacagcauu

SEQ ID NO: 2328059 - RNA, 19 nt, Artificial Sequence
  Description of Artificial Sequence: Synthetic oligonucleotide
  Antisense strand to SEQ ID NO: 2328058
aaugcugugcucaauuugu

SEQ ID NO: 2328060 - RNA, 19 nt, Artificial Sequence
  Description of Artificial Sequence: Synthetic oligonucleotide
  Sense strand starting at position 718 of SEQ ID NO: 1885254
aaguguauauaugucauga

SEQ ID NO: 2328061 - RNA, 19 nt, Artificial Sequence
  Description of Artificial Sequence: Synthetic oligonucleotide
  Antisense strand to SEQ ID NO: 2328060
ucaugacauauauacacuu

SEQ ID NO: 2328062 - RNA, 19 nt, Artificial Sequence
  Description of Artificial Sequence: Synthetic oligonucleotide
  Sense strand starting at position 753 of SEQ ID NO: 1885254
ucagaaacauaggauugaa

SEQ ID NO: 2328063 - RNA, 19 nt, Artificial Sequence
  Description of Artificial Sequence: Synthetic oligonucleotide
  Antisense strand to SEQ ID NO: 2328062
uucaauccuauguuucuga

SEQ ID NO: 2328064 - RNA, 19 nt, Artificial Sequence
  Description of Artificial Sequence: Synthetic oligonucleotide
  Sense strand starting at position 1154 of SEQ ID NO: 1885254
uuaguuguugaagacaguu

SEQ ID NO: 2328065 - RNA, 19 nt, Artificial Sequence
  Description of Artificial Sequence: Synthetic oligonucleotide
  Antisense strand to SEQ ID NO: 2328064
aacugucuucaacaacuaa

SEQ ID NO: 2328066 - RNA, 19 nt, Artificial Sequence
  Description of Artificial Sequence: Synthetic oligonucleotide
  Sense strand starting at position 1304 of SEQ ID NO: 1885254
aaguaagagccauauagua

SEQ ID NO: 2328067 - RNA, 19 nt, Artificial Sequence
  Description of Artificial Sequence: Synthetic oligonucleotide
  Antisense strand to SEQ ID NO: 2328066
uacuauauggcucuuacuu

SEQ ID NO: 2328068 - RNA, 19 nt, Artificial Sequence
  Description of Artificial Sequence: Synthetic oligonucleotide
  Sense strand starting at position 1306 of SEQ ID NO: 1885254
guaagagccauauaguaga

SEQ ID NO: 2328069 - RNA, 19 nt, Artificial Sequence
  Description of Artificial Sequence: Synthetic oligonucleotide
  Antisense strand to SEQ ID NO: 2328068
ucuacuauauggcucuuac

SEQ ID NO: 2328070 - RNA, 19 nt, Artificial Sequence
  Description of Artificial Sequence: Synthetic oligonucleotide
  Sense strand starting at position 1340 of SEQ ID NO: 1885254
ugcauaacugcccaaggau

SEQ ID NO: 2328071 - RNA, 19 nt, Artificial Sequence
  Description of Artificial Sequence: Synthetic oligonucleotide
  Antisense strand to SEQ ID NO: 2328070
auccuugggcaguuaugca

SEQ ID NO: 2328072 - RNA, 19 nt, Artificial Sequence
  Description of Artificial Sequence: Synthetic oligonucleotide
  Sense strand starting at position 1468 of SEQ ID NO: 1885254
acacuuuauuguguaauca

SEQ ID NO: 2328073 - RNA, 19 nt, Artificial Sequence
  Description of Artificial Sequence: Synthetic oligonucleotide
  Antisense strand to SEQ ID NO: 2328072
ugauuacacaauaaagugu

SEQ ID NO: 2328074 - RNA, 19 nt, Artificial Sequence
  Description of Artificial Sequence: Synthetic oligonucleotide
  Sense strand starting at position 1476 of SEQ ID NO: 1885254
uuguguaaucaugauguca

SEQ ID NO: 2328075 - RNA, 19 nt, Artificial Sequence
  Description of Artificial Sequence: Synthetic oligonucleotide
  Antisense strand to SEQ ID NO: 2328074
ugacaucaugauuacacaa

SEQ ID NO: 2328076 - RNA, 19 nt, Artificial Sequence
  Description of Artificial Sequence: Synthetic oligonucleotide
  Sense strand starting at position 1612 of SEQ ID NO: 1885254
ggagguaugccuuaaauuc

SEQ ID NO: 2328077 - RNA, 19 nt, Artificial Sequence
  Description of Artificial Sequence: Synthetic oligonucleotide
  Antisense strand to SEQ ID NO: 2328076
gaauuuaaggcauaccucc

SEQ ID NO: 2328078 - RNA, 19 nt, Artificial Sequence
  Description of Artificial Sequence: Synthetic oligonucleotide
  Sense strand starting at position 1780 of SEQ ID NO: 1885254
cgaaaucaagccuauuaac

SEQ ID NO: 2328079 - RNA, 19 nt, Artificial Sequence
  Description of Artificial Sequence: Synthetic oligonucleotide
  Antisense strand to SEQ ID NO: 2328078
guuaauaggcuugauuucg

SEQ ID NO: 2328080 - RNA, 19 nt, Artificial Sequence
  Description of Artificial Sequence: Synthetic oligonucleotide
  Sense strand starting at position 1875 of SEQ ID NO: 1885254
agauuuaugccauguagca

SEQ ID NO: 2328081 - RNA, 19 nt, Artificial Sequence
  Description of Artificial Sequence: Synthetic oligonucleotide
  Antisense strand to SEQ ID NO: 2328080
ugcuacauggcauaaaucu

SEQ ID NO: 2328082 - RNA, 19 nt, Artificial Sequence
  Description of Artificial Sequence: Synthetic oligonucleotide
  Sense strand starting at position 2056 of SEQ ID NO: 1885254
gugaauguugcauaaacaa

SEQ ID NO: 2328083 - RNA, 19 nt, Artificial Sequence
  Description of Artificial Sequence: Synthetic oligonucleotide
  Antisense strand to SEQ ID NO: 2328082
uuguuuaugcaacauucac

SEQ ID NO: 2328084 - RNA, 19 nt, Artificial Sequence
  Description of Artificial Sequence: Synthetic oligonucleotide
  Sense strand starting at position 2530 of SEQ ID NO: 1885254
gggucagcugauuacuaga

SEQ ID NO: 2328085 - RNA, 19 nt, Artificial Sequence
  Description of Artificial Sequence: Synthetic oligonucleotide
  Antisense strand to SEQ ID NO: 2328084
ucuaguaaucagcugaccc

SEQ ID NO: 2328086 - RNA, 19 nt, Artificial Sequence
  Description of Artificial Sequence: Synthetic oligonucleotide
  Sense strand starting at position 2532 of SEQ ID NO: 1885254
gucagcugauuacuagaau

SEQ ID NO: 2328087 - RNA, 19 nt, Artificial Sequence
  Description of Artificial Sequence: Synthetic oligonucleotide
  Antisense strand to SEQ ID NO: 2328086
auucuaguaaucagcugac

SEQ ID NO: 2328088 - RNA, 19 nt, Artificial Sequence
  Description of Artificial Sequence: Synthetic oligonucleotide
  Sense strand starting at position 2589 of SEQ ID NO: 1885254
aaacguccuccauggacau

SEQ ID NO: 2328089 - RNA, 19 nt, Artificial Sequence
  Description of Artificial Sequence: Synthetic oligonucleotide
  Antisense strand to SEQ ID NO: 2328088
auguccauggaggacguuu

SEQ ID NO: 2328090 - RNA, 19 nt, Artificial Sequence
  Description of Artificial Sequence: Synthetic oligonucleotide
  Sense strand starting at position 2600 of SEQ ID NO: 1885254
auggacauaugucuuaaau

SEQ ID NO: 2328091 - RNA, 19 nt, Artificial Sequence
  Description of Artificial Sequence: Synthetic oligonucleotide
  Antisense strand to SEQ ID NO: 2328090
auuuaagacauauguccau

SEQ ID NO: 2328092 - RNA, 19 nt, Artificial Sequence
  Description of Artificial Sequence: Synthetic oligonucleotide
  Sense strand starting at position 2642 of SEQ ID NO: 1885254
agcaauugucaugaaugug

SEQ ID NO: 2328093 - RNA, 19 nt, Artificial Sequence
  Description of Artificial Sequence: Synthetic oligonucleotide
  Antisense strand to SEQ ID NO: 2328092
cacauucaugacaauugcu

SEQ ID NO: 2328094 - RNA, 19 nt, Artificial Sequence
  Description of Artificial Sequence: Synthetic oligonucleotide
  Sense strand starting at position 2702 of SEQ ID NO: 1885254
cuaguuaagaucggaagca

SEQ ID NO: 2328095 - RNA, 19 nt, Artificial Sequence
  Description of Artificial Sequence: Synthetic oligonucleotide
  Antisense strand to SEQ ID NO: 2328094
ugcuuccgaucuuaacuag

SEQ ID NO: 2328096 - RNA, 19 nt, Artificial Sequence
  Description of Artificial Sequence: Synthetic oligonucleotide
  Sense strand starting at position 2722 of SEQ ID NO: 1885254
ugaccaaagugguucccua

SEQ ID NO: 2328097 - RNA, 19 nt, Artificial Sequence
  Description of Artificial Sequence: Synthetic oligonucleotide
  Antisense strand to SEQ ID NO: 2328096
uagggaaccacuuugguca

SEQ ID NO: 2328098 - RNA, 19 nt, Artificial Sequence
  Description of Artificial Sequence: Synthetic oligonucleotide
  Sense strand starting at position 2737 of SEQ ID NO: 1885254
ccuagucaugacugugauu

SEQ ID NO: 2328099 - RNA, 19 nt, Artificial Sequence
  Description of Artificial Sequence: Synthetic oligonucleotide
  Antisense strand to SEQ ID NO: 2328098
aaucacagucaugacuagg

SEQ ID NO: 2328100 - RNA, 19 nt, Artificial Sequence
  Description of Artificial Sequence: Synthetic oligonucleotide
  Sense strand starting at position 2739 of SEQ ID NO: 1885254
uagucaugacugugauuga

SEQ ID NO: 2328101 - RNA, 19 nt, Artificial Sequence
  Description of Artificial Sequence: Synthetic oligonucleotide
  Antisense strand to SEQ ID NO: 2328100
ucaaucacagucaugacua

SEQ ID NO: 2328102 - RNA, 19 nt, Artificial Sequence
  Description of Artificial Sequence: Synthetic oligonucleotide
  Sense strand starting at position 2742 of SEQ ID NO: 1885254
ucaugacugugauugacaa

SEQ ID NO: 2328103 - RNA, 19 nt, Artificial Sequence
  Description of Artificial Sequence: Synthetic oligonucleotide
  Antisense strand to SEQ ID NO: 2328102
uugucaaucacagucauga

SEQ ID NO: 2328104 - RNA, 19 nt, Artificial Sequence
  Description of Artificial Sequence: Synthetic oligonucleotide
  Sense strand starting at position 3010 of SEQ ID NO: 1885254
agguuuccauauguaagaa

SEQ ID NO: 2328105 - RNA, 19 nt, Artificial Sequence
  Description of Artificial Sequence: Synthetic oligonucleotide
  Antisense strand to SEQ ID NO: 2328104
uucuuacauauggaaaccu

SEQ ID NO: 2328106 - RNA, 19 nt, Artificial Sequence
  Description of Artificial Sequence: Synthetic oligonucleotide
  Sense strand starting at position 3065 of SEQ ID NO: 1885254
uccacaguucucuaggacu

SEQ ID NO: 2328107 - RNA, 19 nt, Artificial Sequence
  Description of Artificial Sequence: Synthetic oligonucleotide
  Antisense strand to SEQ ID NO: 2328106
aguccuagagaacugugga

SEQ ID NO: 2328108 - RNA, 19 nt, Artificial Sequence
  Description of Artificial Sequence: Synthetic oligonucleotide
  Sense strand starting at position 3208 of SEQ ID NO: 1885254
cuuuaacaccaucgaugua

SEQ ID NO: 2328109 - RNA, 19 nt, Artificial Sequence
  Description of Artificial Sequence: Synthetic oligonucleotide
  Antisense strand to SEQ ID NO: 2328108
uacaucgaugguguuaaag

SEQ ID NO: 2328110 - RNA, 19 nt, Artificial Sequence
  Description of Artificial Sequence: Synthetic oligonucleotide
  Sense strand starting at position 3317 of SEQ ID NO: 1885254
cugccaggguaaucauaaa

SEQ ID NO: 2328111 - RNA, 19 nt, Artificial Sequence
  Description of Artificial Sequence: Synthetic oligonucleotide
  Antisense strand to SEQ ID NO: 2328110
uuuaugauuacccuggcag

SEQ ID NO: 2328112 - RNA, 19 nt, Artificial Sequence
  Description of Artificial Sequence: Synthetic oligonucleotide
  Sense strand starting at position 3437 of SEQ ID NO: 1885254
ucuaaauucuagucaggca

SEQ ID NO: 2328113 - RNA, 19 nt, Artificial Sequence
  Description of Artificial Sequence: Synthetic oligonucleotide
  Antisense strand to SEQ ID NO: 2328112
ugccugacuagaauuuaga

SEQ ID NO: 2328114 - RNA, 19 nt, Artificial Sequence
  Description of Artificial Sequence: Synthetic oligonucleotide
  Sense strand starting at position 3444 of SEQ ID NO: 1885254
ucuagucaggcaggaaaua

SEQ ID NO: 2328115 - RNA, 19 nt, Artificial Sequence
  Description of Artificial Sequence: Synthetic oligonucleotide
  Antisense strand to SEQ ID NO: 2328114
uauuuccugccugacuaga

SEQ ID NO: 2328116 - RNA, 19 nt, Artificial Sequence
  Description of Artificial Sequence: Synthetic oligonucleotide
  Sense strand starting at position 3470 of SEQ ID NO: 1885254
aaguuaugacccugguaga

SEQ ID NO: 2328117 - RNA, 19 nt, Artificial Sequence
  Description of Artificial Sequence: Synthetic oligonucleotide
  Antisense strand to SEQ ID NO: 2328116
ucuaccagggucauaacuu

SEQ ID NO: 2328118 - RNA, 19 nt, Artificial Sequence
  Description of Artificial Sequence: Synthetic oligonucleotide
  Sense strand starting at position 3471 of SEQ ID NO: 1885254
aguuaugacccugguagaa

SEQ ID NO: 2328119 - RNA, 19 nt, Artificial Sequence
  Description of Artificial Sequence: Synthetic oligonucleotide
  Antisense strand to SEQ ID NO: 2328118
uucuaccagggucauaacu

SEQ ID NO: 2328120 - RNA, 19 nt, Artificial Sequence
  Description of Artificial Sequence: Synthetic oligonucleotide
  Sense strand starting at position 3480 of SEQ ID NO: 1885254
ccugguagaagucaggauu

SEQ ID NO: 2328121 - RNA, 19 nt, Artificial Sequence
  Description of Artificial Sequence: Synthetic oligonucleotide
  Antisense strand to SEQ ID NO: 2328120
aauccugacuucuaccagg

SEQ ID NO: 2328122 - RNA, 19 nt, Artificial Sequence
  Description of Artificial Sequence: Synthetic oligonucleotide
  Sense strand starting at position 3607 of SEQ ID NO: 1885254
gcagguaucuuaucuaaga

SEQ ID NO: 2328123 - RNA, 19 nt, Artificial Sequence
  Description of Artificial Sequence: Synthetic oligonucleotide
  Antisense strand to SEQ ID NO: 2328122
ucuuagauaagauaccugc

SEQ ID NO: 2328124 - RNA, 19 nt, Artificial Sequence
  Description of Artificial Sequence: Synthetic oligonucleotide
  Sense strand starting at position 3634 of SEQ ID NO: 1885254
gaaggagacuuggaaauua

SEQ ID NO: 2328125 - RNA, 19 nt, Artificial Sequence
  Description of Artificial Sequence: Synthetic oligonucleotide
  Antisense strand to SEQ ID NO: 2328124
uaauuuccaagucuccuuc

SEQ ID NO: 2328126 - RNA, 19 nt, Artificial Sequence
  Description of Artificial Sequence: Synthetic oligonucleotide
  Sense strand starting at position 3709 of SEQ ID NO: 1885254
ugacauuggaugcagugau

SEQ ID NO: 2328127 - RNA, 19 nt, Artificial Sequence
  Description of Artificial Sequence: Synthetic oligonucleotide
  Antisense strand to SEQ ID NO: 2328126
aucacugcauccaauguca

SEQ ID NO: 2328128 - RNA, 19 nt, Artificial Sequence
  Description of Artificial Sequence: Synthetic oligonucleotide
  Sense strand starting at position 3713 of SEQ ID NO: 1885254
auuggaugcagugaucaug

SEQ ID NO: 2328129 - RNA, 19 nt, Artificial Sequence
  Description of Artificial Sequence: Synthetic oligonucleotide
  Antisense strand to SEQ ID NO: 2328128
caugaucacugcauccaau

SEQ ID NO: 2328130 - RNA, 19 nt, Artificial Sequence
  Description of Artificial Sequence: Synthetic oligonucleotide
  Sense strand starting at position 3716 of SEQ ID NO: 1885254
ggaugcagugaucaugcaa

SEQ ID NO: 2328131 - RNA, 19 nt, Artificial Sequence
  Description of Artificial Sequence: Synthetic oligonucleotide
  Antisense strand to SEQ ID NO: 2328130
uugcaugaucacugcaucc

SEQ ID NO: 2328132 - RNA, 19 nt, Artificial Sequence
  Description of Artificial Sequence: Synthetic oligonucleotide
  Sense strand starting at position 73 of SEQ ID NO: 1885255
ccaccaguucugcacugau

SEQ ID NO: 2328133 - RNA, 19 nt, Artificial Sequence
  Description of Artificial Sequence: Synthetic oligonucleotide
  Antisense strand to SEQ ID NO: 2328132
aucagugcagaacuggugg

SEQ ID NO: 2328134 - RNA, 19 nt, Artificial Sequence
  Description of Artificial Sequence: Synthetic oligonucleotide
  Sense strand starting at position 131 of SEQ ID NO: 1885255
auagcccuuugauuaaagu

SEQ ID NO: 2328135 - RNA, 19 nt, Artificial Sequence
  Description of Artificial Sequence: Synthetic oligonucleotide
  Antisense strand to SEQ ID NO: 2328134
acuuuaaucaaagggcuau

SEQ ID NO: 2328136 - RNA, 19 nt, Artificial Sequence
  Description of Artificial Sequence: Synthetic oligonucleotide
  Sense strand starting at position 243 of SEQ ID NO: 1885255
cuaugaugcgauuauuaug

SEQ ID NO: 2328137 - RNA, 19 nt, Artificial Sequence
  Description of Artificial Sequence: Synthetic oligonucleotide
  Antisense strand to SEQ ID NO: 2328136
cauaauaaucgcaucauag

SEQ ID NO: 2328138 - RNA, 19 nt, Artificial Sequence
  Description of Artificial Sequence: Synthetic oligonucleotide
  Sense strand starting at position 542 of SEQ ID NO: 1885255
ggaccuugucaguauucug

SEQ ID NO: 2328139 - RNA, 19 nt, Artificial Sequence
  Description of Artificial Sequence: Synthetic oligonucleotide
  Antisense strand to SEQ ID NO: 2328138
cagaauacugacaaggucc

SEQ ID NO: 2328140 - RNA, 19 nt, Artificial Sequence
  Description of Artificial Sequence: Synthetic oligonucleotide
  Sense strand starting at position 651 of SEQ ID NO: 1885255
gccagaacccucugacuac

SEQ ID NO: 2328141 - RNA, 19 nt, Artificial Sequence
  Description of Artificial Sequence: Synthetic oligonucleotide
  Antisense strand to SEQ ID NO: 2328140
guagucagaggguucuggc

SEQ ID NO: 2328142 - RNA, 19 nt, Artificial Sequence
  Description of Artificial Sequence: Synthetic oligonucleotide
  Sense strand starting at position 683 of SEQ ID NO: 1885255
caaacaugccuagaaacgu

SEQ ID NO: 2328143 - RNA, 19 nt, Artificial Sequence
  Description of Artificial Sequence: Synthetic oligonucleotide
  Antisense strand to SEQ ID NO: 2328142
acguuucuaggcauguuug

SEQ ID NO: 2328144 - RNA, 19 nt, Artificial Sequence
  Description of Artificial Sequence: Synthetic oligonucleotide
  Sense strand starting at position 810 of SEQ ID NO: 1885255
uggauugagccacagaugu

SEQ ID NO: 2328145 - RNA, 19 nt, Artificial Sequence
  Description of Artificial Sequence: Synthetic oligonucleotide
  Antisense strand to SEQ ID NO: 2328144
acaucuguggcucaaucca

SEQ ID NO: 2328146 - RNA, 19 nt, Artificial Sequence
  Description of Artificial Sequence: Synthetic oligonucleotide
  Sense strand starting at position 1205 of SEQ ID NO: 1885255
aaagcacugcucugggaaa

SEQ ID NO: 2328147 - RNA, 19 nt, Artificial Sequence
  Description of Artificial Sequence: Synthetic oligonucleotide
  Antisense strand to SEQ ID NO: 2328146
uuucccagagcagugcuuu

SEQ ID NO: 2328148 - RNA, 19 nt, Artificial Sequence
  Description of Artificial Sequence: Synthetic oligonucleotide
  Sense strand starting at position 1334 of SEQ ID NO: 1885255
guggcacugacagggauaa

SEQ ID NO: 2328149 - RNA, 19 nt, Artificial Sequence
  Description of Artificial Sequence: Synthetic oligonucleotide
  Antisense strand to SEQ ID NO: 2328148
uuaucccugucagugccac

SEQ ID NO: 2328150 - RNA, 19 nt, Artificial Sequence
  Description of Artificial Sequence: Synthetic oligonucleotide
  Sense strand starting at position 1755 of SEQ ID NO: 1885255
ucaagauucugagagaaau

SEQ ID NO: 2328151 - RNA, 19 nt, Artificial Sequence
  Description of Artificial Sequence: Synthetic oligonucleotide
  Antisense strand to SEQ ID NO: 2328150
auuucucucagaaucuuga

SEQ ID NO: 2328152 - RNA, 19 nt, Artificial Sequence
  Description of Artificial Sequence: Synthetic oligonucleotide
  Sense strand starting at position 1826 of SEQ ID NO: 1885255
ucagaaaguuaagugauga

SEQ ID NO: 2328153 - RNA, 19 nt, Artificial Sequence
  Description of Artificial Sequence: Synthetic oligonucleotide
  Antisense strand to SEQ ID NO: 2328152
ucaucacuuaacuuucuga

SEQ ID NO: 2328154 - RNA, 19 nt, Artificial Sequence
  Description of Artificial Sequence: Synthetic oligonucleotide
  Sense strand starting at position 1856 of SEQ ID NO: 1885255
accaaaguugauugagguu

SEQ ID NO: 2328155 - RNA, 19 nt, Artificial Sequence
  Description of Artificial Sequence: Synthetic oligonucleotide
  Antisense strand to SEQ ID NO: 2328154
aaccucaaucaacuuuggu

SEQ ID NO: 2328156 - RNA, 19 nt, Artificial Sequence
  Description of Artificial Sequence: Synthetic oligonucleotide
  Sense strand starting at position 1863 of SEQ ID NO: 1885255
uugauugagguugguuauu

SEQ ID NO: 2328157 - RNA, 19 nt, Artificial Sequence
  Description of Artificial Sequence: Synthetic oligonucleotide
  Antisense strand to SEQ ID NO: 2328156
aauaaccaaccucaaucaa

SEQ ID NO: 2328158 - RNA, 19 nt, Artificial Sequence
  Description of Artificial Sequence: Synthetic oligonucleotide
  Sense strand starting at position 1895 of SEQ ID NO: 1885255
gaaagcuuaccuuauccgu

SEQ ID NO: 2328159 - RNA, 19 nt, Artificial Sequence
  Description of Artificial Sequence: Synthetic oligonucleotide
  Antisense strand to SEQ ID NO: 2328158
acggauaagguaagcuuuc

SEQ ID NO: 2328160 - RNA, 19 nt, Artificial Sequence
  Description of Artificial Sequence: Synthetic oligonucleotide
  Sense strand starting at position 1911 of SEQ ID NO: 1885255
cguuaugaaccugacuuua

SEQ ID NO: 2328161 - RNA, 19 nt, Artificial Sequence
  Description of Artificial Sequence: Synthetic oligonucleotide
  Antisense strand to SEQ ID NO: 2328160
uaaagucagguucauaacg

SEQ ID NO: 2328162 - RNA, 19 nt, Artificial Sequence
  Description of Artificial Sequence: Synthetic oligonucleotide
  Sense strand starting at position 2015 of SEQ ID NO: 1885255
acgugucaccaacaaauca

SEQ ID NO: 2328163 - RNA, 19 nt, Artificial Sequence
  Description of Artificial Sequence: Synthetic oligonucleotide
  Antisense strand to SEQ ID NO: 2328162
ugauuuguuggugacacgu

SEQ ID NO: 2328164 - RNA, 19 nt, Artificial Sequence
  Description of Artificial Sequence: Synthetic oligonucleotide
  Sense strand starting at position 2035 of SEQ ID NO: 1885255
caguauuaaggagaacguu

SEQ ID NO: 2328165 - RNA, 19 nt, Artificial Sequence
  Description of Artificial Sequence: Synthetic oligonucleotide
  Antisense strand to SEQ ID NO: 2328164
aacguucuccuuaauacug

SEQ ID NO: 2328166 - RNA, 19 nt, Artificial Sequence
  Description of Artificial Sequence: Synthetic oligonucleotide
  Sense strand starting at position 2236 of SEQ ID NO: 1885255
cuggaagaauaguucguuu

SEQ ID NO: 2328167 - RNA, 19 nt, Artificial Sequence
  Description of Artificial Sequence: Synthetic oligonucleotide
  Antisense strand to SEQ ID NO: 2328166
aaacgaacuauucuuccag

SEQ ID NO: 2328168 - RNA, 19 nt, Artificial Sequence
  Description of Artificial Sequence: Synthetic oligonucleotide
  Sense strand starting at position 2310 of SEQ ID NO: 1885255
cugauaaauccguggaccu

SEQ ID NO: 2328169 - RNA, 19 nt, Artificial Sequence
  Description of Artificial Sequence: Synthetic oligonucleotide
  Antisense strand to SEQ ID NO: 2328168
agguccacggauuuaucag

SEQ ID NO: 2328170 - RNA, 19 nt, Artificial Sequence
  Description of Artificial Sequence: Synthetic oligonucleotide
  Sense strand starting at position 2311 of SEQ ID NO: 1885255
ugauaaauccguggaccua

SEQ ID NO: 2328171 - RNA, 19 nt, Artificial Sequence
  Description of Artificial Sequence: Synthetic oligonucleotide
  Antisense strand to SEQ ID NO: 2328170
uagguccacggauuuauca

SEQ ID NO: 2328172 - RNA, 19 nt, Artificial Sequence
  Description of Artificial Sequence: Synthetic oligonucleotide
  Sense strand starting at position 2340 of SEQ ID NO: 1885255
acugguacaucauuacuau

SEQ ID NO: 2328173 - RNA, 19 nt, Artificial Sequence
  Description of Artificial Sequence: Synthetic oligonucleotide
  Antisense strand to SEQ ID NO: 2328172
auaguaaugauguaccagu

SEQ ID NO: 2328174 - RNA, 19 nt, Artificial Sequence
  Description of Artificial Sequence: Synthetic oligonucleotide
  Sense strand starting at position 2343 of SEQ ID NO: 1885255
gguacaucauuacuauauu

SEQ ID NO: 2328175 - RNA, 19 nt, Artificial Sequence
  Description of Artificial Sequence: Synthetic oligonucleotide
  Antisense strand to SEQ ID NO: 2328174
aauauaguaaugauguacc

SEQ ID NO: 2328176 - RNA, 19 nt, Artificial Sequence
  Description of Artificial Sequence: Synthetic oligonucleotide
  Sense strand starting at position 2395 of SEQ ID NO: 1885255
aaacgaguucucccugcgu

SEQ ID NO: 2328177 - RNA, 19 nt, Artificial Sequence
  Description of Artificial Sequence: Synthetic oligonucleotide
  Antisense strand to SEQ ID NO: 2328176
acgcagggagaacucguuu

SEQ ID NO: 2328178 - RNA, 19 nt, Artificial Sequence
  Description of Artificial Sequence: Synthetic oligonucleotide
  Sense strand starting at position 2398 of SEQ ID NO: 1885255
cgaguucucccugcguacu

SEQ ID NO: 2328179 - RNA, 19 nt, Artificial Sequence
  Description of Artificial Sequence: Synthetic oligonucleotide
  Antisense strand to SEQ ID NO: 2328178
aguacgcagggagaacucg

SEQ ID NO: 2328180 - RNA, 19 nt, Artificial Sequence
  Description of Artificial Sequence: Synthetic oligonucleotide
  Sense strand starting at position 2457 of SEQ ID NO: 1885255
ggcugagauaauugugaaa

SEQ ID NO: 2328181 - RNA, 19 nt, Artificial Sequence
  Description of Artificial Sequence: Synthetic oligonucleotide
  Antisense strand to SEQ ID NO: 2328180
uuucacaauuaucucagcc

SEQ ID NO: 2328182 - RNA, 19 nt, Artificial Sequence
  Description of Artificial Sequence: Synthetic oligonucleotide
  Sense strand starting at position 2840 of SEQ ID NO: 1885255
agcauuauuugucagaaga

SEQ ID NO: 2328183 - RNA, 19 nt, Artificial Sequence
  Description of Artificial Sequence: Synthetic oligonucleotide
  Antisense strand to SEQ ID NO: 2328182
ucuucugacaaauaaugcu

SEQ ID NO: 2328184 - RNA, 19 nt, Artificial Sequence
  Description of Artificial Sequence: Synthetic oligonucleotide
  Sense strand starting at position 2842 of SEQ ID NO: 1885255
cauuauuugucagaagaga

SEQ ID NO: 2328185 - RNA, 19 nt, Artificial Sequence
  Description of Artificial Sequence: Synthetic oligonucleotide
  Antisense strand to SEQ ID NO: 2328184
ucucuucugacaaauaaug

SEQ ID NO: 2328186 - RNA, 19 nt, Artificial Sequence
  Description of Artificial Sequence: Synthetic oligonucleotide
  Sense strand starting at position 2853 of SEQ ID NO: 1885255
agaagagauuauggaagaa

SEQ ID NO: 2328187 - RNA, 19 nt, Artificial Sequence
  Description of Artificial Sequence: Synthetic oligonucleotide
  Antisense strand to SEQ ID NO: 2328186
uucuuccauaaucucuucu

SEQ ID NO: 2328188 - RNA, 19 nt, Artificial Sequence
  Description of Artificial Sequence: Synthetic oligonucleotide
  Sense strand starting at position 3060 of SEQ ID NO: 1885255
uugagccuaaugugagaau

SEQ ID NO: 2328189 - RNA, 19 nt, Artificial Sequence
  Description of Artificial Sequence: Synthetic oligonucleotide
  Antisense strand to SEQ ID NO: 2328188
auucucacauuaggcucaa

SEQ ID NO: 2328190 - RNA, 19 nt, Artificial Sequence
  Description of Artificial Sequence: Synthetic oligonucleotide
  Sense strand starting at position 3151 of SEQ ID NO: 1885255
guagaauggauacguuaau

SEQ ID NO: 2328191 - RNA, 19 nt, Artificial Sequence
  Description of Artificial Sequence: Synthetic oligonucleotide
  Antisense strand to SEQ ID NO: 2328190
auuaacguauccauucuac

SEQ ID NO: 2328192 - RNA, 19 nt, Artificial Sequence
  Description of Artificial Sequence: Synthetic oligonucleotide
  Sense strand starting at position 3158 of SEQ ID NO: 1885255
ggauacguuaaugagagua

SEQ ID NO: 2328193 - RNA, 19 nt, Artificial Sequence
  Description of Artificial Sequence: Synthetic oligonucleotide
  Antisense strand to SEQ ID NO: 2328192
uacucucauuaacguaucc

SEQ ID NO: 2328194 - RNA, 19 nt, Artificial Sequence
  Description of Artificial Sequence: Synthetic oligonucleotide
  Sense strand starting at position 3163 of SEQ ID NO: 1885255
cguuaaugagaguaauuac

SEQ ID NO: 2328195 - RNA, 19 nt, Artificial Sequence
  Description of Artificial Sequence: Synthetic oligonucleotide
  Antisense strand to SEQ ID NO: 2328194
guaauuacucucauuaacg

SEQ ID NO: 2328196 - RNA, 19 nt, Artificial Sequence
  Description of Artificial Sequence: Synthetic oligonucleotide
  Sense strand starting at position 3189 of SEQ ID NO: 1885255
cauugcugugaggguuaaa

SEQ ID NO: 2328197 - RNA, 19 nt, Artificial Sequence
  Description of Artificial Sequence: Synthetic oligonucleotide
  Antisense strand to SEQ ID NO: 2328196
uuuaacccucacagcaaug

SEQ ID NO: 2328198 - RNA, 19 nt, Artificial Sequence
  Description of Artificial Sequence: Synthetic oligonucleotide
  Sense strand starting at position 3353 of SEQ ID NO: 1885255
caaagcagccucgauaaga

SEQ ID NO: 2328199 - RNA, 19 nt, Artificial Sequence
  Description of Artificial Sequence: Synthetic oligonucleotide
  Antisense strand to SEQ ID NO: 2328198
ucuuaucgaggcugcuuug

SEQ ID NO: 2328200 - RNA, 19 nt, Artificial Sequence
  Description of Artificial Sequence: Synthetic oligonucleotide
  Sense strand starting at position 3442 of SEQ ID NO: 1885255
uccagaaacugguauuuac

SEQ ID NO: 2328201 - RNA, 19 nt, Artificial Sequence
  Description of Artificial Sequence: Synthetic oligonucleotide
  Antisense strand to SEQ ID NO: 2328200
guaaauaccaguuucugga

SEQ ID NO: 2328202 - RNA, 19 nt, Artificial Sequence
  Description of Artificial Sequence: Synthetic oligonucleotide
  Sense strand starting at position 3471 of SEQ ID NO: 1885255
accguuugugcaguguuau

SEQ ID NO: 2328203 - RNA, 19 nt, Artificial Sequence
  Description of Artificial Sequence: Synthetic oligonucleotide
  Antisense strand to SEQ ID NO: 2328202
auaacacugcacaaacggu

SEQ ID NO: 2328204 - RNA, 19 nt, Artificial Sequence
  Description of Artificial Sequence: Synthetic oligonucleotide
  Sense strand starting at position 3488 of SEQ ID NO: 1885255
aucuguaggucucugagaa

SEQ ID NO: 2328205 - RNA, 19 nt, Artificial Sequence
  Description of Artificial Sequence: Synthetic oligonucleotide
  Antisense strand to SEQ ID NO: 2328204
uucucagagaccuacagau

SEQ ID NO: 2328206 - RNA, 19 nt, Artificial Sequence
  Description of Artificial Sequence: Synthetic oligonucleotide
  Sense strand starting at position 3562 of SEQ ID NO: 1885255
uggcuaaaucuuugaaagu

SEQ ID NO: 2328207 - RNA, 19 nt, Artificial Sequence
  Description of Artificial Sequence: Synthetic oligonucleotide
  Antisense strand to SEQ ID NO: 2328206
acuuucaaagauuuagcca

SEQ ID NO: 2328208 - RNA, 19 nt, Artificial Sequence
  Description of Artificial Sequence: Synthetic oligonucleotide
  Sense strand starting at position 3605 of SEQ ID NO: 1885255
agcagaagaggugguguua

SEQ ID NO: 2328209 - RNA, 19 nt, Artificial Sequence
  Description of Artificial Sequence: Synthetic oligonucleotide
  Antisense strand to SEQ ID NO: 2328208
uaacaccaccucuucugcu

SEQ ID NO: 2328210 - RNA, 19 nt, Artificial Sequence
  Description of Artificial Sequence: Synthetic oligonucleotide
  Sense strand starting at position 3614 of SEQ ID NO: 1885255
ggugguguuacauauuaaa

SEQ ID NO: 2328211 - RNA, 19 nt, Artificial Sequence
  Description of Artificial Sequence: Synthetic oligonucleotide
  Antisense strand to SEQ ID NO: 2328210
uuuaauauguaacaccacc

SEQ ID NO: 2328212 - RNA, 19 nt, Artificial Sequence
  Description of Artificial Sequence: Synthetic oligonucleotide
  Sense strand starting at position 58 of SEQ ID NO: 1885256
guccuauguccucacaaua

SEQ ID NO: 2328213 - RNA, 19 nt, Artificial Sequence
  Description of Artificial Sequence: Synthetic oligonucleotide
  Antisense strand to SEQ ID NO: 2328212
uauugugaggacauaggac

SEQ ID NO: 2328214 - RNA, 19 nt, Artificial Sequence
  Description of Artificial Sequence: Synthetic oligonucleotide
  Sense strand starting at position 190 of SEQ ID NO: 1885256
aaugaaauucuaggucagu

SEQ ID NO: 2328215 - RNA, 19 nt, Artificial Sequence
  Description of Artificial Sequence: Synthetic oligonucleotide
  Antisense strand to SEQ ID NO: 2328214
acugaccuagaauuucauu

SEQ ID NO: 2328216 - RNA, 19 nt, Artificial Sequence
  Description of Artificial Sequence: Synthetic oligonucleotide
  Sense strand starting at position 191 of SEQ ID NO: 1885256
augaaauucuaggucaguu

SEQ ID NO: 2328217 - RNA, 19 nt, Artificial Sequence
  Description of Artificial Sequence: Synthetic oligonucleotide
  Antisense strand to SEQ ID NO: 2328216
aacugaccuagaauuucau

SEQ ID NO: 2328218 - RNA, 19 nt, Artificial Sequence
  Description of Artificial Sequence: Synthetic oligonucleotide
  Sense strand starting at position 245 of SEQ ID NO: 1885256
agguauaaaucuucugcaa

SEQ ID NO: 2328219 - RNA, 19 nt, Artificial Sequence
  Description of Artificial Sequence: Synthetic oligonucleotide
  Antisense strand to SEQ ID NO: 2328218
uugcagaagauuuauaccu

SEQ ID NO: 2328220 - RNA, 19 nt, Artificial Sequence
  Description of Artificial Sequence: Synthetic oligonucleotide
  Sense strand starting at position 340 of SEQ ID NO: 1885256
ggcaauuuacuucguguau

SEQ ID NO: 2328221 - RNA, 19 nt, Artificial Sequence
  Description of Artificial Sequence: Synthetic oligonucleotide
  Antisense strand to SEQ ID NO: 2328220
auacacgaaguaaauugcc

SEQ ID NO: 2328222 - RNA, 19 nt, Artificial Sequence
  Description of Artificial Sequence: Synthetic oligonucleotide
  Sense strand starting at position 341 of SEQ ID NO: 1885256
gcaauuuacuucguguaug

SEQ ID NO: 2328223 - RNA, 19 nt, Artificial Sequence
  Description of Artificial Sequence: Synthetic oligonucleotide
  Antisense strand to SEQ ID NO: 2328222
cauacacgaaguaaauugc

SEQ ID NO: 2328224 - RNA, 19 nt, Artificial Sequence
  Description of Artificial Sequence: Synthetic oligonucleotide
  Sense strand starting at position 355 of SEQ ID NO: 1885256
guaugagaauguccucuau

SEQ ID NO: 2328225 - RNA, 19 nt, Artificial Sequence
  Description of Artificial Sequence: Synthetic oligonucleotide
  Antisense strand to SEQ ID NO: 2328224
auagaggacauucucauac

SEQ ID NO: 2328226 - RNA, 19 nt, Artificial Sequence
  Description of Artificial Sequence: Synthetic oligonucleotide
  Sense strand starting at position 357 of SEQ ID NO: 1885256
augagaauguccucuauga

SEQ ID NO: 2328227 - RNA, 19 nt, Artificial Sequence
  Description of Artificial Sequence: Synthetic oligonucleotide
  Antisense strand to SEQ ID NO: 2328226
ucauagaggacauucucau

SEQ ID NO: 2328228 - RNA, 19 nt, Artificial Sequence
  Description of Artificial Sequence: Synthetic oligonucleotide
  Sense strand starting at position 398 of SEQ ID NO: 1885256
ggagaaacuuguguguuua

SEQ ID NO: 2328229 - RNA, 19 nt, Artificial Sequence
  Description of Artificial Sequence: Synthetic oligonucleotide
  Antisense strand to SEQ ID NO: 2328228
uaaacacacaaguuucucc

SEQ ID NO: 2328230 - RNA, 19 nt, Artificial Sequence
  Description of Artificial Sequence: Synthetic oligonucleotide
  Sense strand starting at position 507 of SEQ ID NO: 1885256
ucucauuaaucagcuugga

SEQ ID NO: 2328231 - RNA, 19 nt, Artificial Sequence
  Description of Artificial Sequence: Synthetic oligonucleotide
  Antisense strand to SEQ ID NO: 2328230
uccaagcugauuaaugaga

SEQ ID NO: 2328232 - RNA, 19 nt, Artificial Sequence
  Description of Artificial Sequence: Synthetic oligonucleotide
  Sense strand starting at position 682 of SEQ ID NO: 1885256
ucauguucugaguauaaag

SEQ ID NO: 2328233 - RNA, 19 nt, Artificial Sequence
  Description of Artificial Sequence: Synthetic oligonucleotide
  Antisense strand to SEQ ID NO: 2328232
cuuuauacucagaacauga

SEQ ID NO: 2328234 - RNA, 19 nt, Artificial Sequence
  Description of Artificial Sequence: Synthetic oligonucleotide
  Sense strand starting at position 856 of SEQ ID NO: 1885256
aguaaauagcaugaucuua

SEQ ID NO: 2328235 - RNA, 19 nt, Artificial Sequence
  Description of Artificial Sequence: Synthetic oligonucleotide
  Antisense strand to SEQ ID NO: 2328234
uaagaucaugcuauuuacu

SEQ ID NO: 2328236 - RNA, 19 nt, Artificial Sequence
  Description of Artificial Sequence: Synthetic oligonucleotide
  Sense strand starting at position 905 of SEQ ID NO: 1885256
ugaucuauaaauggugagu

SEQ ID NO: 2328237 - RNA, 19 nt, Artificial Sequence
  Description of Artificial Sequence: Synthetic oligonucleotide
  Antisense strand to SEQ ID NO: 2328236
acucaccauuuauagauca

SEQ ID NO: 2328238 - RNA, 19 nt, Artificial Sequence
  Description of Artificial Sequence: Synthetic oligonucleotide
  Sense strand starting at position 1120 of SEQ ID NO: 1885256
cuagaauuguacccagguu

SEQ ID NO: 2328239 - RNA, 19 nt, Artificial Sequence
  Description of Artificial Sequence: Synthetic oligonucleotide
  Antisense strand to SEQ ID NO: 2328238
aaccuggguacaauucuag

SEQ ID NO: 2328240 - RNA, 19 nt, Artificial Sequence
  Description of Artificial Sequence: Synthetic oligonucleotide
  Sense strand starting at position 1171 of SEQ ID NO: 1885256
ggauauggguccuuuccca

SEQ ID NO: 2328241 - RNA, 19 nt, Artificial Sequence
  Description of Artificial Sequence: Synthetic oligonucleotide
  Antisense strand to SEQ ID NO: 2328240
ugggaaaggacccauaucc

SEQ ID NO: 2328242 - RNA, 19 nt, Artificial Sequence
  Description of Artificial Sequence: Synthetic oligonucleotide
  Sense strand starting at position 1178 of SEQ ID NO: 1885256
gguccuuucccagaucauc

SEQ ID NO: 2328243 - RNA, 19 nt, Artificial Sequence
  Description of Artificial Sequence: Synthetic oligonucleotide
  Antisense strand to SEQ ID NO: 2328242
gaugaucugggaaaggacc

SEQ ID NO: 2328244 - RNA, 19 nt, Artificial Sequence
  Description of Artificial Sequence: Synthetic oligonucleotide
  Sense strand starting at position 1206 of SEQ ID NO: 1885256
ugcacuuuguuugcauuua

SEQ ID NO: 2328245 - RNA, 19 nt, Artificial Sequence
  Description of Artificial Sequence: Synthetic oligonucleotide
  Antisense strand to SEQ ID NO: 2328244
uaaaugcaaacaaagugca

SEQ ID NO: 2328246 - RNA, 19 nt, Artificial Sequence
  Description of Artificial Sequence: Synthetic oligonucleotide
  Sense strand starting at position 1227 of SEQ ID NO: 1885256
cuuguuaaucuuuaaugag

SEQ ID NO: 2328247 - RNA, 19 nt, Artificial Sequence
  Description of Artificial Sequence: Synthetic oligonucleotide
  Antisense strand to SEQ ID NO: 2328246
cucauuaaagauuaacaag

SEQ ID NO: 2328248 - RNA, 19 nt, Artificial Sequence
  Description of Artificial Sequence: Synthetic oligonucleotide
  Sense strand starting at position 1381 of SEQ ID NO: 1885256
ggcuacucuccugaaauug

SEQ ID NO: 2328249 - RNA, 19 nt, Artificial Sequence
  Description of Artificial Sequence: Synthetic oligonucleotide
  Antisense strand to SEQ ID NO: 2328248
caauuucaggagaguagcc

SEQ ID NO: 2328250 - RNA, 19 nt, Artificial Sequence
  Description of Artificial Sequence: Synthetic oligonucleotide
  Sense strand starting at position 1440 of SEQ ID NO: 1885256
ggucauugcuacucaauau

SEQ ID NO: 2328251 - RNA, 19 nt, Artificial Sequence
  Description of Artificial Sequence: Synthetic oligonucleotide
  Antisense strand to SEQ ID NO: 2328250
auauugaguagcaaugacc

SEQ ID NO: 2328252 - RNA, 19 nt, Artificial Sequence
  Description of Artificial Sequence: Synthetic oligonucleotide
  Sense strand starting at position 1444 of SEQ ID NO: 1885256
auugcuacucaauaucgua

SEQ ID NO: 2328253 - RNA, 19 nt, Artificial Sequence
  Description of Artificial Sequence: Synthetic oligonucleotide
  Antisense strand to SEQ ID NO: 2328252
uacgauauugaguagcaau

SEQ ID NO: 2328254 - RNA, 19 nt, Artificial Sequence
  Description of Artificial Sequence: Synthetic oligonucleotide
  Sense strand starting at position 1536 of SEQ ID NO: 1885256
gcagauuccuagcccagga

SEQ ID NO: 2328255 - RNA, 19 nt, Artificial Sequence
  Description of Artificial Sequence: Synthetic oligonucleotide
  Antisense strand to SEQ ID NO: 2328254
uccugggcuaggaaucugc

SEQ ID NO: 2328256 - RNA, 19 nt, Artificial Sequence
  Description of Artificial Sequence: Synthetic oligonucleotide
  Sense strand starting at position 2053 of SEQ ID NO: 1885256
ggaacugagcuuugaacuu

SEQ ID NO: 2328257 - RNA, 19 nt, Artificial Sequence
  Description of Artificial Sequence: Synthetic oligonucleotide
  Antisense strand to SEQ ID NO: 2328256
aaguucaaagcucaguucc

SEQ ID NO: 2328258 - RNA, 19 nt, Artificial Sequence
  Description of Artificial Sequence: Synthetic oligonucleotide
  Sense strand starting at position 2115 of SEQ ID NO: 1885256
ugauauuguguugauauga

SEQ ID NO: 2328259 - RNA, 19 nt, Artificial Sequence
  Description of Artificial Sequence: Synthetic oligonucleotide
  Antisense strand to SEQ ID NO: 2328258
ucauaucaacacaauauca

SEQ ID NO: 2328260 - RNA, 19 nt, Artificial Sequence
  Description of Artificial Sequence: Synthetic oligonucleotide
  Sense strand starting at position 2131 of SEQ ID NO: 1885256
ugacauuacucucuuagga

SEQ ID NO: 2328261 - RNA, 19 nt, Artificial Sequence
  Description of Artificial Sequence: Synthetic oligonucleotide
  Antisense strand to SEQ ID NO: 2328260
uccuaagagaguaauguca

SEQ ID NO: 2328262 - RNA, 19 nt, Artificial Sequence
  Description of Artificial Sequence: Synthetic oligonucleotide
  Sense strand starting at position 2438 of SEQ ID NO: 1885256
ugagacagugcauauuaau

SEQ ID NO: 2328263 - RNA, 19 nt, Artificial Sequence
  Description of Artificial Sequence: Synthetic oligonucleotide
  Antisense strand to SEQ ID NO: 2328262
auuaauaugcacugucuca

SEQ ID NO: 2328264 - RNA, 19 nt, Artificial Sequence
  Description of Artificial Sequence: Synthetic oligonucleotide
  Sense strand starting at position 2496 of SEQ ID NO: 1885256
auuggauuguggagagaag

SEQ ID NO: 2328265 - RNA, 19 nt, Artificial Sequence
  Description of Artificial Sequence: Synthetic oligonucleotide
  Antisense strand to SEQ ID NO: 2328264
cuucucuccacaauccaau

SEQ ID NO: 2328266 - RNA, 19 nt, Artificial Sequence
  Description of Artificial Sequence: Synthetic oligonucleotide
  Sense strand starting at position 2822 of SEQ ID NO: 1885256
aaucaaaucguagaguuuc

SEQ ID NO: 2328267 - RNA, 19 nt, Artificial Sequence
  Description of Artificial Sequence: Synthetic oligonucleotide
  Antisense strand to SEQ ID NO: 2328266
gaaacucuacgauuugauu

SEQ ID NO: 2328268 - RNA, 19 nt, Artificial Sequence
  Description of Artificial Sequence: Synthetic oligonucleotide
  Sense strand starting at position 2845 of SEQ ID NO: 1885256
ucauauggaagguguacaa

SEQ ID NO: 2328269 - RNA, 19 nt, Artificial Sequence
  Description of Artificial Sequence: Synthetic oligonucleotide
  Antisense strand to SEQ ID NO: 2328268
uuguacaccuuccauauga

SEQ ID NO: 2328270 - RNA, 19 nt, Artificial Sequence
  Description of Artificial Sequence: Synthetic oligonucleotide
  Sense strand starting at position 2910 of SEQ ID NO: 1885256
agaauagguucuuuguucu

SEQ ID NO: 2328271 - RNA, 19 nt, Artificial Sequence
  Description of Artificial Sequence: Synthetic oligonucleotide
  Antisense strand to SEQ ID NO: 2328270
agaacaaagaaccuauucu

SEQ ID NO: 2328272 - RNA, 19 nt, Artificial Sequence
  Description of Artificial Sequence: Synthetic oligonucleotide
  Sense strand starting at position 2950 of SEQ ID NO: 1885256
uguagcucacacugacaaa

SEQ ID NO: 2328273 - RNA, 19 nt, Artificial Sequence
  Description of Artificial Sequence: Synthetic oligonucleotide
  Antisense strand to SEQ ID NO: 2328272
uuugucagugugagcuaca

SEQ ID NO: 2328274 - RNA, 19 nt, Artificial Sequence
  Description of Artificial Sequence: Synthetic oligonucleotide
  Sense strand starting at position 3103 of SEQ ID NO: 1885256
ccucgauaaucaucaggca

SEQ ID NO: 2328275 - RNA, 19 nt, Artificial Sequence
  Description of Artificial Sequence: Synthetic oligonucleotide
  Antisense strand to SEQ ID NO: 2328274
ugccugaugauuaucgagg

SEQ ID NO: 2328276 - RNA, 19 nt, Artificial Sequence
  Description of Artificial Sequence: Synthetic oligonucleotide
  Sense strand starting at position 3149 of SEQ ID NO: 1885256
ugugcagagccagauaaua

SEQ ID NO: 2328277 - RNA, 19 nt, Artificial Sequence
  Description of Artificial Sequence: Synthetic oligonucleotide
  Antisense strand to SEQ ID NO: 2328276
uauuaucuggcucugcaca

SEQ ID NO: 2328278 - RNA, 19 nt, Artificial Sequence
  Description of Artificial Sequence: Synthetic oligonucleotide
  Sense strand starting at position 3260 of SEQ ID NO: 1885256
gaacgaaugugacuauguc

SEQ ID NO: 2328279 - RNA, 19 nt, Artificial Sequence
  Description of Artificial Sequence: Synthetic oligonucleotide
  Antisense strand to SEQ ID NO: 2328278
gacauagucacauucguuc

SEQ ID NO: 2328280 - RNA, 19 nt, Artificial Sequence
  Description of Artificial Sequence: Synthetic oligonucleotide
  Sense strand starting at position 3264 of SEQ ID NO: 1885256
gaaugugacuaugucccaa

SEQ ID NO: 2328281 - RNA, 19 nt, Artificial Sequence
  Description of Artificial Sequence: Synthetic oligonucleotide
  Antisense strand to SEQ ID NO: 2328280
uugggacauagucacauuc

SEQ ID NO: 2328282 - RNA, 19 nt, Artificial Sequence
  Description of Artificial Sequence: Synthetic oligonucleotide
  Sense strand starting at position 3266 of SEQ ID NO: 1885256
augugacuaugucccaauu

SEQ ID NO: 2328283 - RNA, 19 nt, Artificial Sequence
  Description of Artificial Sequence: Synthetic oligonucleotide
  Antisense strand to SEQ ID NO: 2328282
aauugggacauagucacau

SEQ ID NO: 2328284 - RNA, 19 nt, Artificial Sequence
  Description of Artificial Sequence: Synthetic oligonucleotide
  Sense strand starting at position 3775 of SEQ ID NO: 1885256
gcccucagccaagaguaua

SEQ ID NO: 2328285 - RNA, 19 nt, Artificial Sequence
  Description of Artificial Sequence: Synthetic oligonucleotide
  Antisense strand to SEQ ID NO: 2328284
uauacucuuggcugagggc

SEQ ID NO: 2328286 - RNA, 19 nt, Artificial Sequence
  Description of Artificial Sequence: Synthetic oligonucleotide
  Sense strand starting at position 3839 of SEQ ID NO: 1885256
gcaggucuauuaccagauu

SEQ ID NO: 2328287 - RNA, 19 nt, Artificial Sequence
  Description of Artificial Sequence: Synthetic oligonucleotide
  Antisense strand to SEQ ID NO: 2328286
aaucugguaauagaccugc

SEQ ID NO: 2328288 - RNA, 19 nt, Artificial Sequence
  Description of Artificial Sequence: Synthetic oligonucleotide
  Sense strand starting at position 3850 of SEQ ID NO: 1885256
accagauucggucaaacca

SEQ ID NO: 2328289 - RNA, 19 nt, Artificial Sequence
  Description of Artificial Sequence: Synthetic oligonucleotide
  Antisense strand to SEQ ID NO: 2328288
ugguuugaccgaaucuggu

SEQ ID NO: 2328290 - RNA, 19 nt, Artificial Sequence
  Description of Artificial Sequence: Synthetic oligonucleotide
  Sense strand starting at position 3868 of SEQ ID NO: 1885256
aaagcuuuguuucuggaca

SEQ ID NO: 2328291 - RNA, 19 nt, Artificial Sequence
  Description of Artificial Sequence: Synthetic oligonucleotide
  Antisense strand to SEQ ID NO: 2328290
uguccagaaacaaagcuuu

SEQ ID NO: 2328292 - RNA, 19 nt, Artificial Sequence
  Description of Artificial Sequence: Synthetic oligonucleotide
  Sense strand starting at position 48 of SEQ ID NO: 1885257
cacaaacaggccugugaaa

SEQ ID NO: 2328293 - RNA, 19 nt, Artificial Sequence
  Description of Artificial Sequence: Synthetic oligonucleotide
  Antisense strand to SEQ ID NO: 2328292
uuucacaggccuguuugug

SEQ ID NO: 2328294 - RNA, 19 nt, Artificial Sequence
  Description of Artificial Sequence: Synthetic oligonucleotide
  Sense strand starting at position 50 of SEQ ID NO: 1885257
caaacaggccugugaaagu

SEQ ID NO: 2328295 - RNA, 19 nt, Artificial Sequence
  Description of Artificial Sequence: Synthetic oligonucleotide
  Antisense strand to SEQ ID NO: 2328294
acuuucacaggccuguuug

SEQ ID NO: 2328296 - RNA, 19 nt, Artificial Sequence
  Description of Artificial Sequence: Synthetic oligonucleotide
  Sense strand starting at position 67 of SEQ ID NO: 1885257
gucacccugucauuugcua

SEQ ID NO: 2328297 - RNA, 19 nt, Artificial Sequence
  Description of Artificial Sequence: Synthetic oligonucleotide
  Antisense strand to SEQ ID NO: 2328296
uagcaaaugacagggugac

SEQ ID NO: 2328298 - RNA, 19 nt, Artificial Sequence
  Description of Artificial Sequence: Synthetic oligonucleotide
  Sense strand starting at position 71 of SEQ ID NO: 1885257
cccugucauuugcuaugau

SEQ ID NO: 2328299 - RNA, 19 nt, Artificial Sequence
  Description of Artificial Sequence: Synthetic oligonucleotide
  Antisense strand to SEQ ID NO: 2328298
aucauagcaaaugacaggg

SEQ ID NO: 2328300 - RNA, 19 nt, Artificial Sequence
  Description of Artificial Sequence: Synthetic oligonucleotide
  Sense strand starting at position 135 of SEQ ID NO: 1885257
gugagucuuggacacaauu

SEQ ID NO: 2328301 - RNA, 19 nt, Artificial Sequence
  Description of Artificial Sequence: Synthetic oligonucleotide
  Antisense strand to SEQ ID NO: 2328300
aauuguguccaagacucac

SEQ ID NO: 2328302 - RNA, 19 nt, Artificial Sequence
  Description of Artificial Sequence: Synthetic oligonucleotide
  Sense strand starting at position 213 of SEQ ID NO: 1885257
cuuuauguauugucagaag

SEQ ID NO: 2328303 - RNA, 19 nt, Artificial Sequence
  Description of Artificial Sequence: Synthetic oligonucleotide
  Antisense strand to SEQ ID NO: 2328302
cuucugacaauacauaaag

SEQ ID NO: 2328304 - RNA, 19 nt, Artificial Sequence
  Description of Artificial Sequence: Synthetic oligonucleotide
  Sense strand starting at position 273 of SEQ ID NO: 1885257
agaauaagguuaggaauuu

SEQ ID NO: 2328305 - RNA, 19 nt, Artificial Sequence
  Description of Artificial Sequence: Synthetic oligonucleotide
  Antisense strand to SEQ ID NO: 2328304
aaauuccuaaccuuauucu

SEQ ID NO: 2328306 - RNA, 19 nt, Artificial Sequence
  Description of Artificial Sequence: Synthetic oligonucleotide
  Sense strand starting at position 331 of SEQ ID NO: 1885257
ucaggagacucucuuaucu

SEQ ID NO: 2328307 - RNA, 19 nt, Artificial Sequence
  Description of Artificial Sequence: Synthetic oligonucleotide
  Antisense strand to SEQ ID NO: 2328306
agauaagagagucuccuga

SEQ ID NO: 2328308 - RNA, 19 nt, Artificial Sequence
  Description of Artificial Sequence: Synthetic oligonucleotide
  Sense strand starting at position 397 of SEQ ID NO: 1885257
gugauaugccacgaacaua

SEQ ID NO: 2328309 - RNA, 19 nt, Artificial Sequence
  Description of Artificial Sequence: Synthetic oligonucleotide
  Antisense strand to SEQ ID NO: 2328308
uauguucguggcauaucac

SEQ ID NO: 2328310 - RNA, 19 nt, Artificial Sequence
  Description of Artificial Sequence: Synthetic oligonucleotide
  Sense strand starting at position 706 of SEQ ID NO: 1885257
ugguaauagcagcaagauu

SEQ ID NO: 2328311 - RNA, 19 nt, Artificial Sequence
  Description of Artificial Sequence: Synthetic oligonucleotide
  Antisense strand to SEQ ID NO: 2328310
aaucuugcugcuauuacca

SEQ ID NO: 2328312 - RNA, 19 nt, Artificial Sequence
  Description of Artificial Sequence: Synthetic oligonucleotide
  Sense strand starting at position 1016 of SEQ ID NO: 1885257
aauguuaaccuaugggcau

SEQ ID NO: 2328313 - RNA, 19 nt, Artificial Sequence
  Description of Artificial Sequence: Synthetic oligonucleotide
  Antisense strand to SEQ ID NO: 2328312
augcccauagguuaacauu

SEQ ID NO: 2328314 - RNA, 19 nt, Artificial Sequence
  Description of Artificial Sequence: Synthetic oligonucleotide
  Sense strand starting at position 1119 of SEQ ID NO: 1885257
ggcgaagaggcauauguaa

SEQ ID NO: 2328315 - RNA, 19 nt, Artificial Sequence
  Description of Artificial Sequence: Synthetic oligonucleotide
  Antisense strand to SEQ ID NO: 2328314
uuacauaugccucuucgcc

SEQ ID NO: 2328316 - RNA, 19 nt, Artificial Sequence
  Description of Artificial Sequence: Synthetic oligonucleotide
  Sense strand starting at position 1121 of SEQ ID NO: 1885257
cgaagaggcauauguaaua

SEQ ID NO: 2328317 - RNA, 19 nt, Artificial Sequence
  Description of Artificial Sequence: Synthetic oligonucleotide
  Antisense strand to SEQ ID NO: 2328316
uauuacauaugccucuucg

SEQ ID NO: 2328318 - RNA, 19 nt, Artificial Sequence
  Description of Artificial Sequence: Synthetic oligonucleotide
  Sense strand starting at position 1522 of SEQ ID NO: 1885257
ggacugagagggugucaga

SEQ ID NO: 2328319 - RNA, 19 nt, Artificial Sequence
  Description of Artificial Sequence: Synthetic oligonucleotide
  Antisense strand to SEQ ID NO: 2328318
ucugacacccucucagucc

SEQ ID NO: 2328320 - RNA, 19 nt, Artificial Sequence
  Description of Artificial Sequence: Synthetic oligonucleotide
  Sense strand starting at position 2113 of SEQ ID NO: 1885257
gagaauaaucggcacagcu

SEQ ID NO: 2328321 - RNA, 19 nt, Artificial Sequence
  Description of Artificial Sequence: Synthetic oligonucleotide
  Antisense strand to SEQ ID NO: 2328320
agcugugccgauuauucuc

SEQ ID NO: 2328322 - RNA, 19 nt, Artificial Sequence
  Description of Artificial Sequence: Synthetic oligonucleotide
  Sense strand starting at position 2164 of SEQ ID NO: 1885257
uuauuaucauuggcugaca

SEQ ID NO: 2328323 - RNA, 19 nt, Artificial Sequence
  Description of Artificial Sequence: Synthetic oligonucleotide
  Antisense strand to SEQ ID NO: 2328322
ugucagccaaugauaauaa

SEQ ID NO: 2328324 - RNA, 19 nt, Artificial Sequence
  Description of Artificial Sequence: Synthetic oligonucleotide
  Sense strand starting at position 2166 of SEQ ID NO: 1885257
auuaucauuggcugacaaa

SEQ ID NO: 2328325 - RNA, 19 nt, Artificial Sequence
  Description of Artificial Sequence: Synthetic oligonucleotide
  Antisense strand to SEQ ID NO: 2328324
uuugucagccaaugauaau

SEQ ID NO: 2328326 - RNA, 19 nt, Artificial Sequence
  Description of Artificial Sequence: Synthetic oligonucleotide
  Sense strand starting at position 2167 of SEQ ID NO: 1885257
uuaucauuggcugacaaac

SEQ ID NO: 2328327 - RNA, 19 nt, Artificial Sequence
  Description of Artificial Sequence: Synthetic oligonucleotide
  Antisense strand to SEQ ID NO: 2328326
guuugucagccaaugauaa

SEQ ID NO: 2328328 - RNA, 19 nt, Artificial Sequence
  Description of Artificial Sequence: Synthetic oligonucleotide
  Sense strand starting at position 2247 of SEQ ID NO: 1885257
aggcauagagaaugaaguu

SEQ ID NO: 2328329 - RNA, 19 nt, Artificial Sequence
  Description of Artificial Sequence: Synthetic oligonucleotide
  Antisense strand to SEQ ID NO: 2328328
aacuucauucucuaugccu

SEQ ID NO: 2328330 - RNA, 19 nt, Artificial Sequence
  Description of Artificial Sequence: Synthetic oligonucleotide
  Sense strand starting at position 2288 of SEQ ID NO: 1885257
cuuagacugcguuaaagag

SEQ ID NO: 2328331 - RNA, 19 nt, Artificial Sequence
  Description of Artificial Sequence: Synthetic oligonucleotide
  Antisense strand to SEQ ID NO: 2328330
cucuuuaacgcagucuaag

SEQ ID NO: 2328332 - RNA, 19 nt, Artificial Sequence
  Description of Artificial Sequence: Synthetic oligonucleotide
  Sense strand starting at position 2625 of SEQ ID NO: 1885257
gaguuccuacuaggugaau

SEQ ID NO: 2328333 - RNA, 19 nt, Artificial Sequence
  Description of Artificial Sequence: Synthetic oligonucleotide
  Antisense strand to SEQ ID NO: 2328332
auucaccuaguaggaacuc

SEQ ID NO: 2328334 - RNA, 19 nt, Artificial Sequence
  Description of Artificial Sequence: Synthetic oligonucleotide
  Sense strand starting at position 2626 of SEQ ID NO: 1885257
aguuccuacuaggugaaua

SEQ ID NO: 2328335 - RNA, 19 nt, Artificial Sequence
  Description of Artificial Sequence: Synthetic oligonucleotide
  Antisense strand to SEQ ID NO: 2328334
uauucaccuaguaggaacu

SEQ ID NO: 2328336 - RNA, 19 nt, Artificial Sequence
  Description of Artificial Sequence: Synthetic oligonucleotide
  Sense strand starting at position 2631 of SEQ ID NO: 1885257
cuacuaggugaauaauguu

SEQ ID NO: 2328337 - RNA, 19 nt, Artificial Sequence
  Description of Artificial Sequence: Synthetic oligonucleotide
  Antisense strand to SEQ ID NO: 2328336
aacauuauucaccuaguag

SEQ ID NO: 2328338 - RNA, 19 nt, Artificial Sequence
  Description of Artificial Sequence: Synthetic oligonucleotide
  Sense strand starting at position 2637 of SEQ ID NO: 1885257
ggugaauaauguuccauua

SEQ ID NO: 2328339 - RNA, 19 nt, Artificial Sequence
  Description of Artificial Sequence: Synthetic oligonucleotide
  Antisense strand to SEQ ID NO: 2328338
uaauggaacauuauucacc

SEQ ID NO: 2328340 - RNA, 19 nt, Artificial Sequence
  Description of Artificial Sequence: Synthetic oligonucleotide
  Sense strand starting at position 2703 of SEQ ID NO: 1885257
uucugcaaugcagaauaaa

SEQ ID NO: 2328341 - RNA, 19 nt, Artificial Sequence
  Description of Artificial Sequence: Synthetic oligonucleotide
  Antisense strand to SEQ ID NO: 2328340
uuuauucugcauugcagaa

SEQ ID NO: 2328342 - RNA, 19 nt, Artificial Sequence
  Description of Artificial Sequence: Synthetic oligonucleotide
  Sense strand starting at position 2804 of SEQ ID NO: 1885257
ccuuuaagugggcaauaua

SEQ ID NO: 2328343 - RNA, 19 nt, Artificial Sequence
  Description of Artificial Sequence: Synthetic oligonucleotide
  Antisense strand to SEQ ID NO: 2328342
uauauugcccacuuaaagg

SEQ ID NO: 2328344 - RNA, 19 nt, Artificial Sequence
  Description of Artificial Sequence: Synthetic oligonucleotide
  Sense strand starting at position 2827 of SEQ ID NO: 1885257
cuugaaguaagaugagcua

SEQ ID NO: 2328345 - RNA, 19 nt, Artificial Sequence
  Description of Artificial Sequence: Synthetic oligonucleotide
  Antisense strand to SEQ ID NO: 2328344
uagcucaucuuacuucaag

SEQ ID NO: 2328346 - RNA, 19 nt, Artificial Sequence
  Description of Artificial Sequence: Synthetic oligonucleotide
  Sense strand starting at position 2830 of SEQ ID NO: 1885257
gaaguaagaugagcuaauu

SEQ ID NO: 2328347 - RNA, 19 nt, Artificial Sequence
  Description of Artificial Sequence: Synthetic oligonucleotide
  Antisense strand to SEQ ID NO: 2328346
aauuagcucaucuuacuuc

SEQ ID NO: 2328348 - RNA, 19 nt, Artificial Sequence
  Description of Artificial Sequence: Synthetic oligonucleotide
  Sense strand starting at position 2863 of SEQ ID NO: 1885257
aucagaagccuaugauaau

SEQ ID NO: 2328349 - RNA, 19 nt, Artificial Sequence
  Description of Artificial Sequence: Synthetic oligonucleotide
  Antisense strand to SEQ ID NO: 2328348
auuaucauaggcuucugau

SEQ ID NO: 2328350 - RNA, 19 nt, Artificial Sequence
  Description of Artificial Sequence: Synthetic oligonucleotide
  Sense strand starting at position 2913 of SEQ ID NO: 1885257
aagauugauuuagguagaa

SEQ ID NO: 2328351 - RNA, 19 nt, Artificial Sequence
  Description of Artificial Sequence: Synthetic oligonucleotide
  Antisense strand to SEQ ID NO: 2328350
uucuaccuaaaucaaucuu

SEQ ID NO: 2328352 - RNA, 19 nt, Artificial Sequence
  Description of Artificial Sequence: Synthetic oligonucleotide
  Sense strand starting at position 2937 of SEQ ID NO: 1885257
aauguauaaccuggaggua

SEQ ID NO: 2328353 - RNA, 19 nt, Artificial Sequence
  Description of Artificial Sequence: Synthetic oligonucleotide
  Antisense strand to SEQ ID NO: 2328352
uaccuccagguuauacauu

SEQ ID NO: 2328354 - RNA, 19 nt, Artificial Sequence
  Description of Artificial Sequence: Synthetic oligonucleotide
  Sense strand starting at position 3184 of SEQ ID NO: 1885257
aagcuaggugaguacuauu

SEQ ID NO: 2328355 - RNA, 19 nt, Artificial Sequence
  Description of Artificial Sequence: Synthetic oligonucleotide
  Antisense strand to SEQ ID NO: 2328354
aauaguacucaccuagcuu

SEQ ID NO: 2328356 - RNA, 19 nt, Artificial Sequence
  Description of Artificial Sequence: Synthetic oligonucleotide
  Sense strand starting at position 3198 of SEQ ID NO: 1885257
cuauuuaugucccuguguu

SEQ ID NO: 2328357 - RNA, 19 nt, Artificial Sequence
  Description of Artificial Sequence: Synthetic oligonucleotide
  Antisense strand to SEQ ID NO: 2328356
aacacagggacauaaauag

SEQ ID NO: 2328358 - RNA, 19 nt, Artificial Sequence
  Description of Artificial Sequence: Synthetic oligonucleotide
  Sense strand starting at position 3199 of SEQ ID NO: 1885257
uauuuaugucccuguguuu

SEQ ID NO: 2328359 - RNA, 19 nt, Artificial Sequence
  Description of Artificial Sequence: Synthetic oligonucleotide
  Antisense strand to SEQ ID NO: 2328358
aaacacagggacauaaaua

SEQ ID NO: 2328360 - RNA, 19 nt, Artificial Sequence
  Description of Artificial Sequence: Synthetic oligonucleotide
  Sense strand starting at position 3483 of SEQ ID NO: 1885257
ugaagaugcugucuaggga

SEQ ID NO: 2328361 - RNA, 19 nt, Artificial Sequence
  Description of Artificial Sequence: Synthetic oligonucleotide
  Antisense strand to SEQ ID NO: 2328360
ucccuagacagcaucuuca

SEQ ID NO: 2328362 - RNA, 19 nt, Artificial Sequence
  Description of Artificial Sequence: Synthetic oligonucleotide
  Sense strand starting at position 3486 of SEQ ID NO: 1885257
agaugcugucuagggagaa

SEQ ID NO: 2328363 - RNA, 19 nt, Artificial Sequence
  Description of Artificial Sequence: Synthetic oligonucleotide
  Antisense strand to SEQ ID NO: 2328362
uucucccuagacagcaucu

SEQ ID NO: 2328364 - RNA, 19 nt, Artificial Sequence
  Description of Artificial Sequence: Synthetic oligonucleotide
  Sense strand starting at position 3623 of SEQ ID NO: 1885257
ugagacaacaugugaguaa

SEQ ID NO: 2328365 - RNA, 19 nt, Artificial Sequence
  Description of Artificial Sequence: Synthetic oligonucleotide
  Antisense strand to SEQ ID NO: 2328364
uuacucacauguugucuca

SEQ ID NO: 2328366 - RNA, 19 nt, Artificial Sequence
  Description of Artificial Sequence: Synthetic oligonucleotide
  Sense strand starting at position 3835 of SEQ ID NO: 1885257
acgugauugauggaguuaa

SEQ ID NO: 2328367 - RNA, 19 nt, Artificial Sequence
  Description of Artificial Sequence: Synthetic oligonucleotide
  Antisense strand to SEQ ID NO: 2328366
uuaacuccaucaaucacgu

SEQ ID NO: 2328368 - RNA, 19 nt, Artificial Sequence
  Description of Artificial Sequence: Synthetic oligonucleotide
  Sense strand starting at position 3882 of SEQ ID NO: 1885257
aguugucugaguuauccag

SEQ ID NO: 2328369 - RNA, 19 nt, Artificial Sequence
  Description of Artificial Sequence: Synthetic oligonucleotide
  Antisense strand to SEQ ID NO: 2328368
cuggauaacucagacaacu

SEQ ID NO: 2328370 - RNA, 19 nt, Artificial Sequence
  Description of Artificial Sequence: Synthetic oligonucleotide
  Sense strand starting at position 3902 of SEQ ID NO: 1885257
uaguuaaugccagagucaa

SEQ ID NO: 2328371 - RNA, 19 nt, Artificial Sequence
  Description of Artificial Sequence: Synthetic oligonucleotide
  Antisense strand to SEQ ID NO: 2328370
uugacucuggcauuaacua

SEQ ID NO: 2328372 - RNA, 19 nt, Artificial Sequence
  Description of Artificial Sequence: Synthetic oligonucleotide
  Sense strand starting at position 17 of SEQ ID NO: 1885258
uaagucguuucuuucuuga

SEQ ID NO: 2328373 - RNA, 19 nt, Artificial Sequence
  Description of Artificial Sequence: Synthetic oligonucleotide
  Antisense strand to SEQ ID NO: 2328372
ucaagaaagaaacgacuua

SEQ ID NO: 2328374 - RNA, 19 nt, Artificial Sequence
  Description of Artificial Sequence: Synthetic oligonucleotide
  Sense strand starting at position 19 of SEQ ID NO: 1885258
agucguuucuuucuugaca

SEQ ID NO: 2328375 - RNA, 19 nt, Artificial Sequence
  Description of Artificial Sequence: Synthetic oligonucleotide
  Antisense strand to SEQ ID NO: 2328374
ugucaagaaagaaacgacu

SEQ ID NO: 2328376 - RNA, 19 nt, Artificial Sequence
  Description of Artificial Sequence: Synthetic oligonucleotide
  Sense strand starting at position 32 of SEQ ID NO: 1885258
uugacaucugagggucaaa

SEQ ID NO: 2328377 - RNA, 19 nt, Artificial Sequence
  Description of Artificial Sequence: Synthetic oligonucleotide
  Antisense strand to SEQ ID NO: 2328376
uuugacccucagaugucaa

SEQ ID NO: 2328378 - RNA, 19 nt, Artificial Sequence
  Description of Artificial Sequence: Synthetic oligonucleotide
  Sense strand starting at position 41 of SEQ ID NO: 1885258
gagggucaaauugguucua

SEQ ID NO: 2328379 - RNA, 19 nt, Artificial Sequence
  Description of Artificial Sequence: Synthetic oligonucleotide
  Antisense strand to SEQ ID NO: 2328378
uagaaccaauuugacccuc

SEQ ID NO: 2328380 - RNA, 19 nt, Artificial Sequence
  Description of Artificial Sequence: Synthetic oligonucleotide
  Sense strand starting at position 42 of SEQ ID NO: 1885258
agggucaaauugguucuaa

SEQ ID NO: 2328381 - RNA, 19 nt, Artificial Sequence
  Description of Artificial Sequence: Synthetic oligonucleotide
  Antisense strand to SEQ ID NO: 2328380
uuagaaccaauuugacccu

SEQ ID NO: 2328382 - RNA, 19 nt, Artificial Sequence
  Description of Artificial Sequence: Synthetic oligonucleotide
  Sense strand starting at position 43 of SEQ ID NO: 1885258
gggucaaauugguucuaau

SEQ ID NO: 2328383 - RNA, 19 nt, Artificial Sequence
  Description of Artificial Sequence: Synthetic oligonucleotide
  Antisense strand to SEQ ID NO: 2328382
auuagaaccaauuugaccc

SEQ ID NO: 2328384 - RNA, 19 nt, Artificial Sequence
  Description of Artificial Sequence: Synthetic oligonucleotide
  Sense strand starting at position 52 of SEQ ID NO: 1885258
ugguucuaauucuccagaa

SEQ ID NO: 2328385 - RNA, 19 nt, Artificial Sequence
  Description of Artificial Sequence: Synthetic oligonucleotide
  Antisense strand to SEQ ID NO: 2328384
uucuggagaauuagaacca

SEQ ID NO: 2328386 - RNA, 19 nt, Artificial Sequence
  Description of Artificial Sequence: Synthetic oligonucleotide
  Sense strand starting at position 53 of SEQ ID NO: 1885258
gguucuaauucuccagaau

SEQ ID NO: 2328387 - RNA, 19 nt, Artificial Sequence
  Description of Artificial Sequence: Synthetic oligonucleotide
  Antisense strand to SEQ ID NO: 2328386
auucuggagaauuagaacc

SEQ ID NO: 2328388 - RNA, 19 nt, Artificial Sequence
  Description of Artificial Sequence: Synthetic oligonucleotide
  Sense strand starting at position 643 of SEQ ID NO: 1885258
cugaauacccauuguaguu

SEQ ID NO: 2328389 - RNA, 19 nt, Artificial Sequence
  Description of Artificial Sequence: Synthetic oligonucleotide
  Antisense strand to SEQ ID NO: 2328388
aacuacaauggguauucag

SEQ ID NO: 2328390 - RNA, 19 nt, Artificial Sequence
  Description of Artificial Sequence: Synthetic oligonucleotide
  Sense strand starting at position 737 of SEQ ID NO: 1885258
ucgugugguaauuaagauu

SEQ ID NO: 2328391 - RNA, 19 nt, Artificial Sequence
  Description of Artificial Sequence: Synthetic oligonucleotide
  Antisense strand to SEQ ID NO: 2328390
aaucuuaauuaccacacga

SEQ ID NO: 2328392 - RNA, 19 nt, Artificial Sequence
  Description of Artificial Sequence: Synthetic oligonucleotide
  Sense strand starting at position 782 of SEQ ID NO: 1885258
gguuaagggaguuaucagu

SEQ ID NO: 2328393 - RNA, 19 nt, Artificial Sequence
  Description of Artificial Sequence: Synthetic oligonucleotide
  Antisense strand to SEQ ID NO: 2328392
acugauaacucccuuaacc

SEQ ID NO: 2328394 - RNA, 19 nt, Artificial Sequence
  Description of Artificial Sequence: Synthetic oligonucleotide
  Sense strand starting at position 788 of SEQ ID NO: 1885258
gggaguuaucagugguugg

SEQ ID NO: 2328395 - RNA, 19 nt, Artificial Sequence
  Description of Artificial Sequence: Synthetic oligonucleotide
  Antisense strand to SEQ ID NO: 2328394
ccaaccacugauaacuccc

SEQ ID NO: 2328396 - RNA, 19 nt, Artificial Sequence
  Description of Artificial Sequence: Synthetic oligonucleotide
  Sense strand starting at position 789 of SEQ ID NO: 1885258
ggaguuaucagugguugga

SEQ ID NO: 2328397 - RNA, 19 nt, Artificial Sequence
  Description of Artificial Sequence: Synthetic oligonucleotide
  Antisense strand to SEQ ID NO: 2328396
uccaaccacugauaacucc

SEQ ID NO: 2328398 - RNA, 19 nt, Artificial Sequence
  Description of Artificial Sequence: Synthetic oligonucleotide
  Sense strand starting at position 791 of SEQ ID NO: 1885258
aguuaucagugguuggagu

SEQ ID NO: 2328399 - RNA, 19 nt, Artificial Sequence
  Description of Artificial Sequence: Synthetic oligonucleotide
  Antisense strand to SEQ ID NO: 2328398
acuccaaccacugauaacu

SEQ ID NO: 2328400 - RNA, 19 nt, Artificial Sequence
  Description of Artificial Sequence: Synthetic oligonucleotide
  Sense strand starting at position 792 of SEQ ID NO: 1885258
guuaucagugguuggaguu

SEQ ID NO: 2328401 - RNA, 19 nt, Artificial Sequence
  Description of Artificial Sequence: Synthetic oligonucleotide
  Antisense strand to SEQ ID NO: 2328400
aacuccaaccacugauaac

SEQ ID NO: 2328402 - RNA, 19 nt, Artificial Sequence
  Description of Artificial Sequence: Synthetic oligonucleotide
  Sense strand starting at position 1630 of SEQ ID NO: 1885258
ccgggaguucgggacaaca

SEQ ID NO: 2328403 - RNA, 19 nt, Artificial Sequence
  Description of Artificial Sequence: Synthetic oligonucleotide
  Antisense strand to SEQ ID NO: 2328402
uguugucccgaacucccgg

SEQ ID NO: 2328404 - RNA, 19 nt, Artificial Sequence
  Description of Artificial Sequence: Synthetic oligonucleotide
  Sense strand starting at position 1821 of SEQ ID NO: 1885258
gcgacaggugcccaguauu

SEQ ID NO: 2328405 - RNA, 19 nt, Artificial Sequence
  Description of Artificial Sequence: Synthetic oligonucleotide
  Antisense strand to SEQ ID NO: 2328404
aauacugggcaccugucgc

SEQ ID NO: 2328406 - RNA, 19 nt, Artificial Sequence
  Description of Artificial Sequence: Synthetic oligonucleotide
  Sense strand starting at position 2367 of SEQ ID NO: 1885258
cagcucaagccgugacaaa

SEQ ID NO: 2328407 - RNA, 19 nt, Artificial Sequence
  Description of Artificial Sequence: Synthetic oligonucleotide
  Antisense strand to SEQ ID NO: 2328406
uuugucacggcuugagcug

SEQ ID NO: 2328408 - RNA, 19 nt, Artificial Sequence
  Description of Artificial Sequence: Synthetic oligonucleotide
  Sense strand starting at position 2368 of SEQ ID NO: 1885258
agcucaagccgugacaaau

SEQ ID NO: 2328409 - RNA, 19 nt, Artificial Sequence
  Description of Artificial Sequence: Synthetic oligonucleotide
  Antisense strand to SEQ ID NO: 2328408
auuugucacggcuugagcu

SEQ ID NO: 2328410 - RNA, 19 nt, Artificial Sequence
  Description of Artificial Sequence: Synthetic oligonucleotide
  Sense strand starting at position 2502 of SEQ ID NO: 1885258
gguuuauauccugguccuu

SEQ ID NO: 2328411 - RNA, 19 nt, Artificial Sequence
  Description of Artificial Sequence: Synthetic oligonucleotide
  Antisense strand to SEQ ID NO: 2328410
aaggaccaggauauaaacc

SEQ ID NO: 2328412 - RNA, 19 nt, Artificial Sequence
  Description of Artificial Sequence: Synthetic oligonucleotide
  Sense strand starting at position 2542 of SEQ ID NO: 1885258
ggcaauagaugacuugcua

SEQ ID NO: 2328413 - RNA, 19 nt, Artificial Sequence
  Description of Artificial Sequence: Synthetic oligonucleotide
  Antisense strand to SEQ ID NO: 2328412
uagcaagucaucuauugcc

SEQ ID NO: 2328414 - RNA, 19 nt, Artificial Sequence
  Description of Artificial Sequence: Synthetic oligonucleotide
  Sense strand starting at position 2890 of SEQ ID NO: 1885258
caugcaucauguuugagaa

SEQ ID NO: 2328415 - RNA, 19 nt, Artificial Sequence
  Description of Artificial Sequence: Synthetic oligonucleotide
  Antisense strand to SEQ ID NO: 2328414
uucucaaacaugaugcaug

SEQ ID NO: 2328416 - RNA, 19 nt, Artificial Sequence
  Description of Artificial Sequence: Synthetic oligonucleotide
  Sense strand starting at position 2891 of SEQ ID NO: 1885258
augcaucauguuugagaaa

SEQ ID NO: 2328417 - RNA, 19 nt, Artificial Sequence
  Description of Artificial Sequence: Synthetic oligonucleotide
  Antisense strand to SEQ ID NO: 2328416
uuucucaaacaugaugcau

SEQ ID NO: 2328418 - RNA, 19 nt, Artificial Sequence
  Description of Artificial Sequence: Synthetic oligonucleotide
  Sense strand starting at position 2912 of SEQ ID NO: 1885258
auugcuucugaccaaggau

SEQ ID NO: 2328419 - RNA, 19 nt, Artificial Sequence
  Description of Artificial Sequence: Synthetic oligonucleotide
  Antisense strand to SEQ ID NO: 2328418
auccuuggucagaagcaau

SEQ ID NO: 2328420 - RNA, 19 nt, Artificial Sequence
  Description of Artificial Sequence: Synthetic oligonucleotide
  Sense strand starting at position 2915 of SEQ ID NO: 1885258
gcuucugaccaaggauauc

SEQ ID NO: 2328421 - RNA, 19 nt, Artificial Sequence
  Description of Artificial Sequence: Synthetic oligonucleotide
  Antisense strand to SEQ ID NO: 2328420
gauauccuuggucagaagc

SEQ ID NO: 2328422 - RNA, 19 nt, Artificial Sequence
  Description of Artificial Sequence: Synthetic oligonucleotide
  Sense strand starting at position 2961 of SEQ ID NO: 1885258
cuaggauccugguauuuau

SEQ ID NO: 2328423 - RNA, 19 nt, Artificial Sequence
  Description of Artificial Sequence: Synthetic oligonucleotide
  Antisense strand to SEQ ID NO: 2328422
auaaauaccaggauccuag

SEQ ID NO: 2328424 - RNA, 19 nt, Artificial Sequence
  Description of Artificial Sequence: Synthetic oligonucleotide
  Sense strand starting at position 3013 of SEQ ID NO: 1885258
gcuggcuugagagaaugau

SEQ ID NO: 2328425 - RNA, 19 nt, Artificial Sequence
  Description of Artificial Sequence: Synthetic oligonucleotide
  Antisense strand to SEQ ID NO: 2328424
aucauucucucaagccagc

SEQ ID NO: 2328426 - RNA, 19 nt, Artificial Sequence
  Description of Artificial Sequence: Synthetic oligonucleotide
  Sense strand starting at position 3019 of SEQ ID NO: 1885258
uugagagaaugauagaaua

SEQ ID NO: 2328427 - RNA, 19 nt, Artificial Sequence
  Description of Artificial Sequence: Synthetic oligonucleotide
  Antisense strand to SEQ ID NO: 2328426
uauucuaucauucucucaa

SEQ ID NO: 2328428 - RNA, 19 nt, Artificial Sequence
  Description of Artificial Sequence: Synthetic oligonucleotide
  Sense strand starting at position 3058 of SEQ ID NO: 1885258
uugccauuuaggugguaau

SEQ ID NO: 2328429 - RNA, 19 nt, Artificial Sequence
  Description of Artificial Sequence: Synthetic oligonucleotide
  Antisense strand to SEQ ID NO: 2328428
auuaccaccuaaauggcaa

SEQ ID NO: 2328430 - RNA, 19 nt, Artificial Sequence
  Description of Artificial Sequence: Synthetic oligonucleotide
  Sense strand starting at position 3061 of SEQ ID NO: 1885258
ccauuuaggugguaauacu

SEQ ID NO: 2328431 - RNA, 19 nt, Artificial Sequence
  Description of Artificial Sequence: Synthetic oligonucleotide
  Antisense strand to SEQ ID NO: 2328430
aguauuaccaccuaaaugg

SEQ ID NO: 2328432 - RNA, 19 nt, Artificial Sequence
  Description of Artificial Sequence: Synthetic oligonucleotide
  Sense strand starting at position 3069 of SEQ ID NO: 1885258
gugguaauacuguauagug

SEQ ID NO: 2328433 - RNA, 19 nt, Artificial Sequence
  Description of Artificial Sequence: Synthetic oligonucleotide
  Antisense strand to SEQ ID NO: 2328432
cacuauacaguauuaccac

SEQ ID NO: 2328434 - RNA, 19 nt, Artificial Sequence
  Description of Artificial Sequence: Synthetic oligonucleotide
  Sense strand starting at position 3079 of SEQ ID NO: 1885258
uguauagugcuguaauaau

SEQ ID NO: 2328435 - RNA, 19 nt, Artificial Sequence
  Description of Artificial Sequence: Synthetic oligonucleotide
  Antisense strand to SEQ ID NO: 2328434
auuauuacagcacuauaca

SEQ ID NO: 2328436 - RNA, 19 nt, Artificial Sequence
  Description of Artificial Sequence: Synthetic oligonucleotide
  Sense strand starting at position 3090 of SEQ ID NO: 1885258
guaauaauguccuccagga

SEQ ID NO: 2328437 - RNA, 19 nt, Artificial Sequence
  Description of Artificial Sequence: Synthetic oligonucleotide
  Antisense strand to SEQ ID NO: 2328436
uccuggaggacauuauuac

SEQ ID NO: 2328438 - RNA, 19 nt, Artificial Sequence
  Description of Artificial Sequence: Synthetic oligonucleotide
  Sense strand starting at position 3205 of SEQ ID NO: 1885258
ccauuaccauuggugauua

SEQ ID NO: 2328439 - RNA, 19 nt, Artificial Sequence
  Description of Artificial Sequence: Synthetic oligonucleotide
  Antisense strand to SEQ ID NO: 2328438
uaaucaccaaugguaaugg

SEQ ID NO: 2328440 - RNA, 19 nt, Artificial Sequence
  Description of Artificial Sequence: Synthetic oligonucleotide
  Sense strand starting at position 3207 of SEQ ID NO: 1885258
auuaccauuggugauuauu

SEQ ID NO: 2328441 - RNA, 19 nt, Artificial Sequence
  Description of Artificial Sequence: Synthetic oligonucleotide
  Antisense strand to SEQ ID NO: 2328440
aauaaucaccaaugguaau

SEQ ID NO: 2328442 - RNA, 19 nt, Artificial Sequence
  Description of Artificial Sequence: Synthetic oligonucleotide
  Sense strand starting at position 3209 of SEQ ID NO: 1885258
uaccauuggugauuauuga

SEQ ID NO: 2328443 - RNA, 19 nt, Artificial Sequence
  Description of Artificial Sequence: Synthetic oligonucleotide
  Antisense strand to SEQ ID NO: 2328442
ucaauaaucaccaauggua

SEQ ID NO: 2328444 - RNA, 19 nt, Artificial Sequence
  Description of Artificial Sequence: Synthetic oligonucleotide
  Sense strand starting at position 3440 of SEQ ID NO: 1885258
uucugaaucugacuguuac

SEQ ID NO: 2328445 - RNA, 19 nt, Artificial Sequence
  Description of Artificial Sequence: Synthetic oligonucleotide
  Antisense strand to SEQ ID NO: 2328444
guaacagucagauucagaa

SEQ ID NO: 2328446 - RNA, 19 nt, Artificial Sequence
  Description of Artificial Sequence: Synthetic oligonucleotide
  Sense strand starting at position 3765 of SEQ ID NO: 1885258
cucuuaguucuugggcauu

SEQ ID NO: 2328447 - RNA, 19 nt, Artificial Sequence
  Description of Artificial Sequence: Synthetic oligonucleotide
  Antisense strand to SEQ ID NO: 2328446
aaugcccaagaacuaagag

SEQ ID NO: 2328448 - RNA, 19 nt, Artificial Sequence
  Description of Artificial Sequence: Synthetic oligonucleotide
  Sense strand starting at position 3778 of SEQ ID NO: 1885258
ggcauuucccucuauugcu

SEQ ID NO: 2328449 - RNA, 19 nt, Artificial Sequence
  Description of Artificial Sequence: Synthetic oligonucleotide
  Antisense strand to SEQ ID NO: 2328448
agcaauagagggaaaugcc

SEQ ID NO: 2328450 - RNA, 19 nt, Artificial Sequence
  Description of Artificial Sequence: Synthetic oligonucleotide
  Sense strand starting at position 3857 of SEQ ID NO: 1885258
uucuauucuguggauacuu

SEQ ID NO: 2328451 - RNA, 19 nt, Artificial Sequence
  Description of Artificial Sequence: Synthetic oligonucleotide
  Antisense strand to SEQ ID NO: 2328450
aaguauccacagaauagaa

SEQ ID NO: 2328452 - RNA, 19 nt, Artificial Sequence
  Description of Artificial Sequence: Synthetic oligonucleotide
  Sense strand starting at position 145 of SEQ ID NO: 1885259
agagcaaacuccuugugag

SEQ ID NO: 2328453 - RNA, 19 nt, Artificial Sequence
  Description of Artificial Sequence: Synthetic oligonucleotide
  Antisense strand to SEQ ID NO: 2328452
cucacaaggaguuugcucu

SEQ ID NO: 2328454 - RNA, 19 nt, Artificial Sequence
  Description of Artificial Sequence: Synthetic oligonucleotide
  Sense strand starting at position 146 of SEQ ID NO: 1885259
gagcaaacuccuugugaga

SEQ ID NO: 2328455 - RNA, 19 nt, Artificial Sequence
  Description of Artificial Sequence: Synthetic oligonucleotide
  Antisense strand to SEQ ID NO: 2328454
ucucacaaggaguuugcuc

SEQ ID NO: 2328456 - RNA, 19 nt, Artificial Sequence
  Description of Artificial Sequence: Synthetic oligonucleotide
  Sense strand starting at position 176 of SEQ ID NO: 1885259
uagagaaacugugcaugaa

SEQ ID NO: 2328457 - RNA, 19 nt, Artificial Sequence
  Description of Artificial Sequence: Synthetic oligonucleotide
  Antisense strand to SEQ ID NO: 2328456
uucaugcacaguuucucua

SEQ ID NO: 2328458 - RNA, 19 nt, Artificial Sequence
  Description of Artificial Sequence: Synthetic oligonucleotide
  Sense strand starting at position 179 of SEQ ID NO: 1885259
agaaacugugcaugaaaua

SEQ ID NO: 2328459 - RNA, 19 nt, Artificial Sequence
  Description of Artificial Sequence: Synthetic oligonucleotide
  Antisense strand to SEQ ID NO: 2328458
uauuucaugcacaguuucu

SEQ ID NO: 2328460 - RNA, 19 nt, Artificial Sequence
  Description of Artificial Sequence: Synthetic oligonucleotide
  Sense strand starting at position 472 of SEQ ID NO: 1885259
aacagaguacuuggcuaau

SEQ ID NO: 2328461 - RNA, 19 nt, Artificial Sequence
  Description of Artificial Sequence: Synthetic oligonucleotide
  Antisense strand to SEQ ID NO: 2328460
auuagccaaguacucuguu

SEQ ID NO: 2328462 - RNA, 19 nt, Artificial Sequence
  Description of Artificial Sequence: Synthetic oligonucleotide
  Sense strand starting at position 474 of SEQ ID NO: 1885259
cagaguacuuggcuaauga

SEQ ID NO: 2328463 - RNA, 19 nt, Artificial Sequence
  Description of Artificial Sequence: Synthetic oligonucleotide
  Antisense strand to SEQ ID NO: 2328462
ucauuagccaaguacucug

SEQ ID NO: 2328464 - RNA, 19 nt, Artificial Sequence
  Description of Artificial Sequence: Synthetic oligonucleotide
  Sense strand starting at position 475 of SEQ ID NO: 1885259
agaguacuuggcuaaugau

SEQ ID NO: 2328465 - RNA, 19 nt, Artificial Sequence
  Description of Artificial Sequence: Synthetic oligonucleotide
  Antisense strand to SEQ ID NO: 2328464
aucauuagccaaguacucu

SEQ ID NO: 2328466 - RNA, 19 nt, Artificial Sequence
  Description of Artificial Sequence: Synthetic oligonucleotide
  Sense strand starting at position 523 of SEQ ID NO: 1885259
ugaauaauuucugaucuag

SEQ ID NO: 2328467 - RNA, 19 nt, Artificial Sequence
  Description of Artificial Sequence: Synthetic oligonucleotide
  Antisense strand to SEQ ID NO: 2328466
cuagaucagaaauuauuca

SEQ ID NO: 2328468 - RNA, 19 nt, Artificial Sequence
  Description of Artificial Sequence: Synthetic oligonucleotide
  Sense strand starting at position 538 of SEQ ID NO: 1885259
cuaggaaacugagcuguaa

SEQ ID NO: 2328469 - RNA, 19 nt, Artificial Sequence
  Description of Artificial Sequence: Synthetic oligonucleotide
  Antisense strand to SEQ ID NO: 2328468
uuacagcucaguuuccuag

SEQ ID NO: 2328470 - RNA, 19 nt, Artificial Sequence
  Description of Artificial Sequence: Synthetic oligonucleotide
  Sense strand starting at position 540 of SEQ ID NO: 1885259
aggaaacugagcuguaaug

SEQ ID NO: 2328471 - RNA, 19 nt, Artificial Sequence
  Description of Artificial Sequence: Synthetic oligonucleotide
  Antisense strand to SEQ ID NO: 2328470
cauuacagcucaguuuccu

SEQ ID NO: 2328472 - RNA, 19 nt, Artificial Sequence
  Description of Artificial Sequence: Synthetic oligonucleotide
  Sense strand starting at position 572 of SEQ ID NO: 1885259
agcuaccauugauugaaua

SEQ ID NO: 2328473 - RNA, 19 nt, Artificial Sequence
  Description of Artificial Sequence: Synthetic oligonucleotide
  Antisense strand to SEQ ID NO: 2328472
uauucaaucaaugguagcu

SEQ ID NO: 2328474 - RNA, 19 nt, Artificial Sequence
  Description of Artificial Sequence: Synthetic oligonucleotide
  Sense strand starting at position 661 of SEQ ID NO: 1885259
ccaccaauucuaugagguu

SEQ ID NO: 2328475 - RNA, 19 nt, Artificial Sequence
  Description of Artificial Sequence: Synthetic oligonucleotide
  Antisense strand to SEQ ID NO: 2328474
aaccucauagaauuggugg

SEQ ID NO: 2328476 - RNA, 19 nt, Artificial Sequence
  Description of Artificial Sequence: Synthetic oligonucleotide
  Sense strand starting at position 851 of SEQ ID NO: 1885259
ucagauaagcauuagcuaa

SEQ ID NO: 2328477 - RNA, 19 nt, Artificial Sequence
  Description of Artificial Sequence: Synthetic oligonucleotide
  Antisense strand to SEQ ID NO: 2328476
uuagcuaaugcuuaucuga

SEQ ID NO: 2328478 - RNA, 19 nt, Artificial Sequence
  Description of Artificial Sequence: Synthetic oligonucleotide
  Sense strand starting at position 853 of SEQ ID NO: 1885259
agauaagcauuagcuaaca

SEQ ID NO: 2328479 - RNA, 19 nt, Artificial Sequence
  Description of Artificial Sequence: Synthetic oligonucleotide
  Antisense strand to SEQ ID NO: 2328478
uguuagcuaaugcuuaucu

SEQ ID NO: 2328480 - RNA, 19 nt, Artificial Sequence
  Description of Artificial Sequence: Synthetic oligonucleotide
  Sense strand starting at position 926 of SEQ ID NO: 1885259
agaaauaguccugagcauc

SEQ ID NO: 2328481 - RNA, 19 nt, Artificial Sequence
  Description of Artificial Sequence: Synthetic oligonucleotide
  Antisense strand to SEQ ID NO: 2328480
gaugcucaggacuauuucu

SEQ ID NO: 2328482 - RNA, 19 nt, Artificial Sequence
  Description of Artificial Sequence: Synthetic oligonucleotide
  Sense strand starting at position 943 of SEQ ID NO: 1885259
ucauuaugagcacgaaaua

SEQ ID NO: 2328483 - RNA, 19 nt, Artificial Sequence
  Description of Artificial Sequence: Synthetic oligonucleotide
  Antisense strand to SEQ ID NO: 2328482
uauuucgugcucauaauga

SEQ ID NO: 2328484 - RNA, 19 nt, Artificial Sequence
  Description of Artificial Sequence: Synthetic oligonucleotide
  Sense strand starting at position 965 of SEQ ID NO: 1885259
uuaacugugcuguaaugau

SEQ ID NO: 2328485 - RNA, 19 nt, Artificial Sequence
  Description of Artificial Sequence: Synthetic oligonucleotide
  Antisense strand to SEQ ID NO: 2328484
aucauuacagcacaguuaa

SEQ ID NO: 2328486 - RNA, 19 nt, Artificial Sequence
  Description of Artificial Sequence: Synthetic oligonucleotide
  Sense strand starting at position 988 of SEQ ID NO: 1885259
ugugguauucaauaugggu

SEQ ID NO: 2328487 - RNA, 19 nt, Artificial Sequence
  Description of Artificial Sequence: Synthetic oligonucleotide
  Antisense strand to SEQ ID NO: 2328486
acccauauugaauaccaca

SEQ ID NO: 2328488 - RNA, 19 nt, Artificial Sequence
  Description of Artificial Sequence: Synthetic oligonucleotide
  Sense strand starting at position 1031 of SEQ ID NO: 1885259
gauugcucucuuuauagag

SEQ ID NO: 2328489 - RNA, 19 nt, Artificial Sequence
  Description of Artificial Sequence: Synthetic oligonucleotide
  Antisense strand to SEQ ID NO: 2328488
cucuauaaagagagcaauc

SEQ ID NO: 2328490 - RNA, 19 nt, Artificial Sequence
  Description of Artificial Sequence: Synthetic oligonucleotide
  Sense strand starting at position 1353 of SEQ ID NO: 1885259
gccaacauggguuaacagu

SEQ ID NO: 2328491 - RNA, 19 nt, Artificial Sequence
  Description of Artificial Sequence: Synthetic oligonucleotide
  Antisense strand to SEQ ID NO: 2328490
acuguuaacccauguuggc

SEQ ID NO: 2328492 - RNA, 19 nt, Artificial Sequence
  Description of Artificial Sequence: Synthetic oligonucleotide
  Sense strand starting at position 1457 of SEQ ID NO: 1885259
ggccaagugaacugugaaa

SEQ ID NO: 2328493 - RNA, 19 nt, Artificial Sequence
  Description of Artificial Sequence: Synthetic oligonucleotide
  Antisense strand to SEQ ID NO: 2328492
uuucacaguucacuuggcc

SEQ ID NO: 2328494 - RNA, 19 nt, Artificial Sequence
  Description of Artificial Sequence: Synthetic oligonucleotide
  Sense strand starting at position 1490 of SEQ ID NO: 1885259
gaggucacuugaguuuacu

SEQ ID NO: 2328495 - RNA, 19 nt, Artificial Sequence
  Description of Artificial Sequence: Synthetic oligonucleotide
  Antisense strand to SEQ ID NO: 2328494
aguaaacucaagugaccuc

SEQ ID NO: 2328496 - RNA, 19 nt, Artificial Sequence
  Description of Artificial Sequence: Synthetic oligonucleotide
  Sense strand starting at position 1826 of SEQ ID NO: 1885259
uuucuuguuauagaagugu

SEQ ID NO: 2328497 - RNA, 19 nt, Artificial Sequence
  Description of Artificial Sequence: Synthetic oligonucleotide
  Antisense strand to SEQ ID NO: 2328496
acacuucuauaacaagaaa

SEQ ID NO: 2328498 - RNA, 19 nt, Artificial Sequence
  Description of Artificial Sequence: Synthetic oligonucleotide
  Sense strand starting at position 1867 of SEQ ID NO: 1885259
cccuuugguuauguauuua

SEQ ID NO: 2328499 - RNA, 19 nt, Artificial Sequence
  Description of Artificial Sequence: Synthetic oligonucleotide
  Antisense strand to SEQ ID NO: 2328498
uaaauacauaaccaaaggg

SEQ ID NO: 2328500 - RNA, 19 nt, Artificial Sequence
  Description of Artificial Sequence: Synthetic oligonucleotide
  Sense strand starting at position 2164 of SEQ ID NO: 1885259
uagagcuccagugagaguu

SEQ ID NO: 2328501 - RNA, 19 nt, Artificial Sequence
  Description of Artificial Sequence: Synthetic oligonucleotide
  Antisense strand to SEQ ID NO: 2328500
aacucucacuggagcucua

SEQ ID NO: 2328502 - RNA, 19 nt, Artificial Sequence
  Description of Artificial Sequence: Synthetic oligonucleotide
  Sense strand starting at position 2172 of SEQ ID NO: 1885259
cagugagaguuucuggauu

SEQ ID NO: 2328503 - RNA, 19 nt, Artificial Sequence
  Description of Artificial Sequence: Synthetic oligonucleotide
  Antisense strand to SEQ ID NO: 2328502
aauccagaaacucucacug

SEQ ID NO: 2328504 - RNA, 19 nt, Artificial Sequence
  Description of Artificial Sequence: Synthetic oligonucleotide
  Sense strand starting at position 2464 of SEQ ID NO: 1885259
acauguugccaugagauga

SEQ ID NO: 2328505 - RNA, 19 nt, Artificial Sequence
  Description of Artificial Sequence: Synthetic oligonucleotide
  Antisense strand to SEQ ID NO: 2328504
ucaucucauggcaacaugu

SEQ ID NO: 2328506 - RNA, 19 nt, Artificial Sequence
  Description of Artificial Sequence: Synthetic oligonucleotide
  Sense strand starting at position 2468 of SEQ ID NO: 1885259
guugccaugagaugaucaa

SEQ ID NO: 2328507 - RNA, 19 nt, Artificial Sequence
  Description of Artificial Sequence: Synthetic oligonucleotide
  Antisense strand to SEQ ID NO: 2328506
uugaucaucucauggcaac

SEQ ID NO: 2328508 - RNA, 19 nt, Artificial Sequence
  Description of Artificial Sequence: Synthetic oligonucleotide
  Sense strand starting at position 2879 of SEQ ID NO: 1885259
uaguuaugggccuaucuaa

SEQ ID NO: 2328509 - RNA, 19 nt, Artificial Sequence
  Description of Artificial Sequence: Synthetic oligonucleotide
  Antisense strand to SEQ ID NO: 2328508
uuagauaggcccauaacua

SEQ ID NO: 2328510 - RNA, 19 nt, Artificial Sequence
  Description of Artificial Sequence: Synthetic oligonucleotide
  Sense strand starting at position 2911 of SEQ ID NO: 1885259
uccaauucugugcaagagu

SEQ ID NO: 2328511 - RNA, 19 nt, Artificial Sequence
  Description of Artificial Sequence: Synthetic oligonucleotide
  Antisense strand to SEQ ID NO: 2328510
acucuugcacagaauugga

SEQ ID NO: 2328512 - RNA, 19 nt, Artificial Sequence
  Description of Artificial Sequence: Synthetic oligonucleotide
  Sense strand starting at position 2914 of SEQ ID NO: 1885259
aauucugugcaagaguacu

SEQ ID NO: 2328513 - RNA, 19 nt, Artificial Sequence
  Description of Artificial Sequence: Synthetic oligonucleotide
  Antisense strand to SEQ ID NO: 2328512
aguacucuugcacagaauu

SEQ ID NO: 2328514 - RNA, 19 nt, Artificial Sequence
  Description of Artificial Sequence: Synthetic oligonucleotide
  Sense strand starting at position 2993 of SEQ ID NO: 1885259
ugccuaugccuuguuguca

SEQ ID NO: 2328515 - RNA, 19 nt, Artificial Sequence
  Description of Artificial Sequence: Synthetic oligonucleotide
  Antisense strand to SEQ ID NO: 2328514
ugacaacaaggcauaggca

SEQ ID NO: 2328516 - RNA, 19 nt, Artificial Sequence
  Description of Artificial Sequence: Synthetic oligonucleotide
  Sense strand starting at position 3159 of SEQ ID NO: 1885259
agugaauaaucuuuaguga

SEQ ID NO: 2328517 - RNA, 19 nt, Artificial Sequence
  Description of Artificial Sequence: Synthetic oligonucleotide
  Antisense strand to SEQ ID NO: 2328516
ucacuaaagauuauucacu

SEQ ID NO: 2328518 - RNA, 19 nt, Artificial Sequence
  Description of Artificial Sequence: Synthetic oligonucleotide
  Sense strand starting at position 3160 of SEQ ID NO: 1885259
gugaauaaucuuuagugac

SEQ ID NO: 2328519 - RNA, 19 nt, Artificial Sequence
  Description of Artificial Sequence: Synthetic oligonucleotide
  Antisense strand to SEQ ID NO: 2328518
gucacuaaagauuauucac

SEQ ID NO: 2328520 - RNA, 19 nt, Artificial Sequence
  Description of Artificial Sequence: Synthetic oligonucleotide
  Sense strand starting at position 3176 of SEQ ID NO: 1885259
gacuuuagugaauaagcuu

SEQ ID NO: 2328521 - RNA, 19 nt, Artificial Sequence
  Description of Artificial Sequence: Synthetic oligonucleotide
  Antisense strand to SEQ ID NO: 2328520
aagcuuauucacuaaaguc

SEQ ID NO: 2328522 - RNA, 19 nt, Artificial Sequence
  Description of Artificial Sequence: Synthetic oligonucleotide
  Sense strand starting at position 3225 of SEQ ID NO: 1885259
uuuagugacuaugcaacau

SEQ ID NO: 2328523 - RNA, 19 nt, Artificial Sequence
  Description of Artificial Sequence: Synthetic oligonucleotide
  Antisense strand to SEQ ID NO: 2328522
auguugcauagucacuaaa

SEQ ID NO: 2328524 - RNA, 19 nt, Artificial Sequence
  Description of Artificial Sequence: Synthetic oligonucleotide
  Sense strand starting at position 3229 of SEQ ID NO: 1885259
gugacuaugcaacauagca

SEQ ID NO: 2328525 - RNA, 19 nt, Artificial Sequence
  Description of Artificial Sequence: Synthetic oligonucleotide
  Antisense strand to SEQ ID NO: 2328524
ugcuauguugcauagucac

SEQ ID NO: 2328526 - RNA, 19 nt, Artificial Sequence
  Description of Artificial Sequence: Synthetic oligonucleotide
  Sense strand starting at position 3582 of SEQ ID NO: 1885259
uagaacaaugucuaagugu

SEQ ID NO: 2328527 - RNA, 19 nt, Artificial Sequence
  Description of Artificial Sequence: Synthetic oligonucleotide
  Antisense strand to SEQ ID NO: 2328526
acacuuagacauuguucua

SEQ ID NO: 2328528 - RNA, 19 nt, Artificial Sequence
  Description of Artificial Sequence: Synthetic oligonucleotide
  Sense strand starting at position 3621 of SEQ ID NO: 1885259
gaaucauaucacgggucau

SEQ ID NO: 2328529 - RNA, 19 nt, Artificial Sequence
  Description of Artificial Sequence: Synthetic oligonucleotide
  Antisense strand to SEQ ID NO: 2328528
augacccgugauaugauuc

SEQ ID NO: 2328530 - RNA, 19 nt, Artificial Sequence
  Description of Artificial Sequence: Synthetic oligonucleotide
  Sense strand starting at position 3787 of SEQ ID NO: 1885259
ucuugcgcacuguuagauu

SEQ ID NO: 2328531 - RNA, 19 nt, Artificial Sequence
  Description of Artificial Sequence: Synthetic oligonucleotide
  Antisense strand to SEQ ID NO: 2328530
aaucuaacagugcgcaaga

SEQ ID NO: 2328532 - RNA, 19 nt, Artificial Sequence
  Description of Artificial Sequence: Synthetic oligonucleotide
  Sense strand starting at position 68 of SEQ ID NO: 1885260
gaaaguaaguuuccuuguc

SEQ ID NO: 2328533 - RNA, 19 nt, Artificial Sequence
  Description of Artificial Sequence: Synthetic oligonucleotide
  Antisense strand to SEQ ID NO: 2328532
gacaaggaaacuuacuuuc

SEQ ID NO: 2328534 - RNA, 19 nt, Artificial Sequence
  Description of Artificial Sequence: Synthetic oligonucleotide
  Sense strand starting at position 76 of SEQ ID NO: 1885260
guuuccuugucaugaacag

SEQ ID NO: 2328535 - RNA, 19 nt, Artificial Sequence
  Description of Artificial Sequence: Synthetic oligonucleotide
  Antisense strand to SEQ ID NO: 2328534
cuguucaugacaaggaaac

SEQ ID NO: 2328536 - RNA, 19 nt, Artificial Sequence
  Description of Artificial Sequence: Synthetic oligonucleotide
  Sense strand starting at position 77 of SEQ ID NO: 1885260
uuuccuugucaugaacaga

SEQ ID NO: 2328537 - RNA, 19 nt, Artificial Sequence
  Description of Artificial Sequence: Synthetic oligonucleotide
  Antisense strand to SEQ ID NO: 2328536
ucuguucaugacaaggaaa

SEQ ID NO: 2328538 - RNA, 19 nt, Artificial Sequence
  Description of Artificial Sequence: Synthetic oligonucleotide
  Sense strand starting at position 91 of SEQ ID NO: 1885260
acagauguaucugugaaua

SEQ ID NO: 2328539 - RNA, 19 nt, Artificial Sequence
  Description of Artificial Sequence: Synthetic oligonucleotide
  Antisense strand to SEQ ID NO: 2328538
uauucacagauacaucugu

SEQ ID NO: 2328540 - RNA, 19 nt, Artificial Sequence
  Description of Artificial Sequence: Synthetic oligonucleotide
  Sense strand starting at position 93 of SEQ ID NO: 1885260
agauguaucugugaauagc

SEQ ID NO: 2328541 - RNA, 19 nt, Artificial Sequence
  Description of Artificial Sequence: Synthetic oligonucleotide
  Antisense strand to SEQ ID NO: 2328540
gcuauucacagauacaucu

SEQ ID NO: 2328542 - RNA, 19 nt, Artificial Sequence
  Description of Artificial Sequence: Synthetic oligonucleotide
  Sense strand starting at position 103 of SEQ ID NO: 1885260
gugaauagccuguggugaa

SEQ ID NO: 2328543 - RNA, 19 nt, Artificial Sequence
  Description of Artificial Sequence: Synthetic oligonucleotide
  Antisense strand to SEQ ID NO: 2328542
uucaccacaggcuauucac

SEQ ID NO: 2328544 - RNA, 19 nt, Artificial Sequence
  Description of Artificial Sequence: Synthetic oligonucleotide
  Sense strand starting at position 104 of SEQ ID NO: 1885260
ugaauagccuguggugaaa

SEQ ID NO: 2328545 - RNA, 19 nt, Artificial Sequence
  Description of Artificial Sequence: Synthetic oligonucleotide
  Antisense strand to SEQ ID NO: 2328544
uuucaccacaggcuauuca

SEQ ID NO: 2328546 - RNA, 19 nt, Artificial Sequence
  Description of Artificial Sequence: Synthetic oligonucleotide
  Sense strand starting at position 116 of SEQ ID NO: 1885260
ggugaaaucauguggcaaa

SEQ ID NO: 2328547 - RNA, 19 nt, Artificial Sequence
  Description of Artificial Sequence: Synthetic oligonucleotide
  Antisense strand to SEQ ID NO: 2328546
uuugccacaugauuucacc

SEQ ID NO: 2328548 - RNA, 19 nt, Artificial Sequence
  Description of Artificial Sequence: Synthetic oligonucleotide
  Sense strand starting at position 137 of SEQ ID NO: 1885260
gggaauauguucugacuga

SEQ ID NO: 2328549 - RNA, 19 nt, Artificial Sequence
  Description of Artificial Sequence: Synthetic oligonucleotide
  Antisense strand to SEQ ID NO: 2328548
ucagucagaacauauuccc

SEQ ID NO: 2328550 - RNA, 19 nt, Artificial Sequence
  Description of Artificial Sequence: Synthetic oligonucleotide
  Sense strand starting at position 138 of SEQ ID NO: 1885260
ggaauauguucugacugau

SEQ ID NO: 2328551 - RNA, 19 nt, Artificial Sequence
  Description of Artificial Sequence: Synthetic oligonucleotide
  Antisense strand to SEQ ID NO: 2328550
aucagucagaacauauucc

SEQ ID NO: 2328552 - RNA, 19 nt, Artificial Sequence
  Description of Artificial Sequence: Synthetic oligonucleotide
  Sense strand starting at position 144 of SEQ ID NO: 1885260
uguucugacugaugggaua

SEQ ID NO: 2328553 - RNA, 19 nt, Artificial Sequence
  Description of Artificial Sequence: Synthetic oligonucleotide
  Antisense strand to SEQ ID NO: 2328552
uaucccaucagucagaaca

SEQ ID NO: 2328554 - RNA, 19 nt, Artificial Sequence
  Description of Artificial Sequence: Synthetic oligonucleotide
  Sense strand starting at position 209 of SEQ ID NO: 1885260
ccucuacucucucaugguu

SEQ ID NO: 2328555 - RNA, 19 nt, Artificial Sequence
  Description of Artificial Sequence: Synthetic oligonucleotide
  Antisense strand to SEQ ID NO: 2328554
aaccaugagagaguagagg

SEQ ID NO: 2328556 - RNA, 19 nt, Artificial Sequence
  Description of Artificial Sequence: Synthetic oligonucleotide
  Sense strand starting at position 239 of SEQ ID NO: 1885260
agagauagaucugaaauaa

SEQ ID NO: 2328557 - RNA, 19 nt, Artificial Sequence
  Description of Artificial Sequence: Synthetic oligonucleotide
  Antisense strand to SEQ ID NO: 2328556
uuauuucagaucuaucucu

SEQ ID NO: 2328558 - RNA, 19 nt, Artificial Sequence
  Description of Artificial Sequence: Synthetic oligonucleotide
  Sense strand starting at position 259 of SEQ ID NO: 1885260
aauaguaguuuagagugaa

SEQ ID NO: 2328559 - RNA, 19 nt, Artificial Sequence
  Description of Artificial Sequence: Synthetic oligonucleotide
  Antisense strand to SEQ ID NO: 2328558
uucacucuaaacuacuauu

SEQ ID NO: 2328560 - RNA, 19 nt, Artificial Sequence
  Description of Artificial Sequence: Synthetic oligonucleotide
  Sense strand starting at position 262 of SEQ ID NO: 1885260
aguaguuuagagugaaauu

SEQ ID NO: 2328561 - RNA, 19 nt, Artificial Sequence
  Description of Artificial Sequence: Synthetic oligonucleotide
  Antisense strand to SEQ ID NO: 2328560
aauuucacucuaaacuacu

SEQ ID NO: 2328562 - RNA, 19 nt, Artificial Sequence
  Description of Artificial Sequence: Synthetic oligonucleotide
  Sense strand starting at position 263 of SEQ ID NO: 1885260
guaguuuagagugaaauua

SEQ ID NO: 2328563 - RNA, 19 nt, Artificial Sequence
  Description of Artificial Sequence: Synthetic oligonucleotide
  Antisense strand to SEQ ID NO: 2328562
uaauuucacucuaaacuac

SEQ ID NO: 2328564 - RNA, 19 nt, Artificial Sequence
  Description of Artificial Sequence: Synthetic oligonucleotide
  Sense strand starting at position 317 of SEQ ID NO: 1885260
gauagagcuuccugaaugg

SEQ ID NO: 2328565 - RNA, 19 nt, Artificial Sequence
  Description of Artificial Sequence: Synthetic oligonucleotide
  Antisense strand to SEQ ID NO: 2328564
ccauucaggaagcucuauc

SEQ ID NO: 2328566 - RNA, 19 nt, Artificial Sequence
  Description of Artificial Sequence: Synthetic oligonucleotide
  Sense strand starting at position 352 of SEQ ID NO: 1885260
cccuaacacuuggagauaa

SEQ ID NO: 2328567 - RNA, 19 nt, Artificial Sequence
  Description of Artificial Sequence: Synthetic oligonucleotide
  Antisense strand to SEQ ID NO: 2328566
uuaucuccaaguguuaggg

SEQ ID NO: 2328568 - RNA, 19 nt, Artificial Sequence
  Description of Artificial Sequence: Synthetic oligonucleotide
  Sense strand starting at position 538 of SEQ ID NO: 1885260
aggaaauguuagccuuuga

SEQ ID NO: 2328569 - RNA, 19 nt, Artificial Sequence
  Description of Artificial Sequence: Synthetic oligonucleotide
  Antisense strand to SEQ ID NO: 2328568
ucaaaggcuaacauuuccu

SEQ ID NO: 2328570 - RNA, 19 nt, Artificial Sequence
  Description of Artificial Sequence: Synthetic oligonucleotide
  Sense strand starting at position 722 of SEQ ID NO: 1885260
cgauaaagcaaguaucaga

SEQ ID NO: 2328571 - RNA, 19 nt, Artificial Sequence
  Description of Artificial Sequence: Synthetic oligonucleotide
  Antisense strand to SEQ ID NO: 2328570
ucugauacuugcuuuaucg

SEQ ID NO: 2328572 - RNA, 19 nt, Artificial Sequence
  Description of Artificial Sequence: Synthetic oligonucleotide
  Sense strand starting at position 843 of SEQ ID NO: 1885260
acagauggguaaugaaaua

SEQ ID NO: 2328573 - RNA, 19 nt, Artificial Sequence
  Description of Artificial Sequence: Synthetic oligonucleotide
  Antisense strand to SEQ ID NO: 2328572
uauuucauuacccaucugu

SEQ ID NO: 2328574 - RNA, 19 nt, Artificial Sequence
  Description of Artificial Sequence: Synthetic oligonucleotide
  Sense strand starting at position 945 of SEQ ID NO: 1885260
acagacucaucagggaaca

SEQ ID NO: 2328575 - RNA, 19 nt, Artificial Sequence
  Description of Artificial Sequence: Synthetic oligonucleotide
  Antisense strand to SEQ ID NO: 2328574
uguucccugaugagucugu

SEQ ID NO: 2328576 - RNA, 19 nt, Artificial Sequence
  Description of Artificial Sequence: Synthetic oligonucleotide
  Sense strand starting at position 1157 of SEQ ID NO: 1885260
agaaauacuugagguaaua

SEQ ID NO: 2328577 - RNA, 19 nt, Artificial Sequence
  Description of Artificial Sequence: Synthetic oligonucleotide
  Antisense strand to SEQ ID NO: 2328576
uauuaccucaaguauuucu

SEQ ID NO: 2328578 - RNA, 19 nt, Artificial Sequence
  Description of Artificial Sequence: Synthetic oligonucleotide
  Sense strand starting at position 1361 of SEQ ID NO: 1885260
aguucugagucuucucuuu

SEQ ID NO: 2328579 - RNA, 19 nt, Artificial Sequence
  Description of Artificial Sequence: Synthetic oligonucleotide
  Antisense strand to SEQ ID NO: 2328578
aaagagaagacucagaacu

SEQ ID NO: 2328580 - RNA, 19 nt, Artificial Sequence
  Description of Artificial Sequence: Synthetic oligonucleotide
  Sense strand starting at position 1379 of SEQ ID NO: 1885260
ucaugugguuacuuuggaa

SEQ ID NO: 2328581 - RNA, 19 nt, Artificial Sequence
  Description of Artificial Sequence: Synthetic oligonucleotide
  Antisense strand to SEQ ID NO: 2328580
uuccaaaguaaccacauga

SEQ ID NO: 2328582 - RNA, 19 nt, Artificial Sequence
  Description of Artificial Sequence: Synthetic oligonucleotide
  Sense strand starting at position 1382 of SEQ ID NO: 1885260
ugugguuacuuuggaaugu

SEQ ID NO: 2328583 - RNA, 19 nt, Artificial Sequence
  Description of Artificial Sequence: Synthetic oligonucleotide
  Antisense strand to SEQ ID NO: 2328582
acauuccaaaguaaccaca

SEQ ID NO: 2328584 - RNA, 19 nt, Artificial Sequence
  Description of Artificial Sequence: Synthetic oligonucleotide
  Sense strand starting at position 1383 of SEQ ID NO: 1885260
gugguuacuuuggaauguu

SEQ ID NO: 2328585 - RNA, 19 nt, Artificial Sequence
  Description of Artificial Sequence: Synthetic oligonucleotide
  Antisense strand to SEQ ID NO: 2328584
aacauuccaaaguaaccac

SEQ ID NO: 2328586 - RNA, 19 nt, Artificial Sequence
  Description of Artificial Sequence: Synthetic oligonucleotide
  Sense strand starting at position 1392 of SEQ ID NO: 1885260
uuggaauguucacggcaca

SEQ ID NO: 2328587 - RNA, 19 nt, Artificial Sequence
  Description of Artificial Sequence: Synthetic oligonucleotide
  Antisense strand to SEQ ID NO: 2328586
ugugccgugaacauuccaa

SEQ ID NO: 2328588 - RNA, 19 nt, Artificial Sequence
  Description of Artificial Sequence: Synthetic oligonucleotide
  Sense strand starting at position 1393 of SEQ ID NO: 1885260
uggaauguucacggcacau

SEQ ID NO: 2328589 - RNA, 19 nt, Artificial Sequence
  Description of Artificial Sequence: Synthetic oligonucleotide
  Antisense strand to SEQ ID NO: 2328588
augugccgugaacauucca

SEQ ID NO: 2328590 - RNA, 19 nt, Artificial Sequence
  Description of Artificial Sequence: Synthetic oligonucleotide
  Sense strand starting at position 2328 of SEQ ID NO: 1885260
ccagguagguccuaaagau

SEQ ID NO: 2328591 - RNA, 19 nt, Artificial Sequence
  Description of Artificial Sequence: Synthetic oligonucleotide
  Antisense strand to SEQ ID NO: 2328590
aucuuuaggaccuaccugg

SEQ ID NO: 2328592 - RNA, 19 nt, Artificial Sequence
  Description of Artificial Sequence: Synthetic oligonucleotide
  Sense strand starting at position 2337 of SEQ ID NO: 1885260
uccuaaagaucuugggauc

SEQ ID NO: 2328593 - RNA, 19 nt, Artificial Sequence
  Description of Artificial Sequence: Synthetic oligonucleotide
  Antisense strand to SEQ ID NO: 2328592
gaucccaagaucuuuagga

SEQ ID NO: 2328594 - RNA, 19 nt, Artificial Sequence
  Description of Artificial Sequence: Synthetic oligonucleotide
  Sense strand starting at position 2521 of SEQ ID NO: 1885260
uacccugucuagguguuua

SEQ ID NO: 2328595 - RNA, 19 nt, Artificial Sequence
  Description of Artificial Sequence: Synthetic oligonucleotide
  Antisense strand to SEQ ID NO: 2328594
uaaacaccuagacagggua

SEQ ID NO: 2328596 - RNA, 19 nt, Artificial Sequence
  Description of Artificial Sequence: Synthetic oligonucleotide
  Sense strand starting at position 2744 of SEQ ID NO: 1885260
cccacuuugugaucucaua

SEQ ID NO: 2328597 - RNA, 19 nt, Artificial Sequence
  Description of Artificial Sequence: Synthetic oligonucleotide
  Antisense strand to SEQ ID NO: 2328596
uaugagaucacaaaguggg

SEQ ID NO: 2328598 - RNA, 19 nt, Artificial Sequence
  Description of Artificial Sequence: Synthetic oligonucleotide
  Sense strand starting at position 2848 of SEQ ID NO: 1885260
cccuuaggcugagguagau

SEQ ID NO: 2328599 - RNA, 19 nt, Artificial Sequence
  Description of Artificial Sequence: Synthetic oligonucleotide
  Antisense strand to SEQ ID NO: 2328598
aucuaccucagccuaaggg

SEQ ID NO: 2328600 - RNA, 19 nt, Artificial Sequence
  Description of Artificial Sequence: Synthetic oligonucleotide
  Sense strand starting at position 55 of SEQ ID NO: 1885261
gcuguuuguugucugcuga

SEQ ID NO: 2328601 - RNA, 19 nt, Artificial Sequence
  Description of Artificial Sequence: Synthetic oligonucleotide
  Antisense strand to SEQ ID NO: 2328600
ucagcagacaacaaacagc

SEQ ID NO: 2328602 - RNA, 19 nt, Artificial Sequence
  Description of Artificial Sequence: Synthetic oligonucleotide
  Sense strand starting at position 154 of SEQ ID NO: 1885261
uugguagaaacaugagcaa

SEQ ID NO: 2328603 - RNA, 19 nt, Artificial Sequence
  Description of Artificial Sequence: Synthetic oligonucleotide
  Antisense strand to SEQ ID NO: 2328602
uugcucauguuucuaccaa

SEQ ID NO: 2328604 - RNA, 19 nt, Artificial Sequence
  Description of Artificial Sequence: Synthetic oligonucleotide
  Sense strand starting at position 172 of SEQ ID NO: 1885261
aaggguguuucugcuuuau

SEQ ID NO: 2328605 - RNA, 19 nt, Artificial Sequence
  Description of Artificial Sequence: Synthetic oligonucleotide
  Antisense strand to SEQ ID NO: 2328604
auaaagcagaaacacccuu

SEQ ID NO: 2328606 - RNA, 19 nt, Artificial Sequence
  Description of Artificial Sequence: Synthetic oligonucleotide
  Sense strand starting at position 174 of SEQ ID NO: 1885261
ggguguuucugcuuuauuu

SEQ ID NO: 2328607 - RNA, 19 nt, Artificial Sequence
  Description of Artificial Sequence: Synthetic oligonucleotide
  Antisense strand to SEQ ID NO: 2328606
aaauaaagcagaaacaccc

SEQ ID NO: 2328608 - RNA, 19 nt, Artificial Sequence
  Description of Artificial Sequence: Synthetic oligonucleotide
  Sense strand starting at position 176 of SEQ ID NO: 1885261
guguuucugcuuuauuugu

SEQ ID NO: 2328609 - RNA, 19 nt, Artificial Sequence
  Description of Artificial Sequence: Synthetic oligonucleotide
  Antisense strand to SEQ ID NO: 2328608
acaaauaaagcagaaacac

SEQ ID NO: 2328610 - RNA, 19 nt, Artificial Sequence
  Description of Artificial Sequence: Synthetic oligonucleotide
  Sense strand starting at position 263 of SEQ ID NO: 1885261
uucgacagucacuaugaga

SEQ ID NO: 2328611 - RNA, 19 nt, Artificial Sequence
  Description of Artificial Sequence: Synthetic oligonucleotide
  Antisense strand to SEQ ID NO: 2328610
ucucauagugacugucgaa

SEQ ID NO: 2328612 - RNA, 19 nt, Artificial Sequence
  Description of Artificial Sequence: Synthetic oligonucleotide
  Sense strand starting at position 423 of SEQ ID NO: 1885261
uuaagaugauggcaaucaa

SEQ ID NO: 2328613 - RNA, 19 nt, Artificial Sequence
  Description of Artificial Sequence: Synthetic oligonucleotide
  Antisense strand to SEQ ID NO: 2328612
uugauugccaucaucuuaa

SEQ ID NO: 2328614 - RNA, 19 nt, Artificial Sequence
  Description of Artificial Sequence: Synthetic oligonucleotide
  Sense strand starting at position 458 of SEQ ID NO: 1885261
ggcagaucuuguucugcuu

SEQ ID NO: 2328615 - RNA, 19 nt, Artificial Sequence
  Description of Artificial Sequence: Synthetic oligonucleotide
  Antisense strand to SEQ ID NO: 2328614
aagcagaacaagaucugcc

SEQ ID NO: 2328616 - RNA, 19 nt, Artificial Sequence
  Description of Artificial Sequence: Synthetic oligonucleotide
  Sense strand starting at position 590 of SEQ ID NO: 1885261
aggacccauuuaugagaca

SEQ ID NO: 2328617 - RNA, 19 nt, Artificial Sequence
  Description of Artificial Sequence: Synthetic oligonucleotide
  Antisense strand to SEQ ID NO: 2328616
ugucucauaaauggguccu

SEQ ID NO: 2328618 - RNA, 19 nt, Artificial Sequence
  Description of Artificial Sequence: Synthetic oligonucleotide
  Sense strand starting at position 615 of SEQ ID NO: 1885261
aguacuggugcugaaguau

SEQ ID NO: 2328619 - RNA, 19 nt, Artificial Sequence
  Description of Artificial Sequence: Synthetic oligonucleotide
  Antisense strand to SEQ ID NO: 2328618
auacuucagcaccaguacu

SEQ ID NO: 2328620 - RNA, 19 nt, Artificial Sequence
  Description of Artificial Sequence: Synthetic oligonucleotide
  Sense strand starting at position 816 of SEQ ID NO: 1885261
cauggaguugcggacagau

SEQ ID NO: 2328621 - RNA, 19 nt, Artificial Sequence
  Description of Artificial Sequence: Synthetic oligonucleotide
  Antisense strand to SEQ ID NO: 2328620
aucuguccgcaacuccaug

SEQ ID NO: 2328622 - RNA, 19 nt, Artificial Sequence
  Description of Artificial Sequence: Synthetic oligonucleotide
  Sense strand starting at position 883 of SEQ ID NO: 1885261
cugacaggaucugaagaaa

SEQ ID NO: 2328623 - RNA, 19 nt, Artificial Sequence
  Description of Artificial Sequence: Synthetic oligonucleotide
  Antisense strand to SEQ ID NO: 2328622
uuucuucagauccugucag

SEQ ID NO: 2328624 - RNA, 19 nt, Artificial Sequence
  Description of Artificial Sequence: Synthetic oligonucleotide
  Sense strand starting at position 895 of SEQ ID NO: 1885261
gaagaaaucugcggagagu

SEQ ID NO: 2328625 - RNA, 19 nt, Artificial Sequence
  Description of Artificial Sequence: Synthetic oligonucleotide
  Antisense strand to SEQ ID NO: 2328624
acucuccgcagauuucuuc

SEQ ID NO: 2328626 - RNA, 19 nt, Artificial Sequence
  Description of Artificial Sequence: Synthetic oligonucleotide
  Sense strand starting at position 916 of SEQ ID NO: 1885261
ccuugagccucauggagaa

SEQ ID NO: 2328627 - RNA, 19 nt, Artificial Sequence
  Description of Artificial Sequence: Synthetic oligonucleotide
  Antisense strand to SEQ ID NO: 2328626
uucuccaugaggcucaagg

SEQ ID NO: 2328628 - RNA, 19 nt, Artificial Sequence
  Description of Artificial Sequence: Synthetic oligonucleotide
  Sense strand starting at position 1103 of SEQ ID NO: 1885261
cagggaagccugcgaaagu

SEQ ID NO: 2328629 - RNA, 19 nt, Artificial Sequence
  Description of Artificial Sequence: Synthetic oligonucleotide
  Antisense strand to SEQ ID NO: 2328628
acuuucgcaggcuucccug

SEQ ID NO: 2328630 - RNA, 19 nt, Artificial Sequence
  Description of Artificial Sequence: Synthetic oligonucleotide
  Sense strand starting at position 1170 of SEQ ID NO: 1885261
gcccuuacaucugacugau

SEQ ID NO: 2328631 - RNA, 19 nt, Artificial Sequence
  Description of Artificial Sequence: Synthetic oligonucleotide
  Antisense strand to SEQ ID NO: 2328630
aucagucagauguaagggc

SEQ ID NO: 2328632 - RNA, 19 nt, Artificial Sequence
  Description of Artificial Sequence: Synthetic oligonucleotide
  Sense strand starting at position 1172 of SEQ ID NO: 1885261
ccuuacaucugacugaugu

SEQ ID NO: 2328633 - RNA, 19 nt, Artificial Sequence
  Description of Artificial Sequence: Synthetic oligonucleotide
  Antisense strand to SEQ ID NO: 2328632
acaucagucagauguaagg

SEQ ID NO: 2328634 - RNA, 19 nt, Artificial Sequence
  Description of Artificial Sequence: Synthetic oligonucleotide
  Sense strand starting at position 1176 of SEQ ID NO: 1885261
acaucugacugauguccau

SEQ ID NO: 2328635 - RNA, 19 nt, Artificial Sequence
  Description of Artificial Sequence: Synthetic oligonucleotide
  Antisense strand to SEQ ID NO: 2328634
auggacaucagucagaugu

SEQ ID NO: 2328636 - RNA, 19 nt, Artificial Sequence
  Description of Artificial Sequence: Synthetic oligonucleotide
  Sense strand starting at position 1264 of SEQ ID NO: 1885261
gauggcauccuauaauguu

SEQ ID NO: 2328637 - RNA, 19 nt, Artificial Sequence
  Description of Artificial Sequence: Synthetic oligonucleotide
  Antisense strand to SEQ ID NO: 2328636
aacauuauaggaugccauc

SEQ ID NO: 2328638 - RNA, 19 nt, Artificial Sequence
  Description of Artificial Sequence: Synthetic oligonucleotide
  Sense strand starting at position 1267 of SEQ ID NO: 1885261
ggcauccuauaauguuaaa

SEQ ID NO: 2328639 - RNA, 19 nt, Artificial Sequence
  Description of Artificial Sequence: Synthetic oligonucleotide
  Antisense strand to SEQ ID NO: 2328638
uuuaacauuauaggaugcc

SEQ ID NO: 2328640 - RNA, 19 nt, Artificial Sequence
  Description of Artificial Sequence: Synthetic oligonucleotide
  Sense strand starting at position 1278 of SEQ ID NO: 1885261
auguuaaacgcacaauuaa

SEQ ID NO: 2328641 - RNA, 19 nt, Artificial Sequence
  Description of Artificial Sequence: Synthetic oligonucleotide
  Antisense strand to SEQ ID NO: 2328640
uuaauugugcguuuaacau

SEQ ID NO: 2328642 - RNA, 19 nt, Artificial Sequence
  Description of Artificial Sequence: Synthetic oligonucleotide
  Sense strand starting at position 1296 of SEQ ID NO: 1885261
aaacaaucgcuagagguga

SEQ ID NO: 2328643 - RNA, 19 nt, Artificial Sequence
  Description of Artificial Sequence: Synthetic oligonucleotide
  Antisense strand to SEQ ID NO: 2328642
ucaccucuagcgauuguuu

SEQ ID NO: 2328644 - RNA, 19 nt, Artificial Sequence
  Description of Artificial Sequence: Synthetic oligonucleotide
  Sense strand starting at position 1363 of SEQ ID NO: 1885261
ggagaccuaccuggaugua

SEQ ID NO: 2328645 - RNA, 19 nt, Artificial Sequence
  Description of Artificial Sequence: Synthetic oligonucleotide
  Antisense strand to SEQ ID NO: 2328644
uacauccagguaggucucc

SEQ ID NO: 2328646 - RNA, 19 nt, Artificial Sequence
  Description of Artificial Sequence: Synthetic oligonucleotide
  Sense strand starting at position 1528 of SEQ ID NO: 1885261
ugagaaauauaauauggga

SEQ ID NO: 2328647 - RNA, 19 nt, Artificial Sequence
  Description of Artificial Sequence: Synthetic oligonucleotide
  Antisense strand to SEQ ID NO: 2328646
ucccauauuauauuucuca

SEQ ID NO: 2328648 - RNA, 19 nt, Artificial Sequence
  Description of Artificial Sequence: Synthetic oligonucleotide
  Sense strand starting at position 1570 of SEQ ID NO: 1885261
cuuacaacagcuuggauau

SEQ ID NO: 2328649 - RNA, 19 nt, Artificial Sequence
  Description of Artificial Sequence: Synthetic oligonucleotide
  Antisense strand to SEQ ID NO: 2328648
auauccaagcuguuguaag

SEQ ID NO: 2328650 - RNA, 19 nt, Artificial Sequence
  Description of Artificial Sequence: Synthetic oligonucleotide
  Sense strand starting at position 1577 of SEQ ID NO: 1885261
cagcuuggauaugagagaa

SEQ ID NO: 2328651 - RNA, 19 nt, Artificial Sequence
  Description of Artificial Sequence: Synthetic oligonucleotide
  Antisense strand to SEQ ID NO: 2328650
uucucucauauccaagcug

SEQ ID NO: 2328652 - RNA, 19 nt, Artificial Sequence
  Description of Artificial Sequence: Synthetic oligonucleotide
  Sense strand starting at position 1598 of SEQ ID NO: 1885261
aaagaauagugccuuugga

SEQ ID NO: 2328653 - RNA, 19 nt, Artificial Sequence
  Description of Artificial Sequence: Synthetic oligonucleotide
  Antisense strand to SEQ ID NO: 2328652
uccaaaggcacuauucuuu

SEQ ID NO: 2328654 - RNA, 19 nt, Artificial Sequence
  Description of Artificial Sequence: Synthetic oligonucleotide
  Sense strand starting at position 1660 of SEQ ID NO: 1885261
ugacaauaauucuagaugu

SEQ ID NO: 2328655 - RNA, 19 nt, Artificial Sequence
  Description of Artificial Sequence: Synthetic oligonucleotide
  Antisense strand to SEQ ID NO: 2328654
acaucuagaauuauuguca

SEQ ID NO: 2328656 - RNA, 19 nt, Artificial Sequence
  Description of Artificial Sequence: Synthetic oligonucleotide
  Sense strand starting at position 1662 of SEQ ID NO: 1885261
acaauaauucuagaugugu

SEQ ID NO: 2328657 - RNA, 19 nt, Artificial Sequence
  Description of Artificial Sequence: Synthetic oligonucleotide
  Antisense strand to SEQ ID NO: 2328656
acacaucuagaauuauugu

SEQ ID NO: 2328658 - RNA, 19 nt, Artificial Sequence
  Description of Artificial Sequence: Synthetic oligonucleotide
  Sense strand starting at position 1720 of SEQ ID NO: 1885261
uggcauaacugguggagaa

SEQ ID NO: 2328659 - RNA, 19 nt, Artificial Sequence
  Description of Artificial Sequence: Synthetic oligonucleotide
  Antisense strand to SEQ ID NO: 2328658
uucuccaccaguuaugcca

SEQ ID NO: 2328660 - RNA, 19 nt, Artificial Sequence
  Description of Artificial Sequence: Synthetic oligonucleotide
  Sense strand starting at position 1721 of SEQ ID NO: 1885261
ggcauaacugguggagaaa

SEQ ID NO: 2328661 - RNA, 19 nt, Artificial Sequence
  Description of Artificial Sequence: Synthetic oligonucleotide
  Antisense strand to SEQ ID NO: 2328660
uuucuccaccaguuaugcc

SEQ ID NO: 2328662 - RNA, 19 nt, Artificial Sequence
  Description of Artificial Sequence: Synthetic oligonucleotide
  Sense strand starting at position 1944 of SEQ ID NO: 1885261
ugacuuguguccuccaaag

SEQ ID NO: 2328663 - RNA, 19 nt, Artificial Sequence
  Description of Artificial Sequence: Synthetic oligonucleotide
  Antisense strand to SEQ ID NO: 2328662
cuuuggaggacacaaguca

SEQ ID NO: 2328664 - RNA, 19 nt, Artificial Sequence
  Description of Artificial Sequence: Synthetic oligonucleotide
  Sense strand starting at position 1946 of SEQ ID NO: 1885261
acuuguguccuccaaaggu

SEQ ID NO: 2328665 - RNA, 19 nt, Artificial Sequence
  Description of Artificial Sequence: Synthetic oligonucleotide
  Antisense strand to SEQ ID NO: 2328664
accuuuggaggacacaagu

SEQ ID NO: 2328666 - RNA, 19 nt, Artificial Sequence
  Description of Artificial Sequence: Synthetic oligonucleotide
  Sense strand starting at position 1988 of SEQ ID NO: 1885261
gagugacuauuuggaauua

SEQ ID NO: 2328667 - RNA, 19 nt, Artificial Sequence
  Description of Artificial Sequence: Synthetic oligonucleotide
  Antisense strand to SEQ ID NO: 2328666
uaauuccaaauagucacuc

SEQ ID NO: 2328668 - RNA, 19 nt, Artificial Sequence
  Description of Artificial Sequence: Synthetic oligonucleotide
  Sense strand starting at position 2026 of SEQ ID NO: 1885261
ugaagaucuuaagaugacu

SEQ ID NO: 2328669 - RNA, 19 nt, Artificial Sequence
  Description of Artificial Sequence: Synthetic oligonucleotide
  Antisense strand to SEQ ID NO: 2328668
agucaucuuaagaucuuca

SEQ ID NO: 2328670 - RNA, 19 nt, Artificial Sequence
  Description of Artificial Sequence: Synthetic oligonucleotide
  Sense strand starting at position 2047 of SEQ ID NO: 1885261
uccugaauuucggaugaau

SEQ ID NO: 2328671 - RNA, 19 nt, Artificial Sequence
  Description of Artificial Sequence: Synthetic oligonucleotide
  Antisense strand to SEQ ID NO: 2328670
auucauccgaaauucagga

SEQ ID NO: 2328672 - RNA, 19 nt, Artificial Sequence
  Description of Artificial Sequence: Synthetic oligonucleotide
  Sense strand starting at position 2065 of SEQ ID NO: 1885261
uccuaaauccagugacuga

SEQ ID NO: 2328673 - RNA, 19 nt, Artificial Sequence
  Description of Artificial Sequence: Synthetic oligonucleotide
  Antisense strand to SEQ ID NO: 2328672
ucagucacuggauuuagga

SEQ ID NO: 2328674 - RNA, 19 nt, Artificial Sequence
  Description of Artificial Sequence: Synthetic oligonucleotide
  Sense strand starting at position 2076 of SEQ ID NO: 1885261
gugacugauguccauauga

SEQ ID NO: 2328675 - RNA, 19 nt, Artificial Sequence
  Description of Artificial Sequence: Synthetic oligonucleotide
  Antisense strand to SEQ ID NO: 2328674
ucauauggacaucagucac

SEQ ID NO: 2328676 - RNA, 19 nt, Artificial Sequence
  Description of Artificial Sequence: Synthetic oligonucleotide
  Sense strand starting at position 2081 of SEQ ID NO: 1885261
ugauguccauaugagagaa

SEQ ID NO: 2328677 - RNA, 19 nt, Artificial Sequence
  Description of Artificial Sequence: Synthetic oligonucleotide
  Antisense strand to SEQ ID NO: 2328676
uucucucauauggacauca

SEQ ID NO: 2328678 - RNA, 19 nt, Artificial Sequence
  Description of Artificial Sequence: Synthetic oligonucleotide
  Sense strand starting at position 2353 of SEQ ID NO: 1885261
guauguucucauuguuuaa

SEQ ID NO: 2328679 - RNA, 19 nt, Artificial Sequence
  Description of Artificial Sequence: Synthetic oligonucleotide
  Antisense strand to SEQ ID NO: 2328678
uuaaacaaugagaacauac

SEQ ID NO: 2328680 - RNA, 19 nt, Artificial Sequence
  Description of Artificial Sequence: Synthetic oligonucleotide
  Sense strand starting at position 166 of SEQ ID NO: 1885262
agucuuacaggagguuuga

SEQ ID NO: 2328681 - RNA, 19 nt, Artificial Sequence
  Description of Artificial Sequence: Synthetic oligonucleotide
  Antisense strand to SEQ ID NO: 2328680
ucaaaccuccuguaagacu

SEQ ID NO: 2328682 - RNA, 19 nt, Artificial Sequence
  Description of Artificial Sequence: Synthetic oligonucleotide
  Sense strand starting at position 302 of SEQ ID NO: 1885262
uguuuagaaucacuagaua

SEQ ID NO: 2328683 - RNA, 19 nt, Artificial Sequence
  Description of Artificial Sequence: Synthetic oligonucleotide
  Antisense strand to SEQ ID NO: 2328682
uaucuagugauucuaaaca

SEQ ID NO: 2328684 - RNA, 19 nt, Artificial Sequence
  Description of Artificial Sequence: Synthetic oligonucleotide
  Sense strand starting at position 642 of SEQ ID NO: 1885262
ggagcuagaguauguuaaa

SEQ ID NO: 2328685 - RNA, 19 nt, Artificial Sequence
  Description of Artificial Sequence: Synthetic oligonucleotide
  Antisense strand to SEQ ID NO: 2328684
uuuaacauacucuagcucc

SEQ ID NO: 2328686 - RNA, 19 nt, Artificial Sequence
  Description of Artificial Sequence: Synthetic oligonucleotide
  Sense strand starting at position 708 of SEQ ID NO: 1885262
ccauguaguagaugagaca

SEQ ID NO: 2328687 - RNA, 19 nt, Artificial Sequence
  Description of Artificial Sequence: Synthetic oligonucleotide
  Antisense strand to SEQ ID NO: 2328686
ugucucaucuacuacaugg

SEQ ID NO: 2328688 - RNA, 19 nt, Artificial Sequence
  Description of Artificial Sequence: Synthetic oligonucleotide
  Sense strand starting at position 784 of SEQ ID NO: 1885262
agaagugaauauucuuaug

SEQ ID NO: 2328689 - RNA, 19 nt, Artificial Sequence
  Description of Artificial Sequence: Synthetic oligonucleotide
  Antisense strand to SEQ ID NO: 2328688
cauaagaauauucacuucu

SEQ ID NO: 2328690 - RNA, 19 nt, Artificial Sequence
  Description of Artificial Sequence: Synthetic oligonucleotide
  Sense strand starting at position 857 of SEQ ID NO: 1885262
cgacuaaacucacuucuga

SEQ ID NO: 2328691 - RNA, 19 nt, Artificial Sequence
  Description of Artificial Sequence: Synthetic oligonucleotide
  Antisense strand to SEQ ID NO: 2328690
ucagaagugaguuuagucg

SEQ ID NO: 2328692 - RNA, 19 nt, Artificial Sequence
  Description of Artificial Sequence: Synthetic oligonucleotide
  Sense strand starting at position 980 of SEQ ID NO: 1885262
ccuauuuauguacgucuaa

SEQ ID NO: 2328693 - RNA, 19 nt, Artificial Sequence
  Description of Artificial Sequence: Synthetic oligonucleotide
  Antisense strand to SEQ ID NO: 2328692
uuagacguacauaaauagg

SEQ ID NO: 2328694 - RNA, 19 nt, Artificial Sequence
  Description of Artificial Sequence: Synthetic oligonucleotide
  Sense strand starting at position 981 of SEQ ID NO: 1885262
cuauuuauguacgucuaau

SEQ ID NO: 2328695 - RNA, 19 nt, Artificial Sequence
  Description of Artificial Sequence: Synthetic oligonucleotide
  Antisense strand to SEQ ID NO: 2328694
auuagacguacauaaauag

SEQ ID NO: 2328696 - RNA, 19 nt, Artificial Sequence
  Description of Artificial Sequence: Synthetic oligonucleotide
  Sense strand starting at position 995 of SEQ ID NO: 1885262
cuaaucaauacgcgagaga

SEQ ID NO: 2328697 - RNA, 19 nt, Artificial Sequence
  Description of Artificial Sequence: Synthetic oligonucleotide
  Antisense strand to SEQ ID NO: 2328696
ucucucgcguauugauuag

SEQ ID NO: 2328698 - RNA, 19 nt, Artificial Sequence
  Description of Artificial Sequence: Synthetic oligonucleotide
  Sense strand starting at position 996 of SEQ ID NO: 1885262
uaaucaauacgcgagagaa

SEQ ID NO: 2328699 - RNA, 19 nt, Artificial Sequence
  Description of Artificial Sequence: Synthetic oligonucleotide
  Antisense strand to SEQ ID NO: 2328698
uucucucgcguauugauua

SEQ ID NO: 2328700 - RNA, 19 nt, Artificial Sequence
  Description of Artificial Sequence: Synthetic oligonucleotide
  Sense strand starting at position 998 of SEQ ID NO: 1885262
aucaauacgcgagagaacu

SEQ ID NO: 2328701 - RNA, 19 nt, Artificial Sequence
  Description of Artificial Sequence: Synthetic oligonucleotide
  Antisense strand to SEQ ID NO: 2328700
aguucucucgcguauugau

SEQ ID NO: 2328702 - RNA, 19 nt, Artificial Sequence
  Description of Artificial Sequence: Synthetic oligonucleotide
  Sense strand starting at position 1023 of SEQ ID NO: 1885262
aucaacuuuguugaaggua

SEQ ID NO: 2328703 - RNA, 19 nt, Artificial Sequence
  Description of Artificial Sequence: Synthetic oligonucleotide
  Antisense strand to SEQ ID NO: 2328702
uaccuucaacaaaguugau

SEQ ID NO: 2328704 - RNA, 19 nt, Artificial Sequence
  Description of Artificial Sequence: Synthetic oligonucleotide
  Sense strand starting at position 1035 of SEQ ID NO: 1885262
gaagguauucucugacacu

SEQ ID NO: 2328705 - RNA, 19 nt, Artificial Sequence
  Description of Artificial Sequence: Synthetic oligonucleotide
  Antisense strand to SEQ ID NO: 2328704
agugucagagaauaccuuc

SEQ ID NO: 2328706 - RNA, 19 nt, Artificial Sequence
  Description of Artificial Sequence: Synthetic oligonucleotide
  Sense strand starting at position 1167 of SEQ ID NO: 1885262
uggcauaaaucuguaaauu

SEQ ID NO: 2328707 - RNA, 19 nt, Artificial Sequence
  Description of Artificial Sequence: Synthetic oligonucleotide
  Antisense strand to SEQ ID NO: 2328706
aauuuacagauuuaugcca

SEQ ID NO: 2328708 - RNA, 19 nt, Artificial Sequence
  Description of Artificial Sequence: Synthetic oligonucleotide
  Sense strand starting at position 1292 of SEQ ID NO: 1885262
augacuauauaccugugaa

SEQ ID NO: 2328709 - RNA, 19 nt, Artificial Sequence
  Description of Artificial Sequence: Synthetic oligonucleotide
  Antisense strand to SEQ ID NO: 2328708
uucacagguauauagucau

SEQ ID NO: 2328710 - RNA, 19 nt, Artificial Sequence
  Description of Artificial Sequence: Synthetic oligonucleotide
  Sense strand starting at position 1295 of SEQ ID NO: 1885262
acuauauaccugugaaugg

SEQ ID NO: 2328711 - RNA, 19 nt, Artificial Sequence
  Description of Artificial Sequence: Synthetic oligonucleotide
  Antisense strand to SEQ ID NO: 2328710
ccauucacagguauauagu

SEQ ID NO: 2328712 - RNA, 19 nt, Artificial Sequence
  Description of Artificial Sequence: Synthetic oligonucleotide
  Sense strand starting at position 1558 of SEQ ID NO: 1885262
auguauauugguuaguaga

SEQ ID NO: 2328713 - RNA, 19 nt, Artificial Sequence
  Description of Artificial Sequence: Synthetic oligonucleotide
  Antisense strand to SEQ ID NO: 2328712
ucuacuaaccaauauacau

SEQ ID NO: 2328714 - RNA, 19 nt, Artificial Sequence
  Description of Artificial Sequence: Synthetic oligonucleotide
  Sense strand starting at position 1566 of SEQ ID NO: 1885262
ugguuaguagagcaaauaa

SEQ ID NO: 2328715 - RNA, 19 nt, Artificial Sequence
  Description of Artificial Sequence: Synthetic oligonucleotide
  Antisense strand to SEQ ID NO: 2328714
uuauuugcucuacuaacca

SEQ ID NO: 2328716 - RNA, 19 nt, Artificial Sequence
  Description of Artificial Sequence: Synthetic oligonucleotide
  Sense strand starting at position 1720 of SEQ ID NO: 1885262
uuguuuguagccuauauuu

SEQ ID NO: 2328717 - RNA, 19 nt, Artificial Sequence
  Description of Artificial Sequence: Synthetic oligonucleotide
  Antisense strand to SEQ ID NO: 2328716
aaauauaggcuacaaacaa

SEQ ID NO: 2328718 - RNA, 19 nt, Artificial Sequence
  Description of Artificial Sequence: Synthetic oligonucleotide
  Sense strand starting at position 1722 of SEQ ID NO: 1885262
guuuguagccuauauuugu

SEQ ID NO: 2328719 - RNA, 19 nt, Artificial Sequence
  Description of Artificial Sequence: Synthetic oligonucleotide
  Antisense strand to SEQ ID NO: 2328718
acaaauauaggcuacaaac

SEQ ID NO: 2328720 - RNA, 19 nt, Artificial Sequence
  Description of Artificial Sequence: Synthetic oligonucleotide
  Sense strand starting at position 1838 of SEQ ID NO: 1885262
gccgguuagggcaguuuaa

SEQ ID NO: 2328721 - RNA, 19 nt, Artificial Sequence
  Description of Artificial Sequence: Synthetic oligonucleotide
  Antisense strand to SEQ ID NO: 2328720
uuaaacugcccuaaccggc

SEQ ID NO: 2328722 - RNA, 19 nt, Artificial Sequence
  Description of Artificial Sequence: Synthetic oligonucleotide
  Sense strand starting at position 2168 of SEQ ID NO: 1885262
gggcauguuacaggauacu

SEQ ID NO: 2328723 - RNA, 19 nt, Artificial Sequence
  Description of Artificial Sequence: Synthetic oligonucleotide
  Antisense strand to SEQ ID NO: 2328722
aguauccuguaacaugccc

SEQ ID NO: 2328724 - RNA, 19 nt, Artificial Sequence
  Description of Artificial Sequence: Synthetic oligonucleotide
  Sense strand starting at position 2174 of SEQ ID NO: 1885262
guuacaggauacucucuua

SEQ ID NO: 2328725 - RNA, 19 nt, Artificial Sequence
  Description of Artificial Sequence: Synthetic oligonucleotide
  Antisense strand to SEQ ID NO: 2328724
uaagagaguauccuguaac

SEQ ID NO: 2328726 - RNA, 19 nt, Artificial Sequence
  Description of Artificial Sequence: Synthetic oligonucleotide
  Sense strand starting at position 2177 of SEQ ID NO: 1885262
acaggauacucucuuaguc

SEQ ID NO: 2328727 - RNA, 19 nt, Artificial Sequence
  Description of Artificial Sequence: Synthetic oligonucleotide
  Antisense strand to SEQ ID NO: 2328726
gacuaagagaguauccugu

SEQ ID NO: 2328728 - RNA, 19 nt, Artificial Sequence
  Description of Artificial Sequence: Synthetic oligonucleotide
  Sense strand starting at position 2310 of SEQ ID NO: 1885262
cacccauaggcuuggagaa

SEQ ID NO: 2328729 - RNA, 19 nt, Artificial Sequence
  Description of Artificial Sequence: Synthetic oligonucleotide
  Antisense strand to SEQ ID NO: 2328728
uucuccaagccuaugggug

SEQ ID NO: 2328730 - RNA, 19 nt, Artificial Sequence
  Description of Artificial Sequence: Synthetic oligonucleotide
  Sense strand starting at position 2311 of SEQ ID NO: 1885262
acccauaggcuuggagaau

SEQ ID NO: 2328731 - RNA, 19 nt, Artificial Sequence
  Description of Artificial Sequence: Synthetic oligonucleotide
  Antisense strand to SEQ ID NO: 2328730
auucuccaagccuaugggu

SEQ ID NO: 2328732 - RNA, 19 nt, Artificial Sequence
  Description of Artificial Sequence: Synthetic oligonucleotide
  Sense strand starting at position 3006 of SEQ ID NO: 1885262
auaugaaaucauugaaugc

SEQ ID NO: 2328733 - RNA, 19 nt, Artificial Sequence
  Description of Artificial Sequence: Synthetic oligonucleotide
  Antisense strand to SEQ ID NO: 2328732
gcauucaaugauuucauau

SEQ ID NO: 2328734 - RNA, 19 nt, Artificial Sequence
  Description of Artificial Sequence: Synthetic oligonucleotide
  Sense strand starting at position 3187 of SEQ ID NO: 1885262
cugauuauguacucauuac

SEQ ID NO: 2328735 - RNA, 19 nt, Artificial Sequence
  Description of Artificial Sequence: Synthetic oligonucleotide
  Antisense strand to SEQ ID NO: 2328734
guaaugaguacauaaucag

SEQ ID NO: 2328736 - RNA, 19 nt, Artificial Sequence
  Description of Artificial Sequence: Synthetic oligonucleotide
  Sense strand starting at position 3222 of SEQ ID NO: 1885262
ggaauuggucaugguggga

SEQ ID NO: 2328737 - RNA, 19 nt, Artificial Sequence
  Description of Artificial Sequence: Synthetic oligonucleotide
  Antisense strand to SEQ ID NO: 2328736
ucccaccaugaccaauucc

SEQ ID NO: 2328738 - RNA, 19 nt, Artificial Sequence
  Description of Artificial Sequence: Synthetic oligonucleotide
  Sense strand starting at position 3394 of SEQ ID NO: 1885262
uuuguuuauggaugagaug

SEQ ID NO: 2328739 - RNA, 19 nt, Artificial Sequence
  Description of Artificial Sequence: Synthetic oligonucleotide
  Antisense strand to SEQ ID NO: 2328738
caucucauccauaaacaaa

SEQ ID NO: 2328740 - RNA, 19 nt, Artificial Sequence
  Description of Artificial Sequence: Synthetic oligonucleotide
  Sense strand starting at position 3395 of SEQ ID NO: 1885262
uuguuuauggaugagaugu

SEQ ID NO: 2328741 - RNA, 19 nt, Artificial Sequence
  Description of Artificial Sequence: Synthetic oligonucleotide
  Antisense strand to SEQ ID NO: 2328740
acaucucauccauaaacaa

SEQ ID NO: 2328742 - RNA, 19 nt, Artificial Sequence
  Description of Artificial Sequence: Synthetic oligonucleotide
  Sense strand starting at position 3428 of SEQ ID NO: 1885262
agaugaacauaucagagaa

SEQ ID NO: 2328743 - RNA, 19 nt, Artificial Sequence
  Description of Artificial Sequence: Synthetic oligonucleotide
  Antisense strand to SEQ ID NO: 2328742
uucucugauauguucaucu

SEQ ID NO: 2328744 - RNA, 19 nt, Artificial Sequence
  Description of Artificial Sequence: Synthetic oligonucleotide
  Sense strand starting at position 3571 of SEQ ID NO: 1885262
augucauagagagguccuu

SEQ ID NO: 2328745 - RNA, 19 nt, Artificial Sequence
  Description of Artificial Sequence: Synthetic oligonucleotide
  Antisense strand to SEQ ID NO: 2328744
aaggaccucucuaugacau

SEQ ID NO: 2328746 - RNA, 19 nt, Artificial Sequence
  Description of Artificial Sequence: Synthetic oligonucleotide
  Sense strand starting at position 3581 of SEQ ID NO: 1885262
gagguccuugccgagagau

SEQ ID NO: 2328747 - RNA, 19 nt, Artificial Sequence
  Description of Artificial Sequence: Synthetic oligonucleotide
  Antisense strand to SEQ ID NO: 2328746
aucucucggcaaggaccuc

SEQ ID NO: 2328748 - RNA, 19 nt, Artificial Sequence
  Description of Artificial Sequence: Synthetic oligonucleotide
  Sense strand starting at position 3640 of SEQ ID NO: 1885262
agaguuguaccagaaguca

SEQ ID NO: 2328749 - RNA, 19 nt, Artificial Sequence
  Description of Artificial Sequence: Synthetic oligonucleotide
  Antisense strand to SEQ ID NO: 2328748
ugacuucugguacaacucu

SEQ ID NO: 2328750 - RNA, 19 nt, Artificial Sequence
  Description of Artificial Sequence: Synthetic oligonucleotide
  Sense strand starting at position 3726 of SEQ ID NO: 1885262
gauucuguauggguaauca

SEQ ID NO: 2328751 - RNA, 19 nt, Artificial Sequence
  Description of Artificial Sequence: Synthetic oligonucleotide
  Antisense strand to SEQ ID NO: 2328750
ugauuacccauacagaauc

SEQ ID NO: 2328752 - RNA, 19 nt, Artificial Sequence
  Description of Artificial Sequence: Synthetic oligonucleotide
  Sense strand starting at position 3826 of SEQ ID NO: 1885262
gcuccaagucuuuagaaau

SEQ ID NO: 2328753 - RNA, 19 nt, Artificial Sequence
  Description of Artificial Sequence: Synthetic oligonucleotide
  Antisense strand to SEQ ID NO: 2328752
auuucuaaagacuuggagc

SEQ ID NO: 2328754 - RNA, 19 nt, Artificial Sequence
  Description of Artificial Sequence: Synthetic oligonucleotide
  Sense strand starting at position 3911 of SEQ ID NO: 1885262
cuuuaugguguggagauaa

SEQ ID NO: 2328755 - RNA, 19 nt, Artificial Sequence
  Description of Artificial Sequence: Synthetic oligonucleotide
  Antisense strand to SEQ ID NO: 2328754
uuaucuccacaccauaaag

SEQ ID NO: 2328756 - RNA, 19 nt, Artificial Sequence
  Description of Artificial Sequence: Synthetic oligonucleotide
  Sense strand starting at position 3977 of SEQ ID NO: 1885262
augggauaccucugagcuc

SEQ ID NO: 2328757 - RNA, 19 nt, Artificial Sequence
  Description of Artificial Sequence: Synthetic oligonucleotide
  Antisense strand to SEQ ID NO: 2328756
gagcucagagguaucccau

SEQ ID NO: 2328758 - RNA, 19 nt, Artificial Sequence
  Description of Artificial Sequence: Synthetic oligonucleotide
  Sense strand starting at position 3980 of SEQ ID NO: 1885262
ggauaccucugagcucaaa

SEQ ID NO: 2328759 - RNA, 19 nt, Artificial Sequence
  Description of Artificial Sequence: Synthetic oligonucleotide
  Antisense strand to SEQ ID NO: 2328758
uuugagcucagagguaucc

SEQ ID NO: 2328760 - RNA, 19 nt, Artificial Sequence
  Description of Artificial Sequence: Synthetic oligonucleotide
  Sense strand starting at position 40 of SEQ ID NO: 1885263
cuguauguggauuaaauca

SEQ ID NO: 2328761 - RNA, 19 nt, Artificial Sequence
  Description of Artificial Sequence: Synthetic oligonucleotide
  Antisense strand to SEQ ID NO: 2328760
ugauuuaauccacauacag

SEQ ID NO: 2328762 - RNA, 19 nt, Artificial Sequence
  Description of Artificial Sequence: Synthetic oligonucleotide
  Sense strand starting at position 61 of SEQ ID NO: 1885263
uaauauaagugagugcuga

SEQ ID NO: 2328763 - RNA, 19 nt, Artificial Sequence
  Description of Artificial Sequence: Synthetic oligonucleotide
  Antisense strand to SEQ ID NO: 2328762
ucagcacucacuuauauua

SEQ ID NO: 2328764 - RNA, 19 nt, Artificial Sequence
  Description of Artificial Sequence: Synthetic oligonucleotide
  Sense strand starting at position 62 of SEQ ID NO: 1885263
aauauaagugagugcugaa

SEQ ID NO: 2328765 - RNA, 19 nt, Artificial Sequence
  Description of Artificial Sequence: Synthetic oligonucleotide
  Antisense strand to SEQ ID NO: 2328764
uucagcacucacuuauauu

SEQ ID NO: 2328766 - RNA, 19 nt, Artificial Sequence
  Description of Artificial Sequence: Synthetic oligonucleotide
  Sense strand starting at position 145 of SEQ ID NO: 1885263
gugugucugcugucguaca

SEQ ID NO: 2328767 - RNA, 19 nt, Artificial Sequence
  Description of Artificial Sequence: Synthetic oligonucleotide
  Antisense strand to SEQ ID NO: 2328766
uguacgacagcagacacac

SEQ ID NO: 2328768 - RNA, 19 nt, Artificial Sequence
  Description of Artificial Sequence: Synthetic oligonucleotide
  Sense strand starting at position 215 of SEQ ID NO: 1885263
uccaccugucagugaagaa

SEQ ID NO: 2328769 - RNA, 19 nt, Artificial Sequence
  Description of Artificial Sequence: Synthetic oligonucleotide
  Antisense strand to SEQ ID NO: 2328768
uucuucacugacaggugga

SEQ ID NO: 2328770 - RNA, 19 nt, Artificial Sequence
  Description of Artificial Sequence: Synthetic oligonucleotide
  Sense strand starting at position 580 of SEQ ID NO: 1885263
ugacauagcacuugaggga

SEQ ID NO: 2328771 - RNA, 19 nt, Artificial Sequence
  Description of Artificial Sequence: Synthetic oligonucleotide
  Antisense strand to SEQ ID NO: 2328770
ucccucaagugcuauguca

SEQ ID NO: 2328772 - RNA, 19 nt, Artificial Sequence
  Description of Artificial Sequence: Synthetic oligonucleotide
  Sense strand starting at position 837 of SEQ ID NO: 1885263
ugugcaaauccugggaaga

SEQ ID NO: 2328773 - RNA, 19 nt, Artificial Sequence
  Description of Artificial Sequence: Synthetic oligonucleotide
  Antisense strand to SEQ ID NO: 2328772
ucuucccaggauuugcaca

SEQ ID NO: 2328774 - RNA, 19 nt, Artificial Sequence
  Description of Artificial Sequence: Synthetic oligonucleotide
  Sense strand starting at position 838 of SEQ ID NO: 1885263
gugcaaauccugggaagau

SEQ ID NO: 2328775 - RNA, 19 nt, Artificial Sequence
  Description of Artificial Sequence: Synthetic oligonucleotide
  Antisense strand to SEQ ID NO: 2328774
aucuucccaggauuugcac

SEQ ID NO: 2328776 - RNA, 19 nt, Artificial Sequence
  Description of Artificial Sequence: Synthetic oligonucleotide
  Sense strand starting at position 847 of SEQ ID NO: 1885263
cugggaagaugcuuacagu

SEQ ID NO: 2328777 - RNA, 19 nt, Artificial Sequence
  Description of Artificial Sequence: Synthetic oligonucleotide
  Antisense strand to SEQ ID NO: 2328776
acuguaagcaucuucccag

SEQ ID NO: 2328778 - RNA, 19 nt, Artificial Sequence
  Description of Artificial Sequence: Synthetic oligonucleotide
  Sense strand starting at position 848 of SEQ ID NO: 1885263
ugggaagaugcuuacaguu

SEQ ID NO: 2328779 - RNA, 19 nt, Artificial Sequence
  Description of Artificial Sequence: Synthetic oligonucleotide
  Antisense strand to SEQ ID NO: 2328778
aacuguaagcaucuuccca

SEQ ID NO: 2328780 - RNA, 19 nt, Artificial Sequence
  Description of Artificial Sequence: Synthetic oligonucleotide
  Sense strand starting at position 968 of SEQ ID NO: 1885263
cccagauagaguuaugugu

SEQ ID NO: 2328781 - RNA, 19 nt, Artificial Sequence
  Description of Artificial Sequence: Synthetic oligonucleotide
  Antisense strand to SEQ ID NO: 2328780
acacauaacucuaucuggg

SEQ ID NO: 2328782 - RNA, 19 nt, Artificial Sequence
  Description of Artificial Sequence: Synthetic oligonucleotide
  Sense strand starting at position 1086 of SEQ ID NO: 1885263
ucccguggugggcagaaau

SEQ ID NO: 2328783 - RNA, 19 nt, Artificial Sequence
  Description of Artificial Sequence: Synthetic oligonucleotide
  Antisense strand to SEQ ID NO: 2328782
auuucugcccaccacggga

SEQ ID NO: 2328784 - RNA, 19 nt, Artificial Sequence
  Description of Artificial Sequence: Synthetic oligonucleotide
  Sense strand starting at position 1510 of SEQ ID NO: 1885263
agggaaucuuuaccuuaug

SEQ ID NO: 2328785 - RNA, 19 nt, Artificial Sequence
  Description of Artificial Sequence: Synthetic oligonucleotide
  Antisense strand to SEQ ID NO: 2328784
cauaagguaaagauucccu

SEQ ID NO: 2328786 - RNA, 19 nt, Artificial Sequence
  Description of Artificial Sequence: Synthetic oligonucleotide
  Sense strand starting at position 1511 of SEQ ID NO: 1885263
gggaaucuuuaccuuauga

SEQ ID NO: 2328787 - RNA, 19 nt, Artificial Sequence
  Description of Artificial Sequence: Synthetic oligonucleotide
  Antisense strand to SEQ ID NO: 2328786
ucauaagguaaagauuccc

SEQ ID NO: 2328788 - RNA, 19 nt, Artificial Sequence
  Description of Artificial Sequence: Synthetic oligonucleotide
  Sense strand starting at position 1521 of SEQ ID NO: 1885263
accuuaugaauggguugua

SEQ ID NO: 2328789 - RNA, 19 nt, Artificial Sequence
  Description of Artificial Sequence: Synthetic oligonucleotide
  Antisense strand to SEQ ID NO: 2328788
uacaacccauucauaaggu

SEQ ID NO: 2328790 - RNA, 19 nt, Artificial Sequence
  Description of Artificial Sequence: Synthetic oligonucleotide
  Sense strand starting at position 1522 of SEQ ID NO: 1885263
ccuuaugaauggguuguau

SEQ ID NO: 2328791 - RNA, 19 nt, Artificial Sequence
  Description of Artificial Sequence: Synthetic oligonucleotide
  Antisense strand to SEQ ID NO: 2328790
auacaacccauucauaagg

SEQ ID NO: 2328792 - RNA, 19 nt, Artificial Sequence
  Description of Artificial Sequence: Synthetic oligonucleotide
  Sense strand starting at position 1524 of SEQ ID NO: 1885263
uuaugaauggguuguauac

SEQ ID NO: 2328793 - RNA, 19 nt, Artificial Sequence
  Description of Artificial Sequence: Synthetic oligonucleotide
  Antisense strand to SEQ ID NO: 2328792
guauacaacccauucauaa

SEQ ID NO: 2328794 - RNA, 19 nt, Artificial Sequence
  Description of Artificial Sequence: Synthetic oligonucleotide
  Sense strand starting at position 1553 of SEQ ID NO: 1885263
uuguuuagagaguggaaua

SEQ ID NO: 2328795 - RNA, 19 nt, Artificial Sequence
  Description of Artificial Sequence: Synthetic oligonucleotide
  Antisense strand to SEQ ID NO: 2328794
uauuccacucucuaaacaa

SEQ ID NO: 2328796 - RNA, 19 nt, Artificial Sequence
  Description of Artificial Sequence: Synthetic oligonucleotide
  Sense strand starting at position 2037 of SEQ ID NO: 1885263
gagggaaccuccucguuaa

SEQ ID NO: 2328797 - RNA, 19 nt, Artificial Sequence
  Description of Artificial Sequence: Synthetic oligonucleotide
  Antisense strand to SEQ ID NO: 2328796
uuaacgaggagguucccuc

SEQ ID NO: 2328798 - RNA, 19 nt, Artificial Sequence
  Description of Artificial Sequence: Synthetic oligonucleotide
  Sense strand starting at position 2109 of SEQ ID NO: 1885263
gcguguggacguccugaga

SEQ ID NO: 2328799 - RNA, 19 nt, Artificial Sequence
  Description of Artificial Sequence: Synthetic oligonucleotide
  Antisense strand to SEQ ID NO: 2328798
ucucaggacguccacacgc

SEQ ID NO: 2328800 - RNA, 19 nt, Artificial Sequence
  Description of Artificial Sequence: Synthetic oligonucleotide
  Sense strand starting at position 2200 of SEQ ID NO: 1885263
cuaauugcccucuaaugag

SEQ ID NO: 2328801 - RNA, 19 nt, Artificial Sequence
  Description of Artificial Sequence: Synthetic oligonucleotide
  Antisense strand to SEQ ID NO: 2328800
cucauuagagggcaauuag

SEQ ID NO: 2328802 - RNA, 19 nt, Artificial Sequence
  Description of Artificial Sequence: Synthetic oligonucleotide
  Sense strand starting at position 2215 of SEQ ID NO: 1885263
ugagaaggcugcucccaaa

SEQ ID NO: 2328803 - RNA, 19 nt, Artificial Sequence
  Description of Artificial Sequence: Synthetic oligonucleotide
  Antisense strand to SEQ ID NO: 2328802
uuugggagcagccuucuca

SEQ ID NO: 2328804 - RNA, 19 nt, Artificial Sequence
  Description of Artificial Sequence: Synthetic oligonucleotide
  Sense strand starting at position 2280 of SEQ ID NO: 1885263
gcuuauuuauccucuaacg

SEQ ID NO: 2328805 - RNA, 19 nt, Artificial Sequence
  Description of Artificial Sequence: Synthetic oligonucleotide
  Antisense strand to SEQ ID NO: 2328804
cguuagaggauaaauaagc

SEQ ID NO: 2328806 - RNA, 19 nt, Artificial Sequence
  Description of Artificial Sequence: Synthetic oligonucleotide
  Sense strand starting at position 2331 of SEQ ID NO: 1885263
cauuaaaugugaccagagu

SEQ ID NO: 2328807 - RNA, 19 nt, Artificial Sequence
  Description of Artificial Sequence: Synthetic oligonucleotide
  Antisense strand to SEQ ID NO: 2328806
acucuggucacauuuaaug

SEQ ID NO: 2328808 - RNA, 19 nt, Artificial Sequence
  Description of Artificial Sequence: Synthetic oligonucleotide
  Sense strand starting at position 2374 of SEQ ID NO: 1885263
auugaauuguugccacuga

SEQ ID NO: 2328809 - RNA, 19 nt, Artificial Sequence
  Description of Artificial Sequence: Synthetic oligonucleotide
  Antisense strand to SEQ ID NO: 2328808
ucaguggcaacaauucaau

SEQ ID NO: 2328810 - RNA, 19 nt, Artificial Sequence
  Description of Artificial Sequence: Synthetic oligonucleotide
  Sense strand starting at position 2598 of SEQ ID NO: 1885263
ccacuuaaugaguagucga

SEQ ID NO: 2328811 - RNA, 19 nt, Artificial Sequence
  Description of Artificial Sequence: Synthetic oligonucleotide
  Antisense strand to SEQ ID NO: 2328810
ucgacuacucauuaagugg

SEQ ID NO: 2328812 - RNA, 19 nt, Artificial Sequence
  Description of Artificial Sequence: Synthetic oligonucleotide
  Sense strand starting at position 2601 of SEQ ID NO: 1885263
cuuaaugaguagucgauau

SEQ ID NO: 2328813 - RNA, 19 nt, Artificial Sequence
  Description of Artificial Sequence: Synthetic oligonucleotide
  Antisense strand to SEQ ID NO: 2328812
auaucgacuacucauuaag

SEQ ID NO: 2328814 - RNA, 19 nt, Artificial Sequence
  Description of Artificial Sequence: Synthetic oligonucleotide
  Sense strand starting at position 2603 of SEQ ID NO: 1885263
uaaugaguagucgauauac

SEQ ID NO: 2328815 - RNA, 19 nt, Artificial Sequence
  Description of Artificial Sequence: Synthetic oligonucleotide
  Antisense strand to SEQ ID NO: 2328814
guauaucgacuacucauua

SEQ ID NO: 2328816 - RNA, 19 nt, Artificial Sequence
  Description of Artificial Sequence: Synthetic oligonucleotide
  Sense strand starting at position 2605 of SEQ ID NO: 1885263
augaguagucgauauacuu

SEQ ID NO: 2328817 - RNA, 19 nt, Artificial Sequence
  Description of Artificial Sequence: Synthetic oligonucleotide
  Antisense strand to SEQ ID NO: 2328816
aaguauaucgacuacucau

SEQ ID NO: 2328818 - RNA, 19 nt, Artificial Sequence
  Description of Artificial Sequence: Synthetic oligonucleotide
  Sense strand starting at position 2853 of SEQ ID NO: 1885263
ucaagagucaacuguaggu

SEQ ID NO: 2328819 - RNA, 19 nt, Artificial Sequence
  Description of Artificial Sequence: Synthetic oligonucleotide
  Antisense strand to SEQ ID NO: 2328818
accuacaguugacucuuga

SEQ ID NO: 2328820 - RNA, 19 nt, Artificial Sequence
  Description of Artificial Sequence: Synthetic oligonucleotide
  Sense strand starting at position 3182 of SEQ ID NO: 1885263
ccuggacgguucucaaauu

SEQ ID NO: 2328821 - RNA, 19 nt, Artificial Sequence
  Description of Artificial Sequence: Synthetic oligonucleotide
  Antisense strand to SEQ ID NO: 2328820
aauuugagaaccguccagg

SEQ ID NO: 2328822 - RNA, 19 nt, Artificial Sequence
  Description of Artificial Sequence: Synthetic oligonucleotide
  Sense strand starting at position 3348 of SEQ ID NO: 1885263
ugaggaugugggugauaau

SEQ ID NO: 2328823 - RNA, 19 nt, Artificial Sequence
  Description of Artificial Sequence: Synthetic oligonucleotide
  Antisense strand to SEQ ID NO: 2328822
auuaucacccacauccuca

SEQ ID NO: 2328824 - RNA, 19 nt, Artificial Sequence
  Description of Artificial Sequence: Synthetic oligonucleotide
  Sense strand starting at position 3358 of SEQ ID NO: 1885263
ggugauaauguggagguua

SEQ ID NO: 2328825 - RNA, 19 nt, Artificial Sequence
  Description of Artificial Sequence: Synthetic oligonucleotide
  Antisense strand to SEQ ID NO: 2328824
uaaccuccacauuaucacc

SEQ ID NO: 2328826 - RNA, 19 nt, Artificial Sequence
  Description of Artificial Sequence: Synthetic oligonucleotide
  Sense strand starting at position 3360 of SEQ ID NO: 1885263
ugauaauguggagguuaaa

SEQ ID NO: 2328827 - RNA, 19 nt, Artificial Sequence
  Description of Artificial Sequence: Synthetic oligonucleotide
  Antisense strand to SEQ ID NO: 2328826
uuuaaccuccacauuauca

SEQ ID NO: 2328828 - RNA, 19 nt, Artificial Sequence
  Description of Artificial Sequence: Synthetic oligonucleotide
  Sense strand starting at position 3378 of SEQ ID NO: 1885263
auaauauggucacugauga

SEQ ID NO: 2328829 - RNA, 19 nt, Artificial Sequence
  Description of Artificial Sequence: Synthetic oligonucleotide
  Antisense strand to SEQ ID NO: 2328828
ucaucagugaccauauuau

SEQ ID NO: 2328830 - RNA, 19 nt, Artificial Sequence
  Description of Artificial Sequence: Synthetic oligonucleotide
  Sense strand starting at position 3486 of SEQ ID NO: 1885263
gguauucgggagcagauua

SEQ ID NO: 2328831 - RNA, 19 nt, Artificial Sequence
  Description of Artificial Sequence: Synthetic oligonucleotide
  Antisense strand to SEQ ID NO: 2328830
uaaucugcucccgaauacc

SEQ ID NO: 2328832 - RNA, 19 nt, Artificial Sequence
  Description of Artificial Sequence: Synthetic oligonucleotide
  Sense strand starting at position 3603 of SEQ ID NO: 1885263
uguggcuuaguacauuaua

SEQ ID NO: 2328833 - RNA, 19 nt, Artificial Sequence
  Description of Artificial Sequence: Synthetic oligonucleotide
  Antisense strand to SEQ ID NO: 2328832
uauaauguacuaagccaca

SEQ ID NO: 2328834 - RNA, 19 nt, Artificial Sequence
  Description of Artificial Sequence: Synthetic oligonucleotide
  Sense strand starting at position 3606 of SEQ ID NO: 1885263
ggcuuaguacauuauacag

SEQ ID NO: 2328835 - RNA, 19 nt, Artificial Sequence
  Description of Artificial Sequence: Synthetic oligonucleotide
  Antisense strand to SEQ ID NO: 2328834
cuguauaauguacuaagcc

SEQ ID NO: 2328836 - RNA, 19 nt, Artificial Sequence
  Description of Artificial Sequence: Synthetic oligonucleotide
  Sense strand starting at position 3652 of SEQ ID NO: 1885263
ggccuaccauuccuggauu

SEQ ID NO: 2328837 - RNA, 19 nt, Artificial Sequence
  Description of Artificial Sequence: Synthetic oligonucleotide
  Antisense strand to SEQ ID NO: 2328836
aauccaggaaugguaggcc

SEQ ID NO: 2328838 - RNA, 19 nt, Artificial Sequence
  Description of Artificial Sequence: Synthetic oligonucleotide
  Sense strand starting at position 3739 of SEQ ID NO: 1885263
aguuaacuccuagagccaa

SEQ ID NO: 2328839 - RNA, 19 nt, Artificial Sequence
  Description of Artificial Sequence: Synthetic oligonucleotide
  Antisense strand to SEQ ID NO: 2328838
uuggcucuaggaguuaacu

SEQ ID NO: 2328840 - RNA, 19 nt, Artificial Sequence
  Description of Artificial Sequence: Synthetic oligonucleotide
  Sense strand starting at position 9 of SEQ ID NO: 1885264
acacaacaguuuguagauu

SEQ ID NO: 2328841 - RNA, 19 nt, Artificial Sequence
  Description of Artificial Sequence: Synthetic oligonucleotide
  Antisense strand to SEQ ID NO: 2328840
aaucuacaaacuguugugu

SEQ ID NO: 2328842 - RNA, 19 nt, Artificial Sequence
  Description of Artificial Sequence: Synthetic oligonucleotide
  Sense strand starting at position 17 of SEQ ID NO: 1885264
guuuguagauucuugagga

SEQ ID NO: 2328843 - RNA, 19 nt, Artificial Sequence
  Description of Artificial Sequence: Synthetic oligonucleotide
  Antisense strand to SEQ ID NO: 2328842
uccucaagaaucuacaaac

SEQ ID NO: 2328844 - RNA, 19 nt, Artificial Sequence
  Description of Artificial Sequence: Synthetic oligonucleotide
  Sense strand starting at position 238 of SEQ ID NO: 1885264
cggacuuaaccacgucaca

SEQ ID NO: 2328845 - RNA, 19 nt, Artificial Sequence
  Description of Artificial Sequence: Synthetic oligonucleotide
  Antisense strand to SEQ ID NO: 2328844
ugugacgugguuaaguccg

SEQ ID NO: 2328846 - RNA, 19 nt, Artificial Sequence
  Description of Artificial Sequence: Synthetic oligonucleotide
  Sense strand starting at position 352 of SEQ ID NO: 1885264
uggcauaagaccuggcgaa

SEQ ID NO: 2328847 - RNA, 19 nt, Artificial Sequence
  Description of Artificial Sequence: Synthetic oligonucleotide
  Antisense strand to SEQ ID NO: 2328846
uucgccaggucuuaugcca

SEQ ID NO: 2328848 - RNA, 19 nt, Artificial Sequence
  Description of Artificial Sequence: Synthetic oligonucleotide
  Sense strand starting at position 398 of SEQ ID NO: 1885264
auugaaugacuguguguua

SEQ ID NO: 2328849 - RNA, 19 nt, Artificial Sequence
  Description of Artificial Sequence: Synthetic oligonucleotide
  Antisense strand to SEQ ID NO: 2328848
uaacacacagucauucaau

SEQ ID NO: 2328850 - RNA, 19 nt, Artificial Sequence
  Description of Artificial Sequence: Synthetic oligonucleotide
  Sense strand starting at position 399 of SEQ ID NO: 1885264
uugaaugacuguguguuau

SEQ ID NO: 2328851 - RNA, 19 nt, Artificial Sequence
  Description of Artificial Sequence: Synthetic oligonucleotide
  Antisense strand to SEQ ID NO: 2328850
auaacacacagucauucaa

SEQ ID NO: 2328852 - RNA, 19 nt, Artificial Sequence
  Description of Artificial Sequence: Synthetic oligonucleotide
  Sense strand starting at position 405 of SEQ ID NO: 1885264
gacuguguguuauuucuua

SEQ ID NO: 2328853 - RNA, 19 nt, Artificial Sequence
  Description of Artificial Sequence: Synthetic oligonucleotide
  Antisense strand to SEQ ID NO: 2328852
uaagaaauaacacacaguc

SEQ ID NO: 2328854 - RNA, 19 nt, Artificial Sequence
  Description of Artificial Sequence: Synthetic oligonucleotide
  Sense strand starting at position 534 of SEQ ID NO: 1885264
cucgaagaccugcaggauu

SEQ ID NO: 2328855 - RNA, 19 nt, Artificial Sequence
  Description of Artificial Sequence: Synthetic oligonucleotide
  Antisense strand to SEQ ID NO: 2328854
aauccugcaggucuucgag

SEQ ID NO: 2328856 - RNA, 19 nt, Artificial Sequence
  Description of Artificial Sequence: Synthetic oligonucleotide
  Sense strand starting at position 600 of SEQ ID NO: 1885264
ugacaauagagauggcuuu

SEQ ID NO: 2328857 - RNA, 19 nt, Artificial Sequence
  Description of Artificial Sequence: Synthetic oligonucleotide
  Antisense strand to SEQ ID NO: 2328856
aaagccaucucuauuguca

SEQ ID NO: 2328858 - RNA, 19 nt, Artificial Sequence
  Description of Artificial Sequence: Synthetic oligonucleotide
  Sense strand starting at position 626 of SEQ ID NO: 1885264
ggaagaauacuuugggcuc

SEQ ID NO: 2328859 - RNA, 19 nt, Artificial Sequence
  Description of Artificial Sequence: Synthetic oligonucleotide
  Antisense strand to SEQ ID NO: 2328858
gagcccaaaguauucuucc

SEQ ID NO: 2328860 - RNA, 19 nt, Artificial Sequence
  Description of Artificial Sequence: Synthetic oligonucleotide
  Sense strand starting at position 652 of SEQ ID NO: 1885264
cuccaugagcacuggguaa

SEQ ID NO: 2328861 - RNA, 19 nt, Artificial Sequence
  Description of Artificial Sequence: Synthetic oligonucleotide
  Antisense strand to SEQ ID NO: 2328860
uuacccagugcucauggag

SEQ ID NO: 2328862 - RNA, 19 nt, Artificial Sequence
  Description of Artificial Sequence: Synthetic oligonucleotide
  Sense strand starting at position 694 of SEQ ID NO: 1885264
ugcuauaauuugucugugu

SEQ ID NO: 2328863 - RNA, 19 nt, Artificial Sequence
  Description of Artificial Sequence: Synthetic oligonucleotide
  Antisense strand to SEQ ID NO: 2328862
acacagacaaauuauagca

SEQ ID NO: 2328864 - RNA, 19 nt, Artificial Sequence
  Description of Artificial Sequence: Synthetic oligonucleotide
  Sense strand starting at position 695 of SEQ ID NO: 1885264
gcuauaauuugucugugug

SEQ ID NO: 2328865 - RNA, 19 nt, Artificial Sequence
  Description of Artificial Sequence: Synthetic oligonucleotide
  Antisense strand to SEQ ID NO: 2328864
cacacagacaaauuauagc

SEQ ID NO: 2328866 - RNA, 19 nt, Artificial Sequence
  Description of Artificial Sequence: Synthetic oligonucleotide
  Sense strand starting at position 696 of SEQ ID NO: 1885264
cuauaauuugucugugugu

SEQ ID NO: 2328867 - RNA, 19 nt, Artificial Sequence
  Description of Artificial Sequence: Synthetic oligonucleotide
  Antisense strand to SEQ ID NO: 2328866
acacacagacaaauuauag

SEQ ID NO: 2328868 - RNA, 19 nt, Artificial Sequence
  Description of Artificial Sequence: Synthetic oligonucleotide
  Sense strand starting at position 697 of SEQ ID NO: 1885264
uauaauuugucuguguguu

SEQ ID NO: 2328869 - RNA, 19 nt, Artificial Sequence
  Description of Artificial Sequence: Synthetic oligonucleotide
  Antisense strand to SEQ ID NO: 2328868
aacacacagacaaauuaua

SEQ ID NO: 2328870 - RNA, 19 nt, Artificial Sequence
  Description of Artificial Sequence: Synthetic oligonucleotide
  Sense strand starting at position 698 of SEQ ID NO: 1885264
auaauuugucuguguguuc

SEQ ID NO: 2328871 - RNA, 19 nt, Artificial Sequence
  Description of Artificial Sequence: Synthetic oligonucleotide
  Antisense strand to SEQ ID NO: 2328870
gaacacacagacaaauuau

SEQ ID NO: 2328872 - RNA, 19 nt, Artificial Sequence
  Description of Artificial Sequence: Synthetic oligonucleotide
  Sense strand starting at position 701 of SEQ ID NO: 1885264
auuugucuguguguucaga

SEQ ID NO: 2328873 - RNA, 19 nt, Artificial Sequence
  Description of Artificial Sequence: Synthetic oligonucleotide
  Antisense strand to SEQ ID NO: 2328872
ucugaacacacagacaaau

SEQ ID NO: 2328874 - RNA, 19 nt, Artificial Sequence
  Description of Artificial Sequence: Synthetic oligonucleotide
  Sense strand starting at position 935 of SEQ ID NO: 1885264
cugagaggcguccauugua

SEQ ID NO: 2328875 - RNA, 19 nt, Artificial Sequence
  Description of Artificial Sequence: Synthetic oligonucleotide
  Antisense strand to SEQ ID NO: 2328874
uacaauggacgccucucag

SEQ ID NO: 2328876 - RNA, 19 nt, Artificial Sequence
  Description of Artificial Sequence: Synthetic oligonucleotide
  Sense strand starting at position 947 of SEQ ID NO: 1885264
cauuguaaacgacagcuua

SEQ ID NO: 2328877 - RNA, 19 nt, Artificial Sequence
  Description of Artificial Sequence: Synthetic oligonucleotide
  Antisense strand to SEQ ID NO: 2328876
uaagcugucguuuacaaug

SEQ ID NO: 2328878 - RNA, 19 nt, Artificial Sequence
  Description of Artificial Sequence: Synthetic oligonucleotide
  Sense strand starting at position 1319 of SEQ ID NO: 1885264
ugguuccaagccugaagaa

SEQ ID NO: 2328879 - RNA, 19 nt, Artificial Sequence
  Description of Artificial Sequence: Synthetic oligonucleotide
  Antisense strand to SEQ ID NO: 2328878
uucuucaggcuuggaacca

SEQ ID NO: 2328880 - RNA, 19 nt, Artificial Sequence
  Description of Artificial Sequence: Synthetic oligonucleotide
  Sense strand starting at position 1338 of SEQ ID NO: 1885264
cuugcaaucugauuaagau

SEQ ID NO: 2328881 - RNA, 19 nt, Artificial Sequence
  Description of Artificial Sequence: Synthetic oligonucleotide
  Antisense strand to SEQ ID NO: 2328880
aucuuaaucagauugcaag

SEQ ID NO: 2328882 - RNA, 19 nt, Artificial Sequence
  Description of Artificial Sequence: Synthetic oligonucleotide
  Sense strand starting at position 1339 of SEQ ID NO: 1885264
uugcaaucugauuaagauc

SEQ ID NO: 2328883 - RNA, 19 nt, Artificial Sequence
  Description of Artificial Sequence: Synthetic oligonucleotide
  Antisense strand to SEQ ID NO: 2328882
gaucuuaaucagauugcaa

SEQ ID NO: 2328884 - RNA, 19 nt, Artificial Sequence
  Description of Artificial Sequence: Synthetic oligonucleotide
  Sense strand starting at position 1350 of SEQ ID NO: 1885264
uuaagaucugaaugcauga

SEQ ID NO: 2328885 - RNA, 19 nt, Artificial Sequence
  Description of Artificial Sequence: Synthetic oligonucleotide
  Antisense strand to SEQ ID NO: 2328884
ucaugcauucagaucuuaa

SEQ ID NO: 2328886 - RNA, 19 nt, Artificial Sequence
  Description of Artificial Sequence: Synthetic oligonucleotide
  Sense strand starting at position 1438 of SEQ ID NO: 1885264
gcuuaugacagcguuaguu

SEQ ID NO: 2328887 - RNA, 19 nt, Artificial Sequence
  Description of Artificial Sequence: Synthetic oligonucleotide
  Antisense strand to SEQ ID NO: 2328886
aacuaacgcugucauaagc

SEQ ID NO: 2328888 - RNA, 19 nt, Artificial Sequence
  Description of Artificial Sequence: Synthetic oligonucleotide
  Sense strand starting at position 1448 of SEQ ID NO: 1885264
gcguuaguuguauuaguaa

SEQ ID NO: 2328889 - RNA, 19 nt, Artificial Sequence
  Description of Artificial Sequence: Synthetic oligonucleotide
  Antisense strand to SEQ ID NO: 2328888
uuacuaauacaacuaacgc

SEQ ID NO: 2328890 - RNA, 19 nt, Artificial Sequence
  Description of Artificial Sequence: Synthetic oligonucleotide
  Sense strand starting at position 1609 of SEQ ID NO: 1885264
aggucaugauuugaaauua

SEQ ID NO: 2328891 - RNA, 19 nt, Artificial Sequence
  Description of Artificial Sequence: Synthetic oligonucleotide
  Antisense strand to SEQ ID NO: 2328890
uaauuucaaaucaugaccu

SEQ ID NO: 2328892 - RNA, 19 nt, Artificial Sequence
  Description of Artificial Sequence: Synthetic oligonucleotide
  Sense strand starting at position 1619 of SEQ ID NO: 1885264
uugaaauuaccgugggaga

SEQ ID NO: 2328893 - RNA, 19 nt, Artificial Sequence
  Description of Artificial Sequence: Synthetic oligonucleotide
  Antisense strand to SEQ ID NO: 2328892
ucucccacgguaauuucaa

SEQ ID NO: 2328894 - RNA, 19 nt, Artificial Sequence
  Description of Artificial Sequence: Synthetic oligonucleotide
  Sense strand starting at position 1620 of SEQ ID NO: 1885264
ugaaauuaccgugggagaa

SEQ ID NO: 2328895 - RNA, 19 nt, Artificial Sequence
  Description of Artificial Sequence: Synthetic oligonucleotide
  Antisense strand to SEQ ID NO: 2328894
uucucccacgguaauuuca

SEQ ID NO: 2328896 - RNA, 19 nt, Artificial Sequence
  Description of Artificial Sequence: Synthetic oligonucleotide
  Sense strand starting at position 1677 of SEQ ID NO: 1885264
agcaaagcuuuguuuaaag

SEQ ID NO: 2328897 - RNA, 19 nt, Artificial Sequence
  Description of Artificial Sequence: Synthetic oligonucleotide
  Antisense strand to SEQ ID NO: 2328896
cuuuaaacaaagcuuugcu

SEQ ID NO: 2328898 - RNA, 19 nt, Artificial Sequence
  Description of Artificial Sequence: Synthetic oligonucleotide
  Sense strand starting at position 1688 of SEQ ID NO: 1885264
guuuaaagcuaaucacaga

SEQ ID NO: 2328899 - RNA, 19 nt, Artificial Sequence
  Description of Artificial Sequence: Synthetic oligonucleotide
  Antisense strand to SEQ ID NO: 2328898
ucugugauuagcuuuaaac

SEQ ID NO: 2328900 - RNA, 19 nt, Artificial Sequence
  Description of Artificial Sequence: Synthetic oligonucleotide
  Sense strand starting at position 1734 of SEQ ID NO: 1885264
ggauuuaucuuguaucaug

SEQ ID NO: 2328901 - RNA, 19 nt, Artificial Sequence
  Description of Artificial Sequence: Synthetic oligonucleotide
  Antisense strand to SEQ ID NO: 2328900
caugauacaagauaaaucc

SEQ ID NO: 2328902 - RNA, 19 nt, Artificial Sequence
  Description of Artificial Sequence: Synthetic oligonucleotide
  Sense strand starting at position 1759 of SEQ ID NO: 1885264
gagcauuugccucgccuau

SEQ ID NO: 2328903 - RNA, 19 nt, Artificial Sequence
  Description of Artificial Sequence: Synthetic oligonucleotide
  Antisense strand to SEQ ID NO: 2328902
auaggcgaggcaaaugcuc

SEQ ID NO: 2328904 - RNA, 19 nt, Artificial Sequence
  Description of Artificial Sequence: Synthetic oligonucleotide
  Sense strand starting at position 1763 of SEQ ID NO: 1885264
auuugccucgccuauuaua

SEQ ID NO: 2328905 - RNA, 19 nt, Artificial Sequence
  Description of Artificial Sequence: Synthetic oligonucleotide
  Antisense strand to SEQ ID NO: 2328904
uauaauaggcgaggcaaau

SEQ ID NO: 2328906 - RNA, 19 nt, Artificial Sequence
  Description of Artificial Sequence: Synthetic oligonucleotide
  Sense strand starting at position 1781 of SEQ ID NO: 1885264
aucuaauucugaguucugu

SEQ ID NO: 2328907 - RNA, 19 nt, Artificial Sequence
  Description of Artificial Sequence: Synthetic oligonucleotide
  Antisense strand to SEQ ID NO: 2328906
acagaacucagaauuagau

SEQ ID NO: 2328908 - RNA, 19 nt, Artificial Sequence
  Description of Artificial Sequence: Synthetic oligonucleotide
  Sense strand starting at position 1792 of SEQ ID NO: 1885264
aguucuguggcuuaaggua

SEQ ID NO: 2328909 - RNA, 19 nt, Artificial Sequence
  Description of Artificial Sequence: Synthetic oligonucleotide
  Antisense strand to SEQ ID NO: 2328908
uaccuuaagccacagaacu

SEQ ID NO: 2328910 - RNA, 19 nt, Artificial Sequence
  Description of Artificial Sequence: Synthetic oligonucleotide
  Sense strand starting at position 1811 of SEQ ID NO: 1885264
gcgucaagcauuuggaaug

SEQ ID NO: 2328911 - RNA, 19 nt, Artificial Sequence
  Description of Artificial Sequence: Synthetic oligonucleotide
  Antisense strand to SEQ ID NO: 2328910
cauuccaaaugcuugacgc

SEQ ID NO: 2328912 - RNA, 19 nt, Artificial Sequence
  Description of Artificial Sequence: Synthetic oligonucleotide
  Sense strand starting at position 2103 of SEQ ID NO: 1885264
gucuuuaccaacggagaca

SEQ ID NO: 2328913 - RNA, 19 nt, Artificial Sequence
  Description of Artificial Sequence: Synthetic oligonucleotide
  Antisense strand to SEQ ID NO: 2328912
ugucuccguugguaaagac

SEQ ID NO: 2328914 - RNA, 19 nt, Artificial Sequence
  Description of Artificial Sequence: Synthetic oligonucleotide
  Sense strand starting at position 2200 of SEQ ID NO: 1885264
gcuuccuuugugucuagca

SEQ ID NO: 2328915 - RNA, 19 nt, Artificial Sequence
  Description of Artificial Sequence: Synthetic oligonucleotide
  Antisense strand to SEQ ID NO: 2328914
ugcuagacacaaaggaagc

SEQ ID NO: 2328916 - RNA, 19 nt, Artificial Sequence
  Description of Artificial Sequence: Synthetic oligonucleotide
  Sense strand starting at position 2768 of SEQ ID NO: 1885264
cucgaauucugggccucaa

SEQ ID NO: 2328917 - RNA, 19 nt, Artificial Sequence
  Description of Artificial Sequence: Synthetic oligonucleotide
  Antisense strand to SEQ ID NO: 2328916
uugaggcccagaauucgag

SEQ ID NO: 2328918 - RNA, 19 nt, Artificial Sequence
  Description of Artificial Sequence: Synthetic oligonucleotide
  Sense strand starting at position 3062 of SEQ ID NO: 1885264
agauaauacugagagguga

SEQ ID NO: 2328919 - RNA, 19 nt, Artificial Sequence
  Description of Artificial Sequence: Synthetic oligonucleotide
  Antisense strand to SEQ ID NO: 2328918
ucaccucucaguauuaucu

SEQ ID NO: 2328920 - RNA, 19 nt, Artificial Sequence
  Description of Artificial Sequence: Synthetic oligonucleotide
  Sense strand starting at position 106 of SEQ ID NO: 1885265
ucuacagauuuggaaacau

SEQ ID NO: 2328921 - RNA, 19 nt, Artificial Sequence
  Description of Artificial Sequence: Synthetic oligonucleotide
  Antisense strand to SEQ ID NO: 2328920
auguuuccaaaucuguaga

SEQ ID NO: 2328922 - RNA, 19 nt, Artificial Sequence
  Description of Artificial Sequence: Synthetic oligonucleotide
  Sense strand starting at position 115 of SEQ ID NO: 1885265
uuggaaacaucacucgaua

SEQ ID NO: 2328923 - RNA, 19 nt, Artificial Sequence
  Description of Artificial Sequence: Synthetic oligonucleotide
  Antisense strand to SEQ ID NO: 2328922
uaucgagugauguuuccaa

SEQ ID NO: 2328924 - RNA, 19 nt, Artificial Sequence
  Description of Artificial Sequence: Synthetic oligonucleotide
  Sense strand starting at position 117 of SEQ ID NO: 1885265
ggaaacaucacucgauagu

SEQ ID NO: 2328925 - RNA, 19 nt, Artificial Sequence
  Description of Artificial Sequence: Synthetic oligonucleotide
  Antisense strand to SEQ ID NO: 2328924
acuaucgagugauguuucc

SEQ ID NO: 2328926 - RNA, 19 nt, Artificial Sequence
  Description of Artificial Sequence: Synthetic oligonucleotide
  Sense strand starting at position 130 of SEQ ID NO: 1885265
gauagugcccaugauauca

SEQ ID NO: 2328927 - RNA, 19 nt, Artificial Sequence
  Description of Artificial Sequence: Synthetic oligonucleotide
  Antisense strand to SEQ ID NO: 2328926
ugauaucaugggcacuauc

SEQ ID NO: 2328928 - RNA, 19 nt, Artificial Sequence
  Description of Artificial Sequence: Synthetic oligonucleotide
  Sense strand starting at position 146 of SEQ ID NO: 1885265
ucaugagaccuuuaggcca

SEQ ID NO: 2328929 - RNA, 19 nt, Artificial Sequence
  Description of Artificial Sequence: Synthetic oligonucleotide
  Antisense strand to SEQ ID NO: 2328928
uggccuaaaggucucauga

SEQ ID NO: 2328930 - RNA, 19 nt, Artificial Sequence
  Description of Artificial Sequence: Synthetic oligonucleotide
  Sense strand starting at position 151 of SEQ ID NO: 1885265
agaccuuuaggccaguuaa

SEQ ID NO: 2328931 - RNA, 19 nt, Artificial Sequence
  Description of Artificial Sequence: Synthetic oligonucleotide
  Antisense strand to SEQ ID NO: 2328930
uuaacuggccuaaaggucu

SEQ ID NO: 2328932 - RNA, 19 nt, Artificial Sequence
  Description of Artificial Sequence: Synthetic oligonucleotide
  Sense strand starting at position 202 of SEQ ID NO: 1885265
ucuaacuggccuuaguaga

SEQ ID NO: 2328933 - RNA, 19 nt, Artificial Sequence
  Description of Artificial Sequence: Synthetic oligonucleotide
  Antisense strand to SEQ ID NO: 2328932
ucuacuaaggccaguuaga

SEQ ID NO: 2328934 - RNA, 19 nt, Artificial Sequence
  Description of Artificial Sequence: Synthetic oligonucleotide
  Sense strand starting at position 207 of SEQ ID NO: 1885265
cuggccuuaguagauauua

SEQ ID NO: 2328935 - RNA, 19 nt, Artificial Sequence
  Description of Artificial Sequence: Synthetic oligonucleotide
  Antisense strand to SEQ ID NO: 2328934
uaauaucuacuaaggccag

SEQ ID NO: 2328936 - RNA, 19 nt, Artificial Sequence
  Description of Artificial Sequence: Synthetic oligonucleotide
  Sense strand starting at position 209 of SEQ ID NO: 1885265
ggccuuaguagauauuaag

SEQ ID NO: 2328937 - RNA, 19 nt, Artificial Sequence
  Description of Artificial Sequence: Synthetic oligonucleotide
  Antisense strand to SEQ ID NO: 2328936
cuuaauaucuacuaaggcc

SEQ ID NO: 2328938 - RNA, 19 nt, Artificial Sequence
  Description of Artificial Sequence: Synthetic oligonucleotide
  Sense strand starting at position 402 of SEQ ID NO: 1885265
caggcauuugugcagucau

SEQ ID NO: 2328939 - RNA, 19 nt, Artificial Sequence
  Description of Artificial Sequence: Synthetic oligonucleotide
  Antisense strand to SEQ ID NO: 2328938
augacugcacaaaugccug

SEQ ID NO: 2328940 - RNA, 19 nt, Artificial Sequence
  Description of Artificial Sequence: Synthetic oligonucleotide
  Sense strand starting at position 486 of SEQ ID NO: 1885265
uuuagaguucuuuaugcag

SEQ ID NO: 2328941 - RNA, 19 nt, Artificial Sequence
  Description of Artificial Sequence: Synthetic oligonucleotide
  Antisense strand to SEQ ID NO: 2328940
cugcauaaagaacucuaaa

SEQ ID NO: 2328942 - RNA, 19 nt, Artificial Sequence
  Description of Artificial Sequence: Synthetic oligonucleotide
  Sense strand starting at position 885 of SEQ ID NO: 1885265
uguagaugaaguuguacaa

SEQ ID NO: 2328943 - RNA, 19 nt, Artificial Sequence
  Description of Artificial Sequence: Synthetic oligonucleotide
  Antisense strand to SEQ ID NO: 2328942
uuguacaacuucaucuaca

SEQ ID NO: 2328944 - RNA, 19 nt, Artificial Sequence
  Description of Artificial Sequence: Synthetic oligonucleotide
  Sense strand starting at position 1077 of SEQ ID NO: 1885265
auuguagugcauccguauu

SEQ ID NO: 2328945 - RNA, 19 nt, Artificial Sequence
  Description of Artificial Sequence: Synthetic oligonucleotide
  Antisense strand to SEQ ID NO: 2328944
aauacggaugcacuacaau

SEQ ID NO: 2328946 - RNA, 19 nt, Artificial Sequence
  Description of Artificial Sequence: Synthetic oligonucleotide
  Sense strand starting at position 1197 of SEQ ID NO: 1885265
gcaaacugauuaccuaagu

SEQ ID NO: 2328947 - RNA, 19 nt, Artificial Sequence
  Description of Artificial Sequence: Synthetic oligonucleotide
  Antisense strand to SEQ ID NO: 2328946
acuuagguaaucaguuugc

SEQ ID NO: 2328948 - RNA, 19 nt, Artificial Sequence
  Description of Artificial Sequence: Synthetic oligonucleotide
  Sense strand starting at position 1335 of SEQ ID NO: 1885265
gccugagagaugcagacua

SEQ ID NO: 2328949 - RNA, 19 nt, Artificial Sequence
  Description of Artificial Sequence: Synthetic oligonucleotide
  Antisense strand to SEQ ID NO: 2328948
uagucugcaucucucaggc

SEQ ID NO: 2328950 - RNA, 19 nt, Artificial Sequence
  Description of Artificial Sequence: Synthetic oligonucleotide
  Sense strand starting at position 1566 of SEQ ID NO: 1885265
acucacaagucuguuauga

SEQ ID NO: 2328951 - RNA, 19 nt, Artificial Sequence
  Description of Artificial Sequence: Synthetic oligonucleotide
  Antisense strand to SEQ ID NO: 2328950
ucauaacagacuugugagu

SEQ ID NO: 2328952 - RNA, 19 nt, Artificial Sequence
  Description of Artificial Sequence: Synthetic oligonucleotide
  Sense strand starting at position 1574 of SEQ ID NO: 1885265
gucuguuaugaauauuagu

SEQ ID NO: 2328953 - RNA, 19 nt, Artificial Sequence
  Description of Artificial Sequence: Synthetic oligonucleotide
  Antisense strand to SEQ ID NO: 2328952
acuaauauucauaacagac

SEQ ID NO: 2328954 - RNA, 19 nt, Artificial Sequence
  Description of Artificial Sequence: Synthetic oligonucleotide
  Sense strand starting at position 1771 of SEQ ID NO: 1885265
aaaguauggcauggacaaa

SEQ ID NO: 2328955 - RNA, 19 nt, Artificial Sequence
  Description of Artificial Sequence: Synthetic oligonucleotide
  Antisense strand to SEQ ID NO: 2328954
uuuguccaugccauacuuu

SEQ ID NO: 2328956 - RNA, 19 nt, Artificial Sequence
  Description of Artificial Sequence: Synthetic oligonucleotide
  Sense strand starting at position 1871 of SEQ ID NO: 1885265
gcugcaaguuaccucauuu

SEQ ID NO: 2328957 - RNA, 19 nt, Artificial Sequence
  Description of Artificial Sequence: Synthetic oligonucleotide
  Antisense strand to SEQ ID NO: 2328956
aaaugagguaacuugcagc

SEQ ID NO: 2328958 - RNA, 19 nt, Artificial Sequence
  Description of Artificial Sequence: Synthetic oligonucleotide
  Sense strand starting at position 2020 of SEQ ID NO: 1885265
ucagaaccuugcucuggau

SEQ ID NO: 2328959 - RNA, 19 nt, Artificial Sequence
  Description of Artificial Sequence: Synthetic oligonucleotide
  Antisense strand to SEQ ID NO: 2328958
auccagagcaagguucuga

SEQ ID NO: 2328960 - RNA, 19 nt, Artificial Sequence
  Description of Artificial Sequence: Synthetic oligonucleotide
  Sense strand starting at position 2032 of SEQ ID NO: 1885265
ucuggauguucuccuugaa

SEQ ID NO: 2328961 - RNA, 19 nt, Artificial Sequence
  Description of Artificial Sequence: Synthetic oligonucleotide
  Antisense strand to SEQ ID NO: 2328960
uucaaggagaacauccaga

SEQ ID NO: 2328962 - RNA, 19 nt, Artificial Sequence
  Description of Artificial Sequence: Synthetic oligonucleotide
  Sense strand starting at position 2036 of SEQ ID NO: 1885265
gauguucuccuugaaagcu

SEQ ID NO: 2328963 - RNA, 19 nt, Artificial Sequence
  Description of Artificial Sequence: Synthetic oligonucleotide
  Antisense strand to SEQ ID NO: 2328962
agcuuucaaggagaacauc

SEQ ID NO: 2328964 - RNA, 19 nt, Artificial Sequence
  Description of Artificial Sequence: Synthetic oligonucleotide
  Sense strand starting at position 2048 of SEQ ID NO: 1885265
gaaagcucuuguccaugaa

SEQ ID NO: 2328965 - RNA, 19 nt, Artificial Sequence
  Description of Artificial Sequence: Synthetic oligonucleotide
  Antisense strand to SEQ ID NO: 2328964
uucauggacaagagcuuuc

SEQ ID NO: 2328966 - RNA, 19 nt, Artificial Sequence
  Description of Artificial Sequence: Synthetic oligonucleotide
  Sense strand starting at position 2052 of SEQ ID NO: 1885265
gcucuuguccaugaacauu

SEQ ID NO: 2328967 - RNA, 19 nt, Artificial Sequence
  Description of Artificial Sequence: Synthetic oligonucleotide
  Antisense strand to SEQ ID NO: 2328966
aauguucauggacaagagc

SEQ ID NO: 2328968 - RNA, 19 nt, Artificial Sequence
  Description of Artificial Sequence: Synthetic oligonucleotide
  Sense strand starting at position 2101 of SEQ ID NO: 1885265
ucaucacucugagucaaag

SEQ ID NO: 2328969 - RNA, 19 nt, Artificial Sequence
  Description of Artificial Sequence: Synthetic oligonucleotide
  Antisense strand to SEQ ID NO: 2328968
cuuugacucagagugauga

SEQ ID NO: 2328970 - RNA, 19 nt, Artificial Sequence
  Description of Artificial Sequence: Synthetic oligonucleotide
  Sense strand starting at position 2179 of SEQ ID NO: 1885265
guaagcuuccagggaagaa

SEQ ID NO: 2328971 - RNA, 19 nt, Artificial Sequence
  Description of Artificial Sequence: Synthetic oligonucleotide
  Antisense strand to SEQ ID NO: 2328970
uucuucccuggaagcuuac

SEQ ID NO: 2328972 - RNA, 19 nt, Artificial Sequence
  Description of Artificial Sequence: Synthetic oligonucleotide
  Sense strand starting at position 2411 of SEQ ID NO: 1885265
ccacuuacuggcuauguaa

SEQ ID NO: 2328973 - RNA, 19 nt, Artificial Sequence
  Description of Artificial Sequence: Synthetic oligonucleotide
  Antisense strand to SEQ ID NO: 2328972
uuacauagccaguaagugg

SEQ ID NO: 2328974 - RNA, 19 nt, Artificial Sequence
  Description of Artificial Sequence: Synthetic oligonucleotide
  Sense strand starting at position 2525 of SEQ ID NO: 1885265
guaacauagguagaauguu

SEQ ID NO: 2328975 - RNA, 19 nt, Artificial Sequence
  Description of Artificial Sequence: Synthetic oligonucleotide
  Antisense strand to SEQ ID NO: 2328974
aacauucuaccuauguuac

SEQ ID NO: 2328976 - RNA, 19 nt, Artificial Sequence
  Description of Artificial Sequence: Synthetic oligonucleotide
  Sense strand starting at position 2619 of SEQ ID NO: 1885265
agcauuauaguuuagaugu

SEQ ID NO: 2328977 - RNA, 19 nt, Artificial Sequence
  Description of Artificial Sequence: Synthetic oligonucleotide
  Antisense strand to SEQ ID NO: 2328976
acaucuaaacuauaaugcu

SEQ ID NO: 2328978 - RNA, 19 nt, Artificial Sequence
  Description of Artificial Sequence: Synthetic oligonucleotide
  Sense strand starting at position 2627 of SEQ ID NO: 1885265
aguuuagauguccauauug

SEQ ID NO: 2328979 - RNA, 19 nt, Artificial Sequence
  Description of Artificial Sequence: Synthetic oligonucleotide
  Antisense strand to SEQ ID NO: 2328978
caauauggacaucuaaacu

SEQ ID NO: 2328980 - RNA, 19 nt, Artificial Sequence
  Description of Artificial Sequence: Synthetic oligonucleotide
  Sense strand starting at position 2727 of SEQ ID NO: 1885265
auuugaaauuuauggccaa

SEQ ID NO: 2328981 - RNA, 19 nt, Artificial Sequence
  Description of Artificial Sequence: Synthetic oligonucleotide
  Antisense strand to SEQ ID NO: 2328980
uuggccauaaauuucaaau

SEQ ID NO: 2328982 - RNA, 19 nt, Artificial Sequence
  Description of Artificial Sequence: Synthetic oligonucleotide
  Sense strand starting at position 2744 of SEQ ID NO: 1885265
aacaucuagccugagugau

SEQ ID NO: 2328983 - RNA, 19 nt, Artificial Sequence
  Description of Artificial Sequence: Synthetic oligonucleotide
  Antisense strand to SEQ ID NO: 2328982
aucacucaggcuagauguu

SEQ ID NO: 2328984 - RNA, 19 nt, Artificial Sequence
  Description of Artificial Sequence: Synthetic oligonucleotide
  Sense strand starting at position 2791 of SEQ ID NO: 1885265
ccucuuaaugcugaagauu

SEQ ID NO: 2328985 - RNA, 19 nt, Artificial Sequence
  Description of Artificial Sequence: Synthetic oligonucleotide
  Antisense strand to SEQ ID NO: 2328984
aaucuucagcauuaagagg

SEQ ID NO: 2328986 - RNA, 19 nt, Artificial Sequence
  Description of Artificial Sequence: Synthetic oligonucleotide
  Sense strand starting at position 2797 of SEQ ID NO: 1885265
aaugcugaagauugaguau

SEQ ID NO: 2328987 - RNA, 19 nt, Artificial Sequence
  Description of Artificial Sequence: Synthetic oligonucleotide
  Antisense strand to SEQ ID NO: 2328986
auacucaaucuucagcauu

SEQ ID NO: 2328988 - RNA, 19 nt, Artificial Sequence
  Description of Artificial Sequence: Synthetic oligonucleotide
  Sense strand starting at position 2871 of SEQ ID NO: 1885265
cuagauacuguugaaucga

SEQ ID NO: 2328989 - RNA, 19 nt, Artificial Sequence
  Description of Artificial Sequence: Synthetic oligonucleotide
  Antisense strand to SEQ ID NO: 2328988
ucgauucaacaguaucuag

SEQ ID NO: 2328990 - RNA, 19 nt, Artificial Sequence
  Description of Artificial Sequence: Synthetic oligonucleotide
  Sense strand starting at position 2905 of SEQ ID NO: 1885265
guuauuauggcaggaagag

SEQ ID NO: 2328991 - RNA, 19 nt, Artificial Sequence
  Description of Artificial Sequence: Synthetic oligonucleotide
  Antisense strand to SEQ ID NO: 2328990
cucuuccugccauaauaac

SEQ ID NO: 2328992 - RNA, 19 nt, Artificial Sequence
  Description of Artificial Sequence: Synthetic oligonucleotide
  Sense strand starting at position 3126 of SEQ ID NO: 1885265
ggcaauuauccagaucacu

SEQ ID NO: 2328993 - RNA, 19 nt, Artificial Sequence
  Description of Artificial Sequence: Synthetic oligonucleotide
  Antisense strand to SEQ ID NO: 2328992
agugaucuggauaauugcc

SEQ ID NO: 2328994 - RNA, 19 nt, Artificial Sequence
  Description of Artificial Sequence: Synthetic oligonucleotide
  Sense strand starting at position 3235 of SEQ ID NO: 1885265
guguaaugccaccauaaau

SEQ ID NO: 2328995 - RNA, 19 nt, Artificial Sequence
  Description of Artificial Sequence: Synthetic oligonucleotide
  Antisense strand to SEQ ID NO: 2328994
auuuaugguggcauuacac

SEQ ID NO: 2328996 - RNA, 19 nt, Artificial Sequence
  Description of Artificial Sequence: Synthetic oligonucleotide
  Sense strand starting at position 3537 of SEQ ID NO: 1885265
uaaguugguugacucaaga

SEQ ID NO: 2328997 - RNA, 19 nt, Artificial Sequence
  Description of Artificial Sequence: Synthetic oligonucleotide
  Antisense strand to SEQ ID NO: 2328996
ucuugagucaaccaacuua

SEQ ID NO: 2328998 - RNA, 19 nt, Artificial Sequence
  Description of Artificial Sequence: Synthetic oligonucleotide
  Sense strand starting at position 3954 of SEQ ID NO: 1885265
aaaguaaagugcuuugaag

SEQ ID NO: 2328999 - RNA, 19 nt, Artificial Sequence
  Description of Artificial Sequence: Synthetic oligonucleotide
  Antisense strand to SEQ ID NO: 2328998
cuucaaagcacuuuacuuu

SEQ ID NO: 2329000 - RNA, 19 nt, Artificial Sequence
  Description of Artificial Sequence: Synthetic oligonucleotide
  Sense strand starting at position 32 of SEQ ID NO: 1885266
acuguuacucuuuguuuau

SEQ ID NO: 2329001 - RNA, 19 nt, Artificial Sequence
  Description of Artificial Sequence: Synthetic oligonucleotide
  Antisense strand to SEQ ID NO: 2329000
auaaacaaagaguaacagu

SEQ ID NO: 2329002 - RNA, 19 nt, Artificial Sequence
  Description of Artificial Sequence: Synthetic oligonucleotide
  Sense strand starting at position 75 of SEQ ID NO: 1885266
ugcaucagacccugugaau

SEQ ID NO: 2329003 - RNA, 19 nt, Artificial Sequence
  Description of Artificial Sequence: Synthetic oligonucleotide
  Antisense strand to SEQ ID NO: 2329002
auucacagggucugaugca

SEQ ID NO: 2329004 - RNA, 19 nt, Artificial Sequence
  Description of Artificial Sequence: Synthetic oligonucleotide
  Sense strand starting at position 101 of SEQ ID NO: 1885266
gaaaguuucgggcaucaca

SEQ ID NO: 2329005 - RNA, 19 nt, Artificial Sequence
  Description of Artificial Sequence: Synthetic oligonucleotide
  Antisense strand to SEQ ID NO: 2329004
ugugaugcccgaaacuuuc

SEQ ID NO: 2329006 - RNA, 19 nt, Artificial Sequence
  Description of Artificial Sequence: Synthetic oligonucleotide
  Sense strand starting at position 199 of SEQ ID NO: 1885266
cugccaguuugaucucuaa

SEQ ID NO: 2329007 - RNA, 19 nt, Artificial Sequence
  Description of Artificial Sequence: Synthetic oligonucleotide
  Antisense strand to SEQ ID NO: 2329006
uuagagaucaaacuggcag

SEQ ID NO: 2329008 - RNA, 19 nt, Artificial Sequence
  Description of Artificial Sequence: Synthetic oligonucleotide
  Sense strand starting at position 300 of SEQ ID NO: 1885266
acagcagauuugcacugau

SEQ ID NO: 2329009 - RNA, 19 nt, Artificial Sequence
  Description of Artificial Sequence: Synthetic oligonucleotide
  Antisense strand to SEQ ID NO: 2329008
aucagugcaaaucugcugu

SEQ ID NO: 2329010 - RNA, 19 nt, Artificial Sequence
  Description of Artificial Sequence: Synthetic oligonucleotide
  Sense strand starting at position 445 of SEQ ID NO: 1885266
gcauaaugccgccaaauua

SEQ ID NO: 2329011 - RNA, 19 nt, Artificial Sequence
  Description of Artificial Sequence: Synthetic oligonucleotide
  Antisense strand to SEQ ID NO: 2329010
uaauuuggcggcauuaugc

SEQ ID NO: 2329012 - RNA, 19 nt, Artificial Sequence
  Description of Artificial Sequence: Synthetic oligonucleotide
  Sense strand starting at position 774 of SEQ ID NO: 1885266
acuacuguggcucaauauu

SEQ ID NO: 2329013 - RNA, 19 nt, Artificial Sequence
  Description of Artificial Sequence: Synthetic oligonucleotide
  Antisense strand to SEQ ID NO: 2329012
aauauugagccacaguagu

SEQ ID NO: 2329014 - RNA, 19 nt, Artificial Sequence
  Description of Artificial Sequence: Synthetic oligonucleotide
  Sense strand starting at position 882 of SEQ ID NO: 1885266
uuuagaugaggccaucuua

SEQ ID NO: 2329015 - RNA, 19 nt, Artificial Sequence
  Description of Artificial Sequence: Synthetic oligonucleotide
  Antisense strand to SEQ ID NO: 2329014
uaagauggccucaucuaaa

SEQ ID NO: 2329016 - RNA, 19 nt, Artificial Sequence
  Description of Artificial Sequence: Synthetic oligonucleotide
  Sense strand starting at position 1030 of SEQ ID NO: 1885266
uccaccuguucugcuaaga

SEQ ID NO: 2329017 - RNA, 19 nt, Artificial Sequence
  Description of Artificial Sequence: Synthetic oligonucleotide
  Antisense strand to SEQ ID NO: 2329016
ucuuagcagaacaggugga

SEQ ID NO: 2329018 - RNA, 19 nt, Artificial Sequence
  Description of Artificial Sequence: Synthetic oligonucleotide
  Sense strand starting at position 1199 of SEQ ID NO: 1885266
gacagaggcaguuguaacu

SEQ ID NO: 2329019 - RNA, 19 nt, Artificial Sequence
  Description of Artificial Sequence: Synthetic oligonucleotide
  Antisense strand to SEQ ID NO: 2329018
aguuacaacugccucuguc

SEQ ID NO: 2329020 - RNA, 19 nt, Artificial Sequence
  Description of Artificial Sequence: Synthetic oligonucleotide
  Sense strand starting at position 1226 of SEQ ID NO: 1885266
uuccauguauauucuaguu

SEQ ID NO: 2329021 - RNA, 19 nt, Artificial Sequence
  Description of Artificial Sequence: Synthetic oligonucleotide
  Antisense strand to SEQ ID NO: 2329020
aacuagaauauacauggaa

SEQ ID NO: 2329022 - RNA, 19 nt, Artificial Sequence
  Description of Artificial Sequence: Synthetic oligonucleotide
  Sense strand starting at position 1266 of SEQ ID NO: 1885266
agagauuccuuugcaaaca

SEQ ID NO: 2329023 - RNA, 19 nt, Artificial Sequence
  Description of Artificial Sequence: Synthetic oligonucleotide
  Antisense strand to SEQ ID NO: 2329022
uguuugcaaaggaaucucu

SEQ ID NO: 2329024 - RNA, 19 nt, Artificial Sequence
  Description of Artificial Sequence: Synthetic oligonucleotide
  Sense strand starting at position 1468 of SEQ ID NO: 1885266
aauagauugugauugcaca

SEQ ID NO: 2329025 - RNA, 19 nt, Artificial Sequence
  Description of Artificial Sequence: Synthetic oligonucleotide
  Antisense strand to SEQ ID NO: 2329024
ugugcaaucacaaucuauu

SEQ ID NO: 2329026 - RNA, 19 nt, Artificial Sequence
  Description of Artificial Sequence: Synthetic oligonucleotide
  Sense strand starting at position 1469 of SEQ ID NO: 1885266
auagauugugauugcacaa

SEQ ID NO: 2329027 - RNA, 19 nt, Artificial Sequence
  Description of Artificial Sequence: Synthetic oligonucleotide
  Antisense strand to SEQ ID NO: 2329026
uugugcaaucacaaucuau

SEQ ID NO: 2329028 - RNA, 19 nt, Artificial Sequence
  Description of Artificial Sequence: Synthetic oligonucleotide
  Sense strand starting at position 1572 of SEQ ID NO: 1885266
uggagucacucccucuuua

SEQ ID NO: 2329029 - RNA, 19 nt, Artificial Sequence
  Description of Artificial Sequence: Synthetic oligonucleotide
  Antisense strand to SEQ ID NO: 2329028
uaaagagggagugacucca

SEQ ID NO: 2329030 - RNA, 19 nt, Artificial Sequence
  Description of Artificial Sequence: Synthetic oligonucleotide
  Sense strand starting at position 1882 of SEQ ID NO: 1885266
ccuuaaguuagacgaaaug

SEQ ID NO: 2329031 - RNA, 19 nt, Artificial Sequence
  Description of Artificial Sequence: Synthetic oligonucleotide
  Antisense strand to SEQ ID NO: 2329030
cauuucgucuaacuuaagg

SEQ ID NO: 2329032 - RNA, 19 nt, Artificial Sequence
  Description of Artificial Sequence: Synthetic oligonucleotide
  Sense strand starting at position 1888 of SEQ ID NO: 1885266
guuagacgaaauggcuaua

SEQ ID NO: 2329033 - RNA, 19 nt, Artificial Sequence
  Description of Artificial Sequence: Synthetic oligonucleotide
  Antisense strand to SEQ ID NO: 2329032
uauagccauuucgucuaac

SEQ ID NO: 2329034 - RNA, 19 nt, Artificial Sequence
  Description of Artificial Sequence: Synthetic oligonucleotide
  Sense strand starting at position 1891 of SEQ ID NO: 1885266
agacgaaauggcuauagca

SEQ ID NO: 2329035 - RNA, 19 nt, Artificial Sequence
  Description of Artificial Sequence: Synthetic oligonucleotide
  Antisense strand to SEQ ID NO: 2329034
ugcuauagccauuucgucu

SEQ ID NO: 2329036 - RNA, 19 nt, Artificial Sequence
  Description of Artificial Sequence: Synthetic oligonucleotide
  Sense strand starting at position 1893 of SEQ ID NO: 1885266
acgaaauggcuauagcaga

SEQ ID NO: 2329037 - RNA, 19 nt, Artificial Sequence
  Description of Artificial Sequence: Synthetic oligonucleotide
  Antisense strand to SEQ ID NO: 2329036
ucugcuauagccauuucgu

SEQ ID NO: 2329038 - RNA, 19 nt, Artificial Sequence
  Description of Artificial Sequence: Synthetic oligonucleotide
  Sense strand starting at position 2038 of SEQ ID NO: 1885266
cagagaaugcaguguggua

SEQ ID NO: 2329039 - RNA, 19 nt, Artificial Sequence
  Description of Artificial Sequence: Synthetic oligonucleotide
  Antisense strand to SEQ ID NO: 2329038
uaccacacugcauucucug

SEQ ID NO: 2329040 - RNA, 19 nt, Artificial Sequence
  Description of Artificial Sequence: Synthetic oligonucleotide
  Sense strand starting at position 2040 of SEQ ID NO: 1885266
gagaaugcagugugguaua

SEQ ID NO: 2329041 - RNA, 19 nt, Artificial Sequence
  Description of Artificial Sequence: Synthetic oligonucleotide
  Antisense strand to SEQ ID NO: 2329040
uauaccacacugcauucuc

SEQ ID NO: 2329042 - RNA, 19 nt, Artificial Sequence
  Description of Artificial Sequence: Synthetic oligonucleotide
  Sense strand starting at position 2195 of SEQ ID NO: 1885266
ccaguucugccugcgcauu

SEQ ID NO: 2329043 - RNA, 19 nt, Artificial Sequence
  Description of Artificial Sequence: Synthetic oligonucleotide
  Antisense strand to SEQ ID NO: 2329042
aaugcgcaggcagaacugg

SEQ ID NO: 2329044 - RNA, 19 nt, Artificial Sequence
  Description of Artificial Sequence: Synthetic oligonucleotide
  Sense strand starting at position 2221 of SEQ ID NO: 1885266
aggacacacuuauaaauga

SEQ ID NO: 2329045 - RNA, 19 nt, Artificial Sequence
  Description of Artificial Sequence: Synthetic oligonucleotide
  Antisense strand to SEQ ID NO: 2329044
ucauuuauaaguguguccu

SEQ ID NO: 2329046 - RNA, 19 nt, Artificial Sequence
  Description of Artificial Sequence: Synthetic oligonucleotide
  Sense strand starting at position 2267 of SEQ ID NO: 1885266
guguucucaguguaaacaa

SEQ ID NO: 2329047 - RNA, 19 nt, Artificial Sequence
  Description of Artificial Sequence: Synthetic oligonucleotide
  Antisense strand to SEQ ID NO: 2329046
uuguuuacacugagaacac

SEQ ID NO: 2329048 - RNA, 19 nt, Artificial Sequence
  Description of Artificial Sequence: Synthetic oligonucleotide
  Sense strand starting at position 2469 of SEQ ID NO: 1885266
gaagguucuccugggaagc

SEQ ID NO: 2329049 - RNA, 19 nt, Artificial Sequence
  Description of Artificial Sequence: Synthetic oligonucleotide
  Antisense strand to SEQ ID NO: 2329048
gcuucccaggagaaccuuc

SEQ ID NO: 2329050 - RNA, 19 nt, Artificial Sequence
  Description of Artificial Sequence: Synthetic oligonucleotide
  Sense strand starting at position 2470 of SEQ ID NO: 1885266
aagguucuccugggaagca

SEQ ID NO: 2329051 - RNA, 19 nt, Artificial Sequence
  Description of Artificial Sequence: Synthetic oligonucleotide
  Antisense strand to SEQ ID NO: 2329050
ugcuucccaggagaaccuu

SEQ ID NO: 2329052 - RNA, 19 nt, Artificial Sequence
  Description of Artificial Sequence: Synthetic oligonucleotide
  Sense strand starting at position 2483 of SEQ ID NO: 1885266
gaagcacugccuggaacau

SEQ ID NO: 2329053 - RNA, 19 nt, Artificial Sequence
  Description of Artificial Sequence: Synthetic oligonucleotide
  Antisense strand to SEQ ID NO: 2329052
auguuccaggcagugcuuc

SEQ ID NO: 2329054 - RNA, 19 nt, Artificial Sequence
  Description of Artificial Sequence: Synthetic oligonucleotide
  Sense strand starting at position 2698 of SEQ ID NO: 1885266
ggaggaaguucuguuguua

SEQ ID NO: 2329055 - RNA, 19 nt, Artificial Sequence
  Description of Artificial Sequence: Synthetic oligonucleotide
  Antisense strand to SEQ ID NO: 2329054
uaacaacagaacuuccucc

SEQ ID NO: 2329056 - RNA, 19 nt, Artificial Sequence
  Description of Artificial Sequence: Synthetic oligonucleotide
  Sense strand starting at position 2827 of SEQ ID NO: 1885266
ugcuuucugguuuaaucuu

SEQ ID NO: 2329057 - RNA, 19 nt, Artificial Sequence
  Description of Artificial Sequence: Synthetic oligonucleotide
  Antisense strand to SEQ ID NO: 2329056
aagauuaaaccagaaagca

SEQ ID NO: 2329058 - RNA, 19 nt, Artificial Sequence
  Description of Artificial Sequence: Synthetic oligonucleotide
  Sense strand starting at position 3028 of SEQ ID NO: 1885266
cuggcuaaguauuucuuua

SEQ ID NO: 2329059 - RNA, 19 nt, Artificial Sequence
  Description of Artificial Sequence: Synthetic oligonucleotide
  Antisense strand to SEQ ID NO: 2329058
uaaagaaauacuuagccag

SEQ ID NO: 2329060 - RNA, 19 nt, Artificial Sequence
  Description of Artificial Sequence: Synthetic oligonucleotide
  Sense strand starting at position 3030 of SEQ ID NO: 1885266
ggcuaaguauuucuuuagu

SEQ ID NO: 2329061 - RNA, 19 nt, Artificial Sequence
  Description of Artificial Sequence: Synthetic oligonucleotide
  Antisense strand to SEQ ID NO: 2329060
acuaaagaaauacuuagcc

SEQ ID NO: 2329062 - RNA, 19 nt, Artificial Sequence
  Description of Artificial Sequence: Synthetic oligonucleotide
  Sense strand starting at position 3194 of SEQ ID NO: 1885266
gcagaaacaguuuaguucu

SEQ ID NO: 2329063 - RNA, 19 nt, Artificial Sequence
  Description of Artificial Sequence: Synthetic oligonucleotide
  Antisense strand to SEQ ID NO: 2329062
agaacuaaacuguuucugc

SEQ ID NO: 2329064 - RNA, 19 nt, Artificial Sequence
  Description of Artificial Sequence: Synthetic oligonucleotide
  Sense strand starting at position 3197 of SEQ ID NO: 1885266
gaaacaguuuaguucugca

SEQ ID NO: 2329065 - RNA, 19 nt, Artificial Sequence
  Description of Artificial Sequence: Synthetic oligonucleotide
  Antisense strand to SEQ ID NO: 2329064
ugcagaacuaaacuguuuc

SEQ ID NO: 2329066 - RNA, 19 nt, Artificial Sequence
  Description of Artificial Sequence: Synthetic oligonucleotide
  Sense strand starting at position 3202 of SEQ ID NO: 1885266
aguuuaguucugcaacucu

SEQ ID NO: 2329067 - RNA, 19 nt, Artificial Sequence
  Description of Artificial Sequence: Synthetic oligonucleotide
  Antisense strand to SEQ ID NO: 2329066
agaguugcagaacuaaacu

SEQ ID NO: 2329068 - RNA, 19 nt, Artificial Sequence
  Description of Artificial Sequence: Synthetic oligonucleotide
  Sense strand starting at position 3362 of SEQ ID NO: 1885266
aacuguuugccugcuuagu

SEQ ID NO: 2329069 - RNA, 19 nt, Artificial Sequence
  Description of Artificial Sequence: Synthetic oligonucleotide
  Antisense strand to SEQ ID NO: 2329068
acuaagcaggcaaacaguu

SEQ ID NO: 2329070 - RNA, 19 nt, Artificial Sequence
  Description of Artificial Sequence: Synthetic oligonucleotide
  Sense strand starting at position 3372 of SEQ ID NO: 1885266
cugcuuagucaggaaauau

SEQ ID NO: 2329071 - RNA, 19 nt, Artificial Sequence
  Description of Artificial Sequence: Synthetic oligonucleotide
  Antisense strand to SEQ ID NO: 2329070
auauuuccugacuaagcag

SEQ ID NO: 2329072 - RNA, 19 nt, Artificial Sequence
  Description of Artificial Sequence: Synthetic oligonucleotide
  Sense strand starting at position 3698 of SEQ ID NO: 1885266
cuguguuuacuuuaucuag

SEQ ID NO: 2329073 - RNA, 19 nt, Artificial Sequence
  Description of Artificial Sequence: Synthetic oligonucleotide
  Antisense strand to SEQ ID NO: 2329072
cuagauaaaguaaacacag

SEQ ID NO: 2329074 - RNA, 19 nt, Artificial Sequence
  Description of Artificial Sequence: Synthetic oligonucleotide
  Sense strand starting at position 3700 of SEQ ID NO: 1885266
guguuuacuuuaucuagac

SEQ ID NO: 2329075 - RNA, 19 nt, Artificial Sequence
  Description of Artificial Sequence: Synthetic oligonucleotide
  Antisense strand to SEQ ID NO: 2329074
gucuagauaaaguaaacac

SEQ ID NO: 2329076 - RNA, 19 nt, Artificial Sequence
  Description of Artificial Sequence: Synthetic oligonucleotide
  Sense strand starting at position 3701 of SEQ ID NO: 1885266
uguuuacuuuaucuagaca

SEQ ID NO: 2329077 - RNA, 19 nt, Artificial Sequence
  Description of Artificial Sequence: Synthetic oligonucleotide
  Antisense strand to SEQ ID NO: 2329076
ugucuagauaaaguaaaca

SEQ ID NO: 2329078 - RNA, 19 nt, Artificial Sequence
  Description of Artificial Sequence: Synthetic oligonucleotide
  Sense strand starting at position 3909 of SEQ ID NO: 1885266
gugcgacugaguggagaau

SEQ ID NO: 2329079 - RNA, 19 nt, Artificial Sequence
  Description of Artificial Sequence: Synthetic oligonucleotide
  Antisense strand to SEQ ID NO: 2329078
auucuccacucagucgcac

SEQ ID NO: 2329080 - RNA, 19 nt, Artificial Sequence
  Description of Artificial Sequence: Synthetic oligonucleotide
  Sense strand starting at position 81 of SEQ ID NO: 1885267
aggaaauuaugucccuaag

SEQ ID NO: 2329081 - RNA, 19 nt, Artificial Sequence
  Description of Artificial Sequence: Synthetic oligonucleotide
  Antisense strand to SEQ ID NO: 2329080
cuuagggacauaauuuccu

SEQ ID NO: 2329082 - RNA, 19 nt, Artificial Sequence
  Description of Artificial Sequence: Synthetic oligonucleotide
  Sense strand starting at position 117 of SEQ ID NO: 1885267
augugacuuucccucccau

SEQ ID NO: 2329083 - RNA, 19 nt, Artificial Sequence
  Description of Artificial Sequence: Synthetic oligonucleotide
  Antisense strand to SEQ ID NO: 2329082
augggagggaaagucacau

SEQ ID NO: 2329084 - RNA, 19 nt, Artificial Sequence
  Description of Artificial Sequence: Synthetic oligonucleotide
  Sense strand starting at position 248 of SEQ ID NO: 1885267
cugugucauauguaagagu

SEQ ID NO: 2329085 - RNA, 19 nt, Artificial Sequence
  Description of Artificial Sequence: Synthetic oligonucleotide
  Antisense strand to SEQ ID NO: 2329084
acucuuacauaugacacag

SEQ ID NO: 2329086 - RNA, 19 nt, Artificial Sequence
  Description of Artificial Sequence: Synthetic oligonucleotide
  Sense strand starting at position 309 of SEQ ID NO: 1885267
gugaaucgcauguaagaau

SEQ ID NO: 2329087 - RNA, 19 nt, Artificial Sequence
  Description of Artificial Sequence: Synthetic oligonucleotide
  Antisense strand to SEQ ID NO: 2329086
auucuuacaugcgauucac

SEQ ID NO: 2329088 - RNA, 19 nt, Artificial Sequence
  Description of Artificial Sequence: Synthetic oligonucleotide
  Sense strand starting at position 321 of SEQ ID NO: 1885267
uaagaaugagugugugacu

SEQ ID NO: 2329089 - RNA, 19 nt, Artificial Sequence
  Description of Artificial Sequence: Synthetic oligonucleotide
  Antisense strand to SEQ ID NO: 2329088
agucacacacucauucuua

SEQ ID NO: 2329090 - RNA, 19 nt, Artificial Sequence
  Description of Artificial Sequence: Synthetic oligonucleotide
  Sense strand starting at position 322 of SEQ ID NO: 1885267
aagaaugagugugugacuu

SEQ ID NO: 2329091 - RNA, 19 nt, Artificial Sequence
  Description of Artificial Sequence: Synthetic oligonucleotide
  Antisense strand to SEQ ID NO: 2329090
aagucacacacucauucuu

SEQ ID NO: 2329092 - RNA, 19 nt, Artificial Sequence
  Description of Artificial Sequence: Synthetic oligonucleotide
  Sense strand starting at position 345 of SEQ ID NO: 1885267
guguaugugggagauugau

SEQ ID NO: 2329093 - RNA, 19 nt, Artificial Sequence
  Description of Artificial Sequence: Synthetic oligonucleotide
  Antisense strand to SEQ ID NO: 2329092
aucaaucucccacauacac

SEQ ID NO: 2329094 - RNA, 19 nt, Artificial Sequence
  Description of Artificial Sequence: Synthetic oligonucleotide
  Sense strand starting at position 357 of SEQ ID NO: 1885267
gauugauucugggaauuug

SEQ ID NO: 2329095 - RNA, 19 nt, Artificial Sequence
  Description of Artificial Sequence: Synthetic oligonucleotide
  Antisense strand to SEQ ID NO: 2329094
caaauucccagaaucaauc

SEQ ID NO: 2329096 - RNA, 19 nt, Artificial Sequence
  Description of Artificial Sequence: Synthetic oligonucleotide
  Sense strand starting at position 367 of SEQ ID NO: 1885267
gggaauuugugugagaauu

SEQ ID NO: 2329097 - RNA, 19 nt, Artificial Sequence
  Description of Artificial Sequence: Synthetic oligonucleotide
  Antisense strand to SEQ ID NO: 2329096
aauucucacacaaauuccc

SEQ ID NO: 2329098 - RNA, 19 nt, Artificial Sequence
  Description of Artificial Sequence: Synthetic oligonucleotide
  Sense strand starting at position 381 of SEQ ID NO: 1885267
gaauuugugugagugugua

SEQ ID NO: 2329099 - RNA, 19 nt, Artificial Sequence
  Description of Artificial Sequence: Synthetic oligonucleotide
  Antisense strand to SEQ ID NO: 2329098
uacacacucacacaaauuc

SEQ ID NO: 2329100 - RNA, 19 nt, Artificial Sequence
  Description of Artificial Sequence: Synthetic oligonucleotide
  Sense strand starting at position 386 of SEQ ID NO: 1885267
ugugugaguguguaggaau

SEQ ID NO: 2329101 - RNA, 19 nt, Artificial Sequence
  Description of Artificial Sequence: Synthetic oligonucleotide
  Antisense strand to SEQ ID NO: 2329100
auuccuacacacucacaca

SEQ ID NO: 2329102 - RNA, 19 nt, Artificial Sequence
  Description of Artificial Sequence: Synthetic oligonucleotide
  Sense strand starting at position 423 of SEQ ID NO: 1885267
agagaaugcaugugugaga

SEQ ID NO: 2329103 - RNA, 19 nt, Artificial Sequence
  Description of Artificial Sequence: Synthetic oligonucleotide
  Antisense strand to SEQ ID NO: 2329102
ucucacacaugcauucucu

SEQ ID NO: 2329104 - RNA, 19 nt, Artificial Sequence
  Description of Artificial Sequence: Synthetic oligonucleotide
  Sense strand starting at position 424 of SEQ ID NO: 1885267
gagaaugcaugugugagaa

SEQ ID NO: 2329105 - RNA, 19 nt, Artificial Sequence
  Description of Artificial Sequence: Synthetic oligonucleotide
  Antisense strand to SEQ ID NO: 2329104
uucucacacaugcauucuc

SEQ ID NO: 2329106 - RNA, 19 nt, Artificial Sequence
  Description of Artificial Sequence: Synthetic oligonucleotide
  Sense strand starting at position 512 of SEQ ID NO: 1885267
aggguucuuugugcaggaa

SEQ ID NO: 2329107 - RNA, 19 nt, Artificial Sequence
  Description of Artificial Sequence: Synthetic oligonucleotide
  Antisense strand to SEQ ID NO: 2329106
uuccugcacaaagaacccu

SEQ ID NO: 2329108 - RNA, 19 nt, Artificial Sequence
  Description of Artificial Sequence: Synthetic oligonucleotide
  Sense strand starting at position 513 of SEQ ID NO: 1885267
ggguucuuugugcaggaaa

SEQ ID NO: 2329109 - RNA, 19 nt, Artificial Sequence
  Description of Artificial Sequence: Synthetic oligonucleotide
  Antisense strand to SEQ ID NO: 2329108
uuuccugcacaaagaaccc

SEQ ID NO: 2329110 - RNA, 19 nt, Artificial Sequence
  Description of Artificial Sequence: Synthetic oligonucleotide
  Sense strand starting at position 515 of SEQ ID NO: 1885267
guucuuugugcaggaaaga

SEQ ID NO: 2329111 - RNA, 19 nt, Artificial Sequence
  Description of Artificial Sequence: Synthetic oligonucleotide
  Antisense strand to SEQ ID NO: 2329110
ucuuuccugcacaaagaac

SEQ ID NO: 2329112 - RNA, 19 nt, Artificial Sequence
  Description of Artificial Sequence: Synthetic oligonucleotide
  Sense strand starting at position 945 of SEQ ID NO: 1885267
uacaaugcucuaggaagga

SEQ ID NO: 2329113 - RNA, 19 nt, Artificial Sequence
  Description of Artificial Sequence: Synthetic oligonucleotide
  Antisense strand to SEQ ID NO: 2329112
uccuuccuagagcauugua

SEQ ID NO: 2329114 - RNA, 19 nt, Artificial Sequence
  Description of Artificial Sequence: Synthetic oligonucleotide
  Sense strand starting at position 1400 of SEQ ID NO: 1885267
cuuggaguccugugaggag

SEQ ID NO: 2329115 - RNA, 19 nt, Artificial Sequence
  Description of Artificial Sequence: Synthetic oligonucleotide
  Antisense strand to SEQ ID NO: 2329114
cuccucacaggacuccaag

SEQ ID NO: 2329116 - RNA, 19 nt, Artificial Sequence
  Description of Artificial Sequence: Synthetic oligonucleotide
  Sense strand starting at position 1734 of SEQ ID NO: 1885267
uccucaagucacugagacu

SEQ ID NO: 2329117 - RNA, 19 nt, Artificial Sequence
  Description of Artificial Sequence: Synthetic oligonucleotide
  Antisense strand to SEQ ID NO: 2329116
agucucagugacuugagga

SEQ ID NO: 2329118 - RNA, 19 nt, Artificial Sequence
  Description of Artificial Sequence: Synthetic oligonucleotide
  Sense strand starting at position 2028 of SEQ ID NO: 1885267
acgggaauauguccaaauc

SEQ ID NO: 2329119 - RNA, 19 nt, Artificial Sequence
  Description of Artificial Sequence: Synthetic oligonucleotide
  Antisense strand to SEQ ID NO: 2329118
gauuuggacauauucccgu

SEQ ID NO: 2329120 - RNA, 19 nt, Artificial Sequence
  Description of Artificial Sequence: Synthetic oligonucleotide
  Sense strand starting at position 2029 of SEQ ID NO: 1885267
cgggaauauguccaaaucu

SEQ ID NO: 2329121 - RNA, 19 nt, Artificial Sequence
  Description of Artificial Sequence: Synthetic oligonucleotide
  Antisense strand to SEQ ID NO: 2329120
agauuuggacauauucccg

SEQ ID NO: 2329122 - RNA, 19 nt, Artificial Sequence
  Description of Artificial Sequence: Synthetic oligonucleotide
  Sense strand starting at position 2209 of SEQ ID NO: 1885267
gggucuggacuuugaaacu

SEQ ID NO: 2329123 - RNA, 19 nt, Artificial Sequence
  Description of Artificial Sequence: Synthetic oligonucleotide
  Antisense strand to SEQ ID NO: 2329122
aguuucaaaguccagaccc

SEQ ID NO: 2329124 - RNA, 19 nt, Artificial Sequence
  Description of Artificial Sequence: Synthetic oligonucleotide
  Sense strand starting at position 2239 of SEQ ID NO: 1885267
aaagaaccuucgccgagaa

SEQ ID NO: 2329125 - RNA, 19 nt, Artificial Sequence
  Description of Artificial Sequence: Synthetic oligonucleotide
  Antisense strand to SEQ ID NO: 2329124
uucucggcgaagguucuuu

SEQ ID NO: 2329126 - RNA, 19 nt, Artificial Sequence
  Description of Artificial Sequence: Synthetic oligonucleotide
  Sense strand starting at position 2597 of SEQ ID NO: 1885267
guugauucucgagguggga

SEQ ID NO: 2329127 - RNA, 19 nt, Artificial Sequence
  Description of Artificial Sequence: Synthetic oligonucleotide
  Antisense strand to SEQ ID NO: 2329126
ucccaccucgagaaucaac

SEQ ID NO: 2329128 - RNA, 19 nt, Artificial Sequence
  Description of Artificial Sequence: Synthetic oligonucleotide
  Sense strand starting at position 2599 of SEQ ID NO: 1885267
ugauucucgaggugggauu

SEQ ID NO: 2329129 - RNA, 19 nt, Artificial Sequence
  Description of Artificial Sequence: Synthetic oligonucleotide
  Antisense strand to SEQ ID NO: 2329128
aaucccaccucgagaauca

SEQ ID NO: 2329130 - RNA, 19 nt, Artificial Sequence
  Description of Artificial Sequence: Synthetic oligonucleotide
  Sense strand starting at position 2612 of SEQ ID NO: 1885267
gggauuugcucguuugcuc

SEQ ID NO: 2329131 - RNA, 19 nt, Artificial Sequence
  Description of Artificial Sequence: Synthetic oligonucleotide
  Antisense strand to SEQ ID NO: 2329130
gagcaaacgagcaaauccc

SEQ ID NO: 2329132 - RNA, 19 nt, Artificial Sequence
  Description of Artificial Sequence: Synthetic oligonucleotide
  Sense strand starting at position 2619 of SEQ ID NO: 1885267
gcucguuugcucuuaaagc

SEQ ID NO: 2329133 - RNA, 19 nt, Artificial Sequence
  Description of Artificial Sequence: Synthetic oligonucleotide
  Antisense strand to SEQ ID NO: 2329132
gcuuuaagagcaaacgagc

SEQ ID NO: 2329134 - RNA, 19 nt, Artificial Sequence
  Description of Artificial Sequence: Synthetic oligonucleotide
  Sense strand starting at position 2784 of SEQ ID NO: 1885267
cucuucgaaguuuaagagu

SEQ ID NO: 2329135 - RNA, 19 nt, Artificial Sequence
  Description of Artificial Sequence: Synthetic oligonucleotide
  Antisense strand to SEQ ID NO: 2329134
acucuuaaacuucgaagag

SEQ ID NO: 2329136 - RNA, 19 nt, Artificial Sequence
  Description of Artificial Sequence: Synthetic oligonucleotide
  Sense strand starting at position 2946 of SEQ ID NO: 1885267
cugaauuccggacguuaaa

SEQ ID NO: 2329137 - RNA, 19 nt, Artificial Sequence
  Description of Artificial Sequence: Synthetic oligonucleotide
  Antisense strand to SEQ ID NO: 2329136
uuuaacguccggaauucag

SEQ ID NO: 2329138 - RNA, 19 nt, Artificial Sequence
  Description of Artificial Sequence: Synthetic oligonucleotide
  Sense strand starting at position 3075 of SEQ ID NO: 1885267
aagacaagucuuuguaaug

SEQ ID NO: 2329139 - RNA, 19 nt, Artificial Sequence
  Description of Artificial Sequence: Synthetic oligonucleotide
  Antisense strand to SEQ ID NO: 2329138
cauuacaaagacuugucuu

SEQ ID NO: 2329140 - RNA, 19 nt, Artificial Sequence
  Description of Artificial Sequence: Synthetic oligonucleotide
  Sense strand starting at position 3096 of SEQ ID NO: 1885267
aguuccucuucccuagaga

SEQ ID NO: 2329141 - RNA, 19 nt, Artificial Sequence
  Description of Artificial Sequence: Synthetic oligonucleotide
  Antisense strand to SEQ ID NO: 2329140
ucucuagggaagaggaacu

SEQ ID NO: 2329142 - RNA, 19 nt, Artificial Sequence
  Description of Artificial Sequence: Synthetic oligonucleotide
  Sense strand starting at position 3097 of SEQ ID NO: 1885267
guuccucuucccuagagag

SEQ ID NO: 2329143 - RNA, 19 nt, Artificial Sequence
  Description of Artificial Sequence: Synthetic oligonucleotide
  Antisense strand to SEQ ID NO: 2329142
cucucuagggaagaggaac

SEQ ID NO: 2329144 - RNA, 19 nt, Artificial Sequence
  Description of Artificial Sequence: Synthetic oligonucleotide
  Sense strand starting at position 3099 of SEQ ID NO: 1885267
uccucuucccuagagaguu

SEQ ID NO: 2329145 - RNA, 19 nt, Artificial Sequence
  Description of Artificial Sequence: Synthetic oligonucleotide
  Antisense strand to SEQ ID NO: 2329144
aacucucuagggaagagga

SEQ ID NO: 2329146 - RNA, 19 nt, Artificial Sequence
  Description of Artificial Sequence: Synthetic oligonucleotide
  Sense strand starting at position 3732 of SEQ ID NO: 1885267
cgcucaucucgggaauaua

SEQ ID NO: 2329147 - RNA, 19 nt, Artificial Sequence
  Description of Artificial Sequence: Synthetic oligonucleotide
  Antisense strand to SEQ ID NO: 2329146
uauauucccgagaugagcg

SEQ ID NO: 2329148 - RNA, 19 nt, Artificial Sequence
  Description of Artificial Sequence: Synthetic oligonucleotide
  Sense strand starting at position 3774 of SEQ ID NO: 1885267
ccagauaagugauugugau

SEQ ID NO: 2329149 - RNA, 19 nt, Artificial Sequence
  Description of Artificial Sequence: Synthetic oligonucleotide
  Antisense strand to SEQ ID NO: 2329148
aucacaaucacuuaucugg

SEQ ID NO: 2329150 - RNA, 19 nt, Artificial Sequence
  Description of Artificial Sequence: Synthetic oligonucleotide
  Sense strand starting at position 3775 of SEQ ID NO: 1885267
cagauaagugauugugaug

SEQ ID NO: 2329151 - RNA, 19 nt, Artificial Sequence
  Description of Artificial Sequence: Synthetic oligonucleotide
  Antisense strand to SEQ ID NO: 2329150
caucacaaucacuuaucug

SEQ ID NO: 2329152 - RNA, 19 nt, Artificial Sequence
  Description of Artificial Sequence: Synthetic oligonucleotide
  Sense strand starting at position 3781 of SEQ ID NO: 1885267
agugauugugauggagacu

SEQ ID NO: 2329153 - RNA, 19 nt, Artificial Sequence
  Description of Artificial Sequence: Synthetic oligonucleotide
  Antisense strand to SEQ ID NO: 2329152
agucuccaucacaaucacu

SEQ ID NO: 2329154 - RNA, 19 nt, Artificial Sequence
  Description of Artificial Sequence: Synthetic oligonucleotide
  Sense strand starting at position 3784 of SEQ ID NO: 1885267
gauugugauggagacuguu

SEQ ID NO: 2329155 - RNA, 19 nt, Artificial Sequence
  Description of Artificial Sequence: Synthetic oligonucleotide
  Antisense strand to SEQ ID NO: 2329154
aacagucuccaucacaauc

SEQ ID NO: 2329156 - RNA, 19 nt, Artificial Sequence
  Description of Artificial Sequence: Synthetic oligonucleotide
  Sense strand starting at position 3792 of SEQ ID NO: 1885267
uggagacuguuggcgagaa

SEQ ID NO: 2329157 - RNA, 19 nt, Artificial Sequence
  Description of Artificial Sequence: Synthetic oligonucleotide
  Antisense strand to SEQ ID NO: 2329156
uucucgccaacagucucca

SEQ ID NO: 2329158 - RNA, 19 nt, Artificial Sequence
  Description of Artificial Sequence: Synthetic oligonucleotide
  Sense strand starting at position 3836 of SEQ ID NO: 1885267
uuacauaaagaucgcauua

SEQ ID NO: 2329159 - RNA, 19 nt, Artificial Sequence
  Description of Artificial Sequence: Synthetic oligonucleotide
  Antisense strand to SEQ ID NO: 2329158
uaaugcgaucuuuauguaa

SEQ ID NO: 2329160 - RNA, 19 nt, Artificial Sequence
  Description of Artificial Sequence: Synthetic oligonucleotide
  Sense strand starting at position 97 of SEQ ID NO: 1885268
aauacaacucggugacaag

SEQ ID NO: 2329161 - RNA, 19 nt, Artificial Sequence
  Description of Artificial Sequence: Synthetic oligonucleotide
  Antisense strand to SEQ ID NO: 2329160
cuugucaccgaguuguauu

SEQ ID NO: 2329162 - RNA, 19 nt, Artificial Sequence
  Description of Artificial Sequence: Synthetic oligonucleotide
  Sense strand starting at position 98 of SEQ ID NO: 1885268
auacaacucggugacaagu

SEQ ID NO: 2329163 - RNA, 19 nt, Artificial Sequence
  Description of Artificial Sequence: Synthetic oligonucleotide
  Antisense strand to SEQ ID NO: 2329162
acuugucaccgaguuguau

SEQ ID NO: 2329164 - RNA, 19 nt, Artificial Sequence
  Description of Artificial Sequence: Synthetic oligonucleotide
  Sense strand starting at position 104 of SEQ ID NO: 1885268
cucggugacaaguaguuua

SEQ ID NO: 2329165 - RNA, 19 nt, Artificial Sequence
  Description of Artificial Sequence: Synthetic oligonucleotide
  Antisense strand to SEQ ID NO: 2329164
uaaacuacuugucaccgag

SEQ ID NO: 2329166 - RNA, 19 nt, Artificial Sequence
  Description of Artificial Sequence: Synthetic oligonucleotide
  Sense strand starting at position 107 of SEQ ID NO: 1885268
ggugacaaguaguuuaugu

SEQ ID NO: 2329167 - RNA, 19 nt, Artificial Sequence
  Description of Artificial Sequence: Synthetic oligonucleotide
  Antisense strand to SEQ ID NO: 2329166
acauaaacuacuugucacc

SEQ ID NO: 2329168 - RNA, 19 nt, Artificial Sequence
  Description of Artificial Sequence: Synthetic oligonucleotide
  Sense strand starting at position 109 of SEQ ID NO: 1885268
ugacaaguaguuuauguuu

SEQ ID NO: 2329169 - RNA, 19 nt, Artificial Sequence
  Description of Artificial Sequence: Synthetic oligonucleotide
  Antisense strand to SEQ ID NO: 2329168
aaacauaaacuacuuguca

SEQ ID NO: 2329170 - RNA, 19 nt, Artificial Sequence
  Description of Artificial Sequence: Synthetic oligonucleotide
  Sense strand starting at position 115 of SEQ ID NO: 1885268
guaguuuauguuuaacuca

SEQ ID NO: 2329171 - RNA, 19 nt, Artificial Sequence
  Description of Artificial Sequence: Synthetic oligonucleotide
  Antisense strand to SEQ ID NO: 2329170
ugaguuaaacauaaacuac

SEQ ID NO: 2329172 - RNA, 19 nt, Artificial Sequence
  Description of Artificial Sequence: Synthetic oligonucleotide
  Sense strand starting at position 293 of SEQ ID NO: 1885268
agaacaggugcgggaauua

SEQ ID NO: 2329173 - RNA, 19 nt, Artificial Sequence
  Description of Artificial Sequence: Synthetic oligonucleotide
  Antisense strand to SEQ ID NO: 2329172
uaauucccgcaccuguucu

SEQ ID NO: 2329174 - RNA, 19 nt, Artificial Sequence
  Description of Artificial Sequence: Synthetic oligonucleotide
  Sense strand starting at position 514 of SEQ ID NO: 1885268
gaggacuccuccuugccau

SEQ ID NO: 2329175 - RNA, 19 nt, Artificial Sequence
  Description of Artificial Sequence: Synthetic oligonucleotide
  Antisense strand to SEQ ID NO: 2329174
auggcaaggaggaguccuc

SEQ ID NO: 2329176 - RNA, 19 nt, Artificial Sequence
  Description of Artificial Sequence: Synthetic oligonucleotide
  Sense strand starting at position 933 of SEQ ID NO: 1885268
gccagacgugccuagaaca

SEQ ID NO: 2329177 - RNA, 19 nt, Artificial Sequence
  Description of Artificial Sequence: Synthetic oligonucleotide
  Antisense strand to SEQ ID NO: 2329176
uguucuaggcacgucuggc

SEQ ID NO: 2329178 - RNA, 19 nt, Artificial Sequence
  Description of Artificial Sequence: Synthetic oligonucleotide
  Sense strand starting at position 958 of SEQ ID NO: 1885268
agggagugguaguguuaga

SEQ ID NO: 2329179 - RNA, 19 nt, Artificial Sequence
  Description of Artificial Sequence: Synthetic oligonucleotide
  Antisense strand to SEQ ID NO: 2329178
ucuaacacuaccacucccu

SEQ ID NO: 2329180 - RNA, 19 nt, Artificial Sequence
  Description of Artificial Sequence: Synthetic oligonucleotide
  Sense strand starting at position 1323 of SEQ ID NO: 1885268
gccuuacccugcugaggau

SEQ ID NO: 2329181 - RNA, 19 nt, Artificial Sequence
  Description of Artificial Sequence: Synthetic oligonucleotide
  Antisense strand to SEQ ID NO: 2329180
auccucagcaggguaaggc

SEQ ID NO: 2329182 - RNA, 19 nt, Artificial Sequence
  Description of Artificial Sequence: Synthetic oligonucleotide
  Sense strand starting at position 2013 of SEQ ID NO: 1885268
cuucgauucugauuggaug

SEQ ID NO: 2329183 - RNA, 19 nt, Artificial Sequence
  Description of Artificial Sequence: Synthetic oligonucleotide
  Antisense strand to SEQ ID NO: 2329182
cauccaaucagaaucgaag

SEQ ID NO: 2329184 - RNA, 19 nt, Artificial Sequence
  Description of Artificial Sequence: Synthetic oligonucleotide
  Sense strand starting at position 2014 of SEQ ID NO: 1885268
uucgauucugauuggauga

SEQ ID NO: 2329185 - RNA, 19 nt, Artificial Sequence
  Description of Artificial Sequence: Synthetic oligonucleotide
  Antisense strand to SEQ ID NO: 2329184
ucauccaaucagaaucgaa

SEQ ID NO: 2329186 - RNA, 19 nt, Artificial Sequence
  Description of Artificial Sequence: Synthetic oligonucleotide
  Sense strand starting at position 2016 of SEQ ID NO: 1885268
cgauucugauuggaugaga

SEQ ID NO: 2329187 - RNA, 19 nt, Artificial Sequence
  Description of Artificial Sequence: Synthetic oligonucleotide
  Antisense strand to SEQ ID NO: 2329186
ucucauccaaucagaaucg

SEQ ID NO: 2329188 - RNA, 19 nt, Artificial Sequence
  Description of Artificial Sequence: Synthetic oligonucleotide
  Sense strand starting at position 2138 of SEQ ID NO: 1885268
uuugcauaagcucauguau

SEQ ID NO: 2329189 - RNA, 19 nt, Artificial Sequence
  Description of Artificial Sequence: Synthetic oligonucleotide
  Antisense strand to SEQ ID NO: 2329188
auacaugagcuuaugcaaa

SEQ ID NO: 2329190 - RNA, 19 nt, Artificial Sequence
  Description of Artificial Sequence: Synthetic oligonucleotide
  Sense strand starting at position 2140 of SEQ ID NO: 1885268
ugcauaagcucauguauaa

SEQ ID NO: 2329191 - RNA, 19 nt, Artificial Sequence
  Description of Artificial Sequence: Synthetic oligonucleotide
  Antisense strand to SEQ ID NO: 2329190
uuauacaugagcuuaugca

SEQ ID NO: 2329192 - RNA, 19 nt, Artificial Sequence
  Description of Artificial Sequence: Synthetic oligonucleotide
  Sense strand starting at position 2151 of SEQ ID NO: 1885268
auguauaaggcaugcagaa

SEQ ID NO: 2329193 - RNA, 19 nt, Artificial Sequence
  Description of Artificial Sequence: Synthetic oligonucleotide
  Antisense strand to SEQ ID NO: 2329192
uucugcaugccuuauacau

SEQ ID NO: 2329194 - RNA, 19 nt, Artificial Sequence
  Description of Artificial Sequence: Synthetic oligonucleotide
  Sense strand starting at position 3446 of SEQ ID NO: 1885268
ggaggaugguaaggauaga

SEQ ID NO: 2329195 - RNA, 19 nt, Artificial Sequence
  Description of Artificial Sequence: Synthetic oligonucleotide
  Antisense strand to SEQ ID NO: 2329194
ucuauccuuaccauccucc

SEQ ID NO: 2329196 - RNA, 19 nt, Artificial Sequence
  Description of Artificial Sequence: Synthetic oligonucleotide
  Sense strand starting at position 3719 of SEQ ID NO: 1885268
gcgagaaggccuugggaaa

SEQ ID NO: 2329197 - RNA, 19 nt, Artificial Sequence
  Description of Artificial Sequence: Synthetic oligonucleotide
  Antisense strand to SEQ ID NO: 2329196
uuucccaaggccuucucgc

SEQ ID NO: 2329198 - RNA, 19 nt, Artificial Sequence
  Description of Artificial Sequence: Synthetic oligonucleotide
  Sense strand starting at position 194 of SEQ ID NO: 1885269
uucccugaaugagucuaaa

SEQ ID NO: 2329199 - RNA, 19 nt, Artificial Sequence
  Description of Artificial Sequence: Synthetic oligonucleotide
  Antisense strand to SEQ ID NO: 2329198
uuuagacucauucagggaa

SEQ ID NO: 2329200 - RNA, 19 nt, Artificial Sequence
  Description of Artificial Sequence: Synthetic oligonucleotide
  Sense strand starting at position 197 of SEQ ID NO: 1885269
ccugaaugagucuaaaguc

SEQ ID NO: 2329201 - RNA, 19 nt, Artificial Sequence
  Description of Artificial Sequence: Synthetic oligonucleotide
  Antisense strand to SEQ ID NO: 2329200
gacuuuagacucauucagg

SEQ ID NO: 2329202 - RNA, 19 nt, Artificial Sequence
  Description of Artificial Sequence: Synthetic oligonucleotide
  Sense strand starting at position 312 of SEQ ID NO: 1885269
gaaugcagauugucuagaa

SEQ ID NO: 2329203 - RNA, 19 nt, Artificial Sequence
  Description of Artificial Sequence: Synthetic oligonucleotide
  Antisense strand to SEQ ID NO: 2329202
uucuagacaaucugcauuc

SEQ ID NO: 2329204 - RNA, 19 nt, Artificial Sequence
  Description of Artificial Sequence: Synthetic oligonucleotide
  Sense strand starting at position 316 of SEQ ID NO: 1885269
gcagauugucuagaaguaa

SEQ ID NO: 2329205 - RNA, 19 nt, Artificial Sequence
  Description of Artificial Sequence: Synthetic oligonucleotide
  Antisense strand to SEQ ID NO: 2329204
uuacuucuagacaaucugc

SEQ ID NO: 2329206 - RNA, 19 nt, Artificial Sequence
  Description of Artificial Sequence: Synthetic oligonucleotide
  Sense strand starting at position 390 of SEQ ID NO: 1885269
auacuaauguaguuacauc

SEQ ID NO: 2329207 - RNA, 19 nt, Artificial Sequence
  Description of Artificial Sequence: Synthetic oligonucleotide
  Antisense strand to SEQ ID NO: 2329206
gauguaacuacauuaguau

SEQ ID NO: 2329208 - RNA, 19 nt, Artificial Sequence
  Description of Artificial Sequence: Synthetic oligonucleotide
  Sense strand starting at position 442 of SEQ ID NO: 1885269
acacuauuagaguggcaug

SEQ ID NO: 2329209 - RNA, 19 nt, Artificial Sequence
  Description of Artificial Sequence: Synthetic oligonucleotide
  Antisense strand to SEQ ID NO: 2329208
caugccacucuaauagugu

SEQ ID NO: 2329210 - RNA, 19 nt, Artificial Sequence
  Description of Artificial Sequence: Synthetic oligonucleotide
  Sense strand starting at position 824 of SEQ ID NO: 1885269
cggucagucagucaaauaa

SEQ ID NO: 2329211 - RNA, 19 nt, Artificial Sequence
  Description of Artificial Sequence: Synthetic oligonucleotide
  Antisense strand to SEQ ID NO: 2329210
uuauuugacugacugaccg

SEQ ID NO: 2329212 - RNA, 19 nt, Artificial Sequence
  Description of Artificial Sequence: Synthetic oligonucleotide
  Sense strand starting at position 1100 of SEQ ID NO: 1885269
auaucaaggguuugaaugu

SEQ ID NO: 2329213 - RNA, 19 nt, Artificial Sequence
  Description of Artificial Sequence: Synthetic oligonucleotide
  Antisense strand to SEQ ID NO: 2329212
acauucaaacccuugauau

SEQ ID NO: 2329214 - RNA, 19 nt, Artificial Sequence
  Description of Artificial Sequence: Synthetic oligonucleotide
  Sense strand starting at position 1121 of SEQ ID NO: 1885269
gguccauaggcugaaucua

SEQ ID NO: 2329215 - RNA, 19 nt, Artificial Sequence
  Description of Artificial Sequence: Synthetic oligonucleotide
  Antisense strand to SEQ ID NO: 2329214
uagauucagccuauggacc

SEQ ID NO: 2329216 - RNA, 19 nt, Artificial Sequence
  Description of Artificial Sequence: Synthetic oligonucleotide
  Sense strand starting at position 1141 of SEQ ID NO: 1885269
acugcuuuacccuaugaag

SEQ ID NO: 2329217 - RNA, 19 nt, Artificial Sequence
  Description of Artificial Sequence: Synthetic oligonucleotide
  Antisense strand to SEQ ID NO: 2329216
cuucauaggguaaagcagu

SEQ ID NO: 2329218 - RNA, 19 nt, Artificial Sequence
  Description of Artificial Sequence: Synthetic oligonucleotide
  Sense strand starting at position 1155 of SEQ ID NO: 1885269
ugaaguaagaauggucuua

SEQ ID NO: 2329219 - RNA, 19 nt, Artificial Sequence
  Description of Artificial Sequence: Synthetic oligonucleotide
  Antisense strand to SEQ ID NO: 2329218
uaagaccauucuuacuuca

SEQ ID NO: 2329220 - RNA, 19 nt, Artificial Sequence
  Description of Artificial Sequence: Synthetic oligonucleotide
  Sense strand starting at position 1157 of SEQ ID NO: 1885269
aaguaagaauggucuuaua

SEQ ID NO: 2329221 - RNA, 19 nt, Artificial Sequence
  Description of Artificial Sequence: Synthetic oligonucleotide
  Antisense strand to SEQ ID NO: 2329220
uauaagaccauucuuacuu

SEQ ID NO: 2329222 - RNA, 19 nt, Artificial Sequence
  Description of Artificial Sequence: Synthetic oligonucleotide
  Sense strand starting at position 1632 of SEQ ID NO: 1885269
agcauuagaguugaguauu

SEQ ID NO: 2329223 - RNA, 19 nt, Artificial Sequence
  Description of Artificial Sequence: Synthetic oligonucleotide
  Antisense strand to SEQ ID NO: 2329222
aauacucaacucuaaugcu

SEQ ID NO: 2329224 - RNA, 19 nt, Artificial Sequence
  Description of Artificial Sequence: Synthetic oligonucleotide
  Sense strand starting at position 1692 of SEQ ID NO: 1885269
ugagcugacuccucacaga

SEQ ID NO: 2329225 - RNA, 19 nt, Artificial Sequence
  Description of Artificial Sequence: Synthetic oligonucleotide
  Antisense strand to SEQ ID NO: 2329224
ucugugaggagucagcuca

SEQ ID NO: 2329226 - RNA, 19 nt, Artificial Sequence
  Description of Artificial Sequence: Synthetic oligonucleotide
  Sense strand starting at position 1757 of SEQ ID NO: 1885269
caugcuuguggucauagaa

SEQ ID NO: 2329227 - RNA, 19 nt, Artificial Sequence
  Description of Artificial Sequence: Synthetic oligonucleotide
  Antisense strand to SEQ ID NO: 2329226
uucuaugaccacaagcaug

SEQ ID NO: 2329228 - RNA, 19 nt, Artificial Sequence
  Description of Artificial Sequence: Synthetic oligonucleotide
  Sense strand starting at position 1766 of SEQ ID NO: 1885269
ggucauagaaguggucuaa

SEQ ID NO: 2329229 - RNA, 19 nt, Artificial Sequence
  Description of Artificial Sequence: Synthetic oligonucleotide
  Antisense strand to SEQ ID NO: 2329228
uuagaccacuucuaugacc

SEQ ID NO: 2329230 - RNA, 19 nt, Artificial Sequence
  Description of Artificial Sequence: Synthetic oligonucleotide
  Sense strand starting at position 1829 of SEQ ID NO: 1885269
acuacugaugaguaauguu

SEQ ID NO: 2329231 - RNA, 19 nt, Artificial Sequence
  Description of Artificial Sequence: Synthetic oligonucleotide
  Antisense strand to SEQ ID NO: 2329230
aacauuacucaucaguagu

SEQ ID NO: 2329232 - RNA, 19 nt, Artificial Sequence
  Description of Artificial Sequence: Synthetic oligonucleotide
  Sense strand starting at position 1922 of SEQ ID NO: 1885269
cuugaaagcuuccuugaag

SEQ ID NO: 2329233 - RNA, 19 nt, Artificial Sequence
  Description of Artificial Sequence: Synthetic oligonucleotide
  Antisense strand to SEQ ID NO: 2329232
cuucaaggaagcuuucaag

SEQ ID NO: 2329234 - RNA, 19 nt, Artificial Sequence
  Description of Artificial Sequence: Synthetic oligonucleotide
  Sense strand starting at position 1925 of SEQ ID NO: 1885269
gaaagcuuccuugaagucu

SEQ ID NO: 2329235 - RNA, 19 nt, Artificial Sequence
  Description of Artificial Sequence: Synthetic oligonucleotide
  Antisense strand to SEQ ID NO: 2329234
agacuucaaggaagcuuuc

SEQ ID NO: 2329236 - RNA, 19 nt, Artificial Sequence
  Description of Artificial Sequence: Synthetic oligonucleotide
  Sense strand starting at position 2018 of SEQ ID NO: 1885269
agcaauuuaucacagaaga

SEQ ID NO: 2329237 - RNA, 19 nt, Artificial Sequence
  Description of Artificial Sequence: Synthetic oligonucleotide
  Antisense strand to SEQ ID NO: 2329236
ucuucugugauaaauugcu

SEQ ID NO: 2329238 - RNA, 19 nt, Artificial Sequence
  Description of Artificial Sequence: Synthetic oligonucleotide
  Sense strand starting at position 2082 of SEQ ID NO: 1885269
aagugaagucaagggugau

SEQ ID NO: 2329239 - RNA, 19 nt, Artificial Sequence
  Description of Artificial Sequence: Synthetic oligonucleotide
  Antisense strand to SEQ ID NO: 2329238
aucacccuugacuucacuu

SEQ ID NO: 2329240 - RNA, 19 nt, Artificial Sequence
  Description of Artificial Sequence: Synthetic oligonucleotide
  Sense strand starting at position 2083 of SEQ ID NO: 1885269
agugaagucaagggugaua

SEQ ID NO: 2329241 - RNA, 19 nt, Artificial Sequence
  Description of Artificial Sequence: Synthetic oligonucleotide
  Antisense strand to SEQ ID NO: 2329240
uaucacccuugacuucacu

SEQ ID NO: 2329242 - RNA, 19 nt, Artificial Sequence
  Description of Artificial Sequence: Synthetic oligonucleotide
  Sense strand starting at position 2085 of SEQ ID NO: 1885269
ugaagucaagggugauaau

SEQ ID NO: 2329243 - RNA, 19 nt, Artificial Sequence
  Description of Artificial Sequence: Synthetic oligonucleotide
  Antisense strand to SEQ ID NO: 2329242
auuaucacccuugacuuca

SEQ ID NO: 2329244 - RNA, 19 nt, Artificial Sequence
  Description of Artificial Sequence: Synthetic oligonucleotide
  Sense strand starting at position 2117 of SEQ ID NO: 1885269
uuaccaagugguggagaau

SEQ ID NO: 2329245 - RNA, 19 nt, Artificial Sequence
  Description of Artificial Sequence: Synthetic oligonucleotide
  Antisense strand to SEQ ID NO: 2329244
auucuccaccacuugguaa

SEQ ID NO: 2329246 - RNA, 19 nt, Artificial Sequence
  Description of Artificial Sequence: Synthetic oligonucleotide
  Sense strand starting at position 2980 of SEQ ID NO: 1885269
gugggaaguaguugacuag

SEQ ID NO: 2329247 - RNA, 19 nt, Artificial Sequence
  Description of Artificial Sequence: Synthetic oligonucleotide
  Antisense strand to SEQ ID NO: 2329246
cuagucaacuacuucccac

SEQ ID NO: 2329248 - RNA, 19 nt, Artificial Sequence
  Description of Artificial Sequence: Synthetic oligonucleotide
  Sense strand starting at position 2983 of SEQ ID NO: 1885269
ggaaguaguugacuagaca

SEQ ID NO: 2329249 - RNA, 19 nt, Artificial Sequence
  Description of Artificial Sequence: Synthetic oligonucleotide
  Antisense strand to SEQ ID NO: 2329248
ugucuagucaacuacuucc

SEQ ID NO: 2329250 - RNA, 19 nt, Artificial Sequence
  Description of Artificial Sequence: Synthetic oligonucleotide
  Sense strand starting at position 3040 of SEQ ID NO: 1885269
ccagauggugcggaaguaa

SEQ ID NO: 2329251 - RNA, 19 nt, Artificial Sequence
  Description of Artificial Sequence: Synthetic oligonucleotide
  Antisense strand to SEQ ID NO: 2329250
uuacuuccgcaccaucugg

SEQ ID NO: 2329252 - RNA, 19 nt, Artificial Sequence
  Description of Artificial Sequence: Synthetic oligonucleotide
  Sense strand starting at position 3059 of SEQ ID NO: 1885269
gaauuaguccuaggucuag

SEQ ID NO: 2329253 - RNA, 19 nt, Artificial Sequence
  Description of Artificial Sequence: Synthetic oligonucleotide
  Antisense strand to SEQ ID NO: 2329252
cuagaccuaggacuaauuc

SEQ ID NO: 2329254 - RNA, 19 nt, Artificial Sequence
  Description of Artificial Sequence: Synthetic oligonucleotide
  Sense strand starting at position 3137 of SEQ ID NO: 1885269
gaugauccugcugacugau

SEQ ID NO: 2329255 - RNA, 19 nt, Artificial Sequence
  Description of Artificial Sequence: Synthetic oligonucleotide
  Antisense strand to SEQ ID NO: 2329254
aucagucagcaggaucauc

SEQ ID NO: 2329256 - RNA, 19 nt, Artificial Sequence
  Description of Artificial Sequence: Synthetic oligonucleotide
  Sense strand starting at position 3140 of SEQ ID NO: 1885269
gauccugcugacugauaug

SEQ ID NO: 2329257 - RNA, 19 nt, Artificial Sequence
  Description of Artificial Sequence: Synthetic oligonucleotide
  Antisense strand to SEQ ID NO: 2329256
cauaucagucagcaggauc

SEQ ID NO: 2329258 - RNA, 19 nt, Artificial Sequence
  Description of Artificial Sequence: Synthetic oligonucleotide
  Sense strand starting at position 3149 of SEQ ID NO: 1885269
gacugauauggucacuguu

SEQ ID NO: 2329259 - RNA, 19 nt, Artificial Sequence
  Description of Artificial Sequence: Synthetic oligonucleotide
  Antisense strand to SEQ ID NO: 2329258
aacagugaccauaucaguc

SEQ ID NO: 2329260 - RNA, 19 nt, Artificial Sequence
  Description of Artificial Sequence: Synthetic oligonucleotide
  Sense strand starting at position 3206 of SEQ ID NO: 1885269
cugacuuugagugaagcaa

SEQ ID NO: 2329261 - RNA, 19 nt, Artificial Sequence
  Description of Artificial Sequence: Synthetic oligonucleotide
  Antisense strand to SEQ ID NO: 2329260
uugcuucacucaaagucag

SEQ ID NO: 2329262 - RNA, 19 nt, Artificial Sequence
  Description of Artificial Sequence: Synthetic oligonucleotide
  Sense strand starting at position 3241 of SEQ ID NO: 1885269
aagggaagcaugcgauaaa

SEQ ID NO: 2329263 - RNA, 19 nt, Artificial Sequence
  Description of Artificial Sequence: Synthetic oligonucleotide
  Antisense strand to SEQ ID NO: 2329262
uuuaucgcaugcuucccuu

SEQ ID NO: 2329264 - RNA, 19 nt, Artificial Sequence
  Description of Artificial Sequence: Synthetic oligonucleotide
  Sense strand starting at position 3244 of SEQ ID NO: 1885269
ggaagcaugcgauaaagga

SEQ ID NO: 2329265 - RNA, 19 nt, Artificial Sequence
  Description of Artificial Sequence: Synthetic oligonucleotide
  Antisense strand to SEQ ID NO: 2329264
uccuuuaucgcaugcuucc

SEQ ID NO: 2329266 - RNA, 19 nt, Artificial Sequence
  Description of Artificial Sequence: Synthetic oligonucleotide
  Sense strand starting at position 3315 of SEQ ID NO: 1885269
auuaccagcuauguaagau

SEQ ID NO: 2329267 - RNA, 19 nt, Artificial Sequence
  Description of Artificial Sequence: Synthetic oligonucleotide
  Antisense strand to SEQ ID NO: 2329266
aucuuacauagcugguaau

SEQ ID NO: 2329268 - RNA, 19 nt, Artificial Sequence
  Description of Artificial Sequence: Synthetic oligonucleotide
  Sense strand starting at position 3359 of SEQ ID NO: 1885269
gauagauuauugguacuua

SEQ ID NO: 2329269 - RNA, 19 nt, Artificial Sequence
  Description of Artificial Sequence: Synthetic oligonucleotide
  Antisense strand to SEQ ID NO: 2329268
uaaguaccaauaaucuauc

SEQ ID NO: 2329270 - RNA, 19 nt, Artificial Sequence
  Description of Artificial Sequence: Synthetic oligonucleotide
  Sense strand starting at position 3389 of SEQ ID NO: 1885269
gauaaauguugucuauaag

SEQ ID NO: 2329271 - RNA, 19 nt, Artificial Sequence
  Description of Artificial Sequence: Synthetic oligonucleotide
  Antisense strand to SEQ ID NO: 2329270
cuuauagacaacauuuauc

SEQ ID NO: 2329272 - RNA, 19 nt, Artificial Sequence
  Description of Artificial Sequence: Synthetic oligonucleotide
  Sense strand starting at position 3439 of SEQ ID NO: 1885269
ccauuccugguauaaugau

SEQ ID NO: 2329273 - RNA, 19 nt, Artificial Sequence
  Description of Artificial Sequence: Synthetic oligonucleotide
  Antisense strand to SEQ ID NO: 2329272
aucauuauaccaggaaugg

SEQ ID NO: 2329274 - RNA, 19 nt, Artificial Sequence
  Description of Artificial Sequence: Synthetic oligonucleotide
  Sense strand starting at position 3445 of SEQ ID NO: 1885269
cugguauaaugauauuuga

SEQ ID NO: 2329275 - RNA, 19 nt, Artificial Sequence
  Description of Artificial Sequence: Synthetic oligonucleotide
  Antisense strand to SEQ ID NO: 2329274
ucaaauaucauuauaccag

SEQ ID NO: 2329276 - RNA, 19 nt, Artificial Sequence
  Description of Artificial Sequence: Synthetic oligonucleotide
  Sense strand starting at position 3628 of SEQ ID NO: 1885269
ugcugaguaucuuccauuu

SEQ ID NO: 2329277 - RNA, 19 nt, Artificial Sequence
  Description of Artificial Sequence: Synthetic oligonucleotide
  Antisense strand to SEQ ID NO: 2329276
aaauggaagauacucagca

SEQ ID NO: 2329278 - RNA, 19 nt, Artificial Sequence
  Description of Artificial Sequence: Synthetic oligonucleotide
  Sense strand starting at position 51 of SEQ ID NO: 1885270
ucugguuaucuaugagaua

SEQ ID NO: 2329279 - RNA, 19 nt, Artificial Sequence
  Description of Artificial Sequence: Synthetic oligonucleotide
  Antisense strand to SEQ ID NO: 2329278
uaucucauagauaaccaga

SEQ ID NO: 2329280 - RNA, 19 nt, Artificial Sequence
  Description of Artificial Sequence: Synthetic oligonucleotide
  Sense strand starting at position 81 of SEQ ID NO: 1885270
guuuauugucaauaacuac

SEQ ID NO: 2329281 - RNA, 19 nt, Artificial Sequence
  Description of Artificial Sequence: Synthetic oligonucleotide
  Antisense strand to SEQ ID NO: 2329280
guaguuauugacaauaaac

SEQ ID NO: 2329282 - RNA, 19 nt, Artificial Sequence
  Description of Artificial Sequence: Synthetic oligonucleotide
  Sense strand starting at position 104 of SEQ ID NO: 1885270
ugugaagucacaugagaau

SEQ ID NO: 2329283 - RNA, 19 nt, Artificial Sequence
  Description of Artificial Sequence: Synthetic oligonucleotide
  Antisense strand to SEQ ID NO: 2329282
auucucaugugacuucaca

SEQ ID NO: 2329284 - RNA, 19 nt, Artificial Sequence
  Description of Artificial Sequence: Synthetic oligonucleotide
  Sense strand starting at position 110 of SEQ ID NO: 1885270
gucacaugagaaugcuaag

SEQ ID NO: 2329285 - RNA, 19 nt, Artificial Sequence
  Description of Artificial Sequence: Synthetic oligonucleotide
  Antisense strand to SEQ ID NO: 2329284
cuuagcauucucaugugac

SEQ ID NO: 2329286 - RNA, 19 nt, Artificial Sequence
  Description of Artificial Sequence: Synthetic oligonucleotide
  Sense strand starting at position 119 of SEQ ID NO: 1885270
gaaugcuaaguguauuauu

SEQ ID NO: 2329287 - RNA, 19 nt, Artificial Sequence
  Description of Artificial Sequence: Synthetic oligonucleotide
  Antisense strand to SEQ ID NO: 2329286
aauaauacacuuagcauuc

SEQ ID NO: 2329288 - RNA, 19 nt, Artificial Sequence
  Description of Artificial Sequence: Synthetic oligonucleotide
  Sense strand starting at position 317 of SEQ ID NO: 1885270
gguguuggaaggugaagaa

SEQ ID NO: 2329289 - RNA, 19 nt, Artificial Sequence
  Description of Artificial Sequence: Synthetic oligonucleotide
  Antisense strand to SEQ ID NO: 2329288
uucuucaccuuccaacacc

SEQ ID NO: 2329290 - RNA, 19 nt, Artificial Sequence
  Description of Artificial Sequence: Synthetic oligonucleotide
  Sense strand starting at position 405 of SEQ ID NO: 1885270
uuugcuaaacuuugagacu

SEQ ID NO: 2329291 - RNA, 19 nt, Artificial Sequence
  Description of Artificial Sequence: Synthetic oligonucleotide
  Antisense strand to SEQ ID NO: 2329290
agucucaaaguuuagcaaa

SEQ ID NO: 2329292 - RNA, 19 nt, Artificial Sequence
  Description of Artificial Sequence: Synthetic oligonucleotide
  Sense strand starting at position 468 of SEQ ID NO: 1885270
cucacagaguaauucugaa

SEQ ID NO: 2329293 - RNA, 19 nt, Artificial Sequence
  Description of Artificial Sequence: Synthetic oligonucleotide
  Antisense strand to SEQ ID NO: 2329292
uucagaauuacucugugag

SEQ ID NO: 2329294 - RNA, 19 nt, Artificial Sequence
  Description of Artificial Sequence: Synthetic oligonucleotide
  Sense strand starting at position 487 of SEQ ID NO: 1885270
gaucuaguuggaugacaca

SEQ ID NO: 2329295 - RNA, 19 nt, Artificial Sequence
  Description of Artificial Sequence: Synthetic oligonucleotide
  Antisense strand to SEQ ID NO: 2329294
ugugucauccaacuagauc

SEQ ID NO: 2329296 - RNA, 19 nt, Artificial Sequence
  Description of Artificial Sequence: Synthetic oligonucleotide
  Sense strand starting at position 657 of SEQ ID NO: 1885270
uccauugaucaaggacgau

SEQ ID NO: 2329297 - RNA, 19 nt, Artificial Sequence
  Description of Artificial Sequence: Synthetic oligonucleotide
  Antisense strand to SEQ ID NO: 2329296
aucguccuugaucaaugga

SEQ ID NO: 2329298 - RNA, 19 nt, Artificial Sequence
  Description of Artificial Sequence: Synthetic oligonucleotide
  Sense strand starting at position 676 of SEQ ID NO: 1885270
ggugaaauauuuggauuuc

SEQ ID NO: 2329299 - RNA, 19 nt, Artificial Sequence
  Description of Artificial Sequence: Synthetic oligonucleotide
  Antisense strand to SEQ ID NO: 2329298
gaaauccaaauauuucacc

SEQ ID NO: 2329300 - RNA, 19 nt, Artificial Sequence
  Description of Artificial Sequence: Synthetic oligonucleotide
  Sense strand starting at position 884 of SEQ ID NO: 1885270
auuaucucugcagacagua

SEQ ID NO: 2329301 - RNA, 19 nt, Artificial Sequence
  Description of Artificial Sequence: Synthetic oligonucleotide
  Antisense strand to SEQ ID NO: 2329300
uacugucugcagagauaau

SEQ ID NO: 2329302 - RNA, 19 nt, Artificial Sequence
  Description of Artificial Sequence: Synthetic oligonucleotide
  Sense strand starting at position 932 of SEQ ID NO: 1885270
cuaugagggaaauguguga

SEQ ID NO: 2329303 - RNA, 19 nt, Artificial Sequence
  Description of Artificial Sequence: Synthetic oligonucleotide
  Antisense strand to SEQ ID NO: 2329302
ucacacauuucccucauag

SEQ ID NO: 2329304 - RNA, 19 nt, Artificial Sequence
  Description of Artificial Sequence: Synthetic oligonucleotide
  Sense strand starting at position 936 of SEQ ID NO: 1885270
gagggaaaugugugaucaa

SEQ ID NO: 2329305 - RNA, 19 nt, Artificial Sequence
  Description of Artificial Sequence: Synthetic oligonucleotide
  Antisense strand to SEQ ID NO: 2329304
uugaucacacauuucccuc

SEQ ID NO: 2329306 - RNA, 19 nt, Artificial Sequence
  Description of Artificial Sequence: Synthetic oligonucleotide
  Sense strand starting at position 939 of SEQ ID NO: 1885270
ggaaaugugugaucaauuc

SEQ ID NO: 2329307 - RNA, 19 nt, Artificial Sequence
  Description of Artificial Sequence: Synthetic oligonucleotide
  Antisense strand to SEQ ID NO: 2329306
gaauugaucacacauuucc

SEQ ID NO: 2329308 - RNA, 19 nt, Artificial Sequence
  Description of Artificial Sequence: Synthetic oligonucleotide
  Sense strand starting at position 971 of SEQ ID NO: 1885270
ugcagaugucaacaaagca

SEQ ID NO: 2329309 - RNA, 19 nt, Artificial Sequence
  Description of Artificial Sequence: Synthetic oligonucleotide
  Antisense strand to SEQ ID NO: 2329308
ugcuuuguugacaucugca

SEQ ID NO: 2329310 - RNA, 19 nt, Artificial Sequence
  Description of Artificial Sequence: Synthetic oligonucleotide
  Sense strand starting at position 1422 of SEQ ID NO: 1885270
aguugcaugcaauaaugau

SEQ ID NO: 2329311 - RNA, 19 nt, Artificial Sequence
  Description of Artificial Sequence: Synthetic oligonucleotide
  Antisense strand to SEQ ID NO: 2329310
aucauuauugcaugcaacu

SEQ ID NO: 2329312 - RNA, 19 nt, Artificial Sequence
  Description of Artificial Sequence: Synthetic oligonucleotide
  Sense strand starting at position 1428 of SEQ ID NO: 1885270
augcaauaaugauuguuga

SEQ ID NO: 2329313 - RNA, 19 nt, Artificial Sequence
  Description of Artificial Sequence: Synthetic oligonucleotide
  Antisense strand to SEQ ID NO: 2329312
ucaacaaucauuauugcau

SEQ ID NO: 2329314 - RNA, 19 nt, Artificial Sequence
  Description of Artificial Sequence: Synthetic oligonucleotide
  Sense strand starting at position 1429 of SEQ ID NO: 1885270
ugcaauaaugauuguugau

SEQ ID NO: 2329315 - RNA, 19 nt, Artificial Sequence
  Description of Artificial Sequence: Synthetic oligonucleotide
  Antisense strand to SEQ ID NO: 2329314
aucaacaaucauuauugca

SEQ ID NO: 2329316 - RNA, 19 nt, Artificial Sequence
  Description of Artificial Sequence: Synthetic oligonucleotide
  Sense strand starting at position 1470 of SEQ ID NO: 1885270
acuuguucccuugauaaag

SEQ ID NO: 2329317 - RNA, 19 nt, Artificial Sequence
  Description of Artificial Sequence: Synthetic oligonucleotide
  Antisense strand to SEQ ID NO: 2329316
cuuuaucaagggaacaagu

SEQ ID NO: 2329318 - RNA, 19 nt, Artificial Sequence
  Description of Artificial Sequence: Synthetic oligonucleotide
  Sense strand starting at position 1556 of SEQ ID NO: 1885270
aagugauaggguuauugua

SEQ ID NO: 2329319 - RNA, 19 nt, Artificial Sequence
  Description of Artificial Sequence: Synthetic oligonucleotide
  Antisense strand to SEQ ID NO: 2329318
uacaauaacccuaucacuu

SEQ ID NO: 2329320 - RNA, 19 nt, Artificial Sequence
  Description of Artificial Sequence: Synthetic oligonucleotide
  Sense strand starting at position 1606 of SEQ ID NO: 1885270
ggauuauagugcuuuaaac

SEQ ID NO: 2329321 - RNA, 19 nt, Artificial Sequence
  Description of Artificial Sequence: Synthetic oligonucleotide
  Antisense strand to SEQ ID NO: 2329320
guuuaaagcacuauaaucc

SEQ ID NO: 2329322 - RNA, 19 nt, Artificial Sequence
  Description of Artificial Sequence: Synthetic oligonucleotide
  Sense strand starting at position 1686 of SEQ ID NO: 1885270
ugcugaguaagagguagau

SEQ ID NO: 2329323 - RNA, 19 nt, Artificial Sequence
  Description of Artificial Sequence: Synthetic oligonucleotide
  Antisense strand to SEQ ID NO: 2329322
aucuaccucuuacucagca

SEQ ID NO: 2329324 - RNA, 19 nt, Artificial Sequence
  Description of Artificial Sequence: Synthetic oligonucleotide
  Sense strand starting at position 1688 of SEQ ID NO: 1885270
cugaguaagagguagaugu

SEQ ID NO: 2329325 - RNA, 19 nt, Artificial Sequence
  Description of Artificial Sequence: Synthetic oligonucleotide
  Antisense strand to SEQ ID NO: 2329324
acaucuaccucuuacucag

SEQ ID NO: 2329326 - RNA, 19 nt, Artificial Sequence
  Description of Artificial Sequence: Synthetic oligonucleotide
  Sense strand starting at position 1692 of SEQ ID NO: 1885270
guaagagguagaugugaau

SEQ ID NO: 2329327 - RNA, 19 nt, Artificial Sequence
  Description of Artificial Sequence: Synthetic oligonucleotide
  Antisense strand to SEQ ID NO: 2329326
auucacaucuaccucuuac

SEQ ID NO: 2329328 - RNA, 19 nt, Artificial Sequence
  Description of Artificial Sequence: Synthetic oligonucleotide
  Sense strand starting at position 1755 of SEQ ID NO: 1885270
auaguuaaugcauaggcaa

SEQ ID NO: 2329329 - RNA, 19 nt, Artificial Sequence
  Description of Artificial Sequence: Synthetic oligonucleotide
  Antisense strand to SEQ ID NO: 2329328
uugccuaugcauuaacuau

SEQ ID NO: 2329330 - RNA, 19 nt, Artificial Sequence
  Description of Artificial Sequence: Synthetic oligonucleotide
  Sense strand starting at position 1782 of SEQ ID NO: 1885270
gggcuuguaauguauagac

SEQ ID NO: 2329331 - RNA, 19 nt, Artificial Sequence
  Description of Artificial Sequence: Synthetic oligonucleotide
  Antisense strand to SEQ ID NO: 2329330
gucuauacauuacaagccc

SEQ ID NO: 2329332 - RNA, 19 nt, Artificial Sequence
  Description of Artificial Sequence: Synthetic oligonucleotide
  Sense strand starting at position 1784 of SEQ ID NO: 1885270
gcuuguaauguauagacaa

SEQ ID NO: 2329333 - RNA, 19 nt, Artificial Sequence
  Description of Artificial Sequence: Synthetic oligonucleotide
  Antisense strand to SEQ ID NO: 2329332
uugucuauacauuacaagc

SEQ ID NO: 2329334 - RNA, 19 nt, Artificial Sequence
  Description of Artificial Sequence: Synthetic oligonucleotide
  Sense strand starting at position 1881 of SEQ ID NO: 1885270
cuuccaauccagugaauag

SEQ ID NO: 2329335 - RNA, 19 nt, Artificial Sequence
  Description of Artificial Sequence: Synthetic oligonucleotide
  Antisense strand to SEQ ID NO: 2329334
cuauucacuggauuggaag

SEQ ID NO: 2329336 - RNA, 19 nt, Artificial Sequence
  Description of Artificial Sequence: Synthetic oligonucleotide
  Sense strand starting at position 2062 of SEQ ID NO: 1885270
cacagcucugauugagaug

SEQ ID NO: 2329337 - RNA, 19 nt, Artificial Sequence
  Description of Artificial Sequence: Synthetic oligonucleotide
  Antisense strand to SEQ ID NO: 2329336
caucucaaucagagcugug

SEQ ID NO: 2329338 - RNA, 19 nt, Artificial Sequence
  Description of Artificial Sequence: Synthetic oligonucleotide
  Sense strand starting at position 2080 of SEQ ID NO: 1885270
gccucagagaaagguuauu

SEQ ID NO: 2329339 - RNA, 19 nt, Artificial Sequence
  Description of Artificial Sequence: Synthetic oligonucleotide
  Antisense strand to SEQ ID NO: 2329338
aauaaccuuucucugaggc

SEQ ID NO: 2329340 - RNA, 19 nt, Artificial Sequence
  Description of Artificial Sequence: Synthetic oligonucleotide
  Sense strand starting at position 2106 of SEQ ID NO: 1885270
aagaguagauggucuaaca

SEQ ID NO: 2329341 - RNA, 19 nt, Artificial Sequence
  Description of Artificial Sequence: Synthetic oligonucleotide
  Antisense strand to SEQ ID NO: 2329340
uguuagaccaucuacucuu

SEQ ID NO: 2329342 - RNA, 19 nt, Artificial Sequence
  Description of Artificial Sequence: Synthetic oligonucleotide
  Sense strand starting at position 2399 of SEQ ID NO: 1885270
auaucucuguggguugaga

SEQ ID NO: 2329343 - RNA, 19 nt, Artificial Sequence
  Description of Artificial Sequence: Synthetic oligonucleotide
  Antisense strand to SEQ ID NO: 2329342
ucucaacccacagagauau

SEQ ID NO: 2329344 - RNA, 19 nt, Artificial Sequence
  Description of Artificial Sequence: Synthetic oligonucleotide
  Sense strand starting at position 2401 of SEQ ID NO: 1885270
aucucuguggguugagaag

SEQ ID NO: 2329345 - RNA, 19 nt, Artificial Sequence
  Description of Artificial Sequence: Synthetic oligonucleotide
  Antisense strand to SEQ ID NO: 2329344
cuucucaacccacagagau

SEQ ID NO: 2329346 - RNA, 19 nt, Artificial Sequence
  Description of Artificial Sequence: Synthetic oligonucleotide
  Sense strand starting at position 2479 of SEQ ID NO: 1885270
uuuagaauccaugaugcca

SEQ ID NO: 2329347 - RNA, 19 nt, Artificial Sequence
  Description of Artificial Sequence: Synthetic oligonucleotide
  Antisense strand to SEQ ID NO: 2329346
uggcaucauggauucuaaa

SEQ ID NO: 2329348 - RNA, 19 nt, Artificial Sequence
  Description of Artificial Sequence: Synthetic oligonucleotide
  Sense strand starting at position 2685 of SEQ ID NO: 1885270
gccugaguccuccaaucca

SEQ ID NO: 2329349 - RNA, 19 nt, Artificial Sequence
  Description of Artificial Sequence: Synthetic oligonucleotide
  Antisense strand to SEQ ID NO: 2329348
uggauuggaggacucaggc

SEQ ID NO: 2329350 - RNA, 19 nt, Artificial Sequence
  Description of Artificial Sequence: Synthetic oligonucleotide
  Sense strand starting at position 2729 of SEQ ID NO: 1885270
uggacauuucuaggucguu

SEQ ID NO: 2329351 - RNA, 19 nt, Artificial Sequence
  Description of Artificial Sequence: Synthetic oligonucleotide
  Antisense strand to SEQ ID NO: 2329350
aacgaccuagaaaugucca

SEQ ID NO: 2329352 - RNA, 19 nt, Artificial Sequence
  Description of Artificial Sequence: Synthetic oligonucleotide
  Sense strand starting at position 2730 of SEQ ID NO: 1885270
ggacauuucuaggucguuu

SEQ ID NO: 2329353 - RNA, 19 nt, Artificial Sequence
  Description of Artificial Sequence: Synthetic oligonucleotide
  Antisense strand to SEQ ID NO: 2329352
aaacgaccuagaaaugucc

SEQ ID NO: 2329354 - RNA, 19 nt, Artificial Sequence
  Description of Artificial Sequence: Synthetic oligonucleotide
  Sense strand starting at position 3148 of SEQ ID NO: 1885270
cugggaucuuaccuucuuu

SEQ ID NO: 2329355 - RNA, 19 nt, Artificial Sequence
  Description of Artificial Sequence: Synthetic oligonucleotide
  Antisense strand to SEQ ID NO: 2329354
aaagaagguaagaucccag

SEQ ID NO: 2329356 - RNA, 19 nt, Artificial Sequence
  Description of Artificial Sequence: Synthetic oligonucleotide
  Sense strand starting at position 3747 of SEQ ID NO: 1885270
ccuuaccauugucuggaaa

SEQ ID NO: 2329357 - RNA, 19 nt, Artificial Sequence
  Description of Artificial Sequence: Synthetic oligonucleotide
  Antisense strand to SEQ ID NO: 2329356
uuuccagacaaugguaagg

SEQ ID NO: 2329358 - RNA, 19 nt, Artificial Sequence
  Description of Artificial Sequence: Synthetic oligonucleotide
  Sense strand starting at position 498 of SEQ ID NO: 1885271
uuugguaucugaguaguuc

SEQ ID NO: 2329359 - RNA, 19 nt, Artificial Sequence
  Description of Artificial Sequence: Synthetic oligonucleotide
  Antisense strand to SEQ ID NO: 2329358
gaacuacucagauaccaaa

SEQ ID NO: 2329360 - RNA, 19 nt, Artificial Sequence
  Description of Artificial Sequence: Synthetic oligonucleotide
  Sense strand starting at position 499 of SEQ ID NO: 1885271
uugguaucugaguaguucu

SEQ ID NO: 2329361 - RNA, 19 nt, Artificial Sequence
  Description of Artificial Sequence: Synthetic oligonucleotide
  Antisense strand to SEQ ID NO: 2329360
agaacuacucagauaccaa

SEQ ID NO: 2329362 - RNA, 19 nt, Artificial Sequence
  Description of Artificial Sequence: Synthetic oligonucleotide
  Sense strand starting at position 502 of SEQ ID NO: 1885271
guaucugaguaguucugga

SEQ ID NO: 2329363 - RNA, 19 nt, Artificial Sequence
  Description of Artificial Sequence: Synthetic oligonucleotide
  Antisense strand to SEQ ID NO: 2329362
uccagaacuacucagauac

SEQ ID NO: 2329364 - RNA, 19 nt, Artificial Sequence
  Description of Artificial Sequence: Synthetic oligonucleotide
  Sense strand starting at position 507 of SEQ ID NO: 1885271
ugaguaguucuggaagcaa

SEQ ID NO: 2329365 - RNA, 19 nt, Artificial Sequence
  Description of Artificial Sequence: Synthetic oligonucleotide
  Antisense strand to SEQ ID NO: 2329364
uugcuuccagaacuacuca

SEQ ID NO: 2329366 - RNA, 19 nt, Artificial Sequence
  Description of Artificial Sequence: Synthetic oligonucleotide
  Sense strand starting at position 543 of SEQ ID NO: 1885271
agaggacuguacuacagaa

SEQ ID NO: 2329367 - RNA, 19 nt, Artificial Sequence
  Description of Artificial Sequence: Synthetic oligonucleotide
  Antisense strand to SEQ ID NO: 2329366
uucuguaguacaguccucu

SEQ ID NO: 2329368 - RNA, 19 nt, Artificial Sequence
  Description of Artificial Sequence: Synthetic oligonucleotide
  Sense strand starting at position 568 of SEQ ID NO: 1885271
auuuaagcaucauagguau

SEQ ID NO: 2329369 - RNA, 19 nt, Artificial Sequence
  Description of Artificial Sequence: Synthetic oligonucleotide
  Antisense strand to SEQ ID NO: 2329368
auaccuaugaugcuuaaau

SEQ ID NO: 2329370 - RNA, 19 nt, Artificial Sequence
  Description of Artificial Sequence: Synthetic oligonucleotide
  Sense strand starting at position 704 of SEQ ID NO: 1885271
uuaugcuuccgcuacaaau

SEQ ID NO: 2329371 - RNA, 19 nt, Artificial Sequence
  Description of Artificial Sequence: Synthetic oligonucleotide
  Antisense strand to SEQ ID NO: 2329370
auuuguagcggaagcauaa

SEQ ID NO: 2329372 - RNA, 19 nt, Artificial Sequence
  Description of Artificial Sequence: Synthetic oligonucleotide
  Sense strand starting at position 844 of SEQ ID NO: 1885271
auauuccuggcauauauga

SEQ ID NO: 2329373 - RNA, 19 nt, Artificial Sequence
  Description of Artificial Sequence: Synthetic oligonucleotide
  Antisense strand to SEQ ID NO: 2329372
ucauauaugccaggaauau

SEQ ID NO: 2329374 - RNA, 19 nt, Artificial Sequence
  Description of Artificial Sequence: Synthetic oligonucleotide
  Sense strand starting at position 859 of SEQ ID NO: 1885271
augaaacuuuagccagagu

SEQ ID NO: 2329375 - RNA, 19 nt, Artificial Sequence
  Description of Artificial Sequence: Synthetic oligonucleotide
  Antisense strand to SEQ ID NO: 2329374
acucuggcuaaaguuucau

SEQ ID NO: 2329376 - RNA, 19 nt, Artificial Sequence
  Description of Artificial Sequence: Synthetic oligonucleotide
  Sense strand starting at position 1017 of SEQ ID NO: 1885271
aauagcagucagcagaaau

SEQ ID NO: 2329377 - RNA, 19 nt, Artificial Sequence
  Description of Artificial Sequence: Synthetic oligonucleotide
  Antisense strand to SEQ ID NO: 2329376
auuucugcugacugcuauu

SEQ ID NO: 2329378 - RNA, 19 nt, Artificial Sequence
  Description of Artificial Sequence: Synthetic oligonucleotide
  Sense strand starting at position 1191 of SEQ ID NO: 1885271
guugauuucugagcaguuu

SEQ ID NO: 2329379 - RNA, 19 nt, Artificial Sequence
  Description of Artificial Sequence: Synthetic oligonucleotide
  Antisense strand to SEQ ID NO: 2329378
aaacugcucagaaaucaac

SEQ ID NO: 2329380 - RNA, 19 nt, Artificial Sequence
  Description of Artificial Sequence: Synthetic oligonucleotide
  Sense strand starting at position 1228 of SEQ ID NO: 1885271
augacagaauaucagugaa

SEQ ID NO: 2329381 - RNA, 19 nt, Artificial Sequence
  Description of Artificial Sequence: Synthetic oligonucleotide
  Antisense strand to SEQ ID NO: 2329380
uucacugauauucugucau

SEQ ID NO: 2329382 - RNA, 19 nt, Artificial Sequence
  Description of Artificial Sequence: Synthetic oligonucleotide
  Sense strand starting at position 1367 of SEQ ID NO: 1885271
gagccuguguuccuggaaa

SEQ ID NO: 2329383 - RNA, 19 nt, Artificial Sequence
  Description of Artificial Sequence: Synthetic oligonucleotide
  Antisense strand to SEQ ID NO: 2329382
uuuccaggaacacaggcuc

SEQ ID NO: 2329384 - RNA, 19 nt, Artificial Sequence
  Description of Artificial Sequence: Synthetic oligonucleotide
  Sense strand starting at position 1397 of SEQ ID NO: 1885271
gcaagaucaccaugagaac

SEQ ID NO: 2329385 - RNA, 19 nt, Artificial Sequence
  Description of Artificial Sequence: Synthetic oligonucleotide
  Antisense strand to SEQ ID NO: 2329384
guucucauggugaucuugc

SEQ ID NO: 2329386 - RNA, 19 nt, Artificial Sequence
  Description of Artificial Sequence: Synthetic oligonucleotide
  Sense strand starting at position 1587 of SEQ ID NO: 1885271
uugggaaaucuuuaccugu

SEQ ID NO: 2329387 - RNA, 19 nt, Artificial Sequence
  Description of Artificial Sequence: Synthetic oligonucleotide
  Antisense strand to SEQ ID NO: 2329386
acagguaaagauuucccaa

SEQ ID NO: 2329388 - RNA, 19 nt, Artificial Sequence
  Description of Artificial Sequence: Synthetic oligonucleotide
  Sense strand starting at position 1589 of SEQ ID NO: 1885271
gggaaaucuuuaccuguca

SEQ ID NO: 2329389 - RNA, 19 nt, Artificial Sequence
  Description of Artificial Sequence: Synthetic oligonucleotide
  Antisense strand to SEQ ID NO: 2329388
ugacagguaaagauuuccc

SEQ ID NO: 2329390 - RNA, 19 nt, Artificial Sequence
  Description of Artificial Sequence: Synthetic oligonucleotide
  Sense strand starting at position 1590 of SEQ ID NO: 1885271
ggaaaucuuuaccugucaa

SEQ ID NO: 2329391 - RNA, 19 nt, Artificial Sequence
  Description of Artificial Sequence: Synthetic oligonucleotide
  Antisense strand to SEQ ID NO: 2329390
uugacagguaaagauuucc

SEQ ID NO: 2329392 - RNA, 19 nt, Artificial Sequence
  Description of Artificial Sequence: Synthetic oligonucleotide
  Sense strand starting at position 1845 of SEQ ID NO: 1885271
ugucuagcuuaaucaaaga

SEQ ID NO: 2329393 - RNA, 19 nt, Artificial Sequence
  Description of Artificial Sequence: Synthetic oligonucleotide
  Antisense strand to SEQ ID NO: 2329392
ucuuugauuaagcuagaca

SEQ ID NO: 2329394 - RNA, 19 nt, Artificial Sequence
  Description of Artificial Sequence: Synthetic oligonucleotide
  Sense strand starting at position 1867 of SEQ ID NO: 1885271
cgagauauucgugucugcu

SEQ ID NO: 2329395 - RNA, 19 nt, Artificial Sequence
  Description of Artificial Sequence: Synthetic oligonucleotide
  Antisense strand to SEQ ID NO: 2329394
agcagacacgaauaucucg

SEQ ID NO: 2329396 - RNA, 19 nt, Artificial Sequence
  Description of Artificial Sequence: Synthetic oligonucleotide
  Sense strand starting at position 1917 of SEQ ID NO: 1885271
ggcugaaguacaggaauau

SEQ ID NO: 2329397 - RNA, 19 nt, Artificial Sequence
  Description of Artificial Sequence: Synthetic oligonucleotide
  Antisense strand to SEQ ID NO: 2329396
auauuccuguacuucagcc

SEQ ID NO: 2329398 - RNA, 19 nt, Artificial Sequence
  Description of Artificial Sequence: Synthetic oligonucleotide
  Sense strand starting at position 2518 of SEQ ID NO: 1885271
uguaacauuacguaucagu

SEQ ID NO: 2329399 - RNA, 19 nt, Artificial Sequence
  Description of Artificial Sequence: Synthetic oligonucleotide
  Antisense strand to SEQ ID NO: 2329398
acugauacguaauguuaca

SEQ ID NO: 2329400 - RNA, 19 nt, Artificial Sequence
  Description of Artificial Sequence: Synthetic oligonucleotide
  Sense strand starting at position 2557 of SEQ ID NO: 1885271
cucaguuaugcagaucauc

SEQ ID NO: 2329401 - RNA, 19 nt, Artificial Sequence
  Description of Artificial Sequence: Synthetic oligonucleotide
  Antisense strand to SEQ ID NO: 2329400
gaugaucugcauaacugag

SEQ ID NO: 2329402 - RNA, 19 nt, Artificial Sequence
  Description of Artificial Sequence: Synthetic oligonucleotide
  Sense strand starting at position 2678 of SEQ ID NO: 1885271
cucacaguuguggauacaa

SEQ ID NO: 2329403 - RNA, 19 nt, Artificial Sequence
  Description of Artificial Sequence: Synthetic oligonucleotide
  Antisense strand to SEQ ID NO: 2329402
uuguauccacaacugugag

SEQ ID NO: 2329404 - RNA, 19 nt, Artificial Sequence
  Description of Artificial Sequence: Synthetic oligonucleotide
  Sense strand starting at position 2680 of SEQ ID NO: 1885271
cacaguuguggauacaagu

SEQ ID NO: 2329405 - RNA, 19 nt, Artificial Sequence
  Description of Artificial Sequence: Synthetic oligonucleotide
  Antisense strand to SEQ ID NO: 2329404
acuuguauccacaacugug

SEQ ID NO: 2329406 - RNA, 19 nt, Artificial Sequence
  Description of Artificial Sequence: Synthetic oligonucleotide
  Sense strand starting at position 2830 of SEQ ID NO: 1885271
agcaccauaguuugucaau

SEQ ID NO: 2329407 - RNA, 19 nt, Artificial Sequence
  Description of Artificial Sequence: Synthetic oligonucleotide
  Antisense strand to SEQ ID NO: 2329406
auugacaaacuauggugcu

SEQ ID NO: 2329408 - RNA, 19 nt, Artificial Sequence
  Description of Artificial Sequence: Synthetic oligonucleotide
  Sense strand starting at position 2831 of SEQ ID NO: 1885271
gcaccauaguuugucaauc

SEQ ID NO: 2329409 - RNA, 19 nt, Artificial Sequence
  Description of Artificial Sequence: Synthetic oligonucleotide
  Antisense strand to SEQ ID NO: 2329408
gauugacaaacuauggugc

SEQ ID NO: 2329410 - RNA, 19 nt, Artificial Sequence
  Description of Artificial Sequence: Synthetic oligonucleotide
  Sense strand starting at position 2939 of SEQ ID NO: 1885271
ccaucauacugaucggaaa

SEQ ID NO: 2329411 - RNA, 19 nt, Artificial Sequence
  Description of Artificial Sequence: Synthetic oligonucleotide
  Antisense strand to SEQ ID NO: 2329410
uuuccgaucaguaugaugg

SEQ ID NO: 2329412 - RNA, 19 nt, Artificial Sequence
  Description of Artificial Sequence: Synthetic oligonucleotide
  Sense strand starting at position 2940 of SEQ ID NO: 1885271
caucauacugaucggaaag

SEQ ID NO: 2329413 - RNA, 19 nt, Artificial Sequence
  Description of Artificial Sequence: Synthetic oligonucleotide
  Antisense strand to SEQ ID NO: 2329412
cuuuccgaucaguaugaug

SEQ ID NO: 2329414 - RNA, 19 nt, Artificial Sequence
  Description of Artificial Sequence: Synthetic oligonucleotide
  Sense strand starting at position 2952 of SEQ ID NO: 1885271
cggaaagcacaauguuaca

SEQ ID NO: 2329415 - RNA, 19 nt, Artificial Sequence
  Description of Artificial Sequence: Synthetic oligonucleotide
  Antisense strand to SEQ ID NO: 2329414
uguaacauugugcuuuccg

SEQ ID NO: 2329416 - RNA, 19 nt, Artificial Sequence
  Description of Artificial Sequence: Synthetic oligonucleotide
  Sense strand starting at position 3024 of SEQ ID NO: 1885271
gaugcugggcucuaugacu

SEQ ID NO: 2329417 - RNA, 19 nt, Artificial Sequence
  Description of Artificial Sequence: Synthetic oligonucleotide
  Antisense strand to SEQ ID NO: 2329416
agucauagagcccagcauc

SEQ ID NO: 2329418 - RNA, 19 nt, Artificial Sequence
  Description of Artificial Sequence: Synthetic oligonucleotide
  Sense strand starting at position 3193 of SEQ ID NO: 1885271
aguauaucaugccuuagca

SEQ ID NO: 2329419 - RNA, 19 nt, Artificial Sequence
  Description of Artificial Sequence: Synthetic oligonucleotide
  Antisense strand to SEQ ID NO: 2329418
ugcuaaggcaugauauacu

SEQ ID NO: 2329420 - RNA, 19 nt, Artificial Sequence
  Description of Artificial Sequence: Synthetic oligonucleotide
  Sense strand starting at position 3244 of SEQ ID NO: 1885271
cuugcaagucugugacacu

SEQ ID NO: 2329421 - RNA, 19 nt, Artificial Sequence
  Description of Artificial Sequence: Synthetic oligonucleotide
  Antisense strand to SEQ ID NO: 2329420
agugucacagacuugcaag

SEQ ID NO: 2329422 - RNA, 19 nt, Artificial Sequence
  Description of Artificial Sequence: Synthetic oligonucleotide
  Sense strand starting at position 3372 of SEQ ID NO: 1885271
uagaaacgauguucuacau

SEQ ID NO: 2329423 - RNA, 19 nt, Artificial Sequence
  Description of Artificial Sequence: Synthetic oligonucleotide
  Antisense strand to SEQ ID NO: 2329422
auguagaacaucguuucua

SEQ ID NO: 2329424 - RNA, 19 nt, Artificial Sequence
  Description of Artificial Sequence: Synthetic oligonucleotide
  Sense strand starting at position 3464 of SEQ ID NO: 1885271
gaaauaggcuuacagaaag

SEQ ID NO: 2329425 - RNA, 19 nt, Artificial Sequence
  Description of Artificial Sequence: Synthetic oligonucleotide
  Antisense strand to SEQ ID NO: 2329424
cuuucuguaagccuauuuc

SEQ ID NO: 2329426 - RNA, 19 nt, Artificial Sequence
  Description of Artificial Sequence: Synthetic oligonucleotide
  Sense strand starting at position 3495 of SEQ ID NO: 1885271
gcuggaaacuagucuguug

SEQ ID NO: 2329427 - RNA, 19 nt, Artificial Sequence
  Description of Artificial Sequence: Synthetic oligonucleotide
  Antisense strand to SEQ ID NO: 2329426
caacagacuaguuuccagc

SEQ ID NO: 2329428 - RNA, 19 nt, Artificial Sequence
  Description of Artificial Sequence: Synthetic oligonucleotide
  Sense strand starting at position 3503 of SEQ ID NO: 1885271
cuagucuguuggcuccaaa

SEQ ID NO: 2329429 - RNA, 19 nt, Artificial Sequence
  Description of Artificial Sequence: Synthetic oligonucleotide
  Antisense strand to SEQ ID NO: 2329428
uuuggagccaacagacuag

SEQ ID NO: 2329430 - RNA, 19 nt, Artificial Sequence
  Description of Artificial Sequence: Synthetic oligonucleotide
  Sense strand starting at position 3562 of SEQ ID NO: 1885271
ucuuacuagcuuugguaua

SEQ ID NO: 2329431 - RNA, 19 nt, Artificial Sequence
  Description of Artificial Sequence: Synthetic oligonucleotide
  Antisense strand to SEQ ID NO: 2329430
uauaccaaagcuaguaaga

SEQ ID NO: 2329432 - RNA, 19 nt, Artificial Sequence
  Description of Artificial Sequence: Synthetic oligonucleotide
  Sense strand starting at position 3793 of SEQ ID NO: 1885271
gccugaaauuaaccuuaga

SEQ ID NO: 2329433 - RNA, 19 nt, Artificial Sequence
  Description of Artificial Sequence: Synthetic oligonucleotide
  Antisense strand to SEQ ID NO: 2329432
ucuaagguuaauuucaggc

SEQ ID NO: 2329434 - RNA, 19 nt, Artificial Sequence
  Description of Artificial Sequence: Synthetic oligonucleotide
  Sense strand starting at position 3806 of SEQ ID NO: 1885271
cuuagaagcuucucaacug

SEQ ID NO: 2329435 - RNA, 19 nt, Artificial Sequence
  Description of Artificial Sequence: Synthetic oligonucleotide
  Antisense strand to SEQ ID NO: 2329434
caguugagaagcuucuaag

SEQ ID NO: 2329436 - RNA, 19 nt, Artificial Sequence
  Description of Artificial Sequence: Synthetic oligonucleotide
  Sense strand starting at position 3875 of SEQ ID NO: 1885271
gaaauuuguuugucugccu

SEQ ID NO: 2329437 - RNA, 19 nt, Artificial Sequence
  Description of Artificial Sequence: Synthetic oligonucleotide
  Antisense strand to SEQ ID NO: 2329436
aggcagacaaacaaauuuc

SEQ ID NO: 2329438 - RNA, 19 nt, Artificial Sequence
  Description of Artificial Sequence: Synthetic oligonucleotide
  Sense strand starting at position 187 of SEQ ID NO: 1885272
ggccuuugcccaggaagau

SEQ ID NO: 2329439 - RNA, 19 nt, Artificial Sequence
  Description of Artificial Sequence: Synthetic oligonucleotide
  Antisense strand to SEQ ID NO: 2329438
aucuuccugggcaaaggcc

SEQ ID NO: 2329440 - RNA, 19 nt, Artificial Sequence
  Description of Artificial Sequence: Synthetic oligonucleotide
  Sense strand starting at position 204 of SEQ ID NO: 1885272
augcgauaaggauguuucu

SEQ ID NO: 2329441 - RNA, 19 nt, Artificial Sequence
  Description of Artificial Sequence: Synthetic oligonucleotide
  Antisense strand to SEQ ID NO: 2329440
agaaacauccuuaucgcau

SEQ ID NO: 2329442 - RNA, 19 nt, Artificial Sequence
  Description of Artificial Sequence: Synthetic oligonucleotide
  Sense strand starting at position 354 of SEQ ID NO: 1885272
gguaaacaguucuacaaag

SEQ ID NO: 2329443 - RNA, 19 nt, Artificial Sequence
  Description of Artificial Sequence: Synthetic oligonucleotide
  Antisense strand to SEQ ID NO: 2329442
cuuuguagaacuguuuacc

SEQ ID NO: 2329444 - RNA, 19 nt, Artificial Sequence
  Description of Artificial Sequence: Synthetic oligonucleotide
  Sense strand starting at position 464 of SEQ ID NO: 1885272
ggugcucacgucugacgaa

SEQ ID NO: 2329445 - RNA, 19 nt, Artificial Sequence
  Description of Artificial Sequence: Synthetic oligonucleotide
  Antisense strand to SEQ ID NO: 2329444
uucgucagacgugagcacc

SEQ ID NO: 2329446 - RNA, 19 nt, Artificial Sequence
  Description of Artificial Sequence: Synthetic oligonucleotide
  Sense strand starting at position 506 of SEQ ID NO: 1885272
aggucagaugguggugaua

SEQ ID NO: 2329447 - RNA, 19 nt, Artificial Sequence
  Description of Artificial Sequence: Synthetic oligonucleotide
  Antisense strand to SEQ ID NO: 2329446
uaucaccaccaucugaccu

SEQ ID NO: 2329448 - RNA, 19 nt, Artificial Sequence
  Description of Artificial Sequence: Synthetic oligonucleotide
  Sense strand starting at position 508 of SEQ ID NO: 1885272
gucagaugguggugauaau

SEQ ID NO: 2329449 - RNA, 19 nt, Artificial Sequence
  Description of Artificial Sequence: Synthetic oligonucleotide
  Antisense strand to SEQ ID NO: 2329448
auuaucaccaccaucugac

SEQ ID NO: 2329450 - RNA, 19 nt, Artificial Sequence
  Description of Artificial Sequence: Synthetic oligonucleotide
  Sense strand starting at position 792 of SEQ ID NO: 1885272
ucgugaaggguccauggau

SEQ ID NO: 2329451 - RNA, 19 nt, Artificial Sequence
  Description of Artificial Sequence: Synthetic oligonucleotide
  Antisense strand to SEQ ID NO: 2329450
auccauggacccuucacga

SEQ ID NO: 2329452 - RNA, 19 nt, Artificial Sequence
  Description of Artificial Sequence: Synthetic oligonucleotide
  Sense strand starting at position 1298 of SEQ ID NO: 1885272
ggauaucuguuucccagca

SEQ ID NO: 2329453 - RNA, 19 nt, Artificial Sequence
  Description of Artificial Sequence: Synthetic oligonucleotide
  Antisense strand to SEQ ID NO: 2329452
ugcugggaaacagauaucc

SEQ ID NO: 2329454 - RNA, 19 nt, Artificial Sequence
  Description of Artificial Sequence: Synthetic oligonucleotide
  Sense strand starting at position 1373 of SEQ ID NO: 1885272
gagggauggugcugacuca

SEQ ID NO: 2329455 - RNA, 19 nt, Artificial Sequence
  Description of Artificial Sequence: Synthetic oligonucleotide
  Antisense strand to SEQ ID NO: 2329454
ugagucagcaccaucccuc

SEQ ID NO: 2329456 - RNA, 19 nt, Artificial Sequence
  Description of Artificial Sequence: Synthetic oligonucleotide
  Sense strand starting at position 1386 of SEQ ID NO: 1885272
gacucauuguuggagguga

SEQ ID NO: 2329457 - RNA, 19 nt, Artificial Sequence
  Description of Artificial Sequence: Synthetic oligonucleotide
  Antisense strand to SEQ ID NO: 2329456
ucaccuccaacaaugaguc

SEQ ID NO: 2329458 - RNA, 19 nt, Artificial Sequence
  Description of Artificial Sequence: Synthetic oligonucleotide
  Sense strand starting at position 1390 of SEQ ID NO: 1885272
cauuguuggaggugaguca

SEQ ID NO: 2329459 - RNA, 19 nt, Artificial Sequence
  Description of Artificial Sequence: Synthetic oligonucleotide
  Antisense strand to SEQ ID NO: 2329458
ugacucaccuccaacaaug

SEQ ID NO: 2329460 - RNA, 19 nt, Artificial Sequence
  Description of Artificial Sequence: Synthetic oligonucleotide
  Sense strand starting at position 1441 of SEQ ID NO: 1885272
ucuccagucuaauaaggga

SEQ ID NO: 2329461 - RNA, 19 nt, Artificial Sequence
  Description of Artificial Sequence: Synthetic oligonucleotide
  Antisense strand to SEQ ID NO: 2329460
ucccuuauuagacuggaga

SEQ ID NO: 2329462 - RNA, 19 nt, Artificial Sequence
  Description of Artificial Sequence: Synthetic oligonucleotide
  Sense strand starting at position 1449 of SEQ ID NO: 1885272
cuaauaagggaaugguagu

SEQ ID NO: 2329463 - RNA, 19 nt, Artificial Sequence
  Description of Artificial Sequence: Synthetic oligonucleotide
  Antisense strand to SEQ ID NO: 2329462
acuaccauucccuuauuag

SEQ ID NO: 2329464 - RNA, 19 nt, Artificial Sequence
  Description of Artificial Sequence: Synthetic oligonucleotide
  Sense strand starting at position 2000 of SEQ ID NO: 1885272
cacgaugagaggugugaga

SEQ ID NO: 2329465 - RNA, 19 nt, Artificial Sequence
  Description of Artificial Sequence: Synthetic oligonucleotide
  Antisense strand to SEQ ID NO: 2329464
ucucacaccucucaucgug

SEQ ID NO: 2329466 - RNA, 19 nt, Artificial Sequence
  Description of Artificial Sequence: Synthetic oligonucleotide
  Sense strand starting at position 2002 of SEQ ID NO: 1885272
cgaugagaggugugagaag

SEQ ID NO: 2329467 - RNA, 19 nt, Artificial Sequence
  Description of Artificial Sequence: Synthetic oligonucleotide
  Antisense strand to SEQ ID NO: 2329466
cuucucacaccucucaucg

SEQ ID NO: 2329468 - RNA, 19 nt, Artificial Sequence
  Description of Artificial Sequence: Synthetic oligonucleotide
  Sense strand starting at position 2108 of SEQ ID NO: 1885272
uguauugcucuuugccaca

SEQ ID NO: 2329469 - RNA, 19 nt, Artificial Sequence
  Description of Artificial Sequence: Synthetic oligonucleotide
  Antisense strand to SEQ ID NO: 2329468
uguggcaaagagcaauaca

SEQ ID NO: 2329470 - RNA, 19 nt, Artificial Sequence
  Description of Artificial Sequence: Synthetic oligonucleotide
  Sense strand starting at position 2246 of SEQ ID NO: 1885272
uuauacucuuaaugaggua

SEQ ID NO: 2329471 - RNA, 19 nt, Artificial Sequence
  Description of Artificial Sequence: Synthetic oligonucleotide
  Antisense strand to SEQ ID NO: 2329470
uaccucauuaagaguauaa

SEQ ID NO: 2329472 - RNA, 19 nt, Artificial Sequence
  Description of Artificial Sequence: Synthetic oligonucleotide
  Sense strand starting at position 2300 of SEQ ID NO: 1885272
guuucucuggcagaagcau

SEQ ID NO: 2329473 - RNA, 19 nt, Artificial Sequence
  Description of Artificial Sequence: Synthetic oligonucleotide
  Antisense strand to SEQ ID NO: 2329472
augcuucugccagagaaac

SEQ ID NO: 2329474 - RNA, 19 nt, Artificial Sequence
  Description of Artificial Sequence: Synthetic oligonucleotide
  Sense strand starting at position 2369 of SEQ ID NO: 1885272
ggaggagucucaugagaua

SEQ ID NO: 2329475 - RNA, 19 nt, Artificial Sequence
  Description of Artificial Sequence: Synthetic oligonucleotide
  Antisense strand to SEQ ID NO: 2329474
uaucucaugagacuccucc

SEQ ID NO: 2329476 - RNA, 19 nt, Artificial Sequence
  Description of Artificial Sequence: Synthetic oligonucleotide
  Sense strand starting at position 2372 of SEQ ID NO: 1885272
ggagucucaugagauagga

SEQ ID NO: 2329477 - RNA, 19 nt, Artificial Sequence
  Description of Artificial Sequence: Synthetic oligonucleotide
  Antisense strand to SEQ ID NO: 2329476
uccuaucucaugagacucc

SEQ ID NO: 2329478 - RNA, 19 nt, Artificial Sequence
  Description of Artificial Sequence: Synthetic oligonucleotide
  Sense strand starting at position 2558 of SEQ ID NO: 1885272
augugugccuuaguauaaa

SEQ ID NO: 2329479 - RNA, 19 nt, Artificial Sequence
  Description of Artificial Sequence: Synthetic oligonucleotide
  Antisense strand to SEQ ID NO: 2329478
uuuauacuaaggcacacau

SEQ ID NO: 2329480 - RNA, 19 nt, Artificial Sequence
  Description of Artificial Sequence: Synthetic oligonucleotide
  Sense strand starting at position 2570 of SEQ ID NO: 1885272
guauaaauuuccuggaagu

SEQ ID NO: 2329481 - RNA, 19 nt, Artificial Sequence
  Description of Artificial Sequence: Synthetic oligonucleotide
  Antisense strand to SEQ ID NO: 2329480
acuuccaggaaauuuauac

SEQ ID NO: 2329482 - RNA, 19 nt, Artificial Sequence
  Description of Artificial Sequence: Synthetic oligonucleotide
  Sense strand starting at position 2657 of SEQ ID NO: 1885272
gccaguucuuccuuaggau

SEQ ID NO: 2329483 - RNA, 19 nt, Artificial Sequence
  Description of Artificial Sequence: Synthetic oligonucleotide
  Antisense strand to SEQ ID NO: 2329482
auccuaaggaagaacuggc

SEQ ID NO: 2329484 - RNA, 19 nt, Artificial Sequence
  Description of Artificial Sequence: Synthetic oligonucleotide
  Sense strand starting at position 2658 of SEQ ID NO: 1885272
ccaguucuuccuuaggaug

SEQ ID NO: 2329485 - RNA, 19 nt, Artificial Sequence
  Description of Artificial Sequence: Synthetic oligonucleotide
  Antisense strand to SEQ ID NO: 2329484
cauccuaaggaagaacugg

SEQ ID NO: 2329486 - RNA, 19 nt, Artificial Sequence
  Description of Artificial Sequence: Synthetic oligonucleotide
  Sense strand starting at position 2661 of SEQ ID NO: 1885272
guucuuccuuaggaugcaa

SEQ ID NO: 2329487 - RNA, 19 nt, Artificial Sequence
  Description of Artificial Sequence: Synthetic oligonucleotide
  Antisense strand to SEQ ID NO: 2329486
uugcauccuaaggaagaac

SEQ ID NO: 2329488 - RNA, 19 nt, Artificial Sequence
  Description of Artificial Sequence: Synthetic oligonucleotide
  Sense strand starting at position 2663 of SEQ ID NO: 1885272
ucuuccuuaggaugcaaau

SEQ ID NO: 2329489 - RNA, 19 nt, Artificial Sequence
  Description of Artificial Sequence: Synthetic oligonucleotide
  Antisense strand to SEQ ID NO: 2329488
auuugcauccuaaggaaga

SEQ ID NO: 2329490 - RNA, 19 nt, Artificial Sequence
  Description of Artificial Sequence: Synthetic oligonucleotide
  Sense strand starting at position 2672 of SEQ ID NO: 1885272
ggaugcaaaucccaggaaa

SEQ ID NO: 2329491 - RNA, 19 nt, Artificial Sequence
  Description of Artificial Sequence: Synthetic oligonucleotide
  Antisense strand to SEQ ID NO: 2329490
uuuccugggauuugcaucc

SEQ ID NO: 2329492 - RNA, 19 nt, Artificial Sequence
  Description of Artificial Sequence: Synthetic oligonucleotide
  Sense strand starting at position 3079 of SEQ ID NO: 1885272
ccaacaauguguguaugua

SEQ ID NO: 2329493 - RNA, 19 nt, Artificial Sequence
  Description of Artificial Sequence: Synthetic oligonucleotide
  Antisense strand to SEQ ID NO: 2329492
uacauacacacauuguugg

SEQ ID NO: 2329494 - RNA, 19 nt, Artificial Sequence
  Description of Artificial Sequence: Synthetic oligonucleotide
  Sense strand starting at position 3361 of SEQ ID NO: 1885272
agacgacagaaauguaguu

SEQ ID NO: 2329495 - RNA, 19 nt, Artificial Sequence
  Description of Artificial Sequence: Synthetic oligonucleotide
  Antisense strand to SEQ ID NO: 2329494
aacuacauuucugucgucu

SEQ ID NO: 2329496 - RNA, 19 nt, Artificial Sequence
  Description of Artificial Sequence: Synthetic oligonucleotide
  Sense strand starting at position 3411 of SEQ ID NO: 1885272
gcuagugggugguagauau

SEQ ID NO: 2329497 - RNA, 19 nt, Artificial Sequence
  Description of Artificial Sequence: Synthetic oligonucleotide
  Antisense strand to SEQ ID NO: 2329496
auaucuaccacccacuagc

SEQ ID NO: 2329498 - RNA, 19 nt, Artificial Sequence
  Description of Artificial Sequence: Synthetic oligonucleotide
  Sense strand starting at position 3438 of SEQ ID NO: 1885272
agaucuuucugcccacaga

SEQ ID NO: 2329499 - RNA, 19 nt, Artificial Sequence
  Description of Artificial Sequence: Synthetic oligonucleotide
  Antisense strand to SEQ ID NO: 2329498
ucugugggcagaaagaucu

SEQ ID NO: 2329500 - RNA, 19 nt, Artificial Sequence
  Description of Artificial Sequence: Synthetic oligonucleotide
  Sense strand starting at position 3448 of SEQ ID NO: 1885272
gcccacagagccuauaaau

SEQ ID NO: 2329501 - RNA, 19 nt, Artificial Sequence
  Description of Artificial Sequence: Synthetic oligonucleotide
  Antisense strand to SEQ ID NO: 2329500
auuuauaggcucugugggc

SEQ ID NO: 2329502 - RNA, 19 nt, Artificial Sequence
  Description of Artificial Sequence: Synthetic oligonucleotide
  Sense strand starting at position 3531 of SEQ ID NO: 1885272
gcagucauggcagaauuga

SEQ ID NO: 2329503 - RNA, 19 nt, Artificial Sequence
  Description of Artificial Sequence: Synthetic oligonucleotide
  Antisense strand to SEQ ID NO: 2329502
ucaauucugccaugacugc

SEQ ID NO: 2329504 - RNA, 19 nt, Artificial Sequence
  Description of Artificial Sequence: Synthetic oligonucleotide
  Sense strand starting at position 56 of SEQ ID NO: 1885273
ggcagugcucucugaucca

SEQ ID NO: 2329505 - RNA, 19 nt, Artificial Sequence
  Description of Artificial Sequence: Synthetic oligonucleotide
  Antisense strand to SEQ ID NO: 2329504
uggaucagagagcacugcc

SEQ ID NO: 2329506 - RNA, 19 nt, Artificial Sequence
  Description of Artificial Sequence: Synthetic oligonucleotide
  Sense strand starting at position 78 of SEQ ID NO: 1885273
gcgcuauaucugucuccau

SEQ ID NO: 2329507 - RNA, 19 nt, Artificial Sequence
  Description of Artificial Sequence: Synthetic oligonucleotide
  Antisense strand to SEQ ID NO: 2329506
auggagacagauauagcgc

SEQ ID NO: 2329508 - RNA, 19 nt, Artificial Sequence
  Description of Artificial Sequence: Synthetic oligonucleotide
  Sense strand starting at position 90 of SEQ ID NO: 1885273
ucuccaucuuaaggagaaa

SEQ ID NO: 2329509 - RNA, 19 nt, Artificial Sequence
  Description of Artificial Sequence: Synthetic oligonucleotide
  Antisense strand to SEQ ID NO: 2329508
uuucuccuuaagauggaga

SEQ ID NO: 2329510 - RNA, 19 nt, Artificial Sequence
  Description of Artificial Sequence: Synthetic oligonucleotide
  Sense strand starting at position 124 of SEQ ID NO: 1885273
gaugucacuccugaugugu

SEQ ID NO: 2329511 - RNA, 19 nt, Artificial Sequence
  Description of Artificial Sequence: Synthetic oligonucleotide
  Antisense strand to SEQ ID NO: 2329510
acacaucaggagugacauc

SEQ ID NO: 2329512 - RNA, 19 nt, Artificial Sequence
  Description of Artificial Sequence: Synthetic oligonucleotide
  Sense strand starting at position 133 of SEQ ID NO: 1885273
ccugauguguuacaacuaa

SEQ ID NO: 2329513 - RNA, 19 nt, Artificial Sequence
  Description of Artificial Sequence: Synthetic oligonucleotide
  Antisense strand to SEQ ID NO: 2329512
uuaguuguaacacaucagg

SEQ ID NO: 2329514 - RNA, 19 nt, Artificial Sequence
  Description of Artificial Sequence: Synthetic oligonucleotide
  Sense strand starting at position 162 of SEQ ID NO: 1885273
cuaggacucuccgaaggaa

SEQ ID NO: 2329515 - RNA, 19 nt, Artificial Sequence
  Description of Artificial Sequence: Synthetic oligonucleotide
  Antisense strand to SEQ ID NO: 2329514
uuccuucggagaguccuag

SEQ ID NO: 2329516 - RNA, 19 nt, Artificial Sequence
  Description of Artificial Sequence: Synthetic oligonucleotide
  Sense strand starting at position 270 of SEQ ID NO: 1885273
guaggauauaaauggcauc

SEQ ID NO: 2329517 - RNA, 19 nt, Artificial Sequence
  Description of Artificial Sequence: Synthetic oligonucleotide
  Antisense strand to SEQ ID NO: 2329516
gaugccauuuauauccuac

SEQ ID NO: 2329518 - RNA, 19 nt, Artificial Sequence
  Description of Artificial Sequence: Synthetic oligonucleotide
  Sense strand starting at position 1191 of SEQ ID NO: 1885273
ggauggagaguguggucaa

SEQ ID NO: 2329519 - RNA, 19 nt, Artificial Sequence
  Description of Artificial Sequence: Synthetic oligonucleotide
  Antisense strand to SEQ ID NO: 2329518
uugaccacacucuccaucc

SEQ ID NO: 2329520 - RNA, 19 nt, Artificial Sequence
  Description of Artificial Sequence: Synthetic oligonucleotide
  Sense strand starting at position 1192 of SEQ ID NO: 1885273
gauggagaguguggucaau

SEQ ID NO: 2329521 - RNA, 19 nt, Artificial Sequence
  Description of Artificial Sequence: Synthetic oligonucleotide
  Antisense strand to SEQ ID NO: 2329520
auugaccacacucuccauc

SEQ ID NO: 2329522 - RNA, 19 nt, Artificial Sequence
  Description of Artificial Sequence: Synthetic oligonucleotide
  Sense strand starting at position 1350 of SEQ ID NO: 1885273
uuuguagugcucccucagu

SEQ ID NO: 2329523 - RNA, 19 nt, Artificial Sequence
  Description of Artificial Sequence: Synthetic oligonucleotide
  Antisense strand to SEQ ID NO: 2329522
acugagggagcacuacaaa

SEQ ID NO: 2329524 - RNA, 19 nt, Artificial Sequence
  Description of Artificial Sequence: Synthetic oligonucleotide
  Sense strand starting at position 1363 of SEQ ID NO: 1885273
cucaguaguuggucuccau

SEQ ID NO: 2329525 - RNA, 19 nt, Artificial Sequence
  Description of Artificial Sequence: Synthetic oligonucleotide
  Antisense strand to SEQ ID NO: 2329524
auggagaccaacuacugag

SEQ ID NO: 2329526 - RNA, 19 nt, Artificial Sequence
  Description of Artificial Sequence: Synthetic oligonucleotide
  Sense strand starting at position 1783 of SEQ ID NO: 1885273
caguucugaggucgggauu

SEQ ID NO: 2329527 - RNA, 19 nt, Artificial Sequence
  Description of Artificial Sequence: Synthetic oligonucleotide
  Antisense strand to SEQ ID NO: 2329526
aaucccgaccucagaacug

SEQ ID NO: 2329528 - RNA, 19 nt, Artificial Sequence
  Description of Artificial Sequence: Synthetic oligonucleotide
  Sense strand starting at position 2108 of SEQ ID NO: 1885273
gcugagagucgcggaguuu

SEQ ID NO: 2329529 - RNA, 19 nt, Artificial Sequence
  Description of Artificial Sequence: Synthetic oligonucleotide
  Antisense strand to SEQ ID NO: 2329528
aaacuccgcgacucucagc

SEQ ID NO: 2329530 - RNA, 19 nt, Artificial Sequence
  Description of Artificial Sequence: Synthetic oligonucleotide
  Sense strand starting at position 2118 of SEQ ID NO: 1885273
gcggaguuuccugguugga

SEQ ID NO: 2329531 - RNA, 19 nt, Artificial Sequence
  Description of Artificial Sequence: Synthetic oligonucleotide
  Antisense strand to SEQ ID NO: 2329530
uccaaccaggaaacuccgc

SEQ ID NO: 2329532 - RNA, 19 nt, Artificial Sequence
  Description of Artificial Sequence: Synthetic oligonucleotide
  Sense strand starting at position 2150 of SEQ ID NO: 1885273
gcgauuugcuuccucauau

SEQ ID NO: 2329533 - RNA, 19 nt, Artificial Sequence
  Description of Artificial Sequence: Synthetic oligonucleotide
  Antisense strand to SEQ ID NO: 2329532
auaugaggaagcaaaucgc

SEQ ID NO: 2329534 - RNA, 19 nt, Artificial Sequence
  Description of Artificial Sequence: Synthetic oligonucleotide
  Sense strand starting at position 2151 of SEQ ID NO: 1885273
cgauuugcuuccucauaua

SEQ ID NO: 2329535 - RNA, 19 nt, Artificial Sequence
  Description of Artificial Sequence: Synthetic oligonucleotide
  Antisense strand to SEQ ID NO: 2329534
uauaugaggaagcaaaucg

SEQ ID NO: 2329536 - RNA, 19 nt, Artificial Sequence
  Description of Artificial Sequence: Synthetic oligonucleotide
  Sense strand starting at position 2424 of SEQ ID NO: 1885273
ggauccuuucucugccgaa

SEQ ID NO: 2329537 - RNA, 19 nt, Artificial Sequence
  Description of Artificial Sequence: Synthetic oligonucleotide
  Antisense strand to SEQ ID NO: 2329536
uucggcagagaaaggaucc

SEQ ID NO: 2329538 - RNA, 19 nt, Artificial Sequence
  Description of Artificial Sequence: Synthetic oligonucleotide
  Sense strand starting at position 2428 of SEQ ID NO: 1885273
ccuuucucugccgaagagu

SEQ ID NO: 2329539 - RNA, 19 nt, Artificial Sequence
  Description of Artificial Sequence: Synthetic oligonucleotide
  Antisense strand to SEQ ID NO: 2329538
acucuucggcagagaaagg

SEQ ID NO: 2329540 - RNA, 19 nt, Artificial Sequence
  Description of Artificial Sequence: Synthetic oligonucleotide
  Sense strand starting at position 2572 of SEQ ID NO: 1885273
gggcuuuguucccucugca

SEQ ID NO: 2329541 - RNA, 19 nt, Artificial Sequence
  Description of Artificial Sequence: Synthetic oligonucleotide
  Antisense strand to SEQ ID NO: 2329540
ugcagagggaacaaagccc

SEQ ID NO: 2329542 - RNA, 19 nt, Artificial Sequence
  Description of Artificial Sequence: Synthetic oligonucleotide
  Sense strand starting at position 2658 of SEQ ID NO: 1885273
cugguccgauccucucaua

SEQ ID NO: 2329543 - RNA, 19 nt, Artificial Sequence
  Description of Artificial Sequence: Synthetic oligonucleotide
  Antisense strand to SEQ ID NO: 2329542
uaugagaggaucggaccag

SEQ ID NO: 2329544 - RNA, 19 nt, Artificial Sequence
  Description of Artificial Sequence: Synthetic oligonucleotide
  Sense strand starting at position 2815 of SEQ ID NO: 1885273
auauuaacuucugggcuaa

SEQ ID NO: 2329545 - RNA, 19 nt, Artificial Sequence
  Description of Artificial Sequence: Synthetic oligonucleotide
  Antisense strand to SEQ ID NO: 2329544
uuagcccagaaguuaauau

SEQ ID NO: 2329546 - RNA, 19 nt, Artificial Sequence
  Description of Artificial Sequence: Synthetic oligonucleotide
  Sense strand starting at position 2876 of SEQ ID NO: 1885273
acaccugaguaauaaguua

SEQ ID NO: 2329547 - RNA, 19 nt, Artificial Sequence
  Description of Artificial Sequence: Synthetic oligonucleotide
  Antisense strand to SEQ ID NO: 2329546
uaacuuauuacucaggugu

SEQ ID NO: 2329548 - RNA, 19 nt, Artificial Sequence
  Description of Artificial Sequence: Synthetic oligonucleotide
  Sense strand starting at position 2935 of SEQ ID NO: 1885273
augguucccuguucuugaa

SEQ ID NO: 2329549 - RNA, 19 nt, Artificial Sequence
  Description of Artificial Sequence: Synthetic oligonucleotide
  Antisense strand to SEQ ID NO: 2329548
uucaagaacagggaaccau

SEQ ID NO: 2329550 - RNA, 19 nt, Artificial Sequence
  Description of Artificial Sequence: Synthetic oligonucleotide
  Sense strand starting at position 2937 of SEQ ID NO: 1885273
gguucccuguucuugaaua

SEQ ID NO: 2329551 - RNA, 19 nt, Artificial Sequence
  Description of Artificial Sequence: Synthetic oligonucleotide
  Antisense strand to SEQ ID NO: 2329550
uauucaagaacagggaacc

SEQ ID NO: 2329552 - RNA, 19 nt, Artificial Sequence
  Description of Artificial Sequence: Synthetic oligonucleotide
  Sense strand starting at position 3409 of SEQ ID NO: 1885273
gguuccaagucuuuguaau

SEQ ID NO: 2329553 - RNA, 19 nt, Artificial Sequence
  Description of Artificial Sequence: Synthetic oligonucleotide
  Antisense strand to SEQ ID NO: 2329552
auuacaaagacuuggaacc

SEQ ID NO: 2329554 - RNA, 19 nt, Artificial Sequence
  Description of Artificial Sequence: Synthetic oligonucleotide
  Sense strand starting at position 3410 of SEQ ID NO: 1885273
guuccaagucuuuguaauu

SEQ ID NO: 2329555 - RNA, 19 nt, Artificial Sequence
  Description of Artificial Sequence: Synthetic oligonucleotide
  Antisense strand to SEQ ID NO: 2329554
aauuacaaagacuuggaac

SEQ ID NO: 2329556 - RNA, 19 nt, Artificial Sequence
  Description of Artificial Sequence: Synthetic oligonucleotide
  Sense strand starting at position 3430 of SEQ ID NO: 1885273
ugaauaaugccgcagucaa

SEQ ID NO: 2329557 - RNA, 19 nt, Artificial Sequence
  Description of Artificial Sequence: Synthetic oligonucleotide
  Antisense strand to SEQ ID NO: 2329556
uugacugcggcauuauuca

SEQ ID NO: 2329558 - RNA, 19 nt, Artificial Sequence
  Description of Artificial Sequence: Synthetic oligonucleotide
  Sense strand starting at position 3669 of SEQ ID NO: 1885273
cagauaaauguguggaaca

SEQ ID NO: 2329559 - RNA, 19 nt, Artificial Sequence
  Description of Artificial Sequence: Synthetic oligonucleotide
  Antisense strand to SEQ ID NO: 2329558
uguuccacacauuuaucug

SEQ ID NO: 2329560 - RNA, 19 nt, Artificial Sequence
  Description of Artificial Sequence: Synthetic oligonucleotide
  Sense strand starting at position 3726 of SEQ ID NO: 1885273
uuuagaaccugauccugau

SEQ ID NO: 2329561 - RNA, 19 nt, Artificial Sequence
  Description of Artificial Sequence: Synthetic oligonucleotide
  Antisense strand to SEQ ID NO: 2329560
aucaggaucagguucuaaa

SEQ ID NO: 2329562 - RNA, 19 nt, Artificial Sequence
  Description of Artificial Sequence: Synthetic oligonucleotide
  Sense strand starting at position 3732 of SEQ ID NO: 1885273
accugauccugaugacauu

SEQ ID NO: 2329563 - RNA, 19 nt, Artificial Sequence
  Description of Artificial Sequence: Synthetic oligonucleotide
  Antisense strand to SEQ ID NO: 2329562
aaugucaucaggaucaggu

SEQ ID NO: 2329564 - RNA, 19 nt, Artificial Sequence
  Description of Artificial Sequence: Synthetic oligonucleotide
  Sense strand starting at position 3751 of SEQ ID NO: 1885273
ucauauguguauggaaaga

SEQ ID NO: 2329565 - RNA, 19 nt, Artificial Sequence
  Description of Artificial Sequence: Synthetic oligonucleotide
  Antisense strand to SEQ ID NO: 2329564
ucuuuccauacacauauga

SEQ ID NO: 2329566 - RNA, 19 nt, Artificial Sequence
  Description of Artificial Sequence: Synthetic oligonucleotide
  Sense strand starting at position 3756 of SEQ ID NO: 1885273
uguguauggaaagaugagu

SEQ ID NO: 2329567 - RNA, 19 nt, Artificial Sequence
  Description of Artificial Sequence: Synthetic oligonucleotide
  Antisense strand to SEQ ID NO: 2329566
acucaucuuuccauacaca

SEQ ID NO: 2329568 - RNA, 19 nt, Artificial Sequence
  Description of Artificial Sequence: Synthetic oligonucleotide
  Sense strand starting at position 3778 of SEQ ID NO: 1885273
uuguaaaugacaugucugu

SEQ ID NO: 2329569 - RNA, 19 nt, Artificial Sequence
  Description of Artificial Sequence: Synthetic oligonucleotide
  Antisense strand to SEQ ID NO: 2329568
acagacaugucauuuacaa

SEQ ID NO: 2329570 - RNA, 19 nt, Artificial Sequence
  Description of Artificial Sequence: Synthetic oligonucleotide
  Sense strand starting at position 3782 of SEQ ID NO: 1885273
aaaugacaugucugugaac

SEQ ID NO: 2329571 - RNA, 19 nt, Artificial Sequence
  Description of Artificial Sequence: Synthetic oligonucleotide
  Antisense strand to SEQ ID NO: 2329570
guucacagacaugucauuu

SEQ ID NO: 2329572 - RNA, 19 nt, Artificial Sequence
  Description of Artificial Sequence: Synthetic oligonucleotide
  Sense strand starting at position 3783 of SEQ ID NO: 1885273
aaugacaugucugugaacu

SEQ ID NO: 2329573 - RNA, 19 nt, Artificial Sequence
  Description of Artificial Sequence: Synthetic oligonucleotide
  Antisense strand to SEQ ID NO: 2329572
aguucacagacaugucauu

SEQ ID NO: 2329574 - RNA, 19 nt, Artificial Sequence
  Description of Artificial Sequence: Synthetic oligonucleotide
  Sense strand starting at position 3784 of SEQ ID NO: 1885273
augacaugucugugaacuc

SEQ ID NO: 2329575 - RNA, 19 nt, Artificial Sequence
  Description of Artificial Sequence: Synthetic oligonucleotide
  Antisense strand to SEQ ID NO: 2329574
gaguucacagacaugucau

SEQ ID NO: 2329576 - RNA, 19 nt, Artificial Sequence
  Description of Artificial Sequence: Synthetic oligonucleotide
  Sense strand starting at position 3842 of SEQ ID NO: 1885273
auugauagaauaugcguaa

SEQ ID NO: 2329577 - RNA, 19 nt, Artificial Sequence
  Description of Artificial Sequence: Synthetic oligonucleotide
  Antisense strand to SEQ ID NO: 2329576
uuacgcauauucuaucaau

SEQ ID NO: 2329578 - RNA, 19 nt, Artificial Sequence
  Description of Artificial Sequence: Synthetic oligonucleotide
  Sense strand starting at position 3843 of SEQ ID NO: 1885273
uugauagaauaugcguaaa

SEQ ID NO: 2329579 - RNA, 19 nt, Artificial Sequence
  Description of Artificial Sequence: Synthetic oligonucleotide
  Antisense strand to SEQ ID NO: 2329578
uuuacgcauauucuaucaa

SEQ ID NO: 2329580 - RNA, 19 nt, Artificial Sequence
  Description of Artificial Sequence: Synthetic oligonucleotide
  Sense strand starting at position 3941 of SEQ ID NO: 1885273
agaccuuccuaugaaugca

SEQ ID NO: 2329581 - RNA, 19 nt, Artificial Sequence
  Description of Artificial Sequence: Synthetic oligonucleotide
  Antisense strand to SEQ ID NO: 2329580
ugcauucauaggaaggucu

SEQ ID NO: 2329582 - RNA, 19 nt, Artificial Sequence
  Description of Artificial Sequence: Synthetic oligonucleotide
  Sense strand starting at position 3955 of SEQ ID NO: 1885273
augcauucugcagguugau

SEQ ID NO: 2329583 - RNA, 19 nt, Artificial Sequence
  Description of Artificial Sequence: Synthetic oligonucleotide
  Antisense strand to SEQ ID NO: 2329582
aucaaccugcagaaugcau

SEQ ID NO: 2329584 - RNA, 19 nt, Artificial Sequence
  Description of Artificial Sequence: Synthetic oligonucleotide
  Sense strand starting at position 64 of SEQ ID NO: 1885274
gguugucucuaguuauuug

SEQ ID NO: 2329585 - RNA, 19 nt, Artificial Sequence
  Description of Artificial Sequence: Synthetic oligonucleotide
  Antisense strand to SEQ ID NO: 2329584
caaauaacuagagacaacc

SEQ ID NO: 2329586 - RNA, 19 nt, Artificial Sequence
  Description of Artificial Sequence: Synthetic oligonucleotide
  Sense strand starting at position 65 of SEQ ID NO: 1885274
guugucucuaguuauuugu

SEQ ID NO: 2329587 - RNA, 19 nt, Artificial Sequence
  Description of Artificial Sequence: Synthetic oligonucleotide
  Antisense strand to SEQ ID NO: 2329586
acaaauaacuagagacaac

SEQ ID NO: 2329588 - RNA, 19 nt, Artificial Sequence
  Description of Artificial Sequence: Synthetic oligonucleotide
  Sense strand starting at position 97 of SEQ ID NO: 1885274
ggcucaaagggauguauua

SEQ ID NO: 2329589 - RNA, 19 nt, Artificial Sequence
  Description of Artificial Sequence: Synthetic oligonucleotide
  Antisense strand to SEQ ID NO: 2329588
uaauacaucccuuugagcc

SEQ ID NO: 2329590 - RNA, 19 nt, Artificial Sequence
  Description of Artificial Sequence: Synthetic oligonucleotide
  Sense strand starting at position 222 of SEQ ID NO: 1885274
gagguuauguacccagaug

SEQ ID NO: 2329591 - RNA, 19 nt, Artificial Sequence
  Description of Artificial Sequence: Synthetic oligonucleotide
  Antisense strand to SEQ ID NO: 2329590
caucuggguacauaaccuc

SEQ ID NO: 2329592 - RNA, 19 nt, Artificial Sequence
  Description of Artificial Sequence: Synthetic oligonucleotide
  Sense strand starting at position 474 of SEQ ID NO: 1885274
ucuuauacauagucaggaa

SEQ ID NO: 2329593 - RNA, 19 nt, Artificial Sequence
  Description of Artificial Sequence: Synthetic oligonucleotide
  Antisense strand to SEQ ID NO: 2329592
uuccugacuauguauaaga

SEQ ID NO: 2329594 - RNA, 19 nt, Artificial Sequence
  Description of Artificial Sequence: Synthetic oligonucleotide
  Sense strand starting at position 489 of SEQ ID NO: 1885274
ggaaacauguaacccuuua

SEQ ID NO: 2329595 - RNA, 19 nt, Artificial Sequence
  Description of Artificial Sequence: Synthetic oligonucleotide
  Antisense strand to SEQ ID NO: 2329594
uaaaggguuacauguuucc

SEQ ID NO: 2329596 - RNA, 19 nt, Artificial Sequence
  Description of Artificial Sequence: Synthetic oligonucleotide
  Sense strand starting at position 691 of SEQ ID NO: 1885274
gucuguugaagccacaaga

SEQ ID NO: 2329597 - RNA, 19 nt, Artificial Sequence
  Description of Artificial Sequence: Synthetic oligonucleotide
  Antisense strand to SEQ ID NO: 2329596
ucuuguggcuucaacagac

SEQ ID NO: 2329598 - RNA, 19 nt, Artificial Sequence
  Description of Artificial Sequence: Synthetic oligonucleotide
  Sense strand starting at position 795 of SEQ ID NO: 1885274
cuuuaucaugcggaaguga

SEQ ID NO: 2329599 - RNA, 19 nt, Artificial Sequence
  Description of Artificial Sequence: Synthetic oligonucleotide
  Antisense strand to SEQ ID NO: 2329598
ucacuuccgcaugauaaag

SEQ ID NO: 2329600 - RNA, 19 nt, Artificial Sequence
  Description of Artificial Sequence: Synthetic oligonucleotide
  Sense strand starting at position 950 of SEQ ID NO: 1885274
cuaguaugagucugaauga

SEQ ID NO: 2329601 - RNA, 19 nt, Artificial Sequence
  Description of Artificial Sequence: Synthetic oligonucleotide
  Antisense strand to SEQ ID NO: 2329600
ucauucagacucauacuag

SEQ ID NO: 2329602 - RNA, 19 nt, Artificial Sequence
  Description of Artificial Sequence: Synthetic oligonucleotide
  Sense strand starting at position 997 of SEQ ID NO: 1885274
cgucauaaucgauaaccac

SEQ ID NO: 2329603 - RNA, 19 nt, Artificial Sequence
  Description of Artificial Sequence: Synthetic oligonucleotide
  Antisense strand to SEQ ID NO: 2329602
gugguuaucgauuaugacg

SEQ ID NO: 2329604 - RNA, 19 nt, Artificial Sequence
  Description of Artificial Sequence: Synthetic oligonucleotide
  Sense strand starting at position 1210 of SEQ ID NO: 1885274
aucacucauuuggagauga

SEQ ID NO: 2329605 - RNA, 19 nt, Artificial Sequence
  Description of Artificial Sequence: Synthetic oligonucleotide
  Antisense strand to SEQ ID NO: 2329604
ucaucuccaaaugagugau

SEQ ID NO: 2329606 - RNA, 19 nt, Artificial Sequence
  Description of Artificial Sequence: Synthetic oligonucleotide
  Sense strand starting at position 1520 of SEQ ID NO: 1885274
gcugaaucucaguauagca

SEQ ID NO: 2329607 - RNA, 19 nt, Artificial Sequence
  Description of Artificial Sequence: Synthetic oligonucleotide
  Antisense strand to SEQ ID NO: 2329606
ugcuauacugagauucagc

SEQ ID NO: 2329608 - RNA, 19 nt, Artificial Sequence
  Description of Artificial Sequence: Synthetic oligonucleotide
  Sense strand starting at position 1569 of SEQ ID NO: 1885274
ucuugaguuguugaaguug

SEQ ID NO: 2329609 - RNA, 19 nt, Artificial Sequence
  Description of Artificial Sequence: Synthetic oligonucleotide
  Antisense strand to SEQ ID NO: 2329608
caacuucaacaacucaaga

SEQ ID NO: 2329610 - RNA, 19 nt, Artificial Sequence
  Description of Artificial Sequence: Synthetic oligonucleotide
  Sense strand starting at position 1575 of SEQ ID NO: 1885274
guuguugaaguuggaugaa

SEQ ID NO: 2329611 - RNA, 19 nt, Artificial Sequence
  Description of Artificial Sequence: Synthetic oligonucleotide
  Antisense strand to SEQ ID NO: 2329610
uucauccaacuucaacaac

SEQ ID NO: 2329612 - RNA, 19 nt, Artificial Sequence
  Description of Artificial Sequence: Synthetic oligonucleotide
  Sense strand starting at position 1601 of SEQ ID NO: 1885274
gucauuauugggcaugaca

SEQ ID NO: 2329613 - RNA, 19 nt, Artificial Sequence
  Description of Artificial Sequence: Synthetic oligonucleotide
  Antisense strand to SEQ ID NO: 2329612
ugucaugcccaauaaugac

SEQ ID NO: 2329614 - RNA, 19 nt, Artificial Sequence
  Description of Artificial Sequence: Synthetic oligonucleotide
  Sense strand starting at position 1603 of SEQ ID NO: 1885274
cauuauugggcaugacauc

SEQ ID NO: 2329615 - RNA, 19 nt, Artificial Sequence
  Description of Artificial Sequence: Synthetic oligonucleotide
  Antisense strand to SEQ ID NO: 2329614
gaugucaugcccaauaaug

SEQ ID NO: 2329616 - RNA, 19 nt, Artificial Sequence
  Description of Artificial Sequence: Synthetic oligonucleotide
  Sense strand starting at position 1660 of SEQ ID NO: 1885274
aucucugaagcuuaaugau

SEQ ID NO: 2329617 - RNA, 19 nt, Artificial Sequence
  Description of Artificial Sequence: Synthetic oligonucleotide
  Antisense strand to SEQ ID NO: 2329616
aucauuaagcuucagagau

SEQ ID NO: 2329618 - RNA, 19 nt, Artificial Sequence
  Description of Artificial Sequence: Synthetic oligonucleotide
  Sense strand starting at position 1792 of SEQ ID NO: 1885274
accugucauugaucacuca

SEQ ID NO: 2329619 - RNA, 19 nt, Artificial Sequence
  Description of Artificial Sequence: Synthetic oligonucleotide
  Antisense strand to SEQ ID NO: 2329618
ugagugaucaaugacaggu

SEQ ID NO: 2329620 - RNA, 19 nt, Artificial Sequence
  Description of Artificial Sequence: Synthetic oligonucleotide
  Sense strand starting at position 1793 of SEQ ID NO: 1885274
ccugucauugaucacucau

SEQ ID NO: 2329621 - RNA, 19 nt, Artificial Sequence
  Description of Artificial Sequence: Synthetic oligonucleotide
  Antisense strand to SEQ ID NO: 2329620
augagugaucaaugacagg

SEQ ID NO: 2329622 - RNA, 19 nt, Artificial Sequence
  Description of Artificial Sequence: Synthetic oligonucleotide
  Sense strand starting at position 1836 of SEQ ID NO: 1885274
gcacuucugggaggacaaa

SEQ ID NO: 2329623 - RNA, 19 nt, Artificial Sequence
  Description of Artificial Sequence: Synthetic oligonucleotide
  Antisense strand to SEQ ID NO: 2329622
uuuguccucccagaagugc

SEQ ID NO: 2329624 - RNA, 19 nt, Artificial Sequence
  Description of Artificial Sequence: Synthetic oligonucleotide
  Sense strand starting at position 2059 of SEQ ID NO: 1885274
gguguuggugaggauggau

SEQ ID NO: 2329625 - RNA, 19 nt, Artificial Sequence
  Description of Artificial Sequence: Synthetic oligonucleotide
  Antisense strand to SEQ ID NO: 2329624
auccauccucaccaacacc

SEQ ID NO: 2329626 - RNA, 19 nt, Artificial Sequence
  Description of Artificial Sequence: Synthetic oligonucleotide
  Sense strand starting at position 2165 of SEQ ID NO: 1885274
ggugauauaucauuauucu

SEQ ID NO: 2329627 - RNA, 19 nt, Artificial Sequence
  Description of Artificial Sequence: Synthetic oligonucleotide
  Antisense strand to SEQ ID NO: 2329626
agaauaaugauauaucacc

SEQ ID NO: 2329628 - RNA, 19 nt, Artificial Sequence
  Description of Artificial Sequence: Synthetic oligonucleotide
  Sense strand starting at position 2272 of SEQ ID NO: 1885274
augcuuaaugaccagacuu

SEQ ID NO: 2329629 - RNA, 19 nt, Artificial Sequence
  Description of Artificial Sequence: Synthetic oligonucleotide
  Antisense strand to SEQ ID NO: 2329628
aagucuggucauuaagcau

SEQ ID NO: 2329630 - RNA, 19 nt, Artificial Sequence
  Description of Artificial Sequence: Synthetic oligonucleotide
  Sense strand starting at position 2274 of SEQ ID NO: 1885274
gcuuaaugaccagacuugu

SEQ ID NO: 2329631 - RNA, 19 nt, Artificial Sequence
  Description of Artificial Sequence: Synthetic oligonucleotide
  Antisense strand to SEQ ID NO: 2329630
acaagucuggucauuaagc

SEQ ID NO: 2329632 - RNA, 19 nt, Artificial Sequence
  Description of Artificial Sequence: Synthetic oligonucleotide
  Sense strand starting at position 2282 of SEQ ID NO: 1885274
accagacuuguauaucuuu

SEQ ID NO: 2329633 - RNA, 19 nt, Artificial Sequence
  Description of Artificial Sequence: Synthetic oligonucleotide
  Antisense strand to SEQ ID NO: 2329632
aaagauauacaagucuggu

SEQ ID NO: 2329634 - RNA, 19 nt, Artificial Sequence
  Description of Artificial Sequence: Synthetic oligonucleotide
  Sense strand starting at position 2414 of SEQ ID NO: 1885274
gugugcuaagauuauaaau

SEQ ID NO: 2329635 - RNA, 19 nt, Artificial Sequence
  Description of Artificial Sequence: Synthetic oligonucleotide
  Antisense strand to SEQ ID NO: 2329634
auuuauaaucuuagcacac

SEQ ID NO: 2329636 - RNA, 19 nt, Artificial Sequence
  Description of Artificial Sequence: Synthetic oligonucleotide
  Sense strand starting at position 2488 of SEQ ID NO: 1885274
gguauuugcuccuucugaa

SEQ ID NO: 2329637 - RNA, 19 nt, Artificial Sequence
  Description of Artificial Sequence: Synthetic oligonucleotide
  Antisense strand to SEQ ID NO: 2329636
uucagaaggagcaaauacc

SEQ ID NO: 2329638 - RNA, 19 nt, Artificial Sequence
  Description of Artificial Sequence: Synthetic oligonucleotide
  Sense strand starting at position 2545 of SEQ ID NO: 1885274
uccaaaugauuagucaguu

SEQ ID NO: 2329639 - RNA, 19 nt, Artificial Sequence
  Description of Artificial Sequence: Synthetic oligonucleotide
  Antisense strand to SEQ ID NO: 2329638
aacugacuaaucauuugga

SEQ ID NO: 2329640 - RNA, 19 nt, Artificial Sequence
  Description of Artificial Sequence: Synthetic oligonucleotide
  Sense strand starting at position 2546 of SEQ ID NO: 1885274
ccaaaugauuagucaguuu

SEQ ID NO: 2329641 - RNA, 19 nt, Artificial Sequence
  Description of Artificial Sequence: Synthetic oligonucleotide
  Antisense strand to SEQ ID NO: 2329640
aaacugacuaaucauuugg

SEQ ID NO: 2329642 - RNA, 19 nt, Artificial Sequence
  Description of Artificial Sequence: Synthetic oligonucleotide
  Sense strand starting at position 2585 of SEQ ID NO: 1885274
aguccaccuugaucauaua

SEQ ID NO: 2329643 - RNA, 19 nt, Artificial Sequence
  Description of Artificial Sequence: Synthetic oligonucleotide
  Antisense strand to SEQ ID NO: 2329642
uauaugaucaagguggacu

SEQ ID NO: 2329644 - RNA, 19 nt, Artificial Sequence
  Description of Artificial Sequence: Synthetic oligonucleotide
  Sense strand starting at position 2586 of SEQ ID NO: 1885274
guccaccuugaucauauau

SEQ ID NO: 2329645 - RNA, 19 nt, Artificial Sequence
  Description of Artificial Sequence: Synthetic oligonucleotide
  Antisense strand to SEQ ID NO: 2329644
auauaugaucaagguggac

SEQ ID NO: 2329646 - RNA, 19 nt, Artificial Sequence
  Description of Artificial Sequence: Synthetic oligonucleotide
  Sense strand starting at position 2620 of SEQ ID NO: 1885274
acaugagucuguuucugaa

SEQ ID NO: 2329647 - RNA, 19 nt, Artificial Sequence
  Description of Artificial Sequence: Synthetic oligonucleotide
  Antisense strand to SEQ ID NO: 2329646
uucagaaacagacucaugu

SEQ ID NO: 2329648 - RNA, 19 nt, Artificial Sequence
  Description of Artificial Sequence: Synthetic oligonucleotide
  Sense strand starting at position 2650 of SEQ ID NO: 1885274
gugcuauugggcuuucugu

SEQ ID NO: 2329649 - RNA, 19 nt, Artificial Sequence
  Description of Artificial Sequence: Synthetic oligonucleotide
  Antisense strand to SEQ ID NO: 2329648
acagaaagcccaauagcac

SEQ ID NO: 2329650 - RNA, 19 nt, Artificial Sequence
  Description of Artificial Sequence: Synthetic oligonucleotide
  Sense strand starting at position 2733 of SEQ ID NO: 1885274
ucauuaauuugccuggcua

SEQ ID NO: 2329651 - RNA, 19 nt, Artificial Sequence
  Description of Artificial Sequence: Synthetic oligonucleotide
  Antisense strand to SEQ ID NO: 2329650
uagccaggcaaauuaauga

SEQ ID NO: 2329652 - RNA, 19 nt, Artificial Sequence
  Description of Artificial Sequence: Synthetic oligonucleotide
  Sense strand starting at position 2735 of SEQ ID NO: 1885274
auuaauuugccuggcuauu

SEQ ID NO: 2329653 - RNA, 19 nt, Artificial Sequence
  Description of Artificial Sequence: Synthetic oligonucleotide
  Antisense strand to SEQ ID NO: 2329652
aauagccaggcaaauuaau

SEQ ID NO: 2329654 - RNA, 19 nt, Artificial Sequence
  Description of Artificial Sequence: Synthetic oligonucleotide
  Sense strand starting at position 2748 of SEQ ID NO: 1885274
gcuauuuaugcaugcuuau

SEQ ID NO: 2329655 - RNA, 19 nt, Artificial Sequence
  Description of Artificial Sequence: Synthetic oligonucleotide
  Antisense strand to SEQ ID NO: 2329654
auaagcaugcauaaauagc

SEQ ID NO: 2329656 - RNA, 19 nt, Artificial Sequence
  Description of Artificial Sequence: Synthetic oligonucleotide
  Sense strand starting at position 2972 of SEQ ID NO: 1885274
acaugucaugcacaugacu

SEQ ID NO: 2329657 - RNA, 19 nt, Artificial Sequence
  Description of Artificial Sequence: Synthetic oligonucleotide
  Antisense strand to SEQ ID NO: 2329656
agucaugugcaugacaugu

SEQ ID NO: 2329658 - RNA, 19 nt, Artificial Sequence
  Description of Artificial Sequence: Synthetic oligonucleotide
  Sense strand starting at position 3060 of SEQ ID NO: 1885274
aauguauuccuaggaguua

SEQ ID NO: 2329659 - RNA, 19 nt, Artificial Sequence
  Description of Artificial Sequence: Synthetic oligonucleotide
  Antisense strand to SEQ ID NO: 2329658
uaacuccuaggaauacauu

SEQ ID NO: 2329660 - RNA, 19 nt, Artificial Sequence
  Description of Artificial Sequence: Synthetic oligonucleotide
  Sense strand starting at position 3269 of SEQ ID NO: 1885274
acuauauuccuaggaguua

SEQ ID NO: 2329661 - RNA, 19 nt, Artificial Sequence
  Description of Artificial Sequence: Synthetic oligonucleotide
  Antisense strand to SEQ ID NO: 2329660
uaacuccuaggaauauagu

SEQ ID NO: 2329662 - RNA, 19 nt, Artificial Sequence
  Description of Artificial Sequence: Synthetic oligonucleotide
  Sense strand starting at position 3372 of SEQ ID NO: 1885274
auauaacuccuaggaguac

SEQ ID NO: 2329663 - RNA, 19 nt, Artificial Sequence
  Description of Artificial Sequence: Synthetic oligonucleotide
  Antisense strand to SEQ ID NO: 2329662
guacuccuaggaguuauau

SEQ ID NO: 2329664 - RNA, 19 nt, Artificial Sequence
  Description of Artificial Sequence: Synthetic oligonucleotide
  Sense strand starting at position 616 of SEQ ID NO: 1885275
uuacaauccuggcuacaga

SEQ ID NO: 2329665 - RNA, 19 nt, Artificial Sequence
  Description of Artificial Sequence: Synthetic oligonucleotide
  Antisense strand to SEQ ID NO: 2329664
ucuguagccaggauuguaa

SEQ ID NO: 2329666 - RNA, 19 nt, Artificial Sequence
  Description of Artificial Sequence: Synthetic oligonucleotide
  Sense strand starting at position 1073 of SEQ ID NO: 1885275
gagucucagacuuggguuu

SEQ ID NO: 2329667 - RNA, 19 nt, Artificial Sequence
  Description of Artificial Sequence: Synthetic oligonucleotide
  Antisense strand to SEQ ID NO: 2329666
aaacccaagucugagacuc

SEQ ID NO: 2329668 - RNA, 19 nt, Artificial Sequence
  Description of Artificial Sequence: Synthetic oligonucleotide
  Sense strand starting at position 1202 of SEQ ID NO: 1885275
guagcucugauuugugaua

SEQ ID NO: 2329669 - RNA, 19 nt, Artificial Sequence
  Description of Artificial Sequence: Synthetic oligonucleotide
  Antisense strand to SEQ ID NO: 2329668
uaucacaaaucagagcuac

SEQ ID NO: 2329670 - RNA, 19 nt, Artificial Sequence
  Description of Artificial Sequence: Synthetic oligonucleotide
  Sense strand starting at position 1249 of SEQ ID NO: 1885275
agaugagaaccuugcuugu

SEQ ID NO: 2329671 - RNA, 19 nt, Artificial Sequence
  Description of Artificial Sequence: Synthetic oligonucleotide
  Antisense strand to SEQ ID NO: 2329670
acaagcaagguucucaucu

SEQ ID NO: 2329672 - RNA, 19 nt, Artificial Sequence
  Description of Artificial Sequence: Synthetic oligonucleotide
  Sense strand starting at position 1260 of SEQ ID NO: 1885275
uugcuuguugguuaaauau

SEQ ID NO: 2329673 - RNA, 19 nt, Artificial Sequence
  Description of Artificial Sequence: Synthetic oligonucleotide
  Antisense strand to SEQ ID NO: 2329672
auauuuaaccaacaagcaa

SEQ ID NO: 2329674 - RNA, 19 nt, Artificial Sequence
  Description of Artificial Sequence: Synthetic oligonucleotide
  Sense strand starting at position 1321 of SEQ ID NO: 1885275
augcuuuaacuggacaagu

SEQ ID NO: 2329675 - RNA, 19 nt, Artificial Sequence
  Description of Artificial Sequence: Synthetic oligonucleotide
  Antisense strand to SEQ ID NO: 2329674
acuuguccaguuaaagcau

SEQ ID NO: 2329676 - RNA, 19 nt, Artificial Sequence
  Description of Artificial Sequence: Synthetic oligonucleotide
  Sense strand starting at position 1323 of SEQ ID NO: 1885275
gcuuuaacuggacaaguag

SEQ ID NO: 2329677 - RNA, 19 nt, Artificial Sequence
  Description of Artificial Sequence: Synthetic oligonucleotide
  Antisense strand to SEQ ID NO: 2329676
cuacuuguccaguuaaagc

SEQ ID NO: 2329678 - RNA, 19 nt, Artificial Sequence
  Description of Artificial Sequence: Synthetic oligonucleotide
  Sense strand starting at position 1344 of SEQ ID NO: 1885275
gcaucugguagugauagca

SEQ ID NO: 2329679 - RNA, 19 nt, Artificial Sequence
  Description of Artificial Sequence: Synthetic oligonucleotide
  Antisense strand to SEQ ID NO: 2329678
ugcuaucacuaccagaugc

SEQ ID NO: 2329680 - RNA, 19 nt, Artificial Sequence
  Description of Artificial Sequence: Synthetic oligonucleotide
  Sense strand starting at position 1353 of SEQ ID NO: 1885275
agugauagcaaaugugagu

SEQ ID NO: 2329681 - RNA, 19 nt, Artificial Sequence
  Description of Artificial Sequence: Synthetic oligonucleotide
  Antisense strand to SEQ ID NO: 2329680
acucacauuugcuaucacu

SEQ ID NO: 2329682 - RNA, 19 nt, Artificial Sequence
  Description of Artificial Sequence: Synthetic oligonucleotide
  Sense strand starting at position 1364 of SEQ ID NO: 1885275
augugagucuuaguuggaa

SEQ ID NO: 2329683 - RNA, 19 nt, Artificial Sequence
  Description of Artificial Sequence: Synthetic oligonucleotide
  Antisense strand to SEQ ID NO: 2329682
uuccaacuaagacucacau

SEQ ID NO: 2329684 - RNA, 19 nt, Artificial Sequence
  Description of Artificial Sequence: Synthetic oligonucleotide
  Sense strand starting at position 1366 of SEQ ID NO: 1885275
gugagucuuaguuggaauu

SEQ ID NO: 2329685 - RNA, 19 nt, Artificial Sequence
  Description of Artificial Sequence: Synthetic oligonucleotide
  Antisense strand to SEQ ID NO: 2329684
aauuccaacuaagacucac

SEQ ID NO: 2329686 - RNA, 19 nt, Artificial Sequence
  Description of Artificial Sequence: Synthetic oligonucleotide
  Sense strand starting at position 1367 of SEQ ID NO: 1885275
ugagucuuaguuggaauua

SEQ ID NO: 2329687 - RNA, 19 nt, Artificial Sequence
  Description of Artificial Sequence: Synthetic oligonucleotide
  Antisense strand to SEQ ID NO: 2329686
uaauuccaacuaagacuca

SEQ ID NO: 2329688 - RNA, 19 nt, Artificial Sequence
  Description of Artificial Sequence: Synthetic oligonucleotide
  Sense strand starting at position 1376 of SEQ ID NO: 1885275
guuggaauuaaguagcaau

SEQ ID NO: 2329689 - RNA, 19 nt, Artificial Sequence
  Description of Artificial Sequence: Synthetic oligonucleotide
  Antisense strand to SEQ ID NO: 2329688
auugcuacuuaauuccaac

SEQ ID NO: 2329690 - RNA, 19 nt, Artificial Sequence
  Description of Artificial Sequence: Synthetic oligonucleotide
  Sense strand starting at position 1630 of SEQ ID NO: 1885275
uguguugaugugggaauua

SEQ ID NO: 2329691 - RNA, 19 nt, Artificial Sequence
  Description of Artificial Sequence: Synthetic oligonucleotide
  Antisense strand to SEQ ID NO: 2329690
uaauucccacaucaacaca

SEQ ID NO: 2329692 - RNA, 19 nt, Artificial Sequence
  Description of Artificial Sequence: Synthetic oligonucleotide
  Sense strand starting at position 1897 of SEQ ID NO: 1885275
aggaucaucacugggcuua

SEQ ID NO: 2329693 - RNA, 19 nt, Artificial Sequence
  Description of Artificial Sequence: Synthetic oligonucleotide
  Antisense strand to SEQ ID NO: 2329692
uaagcccagugaugauccu

SEQ ID NO: 2329694 - RNA, 19 nt, Artificial Sequence
  Description of Artificial Sequence: Synthetic oligonucleotide
  Sense strand starting at position 1899 of SEQ ID NO: 1885275
gaucaucacugggcuuaga

SEQ ID NO: 2329695 - RNA, 19 nt, Artificial Sequence
  Description of Artificial Sequence: Synthetic oligonucleotide
  Antisense strand to SEQ ID NO: 2329694
ucuaagcccagugaugauc

SEQ ID NO: 2329696 - RNA, 19 nt, Artificial Sequence
  Description of Artificial Sequence: Synthetic oligonucleotide
  Sense strand starting at position 2169 of SEQ ID NO: 1885275
gaggauaagguuugcaaga

SEQ ID NO: 2329697 - RNA, 19 nt, Artificial Sequence
  Description of Artificial Sequence: Synthetic oligonucleotide
  Antisense strand to SEQ ID NO: 2329696
ucuugcaaaccuuauccuc

SEQ ID NO: 2329698 - RNA, 19 nt, Artificial Sequence
  Description of Artificial Sequence: Synthetic oligonucleotide
  Sense strand starting at position 2170 of SEQ ID NO: 1885275
aggauaagguuugcaagaa

SEQ ID NO: 2329699 - RNA, 19 nt, Artificial Sequence
  Description of Artificial Sequence: Synthetic oligonucleotide
  Antisense strand to SEQ ID NO: 2329698
uucuugcaaaccuuauccu

SEQ ID NO: 2329700 - RNA, 19 nt, Artificial Sequence
  Description of Artificial Sequence: Synthetic oligonucleotide
  Sense strand starting at position 2174 of SEQ ID NO: 1885275
uaagguuugcaagaagcua

SEQ ID NO: 2329701 - RNA, 19 nt, Artificial Sequence
  Description of Artificial Sequence: Synthetic oligonucleotide
  Antisense strand to SEQ ID NO: 2329700
uagcuucuugcaaaccuua

SEQ ID NO: 2329702 - RNA, 19 nt, Artificial Sequence
  Description of Artificial Sequence: Synthetic oligonucleotide
  Sense strand starting at position 2448 of SEQ ID NO: 1885275
uuuggaauuugauacauga

SEQ ID NO: 2329703 - RNA, 19 nt, Artificial Sequence
  Description of Artificial Sequence: Synthetic oligonucleotide
  Antisense strand to SEQ ID NO: 2329702
ucauguaucaaauuccaaa

SEQ ID NO: 2329704 - RNA, 19 nt, Artificial Sequence
  Description of Artificial Sequence: Synthetic oligonucleotide
  Sense strand starting at position 2706 of SEQ ID NO: 1885275
guguucgugggcucauguu

SEQ ID NO: 2329705 - RNA, 19 nt, Artificial Sequence
  Description of Artificial Sequence: Synthetic oligonucleotide
  Antisense strand to SEQ ID NO: 2329704
aacaugagcccacgaacac

SEQ ID NO: 2329706 - RNA, 19 nt, Artificial Sequence
  Description of Artificial Sequence: Synthetic oligonucleotide
  Sense strand starting at position 2771 of SEQ ID NO: 1885275
gguguugguccugaacauu

SEQ ID NO: 2329707 - RNA, 19 nt, Artificial Sequence
  Description of Artificial Sequence: Synthetic oligonucleotide
  Antisense strand to SEQ ID NO: 2329706
aauguucaggaccaacacc

SEQ ID NO: 2329708 - RNA, 19 nt, Artificial Sequence
  Description of Artificial Sequence: Synthetic oligonucleotide
  Sense strand starting at position 2901 of SEQ ID NO: 1885275
guuugucauggccaccaaa

SEQ ID NO: 2329709 - RNA, 19 nt, Artificial Sequence
  Description of Artificial Sequence: Synthetic oligonucleotide
  Antisense strand to SEQ ID NO: 2329708
uuugguggccaugacaaac

SEQ ID NO: 2329710 - RNA, 19 nt, Artificial Sequence
  Description of Artificial Sequence: Synthetic oligonucleotide
  Sense strand starting at position 2930 of SEQ ID NO: 1885275
ucauuugucugcgugugaa

SEQ ID NO: 2329711 - RNA, 19 nt, Artificial Sequence
  Description of Artificial Sequence: Synthetic oligonucleotide
  Antisense strand to SEQ ID NO: 2329710
uucacacgcagacaaauga

SEQ ID NO: 2329712 - RNA, 19 nt, Artificial Sequence
  Description of Artificial Sequence: Synthetic oligonucleotide
  Sense strand starting at position 2938 of SEQ ID NO: 1885275
cugcgugugaaugauaaac

SEQ ID NO: 2329713 - RNA, 19 nt, Artificial Sequence
  Description of Artificial Sequence: Synthetic oligonucleotide
  Antisense strand to SEQ ID NO: 2329712
guuuaucauucacacgcag

SEQ ID NO: 2329714 - RNA, 19 nt, Artificial Sequence
  Description of Artificial Sequence: Synthetic oligonucleotide
  Sense strand starting at position 2971 of SEQ ID NO: 1885275
uguauaaugacugguguca

SEQ ID NO: 2329715 - RNA, 19 nt, Artificial Sequence
  Description of Artificial Sequence: Synthetic oligonucleotide
  Antisense strand to SEQ ID NO: 2329714
ugacaccagucauuauaca

SEQ ID NO: 2329716 - RNA, 19 nt, Artificial Sequence
  Description of Artificial Sequence: Synthetic oligonucleotide
  Sense strand starting at position 3063 of SEQ ID NO: 1885275
auucgcuuccugcauggaa

SEQ ID NO: 2329717 - RNA, 19 nt, Artificial Sequence
  Description of Artificial Sequence: Synthetic oligonucleotide
  Antisense strand to SEQ ID NO: 2329716
uuccaugcaggaagcgaau

SEQ ID NO: 2329718 - RNA, 19 nt, Artificial Sequence
  Description of Artificial Sequence: Synthetic oligonucleotide
  Sense strand starting at position 3193 of SEQ ID NO: 1885275
uggagauucuuaucucuuu

SEQ ID NO: 2329719 - RNA, 19 nt, Artificial Sequence
  Description of Artificial Sequence: Synthetic oligonucleotide
  Antisense strand to SEQ ID NO: 2329718
aaagagauaagaaucucca

SEQ ID NO: 2329720 - RNA, 19 nt, Artificial Sequence
  Description of Artificial Sequence: Synthetic oligonucleotide
  Sense strand starting at position 3196 of SEQ ID NO: 1885275
agauucuuaucucuuugga

SEQ ID NO: 2329721 - RNA, 19 nt, Artificial Sequence
  Description of Artificial Sequence: Synthetic oligonucleotide
  Antisense strand to SEQ ID NO: 2329720
uccaaagagauaagaaucu

SEQ ID NO: 2329722 - RNA, 19 nt, Artificial Sequence
  Description of Artificial Sequence: Synthetic oligonucleotide
  Sense strand starting at position 3198 of SEQ ID NO: 1885275
auucuuaucucuuuggaag

SEQ ID NO: 2329723 - RNA, 19 nt, Artificial Sequence
  Description of Artificial Sequence: Synthetic oligonucleotide
  Antisense strand to SEQ ID NO: 2329722
cuuccaaagagauaagaau

SEQ ID NO: 2329724 - RNA, 19 nt, Artificial Sequence
  Description of Artificial Sequence: Synthetic oligonucleotide
  Sense strand starting at position 3411 of SEQ ID NO: 1885275
ucugguaaccuagauccuu

SEQ ID NO: 2329725 - RNA, 19 nt, Artificial Sequence
  Description of Artificial Sequence: Synthetic oligonucleotide
  Antisense strand to SEQ ID NO: 2329724
aaggaucuagguuaccaga

SEQ ID NO: 2329726 - RNA, 19 nt, Artificial Sequence
  Description of Artificial Sequence: Synthetic oligonucleotide
  Sense strand starting at position 3429 of SEQ ID NO: 1885275
uugagcaaccuugaucuuu

SEQ ID NO: 2329727 - RNA, 19 nt, Artificial Sequence
  Description of Artificial Sequence: Synthetic oligonucleotide
  Antisense strand to SEQ ID NO: 2329726
aaagaucaagguugcucaa

SEQ ID NO: 2329728 - RNA, 19 nt, Artificial Sequence
  Description of Artificial Sequence: Synthetic oligonucleotide
  Sense strand starting at position 3461 of SEQ ID NO: 1885275
ucucacgauuuguuuguaa

SEQ ID NO: 2329729 - RNA, 19 nt, Artificial Sequence
  Description of Artificial Sequence: Synthetic oligonucleotide
  Antisense strand to SEQ ID NO: 2329728
uuacaaacaaaucgugaga

SEQ ID NO: 2329730 - RNA, 19 nt, Artificial Sequence
  Description of Artificial Sequence: Synthetic oligonucleotide
  Sense strand starting at position 3463 of SEQ ID NO: 1885275
ucacgauuuguuuguaaug

SEQ ID NO: 2329731 - RNA, 19 nt, Artificial Sequence
  Description of Artificial Sequence: Synthetic oligonucleotide
  Antisense strand to SEQ ID NO: 2329730
cauuacaaacaaaucguga

SEQ ID NO: 2329732 - RNA, 19 nt, Artificial Sequence
  Description of Artificial Sequence: Synthetic oligonucleotide
  Sense strand starting at position 3472 of SEQ ID NO: 1885275
guuuguaaugcucuguguu

SEQ ID NO: 2329733 - RNA, 19 nt, Artificial Sequence
  Description of Artificial Sequence: Synthetic oligonucleotide
  Antisense strand to SEQ ID NO: 2329732
aacacagagcauuacaaac

SEQ ID NO: 2329734 - RNA, 19 nt, Artificial Sequence
  Description of Artificial Sequence: Synthetic oligonucleotide
  Sense strand starting at position 3682 of SEQ ID NO: 1885275
cucccagggugucugaaau

SEQ ID NO: 2329735 - RNA, 19 nt, Artificial Sequence
  Description of Artificial Sequence: Synthetic oligonucleotide
  Antisense strand to SEQ ID NO: 2329734
auuucagacacccugggag

SEQ ID NO: 2329736 - RNA, 19 nt, Artificial Sequence
  Description of Artificial Sequence: Synthetic oligonucleotide
  Sense strand starting at position 3688 of SEQ ID NO: 1885275
gggugucugaaaugaacuc

SEQ ID NO: 2329737 - RNA, 19 nt, Artificial Sequence
  Description of Artificial Sequence: Synthetic oligonucleotide
  Antisense strand to SEQ ID NO: 2329736
gaguucauuucagacaccc

SEQ ID NO: 2329738 - RNA, 19 nt, Artificial Sequence
  Description of Artificial Sequence: Synthetic oligonucleotide
  Sense strand starting at position 3695 of SEQ ID NO: 1885275
ugaaaugaacucugcccau

SEQ ID NO: 2329739 - RNA, 19 nt, Artificial Sequence
  Description of Artificial Sequence: Synthetic oligonucleotide
  Antisense strand to SEQ ID NO: 2329738
augggcagaguucauuuca

SEQ ID NO: 2329740 - RNA, 19 nt, Artificial Sequence
  Description of Artificial Sequence: Synthetic oligonucleotide
  Sense strand starting at position 3764 of SEQ ID NO: 1885275
aggugugcucucuaaagag

SEQ ID NO: 2329741 - RNA, 19 nt, Artificial Sequence
  Description of Artificial Sequence: Synthetic oligonucleotide
  Antisense strand to SEQ ID NO: 2329740
cucuuuagagagcacaccu

SEQ ID NO: 2329742 - RNA, 19 nt, Artificial Sequence
  Description of Artificial Sequence: Synthetic oligonucleotide
  Sense strand starting at position 3875 of SEQ ID NO: 1885275
ugagcugacuuauucugaa

SEQ ID NO: 2329743 - RNA, 19 nt, Artificial Sequence
  Description of Artificial Sequence: Synthetic oligonucleotide
  Antisense strand to SEQ ID NO: 2329742
uucagaauaagucagcuca

SEQ ID NO: 2329744 - RNA, 19 nt, Artificial Sequence
  Description of Artificial Sequence: Synthetic oligonucleotide
  Sense strand starting at position 40 of SEQ ID NO: 1885276
cagcgugaucaacaggaau

SEQ ID NO: 2329745 - RNA, 19 nt, Artificial Sequence
  Description of Artificial Sequence: Synthetic oligonucleotide
  Antisense strand to SEQ ID NO: 2329744
auuccuguugaucacgcug

SEQ ID NO: 2329746 - RNA, 19 nt, Artificial Sequence
  Description of Artificial Sequence: Synthetic oligonucleotide
  Sense strand starting at position 88 of SEQ ID NO: 1885276
gagccuuugcgcuugacuu

SEQ ID NO: 2329747 - RNA, 19 nt, Artificial Sequence
  Description of Artificial Sequence: Synthetic oligonucleotide
  Antisense strand to SEQ ID NO: 2329746
aagucaagcgcaaaggcuc

SEQ ID NO: 2329748 - RNA, 19 nt, Artificial Sequence
  Description of Artificial Sequence: Synthetic oligonucleotide
  Sense strand starting at position 221 of SEQ ID NO: 1885276
gcaaacaacgucuaaucuu

SEQ ID NO: 2329749 - RNA, 19 nt, Artificial Sequence
  Description of Artificial Sequence: Synthetic oligonucleotide
  Antisense strand to SEQ ID NO: 2329748
aagauuagacguuguuugc

SEQ ID NO: 2329750 - RNA, 19 nt, Artificial Sequence
  Description of Artificial Sequence: Synthetic oligonucleotide
  Sense strand starting at position 390 of SEQ ID NO: 1885276
cuggaugcugaguauugau

SEQ ID NO: 2329751 - RNA, 19 nt, Artificial Sequence
  Description of Artificial Sequence: Synthetic oligonucleotide
  Antisense strand to SEQ ID NO: 2329750
aucaauacucagcauccag

SEQ ID NO: 2329752 - RNA, 19 nt, Artificial Sequence
  Description of Artificial Sequence: Synthetic oligonucleotide
  Sense strand starting at position 409 of SEQ ID NO: 1885276
cccaguguucagggauagu

SEQ ID NO: 2329753 - RNA, 19 nt, Artificial Sequence
  Description of Artificial Sequence: Synthetic oligonucleotide
  Antisense strand to SEQ ID NO: 2329752
acuaucccugaacacuggg

SEQ ID NO: 2329754 - RNA, 19 nt, Artificial Sequence
  Description of Artificial Sequence: Synthetic oligonucleotide
  Sense strand starting at position 537 of SEQ ID NO: 1885276
uaaagcauaguagauguua

SEQ ID NO: 2329755 - RNA, 19 nt, Artificial Sequence
  Description of Artificial Sequence: Synthetic oligonucleotide
  Antisense strand to SEQ ID NO: 2329754
uaacaucuacuaugcuuua

SEQ ID NO: 2329756 - RNA, 19 nt, Artificial Sequence
  Description of Artificial Sequence: Synthetic oligonucleotide
  Sense strand starting at position 545 of SEQ ID NO: 1885276
aguagauguuauuuguguu

SEQ ID NO: 2329757 - RNA, 19 nt, Artificial Sequence
  Description of Artificial Sequence: Synthetic oligonucleotide
  Antisense strand to SEQ ID NO: 2329756
aacacaaauaacaucuacu

SEQ ID NO: 2329758 - RNA, 19 nt, Artificial Sequence
  Description of Artificial Sequence: Synthetic oligonucleotide
  Sense strand starting at position 546 of SEQ ID NO: 1885276
guagauguuauuuguguuu

SEQ ID NO: 2329759 - RNA, 19 nt, Artificial Sequence
  Description of Artificial Sequence: Synthetic oligonucleotide
  Antisense strand to SEQ ID NO: 2329758
aaacacaaauaacaucuac

SEQ ID NO: 2329760 - RNA, 19 nt, Artificial Sequence
  Description of Artificial Sequence: Synthetic oligonucleotide
  Sense strand starting at position 549 of SEQ ID NO: 1885276
gauguuauuuguguuugga

SEQ ID NO: 2329761 - RNA, 19 nt, Artificial Sequence
  Description of Artificial Sequence: Synthetic oligonucleotide
  Antisense strand to SEQ ID NO: 2329760
uccaaacacaaauaacauc

SEQ ID NO: 2329762 - RNA, 19 nt, Artificial Sequence
  Description of Artificial Sequence: Synthetic oligonucleotide
  Sense strand starting at position 551 of SEQ ID NO: 1885276
uguuauuuguguuuggaga

SEQ ID NO: 2329763 - RNA, 19 nt, Artificial Sequence
  Description of Artificial Sequence: Synthetic oligonucleotide
  Antisense strand to SEQ ID NO: 2329762
ucuccaaacacaaauaaca

SEQ ID NO: 2329764 - RNA, 19 nt, Artificial Sequence
  Description of Artificial Sequence: Synthetic oligonucleotide
  Sense strand starting at position 627 of SEQ ID NO: 1885276
acguuauaucaggaaggua

SEQ ID NO: 2329765 - RNA, 19 nt, Artificial Sequence
  Description of Artificial Sequence: Synthetic oligonucleotide
  Antisense strand to SEQ ID NO: 2329764
uaccuuccugauauaacgu

SEQ ID NO: 2329766 - RNA, 19 nt, Artificial Sequence
  Description of Artificial Sequence: Synthetic oligonucleotide
  Sense strand starting at position 635 of SEQ ID NO: 1885276
ucaggaagguauguuugaa

SEQ ID NO: 2329767 - RNA, 19 nt, Artificial Sequence
  Description of Artificial Sequence: Synthetic oligonucleotide
  Antisense strand to SEQ ID NO: 2329766
uucaaacauaccuuccuga

SEQ ID NO: 2329768 - RNA, 19 nt, Artificial Sequence
  Description of Artificial Sequence: Synthetic oligonucleotide
  Sense strand starting at position 743 of SEQ ID NO: 1885276
cagucuuugguguaagaca

SEQ ID NO: 2329769 - RNA, 19 nt, Artificial Sequence
  Description of Artificial Sequence: Synthetic oligonucleotide
  Antisense strand to SEQ ID NO: 2329768
ugucuuacaccaaagacug

SEQ ID NO: 2329770 - RNA, 19 nt, Artificial Sequence
  Description of Artificial Sequence: Synthetic oligonucleotide
  Sense strand starting at position 846 of SEQ ID NO: 1885276
guugaaucaucugucucag

SEQ ID NO: 2329771 - RNA, 19 nt, Artificial Sequence
  Description of Artificial Sequence: Synthetic oligonucleotide
  Antisense strand to SEQ ID NO: 2329770
cugagacagaugauucaac

SEQ ID NO: 2329772 - RNA, 19 nt, Artificial Sequence
  Description of Artificial Sequence: Synthetic oligonucleotide
  Sense strand starting at position 1260 of SEQ ID NO: 1885276
gguccuuuguaauuaaucu

SEQ ID NO: 2329773 - RNA, 19 nt, Artificial Sequence
  Description of Artificial Sequence: Synthetic oligonucleotide
  Antisense strand to SEQ ID NO: 2329772
agauuaauuacaaaggacc

SEQ ID NO: 2329774 - RNA, 19 nt, Artificial Sequence
  Description of Artificial Sequence: Synthetic oligonucleotide
  Sense strand starting at position 1285 of SEQ ID NO: 1885276
ucaucauaauuggaagaaa

SEQ ID NO: 2329775 - RNA, 19 nt, Artificial Sequence
  Description of Artificial Sequence: Synthetic oligonucleotide
  Antisense strand to SEQ ID NO: 2329774
uuucuuccaauuaugauga

SEQ ID NO: 2329776 - RNA, 19 nt, Artificial Sequence
  Description of Artificial Sequence: Synthetic oligonucleotide
  Sense strand starting at position 1427 of SEQ ID NO: 1885276
aagccaguggguugagaua

SEQ ID NO: 2329777 - RNA, 19 nt, Artificial Sequence
  Description of Artificial Sequence: Synthetic oligonucleotide
  Antisense strand to SEQ ID NO: 2329776
uaucucaacccacuggcuu

SEQ ID NO: 2329778 - RNA, 19 nt, Artificial Sequence
  Description of Artificial Sequence: Synthetic oligonucleotide
  Sense strand starting at position 1436 of SEQ ID NO: 1885276
gguugagauaccugaccag

SEQ ID NO: 2329779 - RNA, 19 nt, Artificial Sequence
  Description of Artificial Sequence: Synthetic oligonucleotide
  Antisense strand to SEQ ID NO: 2329778
cuggucagguaucucaacc

SEQ ID NO: 2329780 - RNA, 19 nt, Artificial Sequence
  Description of Artificial Sequence: Synthetic oligonucleotide
  Sense strand starting at position 1525 of SEQ ID NO: 1885276
aaccuauggguguauguuu

SEQ ID NO: 2329781 - RNA, 19 nt, Artificial Sequence
  Description of Artificial Sequence: Synthetic oligonucleotide
  Antisense strand to SEQ ID NO: 2329780
aaacauacacccauagguu

SEQ ID NO: 2329782 - RNA, 19 nt, Artificial Sequence
  Description of Artificial Sequence: Synthetic oligonucleotide
  Sense strand starting at position 1545 of SEQ ID NO: 1885276
uggcaauguggcuaaguca

SEQ ID NO: 2329783 - RNA, 19 nt, Artificial Sequence
  Description of Artificial Sequence: Synthetic oligonucleotide
  Antisense strand to SEQ ID NO: 2329782
ugacuuagccacauugcca

SEQ ID NO: 2329784 - RNA, 19 nt, Artificial Sequence
  Description of Artificial Sequence: Synthetic oligonucleotide
  Sense strand starting at position 1573 of SEQ ID NO: 1885276
gaggacuguccuggugaca

SEQ ID NO: 2329785 - RNA, 19 nt, Artificial Sequence
  Description of Artificial Sequence: Synthetic oligonucleotide
  Antisense strand to SEQ ID NO: 2329784
ugucaccaggacaguccuc

SEQ ID NO: 2329786 - RNA, 19 nt, Artificial Sequence
  Description of Artificial Sequence: Synthetic oligonucleotide
  Sense strand starting at position 1653 of SEQ ID NO: 1885276
guaaguuaacggcaaauaa

SEQ ID NO: 2329787 - RNA, 19 nt, Artificial Sequence
  Description of Artificial Sequence: Synthetic oligonucleotide
  Antisense strand to SEQ ID NO: 2329786
uuauuugccguuaacuuac

SEQ ID NO: 2329788 - RNA, 19 nt, Artificial Sequence
  Description of Artificial Sequence: Synthetic oligonucleotide
  Sense strand starting at position 1664 of SEQ ID NO: 1885276
gcaaauaaauggcccagaa

SEQ ID NO: 2329789 - RNA, 19 nt, Artificial Sequence
  Description of Artificial Sequence: Synthetic oligonucleotide
  Antisense strand to SEQ ID NO: 2329788
uucugggccauuuauuugc

SEQ ID NO: 2329790 - RNA, 19 nt, Artificial Sequence
  Description of Artificial Sequence: Synthetic oligonucleotide
  Sense strand starting at position 1792 of SEQ ID NO: 1885276
ugguguugaguucaaagac

SEQ ID NO: 2329791 - RNA, 19 nt, Artificial Sequence
  Description of Artificial Sequence: Synthetic oligonucleotide
  Antisense strand to SEQ ID NO: 2329790
gucuuugaacucaacacca

SEQ ID NO: 2329792 - RNA, 19 nt, Artificial Sequence
  Description of Artificial Sequence: Synthetic oligonucleotide
  Sense strand starting at position 2082 of SEQ ID NO: 1885276
cugucaugugcuuagauau

SEQ ID NO: 2329793 - RNA, 19 nt, Artificial Sequence
  Description of Artificial Sequence: Synthetic oligonucleotide
  Antisense strand to SEQ ID NO: 2329792
auaucuaagcacaugacag

SEQ ID NO: 2329794 - RNA, 19 nt, Artificial Sequence
  Description of Artificial Sequence: Synthetic oligonucleotide
  Sense strand starting at position 2184 of SEQ ID NO: 1885276
aauggaaagugcucacuua

SEQ ID NO: 2329795 - RNA, 19 nt, Artificial Sequence
  Description of Artificial Sequence: Synthetic oligonucleotide
  Antisense strand to SEQ ID NO: 2329794
uaagugagcacuuuccauu

SEQ ID NO: 2329796 - RNA, 19 nt, Artificial Sequence
  Description of Artificial Sequence: Synthetic oligonucleotide
  Sense strand starting at position 2185 of SEQ ID NO: 1885276
auggaaagugcucacuuac

SEQ ID NO: 2329797 - RNA, 19 nt, Artificial Sequence
  Description of Artificial Sequence: Synthetic oligonucleotide
  Antisense strand to SEQ ID NO: 2329796
guaagugagcacuuuccau

SEQ ID NO: 2329798 - RNA, 19 nt, Artificial Sequence
  Description of Artificial Sequence: Synthetic oligonucleotide
  Sense strand starting at position 2262 of SEQ ID NO: 1885276
augaguaaaguuuacaagu

SEQ ID NO: 2329799 - RNA, 19 nt, Artificial Sequence
  Description of Artificial Sequence: Synthetic oligonucleotide
  Antisense strand to SEQ ID NO: 2329798
acuuguaaacuuuacucau

SEQ ID NO: 2329800 - RNA, 19 nt, Artificial Sequence
  Description of Artificial Sequence: Synthetic oligonucleotide
  Sense strand starting at position 2279 of SEQ ID NO: 1885276
guauuaauauagucagcau

SEQ ID NO: 2329801 - RNA, 19 nt, Artificial Sequence
  Description of Artificial Sequence: Synthetic oligonucleotide
  Antisense strand to SEQ ID NO: 2329800
augcugacuauauuaauac

SEQ ID NO: 2329802 - RNA, 19 nt, Artificial Sequence
  Description of Artificial Sequence: Synthetic oligonucleotide
  Sense strand starting at position 2615 of SEQ ID NO: 1885276
aaagcuuggcucugagacu

SEQ ID NO: 2329803 - RNA, 19 nt, Artificial Sequence
  Description of Artificial Sequence: Synthetic oligonucleotide
  Antisense strand to SEQ ID NO: 2329802
agucucagagccaagcuuu

SEQ ID NO: 2329804 - RNA, 19 nt, Artificial Sequence
  Description of Artificial Sequence: Synthetic oligonucleotide
  Sense strand starting at position 2664 of SEQ ID NO: 1885276
gcguaugucauggucugca

SEQ ID NO: 2329805 - RNA, 19 nt, Artificial Sequence
  Description of Artificial Sequence: Synthetic oligonucleotide
  Antisense strand to SEQ ID NO: 2329804
ugcagaccaugacauacgc

SEQ ID NO: 2329806 - RNA, 19 nt, Artificial Sequence
  Description of Artificial Sequence: Synthetic oligonucleotide
  Sense strand starting at position 2713 of SEQ ID NO: 1885276
ucaauagaaggcugagacu

SEQ ID NO: 2329807 - RNA, 19 nt, Artificial Sequence
  Description of Artificial Sequence: Synthetic oligonucleotide
  Antisense strand to SEQ ID NO: 2329806
agucucagccuucuauuga

SEQ ID NO: 2329808 - RNA, 19 nt, Artificial Sequence
  Description of Artificial Sequence: Synthetic oligonucleotide
  Sense strand starting at position 3451 of SEQ ID NO: 1885276
guaacacaggccuaucuau

SEQ ID NO: 2329809 - RNA, 19 nt, Artificial Sequence
  Description of Artificial Sequence: Synthetic oligonucleotide
  Antisense strand to SEQ ID NO: 2329808
auagauaggccuguguuac

SEQ ID NO: 2329810 - RNA, 19 nt, Artificial Sequence
  Description of Artificial Sequence: Synthetic oligonucleotide
  Sense strand starting at position 3458 of SEQ ID NO: 1885276
aggccuaucuauguuauaa

SEQ ID NO: 2329811 - RNA, 19 nt, Artificial Sequence
  Description of Artificial Sequence: Synthetic oligonucleotide
  Antisense strand to SEQ ID NO: 2329810
uuauaacauagauaggccu

SEQ ID NO: 2329812 - RNA, 19 nt, Artificial Sequence
  Description of Artificial Sequence: Synthetic oligonucleotide
  Sense strand starting at position 3470 of SEQ ID NO: 1885276
guuauaauacaguguugag

SEQ ID NO: 2329813 - RNA, 19 nt, Artificial Sequence
  Description of Artificial Sequence: Synthetic oligonucleotide
  Antisense strand to SEQ ID NO: 2329812
cucaacacuguauuauaac

SEQ ID NO: 2329814 - RNA, 19 nt, Artificial Sequence
  Description of Artificial Sequence: Synthetic oligonucleotide
  Sense strand starting at position 3477 of SEQ ID NO: 1885276
uacaguguugaguaucuca

SEQ ID NO: 2329815 - RNA, 19 nt, Artificial Sequence
  Description of Artificial Sequence: Synthetic oligonucleotide
  Antisense strand to SEQ ID NO: 2329814
ugagauacucaacacugua

SEQ ID NO: 2329816 - RNA, 19 nt, Artificial Sequence
  Description of Artificial Sequence: Synthetic oligonucleotide
  Sense strand starting at position 3590 of SEQ ID NO: 1885276
gagcguuugaagcauugaa

SEQ ID NO: 2329817 - RNA, 19 nt, Artificial Sequence
  Description of Artificial Sequence: Synthetic oligonucleotide
  Antisense strand to SEQ ID NO: 2329816
uucaaugcuucaaacgcuc

SEQ ID NO: 2329818 - RNA, 19 nt, Artificial Sequence
  Description of Artificial Sequence: Synthetic oligonucleotide
  Sense strand starting at position 3612 of SEQ ID NO: 1885276
aaauuaauugcugggugau

SEQ ID NO: 2329819 - RNA, 19 nt, Artificial Sequence
  Description of Artificial Sequence: Synthetic oligonucleotide
  Antisense strand to SEQ ID NO: 2329818
aucacccagcaauuaauuu

SEQ ID NO: 2329820 - RNA, 19 nt, Artificial Sequence
  Description of Artificial Sequence: Synthetic oligonucleotide
  Sense strand starting at position 3613 of SEQ ID NO: 1885276
aauuaauugcugggugaug

SEQ ID NO: 2329821 - RNA, 19 nt, Artificial Sequence
  Description of Artificial Sequence: Synthetic oligonucleotide
  Antisense strand to SEQ ID NO: 2329820
caucacccagcaauuaauu

SEQ ID NO: 2329822 - RNA, 19 nt, Artificial Sequence
  Description of Artificial Sequence: Synthetic oligonucleotide
  Sense strand starting at position 3829 of SEQ ID NO: 1885276
gcaucaggagagugucaua

SEQ ID NO: 2329823 - RNA, 19 nt, Artificial Sequence
  Description of Artificial Sequence: Synthetic oligonucleotide
  Antisense strand to SEQ ID NO: 2329822
uaugacacucuccugaugc

SEQ ID NO: 2329824 - RNA, 19 nt, Artificial Sequence
  Description of Artificial Sequence: Synthetic oligonucleotide
  Sense strand starting at position 286 of SEQ ID NO: 1885277
aggcgagguuaacuaaauc

SEQ ID NO: 2329825 - RNA, 19 nt, Artificial Sequence
  Description of Artificial Sequence: Synthetic oligonucleotide
  Antisense strand to SEQ ID NO: 2329824
gauuuaguuaaccucgccu

SEQ ID NO: 2329826 - RNA, 19 nt, Artificial Sequence
  Description of Artificial Sequence: Synthetic oligonucleotide
  Sense strand starting at position 1204 of SEQ ID NO: 1885277
guucuugcccuccaggaaa

SEQ ID NO: 2329827 - RNA, 19 nt, Artificial Sequence
  Description of Artificial Sequence: Synthetic oligonucleotide
  Antisense strand to SEQ ID NO: 2329826
uuuccuggagggcaagaac

SEQ ID NO: 2329828 - RNA, 19 nt, Artificial Sequence
  Description of Artificial Sequence: Synthetic oligonucleotide
  Sense strand starting at position 1564 of SEQ ID NO: 1885277
gugaguguauacucagaga

SEQ ID NO: 2329829 - RNA, 19 nt, Artificial Sequence
  Description of Artificial Sequence: Synthetic oligonucleotide
  Antisense strand to SEQ ID NO: 2329828
ucucugaguauacacucac

SEQ ID NO: 2329830 - RNA, 19 nt, Artificial Sequence
  Description of Artificial Sequence: Synthetic oligonucleotide
  Sense strand starting at position 1584 of SEQ ID NO: 1885277
gcgucccugcaaugaucaa

SEQ ID NO: 2329831 - RNA, 19 nt, Artificial Sequence
  Description of Artificial Sequence: Synthetic oligonucleotide
  Antisense strand to SEQ ID NO: 2329830
uugaucauugcagggacgc

SEQ ID NO: 2329832 - RNA, 19 nt, Artificial Sequence
  Description of Artificial Sequence: Synthetic oligonucleotide
  Sense strand starting at position 2001 of SEQ ID NO: 1885277
gugugagagcaguaaagcu

SEQ ID NO: 2329833 - RNA, 19 nt, Artificial Sequence
  Description of Artificial Sequence: Synthetic oligonucleotide
  Antisense strand to SEQ ID NO: 2329832
agcuuuacugcucucacac

SEQ ID NO: 2329834 - RNA, 19 nt, Artificial Sequence
  Description of Artificial Sequence: Synthetic oligonucleotide
  Sense strand starting at position 2446 of SEQ ID NO: 1885277
uggcauuaaugggcucaaa

SEQ ID NO: 2329835 - RNA, 19 nt, Artificial Sequence
  Description of Artificial Sequence: Synthetic oligonucleotide
  Antisense strand to SEQ ID NO: 2329834
uuugagcccauuaaugcca

SEQ ID NO: 2329836 - RNA, 19 nt, Artificial Sequence
  Description of Artificial Sequence: Synthetic oligonucleotide
  Sense strand starting at position 2466 of SEQ ID NO: 1885277
agugaaaggaaauguguaa

SEQ ID NO: 2329837 - RNA, 19 nt, Artificial Sequence
  Description of Artificial Sequence: Synthetic oligonucleotide
  Antisense strand to SEQ ID NO: 2329836
uuacacauuuccuuucacu

SEQ ID NO: 2329838 - RNA, 19 nt, Artificial Sequence
  Description of Artificial Sequence: Synthetic oligonucleotide
  Sense strand starting at position 2505 of SEQ ID NO: 1885277
ucaugagaauguuaaugac

SEQ ID NO: 2329839 - RNA, 19 nt, Artificial Sequence
  Description of Artificial Sequence: Synthetic oligonucleotide
  Antisense strand to SEQ ID NO: 2329838
gucauuaacauucucauga

SEQ ID NO: 2329840 - RNA, 19 nt, Artificial Sequence
  Description of Artificial Sequence: Synthetic oligonucleotide
  Sense strand starting at position 2508 of SEQ ID NO: 1885277
ugagaauguuaaugacaaa

SEQ ID NO: 2329841 - RNA, 19 nt, Artificial Sequence
  Description of Artificial Sequence: Synthetic oligonucleotide
  Antisense strand to SEQ ID NO: 2329840
uuugucauuaacauucuca

SEQ ID NO: 2329842 - RNA, 19 nt, Artificial Sequence
  Description of Artificial Sequence: Synthetic oligonucleotide
  Sense strand starting at position 2603 of SEQ ID NO: 1885277
acacgaaucugcuaaacua

SEQ ID NO: 2329843 - RNA, 19 nt, Artificial Sequence
  Description of Artificial Sequence: Synthetic oligonucleotide
  Antisense strand to SEQ ID NO: 2329842
uaguuuagcagauucgugu

SEQ ID NO: 2329844 - RNA, 19 nt, Artificial Sequence
  Description of Artificial Sequence: Synthetic oligonucleotide
  Sense strand starting at position 2631 of SEQ ID NO: 1885277
acucucauucgagaguaca

SEQ ID NO: 2329845 - RNA, 19 nt, Artificial Sequence
  Description of Artificial Sequence: Synthetic oligonucleotide
  Antisense strand to SEQ ID NO: 2329844
uguacucucgaaugagagu

SEQ ID NO: 2329846 - RNA, 19 nt, Artificial Sequence
  Description of Artificial Sequence: Synthetic oligonucleotide
  Sense strand starting at position 2641 of SEQ ID NO: 1885277
gagaguacauuugagauac

SEQ ID NO: 2329847 - RNA, 19 nt, Artificial Sequence
  Description of Artificial Sequence: Synthetic oligonucleotide
  Antisense strand to SEQ ID NO: 2329846
guaucucaaauguacucuc

SEQ ID NO: 2329848 - RNA, 19 nt, Artificial Sequence
  Description of Artificial Sequence: Synthetic oligonucleotide
  Sense strand starting at position 2643 of SEQ ID NO: 1885277
gaguacauuugagauacau

SEQ ID NO: 2329849 - RNA, 19 nt, Artificial Sequence
  Description of Artificial Sequence: Synthetic oligonucleotide
  Antisense strand to SEQ ID NO: 2329848
auguaucucaaauguacuc

SEQ ID NO: 2329850 - RNA, 19 nt, Artificial Sequence
  Description of Artificial Sequence: Synthetic oligonucleotide
  Sense strand starting at position 2654 of SEQ ID NO: 1885277
agauacauacugugcauga

SEQ ID NO: 2329851 - RNA, 19 nt, Artificial Sequence
  Description of Artificial Sequence: Synthetic oligonucleotide
  Antisense strand to SEQ ID NO: 2329850
ucaugcacaguauguaucu

SEQ ID NO: 2329852 - RNA, 19 nt, Artificial Sequence
  Description of Artificial Sequence: Synthetic oligonucleotide
  Sense strand starting at position 2655 of SEQ ID NO: 1885277
gauacauacugugcaugaa

SEQ ID NO: 2329853 - RNA, 19 nt, Artificial Sequence
  Description of Artificial Sequence: Synthetic oligonucleotide
  Antisense strand to SEQ ID NO: 2329852
uucaugcacaguauguauc

SEQ ID NO: 2329854 - RNA, 19 nt, Artificial Sequence
  Description of Artificial Sequence: Synthetic oligonucleotide
  Sense strand starting at position 2658 of SEQ ID NO: 1885277
acauacugugcaugaacau

SEQ ID NO: 2329855 - RNA, 19 nt, Artificial Sequence
  Description of Artificial Sequence: Synthetic oligonucleotide
  Antisense strand to SEQ ID NO: 2329854
auguucaugcacaguaugu

SEQ ID NO: 2329856 - RNA, 19 nt, Artificial Sequence
  Description of Artificial Sequence: Synthetic oligonucleotide
  Sense strand starting at position 2697 of SEQ ID NO: 1885277
caaggaaaguauccuguga

SEQ ID NO: 2329857 - RNA, 19 nt, Artificial Sequence
  Description of Artificial Sequence: Synthetic oligonucleotide
  Antisense strand to SEQ ID NO: 2329856
ucacaggauacuuuccuug

SEQ ID NO: 2329858 - RNA, 19 nt, Artificial Sequence
  Description of Artificial Sequence: Synthetic oligonucleotide
  Sense strand starting at position 2699 of SEQ ID NO: 1885277
aggaaaguauccugugaag

SEQ ID NO: 2329859 - RNA, 19 nt, Artificial Sequence
  Description of Artificial Sequence: Synthetic oligonucleotide
  Antisense strand to SEQ ID NO: 2329858
cuucacaggauacuuuccu

SEQ ID NO: 2329860 - RNA, 19 nt, Artificial Sequence
  Description of Artificial Sequence: Synthetic oligonucleotide
  Sense strand starting at position 2828 of SEQ ID NO: 1885277
uaugguuccuuggcguauu

SEQ ID NO: 2329861 - RNA, 19 nt, Artificial Sequence
  Description of Artificial Sequence: Synthetic oligonucleotide
  Antisense strand to SEQ ID NO: 2329860
aauacgccaaggaaccaua

SEQ ID NO: 2329862 - RNA, 19 nt, Artificial Sequence
  Description of Artificial Sequence: Synthetic oligonucleotide
  Sense strand starting at position 2831 of SEQ ID NO: 1885277
gguuccuuggcguauugaa

SEQ ID NO: 2329863 - RNA, 19 nt, Artificial Sequence
  Description of Artificial Sequence: Synthetic oligonucleotide
  Antisense strand to SEQ ID NO: 2329862
uucaauacgccaaggaacc

SEQ ID NO: 2329864 - RNA, 19 nt, Artificial Sequence
  Description of Artificial Sequence: Synthetic oligonucleotide
  Sense strand starting at position 2889 of SEQ ID NO: 1885277
gggaaagugucucugacuu

SEQ ID NO: 2329865 - RNA, 19 nt, Artificial Sequence
  Description of Artificial Sequence: Synthetic oligonucleotide
  Antisense strand to SEQ ID NO: 2329864
aagucagagacacuuuccc

SEQ ID NO: 2329866 - RNA, 19 nt, Artificial Sequence
  Description of Artificial Sequence: Synthetic oligonucleotide
  Sense strand starting at position 2978 of SEQ ID NO: 1885277
gucauagacucucauguaa

SEQ ID NO: 2329867 - RNA, 19 nt, Artificial Sequence
  Description of Artificial Sequence: Synthetic oligonucleotide
  Antisense strand to SEQ ID NO: 2329866
uuacaugagagucuaugac

SEQ ID NO: 2329868 - RNA, 19 nt, Artificial Sequence
  Description of Artificial Sequence: Synthetic oligonucleotide
  Sense strand starting at position 3005 of SEQ ID NO: 1885277
cucucuaugccaggaagaa

SEQ ID NO: 2329869 - RNA, 19 nt, Artificial Sequence
  Description of Artificial Sequence: Synthetic oligonucleotide
  Antisense strand to SEQ ID NO: 2329868
uucuuccuggcauagagag

SEQ ID NO: 2329870 - RNA, 19 nt, Artificial Sequence
  Description of Artificial Sequence: Synthetic oligonucleotide
  Sense strand starting at position 3098 of SEQ ID NO: 1885277
aguuuauaaucaucauguc

SEQ ID NO: 2329871 - RNA, 19 nt, Artificial Sequence
  Description of Artificial Sequence: Synthetic oligonucleotide
  Antisense strand to SEQ ID NO: 2329870
gacaugaugauuauaaacu

SEQ ID NO: 2329872 - RNA, 19 nt, Artificial Sequence
  Description of Artificial Sequence: Synthetic oligonucleotide
  Sense strand starting at position 3099 of SEQ ID NO: 1885277
guuuauaaucaucauguca

SEQ ID NO: 2329873 - RNA, 19 nt, Artificial Sequence
  Description of Artificial Sequence: Synthetic oligonucleotide
  Antisense strand to SEQ ID NO: 2329872
ugacaugaugauuauaaac

SEQ ID NO: 2329874 - RNA, 19 nt, Artificial Sequence
  Description of Artificial Sequence: Synthetic oligonucleotide
  Sense strand starting at position 3391 of SEQ ID NO: 1885277
gcuggauccaauggcagaa

SEQ ID NO: 2329875 - RNA, 19 nt, Artificial Sequence
  Description of Artificial Sequence: Synthetic oligonucleotide
  Antisense strand to SEQ ID NO: 2329874
uucugccauuggauccagc

SEQ ID NO: 2329876 - RNA, 19 nt, Artificial Sequence
  Description of Artificial Sequence: Synthetic oligonucleotide
  Sense strand starting at position 3571 of SEQ ID NO: 1885277
aucugauauuacuagagug

SEQ ID NO: 2329877 - RNA, 19 nt, Artificial Sequence
  Description of Artificial Sequence: Synthetic oligonucleotide
  Antisense strand to SEQ ID NO: 2329876
cacucuaguaauaucagau

SEQ ID NO: 2329878 - RNA, 19 nt, Artificial Sequence
  Description of Artificial Sequence: Synthetic oligonucleotide
  Sense strand starting at position 3581 of SEQ ID NO: 1885277
acuagagugagaugucauu

SEQ ID NO: 2329879 - RNA, 19 nt, Artificial Sequence
  Description of Artificial Sequence: Synthetic oligonucleotide
  Antisense strand to SEQ ID NO: 2329878
aaugacaucucacucuagu

SEQ ID NO: 2329880 - RNA, 19 nt, Artificial Sequence
  Description of Artificial Sequence: Synthetic oligonucleotide
  Sense strand starting at position 3610 of SEQ ID NO: 1885277
uuaaaugaaucagugcuau

SEQ ID NO: 2329881 - RNA, 19 nt, Artificial Sequence
  Description of Artificial Sequence: Synthetic oligonucleotide
  Antisense strand to SEQ ID NO: 2329880
auagcacugauucauuuaa

SEQ ID NO: 2329882 - RNA, 19 nt, Artificial Sequence
  Description of Artificial Sequence: Synthetic oligonucleotide
  Sense strand starting at position 3614 of SEQ ID NO: 1885277
augaaucagugcuaucaua

SEQ ID NO: 2329883 - RNA, 19 nt, Artificial Sequence
  Description of Artificial Sequence: Synthetic oligonucleotide
  Antisense strand to SEQ ID NO: 2329882
uaugauagcacugauucau

SEQ ID NO: 2329884 - RNA, 19 nt, Artificial Sequence
  Description of Artificial Sequence: Synthetic oligonucleotide
  Sense strand starting at position 3658 of SEQ ID NO: 1885277
aguuaucuuugugucauaa

SEQ ID NO: 2329885 - RNA, 19 nt, Artificial Sequence
  Description of Artificial Sequence: Synthetic oligonucleotide
  Antisense strand to SEQ ID NO: 2329884
uuaugacacaaagauaacu

SEQ ID NO: 2329886 - RNA, 19 nt, Artificial Sequence
  Description of Artificial Sequence: Synthetic oligonucleotide
  Sense strand starting at position 3692 of SEQ ID NO: 1885277
ggcauagcacagugucauu

SEQ ID NO: 2329887 - RNA, 19 nt, Artificial Sequence
  Description of Artificial Sequence: Synthetic oligonucleotide
  Antisense strand to SEQ ID NO: 2329886
aaugacacugugcuaugcc

SEQ ID NO: 2329888 - RNA, 19 nt, Artificial Sequence
  Description of Artificial Sequence: Synthetic oligonucleotide
  Sense strand starting at position 3697 of SEQ ID NO: 1885277
agcacagugucauuguaaa

SEQ ID NO: 2329889 - RNA, 19 nt, Artificial Sequence
  Description of Artificial Sequence: Synthetic oligonucleotide
  Antisense strand to SEQ ID NO: 2329888
uuuacaaugacacugugcu

SEQ ID NO: 2329890 - RNA, 19 nt, Artificial Sequence
  Description of Artificial Sequence: Synthetic oligonucleotide
  Sense strand starting at position 3754 of SEQ ID NO: 1885277
cugggaauuagaugugcaa

SEQ ID NO: 2329891 - RNA, 19 nt, Artificial Sequence
  Description of Artificial Sequence: Synthetic oligonucleotide
  Antisense strand to SEQ ID NO: 2329890
uugcacaucuaauucccag

SEQ ID NO: 2329892 - RNA, 19 nt, Artificial Sequence
  Description of Artificial Sequence: Synthetic oligonucleotide
  Sense strand starting at position 3756 of SEQ ID NO: 1885277
gggaauuagaugugcaaca

SEQ ID NO: 2329893 - RNA, 19 nt, Artificial Sequence
  Description of Artificial Sequence: Synthetic oligonucleotide
  Antisense strand to SEQ ID NO: 2329892
uguugcacaucuaauuccc

SEQ ID NO: 2329894 - RNA, 19 nt, Artificial Sequence
  Description of Artificial Sequence: Synthetic oligonucleotide
  Sense strand starting at position 3757 of SEQ ID NO: 1885277
ggaauuagaugugcaacau

SEQ ID NO: 2329895 - RNA, 19 nt, Artificial Sequence
  Description of Artificial Sequence: Synthetic oligonucleotide
  Antisense strand to SEQ ID NO: 2329894
auguugcacaucuaauucc

SEQ ID NO: 2329896 - RNA, 19 nt, Artificial Sequence
  Description of Artificial Sequence: Synthetic oligonucleotide
  Sense strand starting at position 3761 of SEQ ID NO: 1885277
uuagaugugcaacaugauu

SEQ ID NO: 2329897 - RNA, 19 nt, Artificial Sequence
  Description of Artificial Sequence: Synthetic oligonucleotide
  Antisense strand to SEQ ID NO: 2329896
aaucauguugcacaucuaa

SEQ ID NO: 2329898 - RNA, 19 nt, Artificial Sequence
  Description of Artificial Sequence: Synthetic oligonucleotide
  Sense strand starting at position 3791 of SEQ ID NO: 1885277
ucaaacaaguagugauaau

SEQ ID NO: 2329899 - RNA, 19 nt, Artificial Sequence
  Description of Artificial Sequence: Synthetic oligonucleotide
  Antisense strand to SEQ ID NO: 2329898
auuaucacuacuuguuuga

SEQ ID NO: 2329900 - RNA, 19 nt, Artificial Sequence
  Description of Artificial Sequence: Synthetic oligonucleotide
  Sense strand starting at position 3824 of SEQ ID NO: 1885277
aguagcagucacgaagaau

SEQ ID NO: 2329901 - RNA, 19 nt, Artificial Sequence
  Description of Artificial Sequence: Synthetic oligonucleotide
  Antisense strand to SEQ ID NO: 2329900
auucuucgugacugcuacu

SEQ ID NO: 2329902 - RNA, 19 nt, Artificial Sequence
  Description of Artificial Sequence: Synthetic oligonucleotide
  Sense strand starting at position 3940 of SEQ ID NO: 1885277
cucuuugcugucugccaua

SEQ ID NO: 2329903 - RNA, 19 nt, Artificial Sequence
  Description of Artificial Sequence: Synthetic oligonucleotide
  Antisense strand to SEQ ID NO: 2329902
uauggcagacagcaaagag

SEQ ID NO: 2329904 - RNA, 19 nt, Artificial Sequence
  Description of Artificial Sequence: Synthetic oligonucleotide
  Sense strand starting at position 167 of SEQ ID NO: 1885278
ccuggaaacucugucuaga

SEQ ID NO: 2329905 - RNA, 19 nt, Artificial Sequence
  Description of Artificial Sequence: Synthetic oligonucleotide
  Antisense strand to SEQ ID NO: 2329904
ucuagacagaguuuccagg

SEQ ID NO: 2329906 - RNA, 19 nt, Artificial Sequence
  Description of Artificial Sequence: Synthetic oligonucleotide
  Sense strand starting at position 169 of SEQ ID NO: 1885278
uggaaacucugucuagaag

SEQ ID NO: 2329907 - RNA, 19 nt, Artificial Sequence
  Description of Artificial Sequence: Synthetic oligonucleotide
  Antisense strand to SEQ ID NO: 2329906
cuucuagacagaguuucca

SEQ ID NO: 2329908 - RNA, 19 nt, Artificial Sequence
  Description of Artificial Sequence: Synthetic oligonucleotide
  Sense strand starting at position 345 of SEQ ID NO: 1885278
ugaagugucuggccaacuu

SEQ ID NO: 2329909 - RNA, 19 nt, Artificial Sequence
  Description of Artificial Sequence: Synthetic oligonucleotide
  Antisense strand to SEQ ID NO: 2329908
aaguuggccagacacuuca

SEQ ID NO: 2329910 - RNA, 19 nt, Artificial Sequence
  Description of Artificial Sequence: Synthetic oligonucleotide
  Sense strand starting at position 482 of SEQ ID NO: 1885278
uuuccuguuguauaacaaa

SEQ ID NO: 2329911 - RNA, 19 nt, Artificial Sequence
  Description of Artificial Sequence: Synthetic oligonucleotide
  Antisense strand to SEQ ID NO: 2329910
uuuguuauacaacaggaaa

SEQ ID NO: 2329912 - RNA, 19 nt, Artificial Sequence
  Description of Artificial Sequence: Synthetic oligonucleotide
  Sense strand starting at position 635 of SEQ ID NO: 1885278
ucuggucugcgguaggaaa

SEQ ID NO: 2329913 - RNA, 19 nt, Artificial Sequence
  Description of Artificial Sequence: Synthetic oligonucleotide
  Antisense strand to SEQ ID NO: 2329912
uuuccuaccgcagaccaga

SEQ ID NO: 2329914 - RNA, 19 nt, Artificial Sequence
  Description of Artificial Sequence: Synthetic oligonucleotide
  Sense strand starting at position 661 of SEQ ID NO: 1885278
ccaggagggugcucacauu

SEQ ID NO: 2329915 - RNA, 19 nt, Artificial Sequence
  Description of Artificial Sequence: Synthetic oligonucleotide
  Antisense strand to SEQ ID NO: 2329914
aaugugagcacccuccugg

SEQ ID NO: 2329916 - RNA, 19 nt, Artificial Sequence
  Description of Artificial Sequence: Synthetic oligonucleotide
  Sense strand starting at position 691 of SEQ ID NO: 1885278
auagcagcccugugaauca

SEQ ID NO: 2329917 - RNA, 19 nt, Artificial Sequence
  Description of Artificial Sequence: Synthetic oligonucleotide
  Antisense strand to SEQ ID NO: 2329916
ugauucacagggcugcuau

SEQ ID NO: 2329918 - RNA, 19 nt, Artificial Sequence
  Description of Artificial Sequence: Synthetic oligonucleotide
  Sense strand starting at position 779 of SEQ ID NO: 1885278
guccuaagaauuggucagu

SEQ ID NO: 2329919 - RNA, 19 nt, Artificial Sequence
  Description of Artificial Sequence: Synthetic oligonucleotide
  Antisense strand to SEQ ID NO: 2329918
acugaccaauucuuaggac

SEQ ID NO: 2329920 - RNA, 19 nt, Artificial Sequence
  Description of Artificial Sequence: Synthetic oligonucleotide
  Sense strand starting at position 780 of SEQ ID NO: 1885278
uccuaagaauuggucaguu

SEQ ID NO: 2329921 - RNA, 19 nt, Artificial Sequence
  Description of Artificial Sequence: Synthetic oligonucleotide
  Antisense strand to SEQ ID NO: 2329920
aacugaccaauucuuagga

SEQ ID NO: 2329922 - RNA, 19 nt, Artificial Sequence
  Description of Artificial Sequence: Synthetic oligonucleotide
  Sense strand starting at position 782 of SEQ ID NO: 1885278
cuaagaauuggucaguuug

SEQ ID NO: 2329923 - RNA, 19 nt, Artificial Sequence
  Description of Artificial Sequence: Synthetic oligonucleotide
  Antisense strand to SEQ ID NO: 2329922
caaacugaccaauucuuag

SEQ ID NO: 2329924 - RNA, 19 nt, Artificial Sequence
  Description of Artificial Sequence: Synthetic oligonucleotide
  Sense strand starting at position 784 of SEQ ID NO: 1885278
aagaauuggucaguuuggu

SEQ ID NO: 2329925 - RNA, 19 nt, Artificial Sequence
  Description of Artificial Sequence: Synthetic oligonucleotide
  Antisense strand to SEQ ID NO: 2329924
accaaacugaccaauucuu

SEQ ID NO: 2329926 - RNA, 19 nt, Artificial Sequence
  Description of Artificial Sequence: Synthetic oligonucleotide
  Sense strand starting at position 1786 of SEQ ID NO: 1885278
uuucuauuacuggagguuu

SEQ ID NO: 2329927 - RNA, 19 nt, Artificial Sequence
  Description of Artificial Sequence: Synthetic oligonucleotide
  Antisense strand to SEQ ID NO: 2329926
aaaccuccaguaauagaaa

SEQ ID NO: 2329928 - RNA, 19 nt, Artificial Sequence
  Description of Artificial Sequence: Synthetic oligonucleotide
  Sense strand starting at position 2042 of SEQ ID NO: 1885278
gagagcucagguuauucuu

SEQ ID NO: 2329929 - RNA, 19 nt, Artificial Sequence
  Description of Artificial Sequence: Synthetic oligonucleotide
  Antisense strand to SEQ ID NO: 2329928
aagaauaaccugagcucuc

SEQ ID NO: 2329930 - RNA, 19 nt, Artificial Sequence
  Description of Artificial Sequence: Synthetic oligonucleotide
  Sense strand starting at position 2158 of SEQ ID NO: 1885278
gaauguaaucccggaugag

SEQ ID NO: 2329931 - RNA, 19 nt, Artificial Sequence
  Description of Artificial Sequence: Synthetic oligonucleotide
  Antisense strand to SEQ ID NO: 2329930
cucauccgggauuacauuc

SEQ ID NO: 2329932 - RNA, 19 nt, Artificial Sequence
  Description of Artificial Sequence: Synthetic oligonucleotide
  Sense strand starting at position 2159 of SEQ ID NO: 1885278
aauguaaucccggaugagc

SEQ ID NO: 2329933 - RNA, 19 nt, Artificial Sequence
  Description of Artificial Sequence: Synthetic oligonucleotide
  Antisense strand to SEQ ID NO: 2329932
gcucauccgggauuacauu

SEQ ID NO: 2329934 - RNA, 19 nt, Artificial Sequence
  Description of Artificial Sequence: Synthetic oligonucleotide
  Sense strand starting at position 2258 of SEQ ID NO: 1885278
agggcaagguacuucuaua

SEQ ID NO: 2329935 - RNA, 19 nt, Artificial Sequence
  Description of Artificial Sequence: Synthetic oligonucleotide
  Antisense strand to SEQ ID NO: 2329934
uauagaaguaccuugcccu

SEQ ID NO: 2329936 - RNA, 19 nt, Artificial Sequence
  Description of Artificial Sequence: Synthetic oligonucleotide
  Sense strand starting at position 2416 of SEQ ID NO: 1885278
acuaauucugauugaguaa

SEQ ID NO: 2329937 - RNA, 19 nt, Artificial Sequence
  Description of Artificial Sequence: Synthetic oligonucleotide
  Antisense strand to SEQ ID NO: 2329936
uuacucaaucagaauuagu

SEQ ID NO: 2329938 - RNA, 19 nt, Artificial Sequence
  Description of Artificial Sequence: Synthetic oligonucleotide
  Sense strand starting at position 2474 of SEQ ID NO: 1885278
acgguuaugaaaugaguca

SEQ ID NO: 2329939 - RNA, 19 nt, Artificial Sequence
  Description of Artificial Sequence: Synthetic oligonucleotide
  Antisense strand to SEQ ID NO: 2329938
ugacucauuucauaaccgu

SEQ ID NO: 2329940 - RNA, 19 nt, Artificial Sequence
  Description of Artificial Sequence: Synthetic oligonucleotide
  Sense strand starting at position 2475 of SEQ ID NO: 1885278
cgguuaugaaaugagucaa

SEQ ID NO: 2329941 - RNA, 19 nt, Artificial Sequence
  Description of Artificial Sequence: Synthetic oligonucleotide
  Antisense strand to SEQ ID NO: 2329940
uugacucauuucauaaccg

SEQ ID NO: 2329942 - RNA, 19 nt, Artificial Sequence
  Description of Artificial Sequence: Synthetic oligonucleotide
  Sense strand starting at position 2558 of SEQ ID NO: 1885278
uggaguaaguaaucagaau

SEQ ID NO: 2329943 - RNA, 19 nt, Artificial Sequence
  Description of Artificial Sequence: Synthetic oligonucleotide
  Antisense strand to SEQ ID NO: 2329942
auucugauuacuuacucca

SEQ ID NO: 2329944 - RNA, 19 nt, Artificial Sequence
  Description of Artificial Sequence: Synthetic oligonucleotide
  Sense strand starting at position 2812 of SEQ ID NO: 1885278
caucuuaaaccgugaggcu

SEQ ID NO: 2329945 - RNA, 19 nt, Artificial Sequence
  Description of Artificial Sequence: Synthetic oligonucleotide
  Antisense strand to SEQ ID NO: 2329944
agccucacgguuuaagaug

SEQ ID NO: 2329946 - RNA, 19 nt, Artificial Sequence
  Description of Artificial Sequence: Synthetic oligonucleotide
  Sense strand starting at position 2828 of SEQ ID NO: 1885278
gcugaagucagaggugaca

SEQ ID NO: 2329947 - RNA, 19 nt, Artificial Sequence
  Description of Artificial Sequence: Synthetic oligonucleotide
  Antisense strand to SEQ ID NO: 2329946
ugucaccucugacuucagc

SEQ ID NO: 2329948 - RNA, 19 nt, Artificial Sequence
  Description of Artificial Sequence: Synthetic oligonucleotide
  Sense strand starting at position 2942 of SEQ ID NO: 1885278
ggcugacuugcacaauacu

SEQ ID NO: 2329949 - RNA, 19 nt, Artificial Sequence
  Description of Artificial Sequence: Synthetic oligonucleotide
  Antisense strand to SEQ ID NO: 2329948
aguauugugcaagucagcc

SEQ ID NO: 2329950 - RNA, 19 nt, Artificial Sequence
  Description of Artificial Sequence: Synthetic oligonucleotide
  Sense strand starting at position 3067 of SEQ ID NO: 1885278
agagaaccauacuuuguuu

SEQ ID NO: 2329951 - RNA, 19 nt, Artificial Sequence
  Description of Artificial Sequence: Synthetic oligonucleotide
  Antisense strand to SEQ ID NO: 2329950
aaacaaaguaugguucucu

SEQ ID NO: 2329952 - RNA, 19 nt, Artificial Sequence
  Description of Artificial Sequence: Synthetic oligonucleotide
  Sense strand starting at position 3107 of SEQ ID NO: 1885278
cugggaagcaauugucauc

SEQ ID NO: 2329953 - RNA, 19 nt, Artificial Sequence
  Description of Artificial Sequence: Synthetic oligonucleotide
  Antisense strand to SEQ ID NO: 2329952
gaugacaauugcuucccag

SEQ ID NO: 2329954 - RNA, 19 nt, Artificial Sequence
  Description of Artificial Sequence: Synthetic oligonucleotide
  Sense strand starting at position 3140 of SEQ ID NO: 1885278
uuugcauauuuguccucau

SEQ ID NO: 2329955 - RNA, 19 nt, Artificial Sequence
  Description of Artificial Sequence: Synthetic oligonucleotide
  Antisense strand to SEQ ID NO: 2329954
augaggacaaauaugcaaa

SEQ ID NO: 2329956 - RNA, 19 nt, Artificial Sequence
  Description of Artificial Sequence: Synthetic oligonucleotide
  Sense strand starting at position 3141 of SEQ ID NO: 1885278
uugcauauuuguccucauu

SEQ ID NO: 2329957 - RNA, 19 nt, Artificial Sequence
  Description of Artificial Sequence: Synthetic oligonucleotide
  Antisense strand to SEQ ID NO: 2329956
aaugaggacaaauaugcaa

SEQ ID NO: 2329958 - RNA, 19 nt, Artificial Sequence
  Description of Artificial Sequence: Synthetic oligonucleotide
  Sense strand starting at position 3143 of SEQ ID NO: 1885278
gcauauuuguccucauugu

SEQ ID NO: 2329959 - RNA, 19 nt, Artificial Sequence
  Description of Artificial Sequence: Synthetic oligonucleotide
  Antisense strand to SEQ ID NO: 2329958
acaaugaggacaaauaugc

SEQ ID NO: 2329960 - RNA, 19 nt, Artificial Sequence
  Description of Artificial Sequence: Synthetic oligonucleotide
  Sense strand starting at position 3183 of SEQ ID NO: 1885278
acuaguugauuggugugua

SEQ ID NO: 2329961 - RNA, 19 nt, Artificial Sequence
  Description of Artificial Sequence: Synthetic oligonucleotide
  Antisense strand to SEQ ID NO: 2329960
uacacaccaaucaacuagu

SEQ ID NO: 2329962 - RNA, 19 nt, Artificial Sequence
  Description of Artificial Sequence: Synthetic oligonucleotide
  Sense strand starting at position 3186 of SEQ ID NO: 1885278
aguugauugguguguagau

SEQ ID NO: 2329963 - RNA, 19 nt, Artificial Sequence
  Description of Artificial Sequence: Synthetic oligonucleotide
  Antisense strand to SEQ ID NO: 2329962
aucuacacaccaaucaacu

SEQ ID NO: 2329964 - RNA, 19 nt, Artificial Sequence
  Description of Artificial Sequence: Synthetic oligonucleotide
  Sense strand starting at position 3187 of SEQ ID NO: 1885278
guugauugguguguagauu

SEQ ID NO: 2329965 - RNA, 19 nt, Artificial Sequence
  Description of Artificial Sequence: Synthetic oligonucleotide
  Antisense strand to SEQ ID NO: 2329964
aaucuacacaccaaucaac

SEQ ID NO: 2329966 - RNA, 19 nt, Artificial Sequence
  Description of Artificial Sequence: Synthetic oligonucleotide
  Sense strand starting at position 3198 of SEQ ID NO: 1885278
uguagauugucugucauua

SEQ ID NO: 2329967 - RNA, 19 nt, Artificial Sequence
  Description of Artificial Sequence: Synthetic oligonucleotide
  Antisense strand to SEQ ID NO: 2329966
uaaugacagacaaucuaca

SEQ ID NO: 2329968 - RNA, 19 nt, Artificial Sequence
  Description of Artificial Sequence: Synthetic oligonucleotide
  Sense strand starting at position 3202 of SEQ ID NO: 1885278
gauugucugucauuaaagc

SEQ ID NO: 2329969 - RNA, 19 nt, Artificial Sequence
  Description of Artificial Sequence: Synthetic oligonucleotide
  Antisense strand to SEQ ID NO: 2329968
gcuuuaaugacagacaauc

SEQ ID NO: 2329970 - RNA, 19 nt, Artificial Sequence
  Description of Artificial Sequence: Synthetic oligonucleotide
  Sense strand starting at position 3226 of SEQ ID NO: 1885278
ggaaaucagcuuugucacu

SEQ ID NO: 2329971 - RNA, 19 nt, Artificial Sequence
  Description of Artificial Sequence: Synthetic oligonucleotide
  Antisense strand to SEQ ID NO: 2329970
agugacaaagcugauuucc

SEQ ID NO: 2329972 - RNA, 19 nt, Artificial Sequence
  Description of Artificial Sequence: Synthetic oligonucleotide
  Sense strand starting at position 3244 of SEQ ID NO: 1885278
ugguuuaguguuggaacuu

SEQ ID NO: 2329973 - RNA, 19 nt, Artificial Sequence
  Description of Artificial Sequence: Synthetic oligonucleotide
  Antisense strand to SEQ ID NO: 2329972
aaguuccaacacuaaacca

SEQ ID NO: 2329974 - RNA, 19 nt, Artificial Sequence
  Description of Artificial Sequence: Synthetic oligonucleotide
  Sense strand starting at position 3283 of SEQ ID NO: 1885278
uggaaagcucugugcacua

SEQ ID NO: 2329975 - RNA, 19 nt, Artificial Sequence
  Description of Artificial Sequence: Synthetic oligonucleotide
  Antisense strand to SEQ ID NO: 2329974
uagugcacagagcuuucca

SEQ ID NO: 2329976 - RNA, 19 nt, Artificial Sequence
  Description of Artificial Sequence: Synthetic oligonucleotide
  Sense strand starting at position 3288 of SEQ ID NO: 1885278
agcucugugcacuaggaaa

SEQ ID NO: 2329977 - RNA, 19 nt, Artificial Sequence
  Description of Artificial Sequence: Synthetic oligonucleotide
  Antisense strand to SEQ ID NO: 2329976
uuuccuagugcacagagcu

SEQ ID NO: 2329978 - RNA, 19 nt, Artificial Sequence
  Description of Artificial Sequence: Synthetic oligonucleotide
  Sense strand starting at position 3370 of SEQ ID NO: 1885278
ugaccuugagccuaagcaa

SEQ ID NO: 2329979 - RNA, 19 nt, Artificial Sequence
  Description of Artificial Sequence: Synthetic oligonucleotide
  Antisense strand to SEQ ID NO: 2329978
uugcuuaggcucaagguca

SEQ ID NO: 2329980 - RNA, 19 nt, Artificial Sequence
  Description of Artificial Sequence: Synthetic oligonucleotide
  Sense strand starting at position 3786 of SEQ ID NO: 1885278
cccagaacauguuucuaag

SEQ ID NO: 2329981 - RNA, 19 nt, Artificial Sequence
  Description of Artificial Sequence: Synthetic oligonucleotide
  Antisense strand to SEQ ID NO: 2329980
cuuagaaacauguucuggg

SEQ ID NO: 2329982 - RNA, 19 nt, Artificial Sequence
  Description of Artificial Sequence: Synthetic oligonucleotide
  Sense strand starting at position 3882 of SEQ ID NO: 1885278
gaggcaaauccguagagua

SEQ ID NO: 2329983 - RNA, 19 nt, Artificial Sequence
  Description of Artificial Sequence: Synthetic oligonucleotide
  Antisense strand to SEQ ID NO: 2329982
uacucuacggauuugccuc

SEQ ID NO: 2329984 - RNA, 19 nt, Artificial Sequence
  Description of Artificial Sequence: Synthetic oligonucleotide
  Sense strand starting at position 91 of SEQ ID NO: 1885279
aguaguagauaaucacuuu

SEQ ID NO: 2329985 - RNA, 19 nt, Artificial Sequence
  Description of Artificial Sequence: Synthetic oligonucleotide
  Antisense strand to SEQ ID NO: 2329984
aaagugauuaucuacuacu

SEQ ID NO: 2329986 - RNA, 19 nt, Artificial Sequence
  Description of Artificial Sequence: Synthetic oligonucleotide
  Sense strand starting at position 227 of SEQ ID NO: 1885279
agcaauugguaacuagaaa

SEQ ID NO: 2329987 - RNA, 19 nt, Artificial Sequence
  Description of Artificial Sequence: Synthetic oligonucleotide
  Antisense strand to SEQ ID NO: 2329986
uuucuaguuaccaauugcu

SEQ ID NO: 2329988 - RNA, 19 nt, Artificial Sequence
  Description of Artificial Sequence: Synthetic oligonucleotide
  Sense strand starting at position 256 of SEQ ID NO: 1885279
ucaagaucaguaugaguac

SEQ ID NO: 2329989 - RNA, 19 nt, Artificial Sequence
  Description of Artificial Sequence: Synthetic oligonucleotide
  Antisense strand to SEQ ID NO: 2329988
guacucauacugaucuuga

SEQ ID NO: 2329990 - RNA, 19 nt, Artificial Sequence
  Description of Artificial Sequence: Synthetic oligonucleotide
  Sense strand starting at position 259 of SEQ ID NO: 1885279
agaucaguaugaguacuua

SEQ ID NO: 2329991 - RNA, 19 nt, Artificial Sequence
  Description of Artificial Sequence: Synthetic oligonucleotide
  Antisense strand to SEQ ID NO: 2329990
uaaguacucauacugaucu

SEQ ID NO: 2329992 - RNA, 19 nt, Artificial Sequence
  Description of Artificial Sequence: Synthetic oligonucleotide
  Sense strand starting at position 267 of SEQ ID NO: 1885279
augaguacuuauuccauca

SEQ ID NO: 2329993 - RNA, 19 nt, Artificial Sequence
  Description of Artificial Sequence: Synthetic oligonucleotide
  Antisense strand to SEQ ID NO: 2329992
ugauggaauaaguacucau

SEQ ID NO: 2329994 - RNA, 19 nt, Artificial Sequence
  Description of Artificial Sequence: Synthetic oligonucleotide
  Sense strand starting at position 279 of SEQ ID NO: 1885279
uccaucaugcaguauauua

SEQ ID NO: 2329995 - RNA, 19 nt, Artificial Sequence
  Description of Artificial Sequence: Synthetic oligonucleotide
  Antisense strand to SEQ ID NO: 2329994
uaauauacugcaugaugga

SEQ ID NO: 2329996 - RNA, 19 nt, Artificial Sequence
  Description of Artificial Sequence: Synthetic oligonucleotide
  Sense strand starting at position 478 of SEQ ID NO: 1885279
acuucuuagcuguguauuu

SEQ ID NO: 2329997 - RNA, 19 nt, Artificial Sequence
  Description of Artificial Sequence: Synthetic oligonucleotide
  Antisense strand to SEQ ID NO: 2329996
aaauacacagcuaagaagu

SEQ ID NO: 2329998 - RNA, 19 nt, Artificial Sequence
  Description of Artificial Sequence: Synthetic oligonucleotide
  Sense strand starting at position 574 of SEQ ID NO: 1885279
uaguaagauuucugggaag

SEQ ID NO: 2329999 - RNA, 19 nt, Artificial Sequence
  Description of Artificial Sequence: Synthetic oligonucleotide
  Antisense strand to SEQ ID NO: 2329998
cuucccagaaaucuuacua

SEQ ID NO: 2330000 - RNA, 19 nt, Artificial Sequence
  Description of Artificial Sequence: Synthetic oligonucleotide
  Sense strand starting at position 577 of SEQ ID NO: 1885279
uaagauuucugggaaguaa

SEQ ID NO: 2330001 - RNA, 19 nt, Artificial Sequence
  Description of Artificial Sequence: Synthetic oligonucleotide
  Antisense strand to SEQ ID NO: 2330000
uuacuucccagaaaucuua

SEQ ID NO: 2330002 - RNA, 19 nt, Artificial Sequence
  Description of Artificial Sequence: Synthetic oligonucleotide
  Sense strand starting at position 787 of SEQ ID NO: 1885279
ggaucuaauuuaggaccua

SEQ ID NO: 2330003 - RNA, 19 nt, Artificial Sequence
  Description of Artificial Sequence: Synthetic oligonucleotide
  Antisense strand to SEQ ID NO: 2330002
uagguccuaaauuagaucc

SEQ ID NO: 2330004 - RNA, 19 nt, Artificial Sequence
  Description of Artificial Sequence: Synthetic oligonucleotide
  Sense strand starting at position 807 of SEQ ID NO: 1885279
cacauuguauaugaaggaa

SEQ ID NO: 2330005 - RNA, 19 nt, Artificial Sequence
  Description of Artificial Sequence: Synthetic oligonucleotide
  Antisense strand to SEQ ID NO: 2330004
uuccuucauauacaaugug

SEQ ID NO: 2330006 - RNA, 19 nt, Artificial Sequence
  Description of Artificial Sequence: Synthetic oligonucleotide
  Sense strand starting at position 834 of SEQ ID NO: 1885279
uuaccagauuuagaacgua

SEQ ID NO: 2330007 - RNA, 19 nt, Artificial Sequence
  Description of Artificial Sequence: Synthetic oligonucleotide
  Antisense strand to SEQ ID NO: 2330006
uacguucuaaaucugguaa

SEQ ID NO: 2330008 - RNA, 19 nt, Artificial Sequence
  Description of Artificial Sequence: Synthetic oligonucleotide
  Sense strand starting at position 1051 of SEQ ID NO: 1885279
ugcauauuauccuuggauu

SEQ ID NO: 2330009 - RNA, 19 nt, Artificial Sequence
  Description of Artificial Sequence: Synthetic oligonucleotide
  Antisense strand to SEQ ID NO: 2330008
aauccaaggauaauaugca

SEQ ID NO: 2330010 - RNA, 19 nt, Artificial Sequence
  Description of Artificial Sequence: Synthetic oligonucleotide
  Sense strand starting at position 1052 of SEQ ID NO: 1885279
gcauauuauccuuggauua

SEQ ID NO: 2330011 - RNA, 19 nt, Artificial Sequence
  Description of Artificial Sequence: Synthetic oligonucleotide
  Antisense strand to SEQ ID NO: 2330010
uaauccaaggauaauaugc

SEQ ID NO: 2330012 - RNA, 19 nt, Artificial Sequence
  Description of Artificial Sequence: Synthetic oligonucleotide
  Sense strand starting at position 1059 of SEQ ID NO: 1885279
auccuuggauuauagauaa

SEQ ID NO: 2330013 - RNA, 19 nt, Artificial Sequence
  Description of Artificial Sequence: Synthetic oligonucleotide
  Antisense strand to SEQ ID NO: 2330012
uuaucuauaauccaaggau

SEQ ID NO: 2330014 - RNA, 19 nt, Artificial Sequence
  Description of Artificial Sequence: Synthetic oligonucleotide
  Sense strand starting at position 1094 of SEQ ID NO: 1885279
ugcccucucugguuauaau

SEQ ID NO: 2330015 - RNA, 19 nt, Artificial Sequence
  Description of Artificial Sequence: Synthetic oligonucleotide
  Antisense strand to SEQ ID NO: 2330014
auuauaaccagagagggca

SEQ ID NO: 2330016 - RNA, 19 nt, Artificial Sequence
  Description of Artificial Sequence: Synthetic oligonucleotide
  Sense strand starting at position 1095 of SEQ ID NO: 1885279
gcccucucugguuauaaua

SEQ ID NO: 2330017 - RNA, 19 nt, Artificial Sequence
  Description of Artificial Sequence: Synthetic oligonucleotide
  Antisense strand to SEQ ID NO: 2330016
uauuauaaccagagagggc

SEQ ID NO: 2330018 - RNA, 19 nt, Artificial Sequence
  Description of Artificial Sequence: Synthetic oligonucleotide
  Sense strand starting at position 1185 of SEQ ID NO: 1885279
ucauaauucuguguaauag

SEQ ID NO: 2330019 - RNA, 19 nt, Artificial Sequence
  Description of Artificial Sequence: Synthetic oligonucleotide
  Antisense strand to SEQ ID NO: 2330018
cuauuacacagaauuauga

SEQ ID NO: 2330020 - RNA, 19 nt, Artificial Sequence
  Description of Artificial Sequence: Synthetic oligonucleotide
  Sense strand starting at position 1225 of SEQ ID NO: 1885279
gagccauauccaugugaaa

SEQ ID NO: 2330021 - RNA, 19 nt, Artificial Sequence
  Description of Artificial Sequence: Synthetic oligonucleotide
  Antisense strand to SEQ ID NO: 2330020
uuucacauggauauggcuc

SEQ ID NO: 2330022 - RNA, 19 nt, Artificial Sequence
  Description of Artificial Sequence: Synthetic oligonucleotide
  Sense strand starting at position 1379 of SEQ ID NO: 1885279
uaucuuacaguauggagau

SEQ ID NO: 2330023 - RNA, 19 nt, Artificial Sequence
  Description of Artificial Sequence: Synthetic oligonucleotide
  Antisense strand to SEQ ID NO: 2330022
aucuccauacuguaagaua

SEQ ID NO: 2330024 - RNA, 19 nt, Artificial Sequence
  Description of Artificial Sequence: Synthetic oligonucleotide
  Sense strand starting at position 2161 of SEQ ID NO: 1885279
gaaacuuuccugggugggu

SEQ ID NO: 2330025 - RNA, 19 nt, Artificial Sequence
  Description of Artificial Sequence: Synthetic oligonucleotide
  Antisense strand to SEQ ID NO: 2330024
acccacccaggaaaguuuc

SEQ ID NO: 2330026 - RNA, 19 nt, Artificial Sequence
  Description of Artificial Sequence: Synthetic oligonucleotide
  Sense strand starting at position 2234 of SEQ ID NO: 1885279
uaggaauugcccugugagg

SEQ ID NO: 2330027 - RNA, 19 nt, Artificial Sequence
  Description of Artificial Sequence: Synthetic oligonucleotide
  Antisense strand to SEQ ID NO: 2330026
ccucacagggcaauuccua

SEQ ID NO: 2330028 - RNA, 19 nt, Artificial Sequence
  Description of Artificial Sequence: Synthetic oligonucleotide
  Sense strand starting at position 2236 of SEQ ID NO: 1885279
ggaauugcccugugaggau

SEQ ID NO: 2330029 - RNA, 19 nt, Artificial Sequence
  Description of Artificial Sequence: Synthetic oligonucleotide
  Antisense strand to SEQ ID NO: 2330028
auccucacagggcaauucc

SEQ ID NO: 2330030 - RNA, 19 nt, Artificial Sequence
  Description of Artificial Sequence: Synthetic oligonucleotide
  Sense strand starting at position 2275 of SEQ ID NO: 1885279
ccauguuucuacucagcau

SEQ ID NO: 2330031 - RNA, 19 nt, Artificial Sequence
  Description of Artificial Sequence: Synthetic oligonucleotide
  Antisense strand to SEQ ID NO: 2330030
augcugaguagaaacaugg

SEQ ID NO: 2330032 - RNA, 19 nt, Artificial Sequence
  Description of Artificial Sequence: Synthetic oligonucleotide
  Sense strand starting at position 2447 of SEQ ID NO: 1885279
ggacacugucaaggcuuau

SEQ ID NO: 2330033 - RNA, 19 nt, Artificial Sequence
  Description of Artificial Sequence: Synthetic oligonucleotide
  Antisense strand to SEQ ID NO: 2330032
auaagccuugacagugucc

SEQ ID NO: 2330034 - RNA, 19 nt, Artificial Sequence
  Description of Artificial Sequence: Synthetic oligonucleotide
  Sense strand starting at position 2606 of SEQ ID NO: 1885279
ugaggucugucccuuggaa

SEQ ID NO: 2330035 - RNA, 19 nt, Artificial Sequence
  Description of Artificial Sequence: Synthetic oligonucleotide
  Antisense strand to SEQ ID NO: 2330034
uuccaagggacagaccuca

SEQ ID NO: 2330036 - RNA, 19 nt, Artificial Sequence
  Description of Artificial Sequence: Synthetic oligonucleotide
  Sense strand starting at position 2608 of SEQ ID NO: 1885279
aggucugucccuuggaauc

SEQ ID NO: 2330037 - RNA, 19 nt, Artificial Sequence
  Description of Artificial Sequence: Synthetic oligonucleotide
  Antisense strand to SEQ ID NO: 2330036
gauuccaagggacagaccu

SEQ ID NO: 2330038 - RNA, 19 nt, Artificial Sequence
  Description of Artificial Sequence: Synthetic oligonucleotide
  Sense strand starting at position 2739 of SEQ ID NO: 1885279
caaacaguccuucggcuau

SEQ ID NO: 2330039 - RNA, 19 nt, Artificial Sequence
  Description of Artificial Sequence: Synthetic oligonucleotide
  Antisense strand to SEQ ID NO: 2330038
auagccgaaggacuguuug

SEQ ID NO: 2330040 - RNA, 19 nt, Artificial Sequence
  Description of Artificial Sequence: Synthetic oligonucleotide
  Sense strand starting at position 2741 of SEQ ID NO: 1885279
aacaguccuucggcuauga

SEQ ID NO: 2330041 - RNA, 19 nt, Artificial Sequence
  Description of Artificial Sequence: Synthetic oligonucleotide
  Antisense strand to SEQ ID NO: 2330040
ucauagccgaaggacuguu

SEQ ID NO: 2330042 - RNA, 19 nt, Artificial Sequence
  Description of Artificial Sequence: Synthetic oligonucleotide
  Sense strand starting at position 2807 of SEQ ID NO: 1885279
gguugagaguuuccuaaau

SEQ ID NO: 2330043 - RNA, 19 nt, Artificial Sequence
  Description of Artificial Sequence: Synthetic oligonucleotide
  Antisense strand to SEQ ID NO: 2330042
auuuaggaaacucucaacc

SEQ ID NO: 2330044 - RNA, 19 nt, Artificial Sequence
  Description of Artificial Sequence: Synthetic oligonucleotide
  Sense strand starting at position 2882 of SEQ ID NO: 1885279
uuuagaaucuuagugugag

SEQ ID NO: 2330045 - RNA, 19 nt, Artificial Sequence
  Description of Artificial Sequence: Synthetic oligonucleotide
  Antisense strand to SEQ ID NO: 2330044
cucacacuaagauucuaaa

SEQ ID NO: 2330046 - RNA, 19 nt, Artificial Sequence
  Description of Artificial Sequence: Synthetic oligonucleotide
  Sense strand starting at position 2890 of SEQ ID NO: 1885279
cuuagugugaguggccaaa

SEQ ID NO: 2330047 - RNA, 19 nt, Artificial Sequence
  Description of Artificial Sequence: Synthetic oligonucleotide
  Antisense strand to SEQ ID NO: 2330046
uuuggccacucacacuaag

SEQ ID NO: 2330048 - RNA, 19 nt, Artificial Sequence
  Description of Artificial Sequence: Synthetic oligonucleotide
  Sense strand starting at position 3022 of SEQ ID NO: 1885279
agacaaauucuuugccagu

SEQ ID NO: 2330049 - RNA, 19 nt, Artificial Sequence
  Description of Artificial Sequence: Synthetic oligonucleotide
  Antisense strand to SEQ ID NO: 2330048
acuggcaaagaauuugucu

SEQ ID NO: 2330050 - RNA, 19 nt, Artificial Sequence
  Description of Artificial Sequence: Synthetic oligonucleotide
  Sense strand starting at position 3113 of SEQ ID NO: 1885279
uagcguuuacugucuaugu

SEQ ID NO: 2330051 - RNA, 19 nt, Artificial Sequence
  Description of Artificial Sequence: Synthetic oligonucleotide
  Antisense strand to SEQ ID NO: 2330050
acauagacaguaaacgcua

SEQ ID NO: 2330052 - RNA, 19 nt, Artificial Sequence
  Description of Artificial Sequence: Synthetic oligonucleotide
  Sense strand starting at position 3312 of SEQ ID NO: 1885279
uguugucaucaacaccuua

SEQ ID NO: 2330053 - RNA, 19 nt, Artificial Sequence
  Description of Artificial Sequence: Synthetic oligonucleotide
  Antisense strand to SEQ ID NO: 2330052
uaagguguugaugacaaca

SEQ ID NO: 2330054 - RNA, 19 nt, Artificial Sequence
  Description of Artificial Sequence: Synthetic oligonucleotide
  Sense strand starting at position 3367 of SEQ ID NO: 1885279
uguugcuuacaagagaaca

SEQ ID NO: 2330055 - RNA, 19 nt, Artificial Sequence
  Description of Artificial Sequence: Synthetic oligonucleotide
  Antisense strand to SEQ ID NO: 2330054
uguucucuuguaagcaaca

SEQ ID NO: 2330056 - RNA, 19 nt, Artificial Sequence
  Description of Artificial Sequence: Synthetic oligonucleotide
  Sense strand starting at position 3460 of SEQ ID NO: 1885279
gcuacaucuggugaguguu

SEQ ID NO: 2330057 - RNA, 19 nt, Artificial Sequence
  Description of Artificial Sequence: Synthetic oligonucleotide
  Antisense strand to SEQ ID NO: 2330056
aacacucaccagauguagc

SEQ ID NO: 2330058 - RNA, 19 nt, Artificial Sequence
  Description of Artificial Sequence: Synthetic oligonucleotide
  Sense strand starting at position 3499 of SEQ ID NO: 1885279
ggaauucugagguggcaca

SEQ ID NO: 2330059 - RNA, 19 nt, Artificial Sequence
  Description of Artificial Sequence: Synthetic oligonucleotide
  Antisense strand to SEQ ID NO: 2330058
ugugccaccucagaauucc

SEQ ID NO: 2330060 - RNA, 19 nt, Artificial Sequence
  Description of Artificial Sequence: Synthetic oligonucleotide
  Sense strand starting at position 3837 of SEQ ID NO: 1885279
augaaaguaaugugcagaa

SEQ ID NO: 2330061 - RNA, 19 nt, Artificial Sequence
  Description of Artificial Sequence: Synthetic oligonucleotide
  Antisense strand to SEQ ID NO: 2330060
uucugcacauuacuuucau

SEQ ID NO: 2330062 - RNA, 19 nt, Artificial Sequence
  Description of Artificial Sequence: Synthetic oligonucleotide
  Sense strand starting at position 3841 of SEQ ID NO: 1885279
aaguaaugugcagaauaua

SEQ ID NO: 2330063 - RNA, 19 nt, Artificial Sequence
  Description of Artificial Sequence: Synthetic oligonucleotide
  Antisense strand to SEQ ID NO: 2330062
uauauucugcacauuacuu

SEQ ID NO: 2330064 - RNA, 19 nt, Artificial Sequence
  Description of Artificial Sequence: Synthetic oligonucleotide
  Sense strand starting at position 102 of SEQ ID NO: 1885280
aaauaaaugugguccugua

SEQ ID NO: 2330065 - RNA, 19 nt, Artificial Sequence
  Description of Artificial Sequence: Synthetic oligonucleotide
  Antisense strand to SEQ ID NO: 2330064
uacaggaccacauuuauuu

SEQ ID NO: 2330066 - RNA, 19 nt, Artificial Sequence
  Description of Artificial Sequence: Synthetic oligonucleotide
  Sense strand starting at position 207 of SEQ ID NO: 1885280
gucaaacagaguuggacuu

SEQ ID NO: 2330067 - RNA, 19 nt, Artificial Sequence
  Description of Artificial Sequence: Synthetic oligonucleotide
  Antisense strand to SEQ ID NO: 2330066
aaguccaacucuguuugac

SEQ ID NO: 2330068 - RNA, 19 nt, Artificial Sequence
  Description of Artificial Sequence: Synthetic oligonucleotide
  Sense strand starting at position 285 of SEQ ID NO: 1885280
ucugguucugcucagaauu

SEQ ID NO: 2330069 - RNA, 19 nt, Artificial Sequence
  Description of Artificial Sequence: Synthetic oligonucleotide
  Antisense strand to SEQ ID NO: 2330068
aauucugagcagaaccaga

SEQ ID NO: 2330070 - RNA, 19 nt, Artificial Sequence
  Description of Artificial Sequence: Synthetic oligonucleotide
  Sense strand starting at position 310 of SEQ ID NO: 1885280
gggucacaaugccuggaua

SEQ ID NO: 2330071 - RNA, 19 nt, Artificial Sequence
  Description of Artificial Sequence: Synthetic oligonucleotide
  Antisense strand to SEQ ID NO: 2330070
uauccaggcauugugaccc

SEQ ID NO: 2330072 - RNA, 19 nt, Artificial Sequence
  Description of Artificial Sequence: Synthetic oligonucleotide
  Sense strand starting at position 311 of SEQ ID NO: 1885280
ggucacaaugccuggauaa

SEQ ID NO: 2330073 - RNA, 19 nt, Artificial Sequence
  Description of Artificial Sequence: Synthetic oligonucleotide
  Antisense strand to SEQ ID NO: 2330072
uuauccaggcauugugacc

SEQ ID NO: 2330074 - RNA, 19 nt, Artificial Sequence
  Description of Artificial Sequence: Synthetic oligonucleotide
  Sense strand starting at position 312 of SEQ ID NO: 1885280
gucacaaugccuggauaag

SEQ ID NO: 2330075 - RNA, 19 nt, Artificial Sequence
  Description of Artificial Sequence: Synthetic oligonucleotide
  Antisense strand to SEQ ID NO: 2330074
cuuauccaggcauugugac

SEQ ID NO: 2330076 - RNA, 19 nt, Artificial Sequence
  Description of Artificial Sequence: Synthetic oligonucleotide
  Sense strand starting at position 502 of SEQ ID NO: 1885280
uucuguaugcgauaauaaa

SEQ ID NO: 2330077 - RNA, 19 nt, Artificial Sequence
  Description of Artificial Sequence: Synthetic oligonucleotide
  Antisense strand to SEQ ID NO: 2330076
uuuauuaucgcauacagaa

SEQ ID NO: 2330078 - RNA, 19 nt, Artificial Sequence
  Description of Artificial Sequence: Synthetic oligonucleotide
  Sense strand starting at position 558 of SEQ ID NO: 1885280
auaggaaauugguaaagag

SEQ ID NO: 2330079 - RNA, 19 nt, Artificial Sequence
  Description of Artificial Sequence: Synthetic oligonucleotide
  Antisense strand to SEQ ID NO: 2330078
cucuuuaccaauuuccuau

SEQ ID NO: 2330080 - RNA, 19 nt, Artificial Sequence
  Description of Artificial Sequence: Synthetic oligonucleotide
  Sense strand starting at position 657 of SEQ ID NO: 1885280
ugugaaauguauccaucag

SEQ ID NO: 2330081 - RNA, 19 nt, Artificial Sequence
  Description of Artificial Sequence: Synthetic oligonucleotide
  Antisense strand to SEQ ID NO: 2330080
cugauggauacauuucaca

SEQ ID NO: 2330082 - RNA, 19 nt, Artificial Sequence
  Description of Artificial Sequence: Synthetic oligonucleotide
  Sense strand starting at position 658 of SEQ ID NO: 1885280
gugaaauguauccaucagu

SEQ ID NO: 2330083 - RNA, 19 nt, Artificial Sequence
  Description of Artificial Sequence: Synthetic oligonucleotide
  Antisense strand to SEQ ID NO: 2330082
acugauggauacauuucac

SEQ ID NO: 2330084 - RNA, 19 nt, Artificial Sequence
  Description of Artificial Sequence: Synthetic oligonucleotide
  Sense strand starting at position 667 of SEQ ID NO: 1885280
auccaucaguuucuaaguu

SEQ ID NO: 2330085 - RNA, 19 nt, Artificial Sequence
  Description of Artificial Sequence: Synthetic oligonucleotide
  Antisense strand to SEQ ID NO: 2330084
aacuuagaaacugauggau

SEQ ID NO: 2330086 - RNA, 19 nt, Artificial Sequence
  Description of Artificial Sequence: Synthetic oligonucleotide
  Sense strand starting at position 758 of SEQ ID NO: 1885280
acuuguuugcgugcuugca

SEQ ID NO: 2330087 - RNA, 19 nt, Artificial Sequence
  Description of Artificial Sequence: Synthetic oligonucleotide
  Antisense strand to SEQ ID NO: 2330086
ugcaagcacgcaaacaagu

SEQ ID NO: 2330088 - RNA, 19 nt, Artificial Sequence
  Description of Artificial Sequence: Synthetic oligonucleotide
  Sense strand starting at position 788 of SEQ ID NO: 1885280
augagugacuccuuuaaau

SEQ ID NO: 2330089 - RNA, 19 nt, Artificial Sequence
  Description of Artificial Sequence: Synthetic oligonucleotide
  Antisense strand to SEQ ID NO: 2330088
auuuaaaggagucacucau

SEQ ID NO: 2330090 - RNA, 19 nt, Artificial Sequence
  Description of Artificial Sequence: Synthetic oligonucleotide
  Sense strand starting at position 845 of SEQ ID NO: 1885280
ugucuaugauuccuggaaa

SEQ ID NO: 2330091 - RNA, 19 nt, Artificial Sequence
  Description of Artificial Sequence: Synthetic oligonucleotide
  Antisense strand to SEQ ID NO: 2330090
uuuccaggaaucauagaca

SEQ ID NO: 2330092 - RNA, 19 nt, Artificial Sequence
  Description of Artificial Sequence: Synthetic oligonucleotide
  Sense strand starting at position 910 of SEQ ID NO: 1885280
agccauacuuauguacaga

SEQ ID NO: 2330093 - RNA, 19 nt, Artificial Sequence
  Description of Artificial Sequence: Synthetic oligonucleotide
  Antisense strand to SEQ ID NO: 2330092
ucuguacauaaguauggcu

SEQ ID NO: 2330094 - RNA, 19 nt, Artificial Sequence
  Description of Artificial Sequence: Synthetic oligonucleotide
  Sense strand starting at position 962 of SEQ ID NO: 1885280
gugucaagcaaggaucaaa

SEQ ID NO: 2330095 - RNA, 19 nt, Artificial Sequence
  Description of Artificial Sequence: Synthetic oligonucleotide
  Antisense strand to SEQ ID NO: 2330094
uuugauccuugcuugacac

SEQ ID NO: 2330096 - RNA, 19 nt, Artificial Sequence
  Description of Artificial Sequence: Synthetic oligonucleotide
  Sense strand starting at position 1030 of SEQ ID NO: 1885280
aggcacuucuuacugaaau

SEQ ID NO: 2330097 - RNA, 19 nt, Artificial Sequence
  Description of Artificial Sequence: Synthetic oligonucleotide
  Antisense strand to SEQ ID NO: 2330096
auuucaguaagaagugccu

SEQ ID NO: 2330098 - RNA, 19 nt, Artificial Sequence
  Description of Artificial Sequence: Synthetic oligonucleotide
  Sense strand starting at position 1159 of SEQ ID NO: 1885280
gggcaauuauggcuaauua

SEQ ID NO: 2330099 - RNA, 19 nt, Artificial Sequence
  Description of Artificial Sequence: Synthetic oligonucleotide
  Antisense strand to SEQ ID NO: 2330098
uaauuagccauaauugccc

SEQ ID NO: 2330100 - RNA, 19 nt, Artificial Sequence
  Description of Artificial Sequence: Synthetic oligonucleotide
  Sense strand starting at position 1160 of SEQ ID NO: 1885280
ggcaauuauggcuaauuau

SEQ ID NO: 2330101 - RNA, 19 nt, Artificial Sequence
  Description of Artificial Sequence: Synthetic oligonucleotide
  Antisense strand to SEQ ID NO: 2330100
auaauuagccauaauugcc

SEQ ID NO: 2330102 - RNA, 19 nt, Artificial Sequence
  Description of Artificial Sequence: Synthetic oligonucleotide
  Sense strand starting at position 1260 of SEQ ID NO: 1885280
uucugacuaugauugcuua

SEQ ID NO: 2330103 - RNA, 19 nt, Artificial Sequence
  Description of Artificial Sequence: Synthetic oligonucleotide
  Antisense strand to SEQ ID NO: 2330102
uaagcaaucauagucagaa

SEQ ID NO: 2330104 - RNA, 19 nt, Artificial Sequence
  Description of Artificial Sequence: Synthetic oligonucleotide
  Sense strand starting at position 1263 of SEQ ID NO: 1885280
ugacuaugauugcuuagga

SEQ ID NO: 2330105 - RNA, 19 nt, Artificial Sequence
  Description of Artificial Sequence: Synthetic oligonucleotide
  Antisense strand to SEQ ID NO: 2330104
uccuaagcaaucauaguca

SEQ ID NO: 2330106 - RNA, 19 nt, Artificial Sequence
  Description of Artificial Sequence: Synthetic oligonucleotide
  Sense strand starting at position 1264 of SEQ ID NO: 1885280
gacuaugauugcuuaggag

SEQ ID NO: 2330107 - RNA, 19 nt, Artificial Sequence
  Description of Artificial Sequence: Synthetic oligonucleotide
  Antisense strand to SEQ ID NO: 2330106
cuccuaagcaaucauaguc

SEQ ID NO: 2330108 - RNA, 19 nt, Artificial Sequence
  Description of Artificial Sequence: Synthetic oligonucleotide
  Sense strand starting at position 1433 of SEQ ID NO: 1885280
aaaccuguuggcugaaaug

SEQ ID NO: 2330109 - RNA, 19 nt, Artificial Sequence
  Description of Artificial Sequence: Synthetic oligonucleotide
  Antisense strand to SEQ ID NO: 2330108
cauuucagccaacagguuu

SEQ ID NO: 2330110 - RNA, 19 nt, Artificial Sequence
  Description of Artificial Sequence: Synthetic oligonucleotide
  Sense strand starting at position 1469 of SEQ ID NO: 1885280
gugugcccuccggauauuu

SEQ ID NO: 2330111 - RNA, 19 nt, Artificial Sequence
  Description of Artificial Sequence: Synthetic oligonucleotide
  Antisense strand to SEQ ID NO: 2330110
aaauauccggagggcacac

SEQ ID NO: 2330112 - RNA, 19 nt, Artificial Sequence
  Description of Artificial Sequence: Synthetic oligonucleotide
  Sense strand starting at position 1494 of SEQ ID NO: 1885280
uuucguggcaugcaaagaa

SEQ ID NO: 2330113 - RNA, 19 nt, Artificial Sequence
  Description of Artificial Sequence: Synthetic oligonucleotide
  Antisense strand to SEQ ID NO: 2330112
uucuuugcaugccacgaaa

SEQ ID NO: 2330114 - RNA, 19 nt, Artificial Sequence
  Description of Artificial Sequence: Synthetic oligonucleotide
  Sense strand starting at position 1498 of SEQ ID NO: 1885280
guggcaugcaaagaaaugu

SEQ ID NO: 2330115 - RNA, 19 nt, Artificial Sequence
  Description of Artificial Sequence: Synthetic oligonucleotide
  Antisense strand to SEQ ID NO: 2330114
acauuucuuugcaugccac

SEQ ID NO: 2330116 - RNA, 19 nt, Artificial Sequence
  Description of Artificial Sequence: Synthetic oligonucleotide
  Sense strand starting at position 1511 of SEQ ID NO: 1885280
aaaugugaugcugacaagu

SEQ ID NO: 2330117 - RNA, 19 nt, Artificial Sequence
  Description of Artificial Sequence: Synthetic oligonucleotide
  Antisense strand to SEQ ID NO: 2330116
acuugucagcaucacauuu

SEQ ID NO: 2330118 - RNA, 19 nt, Artificial Sequence
  Description of Artificial Sequence: Synthetic oligonucleotide
  Sense strand starting at position 1528 of SEQ ID NO: 1885280
guagauuuaguuugugcuu

SEQ ID NO: 2330119 - RNA, 19 nt, Artificial Sequence
  Description of Artificial Sequence: Synthetic oligonucleotide
  Antisense strand to SEQ ID NO: 2330118
aagcacaaacuaaaucuac

SEQ ID NO: 2330120 - RNA, 19 nt, Artificial Sequence
  Description of Artificial Sequence: Synthetic oligonucleotide
  Sense strand starting at position 1548 of SEQ ID NO: 1885280
gucuaauuacugcgaagag

SEQ ID NO: 2330121 - RNA, 19 nt, Artificial Sequence
  Description of Artificial Sequence: Synthetic oligonucleotide
  Antisense strand to SEQ ID NO: 2330120
cucuucgcaguaauuagac

SEQ ID NO: 2330122 - RNA, 19 nt, Artificial Sequence
  Description of Artificial Sequence: Synthetic oligonucleotide
  Sense strand starting at position 1568 of SEQ ID NO: 1885280
acaggaacgucucuaauga

SEQ ID NO: 2330123 - RNA, 19 nt, Artificial Sequence
  Description of Artificial Sequence: Synthetic oligonucleotide
  Antisense strand to SEQ ID NO: 2330122
ucauuagagacguuccugu

SEQ ID NO: 2330124 - RNA, 19 nt, Artificial Sequence
  Description of Artificial Sequence: Synthetic oligonucleotide
  Sense strand starting at position 1623 of SEQ ID NO: 1885280
gggccacauucccuagaau

SEQ ID NO: 2330125 - RNA, 19 nt, Artificial Sequence
  Description of Artificial Sequence: Synthetic oligonucleotide
  Antisense strand to SEQ ID NO: 2330124
auucuagggaauguggccc

SEQ ID NO: 2330126 - RNA, 19 nt, Artificial Sequence
  Description of Artificial Sequence: Synthetic oligonucleotide
  Sense strand starting at position 1624 of SEQ ID NO: 1885280
ggccacauucccuagaauu

SEQ ID NO: 2330127 - RNA, 19 nt, Artificial Sequence
  Description of Artificial Sequence: Synthetic oligonucleotide
  Antisense strand to SEQ ID NO: 2330126
aauucuagggaauguggcc

SEQ ID NO: 2330128 - RNA, 19 nt, Artificial Sequence
  Description of Artificial Sequence: Synthetic oligonucleotide
  Sense strand starting at position 1643 of SEQ ID NO: 1885280
uauucuuuggugcaagacu

SEQ ID NO: 2330129 - RNA, 19 nt, Artificial Sequence
  Description of Artificial Sequence: Synthetic oligonucleotide
  Antisense strand to SEQ ID NO: 2330128
agucuugcaccaaagaaua

SEQ ID NO: 2330130 - RNA, 19 nt, Artificial Sequence
  Description of Artificial Sequence: Synthetic oligonucleotide
  Sense strand starting at position 1770 of SEQ ID NO: 1885280
gaggacugugcccauugua

SEQ ID NO: 2330131 - RNA, 19 nt, Artificial Sequence
  Description of Artificial Sequence: Synthetic oligonucleotide
  Antisense strand to SEQ ID NO: 2330130
uacaaugggcacaguccuc

SEQ ID NO: 2330132 - RNA, 19 nt, Artificial Sequence
  Description of Artificial Sequence: Synthetic oligonucleotide
  Sense strand starting at position 1785 of SEQ ID NO: 1885280
uguaauucacgaggagaag

SEQ ID NO: 2330133 - RNA, 19 nt, Artificial Sequence
  Description of Artificial Sequence: Synthetic oligonucleotide
  Antisense strand to SEQ ID NO: 2330132
cuucuccucgugaauuaca

SEQ ID NO: 2330134 - RNA, 19 nt, Artificial Sequence
  Description of Artificial Sequence: Synthetic oligonucleotide
  Sense strand starting at position 1971 of SEQ ID NO: 1885280
gcaaguuuccuugggaaau

SEQ ID NO: 2330135 - RNA, 19 nt, Artificial Sequence
  Description of Artificial Sequence: Synthetic oligonucleotide
  Antisense strand to SEQ ID NO: 2330134
auuucccaaggaaacuugc

SEQ ID NO: 2330136 - RNA, 19 nt, Artificial Sequence
  Description of Artificial Sequence: Synthetic oligonucleotide
  Sense strand starting at position 2111 of SEQ ID NO: 1885280
gcaggaguaccagaucuau

SEQ ID NO: 2330137 - RNA, 19 nt, Artificial Sequence
  Description of Artificial Sequence: Synthetic oligonucleotide
  Antisense strand to SEQ ID NO: 2330136
auagaucugguacuccugc

SEQ ID NO: 2330138 - RNA, 19 nt, Artificial Sequence
  Description of Artificial Sequence: Synthetic oligonucleotide
  Sense strand starting at position 2255 of SEQ ID NO: 1885280
cuaagagcugauuggcaga

SEQ ID NO: 2330139 - RNA, 19 nt, Artificial Sequence
  Description of Artificial Sequence: Synthetic oligonucleotide
  Antisense strand to SEQ ID NO: 2330138
ucugccaaucagcucuuag

SEQ ID NO: 2330140 - RNA, 19 nt, Artificial Sequence
  Description of Artificial Sequence: Synthetic oligonucleotide
  Sense strand starting at position 2257 of SEQ ID NO: 1885280
aagagcugauuggcagaaa

SEQ ID NO: 2330141 - RNA, 19 nt, Artificial Sequence
  Description of Artificial Sequence: Synthetic oligonucleotide
  Antisense strand to SEQ ID NO: 2330140
uuucugccaaucagcucuu

SEQ ID NO: 2330142 - RNA, 19 nt, Artificial Sequence
  Description of Artificial Sequence: Synthetic oligonucleotide
  Sense strand starting at position 2260 of SEQ ID NO: 1885280
agcugauuggcagaaauua

SEQ ID NO: 2330143 - RNA, 19 nt, Artificial Sequence
  Description of Artificial Sequence: Synthetic oligonucleotide
  Antisense strand to SEQ ID NO: 2330142
uaauuucugccaaucagcu

SEQ ID NO: 2330144 - RNA, 19 nt, Artificial Sequence
  Description of Artificial Sequence: Synthetic oligonucleotide
  Sense strand starting at position 23 of SEQ ID NO: 1885281
guacuaaggcaaugaugau

SEQ ID NO: 2330145 - RNA, 19 nt, Artificial Sequence
  Description of Artificial Sequence: Synthetic oligonucleotide
  Antisense strand to SEQ ID NO: 2330144
aucaucauugccuuaguac

SEQ ID NO: 2330146 - RNA, 19 nt, Artificial Sequence
  Description of Artificial Sequence: Synthetic oligonucleotide
  Sense strand starting at position 157 of SEQ ID NO: 1885281
ggccaaaucagaggcucau

SEQ ID NO: 2330147 - RNA, 19 nt, Artificial Sequence
  Description of Artificial Sequence: Synthetic oligonucleotide
  Antisense strand to SEQ ID NO: 2330146
augagccucugauuuggcc

SEQ ID NO: 2330148 - RNA, 19 nt, Artificial Sequence
  Description of Artificial Sequence: Synthetic oligonucleotide
  Sense strand starting at position 289 of SEQ ID NO: 1885281
gugucacauccucaguaau

SEQ ID NO: 2330149 - RNA, 19 nt, Artificial Sequence
  Description of Artificial Sequence: Synthetic oligonucleotide
  Antisense strand to SEQ ID NO: 2330148
auuacugaggaugugacac

SEQ ID NO: 2330150 - RNA, 19 nt, Artificial Sequence
  Description of Artificial Sequence: Synthetic oligonucleotide
  Sense strand starting at position 420 of SEQ ID NO: 1885281
ugagcucuugccuaaacua

SEQ ID NO: 2330151 - RNA, 19 nt, Artificial Sequence
  Description of Artificial Sequence: Synthetic oligonucleotide
  Antisense strand to SEQ ID NO: 2330150
uaguuuaggcaagagcuca

SEQ ID NO: 2330152 - RNA, 19 nt, Artificial Sequence
  Description of Artificial Sequence: Synthetic oligonucleotide
  Sense strand starting at position 458 of SEQ ID NO: 1885281
gaaguagcacuuuaauugu

SEQ ID NO: 2330153 - RNA, 19 nt, Artificial Sequence
  Description of Artificial Sequence: Synthetic oligonucleotide
  Antisense strand to SEQ ID NO: 2330152
acaauuaaagugcuacuuc

SEQ ID NO: 2330154 - RNA, 19 nt, Artificial Sequence
  Description of Artificial Sequence: Synthetic oligonucleotide
  Sense strand starting at position 610 of SEQ ID NO: 1885281
augucauaauaugcagaua

SEQ ID NO: 2330155 - RNA, 19 nt, Artificial Sequence
  Description of Artificial Sequence: Synthetic oligonucleotide
  Antisense strand to SEQ ID NO: 2330154
uaucugcauauuaugacau

SEQ ID NO: 2330156 - RNA, 19 nt, Artificial Sequence
  Description of Artificial Sequence: Synthetic oligonucleotide
  Sense strand starting at position 644 of SEQ ID NO: 1885281
auacaacuugcugggauaa

SEQ ID NO: 2330157 - RNA, 19 nt, Artificial Sequence
  Description of Artificial Sequence: Synthetic oligonucleotide
  Antisense strand to SEQ ID NO: 2330156
uuaucccagcaaguuguau

SEQ ID NO: 2330158 - RNA, 19 nt, Artificial Sequence
  Description of Artificial Sequence: Synthetic oligonucleotide
  Sense strand starting at position 740 of SEQ ID NO: 1885281
ggauuuacaucacagcaca

SEQ ID NO: 2330159 - RNA, 19 nt, Artificial Sequence
  Description of Artificial Sequence: Synthetic oligonucleotide
  Antisense strand to SEQ ID NO: 2330158
ugugcugugauguaaaucc

SEQ ID NO: 2330160 - RNA, 19 nt, Artificial Sequence
  Description of Artificial Sequence: Synthetic oligonucleotide
  Sense strand starting at position 958 of SEQ ID NO: 1885281
gucuuugugccuuugcaca

SEQ ID NO: 2330161 - RNA, 19 nt, Artificial Sequence
  Description of Artificial Sequence: Synthetic oligonucleotide
  Antisense strand to SEQ ID NO: 2330160
ugugcaaaggcacaaagac

SEQ ID NO: 2330162 - RNA, 19 nt, Artificial Sequence
  Description of Artificial Sequence: Synthetic oligonucleotide
  Sense strand starting at position 1070 of SEQ ID NO: 1885281
ggcccugguauuggacaaa

SEQ ID NO: 2330163 - RNA, 19 nt, Artificial Sequence
  Description of Artificial Sequence: Synthetic oligonucleotide
  Antisense strand to SEQ ID NO: 2330162
uuuguccaauaccagggcc

SEQ ID NO: 2330164 - RNA, 19 nt, Artificial Sequence
  Description of Artificial Sequence: Synthetic oligonucleotide
  Sense strand starting at position 1474 of SEQ ID NO: 1885281
ggugcuucccguucuuaca

SEQ ID NO: 2330165 - RNA, 19 nt, Artificial Sequence
  Description of Artificial Sequence: Synthetic oligonucleotide
  Antisense strand to SEQ ID NO: 2330164
uguaagaacgggaagcacc

SEQ ID NO: 2330166 - RNA, 19 nt, Artificial Sequence
  Description of Artificial Sequence: Synthetic oligonucleotide
  Sense strand starting at position 1577 of SEQ ID NO: 1885281
ccagcaagugucuaacauu

SEQ ID NO: 2330167 - RNA, 19 nt, Artificial Sequence
  Description of Artificial Sequence: Synthetic oligonucleotide
  Antisense strand to SEQ ID NO: 2330166
aauguuagacacuugcugg

SEQ ID NO: 2330168 - RNA, 19 nt, Artificial Sequence
  Description of Artificial Sequence: Synthetic oligonucleotide
  Sense strand starting at position 1601 of SEQ ID NO: 1885281
ucuucuaagugacugguaa

SEQ ID NO: 2330169 - RNA, 19 nt, Artificial Sequence
  Description of Artificial Sequence: Synthetic oligonucleotide
  Antisense strand to SEQ ID NO: 2330168
uuaccagucacuuagaaga

SEQ ID NO: 2330170 - RNA, 19 nt, Artificial Sequence
  Description of Artificial Sequence: Synthetic oligonucleotide
  Sense strand starting at position 1602 of SEQ ID NO: 1885281
cuucuaagugacugguaaa

SEQ ID NO: 2330171 - RNA, 19 nt, Artificial Sequence
  Description of Artificial Sequence: Synthetic oligonucleotide
  Antisense strand to SEQ ID NO: 2330170
uuuaccagucacuuagaag

SEQ ID NO: 2330172 - RNA, 19 nt, Artificial Sequence
  Description of Artificial Sequence: Synthetic oligonucleotide
  Sense strand starting at position 1603 of SEQ ID NO: 1885281
uucuaagugacugguaaag

SEQ ID NO: 2330173 - RNA, 19 nt, Artificial Sequence
  Description of Artificial Sequence: Synthetic oligonucleotide
  Antisense strand to SEQ ID NO: 2330172
cuuuaccagucacuuagaa

SEQ ID NO: 2330174 - RNA, 19 nt, Artificial Sequence
  Description of Artificial Sequence: Synthetic oligonucleotide
  Sense strand starting at position 1676 of SEQ ID NO: 1885281
cggauugggcgggaugaga

SEQ ID NO: 2330175 - RNA, 19 nt, Artificial Sequence
  Description of Artificial Sequence: Synthetic oligonucleotide
  Antisense strand to SEQ ID NO: 2330174
ucucaucccgcccaauccg

SEQ ID NO: 2330176 - RNA, 19 nt, Artificial Sequence
  Description of Artificial Sequence: Synthetic oligonucleotide
  Sense strand starting at position 1739 of SEQ ID NO: 1885281
gggugcacuagccagauau

SEQ ID NO: 2330177 - RNA, 19 nt, Artificial Sequence
  Description of Artificial Sequence: Synthetic oligonucleotide
  Antisense strand to SEQ ID NO: 2330176
auaucuggcuagugcaccc

SEQ ID NO: 2330178 - RNA, 19 nt, Artificial Sequence
  Description of Artificial Sequence: Synthetic oligonucleotide
  Sense strand starting at position 1821 of SEQ ID NO: 1885281
ccaccagacucuuuguaua

SEQ ID NO: 2330179 - RNA, 19 nt, Artificial Sequence
  Description of Artificial Sequence: Synthetic oligonucleotide
  Antisense strand to SEQ ID NO: 2330178
uauacaaagagucuggugg

SEQ ID NO: 2330180 - RNA, 19 nt, Artificial Sequence
  Description of Artificial Sequence: Synthetic oligonucleotide
  Sense strand starting at position 1869 of SEQ ID NO: 1885281
gggugguucuggguagaag

SEQ ID NO: 2330181 - RNA, 19 nt, Artificial Sequence
  Description of Artificial Sequence: Synthetic oligonucleotide
  Antisense strand to SEQ ID NO: 2330180
cuucuacccagaaccaccc

SEQ ID NO: 2330182 - RNA, 19 nt, Artificial Sequence
  Description of Artificial Sequence: Synthetic oligonucleotide
  Sense strand starting at position 2918 of SEQ ID NO: 1885281
guccauugcccacaggaua

SEQ ID NO: 2330183 - RNA, 19 nt, Artificial Sequence
  Description of Artificial Sequence: Synthetic oligonucleotide
  Antisense strand to SEQ ID NO: 2330182
uauccugugggcaauggac

SEQ ID NO: 2330184 - RNA, 19 nt, Artificial Sequence
  Description of Artificial Sequence: Synthetic oligonucleotide
  Sense strand starting at position 2998 of SEQ ID NO: 1885281
caaagccaucuguagugau

SEQ ID NO: 2330185 - RNA, 19 nt, Artificial Sequence
  Description of Artificial Sequence: Synthetic oligonucleotide
  Antisense strand to SEQ ID NO: 2330184
aucacuacagauggcuuug

SEQ ID NO: 2330186 - RNA, 19 nt, Artificial Sequence
  Description of Artificial Sequence: Synthetic oligonucleotide
  Sense strand starting at position 3005 of SEQ ID NO: 1885281
aucuguagugauugaugga

SEQ ID NO: 2330187 - RNA, 19 nt, Artificial Sequence
  Description of Artificial Sequence: Synthetic oligonucleotide
  Antisense strand to SEQ ID NO: 2330186
uccaucaaucacuacagau

SEQ ID NO: 2330188 - RNA, 19 nt, Artificial Sequence
  Description of Artificial Sequence: Synthetic oligonucleotide
  Sense strand starting at position 3010 of SEQ ID NO: 1885281
uagugauugauggagcgua

SEQ ID NO: 2330189 - RNA, 19 nt, Artificial Sequence
  Description of Artificial Sequence: Synthetic oligonucleotide
  Antisense strand to SEQ ID NO: 2330188
uacgcuccaucaaucacua

SEQ ID NO: 2330190 - RNA, 19 nt, Artificial Sequence
  Description of Artificial Sequence: Synthetic oligonucleotide
  Sense strand starting at position 3023 of SEQ ID NO: 1885281
agcguaacucuuuagagga

SEQ ID NO: 2330191 - RNA, 19 nt, Artificial Sequence
  Description of Artificial Sequence: Synthetic oligonucleotide
  Antisense strand to SEQ ID NO: 2330190
uccucuaaagaguuacgcu

SEQ ID NO: 2330192 - RNA, 19 nt, Artificial Sequence
  Description of Artificial Sequence: Synthetic oligonucleotide
  Sense strand starting at position 3066 of SEQ ID NO: 1885281
ugagacauuuaccagaagu

SEQ ID NO: 2330193 - RNA, 19 nt, Artificial Sequence
  Description of Artificial Sequence: Synthetic oligonucleotide
  Antisense strand to SEQ ID NO: 2330192
acuucugguaaaugucuca

SEQ ID NO: 2330194 - RNA, 19 nt, Artificial Sequence
  Description of Artificial Sequence: Synthetic oligonucleotide
  Sense strand starting at position 3076 of SEQ ID NO: 1885281
accagaagugcuugaaagu

SEQ ID NO: 2330195 - RNA, 19 nt, Artificial Sequence
  Description of Artificial Sequence: Synthetic oligonucleotide
  Antisense strand to SEQ ID NO: 2330194
acuuucaagcacuucuggu

SEQ ID NO: 2330196 - RNA, 19 nt, Artificial Sequence
  Description of Artificial Sequence: Synthetic oligonucleotide
  Sense strand starting at position 3077 of SEQ ID NO: 1885281
ccagaagugcuugaaaguu

SEQ ID NO: 2330197 - RNA, 19 nt, Artificial Sequence
  Description of Artificial Sequence: Synthetic oligonucleotide
  Antisense strand to SEQ ID NO: 2330196
aacuuucaagcacuucugg

SEQ ID NO: 2330198 - RNA, 19 nt, Artificial Sequence
  Description of Artificial Sequence: Synthetic oligonucleotide
  Sense strand starting at position 3150 of SEQ ID NO: 1885281
cggcuugucucauuauuuc

SEQ ID NO: 2330199 - RNA, 19 nt, Artificial Sequence
  Description of Artificial Sequence: Synthetic oligonucleotide
  Antisense strand to SEQ ID NO: 2330198
gaaauaaugagacaagccg

SEQ ID NO: 2330200 - RNA, 19 nt, Artificial Sequence
  Description of Artificial Sequence: Synthetic oligonucleotide
  Sense strand starting at position 3279 of SEQ ID NO: 1885281
uucccuuauuaaguggaau

SEQ ID NO: 2330201 - RNA, 19 nt, Artificial Sequence
  Description of Artificial Sequence: Synthetic oligonucleotide
  Antisense strand to SEQ ID NO: 2330200
auuccacuuaauaagggaa

SEQ ID NO: 2330202 - RNA, 19 nt, Artificial Sequence
  Description of Artificial Sequence: Synthetic oligonucleotide
  Sense strand starting at position 3316 of SEQ ID NO: 1885281
auacgaaugcacuagaucu

SEQ ID NO: 2330203 - RNA, 19 nt, Artificial Sequence
  Description of Artificial Sequence: Synthetic oligonucleotide
  Antisense strand to SEQ ID NO: 2330202
agaucuagugcauucguau

SEQ ID NO: 2330204 - RNA, 19 nt, Artificial Sequence
  Description of Artificial Sequence: Synthetic oligonucleotide
  Sense strand starting at position 3391 of SEQ ID NO: 1885281
augguuaaauagcuaugau

SEQ ID NO: 2330205 - RNA, 19 nt, Artificial Sequence
  Description of Artificial Sequence: Synthetic oligonucleotide
  Antisense strand to SEQ ID NO: 2330204
aucauagcuauuuaaccau

SEQ ID NO: 2330206 - RNA, 19 nt, Artificial Sequence
  Description of Artificial Sequence: Synthetic oligonucleotide
  Sense strand starting at position 3394 of SEQ ID NO: 1885281
guuaaauagcuaugauuga

SEQ ID NO: 2330207 - RNA, 19 nt, Artificial Sequence
  Description of Artificial Sequence: Synthetic oligonucleotide
  Antisense strand to SEQ ID NO: 2330206
ucaaucauagcuauuuaac

SEQ ID NO: 2330208 - RNA, 19 nt, Artificial Sequence
  Description of Artificial Sequence: Synthetic oligonucleotide
  Sense strand starting at position 3408 of SEQ ID NO: 1885281
auugaaagaguguaauugu

SEQ ID NO: 2330209 - RNA, 19 nt, Artificial Sequence
  Description of Artificial Sequence: Synthetic oligonucleotide
  Antisense strand to SEQ ID NO: 2330208
acaauuacacucuuucaau

SEQ ID NO: 2330210 - RNA, 19 nt, Artificial Sequence
  Description of Artificial Sequence: Synthetic oligonucleotide
  Sense strand starting at position 3411 of SEQ ID NO: 1885281
gaaagaguguaauugucau

SEQ ID NO: 2330211 - RNA, 19 nt, Artificial Sequence
  Description of Artificial Sequence: Synthetic oligonucleotide
  Antisense strand to SEQ ID NO: 2330210
augacaauuacacucuuuc

SEQ ID NO: 2330212 - RNA, 19 nt, Artificial Sequence
  Description of Artificial Sequence: Synthetic oligonucleotide
  Sense strand starting at position 3441 of SEQ ID NO: 1885281
cugguucuacuuugagaca

SEQ ID NO: 2330213 - RNA, 19 nt, Artificial Sequence
  Description of Artificial Sequence: Synthetic oligonucleotide
  Antisense strand to SEQ ID NO: 2330212
ugucucaaaguagaaccag

SEQ ID NO: 2330214 - RNA, 19 nt, Artificial Sequence
  Description of Artificial Sequence: Synthetic oligonucleotide
  Sense strand starting at position 3473 of SEQ ID NO: 1885281
gggaaugggacuuguuucu

SEQ ID NO: 2330215 - RNA, 19 nt, Artificial Sequence
  Description of Artificial Sequence: Synthetic oligonucleotide
  Antisense strand to SEQ ID NO: 2330214
agaaacaagucccauuccc

SEQ ID NO: 2330216 - RNA, 19 nt, Artificial Sequence
  Description of Artificial Sequence: Synthetic oligonucleotide
  Sense strand starting at position 3561 of SEQ ID NO: 1885281
cucgguauacacuaacaau

SEQ ID NO: 2330217 - RNA, 19 nt, Artificial Sequence
  Description of Artificial Sequence: Synthetic oligonucleotide
  Antisense strand to SEQ ID NO: 2330216
auuguuaguguauaccgag

SEQ ID NO: 2330218 - RNA, 19 nt, Artificial Sequence
  Description of Artificial Sequence: Synthetic oligonucleotide
  Sense strand starting at position 3658 of SEQ ID NO: 1885281
ugucuuauaggucaguuaa

SEQ ID NO: 2330219 - RNA, 19 nt, Artificial Sequence
  Description of Artificial Sequence: Synthetic oligonucleotide
  Antisense strand to SEQ ID NO: 2330218
uuaacugaccuauaagaca

SEQ ID NO: 2330220 - RNA, 19 nt, Artificial Sequence
  Description of Artificial Sequence: Synthetic oligonucleotide
  Sense strand starting at position 3821 of SEQ ID NO: 1885281
aguaauggcuacucuaaag

SEQ ID NO: 2330221 - RNA, 19 nt, Artificial Sequence
  Description of Artificial Sequence: Synthetic oligonucleotide
  Antisense strand to SEQ ID NO: 2330220
cuuuagaguagccauuacu

SEQ ID NO: 2330222 - RNA, 19 nt, Artificial Sequence
  Description of Artificial Sequence: Synthetic oligonucleotide
  Sense strand starting at position 3865 of SEQ ID NO: 1885281
ggaagcauacucuaaugua

SEQ ID NO: 2330223 - RNA, 19 nt, Artificial Sequence
  Description of Artificial Sequence: Synthetic oligonucleotide
  Antisense strand to SEQ ID NO: 2330222
uacauuagaguaugcuucc

SEQ ID NO: 2330224 - RNA, 19 nt, Artificial Sequence
  Description of Artificial Sequence: Synthetic oligonucleotide
  Sense strand starting at position 3 of SEQ ID NO: 1885282
auauuagaccuguguucua

SEQ ID NO: 2330225 - RNA, 19 nt, Artificial Sequence
  Description of Artificial Sequence: Synthetic oligonucleotide
  Antisense strand to SEQ ID NO: 2330224
uagaacacaggucuaauau

SEQ ID NO: 2330226 - RNA, 19 nt, Artificial Sequence
  Description of Artificial Sequence: Synthetic oligonucleotide
  Sense strand starting at position 39 of SEQ ID NO: 1885282
uguagugugaagugggaau

SEQ ID NO: 2330227 - RNA, 19 nt, Artificial Sequence
  Description of Artificial Sequence: Synthetic oligonucleotide
  Antisense strand to SEQ ID NO: 2330226
auucccacuucacacuaca

SEQ ID NO: 2330228 - RNA, 19 nt, Artificial Sequence
  Description of Artificial Sequence: Synthetic oligonucleotide
  Sense strand starting at position 163 of SEQ ID NO: 1885282
aaagaaaguguccacaugu

SEQ ID NO: 2330229 - RNA, 19 nt, Artificial Sequence
  Description of Artificial Sequence: Synthetic oligonucleotide
  Antisense strand to SEQ ID NO: 2330228
acauguggacacuuucuuu

SEQ ID NO: 2330230 - RNA, 19 nt, Artificial Sequence
  Description of Artificial Sequence: Synthetic oligonucleotide
  Sense strand starting at position 188 of SEQ ID NO: 1885282
gucucuuucuggucucaau

SEQ ID NO: 2330231 - RNA, 19 nt, Artificial Sequence
  Description of Artificial Sequence: Synthetic oligonucleotide
  Antisense strand to SEQ ID NO: 2330230
auugagaccagaaagagac

SEQ ID NO: 2330232 - RNA, 19 nt, Artificial Sequence
  Description of Artificial Sequence: Synthetic oligonucleotide
  Sense strand starting at position 210 of SEQ ID NO: 1885282
gugccauuugucuacuugu

SEQ ID NO: 2330233 - RNA, 19 nt, Artificial Sequence
  Description of Artificial Sequence: Synthetic oligonucleotide
  Antisense strand to SEQ ID NO: 2330232
acaaguagacaaauggcac

SEQ ID NO: 2330234 - RNA, 19 nt, Artificial Sequence
  Description of Artificial Sequence: Synthetic oligonucleotide
  Sense strand starting at position 213 of SEQ ID NO: 1885282
ccauuugucuacuugucua

SEQ ID NO: 2330235 - RNA, 19 nt, Artificial Sequence
  Description of Artificial Sequence: Synthetic oligonucleotide
  Antisense strand to SEQ ID NO: 2330234
uagacaaguagacaaaugg

SEQ ID NO: 2330236 - RNA, 19 nt, Artificial Sequence
  Description of Artificial Sequence: Synthetic oligonucleotide
  Sense strand starting at position 276 of SEQ ID NO: 1885282
aaguucugauuaucuggua

SEQ ID NO: 2330237 - RNA, 19 nt, Artificial Sequence
  Description of Artificial Sequence: Synthetic oligonucleotide
  Antisense strand to SEQ ID NO: 2330236
uaccagauaaucagaacuu

SEQ ID NO: 2330238 - RNA, 19 nt, Artificial Sequence
  Description of Artificial Sequence: Synthetic oligonucleotide
  Sense strand starting at position 314 of SEQ ID NO: 1885282
gagaguguuggcuaaccuu

SEQ ID NO: 2330239 - RNA, 19 nt, Artificial Sequence
  Description of Artificial Sequence: Synthetic oligonucleotide
  Antisense strand to SEQ ID NO: 2330238
aagguuagccaacacucuc

SEQ ID NO: 2330240 - RNA, 19 nt, Artificial Sequence
  Description of Artificial Sequence: Synthetic oligonucleotide
  Sense strand starting at position 320 of SEQ ID NO: 1885282
guuggcuaaccuugacuuu

SEQ ID NO: 2330241 - RNA, 19 nt, Artificial Sequence
  Description of Artificial Sequence: Synthetic oligonucleotide
  Antisense strand to SEQ ID NO: 2330240
aaagucaagguuagccaac

SEQ ID NO: 2330242 - RNA, 19 nt, Artificial Sequence
  Description of Artificial Sequence: Synthetic oligonucleotide
  Sense strand starting at position 397 of SEQ ID NO: 1885282
ugagauucuagauguugaa

SEQ ID NO: 2330243 - RNA, 19 nt, Artificial Sequence
  Description of Artificial Sequence: Synthetic oligonucleotide
  Antisense strand to SEQ ID NO: 2330242
uucaacaucuagaaucuca

SEQ ID NO: 2330244 - RNA, 19 nt, Artificial Sequence
  Description of Artificial Sequence: Synthetic oligonucleotide
  Sense strand starting at position 492 of SEQ ID NO: 1885282
ggacgugcucuugcuuuca

SEQ ID NO: 2330245 - RNA, 19 nt, Artificial Sequence
  Description of Artificial Sequence: Synthetic oligonucleotide
  Antisense strand to SEQ ID NO: 2330244
ugaaagcaagagcacgucc

SEQ ID NO: 2330246 - RNA, 19 nt, Artificial Sequence
  Description of Artificial Sequence: Synthetic oligonucleotide
  Sense strand starting at position 565 of SEQ ID NO: 1885282
cccuuagugcugugauaag

SEQ ID NO: 2330247 - RNA, 19 nt, Artificial Sequence
  Description of Artificial Sequence: Synthetic oligonucleotide
  Antisense strand to SEQ ID NO: 2330246
cuuaucacagcacuaaggg

SEQ ID NO: 2330248 - RNA, 19 nt, Artificial Sequence
  Description of Artificial Sequence: Synthetic oligonucleotide
  Sense strand starting at position 615 of SEQ ID NO: 1885282
ggagacauuucucaaagac

SEQ ID NO: 2330249 - RNA, 19 nt, Artificial Sequence
  Description of Artificial Sequence: Synthetic oligonucleotide
  Antisense strand to SEQ ID NO: 2330248
gucuuugagaaaugucucc

SEQ ID NO: 2330250 - RNA, 19 nt, Artificial Sequence
  Description of Artificial Sequence: Synthetic oligonucleotide
  Sense strand starting at position 653 of SEQ ID NO: 1885282
ucuagaauccuagggugaa

SEQ ID NO: 2330251 - RNA, 19 nt, Artificial Sequence
  Description of Artificial Sequence: Synthetic oligonucleotide
  Antisense strand to SEQ ID NO: 2330250
uucacccuaggauucuaga

SEQ ID NO: 2330252 - RNA, 19 nt, Artificial Sequence
  Description of Artificial Sequence: Synthetic oligonucleotide
  Sense strand starting at position 760 of SEQ ID NO: 1885282
gugagcucucaaggaguca

SEQ ID NO: 2330253 - RNA, 19 nt, Artificial Sequence
  Description of Artificial Sequence: Synthetic oligonucleotide
  Antisense strand to SEQ ID NO: 2330252
ugacuccuugagagcucac

SEQ ID NO: 2330254 - RNA, 19 nt, Artificial Sequence
  Description of Artificial Sequence: Synthetic oligonucleotide
  Sense strand starting at position 761 of SEQ ID NO: 1885282
ugagcucucaaggagucau

SEQ ID NO: 2330255 - RNA, 19 nt, Artificial Sequence
  Description of Artificial Sequence: Synthetic oligonucleotide
  Antisense strand to SEQ ID NO: 2330254
augacuccuugagagcuca

SEQ ID NO: 2330256 - RNA, 19 nt, Artificial Sequence
  Description of Artificial Sequence: Synthetic oligonucleotide
  Sense strand starting at position 771 of SEQ ID NO: 1885282
aggagucauuguucuugca

SEQ ID NO: 2330257 - RNA, 19 nt, Artificial Sequence
  Description of Artificial Sequence: Synthetic oligonucleotide
  Antisense strand to SEQ ID NO: 2330256
ugcaagaacaaugacuccu

SEQ ID NO: 2330258 - RNA, 19 nt, Artificial Sequence
  Description of Artificial Sequence: Synthetic oligonucleotide
  Sense strand starting at position 979 of SEQ ID NO: 1885282
ggagcagacuguuuagaga

SEQ ID NO: 2330259 - RNA, 19 nt, Artificial Sequence
  Description of Artificial Sequence: Synthetic oligonucleotide
  Antisense strand to SEQ ID NO: 2330258
ucucuaaacagucugcucc

SEQ ID NO: 2330260 - RNA, 19 nt, Artificial Sequence
  Description of Artificial Sequence: Synthetic oligonucleotide
  Sense strand starting at position 1010 of SEQ ID NO: 1885282
agagguaucucuguucucu

SEQ ID NO: 2330261 - RNA, 19 nt, Artificial Sequence
  Description of Artificial Sequence: Synthetic oligonucleotide
  Antisense strand to SEQ ID NO: 2330260
agagaacagagauaccucu

SEQ ID NO: 2330262 - RNA, 19 nt, Artificial Sequence
  Description of Artificial Sequence: Synthetic oligonucleotide
  Sense strand starting at position 1012 of SEQ ID NO: 1885282
agguaucucuguucucuga

SEQ ID NO: 2330263 - RNA, 19 nt, Artificial Sequence
  Description of Artificial Sequence: Synthetic oligonucleotide
  Antisense strand to SEQ ID NO: 2330262
ucagagaacagagauaccu

SEQ ID NO: 2330264 - RNA, 19 nt, Artificial Sequence
  Description of Artificial Sequence: Synthetic oligonucleotide
  Sense strand starting at position 1014 of SEQ ID NO: 1885282
guaucucuguucucugaag

SEQ ID NO: 2330265 - RNA, 19 nt, Artificial Sequence
  Description of Artificial Sequence: Synthetic oligonucleotide
  Antisense strand to SEQ ID NO: 2330264
cuucagagaacagagauac

SEQ ID NO: 2330266 - RNA, 19 nt, Artificial Sequence
  Description of Artificial Sequence: Synthetic oligonucleotide
  Sense strand starting at position 1016 of SEQ ID NO: 1885282
aucucuguucucugaagag

SEQ ID NO: 2330267 - RNA, 19 nt, Artificial Sequence
  Description of Artificial Sequence: Synthetic oligonucleotide
  Antisense strand to SEQ ID NO: 2330266
cucuucagagaacagagau

SEQ ID NO: 2330268 - RNA, 19 nt, Artificial Sequence
  Description of Artificial Sequence: Synthetic oligonucleotide
  Sense strand starting at position 1022 of SEQ ID NO: 1885282
guucucugaagaggauuaa

SEQ ID NO: 2330269 - RNA, 19 nt, Artificial Sequence
  Description of Artificial Sequence: Synthetic oligonucleotide
  Antisense strand to SEQ ID NO: 2330268
uuaauccucuucagagaac

SEQ ID NO: 2330270 - RNA, 19 nt, Artificial Sequence
  Description of Artificial Sequence: Synthetic oligonucleotide
  Sense strand starting at position 1106 of SEQ ID NO: 1885282
gcucuugugacuuacugag

SEQ ID NO: 2330271 - RNA, 19 nt, Artificial Sequence
  Description of Artificial Sequence: Synthetic oligonucleotide
  Antisense strand to SEQ ID NO: 2330270
cucaguaagucacaagagc

SEQ ID NO: 2330272 - RNA, 19 nt, Artificial Sequence
  Description of Artificial Sequence: Synthetic oligonucleotide
  Sense strand starting at position 2048 of SEQ ID NO: 1885282
ugcaucauaccauguuuga

SEQ ID NO: 2330273 - RNA, 19 nt, Artificial Sequence
  Description of Artificial Sequence: Synthetic oligonucleotide
  Antisense strand to SEQ ID NO: 2330272
ucaaacaugguaugaugca

SEQ ID NO: 2330274 - RNA, 19 nt, Artificial Sequence
  Description of Artificial Sequence: Synthetic oligonucleotide
  Sense strand starting at position 2059 of SEQ ID NO: 1885282
auguuugaaugcccauuau

SEQ ID NO: 2330275 - RNA, 19 nt, Artificial Sequence
  Description of Artificial Sequence: Synthetic oligonucleotide
  Antisense strand to SEQ ID NO: 2330274
auaaugggcauucaaacau

SEQ ID NO: 2330276 - RNA, 19 nt, Artificial Sequence
  Description of Artificial Sequence: Synthetic oligonucleotide
  Sense strand starting at position 2063 of SEQ ID NO: 1885282
uugaaugcccauuaugaug

SEQ ID NO: 2330277 - RNA, 19 nt, Artificial Sequence
  Description of Artificial Sequence: Synthetic oligonucleotide
  Antisense strand to SEQ ID NO: 2330276
caucauaaugggcauucaa

SEQ ID NO: 2330278 - RNA, 19 nt, Artificial Sequence
  Description of Artificial Sequence: Synthetic oligonucleotide
  Sense strand starting at position 2142 of SEQ ID NO: 1885282
aguuucuagauguaagagu

SEQ ID NO: 2330279 - RNA, 19 nt, Artificial Sequence
  Description of Artificial Sequence: Synthetic oligonucleotide
  Antisense strand to SEQ ID NO: 2330278
acucuuacaucuagaaacu

SEQ ID NO: 2330280 - RNA, 19 nt, Artificial Sequence
  Description of Artificial Sequence: Synthetic oligonucleotide
  Sense strand starting at position 2184 of SEQ ID NO: 1885282
agaaauaaggccuguaaua

SEQ ID NO: 2330281 - RNA, 19 nt, Artificial Sequence
  Description of Artificial Sequence: Synthetic oligonucleotide
  Antisense strand to SEQ ID NO: 2330280
uauuacaggccuuauuucu

SEQ ID NO: 2330282 - RNA, 19 nt, Artificial Sequence
  Description of Artificial Sequence: Synthetic oligonucleotide
  Sense strand starting at position 2195 of SEQ ID NO: 1885282
cuguaauauuugucccuuu

SEQ ID NO: 2330283 - RNA, 19 nt, Artificial Sequence
  Description of Artificial Sequence: Synthetic oligonucleotide
  Antisense strand to SEQ ID NO: 2330282
aaagggacaaauauuacag

SEQ ID NO: 2330284 - RNA, 19 nt, Artificial Sequence
  Description of Artificial Sequence: Synthetic oligonucleotide
  Sense strand starting at position 2244 of SEQ ID NO: 1885282
guaggcaaaguuugaucaa

SEQ ID NO: 2330285 - RNA, 19 nt, Artificial Sequence
  Description of Artificial Sequence: Synthetic oligonucleotide
  Antisense strand to SEQ ID NO: 2330284
uugaucaaacuuugccuac

SEQ ID NO: 2330286 - RNA, 19 nt, Artificial Sequence
  Description of Artificial Sequence: Synthetic oligonucleotide
  Sense strand starting at position 2247 of SEQ ID NO: 1885282
ggcaaaguuugaucaaagg

SEQ ID NO: 2330287 - RNA, 19 nt, Artificial Sequence
  Description of Artificial Sequence: Synthetic oligonucleotide
  Antisense strand to SEQ ID NO: 2330286
ccuuugaucaaacuuugcc

SEQ ID NO: 2330288 - RNA, 19 nt, Artificial Sequence
  Description of Artificial Sequence: Synthetic oligonucleotide
  Sense strand starting at position 2293 of SEQ ID NO: 1885282
cuaggagagugguucugaa

SEQ ID NO: 2330289 - RNA, 19 nt, Artificial Sequence
  Description of Artificial Sequence: Synthetic oligonucleotide
  Antisense strand to SEQ ID NO: 2330288
uucagaaccacucuccuag

SEQ ID NO: 2330290 - RNA, 19 nt, Artificial Sequence
  Description of Artificial Sequence: Synthetic oligonucleotide
  Sense strand starting at position 2389 of SEQ ID NO: 1885282
uuuauacugcugcaugaau

SEQ ID NO: 2330291 - RNA, 19 nt, Artificial Sequence
  Description of Artificial Sequence: Synthetic oligonucleotide
  Antisense strand to SEQ ID NO: 2330290
auucaugcagcaguauaaa

SEQ ID NO: 2330292 - RNA, 19 nt, Artificial Sequence
  Description of Artificial Sequence: Synthetic oligonucleotide
  Sense strand starting at position 2397 of SEQ ID NO: 1885282
gcugcaugaauauauguga

SEQ ID NO: 2330293 - RNA, 19 nt, Artificial Sequence
  Description of Artificial Sequence: Synthetic oligonucleotide
  Antisense strand to SEQ ID NO: 2330292
ucacauauauucaugcagc

SEQ ID NO: 2330294 - RNA, 19 nt, Artificial Sequence
  Description of Artificial Sequence: Synthetic oligonucleotide
  Sense strand starting at position 2400 of SEQ ID NO: 1885282
gcaugaauauaugugauua

SEQ ID NO: 2330295 - RNA, 19 nt, Artificial Sequence
  Description of Artificial Sequence: Synthetic oligonucleotide
  Antisense strand to SEQ ID NO: 2330294
uaaucacauauauucaugc

SEQ ID NO: 2330296 - RNA, 19 nt, Artificial Sequence
  Description of Artificial Sequence: Synthetic oligonucleotide
  Sense strand starting at position 2410 of SEQ ID NO: 1885282
augugauuagaggagcgau

SEQ ID NO: 2330297 - RNA, 19 nt, Artificial Sequence
  Description of Artificial Sequence: Synthetic oligonucleotide
  Antisense strand to SEQ ID NO: 2330296
aucgcuccucuaaucacau

SEQ ID NO: 2330298 - RNA, 19 nt, Artificial Sequence
  Description of Artificial Sequence: Synthetic oligonucleotide
  Sense strand starting at position 2692 of SEQ ID NO: 1885282
gccuuacucuuagugggaa

SEQ ID NO: 2330299 - RNA, 19 nt, Artificial Sequence
  Description of Artificial Sequence: Synthetic oligonucleotide
  Antisense strand to SEQ ID NO: 2330298
uucccacuaagaguaaggc

SEQ ID NO: 2330300 - RNA, 19 nt, Artificial Sequence
  Description of Artificial Sequence: Synthetic oligonucleotide
  Sense strand starting at position 2868 of SEQ ID NO: 1885282
cucaucuuccuaggacaga

SEQ ID NO: 2330301 - RNA, 19 nt, Artificial Sequence
  Description of Artificial Sequence: Synthetic oligonucleotide
  Antisense strand to SEQ ID NO: 2330300
ucuguccuaggaagaugag

SEQ ID NO: 2330302 - RNA, 19 nt, Artificial Sequence
  Description of Artificial Sequence: Synthetic oligonucleotide
  Sense strand starting at position 2962 of SEQ ID NO: 1885282
gcagcugauccugacaagu

SEQ ID NO: 2330303 - RNA, 19 nt, Artificial Sequence
  Description of Artificial Sequence: Synthetic oligonucleotide
  Antisense strand to SEQ ID NO: 2330302
acuugucaggaucagcugc

SEQ ID NO: 2330304 - RNA, 19 nt, Artificial Sequence
  Description of Artificial Sequence: Synthetic oligonucleotide
  Sense strand starting at position 7 of SEQ ID NO: 1885283
aaauaauauguuugagcug

SEQ ID NO: 2330305 - RNA, 19 nt, Artificial Sequence
  Description of Artificial Sequence: Synthetic oligonucleotide
  Antisense strand to SEQ ID NO: 2330304
cagcucaaacauauuauuu

SEQ ID NO: 2330306 - RNA, 19 nt, Artificial Sequence
  Description of Artificial Sequence: Synthetic oligonucleotide
  Sense strand starting at position 39 of SEQ ID NO: 1885283
uucccaaaucuauguguua

SEQ ID NO: 2330307 - RNA, 19 nt, Artificial Sequence
  Description of Artificial Sequence: Synthetic oligonucleotide
  Antisense strand to SEQ ID NO: 2330306
uaacacauagauuugggaa

SEQ ID NO: 2330308 - RNA, 19 nt, Artificial Sequence
  Description of Artificial Sequence: Synthetic oligonucleotide
  Sense strand starting at position 40 of SEQ ID NO: 1885283
ucccaaaucuauguguuaa

SEQ ID NO: 2330309 - RNA, 19 nt, Artificial Sequence
  Description of Artificial Sequence: Synthetic oligonucleotide
  Antisense strand to SEQ ID NO: 2330308
uuaacacauagauuuggga

SEQ ID NO: 2330310 - RNA, 19 nt, Artificial Sequence
  Description of Artificial Sequence: Synthetic oligonucleotide
  Sense strand starting at position 169 of SEQ ID NO: 1885283
aguuaaacuuaguuuggga

SEQ ID NO: 2330311 - RNA, 19 nt, Artificial Sequence
  Description of Artificial Sequence: Synthetic oligonucleotide
  Antisense strand to SEQ ID NO: 2330310
ucccaaacuaaguuuaacu

SEQ ID NO: 2330312 - RNA, 19 nt, Artificial Sequence
  Description of Artificial Sequence: Synthetic oligonucleotide
  Sense strand starting at position 171 of SEQ ID NO: 1885283
uuaaacuuaguuugggauu

SEQ ID NO: 2330313 - RNA, 19 nt, Artificial Sequence
  Description of Artificial Sequence: Synthetic oligonucleotide
  Antisense strand to SEQ ID NO: 2330312
aaucccaaacuaaguuuaa

SEQ ID NO: 2330314 - RNA, 19 nt, Artificial Sequence
  Description of Artificial Sequence: Synthetic oligonucleotide
  Sense strand starting at position 177 of SEQ ID NO: 1885283
uuaguuugggauuggauau

SEQ ID NO: 2330315 - RNA, 19 nt, Artificial Sequence
  Description of Artificial Sequence: Synthetic oligonucleotide
  Antisense strand to SEQ ID NO: 2330314
auauccaaucccaaacuaa

SEQ ID NO: 2330316 - RNA, 19 nt, Artificial Sequence
  Description of Artificial Sequence: Synthetic oligonucleotide
  Sense strand starting at position 183 of SEQ ID NO: 1885283
ugggauuggauaugucagu

SEQ ID NO: 2330317 - RNA, 19 nt, Artificial Sequence
  Description of Artificial Sequence: Synthetic oligonucleotide
  Antisense strand to SEQ ID NO: 2330316
acugacauauccaauccca

SEQ ID NO: 2330318 - RNA, 19 nt, Artificial Sequence
  Description of Artificial Sequence: Synthetic oligonucleotide
  Sense strand starting at position 184 of SEQ ID NO: 1885283
gggauuggauaugucaguu

SEQ ID NO: 2330319 - RNA, 19 nt, Artificial Sequence
  Description of Artificial Sequence: Synthetic oligonucleotide
  Antisense strand to SEQ ID NO: 2330318
aacugacauauccaauccc

SEQ ID NO: 2330320 - RNA, 19 nt, Artificial Sequence
  Description of Artificial Sequence: Synthetic oligonucleotide
  Sense strand starting at position 286 of SEQ ID NO: 1885283
aagacauuaugugcaguua

SEQ ID NO: 2330321 - RNA, 19 nt, Artificial Sequence
  Description of Artificial Sequence: Synthetic oligonucleotide
  Antisense strand to SEQ ID NO: 2330320
uaacugcacauaaugucuu

SEQ ID NO: 2330322 - RNA, 19 nt, Artificial Sequence
  Description of Artificial Sequence: Synthetic oligonucleotide
  Sense strand starting at position 287 of SEQ ID NO: 1885283
agacauuaugugcaguuaa

SEQ ID NO: 2330323 - RNA, 19 nt, Artificial Sequence
  Description of Artificial Sequence: Synthetic oligonucleotide
  Antisense strand to SEQ ID NO: 2330322
uuaacugcacauaaugucu

SEQ ID NO: 2330324 - RNA, 19 nt, Artificial Sequence
  Description of Artificial Sequence: Synthetic oligonucleotide
  Sense strand starting at position 386 of SEQ ID NO: 1885283
guccuuccacaauggauga

SEQ ID NO: 2330325 - RNA, 19 nt, Artificial Sequence
  Description of Artificial Sequence: Synthetic oligonucleotide
  Antisense strand to SEQ ID NO: 2330324
ucauccauuguggaaggac

SEQ ID NO: 2330326 - RNA, 19 nt, Artificial Sequence
  Description of Artificial Sequence: Synthetic oligonucleotide
  Sense strand starting at position 882 of SEQ ID NO: 1885283
guaauuauaguaugaagca

SEQ ID NO: 2330327 - RNA, 19 nt, Artificial Sequence
  Description of Artificial Sequence: Synthetic oligonucleotide
  Antisense strand to SEQ ID NO: 2330326
ugcuucauacuauaauuac

SEQ ID NO: 2330328 - RNA, 19 nt, Artificial Sequence
  Description of Artificial Sequence: Synthetic oligonucleotide
  Sense strand starting at position 956 of SEQ ID NO: 1885283
uuuauugugugacuucuaa

SEQ ID NO: 2330329 - RNA, 19 nt, Artificial Sequence
  Description of Artificial Sequence: Synthetic oligonucleotide
  Antisense strand to SEQ ID NO: 2330328
uuagaagucacacaauaaa

SEQ ID NO: 2330330 - RNA, 19 nt, Artificial Sequence
  Description of Artificial Sequence: Synthetic oligonucleotide
  Sense strand starting at position 1195 of SEQ ID NO: 1885283
caaaguaacuggcauuuga

SEQ ID NO: 2330331 - RNA, 19 nt, Artificial Sequence
  Description of Artificial Sequence: Synthetic oligonucleotide
  Antisense strand to SEQ ID NO: 2330330
ucaaaugccaguuacuuug

SEQ ID NO: 2330332 - RNA, 19 nt, Artificial Sequence
  Description of Artificial Sequence: Synthetic oligonucleotide
  Sense strand starting at position 1211 of SEQ ID NO: 1885283
ugagaugguccuuggcaga

SEQ ID NO: 2330333 - RNA, 19 nt, Artificial Sequence
  Description of Artificial Sequence: Synthetic oligonucleotide
  Antisense strand to SEQ ID NO: 2330332
ucugccaaggaccaucuca

SEQ ID NO: 2330334 - RNA, 19 nt, Artificial Sequence
  Description of Artificial Sequence: Synthetic oligonucleotide
  Sense strand starting at position 1289 of SEQ ID NO: 1885283
gaacaaacauugucgagau

SEQ ID NO: 2330335 - RNA, 19 nt, Artificial Sequence
  Description of Artificial Sequence: Synthetic oligonucleotide
  Antisense strand to SEQ ID NO: 2330334
aucucgacaauguuuguuc

SEQ ID NO: 2330336 - RNA, 19 nt, Artificial Sequence
  Description of Artificial Sequence: Synthetic oligonucleotide
  Sense strand starting at position 1296 of SEQ ID NO: 1885283
cauugucgagauggagaau

SEQ ID NO: 2330337 - RNA, 19 nt, Artificial Sequence
  Description of Artificial Sequence: Synthetic oligonucleotide
  Antisense strand to SEQ ID NO: 2330336
auucuccaucucgacaaug

SEQ ID NO: 2330338 - RNA, 19 nt, Artificial Sequence
  Description of Artificial Sequence: Synthetic oligonucleotide
  Sense strand starting at position 1299 of SEQ ID NO: 1885283
ugucgagauggagaaugua

SEQ ID NO: 2330339 - RNA, 19 nt, Artificial Sequence
  Description of Artificial Sequence: Synthetic oligonucleotide
  Antisense strand to SEQ ID NO: 2330338
uacauucuccaucucgaca

SEQ ID NO: 2330340 - RNA, 19 nt, Artificial Sequence
  Description of Artificial Sequence: Synthetic oligonucleotide
  Sense strand starting at position 1394 of SEQ ID NO: 1885283
cagaauacauggguccuaa

SEQ ID NO: 2330341 - RNA, 19 nt, Artificial Sequence
  Description of Artificial Sequence: Synthetic oligonucleotide
  Antisense strand to SEQ ID NO: 2330340
uuaggacccauguauucug

SEQ ID NO: 2330342 - RNA, 19 nt, Artificial Sequence
  Description of Artificial Sequence: Synthetic oligonucleotide
  Sense strand starting at position 1430 of SEQ ID NO: 1885283
agguguaagcccugaaauu

SEQ ID NO: 2330343 - RNA, 19 nt, Artificial Sequence
  Description of Artificial Sequence: Synthetic oligonucleotide
  Antisense strand to SEQ ID NO: 2330342
aauuucagggcuuacaccu

SEQ ID NO: 2330344 - RNA, 19 nt, Artificial Sequence
  Description of Artificial Sequence: Synthetic oligonucleotide
  Sense strand starting at position 1431 of SEQ ID NO: 1885283
gguguaagcccugaaauug

SEQ ID NO: 2330345 - RNA, 19 nt, Artificial Sequence
  Description of Artificial Sequence: Synthetic oligonucleotide
  Antisense strand to SEQ ID NO: 2330344
caauuucagggcuuacacc

SEQ ID NO: 2330346 - RNA, 19 nt, Artificial Sequence
  Description of Artificial Sequence: Synthetic oligonucleotide
  Sense strand starting at position 2002 of SEQ ID NO: 1885283
uguggaaacacaugugauc

SEQ ID NO: 2330347 - RNA, 19 nt, Artificial Sequence
  Description of Artificial Sequence: Synthetic oligonucleotide
  Antisense strand to SEQ ID NO: 2330346
gaucacauguguuuccaca

SEQ ID NO: 2330348 - RNA, 19 nt, Artificial Sequence
  Description of Artificial Sequence: Synthetic oligonucleotide
  Sense strand starting at position 2044 of SEQ ID NO: 1885283
cuauaagugccauagaugu

SEQ ID NO: 2330349 - RNA, 19 nt, Artificial Sequence
  Description of Artificial Sequence: Synthetic oligonucleotide
  Antisense strand to SEQ ID NO: 2330348
acaucuauggcacuuauag

SEQ ID NO: 2330350 - RNA, 19 nt, Artificial Sequence
  Description of Artificial Sequence: Synthetic oligonucleotide
  Sense strand starting at position 2224 of SEQ ID NO: 1885283
cuaaguggcugagccauaa

SEQ ID NO: 2330351 - RNA, 19 nt, Artificial Sequence
  Description of Artificial Sequence: Synthetic oligonucleotide
  Antisense strand to SEQ ID NO: 2330350
uuauggcucagccacuuag

SEQ ID NO: 2330352 - RNA, 19 nt, Artificial Sequence
  Description of Artificial Sequence: Synthetic oligonucleotide
  Sense strand starting at position 2228 of SEQ ID NO: 1885283
guggcugagccauaauuga

SEQ ID NO: 2330353 - RNA, 19 nt, Artificial Sequence
  Description of Artificial Sequence: Synthetic oligonucleotide
  Antisense strand to SEQ ID NO: 2330352
ucaauuauggcucagccac

SEQ ID NO: 2330354 - RNA, 19 nt, Artificial Sequence
  Description of Artificial Sequence: Synthetic oligonucleotide
  Sense strand starting at position 2268 of SEQ ID NO: 1885283
gagccuuuauuaguagaga

SEQ ID NO: 2330355 - RNA, 19 nt, Artificial Sequence
  Description of Artificial Sequence: Synthetic oligonucleotide
  Antisense strand to SEQ ID NO: 2330354
ucucuacuaauaaaggcuc

SEQ ID NO: 2330356 - RNA, 19 nt, Artificial Sequence
  Description of Artificial Sequence: Synthetic oligonucleotide
  Sense strand starting at position 2397 of SEQ ID NO: 1885283
cugcuacugucauuugaau

SEQ ID NO: 2330357 - RNA, 19 nt, Artificial Sequence
  Description of Artificial Sequence: Synthetic oligonucleotide
  Antisense strand to SEQ ID NO: 2330356
auucaaaugacaguagcag

SEQ ID NO: 2330358 - RNA, 19 nt, Artificial Sequence
  Description of Artificial Sequence: Synthetic oligonucleotide
  Sense strand starting at position 2403 of SEQ ID NO: 1885283
cugucauuugaaugugcau

SEQ ID NO: 2330359 - RNA, 19 nt, Artificial Sequence
  Description of Artificial Sequence: Synthetic oligonucleotide
  Antisense strand to SEQ ID NO: 2330358
augcacauucaaaugacag

SEQ ID NO: 2330360 - RNA, 19 nt, Artificial Sequence
  Description of Artificial Sequence: Synthetic oligonucleotide
  Sense strand starting at position 2412 of SEQ ID NO: 1885283
gaaugugcauucccuaaag

SEQ ID NO: 2330361 - RNA, 19 nt, Artificial Sequence
  Description of Artificial Sequence: Synthetic oligonucleotide
  Antisense strand to SEQ ID NO: 2330360
cuuuagggaaugcacauuc

SEQ ID NO: 2330362 - RNA, 19 nt, Artificial Sequence
  Description of Artificial Sequence: Synthetic oligonucleotide
  Sense strand starting at position 2423 of SEQ ID NO: 1885283
cccuaaagucagggacaua

SEQ ID NO: 2330363 - RNA, 19 nt, Artificial Sequence
  Description of Artificial Sequence: Synthetic oligonucleotide
  Antisense strand to SEQ ID NO: 2330362
uaugucccugacuuuaggg

SEQ ID NO: 2330364 - RNA, 19 nt, Artificial Sequence
  Description of Artificial Sequence: Synthetic oligonucleotide
  Sense strand starting at position 2459 of SEQ ID NO: 1885283
uggaaucucuaguccauua

SEQ ID NO: 2330365 - RNA, 19 nt, Artificial Sequence
  Description of Artificial Sequence: Synthetic oligonucleotide
  Antisense strand to SEQ ID NO: 2330364
uaauggacuagagauucca

SEQ ID NO: 2330366 - RNA, 19 nt, Artificial Sequence
  Description of Artificial Sequence: Synthetic oligonucleotide
  Sense strand starting at position 2540 of SEQ ID NO: 1885283
ugacuucuccauggccaga

SEQ ID NO: 2330367 - RNA, 19 nt, Artificial Sequence
  Description of Artificial Sequence: Synthetic oligonucleotide
  Antisense strand to SEQ ID NO: 2330366
ucuggccauggagaaguca

SEQ ID NO: 2330368 - RNA, 19 nt, Artificial Sequence
  Description of Artificial Sequence: Synthetic oligonucleotide
  Sense strand starting at position 2628 of SEQ ID NO: 1885283
uuuggaaacuaguccugau

SEQ ID NO: 2330369 - RNA, 19 nt, Artificial Sequence
  Description of Artificial Sequence: Synthetic oligonucleotide
  Antisense strand to SEQ ID NO: 2330368
aucaggacuaguuuccaaa

SEQ ID NO: 2330370 - RNA, 19 nt, Artificial Sequence
  Description of Artificial Sequence: Synthetic oligonucleotide
  Sense strand starting at position 2799 of SEQ ID NO: 1885283
uuaugcaguugacuugaaa

SEQ ID NO: 2330371 - RNA, 19 nt, Artificial Sequence
  Description of Artificial Sequence: Synthetic oligonucleotide
  Antisense strand to SEQ ID NO: 2330370
uuucaagucaacugcauaa

SEQ ID NO: 2330372 - RNA, 19 nt, Artificial Sequence
  Description of Artificial Sequence: Synthetic oligonucleotide
  Sense strand starting at position 3141 of SEQ ID NO: 1885283
agacuuaaugauugccauu

SEQ ID NO: 2330373 - RNA, 19 nt, Artificial Sequence
  Description of Artificial Sequence: Synthetic oligonucleotide
  Antisense strand to SEQ ID NO: 2330372
aauggcaaucauuaagucu

SEQ ID NO: 2330374 - RNA, 19 nt, Artificial Sequence
  Description of Artificial Sequence: Synthetic oligonucleotide
  Sense strand starting at position 3230 of SEQ ID NO: 1885283
gccagaaucucagcucuga

SEQ ID NO: 2330375 - RNA, 19 nt, Artificial Sequence
  Description of Artificial Sequence: Synthetic oligonucleotide
  Antisense strand to SEQ ID NO: 2330374
ucagagcugagauucuggc

SEQ ID NO: 2330376 - RNA, 19 nt, Artificial Sequence
  Description of Artificial Sequence: Synthetic oligonucleotide
  Sense strand starting at position 3238 of SEQ ID NO: 1885283
cucagcucugaacauugau

SEQ ID NO: 2330377 - RNA, 19 nt, Artificial Sequence
  Description of Artificial Sequence: Synthetic oligonucleotide
  Antisense strand to SEQ ID NO: 2330376
aucaauguucagagcugag

SEQ ID NO: 2330378 - RNA, 19 nt, Artificial Sequence
  Description of Artificial Sequence: Synthetic oligonucleotide
  Sense strand starting at position 3241 of SEQ ID NO: 1885283
agcucugaacauugaugga

SEQ ID NO: 2330379 - RNA, 19 nt, Artificial Sequence
  Description of Artificial Sequence: Synthetic oligonucleotide
  Antisense strand to SEQ ID NO: 2330378
uccaucaauguucagagcu

SEQ ID NO: 2330380 - RNA, 19 nt, Artificial Sequence
  Description of Artificial Sequence: Synthetic oligonucleotide
  Sense strand starting at position 3849 of SEQ ID NO: 1885283
aaagcauguugaucagaug

SEQ ID NO: 2330381 - RNA, 19 nt, Artificial Sequence
  Description of Artificial Sequence: Synthetic oligonucleotide
  Antisense strand to SEQ ID NO: 2330380
caucugaucaacaugcuuu

SEQ ID NO: 2330382 - RNA, 19 nt, Artificial Sequence
  Description of Artificial Sequence: Synthetic oligonucleotide
  Sense strand starting at position 3891 of SEQ ID NO: 1885283
agguuuaauuuguaugaug

SEQ ID NO: 2330383 - RNA, 19 nt, Artificial Sequence
  Description of Artificial Sequence: Synthetic oligonucleotide
  Antisense strand to SEQ ID NO: 2330382
caucauacaaauuaaaccu

SEQ ID NO: 2330384 - RNA, 19 nt, Artificial Sequence
  Description of Artificial Sequence: Synthetic oligonucleotide
  Sense strand starting at position 89 of SEQ ID NO: 1885284
uuguaacauugguuaaaug

SEQ ID NO: 2330385 - RNA, 19 nt, Artificial Sequence
  Description of Artificial Sequence: Synthetic oligonucleotide
  Antisense strand to SEQ ID NO: 2330384
cauuuaaccaauguuacaa

SEQ ID NO: 2330386 - RNA, 19 nt, Artificial Sequence
  Description of Artificial Sequence: Synthetic oligonucleotide
  Sense strand starting at position 234 of SEQ ID NO: 1885284
aaauguuguggcuaaacca

SEQ ID NO: 2330387 - RNA, 19 nt, Artificial Sequence
  Description of Artificial Sequence: Synthetic oligonucleotide
  Antisense strand to SEQ ID NO: 2330386
ugguuuagccacaacauuu

SEQ ID NO: 2330388 - RNA, 19 nt, Artificial Sequence
  Description of Artificial Sequence: Synthetic oligonucleotide
  Sense strand starting at position 510 of SEQ ID NO: 1885284
auaugaccucucuguauag

SEQ ID NO: 2330389 - RNA, 19 nt, Artificial Sequence
  Description of Artificial Sequence: Synthetic oligonucleotide
  Antisense strand to SEQ ID NO: 2330388
cuauacagagaggucauau

SEQ ID NO: 2330390 - RNA, 19 nt, Artificial Sequence
  Description of Artificial Sequence: Synthetic oligonucleotide
  Sense strand starting at position 512 of SEQ ID NO: 1885284
augaccucucuguauagua

SEQ ID NO: 2330391 - RNA, 19 nt, Artificial Sequence
  Description of Artificial Sequence: Synthetic oligonucleotide
  Antisense strand to SEQ ID NO: 2330390
uacuauacagagaggucau

SEQ ID NO: 2330392 - RNA, 19 nt, Artificial Sequence
  Description of Artificial Sequence: Synthetic oligonucleotide
  Sense strand starting at position 525 of SEQ ID NO: 1885284
auaguauuuccauguuguc

SEQ ID NO: 2330393 - RNA, 19 nt, Artificial Sequence
  Description of Artificial Sequence: Synthetic oligonucleotide
  Antisense strand to SEQ ID NO: 2330392
gacaacauggaaauacuau

SEQ ID NO: 2330394 - RNA, 19 nt, Artificial Sequence
  Description of Artificial Sequence: Synthetic oligonucleotide
  Sense strand starting at position 750 of SEQ ID NO: 1885284
gcaauaggguccuuagaac

SEQ ID NO: 2330395 - RNA, 19 nt, Artificial Sequence
  Description of Artificial Sequence: Synthetic oligonucleotide
  Antisense strand to SEQ ID NO: 2330394
guucuaaggacccuauugc

SEQ ID NO: 2330396 - RNA, 19 nt, Artificial Sequence
  Description of Artificial Sequence: Synthetic oligonucleotide
  Sense strand starting at position 862 of SEQ ID NO: 1885284
ucuuaucaaggauguuuau

SEQ ID NO: 2330397 - RNA, 19 nt, Artificial Sequence
  Description of Artificial Sequence: Synthetic oligonucleotide
  Antisense strand to SEQ ID NO: 2330396
auaaacauccuugauaaga

SEQ ID NO: 2330398 - RNA, 19 nt, Artificial Sequence
  Description of Artificial Sequence: Synthetic oligonucleotide
  Sense strand starting at position 903 of SEQ ID NO: 1885284
cagcucuuccgggaaagaa

SEQ ID NO: 2330399 - RNA, 19 nt, Artificial Sequence
  Description of Artificial Sequence: Synthetic oligonucleotide
  Antisense strand to SEQ ID NO: 2330398
uucuuucccggaagagcug

SEQ ID NO: 2330400 - RNA, 19 nt, Artificial Sequence
  Description of Artificial Sequence: Synthetic oligonucleotide
  Sense strand starting at position 1111 of SEQ ID NO: 1885284
agaagaguaccugguggaa

SEQ ID NO: 2330401 - RNA, 19 nt, Artificial Sequence
  Description of Artificial Sequence: Synthetic oligonucleotide
  Antisense strand to SEQ ID NO: 2330400
uuccaccagguacucuucu

SEQ ID NO: 2330402 - RNA, 19 nt, Artificial Sequence
  Description of Artificial Sequence: Synthetic oligonucleotide
  Sense strand starting at position 1114 of SEQ ID NO: 1885284
agaguaccugguggaagau

SEQ ID NO: 2330403 - RNA, 19 nt, Artificial Sequence
  Description of Artificial Sequence: Synthetic oligonucleotide
  Antisense strand to SEQ ID NO: 2330402
aucuuccaccagguacucu

SEQ ID NO: 2330404 - RNA, 19 nt, Artificial Sequence
  Description of Artificial Sequence: Synthetic oligonucleotide
  Sense strand starting at position 1253 of SEQ ID NO: 1885284
agccuucggagugaugaaa

SEQ ID NO: 2330405 - RNA, 19 nt, Artificial Sequence
  Description of Artificial Sequence: Synthetic oligonucleotide
  Antisense strand to SEQ ID NO: 2330404
uuucaucacuccgaaggcu

SEQ ID NO: 2330406 - RNA, 19 nt, Artificial Sequence
  Description of Artificial Sequence: Synthetic oligonucleotide
  Sense strand starting at position 1333 of SEQ ID NO: 1885284
uuuauuaugcaauagcuga

SEQ ID NO: 2330407 - RNA, 19 nt, Artificial Sequence
  Description of Artificial Sequence: Synthetic oligonucleotide
  Antisense strand to SEQ ID NO: 2330406
ucagcuauugcauaauaaa

SEQ ID NO: 2330408 - RNA, 19 nt, Artificial Sequence
  Description of Artificial Sequence: Synthetic oligonucleotide
  Sense strand starting at position 1338 of SEQ ID NO: 1885284
uaugcaauagcugaguaua

SEQ ID NO: 2330409 - RNA, 19 nt, Artificial Sequence
  Description of Artificial Sequence: Synthetic oligonucleotide
  Antisense strand to SEQ ID NO: 2330408
uauacucagcuauugcaua

SEQ ID NO: 2330410 - RNA, 19 nt, Artificial Sequence
  Description of Artificial Sequence: Synthetic oligonucleotide
  Sense strand starting at position 1341 of SEQ ID NO: 1885284
gcaauagcugaguauauac

SEQ ID NO: 2330411 - RNA, 19 nt, Artificial Sequence
  Description of Artificial Sequence: Synthetic oligonucleotide
  Antisense strand to SEQ ID NO: 2330410
guauauacucagcuauugc

SEQ ID NO: 2330412 - RNA, 19 nt, Artificial Sequence
  Description of Artificial Sequence: Synthetic oligonucleotide
  Sense strand starting at position 1501 of SEQ ID NO: 1885284
ucucucauacuaugggaaa

SEQ ID NO: 2330413 - RNA, 19 nt, Artificial Sequence
  Description of Artificial Sequence: Synthetic oligonucleotide
  Antisense strand to SEQ ID NO: 2330412
uuucccauaguaugagaga

SEQ ID NO: 2330414 - RNA, 19 nt, Artificial Sequence
  Description of Artificial Sequence: Synthetic oligonucleotide
  Sense strand starting at position 1623 of SEQ ID NO: 1885284
uggcauuugccuugacauu

SEQ ID NO: 2330415 - RNA, 19 nt, Artificial Sequence
  Description of Artificial Sequence: Synthetic oligonucleotide
  Antisense strand to SEQ ID NO: 2330414
aaugucaaggcaaaugcca

SEQ ID NO: 2330416 - RNA, 19 nt, Artificial Sequence
  Description of Artificial Sequence: Synthetic oligonucleotide
  Sense strand starting at position 1674 of SEQ ID NO: 1885284
augagaguucuguaucauc

SEQ ID NO: 2330417 - RNA, 19 nt, Artificial Sequence
  Description of Artificial Sequence: Synthetic oligonucleotide
  Antisense strand to SEQ ID NO: 2330416
gaugauacagaacucucau

SEQ ID NO: 2330418 - RNA, 19 nt, Artificial Sequence
  Description of Artificial Sequence: Synthetic oligonucleotide
  Sense strand starting at position 2070 of SEQ ID NO: 1885284
ggguauauugcacaguaau

SEQ ID NO: 2330419 - RNA, 19 nt, Artificial Sequence
  Description of Artificial Sequence: Synthetic oligonucleotide
  Antisense strand to SEQ ID NO: 2330418
auuacugugcaauauaccc

SEQ ID NO: 2330420 - RNA, 19 nt, Artificial Sequence
  Description of Artificial Sequence: Synthetic oligonucleotide
  Sense strand starting at position 2083 of SEQ ID NO: 1885284
aguaaugaagucuggacuu

SEQ ID NO: 2330421 - RNA, 19 nt, Artificial Sequence
  Description of Artificial Sequence: Synthetic oligonucleotide
  Antisense strand to SEQ ID NO: 2330420
aaguccagacuucauuacu

SEQ ID NO: 2330422 - RNA, 19 nt, Artificial Sequence
  Description of Artificial Sequence: Synthetic oligonucleotide
  Sense strand starting at position 2130 of SEQ ID NO: 1885284
uguuguaauuucucauccu

SEQ ID NO: 2330423 - RNA, 19 nt, Artificial Sequence
  Description of Artificial Sequence: Synthetic oligonucleotide
  Antisense strand to SEQ ID NO: 2330422
aggaugagaaauuacaaca

SEQ ID NO: 2330424 - RNA, 19 nt, Artificial Sequence
  Description of Artificial Sequence: Synthetic oligonucleotide
  Sense strand starting at position 2343 of SEQ ID NO: 1885284
augugcuuauuuccugcaa

SEQ ID NO: 2330425 - RNA, 19 nt, Artificial Sequence
  Description of Artificial Sequence: Synthetic oligonucleotide
  Antisense strand to SEQ ID NO: 2330424
uugcaggaaauaagcacau

SEQ ID NO: 2330426 - RNA, 19 nt, Artificial Sequence
  Description of Artificial Sequence: Synthetic oligonucleotide
  Sense strand starting at position 2344 of SEQ ID NO: 1885284
ugugcuuauuuccugcaaa

SEQ ID NO: 2330427 - RNA, 19 nt, Artificial Sequence
  Description of Artificial Sequence: Synthetic oligonucleotide
  Antisense strand to SEQ ID NO: 2330426
uuugcaggaaauaagcaca

SEQ ID NO: 2330428 - RNA, 19 nt, Artificial Sequence
  Description of Artificial Sequence: Synthetic oligonucleotide
  Sense strand starting at position 2347 of SEQ ID NO: 1885284
gcuuauuuccugcaaagca

SEQ ID NO: 2330429 - RNA, 19 nt, Artificial Sequence
  Description of Artificial Sequence: Synthetic oligonucleotide
  Antisense strand to SEQ ID NO: 2330428
ugcuuugcaggaaauaagc

SEQ ID NO: 2330430 - RNA, 19 nt, Artificial Sequence
  Description of Artificial Sequence: Synthetic oligonucleotide
  Sense strand starting at position 2432 of SEQ ID NO: 1885284
aggaauacaugagagaaca

SEQ ID NO: 2330431 - RNA, 19 nt, Artificial Sequence
  Description of Artificial Sequence: Synthetic oligonucleotide
  Antisense strand to SEQ ID NO: 2330430
uguucucucauguauuccu

SEQ ID NO: 2330432 - RNA, 19 nt, Artificial Sequence
  Description of Artificial Sequence: Synthetic oligonucleotide
  Sense strand starting at position 2469 of SEQ ID NO: 1885284
caggaaauguuaguccaga

SEQ ID NO: 2330433 - RNA, 19 nt, Artificial Sequence
  Description of Artificial Sequence: Synthetic oligonucleotide
  Antisense strand to SEQ ID NO: 2330432
ucuggacuaacauuuccug

SEQ ID NO: 2330434 - RNA, 19 nt, Artificial Sequence
  Description of Artificial Sequence: Synthetic oligonucleotide
  Sense strand starting at position 2470 of SEQ ID NO: 1885284
aggaaauguuaguccagaa

SEQ ID NO: 2330435 - RNA, 19 nt, Artificial Sequence
  Description of Artificial Sequence: Synthetic oligonucleotide
  Antisense strand to SEQ ID NO: 2330434
uucuggacuaacauuuccu

SEQ ID NO: 2330436 - RNA, 19 nt, Artificial Sequence
  Description of Artificial Sequence: Synthetic oligonucleotide
  Sense strand starting at position 2706 of SEQ ID NO: 1885284
ggugcuaagagccaaagau

SEQ ID NO: 2330437 - RNA, 19 nt, Artificial Sequence
  Description of Artificial Sequence: Synthetic oligonucleotide
  Antisense strand to SEQ ID NO: 2330436
aucuuuggcucuuagcacc

SEQ ID NO: 2330438 - RNA, 19 nt, Artificial Sequence
  Description of Artificial Sequence: Synthetic oligonucleotide
  Sense strand starting at position 2883 of SEQ ID NO: 1885284
auccuuauguaaguaaauc

SEQ ID NO: 2330439 - RNA, 19 nt, Artificial Sequence
  Description of Artificial Sequence: Synthetic oligonucleotide
  Antisense strand to SEQ ID NO: 2330438
gauuuacuuacauaaggau

SEQ ID NO: 2330440 - RNA, 19 nt, Artificial Sequence
  Description of Artificial Sequence: Synthetic oligonucleotide
  Sense strand starting at position 2969 of SEQ ID NO: 1885284
gugccauuauuucuguaga

SEQ ID NO: 2330441 - RNA, 19 nt, Artificial Sequence
  Description of Artificial Sequence: Synthetic oligonucleotide
  Antisense strand to SEQ ID NO: 2330440
ucuacagaaauaauggcac

SEQ ID NO: 2330442 - RNA, 19 nt, Artificial Sequence
  Description of Artificial Sequence: Synthetic oligonucleotide
  Sense strand starting at position 2971 of SEQ ID NO: 1885284
gccauuauuucuguagauc

SEQ ID NO: 2330443 - RNA, 19 nt, Artificial Sequence
  Description of Artificial Sequence: Synthetic oligonucleotide
  Antisense strand to SEQ ID NO: 2330442
gaucuacagaaauaauggc

SEQ ID NO: 2330444 - RNA, 19 nt, Artificial Sequence
  Description of Artificial Sequence: Synthetic oligonucleotide
  Sense strand starting at position 3023 of SEQ ID NO: 1885284
cugguucucgaccagggau

SEQ ID NO: 2330445 - RNA, 19 nt, Artificial Sequence
  Description of Artificial Sequence: Synthetic oligonucleotide
  Antisense strand to SEQ ID NO: 2330444
aucccuggucgagaaccag

SEQ ID NO: 2330446 - RNA, 19 nt, Artificial Sequence
  Description of Artificial Sequence: Synthetic oligonucleotide
  Sense strand starting at position 3062 of SEQ ID NO: 1885284
uuggguuaugcugaugaua

SEQ ID NO: 2330447 - RNA, 19 nt, Artificial Sequence
  Description of Artificial Sequence: Synthetic oligonucleotide
  Antisense strand to SEQ ID NO: 2330446
uaucaucagcauaacccaa

SEQ ID NO: 2330448 - RNA, 19 nt, Artificial Sequence
  Description of Artificial Sequence: Synthetic oligonucleotide
  Sense strand starting at position 3199 of SEQ ID NO: 1885284
aaaguacuucuggaauguu

SEQ ID NO: 2330449 - RNA, 19 nt, Artificial Sequence
  Description of Artificial Sequence: Synthetic oligonucleotide
  Antisense strand to SEQ ID NO: 2330448
aacauuccagaaguacuuu

SEQ ID NO: 2330450 - RNA, 19 nt, Artificial Sequence
  Description of Artificial Sequence: Synthetic oligonucleotide
  Sense strand starting at position 3388 of SEQ ID NO: 1885284
agccuuugccuccagagga

SEQ ID NO: 2330451 - RNA, 19 nt, Artificial Sequence
  Description of Artificial Sequence: Synthetic oligonucleotide
  Antisense strand to SEQ ID NO: 2330450
uccucuggaggcaaaggcu

SEQ ID NO: 2330452 - RNA, 19 nt, Artificial Sequence
  Description of Artificial Sequence: Synthetic oligonucleotide
  Sense strand starting at position 3593 of SEQ ID NO: 1885284
agcugucaacacugauaga

SEQ ID NO: 2330453 - RNA, 19 nt, Artificial Sequence
  Description of Artificial Sequence: Synthetic oligonucleotide
  Antisense strand to SEQ ID NO: 2330452
ucuaucaguguugacagcu

SEQ ID NO: 2330454 - RNA, 19 nt, Artificial Sequence
  Description of Artificial Sequence: Synthetic oligonucleotide
  Sense strand starting at position 3606 of SEQ ID NO: 1885284
gauagaaguuaaguaguuu

SEQ ID NO: 2330455 - RNA, 19 nt, Artificial Sequence
  Description of Artificial Sequence: Synthetic oligonucleotide
  Antisense strand to SEQ ID NO: 2330454
aaacuacuuaacuucuauc

SEQ ID NO: 2330456 - RNA, 19 nt, Artificial Sequence
  Description of Artificial Sequence: Synthetic oligonucleotide
  Sense strand starting at position 3724 of SEQ ID NO: 1885284
gcaugaaucccagacaggu

SEQ ID NO: 2330457 - RNA, 19 nt, Artificial Sequence
  Description of Artificial Sequence: Synthetic oligonucleotide
  Antisense strand to SEQ ID NO: 2330456
accugucugggauucaugc

SEQ ID NO: 2330458 - RNA, 19 nt, Artificial Sequence
  Description of Artificial Sequence: Synthetic oligonucleotide
  Sense strand starting at position 3771 of SEQ ID NO: 1885284
agccaaaguccguaaauag

SEQ ID NO: 2330459 - RNA, 19 nt, Artificial Sequence
  Description of Artificial Sequence: Synthetic oligonucleotide
  Antisense strand to SEQ ID NO: 2330458
cuauuuacggacuuuggcu

SEQ ID NO: 2330460 - RNA, 19 nt, Artificial Sequence
  Description of Artificial Sequence: Synthetic oligonucleotide
  Sense strand starting at position 3851 of SEQ ID NO: 1885284
aauaauacaguuuguggaa

SEQ ID NO: 2330461 - RNA, 19 nt, Artificial Sequence
  Description of Artificial Sequence: Synthetic oligonucleotide
  Antisense strand to SEQ ID NO: 2330460
uuccacaaacuguauuauu

SEQ ID NO: 2330462 - RNA, 19 nt, Artificial Sequence
  Description of Artificial Sequence: Synthetic oligonucleotide
  Sense strand starting at position 3852 of SEQ ID NO: 1885284
auaauacaguuuguggaaa

SEQ ID NO: 2330463 - RNA, 19 nt, Artificial Sequence
  Description of Artificial Sequence: Synthetic oligonucleotide
  Antisense strand to SEQ ID NO: 2330462
uuuccacaaacuguauuau

SEQ ID NO: 2330464 - RNA, 19 nt, Artificial Sequence
  Description of Artificial Sequence: Synthetic oligonucleotide
  Sense strand starting at position 200 of SEQ ID NO: 1885285
agugguaguguugggagau

SEQ ID NO: 2330465 - RNA, 19 nt, Artificial Sequence
  Description of Artificial Sequence: Synthetic oligonucleotide
  Antisense strand to SEQ ID NO: 2330464
aucucccaacacuaccacu

SEQ ID NO: 2330466 - RNA, 19 nt, Artificial Sequence
  Description of Artificial Sequence: Synthetic oligonucleotide
  Sense strand starting at position 351 of SEQ ID NO: 1885285
aagaaaguagaucguauau

SEQ ID NO: 2330467 - RNA, 19 nt, Artificial Sequence
  Description of Artificial Sequence: Synthetic oligonucleotide
  Antisense strand to SEQ ID NO: 2330466
auauacgaucuacuuucuu

SEQ ID NO: 2330468 - RNA, 19 nt, Artificial Sequence
  Description of Artificial Sequence: Synthetic oligonucleotide
  Sense strand starting at position 370 of SEQ ID NO: 1885285
guaucagccuuauuuguaa

SEQ ID NO: 2330469 - RNA, 19 nt, Artificial Sequence
  Description of Artificial Sequence: Synthetic oligonucleotide
  Antisense strand to SEQ ID NO: 2330468
uuacaaauaaggcugauac

SEQ ID NO: 2330470 - RNA, 19 nt, Artificial Sequence
  Description of Artificial Sequence: Synthetic oligonucleotide
  Sense strand starting at position 374 of SEQ ID NO: 1885285
cagccuuauuuguaaggaa

SEQ ID NO: 2330471 - RNA, 19 nt, Artificial Sequence
  Description of Artificial Sequence: Synthetic oligonucleotide
  Antisense strand to SEQ ID NO: 2330470
uuccuuacaaauaaggcug

SEQ ID NO: 2330472 - RNA, 19 nt, Artificial Sequence
  Description of Artificial Sequence: Synthetic oligonucleotide
  Sense strand starting at position 425 of SEQ ID NO: 1885285
uugauauacaguuguggaa

SEQ ID NO: 2330473 - RNA, 19 nt, Artificial Sequence
  Description of Artificial Sequence: Synthetic oligonucleotide
  Antisense strand to SEQ ID NO: 2330472
uuccacaacuguauaucaa

SEQ ID NO: 2330474 - RNA, 19 nt, Artificial Sequence
  Description of Artificial Sequence: Synthetic oligonucleotide
  Sense strand starting at position 500 of SEQ ID NO: 1885285
aagcuaguacuuuguuaga

SEQ ID NO: 2330475 - RNA, 19 nt, Artificial Sequence
  Description of Artificial Sequence: Synthetic oligonucleotide
  Antisense strand to SEQ ID NO: 2330474
ucuaacaaaguacuagcuu

SEQ ID NO: 2330476 - RNA, 19 nt, Artificial Sequence
  Description of Artificial Sequence: Synthetic oligonucleotide
  Sense strand starting at position 556 of SEQ ID NO: 1885285
agagguaauucuuuaugaa

SEQ ID NO: 2330477 - RNA, 19 nt, Artificial Sequence
  Description of Artificial Sequence: Synthetic oligonucleotide
  Antisense strand to SEQ ID NO: 2330476
uucauaaagaauuaccucu

SEQ ID NO: 2330478 - RNA, 19 nt, Artificial Sequence
  Description of Artificial Sequence: Synthetic oligonucleotide
  Sense strand starting at position 652 of SEQ ID NO: 1885285
ugcuuagaacccugauaug

SEQ ID NO: 2330479 - RNA, 19 nt, Artificial Sequence
  Description of Artificial Sequence: Synthetic oligonucleotide
  Antisense strand to SEQ ID NO: 2330478
cauaucaggguucuaagca

SEQ ID NO: 2330480 - RNA, 19 nt, Artificial Sequence
  Description of Artificial Sequence: Synthetic oligonucleotide
  Sense strand starting at position 735 of SEQ ID NO: 1885285
gcuguagguaaugaaacaa

SEQ ID NO: 2330481 - RNA, 19 nt, Artificial Sequence
  Description of Artificial Sequence: Synthetic oligonucleotide
  Antisense strand to SEQ ID NO: 2330480
uuguuucauuaccuacagc

SEQ ID NO: 2330482 - RNA, 19 nt, Artificial Sequence
  Description of Artificial Sequence: Synthetic oligonucleotide
  Sense strand starting at position 1037 of SEQ ID NO: 1885285
ggguaaagauaauacuaaa

SEQ ID NO: 2330483 - RNA, 19 nt, Artificial Sequence
  Description of Artificial Sequence: Synthetic oligonucleotide
  Antisense strand to SEQ ID NO: 2330482
uuuaguauuaucuuuaccc

SEQ ID NO: 2330484 - RNA, 19 nt, Artificial Sequence
  Description of Artificial Sequence: Synthetic oligonucleotide
  Sense strand starting at position 1048 of SEQ ID NO: 1885285
auacuaaaguugucuaguu

SEQ ID NO: 2330485 - RNA, 19 nt, Artificial Sequence
  Description of Artificial Sequence: Synthetic oligonucleotide
  Antisense strand to SEQ ID NO: 2330484
aacuagacaacuuuaguau

SEQ ID NO: 2330486 - RNA, 19 nt, Artificial Sequence
  Description of Artificial Sequence: Synthetic oligonucleotide
  Sense strand starting at position 1050 of SEQ ID NO: 1885285
acuaaaguugucuaguugu

SEQ ID NO: 2330487 - RNA, 19 nt, Artificial Sequence
  Description of Artificial Sequence: Synthetic oligonucleotide
  Antisense strand to SEQ ID NO: 2330486
acaacuagacaacuuuagu

SEQ ID NO: 2330488 - RNA, 19 nt, Artificial Sequence
  Description of Artificial Sequence: Synthetic oligonucleotide
  Sense strand starting at position 1061 of SEQ ID NO: 1885285
cuaguuguccuuuaaugua

SEQ ID NO: 2330489 - RNA, 19 nt, Artificial Sequence
  Description of Artificial Sequence: Synthetic oligonucleotide
  Antisense strand to SEQ ID NO: 2330488
uacauuaaaggacaacuag

SEQ ID NO: 2330490 - RNA, 19 nt, Artificial Sequence
  Description of Artificial Sequence: Synthetic oligonucleotide
  Sense strand starting at position 1691 of SEQ ID NO: 1885285
uugaguaaguuguuuggau

SEQ ID NO: 2330491 - RNA, 19 nt, Artificial Sequence
  Description of Artificial Sequence: Synthetic oligonucleotide
  Antisense strand to SEQ ID NO: 2330490
auccaaacaacuuacucaa

SEQ ID NO: 2330492 - RNA, 19 nt, Artificial Sequence
  Description of Artificial Sequence: Synthetic oligonucleotide
  Sense strand starting at position 1692 of SEQ ID NO: 1885285
ugaguaaguuguuuggauu

SEQ ID NO: 2330493 - RNA, 19 nt, Artificial Sequence
  Description of Artificial Sequence: Synthetic oligonucleotide
  Antisense strand to SEQ ID NO: 2330492
aauccaaacaacuuacuca

SEQ ID NO: 2330494 - RNA, 19 nt, Artificial Sequence
  Description of Artificial Sequence: Synthetic oligonucleotide
  Sense strand starting at position 1717 of SEQ ID NO: 1885285
auguaugcuuuacugaaua

SEQ ID NO: 2330495 - RNA, 19 nt, Artificial Sequence
  Description of Artificial Sequence: Synthetic oligonucleotide
  Antisense strand to SEQ ID NO: 2330494
uauucaguaaagcauacau

SEQ ID NO: 2330496 - RNA, 19 nt, Artificial Sequence
  Description of Artificial Sequence: Synthetic oligonucleotide
  Sense strand starting at position 1722 of SEQ ID NO: 1885285
ugcuuuacugaauacagau

SEQ ID NO: 2330497 - RNA, 19 nt, Artificial Sequence
  Description of Artificial Sequence: Synthetic oligonucleotide
  Antisense strand to SEQ ID NO: 2330496
aucuguauucaguaaagca

SEQ ID NO: 2330498 - RNA, 19 nt, Artificial Sequence
  Description of Artificial Sequence: Synthetic oligonucleotide
  Sense strand starting at position 1751 of SEQ ID NO: 1885285
uggcguguaagggaaacau

SEQ ID NO: 2330499 - RNA, 19 nt, Artificial Sequence
  Description of Artificial Sequence: Synthetic oligonucleotide
  Antisense strand to SEQ ID NO: 2330498
auguuucccuuacacgcca

SEQ ID NO: 2330500 - RNA, 19 nt, Artificial Sequence
  Description of Artificial Sequence: Synthetic oligonucleotide
  Sense strand starting at position 1877 of SEQ ID NO: 1885285
ggcugaaagccugaguuca

SEQ ID NO: 2330501 - RNA, 19 nt, Artificial Sequence
  Description of Artificial Sequence: Synthetic oligonucleotide
  Antisense strand to SEQ ID NO: 2330500
ugaacucaggcuuucagcc

SEQ ID NO: 2330502 - RNA, 19 nt, Artificial Sequence
  Description of Artificial Sequence: Synthetic oligonucleotide
  Sense strand starting at position 2219 of SEQ ID NO: 1885285
gugauaaaguguuccauau

SEQ ID NO: 2330503 - RNA, 19 nt, Artificial Sequence
  Description of Artificial Sequence: Synthetic oligonucleotide
  Antisense strand to SEQ ID NO: 2330502
auauggaacacuuuaucac

SEQ ID NO: 2330504 - RNA, 19 nt, Artificial Sequence
  Description of Artificial Sequence: Synthetic oligonucleotide
  Sense strand starting at position 2480 of SEQ ID NO: 1885285
aggaucuacuugcuaaacu

SEQ ID NO: 2330505 - RNA, 19 nt, Artificial Sequence
  Description of Artificial Sequence: Synthetic oligonucleotide
  Antisense strand to SEQ ID NO: 2330504
aguuuagcaaguagauccu

SEQ ID NO: 2330506 - RNA, 19 nt, Artificial Sequence
  Description of Artificial Sequence: Synthetic oligonucleotide
  Sense strand starting at position 2661 of SEQ ID NO: 1885285
gaugaauuauuuggaaugu

SEQ ID NO: 2330507 - RNA, 19 nt, Artificial Sequence
  Description of Artificial Sequence: Synthetic oligonucleotide
  Antisense strand to SEQ ID NO: 2330506
acauuccaaauaauucauc

SEQ ID NO: 2330508 - RNA, 19 nt, Artificial Sequence
  Description of Artificial Sequence: Synthetic oligonucleotide
  Sense strand starting at position 2676 of SEQ ID NO: 1885285
auguaacauguaugcaaua

SEQ ID NO: 2330509 - RNA, 19 nt, Artificial Sequence
  Description of Artificial Sequence: Synthetic oligonucleotide
  Antisense strand to SEQ ID NO: 2330508
uauugcauacauguuacau

SEQ ID NO: 2330510 - RNA, 19 nt, Artificial Sequence
  Description of Artificial Sequence: Synthetic oligonucleotide
  Sense strand starting at position 2677 of SEQ ID NO: 1885285
uguaacauguaugcaauau

SEQ ID NO: 2330511 - RNA, 19 nt, Artificial Sequence
  Description of Artificial Sequence: Synthetic oligonucleotide
  Antisense strand to SEQ ID NO: 2330510
auauugcauacauguuaca

SEQ ID NO: 2330512 - RNA, 19 nt, Artificial Sequence
  Description of Artificial Sequence: Synthetic oligonucleotide
  Sense strand starting at position 2681 of SEQ ID NO: 1885285
acauguaugcaauauguuu

SEQ ID NO: 2330513 - RNA, 19 nt, Artificial Sequence
  Description of Artificial Sequence: Synthetic oligonucleotide
  Antisense strand to SEQ ID NO: 2330512
aaacauauugcauacaugu

SEQ ID NO: 2330514 - RNA, 19 nt, Artificial Sequence
  Description of Artificial Sequence: Synthetic oligonucleotide
  Sense strand starting at position 2770 of SEQ ID NO: 1885285
auguaaugugcuuaacacu

SEQ ID NO: 2330515 - RNA, 19 nt, Artificial Sequence
  Description of Artificial Sequence: Synthetic oligonucleotide
  Antisense strand to SEQ ID NO: 2330514
aguguuaagcacauuacau

SEQ ID NO: 2330516 - RNA, 19 nt, Artificial Sequence
  Description of Artificial Sequence: Synthetic oligonucleotide
  Sense strand starting at position 2914 of SEQ ID NO: 1885285
aaauaaguguguuuacuga

SEQ ID NO: 2330517 - RNA, 19 nt, Artificial Sequence
  Description of Artificial Sequence: Synthetic oligonucleotide
  Antisense strand to SEQ ID NO: 2330516
ucaguaaacacacuuauuu

SEQ ID NO: 2330518 - RNA, 19 nt, Artificial Sequence
  Description of Artificial Sequence: Synthetic oligonucleotide
  Sense strand starting at position 2964 of SEQ ID NO: 1885285
agaaaugacuauguacagu

SEQ ID NO: 2330519 - RNA, 19 nt, Artificial Sequence
  Description of Artificial Sequence: Synthetic oligonucleotide
  Antisense strand to SEQ ID NO: 2330518
acuguacauagucauuucu

SEQ ID NO: 2330520 - RNA, 19 nt, Artificial Sequence
  Description of Artificial Sequence: Synthetic oligonucleotide
  Sense strand starting at position 3069 of SEQ ID NO: 1885285
uugcuauaaacgugaugau

SEQ ID NO: 2330521 - RNA, 19 nt, Artificial Sequence
  Description of Artificial Sequence: Synthetic oligonucleotide
  Antisense strand to SEQ ID NO: 2330520
aucaucacguuuauagcaa

SEQ ID NO: 2330522 - RNA, 19 nt, Artificial Sequence
  Description of Artificial Sequence: Synthetic oligonucleotide
  Sense strand starting at position 3070 of SEQ ID NO: 1885285
ugcuauaaacgugaugauu

SEQ ID NO: 2330523 - RNA, 19 nt, Artificial Sequence
  Description of Artificial Sequence: Synthetic oligonucleotide
  Antisense strand to SEQ ID NO: 2330522
aaucaucacguuuauagca

SEQ ID NO: 2330524 - RNA, 19 nt, Artificial Sequence
  Description of Artificial Sequence: Synthetic oligonucleotide
  Sense strand starting at position 3076 of SEQ ID NO: 1885285
aaacgugaugauuguuuau

SEQ ID NO: 2330525 - RNA, 19 nt, Artificial Sequence
  Description of Artificial Sequence: Synthetic oligonucleotide
  Antisense strand to SEQ ID NO: 2330524
auaaacaaucaucacguuu

SEQ ID NO: 2330526 - RNA, 19 nt, Artificial Sequence
  Description of Artificial Sequence: Synthetic oligonucleotide
  Sense strand starting at position 3078 of SEQ ID NO: 1885285
acgugaugauuguuuauga

SEQ ID NO: 2330527 - RNA, 19 nt, Artificial Sequence
  Description of Artificial Sequence: Synthetic oligonucleotide
  Antisense strand to SEQ ID NO: 2330526
ucauaaacaaucaucacgu

SEQ ID NO: 2330528 - RNA, 19 nt, Artificial Sequence
  Description of Artificial Sequence: Synthetic oligonucleotide
  Sense strand starting at position 3079 of SEQ ID NO: 1885285
cgugaugauuguuuaugag

SEQ ID NO: 2330529 - RNA, 19 nt, Artificial Sequence
  Description of Artificial Sequence: Synthetic oligonucleotide
  Antisense strand to SEQ ID NO: 2330528
cucauaaacaaucaucacg

SEQ ID NO: 2330530 - RNA, 19 nt, Artificial Sequence
  Description of Artificial Sequence: Synthetic oligonucleotide
  Sense strand starting at position 3135 of SEQ ID NO: 1885285
uugagaaguguauaugugu

SEQ ID NO: 2330531 - RNA, 19 nt, Artificial Sequence
  Description of Artificial Sequence: Synthetic oligonucleotide
  Antisense strand to SEQ ID NO: 2330530
acacauauacacuucucaa

SEQ ID NO: 2330532 - RNA, 19 nt, Artificial Sequence
  Description of Artificial Sequence: Synthetic oligonucleotide
  Sense strand starting at position 3334 of SEQ ID NO: 1885285
uugcaaacucaggaguaau

SEQ ID NO: 2330533 - RNA, 19 nt, Artificial Sequence
  Description of Artificial Sequence: Synthetic oligonucleotide
  Antisense strand to SEQ ID NO: 2330532
auuacuccugaguuugcaa

SEQ ID NO: 2330534 - RNA, 19 nt, Artificial Sequence
  Description of Artificial Sequence: Synthetic oligonucleotide
  Sense strand starting at position 3372 of SEQ ID NO: 1885285
uguuccauauaaucgaauu

SEQ ID NO: 2330535 - RNA, 19 nt, Artificial Sequence
  Description of Artificial Sequence: Synthetic oligonucleotide
  Antisense strand to SEQ ID NO: 2330534
aauucgauuauauggaaca

SEQ ID NO: 2330536 - RNA, 19 nt, Artificial Sequence
  Description of Artificial Sequence: Synthetic oligonucleotide
  Sense strand starting at position 3463 of SEQ ID NO: 1885285
gaagaaaugcagugauguu

SEQ ID NO: 2330537 - RNA, 19 nt, Artificial Sequence
  Description of Artificial Sequence: Synthetic oligonucleotide
  Antisense strand to SEQ ID NO: 2330536
aacaucacugcauuucuuc

SEQ ID NO: 2330538 - RNA, 19 nt, Artificial Sequence
  Description of Artificial Sequence: Synthetic oligonucleotide
  Sense strand starting at position 3769 of SEQ ID NO: 1885285
gaugauaucgucuggagua

SEQ ID NO: 2330539 - RNA, 19 nt, Artificial Sequence
  Description of Artificial Sequence: Synthetic oligonucleotide
  Antisense strand to SEQ ID NO: 2330538
uacuccagacgauaucauc

SEQ ID NO: 2330540 - RNA, 19 nt, Artificial Sequence
  Description of Artificial Sequence: Synthetic oligonucleotide
  Sense strand starting at position 3771 of SEQ ID NO: 1885285
ugauaucgucuggaguaca

SEQ ID NO: 2330541 - RNA, 19 nt, Artificial Sequence
  Description of Artificial Sequence: Synthetic oligonucleotide
  Antisense strand to SEQ ID NO: 2330540
uguacuccagacgauauca

SEQ ID NO: 2330542 - RNA, 19 nt, Artificial Sequence
  Description of Artificial Sequence: Synthetic oligonucleotide
  Sense strand starting at position 3798 of SEQ ID NO: 1885285
ucucaauauguagacagua

SEQ ID NO: 2330543 - RNA, 19 nt, Artificial Sequence
  Description of Artificial Sequence: Synthetic oligonucleotide
  Antisense strand to SEQ ID NO: 2330542
uacugucuacauauugaga

SEQ ID NO: 2330544 - RNA, 19 nt, Artificial Sequence
  Description of Artificial Sequence: Synthetic oligonucleotide
  Sense strand starting at position 79 of SEQ ID NO: 1885286
ggcaguucugaaggaauag

SEQ ID NO: 2330545 - RNA, 19 nt, Artificial Sequence
  Description of Artificial Sequence: Synthetic oligonucleotide
  Antisense strand to SEQ ID NO: 2330544
cuauuccuucagaacugcc

SEQ ID NO: 2330546 - RNA, 19 nt, Artificial Sequence
  Description of Artificial Sequence: Synthetic oligonucleotide
  Sense strand starting at position 238 of SEQ ID NO: 1885286
guugaagacuuacuggauc

SEQ ID NO: 2330547 - RNA, 19 nt, Artificial Sequence
  Description of Artificial Sequence: Synthetic oligonucleotide
  Antisense strand to SEQ ID NO: 2330546
gauccaguaagucuucaac

SEQ ID NO: 2330548 - RNA, 19 nt, Artificial Sequence
  Description of Artificial Sequence: Synthetic oligonucleotide
  Sense strand starting at position 319 of SEQ ID NO: 1885286
aguggucucagucaagagu

SEQ ID NO: 2330549 - RNA, 19 nt, Artificial Sequence
  Description of Artificial Sequence: Synthetic oligonucleotide
  Antisense strand to SEQ ID NO: 2330548
acucuugacugagaccacu

SEQ ID NO: 2330550 - RNA, 19 nt, Artificial Sequence
  Description of Artificial Sequence: Synthetic oligonucleotide
  Sense strand starting at position 322 of SEQ ID NO: 1885286
ggucucagucaagaguuau

SEQ ID NO: 2330551 - RNA, 19 nt, Artificial Sequence
  Description of Artificial Sequence: Synthetic oligonucleotide
  Antisense strand to SEQ ID NO: 2330550
auaacucuugacugagacc

SEQ ID NO: 2330552 - RNA, 19 nt, Artificial Sequence
  Description of Artificial Sequence: Synthetic oligonucleotide
  Sense strand starting at position 448 of SEQ ID NO: 1885286
augacuuuccuuggaucca

SEQ ID NO: 2330553 - RNA, 19 nt, Artificial Sequence
  Description of Artificial Sequence: Synthetic oligonucleotide
  Antisense strand to SEQ ID NO: 2330552
uggauccaaggaaagucau

SEQ ID NO: 2330554 - RNA, 19 nt, Artificial Sequence
  Description of Artificial Sequence: Synthetic oligonucleotide
  Sense strand starting at position 473 of SEQ ID NO: 1885286
auaagcuaccacuguagaa

SEQ ID NO: 2330555 - RNA, 19 nt, Artificial Sequence
  Description of Artificial Sequence: Synthetic oligonucleotide
  Antisense strand to SEQ ID NO: 2330554
uucuacagugguagcuuau

SEQ ID NO: 2330556 - RNA, 19 nt, Artificial Sequence
  Description of Artificial Sequence: Synthetic oligonucleotide
  Sense strand starting at position 477 of SEQ ID NO: 1885286
gcuaccacuguagaauuau

SEQ ID NO: 2330557 - RNA, 19 nt, Artificial Sequence
  Description of Artificial Sequence: Synthetic oligonucleotide
  Antisense strand to SEQ ID NO: 2330556
auaauucuacagugguagc

SEQ ID NO: 2330558 - RNA, 19 nt, Artificial Sequence
  Description of Artificial Sequence: Synthetic oligonucleotide
  Sense strand starting at position 489 of SEQ ID NO: 1885286
gaauuauuagaaugguuac

SEQ ID NO: 2330559 - RNA, 19 nt, Artificial Sequence
  Description of Artificial Sequence: Synthetic oligonucleotide
  Antisense strand to SEQ ID NO: 2330558
guaaccauucuaauaauuc

SEQ ID NO: 2330560 - RNA, 19 nt, Artificial Sequence
  Description of Artificial Sequence: Synthetic oligonucleotide
  Sense strand starting at position 814 of SEQ ID NO: 1885286
uacuuuagagacuggcuua

SEQ ID NO: 2330561 - RNA, 19 nt, Artificial Sequence
  Description of Artificial Sequence: Synthetic oligonucleotide
  Antisense strand to SEQ ID NO: 2330560
uaagccagucucuaaagua

SEQ ID NO: 2330562 - RNA, 19 nt, Artificial Sequence
  Description of Artificial Sequence: Synthetic oligonucleotide
  Sense strand starting at position 828 of SEQ ID NO: 1885286
gcuuauuuagcuuagcaau

SEQ ID NO: 2330563 - RNA, 19 nt, Artificial Sequence
  Description of Artificial Sequence: Synthetic oligonucleotide
  Antisense strand to SEQ ID NO: 2330562
auugcuaagcuaaauaagc

SEQ ID NO: 2330564 - RNA, 19 nt, Artificial Sequence
  Description of Artificial Sequence: Synthetic oligonucleotide
  Sense strand starting at position 834 of SEQ ID NO: 1885286
uuagcuuagcaauagguau

SEQ ID NO: 2330565 - RNA, 19 nt, Artificial Sequence
  Description of Artificial Sequence: Synthetic oligonucleotide
  Antisense strand to SEQ ID NO: 2330564
auaccuauugcuaagcuaa

SEQ ID NO: 2330566 - RNA, 19 nt, Artificial Sequence
  Description of Artificial Sequence: Synthetic oligonucleotide
  Sense strand starting at position 860 of SEQ ID NO: 1885286
uuuaccauggcuugauaau

SEQ ID NO: 2330567 - RNA, 19 nt, Artificial Sequence
  Description of Artificial Sequence: Synthetic oligonucleotide
  Antisense strand to SEQ ID NO: 2330566
auuaucaagccaugguaaa

SEQ ID NO: 2330568 - RNA, 19 nt, Artificial Sequence
  Description of Artificial Sequence: Synthetic oligonucleotide
  Sense strand starting at position 861 of SEQ ID NO: 1885286
uuaccauggcuugauaauu

SEQ ID NO: 2330569 - RNA, 19 nt, Artificial Sequence
  Description of Artificial Sequence: Synthetic oligonucleotide
  Antisense strand to SEQ ID NO: 2330568
aauuaucaagccaugguaa

SEQ ID NO: 2330570 - RNA, 19 nt, Artificial Sequence
  Description of Artificial Sequence: Synthetic oligonucleotide
  Sense strand starting at position 1142 of SEQ ID NO: 1885286
acauacuuugguuaguaca

SEQ ID NO: 2330571 - RNA, 19 nt, Artificial Sequence
  Description of Artificial Sequence: Synthetic oligonucleotide
  Antisense strand to SEQ ID NO: 2330570
uguacuaaccaaaguaugu

SEQ ID NO: 2330572 - RNA, 19 nt, Artificial Sequence
  Description of Artificial Sequence: Synthetic oligonucleotide
  Sense strand starting at position 1144 of SEQ ID NO: 1885286
auacuuugguuaguacaca

SEQ ID NO: 2330573 - RNA, 19 nt, Artificial Sequence
  Description of Artificial Sequence: Synthetic oligonucleotide
  Antisense strand to SEQ ID NO: 2330572
uguguacuaaccaaaguau

SEQ ID NO: 2330574 - RNA, 19 nt, Artificial Sequence
  Description of Artificial Sequence: Synthetic oligonucleotide
  Sense strand starting at position 1173 of SEQ ID NO: 1885286
uuuauucuggcacacgaga

SEQ ID NO: 2330575 - RNA, 19 nt, Artificial Sequence
  Description of Artificial Sequence: Synthetic oligonucleotide
  Antisense strand to SEQ ID NO: 2330574
ucucgugugccagaauaaa

SEQ ID NO: 2330576 - RNA, 19 nt, Artificial Sequence
  Description of Artificial Sequence: Synthetic oligonucleotide
  Sense strand starting at position 1279 of SEQ ID NO: 1885286
cuagguucucugugggaaa

SEQ ID NO: 2330577 - RNA, 19 nt, Artificial Sequence
  Description of Artificial Sequence: Synthetic oligonucleotide
  Antisense strand to SEQ ID NO: 2330576
uuucccacagagaaccuag

SEQ ID NO: 2330578 - RNA, 19 nt, Artificial Sequence
  Description of Artificial Sequence: Synthetic oligonucleotide
  Sense strand starting at position 1458 of SEQ ID NO: 1885286
uccaauagucaaggcugaa

SEQ ID NO: 2330579 - RNA, 19 nt, Artificial Sequence
  Description of Artificial Sequence: Synthetic oligonucleotide
  Antisense strand to SEQ ID NO: 2330578
uucagccuugacuauugga

SEQ ID NO: 2330580 - RNA, 19 nt, Artificial Sequence
  Description of Artificial Sequence: Synthetic oligonucleotide
  Sense strand starting at position 1571 of SEQ ID NO: 1885286
ugaguugaucaauggcaag

SEQ ID NO: 2330581 - RNA, 19 nt, Artificial Sequence
  Description of Artificial Sequence: Synthetic oligonucleotide
  Antisense strand to SEQ ID NO: 2330580
cuugccauugaucaacuca

SEQ ID NO: 2330582 - RNA, 19 nt, Artificial Sequence
  Description of Artificial Sequence: Synthetic oligonucleotide
  Sense strand starting at position 1596 of SEQ ID NO: 1885286
acaaauguccucugcagaa

SEQ ID NO: 2330583 - RNA, 19 nt, Artificial Sequence
  Description of Artificial Sequence: Synthetic oligonucleotide
  Antisense strand to SEQ ID NO: 2330582
uucugcagaggacauuugu

SEQ ID NO: 2330584 - RNA, 19 nt, Artificial Sequence
  Description of Artificial Sequence: Synthetic oligonucleotide
  Sense strand starting at position 1644 of SEQ ID NO: 1885286
cucuguuaugaaggagguu

SEQ ID NO: 2330585 - RNA, 19 nt, Artificial Sequence
  Description of Artificial Sequence: Synthetic oligonucleotide
  Antisense strand to SEQ ID NO: 2330584
aaccuccuucauaacagag

SEQ ID NO: 2330586 - RNA, 19 nt, Artificial Sequence
  Description of Artificial Sequence: Synthetic oligonucleotide
  Sense strand starting at position 1645 of SEQ ID NO: 1885286
ucuguuaugaaggagguua

SEQ ID NO: 2330587 - RNA, 19 nt, Artificial Sequence
  Description of Artificial Sequence: Synthetic oligonucleotide
  Antisense strand to SEQ ID NO: 2330586
uaaccuccuucauaacaga

SEQ ID NO: 2330588 - RNA, 19 nt, Artificial Sequence
  Description of Artificial Sequence: Synthetic oligonucleotide
  Sense strand starting at position 1647 of SEQ ID NO: 1885286
uguuaugaaggagguuaaa

SEQ ID NO: 2330589 - RNA, 19 nt, Artificial Sequence
  Description of Artificial Sequence: Synthetic oligonucleotide
  Antisense strand to SEQ ID NO: 2330588
uuuaaccuccuucauaaca

SEQ ID NO: 2330590 - RNA, 19 nt, Artificial Sequence
  Description of Artificial Sequence: Synthetic oligonucleotide
  Sense strand starting at position 1682 of SEQ ID NO: 1885286
uuaacugugggcuauacau

SEQ ID NO: 2330591 - RNA, 19 nt, Artificial Sequence
  Description of Artificial Sequence: Synthetic oligonucleotide
  Antisense strand to SEQ ID NO: 2330590
auguauagcccacaguuaa

SEQ ID NO: 2330592 - RNA, 19 nt, Artificial Sequence
  Description of Artificial Sequence: Synthetic oligonucleotide
  Sense strand starting at position 1688 of SEQ ID NO: 1885286
gugggcuauacauagugau

SEQ ID NO: 2330593 - RNA, 19 nt, Artificial Sequence
  Description of Artificial Sequence: Synthetic oligonucleotide
  Antisense strand to SEQ ID NO: 2330592
aucacuauguauagcccac

SEQ ID NO: 2330594 - RNA, 19 nt, Artificial Sequence
  Description of Artificial Sequence: Synthetic oligonucleotide
  Sense strand starting at position 1742 of SEQ ID NO: 1885286
agaguaaauuuacagugaa

SEQ ID NO: 2330595 - RNA, 19 nt, Artificial Sequence
  Description of Artificial Sequence: Synthetic oligonucleotide
  Antisense strand to SEQ ID NO: 2330594
uucacuguaaauuuacucu

SEQ ID NO: 2330596 - RNA, 19 nt, Artificial Sequence
  Description of Artificial Sequence: Synthetic oligonucleotide
  Sense strand starting at position 1799 of SEQ ID NO: 1885286
uuagcaucaucagugauaa

SEQ ID NO: 2330597 - RNA, 19 nt, Artificial Sequence
  Description of Artificial Sequence: Synthetic oligonucleotide
  Antisense strand to SEQ ID NO: 2330596
uuaucacugaugaugcuaa

SEQ ID NO: 2330598 - RNA, 19 nt, Artificial Sequence
  Description of Artificial Sequence: Synthetic oligonucleotide
  Sense strand starting at position 1832 of SEQ ID NO: 1885286
gucuacccucgauaugaug

SEQ ID NO: 2330599 - RNA, 19 nt, Artificial Sequence
  Description of Artificial Sequence: Synthetic oligonucleotide
  Antisense strand to SEQ ID NO: 2330598
caucauaucgaggguagac

SEQ ID NO: 2330600 - RNA, 19 nt, Artificial Sequence
  Description of Artificial Sequence: Synthetic oligonucleotide
  Sense strand starting at position 1854 of SEQ ID NO: 1885286
ugagaauuguacuuuaucu

SEQ ID NO: 2330601 - RNA, 19 nt, Artificial Sequence
  Description of Artificial Sequence: Synthetic oligonucleotide
  Antisense strand to SEQ ID NO: 2330600
agauaaaguacaauucuca

SEQ ID NO: 2330602 - RNA, 19 nt, Artificial Sequence
  Description of Artificial Sequence: Synthetic oligonucleotide
  Sense strand starting at position 2056 of SEQ ID NO: 1885286
cgugguauccuggaucaaa

SEQ ID NO: 2330603 - RNA, 19 nt, Artificial Sequence
  Description of Artificial Sequence: Synthetic oligonucleotide
  Antisense strand to SEQ ID NO: 2330602
uuugauccaggauaccacg

SEQ ID NO: 2330604 - RNA, 19 nt, Artificial Sequence
  Description of Artificial Sequence: Synthetic oligonucleotide
  Sense strand starting at position 2097 of SEQ ID NO: 1885286
guaucaauauggguuuaua

SEQ ID NO: 2330605 - RNA, 19 nt, Artificial Sequence
  Description of Artificial Sequence: Synthetic oligonucleotide
  Antisense strand to SEQ ID NO: 2330604
uauaaacccauauugauac

SEQ ID NO: 2330606 - RNA, 19 nt, Artificial Sequence
  Description of Artificial Sequence: Synthetic oligonucleotide
  Sense strand starting at position 2641 of SEQ ID NO: 1885286
guuagaaauuuggagaaau

SEQ ID NO: 2330607 - RNA, 19 nt, Artificial Sequence
  Description of Artificial Sequence: Synthetic oligonucleotide
  Antisense strand to SEQ ID NO: 2330606
auuucuccaaauuucuaac

SEQ ID NO: 2330608 - RNA, 19 nt, Artificial Sequence
  Description of Artificial Sequence: Synthetic oligonucleotide
  Sense strand starting at position 2721 of SEQ ID NO: 1885286
uuagcauagggccauugau

SEQ ID NO: 2330609 - RNA, 19 nt, Artificial Sequence
  Description of Artificial Sequence: Synthetic oligonucleotide
  Antisense strand to SEQ ID NO: 2330608
aucaauggcccuaugcuaa

SEQ ID NO: 2330610 - RNA, 19 nt, Artificial Sequence
  Description of Artificial Sequence: Synthetic oligonucleotide
  Sense strand starting at position 2941 of SEQ ID NO: 1885286
gaguaaugugcuuaaccuc

SEQ ID NO: 2330611 - RNA, 19 nt, Artificial Sequence
  Description of Artificial Sequence: Synthetic oligonucleotide
  Antisense strand to SEQ ID NO: 2330610
gagguuaagcacauuacuc

SEQ ID NO: 2330612 - RNA, 19 nt, Artificial Sequence
  Description of Artificial Sequence: Synthetic oligonucleotide
  Sense strand starting at position 3285 of SEQ ID NO: 1885286
gguuauuuguguucuacca

SEQ ID NO: 2330613 - RNA, 19 nt, Artificial Sequence
  Description of Artificial Sequence: Synthetic oligonucleotide
  Antisense strand to SEQ ID NO: 2330612
ugguagaacacaaauaacc

SEQ ID NO: 2330614 - RNA, 19 nt, Artificial Sequence
  Description of Artificial Sequence: Synthetic oligonucleotide
  Sense strand starting at position 3467 of SEQ ID NO: 1885286
guuauuacagacuaugucu

SEQ ID NO: 2330615 - RNA, 19 nt, Artificial Sequence
  Description of Artificial Sequence: Synthetic oligonucleotide
  Antisense strand to SEQ ID NO: 2330614
agacauagucuguaauaac

SEQ ID NO: 2330616 - RNA, 19 nt, Artificial Sequence
  Description of Artificial Sequence: Synthetic oligonucleotide
  Sense strand starting at position 3641 of SEQ ID NO: 1885286
gcacaugcaugacuauuaa

SEQ ID NO: 2330617 - RNA, 19 nt, Artificial Sequence
  Description of Artificial Sequence: Synthetic oligonucleotide
  Antisense strand to SEQ ID NO: 2330616
uuaauagucaugcaugugc

SEQ ID NO: 2330618 - RNA, 19 nt, Artificial Sequence
  Description of Artificial Sequence: Synthetic oligonucleotide
  Sense strand starting at position 3785 of SEQ ID NO: 1885286
cuaaauguagcuuaaauga

SEQ ID NO: 2330619 - RNA, 19 nt, Artificial Sequence
  Description of Artificial Sequence: Synthetic oligonucleotide
  Antisense strand to SEQ ID NO: 2330618
ucauuuaagcuacauuuag

SEQ ID NO: 2330620 - RNA, 19 nt, Artificial Sequence
  Description of Artificial Sequence: Synthetic oligonucleotide
  Sense strand starting at position 3845 of SEQ ID NO: 1885286
uggcuaaagcaacaucauu

SEQ ID NO: 2330621 - RNA, 19 nt, Artificial Sequence
  Description of Artificial Sequence: Synthetic oligonucleotide
  Antisense strand to SEQ ID NO: 2330620
aaugauguugcuuuagcca

SEQ ID NO: 2330622 - RNA, 19 nt, Artificial Sequence
  Description of Artificial Sequence: Synthetic oligonucleotide
  Sense strand starting at position 3866 of SEQ ID NO: 1885286
ccaguacacuauccgaaau

SEQ ID NO: 2330623 - RNA, 19 nt, Artificial Sequence
  Description of Artificial Sequence: Synthetic oligonucleotide
  Antisense strand to SEQ ID NO: 2330622
auuucggauaguguacugg

SEQ ID NO: 2330624 - RNA, 19 nt, Artificial Sequence
  Description of Artificial Sequence: Synthetic oligonucleotide
  Sense strand starting at position 219 of SEQ ID NO: 1885287
uacaguauugagggcuaga

SEQ ID NO: 2330625 - RNA, 19 nt, Artificial Sequence
  Description of Artificial Sequence: Synthetic oligonucleotide
  Antisense strand to SEQ ID NO: 2330624
ucuagcccucaauacugua

SEQ ID NO: 2330626 - RNA, 19 nt, Artificial Sequence
  Description of Artificial Sequence: Synthetic oligonucleotide
  Sense strand starting at position 323 of SEQ ID NO: 1885287
gcguaaguugcauccauug

SEQ ID NO: 2330627 - RNA, 19 nt, Artificial Sequence
  Description of Artificial Sequence: Synthetic oligonucleotide
  Antisense strand to SEQ ID NO: 2330626
caauggaugcaacuuacgc

SEQ ID NO: 2330628 - RNA, 19 nt, Artificial Sequence
  Description of Artificial Sequence: Synthetic oligonucleotide
  Sense strand starting at position 375 of SEQ ID NO: 1885287
auguauguguucuuggaaa

SEQ ID NO: 2330629 - RNA, 19 nt, Artificial Sequence
  Description of Artificial Sequence: Synthetic oligonucleotide
  Antisense strand to SEQ ID NO: 2330628
uuuccaagaacacauacau

SEQ ID NO: 2330630 - RNA, 19 nt, Artificial Sequence
  Description of Artificial Sequence: Synthetic oligonucleotide
  Sense strand starting at position 600 of SEQ ID NO: 1885287
ugacacugagaaugguuua

SEQ ID NO: 2330631 - RNA, 19 nt, Artificial Sequence
  Description of Artificial Sequence: Synthetic oligonucleotide
  Antisense strand to SEQ ID NO: 2330630
uaaaccauucucaguguca

SEQ ID NO: 2330632 - RNA, 19 nt, Artificial Sequence
  Description of Artificial Sequence: Synthetic oligonucleotide
  Sense strand starting at position 603 of SEQ ID NO: 1885287
cacugagaaugguuuaaau

SEQ ID NO: 2330633 - RNA, 19 nt, Artificial Sequence
  Description of Artificial Sequence: Synthetic oligonucleotide
  Antisense strand to SEQ ID NO: 2330632
auuuaaaccauucucagug

SEQ ID NO: 2330634 - RNA, 19 nt, Artificial Sequence
  Description of Artificial Sequence: Synthetic oligonucleotide
  Sense strand starting at position 660 of SEQ ID NO: 1885287
guguuuaacuaucugagac

SEQ ID NO: 2330635 - RNA, 19 nt, Artificial Sequence
  Description of Artificial Sequence: Synthetic oligonucleotide
  Antisense strand to SEQ ID NO: 2330634
gucucagauaguuaaacac

SEQ ID NO: 2330636 - RNA, 19 nt, Artificial Sequence
  Description of Artificial Sequence: Synthetic oligonucleotide
  Sense strand starting at position 694 of SEQ ID NO: 1885287
ugagacaguauguggaaua

SEQ ID NO: 2330637 - RNA, 19 nt, Artificial Sequence
  Description of Artificial Sequence: Synthetic oligonucleotide
  Antisense strand to SEQ ID NO: 2330636
uauuccacauacugucuca

SEQ ID NO: 2330638 - RNA, 19 nt, Artificial Sequence
  Description of Artificial Sequence: Synthetic oligonucleotide
  Sense strand starting at position 718 of SEQ ID NO: 1885287
ugaucagcacagggaaauu

SEQ ID NO: 2330639 - RNA, 19 nt, Artificial Sequence
  Description of Artificial Sequence: Synthetic oligonucleotide
  Antisense strand to SEQ ID NO: 2330638
aauuucccugugcugauca

SEQ ID NO: 2330640 - RNA, 19 nt, Artificial Sequence
  Description of Artificial Sequence: Synthetic oligonucleotide
  Sense strand starting at position 792 of SEQ ID NO: 1885287
guggcucaacaugaauaau

SEQ ID NO: 2330641 - RNA, 19 nt, Artificial Sequence
  Description of Artificial Sequence: Synthetic oligonucleotide
  Antisense strand to SEQ ID NO: 2330640
auuauucauguugagccac

SEQ ID NO: 2330642 - RNA, 19 nt, Artificial Sequence
  Description of Artificial Sequence: Synthetic oligonucleotide
  Sense strand starting at position 1346 of SEQ ID NO: 1885287
auaguugaagcugggaauu

SEQ ID NO: 2330643 - RNA, 19 nt, Artificial Sequence
  Description of Artificial Sequence: Synthetic oligonucleotide
  Antisense strand to SEQ ID NO: 2330642
aauucccagcuucaacuau

SEQ ID NO: 2330644 - RNA, 19 nt, Artificial Sequence
  Description of Artificial Sequence: Synthetic oligonucleotide
  Sense strand starting at position 1374 of SEQ ID NO: 1885287
cuuaguagucuuugaacca

SEQ ID NO: 2330645 - RNA, 19 nt, Artificial Sequence
  Description of Artificial Sequence: Synthetic oligonucleotide
  Antisense strand to SEQ ID NO: 2330644
ugguucaaagacuacuaag

SEQ ID NO: 2330646 - RNA, 19 nt, Artificial Sequence
  Description of Artificial Sequence: Synthetic oligonucleotide
  Sense strand starting at position 1393 of SEQ ID NO: 1885287
cuugaaucacuuuggugaa

SEQ ID NO: 2330647 - RNA, 19 nt, Artificial Sequence
  Description of Artificial Sequence: Synthetic oligonucleotide
  Antisense strand to SEQ ID NO: 2330646
uucaccaaagugauucaag

SEQ ID NO: 2330648 - RNA, 19 nt, Artificial Sequence
  Description of Artificial Sequence: Synthetic oligonucleotide
  Sense strand starting at position 1779 of SEQ ID NO: 1885287
uuugcuauuugacaugaaa

SEQ ID NO: 2330649 - RNA, 19 nt, Artificial Sequence
  Description of Artificial Sequence: Synthetic oligonucleotide
  Antisense strand to SEQ ID NO: 2330648
uuucaugucaaauagcaaa

SEQ ID NO: 2330650 - RNA, 19 nt, Artificial Sequence
  Description of Artificial Sequence: Synthetic oligonucleotide
  Sense strand starting at position 1988 of SEQ ID NO: 1885287
ccugcugacauguaagagu

SEQ ID NO: 2330651 - RNA, 19 nt, Artificial Sequence
  Description of Artificial Sequence: Synthetic oligonucleotide
  Antisense strand to SEQ ID NO: 2330650
acucuuacaugucagcagg

SEQ ID NO: 2330652 - RNA, 19 nt, Artificial Sequence
  Description of Artificial Sequence: Synthetic oligonucleotide
  Sense strand starting at position 2001 of SEQ ID NO: 1885287
aagaguacaucaccagguu

SEQ ID NO: 2330653 - RNA, 19 nt, Artificial Sequence
  Description of Artificial Sequence: Synthetic oligonucleotide
  Antisense strand to SEQ ID NO: 2330652
aaccuggugauguacucuu

SEQ ID NO: 2330654 - RNA, 19 nt, Artificial Sequence
  Description of Artificial Sequence: Synthetic oligonucleotide
  Sense strand starting at position 2013 of SEQ ID NO: 1885287
ccagguucccuugaacuau

SEQ ID NO: 2330655 - RNA, 19 nt, Artificial Sequence
  Description of Artificial Sequence: Synthetic oligonucleotide
  Antisense strand to SEQ ID NO: 2330654
auaguucaagggaaccugg

SEQ ID NO: 2330656 - RNA, 19 nt, Artificial Sequence
  Description of Artificial Sequence: Synthetic oligonucleotide
  Sense strand starting at position 2024 of SEQ ID NO: 1885287
ugaacuaugcccugacucu

SEQ ID NO: 2330657 - RNA, 19 nt, Artificial Sequence
  Description of Artificial Sequence: Synthetic oligonucleotide
  Antisense strand to SEQ ID NO: 2330656
agagucagggcauaguuca

SEQ ID NO: 2330658 - RNA, 19 nt, Artificial Sequence
  Description of Artificial Sequence: Synthetic oligonucleotide
  Sense strand starting at position 2299 of SEQ ID NO: 1885287
auagauucuugucuuaaag

SEQ ID NO: 2330659 - RNA, 19 nt, Artificial Sequence
  Description of Artificial Sequence: Synthetic oligonucleotide
  Antisense strand to SEQ ID NO: 2330658
cuuuaagacaagaaucuau

SEQ ID NO: 2330660 - RNA, 19 nt, Artificial Sequence
  Description of Artificial Sequence: Synthetic oligonucleotide
  Sense strand starting at position 2338 of SEQ ID NO: 1885287
uugcauagagcaugaacaa

SEQ ID NO: 2330661 - RNA, 19 nt, Artificial Sequence
  Description of Artificial Sequence: Synthetic oligonucleotide
  Antisense strand to SEQ ID NO: 2330660
uuguucaugcucuaugcaa

SEQ ID NO: 2330662 - RNA, 19 nt, Artificial Sequence
  Description of Artificial Sequence: Synthetic oligonucleotide
  Sense strand starting at position 2339 of SEQ ID NO: 1885287
ugcauagagcaugaacaau

SEQ ID NO: 2330663 - RNA, 19 nt, Artificial Sequence
  Description of Artificial Sequence: Synthetic oligonucleotide
  Antisense strand to SEQ ID NO: 2330662
auuguucaugcucuaugca

SEQ ID NO: 2330664 - RNA, 19 nt, Artificial Sequence
  Description of Artificial Sequence: Synthetic oligonucleotide
  Sense strand starting at position 2350 of SEQ ID NO: 1885287
ugaacaauuucugaccaga

SEQ ID NO: 2330665 - RNA, 19 nt, Artificial Sequence
  Description of Artificial Sequence: Synthetic oligonucleotide
  Antisense strand to SEQ ID NO: 2330664
ucuggucagaaauuguuca

SEQ ID NO: 2330666 - RNA, 19 nt, Artificial Sequence
  Description of Artificial Sequence: Synthetic oligonucleotide
  Sense strand starting at position 2406 of SEQ ID NO: 1885287
auguauaagguaugaauga

SEQ ID NO: 2330667 - RNA, 19 nt, Artificial Sequence
  Description of Artificial Sequence: Synthetic oligonucleotide
  Antisense strand to SEQ ID NO: 2330666
ucauucauaccuuauacau

SEQ ID NO: 2330668 - RNA, 19 nt, Artificial Sequence
  Description of Artificial Sequence: Synthetic oligonucleotide
  Sense strand starting at position 2453 of SEQ ID NO: 1885287
ggaagauuacggugguaga

SEQ ID NO: 2330669 - RNA, 19 nt, Artificial Sequence
  Description of Artificial Sequence: Synthetic oligonucleotide
  Antisense strand to SEQ ID NO: 2330668
ucuaccaccguaaucuucc

SEQ ID NO: 2330670 - RNA, 19 nt, Artificial Sequence
  Description of Artificial Sequence: Synthetic oligonucleotide
  Sense strand starting at position 2454 of SEQ ID NO: 1885287
gaagauuacggugguagaa

SEQ ID NO: 2330671 - RNA, 19 nt, Artificial Sequence
  Description of Artificial Sequence: Synthetic oligonucleotide
  Antisense strand to SEQ ID NO: 2330670
uucuaccaccguaaucuuc

SEQ ID NO: 2330672 - RNA, 19 nt, Artificial Sequence
  Description of Artificial Sequence: Synthetic oligonucleotide
  Sense strand starting at position 2467 of SEQ ID NO: 1885287
guagaauuaagguggugaa

SEQ ID NO: 2330673 - RNA, 19 nt, Artificial Sequence
  Description of Artificial Sequence: Synthetic oligonucleotide
  Antisense strand to SEQ ID NO: 2330672
uucaccaccuuaauucuac

SEQ ID NO: 2330674 - RNA, 19 nt, Artificial Sequence
  Description of Artificial Sequence: Synthetic oligonucleotide
  Sense strand starting at position 2539 of SEQ ID NO: 1885287
uuaguaaugacuugguuag

SEQ ID NO: 2330675 - RNA, 19 nt, Artificial Sequence
  Description of Artificial Sequence: Synthetic oligonucleotide
  Antisense strand to SEQ ID NO: 2330674
cuaaccaagucauuacuaa

SEQ ID NO: 2330676 - RNA, 19 nt, Artificial Sequence
  Description of Artificial Sequence: Synthetic oligonucleotide
  Sense strand starting at position 2621 of SEQ ID NO: 1885287
gauggugccagucacagau

SEQ ID NO: 2330677 - RNA, 19 nt, Artificial Sequence
  Description of Artificial Sequence: Synthetic oligonucleotide
  Antisense strand to SEQ ID NO: 2330676
aucugugacuggcaccauc

SEQ ID NO: 2330678 - RNA, 19 nt, Artificial Sequence
  Description of Artificial Sequence: Synthetic oligonucleotide
  Sense strand starting at position 2625 of SEQ ID NO: 1885287
gugccagucacagauaaag

SEQ ID NO: 2330679 - RNA, 19 nt, Artificial Sequence
  Description of Artificial Sequence: Synthetic oligonucleotide
  Antisense strand to SEQ ID NO: 2330678
cuuuaucugugacuggcac

SEQ ID NO: 2330680 - RNA, 19 nt, Artificial Sequence
  Description of Artificial Sequence: Synthetic oligonucleotide
  Sense strand starting at position 2658 of SEQ ID NO: 1885287
ggaccaaguuugagggaga

SEQ ID NO: 2330681 - RNA, 19 nt, Artificial Sequence
  Description of Artificial Sequence: Synthetic oligonucleotide
  Antisense strand to SEQ ID NO: 2330680
ucucccucaaacuuggucc

SEQ ID NO: 2330682 - RNA, 19 nt, Artificial Sequence
  Description of Artificial Sequence: Synthetic oligonucleotide
  Sense strand starting at position 2732 of SEQ ID NO: 1885287
agaagucauuuggauauac

SEQ ID NO: 2330683 - RNA, 19 nt, Artificial Sequence
  Description of Artificial Sequence: Synthetic oligonucleotide
  Antisense strand to SEQ ID NO: 2330682
guauauccaaaugacuucu

SEQ ID NO: 2330684 - RNA, 19 nt, Artificial Sequence
  Description of Artificial Sequence: Synthetic oligonucleotide
  Sense strand starting at position 2771 of SEQ ID NO: 1885287
agaagaaugggcugaguug

SEQ ID NO: 2330685 - RNA, 19 nt, Artificial Sequence
  Description of Artificial Sequence: Synthetic oligonucleotide
  Antisense strand to SEQ ID NO: 2330684
caacucagcccauucuucu

SEQ ID NO: 2330686 - RNA, 19 nt, Artificial Sequence
  Description of Artificial Sequence: Synthetic oligonucleotide
  Sense strand starting at position 2825 of SEQ ID NO: 1885287
gugugaucggccaggcaug

SEQ ID NO: 2330687 - RNA, 19 nt, Artificial Sequence
  Description of Artificial Sequence: Synthetic oligonucleotide
  Antisense strand to SEQ ID NO: 2330686
caugccuggccgaucacac

SEQ ID NO: 2330688 - RNA, 19 nt, Artificial Sequence
  Description of Artificial Sequence: Synthetic oligonucleotide
  Sense strand starting at position 3330 of SEQ ID NO: 1885287
gggauaaucuauucucuug

SEQ ID NO: 2330689 - RNA, 19 nt, Artificial Sequence
  Description of Artificial Sequence: Synthetic oligonucleotide
  Antisense strand to SEQ ID NO: 2330688
caagagaauagauuauccc

SEQ ID NO: 2330690 - RNA, 19 nt, Artificial Sequence
  Description of Artificial Sequence: Synthetic oligonucleotide
  Sense strand starting at position 3545 of SEQ ID NO: 1885287
aaggaucuuugugcuuaca

SEQ ID NO: 2330691 - RNA, 19 nt, Artificial Sequence
  Description of Artificial Sequence: Synthetic oligonucleotide
  Antisense strand to SEQ ID NO: 2330690
uguaagcacaaagauccuu

SEQ ID NO: 2330692 - RNA, 19 nt, Artificial Sequence
  Description of Artificial Sequence: Synthetic oligonucleotide
  Sense strand starting at position 3599 of SEQ ID NO: 1885287
aucugaagacccugaaugu

SEQ ID NO: 2330693 - RNA, 19 nt, Artificial Sequence
  Description of Artificial Sequence: Synthetic oligonucleotide
  Antisense strand to SEQ ID NO: 2330692
acauucagggucuucagau

SEQ ID NO: 2330694 - RNA, 19 nt, Artificial Sequence
  Description of Artificial Sequence: Synthetic oligonucleotide
  Sense strand starting at position 3731 of SEQ ID NO: 1885287
gggacacgacucuguaaau

SEQ ID NO: 2330695 - RNA, 19 nt, Artificial Sequence
  Description of Artificial Sequence: Synthetic oligonucleotide
  Antisense strand to SEQ ID NO: 2330694
auuuacagagucguguccc

SEQ ID NO: 2330696 - RNA, 19 nt, Artificial Sequence
  Description of Artificial Sequence: Synthetic oligonucleotide
  Sense strand starting at position 3732 of SEQ ID NO: 1885287
ggacacgacucuguaaaug

SEQ ID NO: 2330697 - RNA, 19 nt, Artificial Sequence
  Description of Artificial Sequence: Synthetic oligonucleotide
  Antisense strand to SEQ ID NO: 2330696
cauuuacagagucgugucc

SEQ ID NO: 2330698 - RNA, 19 nt, Artificial Sequence
  Description of Artificial Sequence: Synthetic oligonucleotide
  Sense strand starting at position 3741 of SEQ ID NO: 1885287
ucuguaaaugcuuauugaa

SEQ ID NO: 2330699 - RNA, 19 nt, Artificial Sequence
  Description of Artificial Sequence: Synthetic oligonucleotide
  Antisense strand to SEQ ID NO: 2330698
uucaauaagcauuuacaga

SEQ ID NO: 2330700 - RNA, 19 nt, Artificial Sequence
  Description of Artificial Sequence: Synthetic oligonucleotide
  Sense strand starting at position 3871 of SEQ ID NO: 1885287
ugaugaaauguauaguagu

SEQ ID NO: 2330701 - RNA, 19 nt, Artificial Sequence
  Description of Artificial Sequence: Synthetic oligonucleotide
  Antisense strand to SEQ ID NO: 2330700
acuacuauacauuucauca

SEQ ID NO: 2330702 - RNA, 19 nt, Artificial Sequence
  Description of Artificial Sequence: Synthetic oligonucleotide
  Sense strand starting at position 3881 of SEQ ID NO: 1885287
uauaguagugcugaaacca

SEQ ID NO: 2330703 - RNA, 19 nt, Artificial Sequence
  Description of Artificial Sequence: Synthetic oligonucleotide
  Antisense strand to SEQ ID NO: 2330702
ugguuucagcacuacuaua

SEQ ID NO: 2330704 - RNA, 19 nt, Artificial Sequence
  Description of Artificial Sequence: Synthetic oligonucleotide
  Sense strand starting at position 100 of SEQ ID NO: 1885288
uuaguaauaugccucauga

SEQ ID NO: 2330705 - RNA, 19 nt, Artificial Sequence
  Description of Artificial Sequence: Synthetic oligonucleotide
  Antisense strand to SEQ ID NO: 2330704
ucaugaggcauauuacuaa

SEQ ID NO: 2330706 - RNA, 19 nt, Artificial Sequence
  Description of Artificial Sequence: Synthetic oligonucleotide
  Sense strand starting at position 102 of SEQ ID NO: 1885288
aguaauaugccucaugauu

SEQ ID NO: 2330707 - RNA, 19 nt, Artificial Sequence
  Description of Artificial Sequence: Synthetic oligonucleotide
  Antisense strand to SEQ ID NO: 2330706
aaucaugaggcauauuacu

SEQ ID NO: 2330708 - RNA, 19 nt, Artificial Sequence
  Description of Artificial Sequence: Synthetic oligonucleotide
  Sense strand starting at position 222 of SEQ ID NO: 1885288
aggguuaaccagcaucuca

SEQ ID NO: 2330709 - RNA, 19 nt, Artificial Sequence
  Description of Artificial Sequence: Synthetic oligonucleotide
  Antisense strand to SEQ ID NO: 2330708
ugagaugcugguuaacccu

SEQ ID NO: 2330710 - RNA, 19 nt, Artificial Sequence
  Description of Artificial Sequence: Synthetic oligonucleotide
  Sense strand starting at position 247 of SEQ ID NO: 1885288
ugguuagucuaauuugguu

SEQ ID NO: 2330711 - RNA, 19 nt, Artificial Sequence
  Description of Artificial Sequence: Synthetic oligonucleotide
  Antisense strand to SEQ ID NO: 2330710
aaccaaauuagacuaacca

SEQ ID NO: 2330712 - RNA, 19 nt, Artificial Sequence
  Description of Artificial Sequence: Synthetic oligonucleotide
  Sense strand starting at position 358 of SEQ ID NO: 1885288
ugagcugguauccaugcaa

SEQ ID NO: 2330713 - RNA, 19 nt, Artificial Sequence
  Description of Artificial Sequence: Synthetic oligonucleotide
  Antisense strand to SEQ ID NO: 2330712
uugcauggauaccagcuca

SEQ ID NO: 2330714 - RNA, 19 nt, Artificial Sequence
  Description of Artificial Sequence: Synthetic oligonucleotide
  Sense strand starting at position 506 of SEQ ID NO: 1885288
caggaacucuuguuugauu

SEQ ID NO: 2330715 - RNA, 19 nt, Artificial Sequence
  Description of Artificial Sequence: Synthetic oligonucleotide
  Antisense strand to SEQ ID NO: 2330714
aaucaaacaagaguuccug

SEQ ID NO: 2330716 - RNA, 19 nt, Artificial Sequence
  Description of Artificial Sequence: Synthetic oligonucleotide
  Sense strand starting at position 534 of SEQ ID NO: 1885288
cucugaggucccugaaaca

SEQ ID NO: 2330717 - RNA, 19 nt, Artificial Sequence
  Description of Artificial Sequence: Synthetic oligonucleotide
  Antisense strand to SEQ ID NO: 2330716
uguuucagggaccucagag

SEQ ID NO: 2330718 - RNA, 19 nt, Artificial Sequence
  Description of Artificial Sequence: Synthetic oligonucleotide
  Sense strand starting at position 552 of SEQ ID NO: 1885288
agaguaguuccucaaauca

SEQ ID NO: 2330719 - RNA, 19 nt, Artificial Sequence
  Description of Artificial Sequence: Synthetic oligonucleotide
  Antisense strand to SEQ ID NO: 2330718
ugauuugaggaacuacucu

SEQ ID NO: 2330720 - RNA, 19 nt, Artificial Sequence
  Description of Artificial Sequence: Synthetic oligonucleotide
  Sense strand starting at position 577 of SEQ ID NO: 1885288
cggaauuaaucacuuuauu

SEQ ID NO: 2330721 - RNA, 19 nt, Artificial Sequence
  Description of Artificial Sequence: Synthetic oligonucleotide
  Antisense strand to SEQ ID NO: 2330720
aauaaagugauuaauuccg

SEQ ID NO: 2330722 - RNA, 19 nt, Artificial Sequence
  Description of Artificial Sequence: Synthetic oligonucleotide
  Sense strand starting at position 758 of SEQ ID NO: 1885288
gcaacuauuuagucuuugu

SEQ ID NO: 2330723 - RNA, 19 nt, Artificial Sequence
  Description of Artificial Sequence: Synthetic oligonucleotide
  Antisense strand to SEQ ID NO: 2330722
acaaagacuaaauaguugc

SEQ ID NO: 2330724 - RNA, 19 nt, Artificial Sequence
  Description of Artificial Sequence: Synthetic oligonucleotide
  Sense strand starting at position 769 of SEQ ID NO: 1885288
gucuuuguccuccaaauua

SEQ ID NO: 2330725 - RNA, 19 nt, Artificial Sequence
  Description of Artificial Sequence: Synthetic oligonucleotide
  Antisense strand to SEQ ID NO: 2330724
uaauuuggaggacaaagac

SEQ ID NO: 2330726 - RNA, 19 nt, Artificial Sequence
  Description of Artificial Sequence: Synthetic oligonucleotide
  Sense strand starting at position 794 of SEQ ID NO: 1885288
gaucuuugcuauuuauggu

SEQ ID NO: 2330727 - RNA, 19 nt, Artificial Sequence
  Description of Artificial Sequence: Synthetic oligonucleotide
  Antisense strand to SEQ ID NO: 2330726
accauaaauagcaaagauc

SEQ ID NO: 2330728 - RNA, 19 nt, Artificial Sequence
  Description of Artificial Sequence: Synthetic oligonucleotide
  Sense strand starting at position 1236 of SEQ ID NO: 1885288
aaggcacucguuuagagaa

SEQ ID NO: 2330729 - RNA, 19 nt, Artificial Sequence
  Description of Artificial Sequence: Synthetic oligonucleotide
  Antisense strand to SEQ ID NO: 2330728
uucucuaaacgagugccuu

SEQ ID NO: 2330730 - RNA, 19 nt, Artificial Sequence
  Description of Artificial Sequence: Synthetic oligonucleotide
  Sense strand starting at position 1243 of SEQ ID NO: 1885288
ucguuuagagaauauacau

SEQ ID NO: 2330731 - RNA, 19 nt, Artificial Sequence
  Description of Artificial Sequence: Synthetic oligonucleotide
  Antisense strand to SEQ ID NO: 2330730
auguauauucucuaaacga

SEQ ID NO: 2330732 - RNA, 19 nt, Artificial Sequence
  Description of Artificial Sequence: Synthetic oligonucleotide
  Sense strand starting at position 1266 of SEQ ID NO: 1885288
auaugcaugagacaacgua

SEQ ID NO: 2330733 - RNA, 19 nt, Artificial Sequence
  Description of Artificial Sequence: Synthetic oligonucleotide
  Antisense strand to SEQ ID NO: 2330732
uacguugucucaugcauau

SEQ ID NO: 2330734 - RNA, 19 nt, Artificial Sequence
  Description of Artificial Sequence: Synthetic oligonucleotide
  Sense strand starting at position 1535 of SEQ ID NO: 1885288
uggauuugguuugaaauug

SEQ ID NO: 2330735 - RNA, 19 nt, Artificial Sequence
  Description of Artificial Sequence: Synthetic oligonucleotide
  Antisense strand to SEQ ID NO: 2330734
caauuucaaaccaaaucca

SEQ ID NO: 2330736 - RNA, 19 nt, Artificial Sequence
  Description of Artificial Sequence: Synthetic oligonucleotide
  Sense strand starting at position 1579 of SEQ ID NO: 1885288
cagugaucacuggguguaa

SEQ ID NO: 2330737 - RNA, 19 nt, Artificial Sequence
  Description of Artificial Sequence: Synthetic oligonucleotide
  Antisense strand to SEQ ID NO: 2330736
uuacacccagugaucacug

SEQ ID NO: 2330738 - RNA, 19 nt, Artificial Sequence
  Description of Artificial Sequence: Synthetic oligonucleotide
  Sense strand starting at position 1580 of SEQ ID NO: 1885288
agugaucacuggguguaau

SEQ ID NO: 2330739 - RNA, 19 nt, Artificial Sequence
  Description of Artificial Sequence: Synthetic oligonucleotide
  Antisense strand to SEQ ID NO: 2330738
auuacacccagugaucacu

SEQ ID NO: 2330740 - RNA, 19 nt, Artificial Sequence
  Description of Artificial Sequence: Synthetic oligonucleotide
  Sense strand starting at position 1581 of SEQ ID NO: 1885288
gugaucacuggguguaaua

SEQ ID NO: 2330741 - RNA, 19 nt, Artificial Sequence
  Description of Artificial Sequence: Synthetic oligonucleotide
  Antisense strand to SEQ ID NO: 2330740
uauuacacccagugaucac

SEQ ID NO: 2330742 - RNA, 19 nt, Artificial Sequence
  Description of Artificial Sequence: Synthetic oligonucleotide
  Sense strand starting at position 1588 of SEQ ID NO: 1885288
cuggguguaauauaugcua

SEQ ID NO: 2330743 - RNA, 19 nt, Artificial Sequence
  Description of Artificial Sequence: Synthetic oligonucleotide
  Antisense strand to SEQ ID NO: 2330742
uagcauauauuacacccag

SEQ ID NO: 2330744 - RNA, 19 nt, Artificial Sequence
  Description of Artificial Sequence: Synthetic oligonucleotide
  Sense strand starting at position 1646 of SEQ ID NO: 1885288
ugcucucagccugaaggaa

SEQ ID NO: 2330745 - RNA, 19 nt, Artificial Sequence
  Description of Artificial Sequence: Synthetic oligonucleotide
  Antisense strand to SEQ ID NO: 2330744
uuccuucaggcugagagca

SEQ ID NO: 2330746 - RNA, 19 nt, Artificial Sequence
  Description of Artificial Sequence: Synthetic oligonucleotide
  Sense strand starting at position 1706 of SEQ ID NO: 1885288
agaauaucucacugcugua

SEQ ID NO: 2330747 - RNA, 19 nt, Artificial Sequence
  Description of Artificial Sequence: Synthetic oligonucleotide
  Antisense strand to SEQ ID NO: 2330746
uacagcagugagauauucu

SEQ ID NO: 2330748 - RNA, 19 nt, Artificial Sequence
  Description of Artificial Sequence: Synthetic oligonucleotide
  Sense strand starting at position 1719 of SEQ ID NO: 1885288
gcuguagugauccagaaac

SEQ ID NO: 2330749 - RNA, 19 nt, Artificial Sequence
  Description of Artificial Sequence: Synthetic oligonucleotide
  Antisense strand to SEQ ID NO: 2330748
guuucuggaucacuacagc

SEQ ID NO: 2330750 - RNA, 19 nt, Artificial Sequence
  Description of Artificial Sequence: Synthetic oligonucleotide
  Sense strand starting at position 1796 of SEQ ID NO: 1885288
uuaugaaggcuuugaccca

SEQ ID NO: 2330751 - RNA, 19 nt, Artificial Sequence
  Description of Artificial Sequence: Synthetic oligonucleotide
  Antisense strand to SEQ ID NO: 2330750
ugggucaaagccuucauaa

SEQ ID NO: 2330752 - RNA, 19 nt, Artificial Sequence
  Description of Artificial Sequence: Synthetic oligonucleotide
  Sense strand starting at position 1803 of SEQ ID NO: 1885288
ggcuuugacccagagccau

SEQ ID NO: 2330753 - RNA, 19 nt, Artificial Sequence
  Description of Artificial Sequence: Synthetic oligonucleotide
  Antisense strand to SEQ ID NO: 2330752
auggcucugggucaaagcc

SEQ ID NO: 2330754 - RNA, 19 nt, Artificial Sequence
  Description of Artificial Sequence: Synthetic oligonucleotide
  Sense strand starting at position 1911 of SEQ ID NO: 1885288
auaacucacguaugggaaa

SEQ ID NO: 2330755 - RNA, 19 nt, Artificial Sequence
  Description of Artificial Sequence: Synthetic oligonucleotide
  Antisense strand to SEQ ID NO: 2330754
uuucccauacgugaguuau

SEQ ID NO: 2330756 - RNA, 19 nt, Artificial Sequence
  Description of Artificial Sequence: Synthetic oligonucleotide
  Sense strand starting at position 1922 of SEQ ID NO: 1885288
augggaaagucgcuuaaug

SEQ ID NO: 2330757 - RNA, 19 nt, Artificial Sequence
  Description of Artificial Sequence: Synthetic oligonucleotide
  Antisense strand to SEQ ID NO: 2330756
cauuaagcgacuuucccau

SEQ ID NO: 2330758 - RNA, 19 nt, Artificial Sequence
  Description of Artificial Sequence: Synthetic oligonucleotide
  Sense strand starting at position 1924 of SEQ ID NO: 1885288
gggaaagucgcuuaaugca

SEQ ID NO: 2330759 - RNA, 19 nt, Artificial Sequence
  Description of Artificial Sequence: Synthetic oligonucleotide
  Antisense strand to SEQ ID NO: 2330758
ugcauuaagcgacuuuccc

SEQ ID NO: 2330760 - RNA, 19 nt, Artificial Sequence
  Description of Artificial Sequence: Synthetic oligonucleotide
  Sense strand starting at position 1983 of SEQ ID NO: 1885288
cugauugcauuucuuguaa

SEQ ID NO: 2330761 - RNA, 19 nt, Artificial Sequence
  Description of Artificial Sequence: Synthetic oligonucleotide
  Antisense strand to SEQ ID NO: 2330760
uuacaagaaaugcaaucag

SEQ ID NO: 2330762 - RNA, 19 nt, Artificial Sequence
  Description of Artificial Sequence: Synthetic oligonucleotide
  Sense strand starting at position 2452 of SEQ ID NO: 1885288
gagucuggcccugacucau

SEQ ID NO: 2330763 - RNA, 19 nt, Artificial Sequence
  Description of Artificial Sequence: Synthetic oligonucleotide
  Antisense strand to SEQ ID NO: 2330762
augagucagggccagacuc

SEQ ID NO: 2330764 - RNA, 19 nt, Artificial Sequence
  Description of Artificial Sequence: Synthetic oligonucleotide
  Sense strand starting at position 2636 of SEQ ID NO: 1885288
gcaucaaaguugucaaagg

SEQ ID NO: 2330765 - RNA, 19 nt, Artificial Sequence
  Description of Artificial Sequence: Synthetic oligonucleotide
  Antisense strand to SEQ ID NO: 2330764
ccuuugacaacuuugaugc

SEQ ID NO: 2330766 - RNA, 19 nt, Artificial Sequence
  Description of Artificial Sequence: Synthetic oligonucleotide
  Sense strand starting at position 2852 of SEQ ID NO: 1885288
ugggcagacuuucuaauug

SEQ ID NO: 2330767 - RNA, 19 nt, Artificial Sequence
  Description of Artificial Sequence: Synthetic oligonucleotide
  Antisense strand to SEQ ID NO: 2330766
caauuagaaagucugccca

SEQ ID NO: 2330768 - RNA, 19 nt, Artificial Sequence
  Description of Artificial Sequence: Synthetic oligonucleotide
  Sense strand starting at position 3053 of SEQ ID NO: 1885288
uuuagacuguccuugagaa

SEQ ID NO: 2330769 - RNA, 19 nt, Artificial Sequence
  Description of Artificial Sequence: Synthetic oligonucleotide
  Antisense strand to SEQ ID NO: 2330768
uucucaaggacagucuaaa

SEQ ID NO: 2330770 - RNA, 19 nt, Artificial Sequence
  Description of Artificial Sequence: Synthetic oligonucleotide
  Sense strand starting at position 3054 of SEQ ID NO: 1885288
uuagacuguccuugagaac

SEQ ID NO: 2330771 - RNA, 19 nt, Artificial Sequence
  Description of Artificial Sequence: Synthetic oligonucleotide
  Antisense strand to SEQ ID NO: 2330770
guucucaaggacagucuaa

SEQ ID NO: 2330772 - RNA, 19 nt, Artificial Sequence
  Description of Artificial Sequence: Synthetic oligonucleotide
  Sense strand starting at position 3312 of SEQ ID NO: 1885288
gugguucuucucuacacaa

SEQ ID NO: 2330773 - RNA, 19 nt, Artificial Sequence
  Description of Artificial Sequence: Synthetic oligonucleotide
  Antisense strand to SEQ ID NO: 2330772
uuguguagagaagaaccac

SEQ ID NO: 2330774 - RNA, 19 nt, Artificial Sequence
  Description of Artificial Sequence: Synthetic oligonucleotide
  Sense strand starting at position 3377 of SEQ ID NO: 1885288
auguguuuggaugaaugca

SEQ ID NO: 2330775 - RNA, 19 nt, Artificial Sequence
  Description of Artificial Sequence: Synthetic oligonucleotide
  Antisense strand to SEQ ID NO: 2330774
ugcauucauccaaacacau

SEQ ID NO: 2330776 - RNA, 19 nt, Artificial Sequence
  Description of Artificial Sequence: Synthetic oligonucleotide
  Sense strand starting at position 3633 of SEQ ID NO: 1885288
uuuguuggagcugaggauu

SEQ ID NO: 2330777 - RNA, 19 nt, Artificial Sequence
  Description of Artificial Sequence: Synthetic oligonucleotide
  Antisense strand to SEQ ID NO: 2330776
aauccucagcuccaacaaa

SEQ ID NO: 2330778 - RNA, 19 nt, Artificial Sequence
  Description of Artificial Sequence: Synthetic oligonucleotide
  Sense strand starting at position 3728 of SEQ ID NO: 1885288
ucuacacagccugauguaa

SEQ ID NO: 2330779 - RNA, 19 nt, Artificial Sequence
  Description of Artificial Sequence: Synthetic oligonucleotide
  Antisense strand to SEQ ID NO: 2330778
uuacaucaggcuguguaga

SEQ ID NO: 2330780 - RNA, 19 nt, Artificial Sequence
  Description of Artificial Sequence: Synthetic oligonucleotide
  Sense strand starting at position 3825 of SEQ ID NO: 1885288
cagguagcuguuuaccaua

SEQ ID NO: 2330781 - RNA, 19 nt, Artificial Sequence
  Description of Artificial Sequence: Synthetic oligonucleotide
  Antisense strand to SEQ ID NO: 2330780
uaugguaaacagcuaccug

SEQ ID NO: 2330782 - RNA, 19 nt, Artificial Sequence
  Description of Artificial Sequence: Synthetic oligonucleotide
  Sense strand starting at position 3887 of SEQ ID NO: 1885288
aguaccuauuccuuugaua

SEQ ID NO: 2330783 - RNA, 19 nt, Artificial Sequence
  Description of Artificial Sequence: Synthetic oligonucleotide
  Antisense strand to SEQ ID NO: 2330782
uaucaaaggaauagguacu

SEQ ID NO: 2330784 - RNA, 19 nt, Artificial Sequence
  Description of Artificial Sequence: Synthetic oligonucleotide
  Sense strand starting at position 329 of SEQ ID NO: 1885289
gauuuaggcguuuggaagu

SEQ ID NO: 2330785 - RNA, 19 nt, Artificial Sequence
  Description of Artificial Sequence: Synthetic oligonucleotide
  Antisense strand to SEQ ID NO: 2330784
acuuccaaacgccuaaauc

SEQ ID NO: 2330786 - RNA, 19 nt, Artificial Sequence
  Description of Artificial Sequence: Synthetic oligonucleotide
  Sense strand starting at position 528 of SEQ ID NO: 1885289
ucgggaauggauuggguaa

SEQ ID NO: 2330787 - RNA, 19 nt, Artificial Sequence
  Description of Artificial Sequence: Synthetic oligonucleotide
  Antisense strand to SEQ ID NO: 2330786
uuacccaauccauucccga

SEQ ID NO: 2330788 - RNA, 19 nt, Artificial Sequence
  Description of Artificial Sequence: Synthetic oligonucleotide
  Sense strand starting at position 529 of SEQ ID NO: 1885289
cgggaauggauuggguaau

SEQ ID NO: 2330789 - RNA, 19 nt, Artificial Sequence
  Description of Artificial Sequence: Synthetic oligonucleotide
  Antisense strand to SEQ ID NO: 2330788
auuacccaauccauucccg

SEQ ID NO: 2330790 - RNA, 19 nt, Artificial Sequence
  Description of Artificial Sequence: Synthetic oligonucleotide
  Sense strand starting at position 2004 of SEQ ID NO: 1885289
cagggauagggccgucuua

SEQ ID NO: 2330791 - RNA, 19 nt, Artificial Sequence
  Description of Artificial Sequence: Synthetic oligonucleotide
  Antisense strand to SEQ ID NO: 2330790
uaagacggcccuaucccug

SEQ ID NO: 2330792 - RNA, 19 nt, Artificial Sequence
  Description of Artificial Sequence: Synthetic oligonucleotide
  Sense strand starting at position 2339 of SEQ ID NO: 1885289
uugacuuuccaguaaaugu

SEQ ID NO: 2330793 - RNA, 19 nt, Artificial Sequence
  Description of Artificial Sequence: Synthetic oligonucleotide
  Antisense strand to SEQ ID NO: 2330792
acauuuacuggaaagucaa

SEQ ID NO: 2330794 - RNA, 19 nt, Artificial Sequence
  Description of Artificial Sequence: Synthetic oligonucleotide
  Sense strand starting at position 2475 of SEQ ID NO: 1885289
augacucaucaauguguuu

SEQ ID NO: 2330795 - RNA, 19 nt, Artificial Sequence
  Description of Artificial Sequence: Synthetic oligonucleotide
  Antisense strand to SEQ ID NO: 2330794
aaacacauugaugagucau

SEQ ID NO: 2330796 - RNA, 19 nt, Artificial Sequence
  Description of Artificial Sequence: Synthetic oligonucleotide
  Sense strand starting at position 2518 of SEQ ID NO: 1885289
agcuguauccaucaaauag

SEQ ID NO: 2330797 - RNA, 19 nt, Artificial Sequence
  Description of Artificial Sequence: Synthetic oligonucleotide
  Antisense strand to SEQ ID NO: 2330796
cuauuugauggauacagcu

SEQ ID NO: 2330798 - RNA, 19 nt, Artificial Sequence
  Description of Artificial Sequence: Synthetic oligonucleotide
  Sense strand starting at position 2593 of SEQ ID NO: 1885289
ccaugucgucuuuagaaag

SEQ ID NO: 2330799 - RNA, 19 nt, Artificial Sequence
  Description of Artificial Sequence: Synthetic oligonucleotide
  Antisense strand to SEQ ID NO: 2330798
cuuucuaaagacgacaugg

SEQ ID NO: 2330800 - RNA, 19 nt, Artificial Sequence
  Description of Artificial Sequence: Synthetic oligonucleotide
  Sense strand starting at position 2653 of SEQ ID NO: 1885289
agugacuacuacuuauagu

SEQ ID NO: 2330801 - RNA, 19 nt, Artificial Sequence
  Description of Artificial Sequence: Synthetic oligonucleotide
  Antisense strand to SEQ ID NO: 2330800
acuauaaguaguagucacu

SEQ ID NO: 2330802 - RNA, 19 nt, Artificial Sequence
  Description of Artificial Sequence: Synthetic oligonucleotide
  Sense strand starting at position 2712 of SEQ ID NO: 1885289
ccuaaauguuuacuuguuu

SEQ ID NO: 2330803 - RNA, 19 nt, Artificial Sequence
  Description of Artificial Sequence: Synthetic oligonucleotide
  Antisense strand to SEQ ID NO: 2330802
aaacaaguaaacauuuagg

SEQ ID NO: 2330804 - RNA, 19 nt, Artificial Sequence
  Description of Artificial Sequence: Synthetic oligonucleotide
  Sense strand starting at position 2787 of SEQ ID NO: 1885289
cugaauacauguguuugau

SEQ ID NO: 2330805 - RNA, 19 nt, Artificial Sequence
  Description of Artificial Sequence: Synthetic oligonucleotide
  Antisense strand to SEQ ID NO: 2330804
aucaaacacauguauucag

SEQ ID NO: 2330806 - RNA, 19 nt, Artificial Sequence
  Description of Artificial Sequence: Synthetic oligonucleotide
  Sense strand starting at position 2789 of SEQ ID NO: 1885289
gaauacauguguuugauaa

SEQ ID NO: 2330807 - RNA, 19 nt, Artificial Sequence
  Description of Artificial Sequence: Synthetic oligonucleotide
  Antisense strand to SEQ ID NO: 2330806
uuaucaaacacauguauuc

SEQ ID NO: 2330808 - RNA, 19 nt, Artificial Sequence
  Description of Artificial Sequence: Synthetic oligonucleotide
  Sense strand starting at position 2797 of SEQ ID NO: 1885289
guguuugauaaugagauuc

SEQ ID NO: 2330809 - RNA, 19 nt, Artificial Sequence
  Description of Artificial Sequence: Synthetic oligonucleotide
  Antisense strand to SEQ ID NO: 2330808
gaaucucauuaucaaacac

SEQ ID NO: 2330810 - RNA, 19 nt, Artificial Sequence
  Description of Artificial Sequence: Synthetic oligonucleotide
  Sense strand starting at position 2808 of SEQ ID NO: 1885289
ugagauuccuuucuuacag

SEQ ID NO: 2330811 - RNA, 19 nt, Artificial Sequence
  Description of Artificial Sequence: Synthetic oligonucleotide
  Antisense strand to SEQ ID NO: 2330810
cuguaagaaaggaaucuca

SEQ ID NO: 2330812 - RNA, 19 nt, Artificial Sequence
  Description of Artificial Sequence: Synthetic oligonucleotide
  Sense strand starting at position 2892 of SEQ ID NO: 1885289
uagguuugauaugcauaaa

SEQ ID NO: 2330813 - RNA, 19 nt, Artificial Sequence
  Description of Artificial Sequence: Synthetic oligonucleotide
  Antisense strand to SEQ ID NO: 2330812
uuuaugcauaucaaaccua

SEQ ID NO: 2330814 - RNA, 19 nt, Artificial Sequence
  Description of Artificial Sequence: Synthetic oligonucleotide
  Sense strand starting at position 3126 of SEQ ID NO: 1885289
gauuaagcggcuuggaauu

SEQ ID NO: 2330815 - RNA, 19 nt, Artificial Sequence
  Description of Artificial Sequence: Synthetic oligonucleotide
  Antisense strand to SEQ ID NO: 2330814
aauuccaagccgcuuaauc

SEQ ID NO: 2330816 - RNA, 19 nt, Artificial Sequence
  Description of Artificial Sequence: Synthetic oligonucleotide
  Sense strand starting at position 3147 of SEQ ID NO: 1885289
gcagcuaacucagucauau

SEQ ID NO: 2330817 - RNA, 19 nt, Artificial Sequence
  Description of Artificial Sequence: Synthetic oligonucleotide
  Antisense strand to SEQ ID NO: 2330816
auaugacugaguuagcugc

SEQ ID NO: 2330818 - RNA, 19 nt, Artificial Sequence
  Description of Artificial Sequence: Synthetic oligonucleotide
  Sense strand starting at position 3158 of SEQ ID NO: 1885289
agucauauuuaugguaaag

SEQ ID NO: 2330819 - RNA, 19 nt, Artificial Sequence
  Description of Artificial Sequence: Synthetic oligonucleotide
  Antisense strand to SEQ ID NO: 2330818
cuuuaccauaaauaugacu

SEQ ID NO: 2330820 - RNA, 19 nt, Artificial Sequence
  Description of Artificial Sequence: Synthetic oligonucleotide
  Sense strand starting at position 3226 of SEQ ID NO: 1885289
cagauauuacgcuauccug

SEQ ID NO: 2330821 - RNA, 19 nt, Artificial Sequence
  Description of Artificial Sequence: Synthetic oligonucleotide
  Antisense strand to SEQ ID NO: 2330820
caggauagcguaauaucug

SEQ ID NO: 2330822 - RNA, 19 nt, Artificial Sequence
  Description of Artificial Sequence: Synthetic oligonucleotide
  Sense strand starting at position 3259 of SEQ ID NO: 1885289
acugaaucucaccaugguu

SEQ ID NO: 2330823 - RNA, 19 nt, Artificial Sequence
  Description of Artificial Sequence: Synthetic oligonucleotide
  Antisense strand to SEQ ID NO: 2330822
aaccauggugagauucagu

SEQ ID NO: 2330824 - RNA, 19 nt, Artificial Sequence
  Description of Artificial Sequence: Synthetic oligonucleotide
  Sense strand starting at position 3325 of SEQ ID NO: 1885289
uaagauauguuagcguaua

SEQ ID NO: 2330825 - RNA, 19 nt, Artificial Sequence
  Description of Artificial Sequence: Synthetic oligonucleotide
  Antisense strand to SEQ ID NO: 2330824
uauacgcuaacauaucuua

SEQ ID NO: 2330826 - RNA, 19 nt, Artificial Sequence
  Description of Artificial Sequence: Synthetic oligonucleotide
  Sense strand starting at position 3369 of SEQ ID NO: 1885289
gccacuccuccugagacuu

SEQ ID NO: 2330827 - RNA, 19 nt, Artificial Sequence
  Description of Artificial Sequence: Synthetic oligonucleotide
  Antisense strand to SEQ ID NO: 2330826
aagucucaggaggaguggc

SEQ ID NO: 2330828 - RNA, 19 nt, Artificial Sequence
  Description of Artificial Sequence: Synthetic oligonucleotide
  Sense strand starting at position 3381 of SEQ ID NO: 1885289
gagacuugcuaagugauga

SEQ ID NO: 2330829 - RNA, 19 nt, Artificial Sequence
  Description of Artificial Sequence: Synthetic oligonucleotide
  Antisense strand to SEQ ID NO: 2330828
ucaucacuuagcaagucuc

SEQ ID NO: 2330830 - RNA, 19 nt, Artificial Sequence
  Description of Artificial Sequence: Synthetic oligonucleotide
  Sense strand starting at position 3382 of SEQ ID NO: 1885289
agacuugcuaagugaugaa

SEQ ID NO: 2330831 - RNA, 19 nt, Artificial Sequence
  Description of Artificial Sequence: Synthetic oligonucleotide
  Antisense strand to SEQ ID NO: 2330830
uucaucacuuagcaagucu

SEQ ID NO: 2330832 - RNA, 19 nt, Artificial Sequence
  Description of Artificial Sequence: Synthetic oligonucleotide
  Sense strand starting at position 3421 of SEQ ID NO: 1885289
ugggaaaggucucuacuuu

SEQ ID NO: 2330833 - RNA, 19 nt, Artificial Sequence
  Description of Artificial Sequence: Synthetic oligonucleotide
  Antisense strand to SEQ ID NO: 2330832
aaaguagagaccuuuccca

SEQ ID NO: 2330834 - RNA, 19 nt, Artificial Sequence
  Description of Artificial Sequence: Synthetic oligonucleotide
  Sense strand starting at position 3449 of SEQ ID NO: 1885289
augcaauaucagugaagcu

SEQ ID NO: 2330835 - RNA, 19 nt, Artificial Sequence
  Description of Artificial Sequence: Synthetic oligonucleotide
  Antisense strand to SEQ ID NO: 2330834
agcuucacugauauugcau

SEQ ID NO: 2330836 - RNA, 19 nt, Artificial Sequence
  Description of Artificial Sequence: Synthetic oligonucleotide
  Sense strand starting at position 3462 of SEQ ID NO: 1885289
gaagcucacucgguauaga

SEQ ID NO: 2330837 - RNA, 19 nt, Artificial Sequence
  Description of Artificial Sequence: Synthetic oligonucleotide
  Antisense strand to SEQ ID NO: 2330836
ucuauaccgagugagcuuc

SEQ ID NO: 2330838 - RNA, 19 nt, Artificial Sequence
  Description of Artificial Sequence: Synthetic oligonucleotide
  Sense strand starting at position 3463 of SEQ ID NO: 1885289
aagcucacucgguauagaa

SEQ ID NO: 2330839 - RNA, 19 nt, Artificial Sequence
  Description of Artificial Sequence: Synthetic oligonucleotide
  Antisense strand to SEQ ID NO: 2330838
uucuauaccgagugagcuu

SEQ ID NO: 2330840 - RNA, 19 nt, Artificial Sequence
  Description of Artificial Sequence: Synthetic oligonucleotide
  Sense strand starting at position 3471 of SEQ ID NO: 1885289
ucgguauagaagggucaga

SEQ ID NO: 2330841 - RNA, 19 nt, Artificial Sequence
  Description of Artificial Sequence: Synthetic oligonucleotide
  Antisense strand to SEQ ID NO: 2330840
ucugacccuucuauaccga

SEQ ID NO: 2330842 - RNA, 19 nt, Artificial Sequence
  Description of Artificial Sequence: Synthetic oligonucleotide
  Sense strand starting at position 3874 of SEQ ID NO: 1885289
ccuuuacaugaucauggua

SEQ ID NO: 2330843 - RNA, 19 nt, Artificial Sequence
  Description of Artificial Sequence: Synthetic oligonucleotide
  Antisense strand to SEQ ID NO: 2330842
uaccaugaucauguaaagg

SEQ ID NO: 2330844 - RNA, 19 nt, Artificial Sequence
  Description of Artificial Sequence: Synthetic oligonucleotide
  Sense strand starting at position 3877 of SEQ ID NO: 1885289
uuacaugaucaugguaaag

SEQ ID NO: 2330845 - RNA, 19 nt, Artificial Sequence
  Description of Artificial Sequence: Synthetic oligonucleotide
  Antisense strand to SEQ ID NO: 2330844
cuuuaccaugaucauguaa

SEQ ID NO: 2330846 - RNA, 19 nt, Artificial Sequence
  Description of Artificial Sequence: Synthetic oligonucleotide
  Sense strand starting at position 3900 of SEQ ID NO: 1885289
aauguaaaguucuuugaag

SEQ ID NO: 2330847 - RNA, 19 nt, Artificial Sequence
  Description of Artificial Sequence: Synthetic oligonucleotide
  Antisense strand to SEQ ID NO: 2330846
cuucaaagaacuuuacauu

SEQ ID NO: 2330848 - RNA, 19 nt, Artificial Sequence
  Description of Artificial Sequence: Synthetic oligonucleotide
  Sense strand starting at position 3901 of SEQ ID NO: 1885289
auguaaaguucuuugaaga

SEQ ID NO: 2330849 - RNA, 19 nt, Artificial Sequence
  Description of Artificial Sequence: Synthetic oligonucleotide
  Antisense strand to SEQ ID NO: 2330848
ucuucaaagaacuuuacau

SEQ ID NO: 2330850 - RNA, 19 nt, Artificial Sequence
  Description of Artificial Sequence: Synthetic oligonucleotide
  Sense strand starting at position 3902 of SEQ ID NO: 1885289
uguaaaguucuuugaagag

SEQ ID NO: 2330851 - RNA, 19 nt, Artificial Sequence
  Description of Artificial Sequence: Synthetic oligonucleotide
  Antisense strand to SEQ ID NO: 2330850
cucuucaaagaacuuuaca

SEQ ID NO: 2330852 - RNA, 19 nt, Artificial Sequence
  Description of Artificial Sequence: Synthetic oligonucleotide
  Sense strand starting at position 3914 of SEQ ID NO: 1885289
ugaagaguacuaggcacau

SEQ ID NO: 2330853 - RNA, 19 nt, Artificial Sequence
  Description of Artificial Sequence: Synthetic oligonucleotide
  Antisense strand to SEQ ID NO: 2330852
augugccuaguacucuuca

SEQ ID NO: 2330854 - RNA, 19 nt, Artificial Sequence
  Description of Artificial Sequence: Synthetic oligonucleotide
  Sense strand starting at position 3918 of SEQ ID NO: 1885289
gaguacuaggcacauacuu

SEQ ID NO: 2330855 - RNA, 19 nt, Artificial Sequence
  Description of Artificial Sequence: Synthetic oligonucleotide
  Antisense strand to SEQ ID NO: 2330854
aaguaugugccuaguacuc

SEQ ID NO: 2330856 - RNA, 19 nt, Artificial Sequence
  Description of Artificial Sequence: Synthetic oligonucleotide
  Sense strand starting at position 3954 of SEQ ID NO: 1885289
cugauaguauuaucacggu

SEQ ID NO: 2330857 - RNA, 19 nt, Artificial Sequence
  Description of Artificial Sequence: Synthetic oligonucleotide
  Antisense strand to SEQ ID NO: 2330856
accgugauaauacuaucag

SEQ ID NO: 2330858 - RNA, 19 nt, Artificial Sequence
  Description of Artificial Sequence: Synthetic oligonucleotide
  Sense strand starting at position 3958 of SEQ ID NO: 1885289
uaguauuaucacgguugac

SEQ ID NO: 2330859 - RNA, 19 nt, Artificial Sequence
  Description of Artificial Sequence: Synthetic oligonucleotide
  Antisense strand to SEQ ID NO: 2330858
gucaaccgugauaauacua

SEQ ID NO: 2330860 - RNA, 19 nt, Artificial Sequence
  Description of Artificial Sequence: Synthetic oligonucleotide
  Sense strand starting at position 3968 of SEQ ID NO: 1885289
acgguugacccuuggaauu

SEQ ID NO: 2330861 - RNA, 19 nt, Artificial Sequence
  Description of Artificial Sequence: Synthetic oligonucleotide
  Antisense strand to SEQ ID NO: 2330860
aauuccaagggucaaccgu

SEQ ID NO: 2330862 - RNA, 19 nt, Artificial Sequence
  Description of Artificial Sequence: Synthetic oligonucleotide
  Sense strand starting at position 3979 of SEQ ID NO: 1885289
uuggaauuauggguauuga

SEQ ID NO: 2330863 - RNA, 19 nt, Artificial Sequence
  Description of Artificial Sequence: Synthetic oligonucleotide
  Antisense strand to SEQ ID NO: 2330862
ucaauacccauaauuccaa

SEQ ID NO: 2330864 - RNA, 19 nt, Artificial Sequence
  Description of Artificial Sequence: Synthetic oligonucleotide
  Sense strand starting at position 5 of SEQ ID NO: 1885290
ucgaguuguacagagcaau

SEQ ID NO: 2330865 - RNA, 19 nt, Artificial Sequence
  Description of Artificial Sequence: Synthetic oligonucleotide
  Antisense strand to SEQ ID NO: 2330864
auugcucuguacaacucga

SEQ ID NO: 2330866 - RNA, 19 nt, Artificial Sequence
  Description of Artificial Sequence: Synthetic oligonucleotide
  Sense strand starting at position 41 of SEQ ID NO: 1885290
ccuaaugauuaacugggua

SEQ ID NO: 2330867 - RNA, 19 nt, Artificial Sequence
  Description of Artificial Sequence: Synthetic oligonucleotide
  Antisense strand to SEQ ID NO: 2330866
uacccaguuaaucauuagg

SEQ ID NO: 2330868 - RNA, 19 nt, Artificial Sequence
  Description of Artificial Sequence: Synthetic oligonucleotide
  Sense strand starting at position 45 of SEQ ID NO: 1885290
augauuaacuggguacagu

SEQ ID NO: 2330869 - RNA, 19 nt, Artificial Sequence
  Description of Artificial Sequence: Synthetic oligonucleotide
  Antisense strand to SEQ ID NO: 2330868
acuguacccaguuaaucau

SEQ ID NO: 2330870 - RNA, 19 nt, Artificial Sequence
  Description of Artificial Sequence: Synthetic oligonucleotide
  Sense strand starting at position 60 of SEQ ID NO: 1885290
caguguugccgguggagca

SEQ ID NO: 2330871 - RNA, 19 nt, Artificial Sequence
  Description of Artificial Sequence: Synthetic oligonucleotide
  Antisense strand to SEQ ID NO: 2330870
ugcuccaccggcaacacug

SEQ ID NO: 2330872 - RNA, 19 nt, Artificial Sequence
  Description of Artificial Sequence: Synthetic oligonucleotide
  Sense strand starting at position 267 of SEQ ID NO: 1885290
ugaucuccauuagaagcau

SEQ ID NO: 2330873 - RNA, 19 nt, Artificial Sequence
  Description of Artificial Sequence: Synthetic oligonucleotide
  Antisense strand to SEQ ID NO: 2330872
augcuucuaauggagauca

SEQ ID NO: 2330874 - RNA, 19 nt, Artificial Sequence
  Description of Artificial Sequence: Synthetic oligonucleotide
  Sense strand starting at position 273 of SEQ ID NO: 1885290
ccauuagaagcauaguaau

SEQ ID NO: 2330875 - RNA, 19 nt, Artificial Sequence
  Description of Artificial Sequence: Synthetic oligonucleotide
  Antisense strand to SEQ ID NO: 2330874
auuacuaugcuucuaaugg

SEQ ID NO: 2330876 - RNA, 19 nt, Artificial Sequence
  Description of Artificial Sequence: Synthetic oligonucleotide
  Sense strand starting at position 279 of SEQ ID NO: 1885290
gaagcauaguaauccuagu

SEQ ID NO: 2330877 - RNA, 19 nt, Artificial Sequence
  Description of Artificial Sequence: Synthetic oligonucleotide
  Antisense strand to SEQ ID NO: 2330876
acuaggauuacuaugcuuc

SEQ ID NO: 2330878 - RNA, 19 nt, Artificial Sequence
  Description of Artificial Sequence: Synthetic oligonucleotide
  Sense strand starting at position 434 of SEQ ID NO: 1885290
gcagcaugaugugguagaa

SEQ ID NO: 2330879 - RNA, 19 nt, Artificial Sequence
  Description of Artificial Sequence: Synthetic oligonucleotide
  Antisense strand to SEQ ID NO: 2330878
uucuaccacaucaugcugc

SEQ ID NO: 2330880 - RNA, 19 nt, Artificial Sequence
  Description of Artificial Sequence: Synthetic oligonucleotide
  Sense strand starting at position 467 of SEQ ID NO: 1885290
agugucuugggucaugagu

SEQ ID NO: 2330881 - RNA, 19 nt, Artificial Sequence
  Description of Artificial Sequence: Synthetic oligonucleotide
  Antisense strand to SEQ ID NO: 2330880
acucaugacccaagacacu

SEQ ID NO: 2330882 - RNA, 19 nt, Artificial Sequence
  Description of Artificial Sequence: Synthetic oligonucleotide
  Sense strand starting at position 503 of SEQ ID NO: 1885290
uguggucuugggcaaguuu

SEQ ID NO: 2330883 - RNA, 19 nt, Artificial Sequence
  Description of Artificial Sequence: Synthetic oligonucleotide
  Antisense strand to SEQ ID NO: 2330882
aaacuugcccaagaccaca

SEQ ID NO: 2330884 - RNA, 19 nt, Artificial Sequence
  Description of Artificial Sequence: Synthetic oligonucleotide
  Sense strand starting at position 605 of SEQ ID NO: 1885290
cucugugauucuucuggaa

SEQ ID NO: 2330885 - RNA, 19 nt, Artificial Sequence
  Description of Artificial Sequence: Synthetic oligonucleotide
  Antisense strand to SEQ ID NO: 2330884
uuccagaagaaucacagag

SEQ ID NO: 2330886 - RNA, 19 nt, Artificial Sequence
  Description of Artificial Sequence: Synthetic oligonucleotide
  Sense strand starting at position 608 of SEQ ID NO: 1885290
ugugauucuucuggaaguu

SEQ ID NO: 2330887 - RNA, 19 nt, Artificial Sequence
  Description of Artificial Sequence: Synthetic oligonucleotide
  Antisense strand to SEQ ID NO: 2330886
aacuuccagaagaaucaca

SEQ ID NO: 2330888 - RNA, 19 nt, Artificial Sequence
  Description of Artificial Sequence: Synthetic oligonucleotide
  Sense strand starting at position 609 of SEQ ID NO: 1885290
gugauucuucuggaaguuu

SEQ ID NO: 2330889 - RNA, 19 nt, Artificial Sequence
  Description of Artificial Sequence: Synthetic oligonucleotide
  Antisense strand to SEQ ID NO: 2330888
aaacuuccagaagaaucac

SEQ ID NO: 2330890 - RNA, 19 nt, Artificial Sequence
  Description of Artificial Sequence: Synthetic oligonucleotide
  Sense strand starting at position 1359 of SEQ ID NO: 1885290
gccacacugucuccggaaa

SEQ ID NO: 2330891 - RNA, 19 nt, Artificial Sequence
  Description of Artificial Sequence: Synthetic oligonucleotide
  Antisense strand to SEQ ID NO: 2330890
uuuccggagacaguguggc

SEQ ID NO: 2330892 - RNA, 19 nt, Artificial Sequence
  Description of Artificial Sequence: Synthetic oligonucleotide
  Sense strand starting at position 1456 of SEQ ID NO: 1885290
acacaugugacacggacua

SEQ ID NO: 2330893 - RNA, 19 nt, Artificial Sequence
  Description of Artificial Sequence: Synthetic oligonucleotide
  Antisense strand to SEQ ID NO: 2330892
uaguccgugucacaugugu

SEQ ID NO: 2330894 - RNA, 19 nt, Artificial Sequence
  Description of Artificial Sequence: Synthetic oligonucleotide
  Sense strand starting at position 1467 of SEQ ID NO: 1885290
acggacuacucacagugau

SEQ ID NO: 2330895 - RNA, 19 nt, Artificial Sequence
  Description of Artificial Sequence: Synthetic oligonucleotide
  Antisense strand to SEQ ID NO: 2330894
aucacugugaguaguccgu

SEQ ID NO: 2330896 - RNA, 19 nt, Artificial Sequence
  Description of Artificial Sequence: Synthetic oligonucleotide
  Sense strand starting at position 1687 of SEQ ID NO: 1885290
cgauguccuggcuggagaa

SEQ ID NO: 2330897 - RNA, 19 nt, Artificial Sequence
  Description of Artificial Sequence: Synthetic oligonucleotide
  Antisense strand to SEQ ID NO: 2330896
uucuccagccaggacaucg

SEQ ID NO: 2330898 - RNA, 19 nt, Artificial Sequence
  Description of Artificial Sequence: Synthetic oligonucleotide
  Sense strand starting at position 1700 of SEQ ID NO: 1885290
ggagaagguuuagagacau

SEQ ID NO: 2330899 - RNA, 19 nt, Artificial Sequence
  Description of Artificial Sequence: Synthetic oligonucleotide
  Antisense strand to SEQ ID NO: 2330898
augucucuaaaccuucucc

SEQ ID NO: 2330900 - RNA, 19 nt, Artificial Sequence
  Description of Artificial Sequence: Synthetic oligonucleotide
  Sense strand starting at position 1786 of SEQ ID NO: 1885290
uccguuaugugucucuaaa

SEQ ID NO: 2330901 - RNA, 19 nt, Artificial Sequence
  Description of Artificial Sequence: Synthetic oligonucleotide
  Antisense strand to SEQ ID NO: 2330900
uuuagagacacauaacgga

SEQ ID NO: 2330902 - RNA, 19 nt, Artificial Sequence
  Description of Artificial Sequence: Synthetic oligonucleotide
  Sense strand starting at position 1812 of SEQ ID NO: 1885290
cugcaagaacuaugcuaag

SEQ ID NO: 2330903 - RNA, 19 nt, Artificial Sequence
  Description of Artificial Sequence: Synthetic oligonucleotide
  Antisense strand to SEQ ID NO: 2330902
cuuagcauaguucuugcag

SEQ ID NO: 2330904 - RNA, 19 nt, Artificial Sequence
  Description of Artificial Sequence: Synthetic oligonucleotide
  Sense strand starting at position 1999 of SEQ ID NO: 1885290
agugguuaccggugaguca

SEQ ID NO: 2330905 - RNA, 19 nt, Artificial Sequence
  Description of Artificial Sequence: Synthetic oligonucleotide
  Antisense strand to SEQ ID NO: 2330904
ugacucaccgguaaccacu

SEQ ID NO: 2330906 - RNA, 19 nt, Artificial Sequence
  Description of Artificial Sequence: Synthetic oligonucleotide
  Sense strand starting at position 2040 of SEQ ID NO: 1885290
agucaauaaugagccgauu

SEQ ID NO: 2330907 - RNA, 19 nt, Artificial Sequence
  Description of Artificial Sequence: Synthetic oligonucleotide
  Antisense strand to SEQ ID NO: 2330906
aaucggcucauuauugacu

SEQ ID NO: 2330908 - RNA, 19 nt, Artificial Sequence
  Description of Artificial Sequence: Synthetic oligonucleotide
  Sense strand starting at position 2052 of SEQ ID NO: 1885290
gccgauuucucaguggguu

SEQ ID NO: 2330909 - RNA, 19 nt, Artificial Sequence
  Description of Artificial Sequence: Synthetic oligonucleotide
  Antisense strand to SEQ ID NO: 2330908
aacccacugagaaaucggc

SEQ ID NO: 2330910 - RNA, 19 nt, Artificial Sequence
  Description of Artificial Sequence: Synthetic oligonucleotide
  Sense strand starting at position 2053 of SEQ ID NO: 1885290
ccgauuucucaguggguua

SEQ ID NO: 2330911 - RNA, 19 nt, Artificial Sequence
  Description of Artificial Sequence: Synthetic oligonucleotide
  Antisense strand to SEQ ID NO: 2330910
uaacccacugagaaaucgg

SEQ ID NO: 2330912 - RNA, 19 nt, Artificial Sequence
  Description of Artificial Sequence: Synthetic oligonucleotide
  Sense strand starting at position 2054 of SEQ ID NO: 1885290
cgauuucucaguggguuag

SEQ ID NO: 2330913 - RNA, 19 nt, Artificial Sequence
  Description of Artificial Sequence: Synthetic oligonucleotide
  Antisense strand to SEQ ID NO: 2330912
cuaacccacugagaaaucg

SEQ ID NO: 2330914 - RNA, 19 nt, Artificial Sequence
  Description of Artificial Sequence: Synthetic oligonucleotide
  Sense strand starting at position 2150 of SEQ ID NO: 1885290
gguuaaugccaacguguuu

SEQ ID NO: 2330915 - RNA, 19 nt, Artificial Sequence
  Description of Artificial Sequence: Synthetic oligonucleotide
  Antisense strand to SEQ ID NO: 2330914
aaacacguuggcauuaacc

SEQ ID NO: 2330916 - RNA, 19 nt, Artificial Sequence
  Description of Artificial Sequence: Synthetic oligonucleotide
  Sense strand starting at position 2162 of SEQ ID NO: 1885290
cguguuuccucagucccaa

SEQ ID NO: 2330917 - RNA, 19 nt, Artificial Sequence
  Description of Artificial Sequence: Synthetic oligonucleotide
  Antisense strand to SEQ ID NO: 2330916
uugggacugaggaaacacg

SEQ ID NO: 2330918 - RNA, 19 nt, Artificial Sequence
  Description of Artificial Sequence: Synthetic oligonucleotide
  Sense strand starting at position 2290 of SEQ ID NO: 1885290
gcuggugacuguugaacaa

SEQ ID NO: 2330919 - RNA, 19 nt, Artificial Sequence
  Description of Artificial Sequence: Synthetic oligonucleotide
  Antisense strand to SEQ ID NO: 2330918
uuguucaacagucaccagc

SEQ ID NO: 2330920 - RNA, 19 nt, Artificial Sequence
  Description of Artificial Sequence: Synthetic oligonucleotide
  Sense strand starting at position 3032 of SEQ ID NO: 1885290
ggguguuggucucccuaau

SEQ ID NO: 2330921 - RNA, 19 nt, Artificial Sequence
  Description of Artificial Sequence: Synthetic oligonucleotide
  Antisense strand to SEQ ID NO: 2330920
auuagggagaccaacaccc

SEQ ID NO: 2330922 - RNA, 19 nt, Artificial Sequence
  Description of Artificial Sequence: Synthetic oligonucleotide
  Sense strand starting at position 3038 of SEQ ID NO: 1885290
uggucucccuaaugaauuc

SEQ ID NO: 2330923 - RNA, 19 nt, Artificial Sequence
  Description of Artificial Sequence: Synthetic oligonucleotide
  Antisense strand to SEQ ID NO: 2330922
gaauucauuagggagacca

SEQ ID NO: 2330924 - RNA, 19 nt, Artificial Sequence
  Description of Artificial Sequence: Synthetic oligonucleotide
  Sense strand starting at position 3065 of SEQ ID NO: 1885290
uuuguugguuccugaagac

SEQ ID NO: 2330925 - RNA, 19 nt, Artificial Sequence
  Description of Artificial Sequence: Synthetic oligonucleotide
  Antisense strand to SEQ ID NO: 2330924
gucuucaggaaccaacaaa

SEQ ID NO: 2330926 - RNA, 19 nt, Artificial Sequence
  Description of Artificial Sequence: Synthetic oligonucleotide
  Sense strand starting at position 3178 of SEQ ID NO: 1885290
ucgggaaucucuuagcgaa

SEQ ID NO: 2330927 - RNA, 19 nt, Artificial Sequence
  Description of Artificial Sequence: Synthetic oligonucleotide
  Antisense strand to SEQ ID NO: 2330926
uucgcuaagagauucccga

SEQ ID NO: 2330928 - RNA, 19 nt, Artificial Sequence
  Description of Artificial Sequence: Synthetic oligonucleotide
  Sense strand starting at position 3180 of SEQ ID NO: 1885290
gggaaucucuuagcgaaag

SEQ ID NO: 2330929 - RNA, 19 nt, Artificial Sequence
  Description of Artificial Sequence: Synthetic oligonucleotide
  Antisense strand to SEQ ID NO: 2330928
cuuucgcuaagagauuccc

SEQ ID NO: 2330930 - RNA, 19 nt, Artificial Sequence
  Description of Artificial Sequence: Synthetic oligonucleotide
  Sense strand starting at position 3247 of SEQ ID NO: 1885290
gugaaugacugcucucuga

SEQ ID NO: 2330931 - RNA, 19 nt, Artificial Sequence
  Description of Artificial Sequence: Synthetic oligonucleotide
  Antisense strand to SEQ ID NO: 2330930
ucagagagcagucauucac

SEQ ID NO: 2330932 - RNA, 19 nt, Artificial Sequence
  Description of Artificial Sequence: Synthetic oligonucleotide
  Sense strand starting at position 3251 of SEQ ID NO: 1885290
augacugcucucugaauuc

SEQ ID NO: 2330933 - RNA, 19 nt, Artificial Sequence
  Description of Artificial Sequence: Synthetic oligonucleotide
  Antisense strand to SEQ ID NO: 2330932
gaauucagagagcagucau

SEQ ID NO: 2330934 - RNA, 19 nt, Artificial Sequence
  Description of Artificial Sequence: Synthetic oligonucleotide
  Sense strand starting at position 3616 of SEQ ID NO: 1885290
cugauccugucccaggauu

SEQ ID NO: 2330935 - RNA, 19 nt, Artificial Sequence
  Description of Artificial Sequence: Synthetic oligonucleotide
  Antisense strand to SEQ ID NO: 2330934
aauccugggacaggaucag

SEQ ID NO: 2330936 - RNA, 19 nt, Artificial Sequence
  Description of Artificial Sequence: Synthetic oligonucleotide
  Sense strand starting at position 3618 of SEQ ID NO: 1885290
gauccugucccaggauuaa

SEQ ID NO: 2330937 - RNA, 19 nt, Artificial Sequence
  Description of Artificial Sequence: Synthetic oligonucleotide
  Antisense strand to SEQ ID NO: 2330936
uuaauccugggacaggauc

SEQ ID NO: 2330938 - RNA, 19 nt, Artificial Sequence
  Description of Artificial Sequence: Synthetic oligonucleotide
  Sense strand starting at position 3656 of SEQ ID NO: 1885290
accucagugcaauggacau

SEQ ID NO: 2330939 - RNA, 19 nt, Artificial Sequence
  Description of Artificial Sequence: Synthetic oligonucleotide
  Antisense strand to SEQ ID NO: 2330938
auguccauugcacugaggu

SEQ ID NO: 2330940 - RNA, 19 nt, Artificial Sequence
  Description of Artificial Sequence: Synthetic oligonucleotide
  Sense strand starting at position 3670 of SEQ ID NO: 1885290
gacauucugggccagguaa

SEQ ID NO: 2330941 - RNA, 19 nt, Artificial Sequence
  Description of Artificial Sequence: Synthetic oligonucleotide
  Antisense strand to SEQ ID NO: 2330940
uuaccuggcccagaauguc

SEQ ID NO: 2330942 - RNA, 19 nt, Artificial Sequence
  Description of Artificial Sequence: Synthetic oligonucleotide
  Sense strand starting at position 3741 of SEQ ID NO: 1885290
ggcucuacccgggagaugu

SEQ ID NO: 2330943 - RNA, 19 nt, Artificial Sequence
  Description of Artificial Sequence: Synthetic oligonucleotide
  Antisense strand to SEQ ID NO: 2330942
acaucucccggguagagcc

SEQ ID NO: 2330944 - RNA, 19 nt, Artificial Sequence
  Description of Artificial Sequence: Synthetic oligonucleotide
  Sense strand starting at position 48 of SEQ ID NO: 1885291
aauagcagucaguagguua

SEQ ID NO: 2330945 - RNA, 19 nt, Artificial Sequence
  Description of Artificial Sequence: Synthetic oligonucleotide
  Antisense strand to SEQ ID NO: 2330944
uaaccuacugacugcuauu

SEQ ID NO: 2330946 - RNA, 19 nt, Artificial Sequence
  Description of Artificial Sequence: Synthetic oligonucleotide
  Sense strand starting at position 51 of SEQ ID NO: 1885291
agcagucaguagguuaaga

SEQ ID NO: 2330947 - RNA, 19 nt, Artificial Sequence
  Description of Artificial Sequence: Synthetic oligonucleotide
  Antisense strand to SEQ ID NO: 2330946
ucuuaaccuacugacugcu

SEQ ID NO: 2330948 - RNA, 19 nt, Artificial Sequence
  Description of Artificial Sequence: Synthetic oligonucleotide
  Sense strand starting at position 208 of SEQ ID NO: 1885291
cagagagccuguucucuga

SEQ ID NO: 2330949 - RNA, 19 nt, Artificial Sequence
  Description of Artificial Sequence: Synthetic oligonucleotide
  Antisense strand to SEQ ID NO: 2330948
ucagagaacaggcucucug

SEQ ID NO: 2330950 - RNA, 19 nt, Artificial Sequence
  Description of Artificial Sequence: Synthetic oligonucleotide
  Sense strand starting at position 210 of SEQ ID NO: 1885291
gagagccuguucucugaaa

SEQ ID NO: 2330951 - RNA, 19 nt, Artificial Sequence
  Description of Artificial Sequence: Synthetic oligonucleotide
  Antisense strand to SEQ ID NO: 2330950
uuucagagaacaggcucuc

SEQ ID NO: 2330952 - RNA, 19 nt, Artificial Sequence
  Description of Artificial Sequence: Synthetic oligonucleotide
  Sense strand starting at position 313 of SEQ ID NO: 1885291
cucaaaugcccugguggaa

SEQ ID NO: 2330953 - RNA, 19 nt, Artificial Sequence
  Description of Artificial Sequence: Synthetic oligonucleotide
  Antisense strand to SEQ ID NO: 2330952
uuccaccagggcauuugag

SEQ ID NO: 2330954 - RNA, 19 nt, Artificial Sequence
  Description of Artificial Sequence: Synthetic oligonucleotide
  Sense strand starting at position 561 of SEQ ID NO: 1885291
agcugaauucaccgggaag

SEQ ID NO: 2330955 - RNA, 19 nt, Artificial Sequence
  Description of Artificial Sequence: Synthetic oligonucleotide
  Antisense strand to SEQ ID NO: 2330954
cuucccggugaauucagcu

SEQ ID NO: 2330956 - RNA, 19 nt, Artificial Sequence
  Description of Artificial Sequence: Synthetic oligonucleotide
  Sense strand starting at position 572 of SEQ ID NO: 1885291
ccgggaaguauggguaauu

SEQ ID NO: 2330957 - RNA, 19 nt, Artificial Sequence
  Description of Artificial Sequence: Synthetic oligonucleotide
  Antisense strand to SEQ ID NO: 2330956
aauuacccauacuucccgg

SEQ ID NO: 2330958 - RNA, 19 nt, Artificial Sequence
  Description of Artificial Sequence: Synthetic oligonucleotide
  Sense strand starting at position 679 of SEQ ID NO: 1885291
ugugacuuucuuggugaaa

SEQ ID NO: 2330959 - RNA, 19 nt, Artificial Sequence
  Description of Artificial Sequence: Synthetic oligonucleotide
  Antisense strand to SEQ ID NO: 2330958
uuucaccaagaaagucaca

SEQ ID NO: 2330960 - RNA, 19 nt, Artificial Sequence
  Description of Artificial Sequence: Synthetic oligonucleotide
  Sense strand starting at position 680 of SEQ ID NO: 1885291
gugacuuucuuggugaaau

SEQ ID NO: 2330961 - RNA, 19 nt, Artificial Sequence
  Description of Artificial Sequence: Synthetic oligonucleotide
  Antisense strand to SEQ ID NO: 2330960
auuucaccaagaaagucac

SEQ ID NO: 2330962 - RNA, 19 nt, Artificial Sequence
  Description of Artificial Sequence: Synthetic oligonucleotide
  Sense strand starting at position 998 of SEQ ID NO: 1885291
gacagauaauuguuuagua

SEQ ID NO: 2330963 - RNA, 19 nt, Artificial Sequence
  Description of Artificial Sequence: Synthetic oligonucleotide
  Antisense strand to SEQ ID NO: 2330962
uacuaaacaauuaucuguc

SEQ ID NO: 2330964 - RNA, 19 nt, Artificial Sequence
  Description of Artificial Sequence: Synthetic oligonucleotide
  Sense strand starting at position 1079 of SEQ ID NO: 1885291
uucuguucuggucaaauag

SEQ ID NO: 2330965 - RNA, 19 nt, Artificial Sequence
  Description of Artificial Sequence: Synthetic oligonucleotide
  Antisense strand to SEQ ID NO: 2330964
cuauuugaccagaacagaa

SEQ ID NO: 2330966 - RNA, 19 nt, Artificial Sequence
  Description of Artificial Sequence: Synthetic oligonucleotide
  Sense strand starting at position 1104 of SEQ ID NO: 1885291
ucuccucgaggccauaaau

SEQ ID NO: 2330967 - RNA, 19 nt, Artificial Sequence
  Description of Artificial Sequence: Synthetic oligonucleotide
  Antisense strand to SEQ ID NO: 2330966
auuuauggccucgaggaga

SEQ ID NO: 2330968 - RNA, 19 nt, Artificial Sequence
  Description of Artificial Sequence: Synthetic oligonucleotide
  Sense strand starting at position 1114 of SEQ ID NO: 1885291
gccauaaaugcugaagcuu

SEQ ID NO: 2330969 - RNA, 19 nt, Artificial Sequence
  Description of Artificial Sequence: Synthetic oligonucleotide
  Antisense strand to SEQ ID NO: 2330968
aagcuucagcauuuauggc

SEQ ID NO: 2330970 - RNA, 19 nt, Artificial Sequence
  Description of Artificial Sequence: Synthetic oligonucleotide
  Sense strand starting at position 1213 of SEQ ID NO: 1885291
auaguuggaugguuuguaa

SEQ ID NO: 2330971 - RNA, 19 nt, Artificial Sequence
  Description of Artificial Sequence: Synthetic oligonucleotide
  Antisense strand to SEQ ID NO: 2330970
uuacaaaccauccaacuau

SEQ ID NO: 2330972 - RNA, 19 nt, Artificial Sequence
  Description of Artificial Sequence: Synthetic oligonucleotide
  Sense strand starting at position 1264 of SEQ ID NO: 1885291
ccuacuuuccaugauguga

SEQ ID NO: 2330973 - RNA, 19 nt, Artificial Sequence
  Description of Artificial Sequence: Synthetic oligonucleotide
  Antisense strand to SEQ ID NO: 2330972
ucacaucauggaaaguagg

SEQ ID NO: 2330974 - RNA, 19 nt, Artificial Sequence
  Description of Artificial Sequence: Synthetic oligonucleotide
  Sense strand starting at position 1401 of SEQ ID NO: 1885291
agagguaaguuagccuaga

SEQ ID NO: 2330975 - RNA, 19 nt, Artificial Sequence
  Description of Artificial Sequence: Synthetic oligonucleotide
  Antisense strand to SEQ ID NO: 2330974
ucuaggcuaacuuaccucu

SEQ ID NO: 2330976 - RNA, 19 nt, Artificial Sequence
  Description of Artificial Sequence: Synthetic oligonucleotide
  Sense strand starting at position 1402 of SEQ ID NO: 1885291
gagguaaguuagccuagaa

SEQ ID NO: 2330977 - RNA, 19 nt, Artificial Sequence
  Description of Artificial Sequence: Synthetic oligonucleotide
  Antisense strand to SEQ ID NO: 2330976
uucuaggcuaacuuaccuc

SEQ ID NO: 2330978 - RNA, 19 nt, Artificial Sequence
  Description of Artificial Sequence: Synthetic oligonucleotide
  Sense strand starting at position 1415 of SEQ ID NO: 1885291
cuagaaagagcuuguuaaa

SEQ ID NO: 2330979 - RNA, 19 nt, Artificial Sequence
  Description of Artificial Sequence: Synthetic oligonucleotide
  Antisense strand to SEQ ID NO: 2330978
uuuaacaagcucuuucuag

SEQ ID NO: 2330980 - RNA, 19 nt, Artificial Sequence
  Description of Artificial Sequence: Synthetic oligonucleotide
  Sense strand starting at position 1451 of SEQ ID NO: 1885291
uucuuuacagucgaauaau

SEQ ID NO: 2330981 - RNA, 19 nt, Artificial Sequence
  Description of Artificial Sequence: Synthetic oligonucleotide
  Antisense strand to SEQ ID NO: 2330980
auuauucgacuguaaagaa

SEQ ID NO: 2330982 - RNA, 19 nt, Artificial Sequence
  Description of Artificial Sequence: Synthetic oligonucleotide
  Sense strand starting at position 1510 of SEQ ID NO: 1885291
gcaacucuaggugguuaaa

SEQ ID NO: 2330983 - RNA, 19 nt, Artificial Sequence
  Description of Artificial Sequence: Synthetic oligonucleotide
  Antisense strand to SEQ ID NO: 2330982
uuuaaccaccuagaguugc

SEQ ID NO: 2330984 - RNA, 19 nt, Artificial Sequence
  Description of Artificial Sequence: Synthetic oligonucleotide
  Sense strand starting at position 1542 of SEQ ID NO: 1885291
acugguuaauuugaagaga

SEQ ID NO: 2330985 - RNA, 19 nt, Artificial Sequence
  Description of Artificial Sequence: Synthetic oligonucleotide
  Antisense strand to SEQ ID NO: 2330984
ucucuucaaauuaaccagu

SEQ ID NO: 2330986 - RNA, 19 nt, Artificial Sequence
  Description of Artificial Sequence: Synthetic oligonucleotide
  Sense strand starting at position 1691 of SEQ ID NO: 1885291
ggauguucuuucccacaca

SEQ ID NO: 2330987 - RNA, 19 nt, Artificial Sequence
  Description of Artificial Sequence: Synthetic oligonucleotide
  Antisense strand to SEQ ID NO: 2330986
ugugugggaaagaacaucc

SEQ ID NO: 2330988 - RNA, 19 nt, Artificial Sequence
  Description of Artificial Sequence: Synthetic oligonucleotide
  Sense strand starting at position 1717 of SEQ ID NO: 1885291
agcuuuaaauaguugcaga

SEQ ID NO: 2330989 - RNA, 19 nt, Artificial Sequence
  Description of Artificial Sequence: Synthetic oligonucleotide
  Antisense strand to SEQ ID NO: 2330988
ucugcaacuauuuaaagcu

SEQ ID NO: 2330990 - RNA, 19 nt, Artificial Sequence
  Description of Artificial Sequence: Synthetic oligonucleotide
  Sense strand starting at position 1739 of SEQ ID NO: 1885291
agcguauccaguuuaguuu

SEQ ID NO: 2330991 - RNA, 19 nt, Artificial Sequence
  Description of Artificial Sequence: Synthetic oligonucleotide
  Antisense strand to SEQ ID NO: 2330990
aaacuaaacuggauacgcu

SEQ ID NO: 2330992 - RNA, 19 nt, Artificial Sequence
  Description of Artificial Sequence: Synthetic oligonucleotide
  Sense strand starting at position 1745 of SEQ ID NO: 1885291
uccaguuuaguuuaugaaa

SEQ ID NO: 2330993 - RNA, 19 nt, Artificial Sequence
  Description of Artificial Sequence: Synthetic oligonucleotide
  Antisense strand to SEQ ID NO: 2330992
uuucauaaacuaaacugga

SEQ ID NO: 2330994 - RNA, 19 nt, Artificial Sequence
  Description of Artificial Sequence: Synthetic oligonucleotide
  Sense strand starting at position 1848 of SEQ ID NO: 1885291
aauaguuuacucgacugua

SEQ ID NO: 2330995 - RNA, 19 nt, Artificial Sequence
  Description of Artificial Sequence: Synthetic oligonucleotide
  Antisense strand to SEQ ID NO: 2330994
uacagucgaguaaacuauu

SEQ ID NO: 2330996 - RNA, 19 nt, Artificial Sequence
  Description of Artificial Sequence: Synthetic oligonucleotide
  Sense strand starting at position 1853 of SEQ ID NO: 1885291
uuuacucgacuguauuaau

SEQ ID NO: 2330997 - RNA, 19 nt, Artificial Sequence
  Description of Artificial Sequence: Synthetic oligonucleotide
  Antisense strand to SEQ ID NO: 2330996
auuaauacagucgaguaaa

SEQ ID NO: 2330998 - RNA, 19 nt, Artificial Sequence
  Description of Artificial Sequence: Synthetic oligonucleotide
  Sense strand starting at position 2063 of SEQ ID NO: 1885291
agcaucaaauguuugauga

SEQ ID NO: 2330999 - RNA, 19 nt, Artificial Sequence
  Description of Artificial Sequence: Synthetic oligonucleotide
  Antisense strand to SEQ ID NO: 2330998
ucaucaaacauuugaugcu

SEQ ID NO: 2331000 - RNA, 19 nt, Artificial Sequence
  Description of Artificial Sequence: Synthetic oligonucleotide
  Sense strand starting at position 2064 of SEQ ID NO: 1885291
gcaucaaauguuugaugaa

SEQ ID NO: 2331001 - RNA, 19 nt, Artificial Sequence
  Description of Artificial Sequence: Synthetic oligonucleotide
  Antisense strand to SEQ ID NO: 2331000
uucaucaaacauuugaugc

SEQ ID NO: 2331002 - RNA, 19 nt, Artificial Sequence
  Description of Artificial Sequence: Synthetic oligonucleotide
  Sense strand starting at position 2316 of SEQ ID NO: 1885291
agaacugugcuuuggagga

SEQ ID NO: 2331003 - RNA, 19 nt, Artificial Sequence
  Description of Artificial Sequence: Synthetic oligonucleotide
  Antisense strand to SEQ ID NO: 2331002
uccuccaaagcacaguucu

SEQ ID NO: 2331004 - RNA, 19 nt, Artificial Sequence
  Description of Artificial Sequence: Synthetic oligonucleotide
  Sense strand starting at position 2350 of SEQ ID NO: 1885291
gacuucuaacacugaggua

SEQ ID NO: 2331005 - RNA, 19 nt, Artificial Sequence
  Description of Artificial Sequence: Synthetic oligonucleotide
  Antisense strand to SEQ ID NO: 2331004
uaccucaguguuagaaguc

SEQ ID NO: 2331006 - RNA, 19 nt, Artificial Sequence
  Description of Artificial Sequence: Synthetic oligonucleotide
  Sense strand starting at position 2362 of SEQ ID NO: 1885291
ugagguaggugacuagaua

SEQ ID NO: 2331007 - RNA, 19 nt, Artificial Sequence
  Description of Artificial Sequence: Synthetic oligonucleotide
  Antisense strand to SEQ ID NO: 2331006
uaucuagucaccuaccuca

SEQ ID NO: 2331008 - RNA, 19 nt, Artificial Sequence
  Description of Artificial Sequence: Synthetic oligonucleotide
  Sense strand starting at position 2781 of SEQ ID NO: 1885291
uuaccaggacgguguauua

SEQ ID NO: 2331009 - RNA, 19 nt, Artificial Sequence
  Description of Artificial Sequence: Synthetic oligonucleotide
  Antisense strand to SEQ ID NO: 2331008
uaauacaccguccugguaa

SEQ ID NO: 2331010 - RNA, 19 nt, Artificial Sequence
  Description of Artificial Sequence: Synthetic oligonucleotide
  Sense strand starting at position 2851 of SEQ ID NO: 1885291
gggagauugugaaagguac

SEQ ID NO: 2331011 - RNA, 19 nt, Artificial Sequence
  Description of Artificial Sequence: Synthetic oligonucleotide
  Antisense strand to SEQ ID NO: 2331010
guaccuuucacaaucuccc

SEQ ID NO: 2331012 - RNA, 19 nt, Artificial Sequence
  Description of Artificial Sequence: Synthetic oligonucleotide
  Sense strand starting at position 3006 of SEQ ID NO: 1885291
ggucuaauucacuggagga

SEQ ID NO: 2331013 - RNA, 19 nt, Artificial Sequence
  Description of Artificial Sequence: Synthetic oligonucleotide
  Antisense strand to SEQ ID NO: 2331012
uccuccagugaauuagacc

SEQ ID NO: 2331014 - RNA, 19 nt, Artificial Sequence
  Description of Artificial Sequence: Synthetic oligonucleotide
  Sense strand starting at position 3156 of SEQ ID NO: 1885291
agggcauggcugugauaug

SEQ ID NO: 2331015 - RNA, 19 nt, Artificial Sequence
  Description of Artificial Sequence: Synthetic oligonucleotide
  Antisense strand to SEQ ID NO: 2331014
cauaucacagccaugcccu

SEQ ID NO: 2331016 - RNA, 19 nt, Artificial Sequence
  Description of Artificial Sequence: Synthetic oligonucleotide
  Sense strand starting at position 3223 of SEQ ID NO: 1885291
cuucucuaggucuggaaga

SEQ ID NO: 2331017 - RNA, 19 nt, Artificial Sequence
  Description of Artificial Sequence: Synthetic oligonucleotide
  Antisense strand to SEQ ID NO: 2331016
ucuuccagaccuagagaag

SEQ ID NO: 2331018 - RNA, 19 nt, Artificial Sequence
  Description of Artificial Sequence: Synthetic oligonucleotide
  Sense strand starting at position 3254 of SEQ ID NO: 1885291
ccaggagcugucuagcaaa

SEQ ID NO: 2331019 - RNA, 19 nt, Artificial Sequence
  Description of Artificial Sequence: Synthetic oligonucleotide
  Antisense strand to SEQ ID NO: 2331018
uuugcuagacagcuccugg

SEQ ID NO: 2331020 - RNA, 19 nt, Artificial Sequence
  Description of Artificial Sequence: Synthetic oligonucleotide
  Sense strand starting at position 3400 of SEQ ID NO: 1885291
gggagacacuaagaugauu

SEQ ID NO: 2331021 - RNA, 19 nt, Artificial Sequence
  Description of Artificial Sequence: Synthetic oligonucleotide
  Antisense strand to SEQ ID NO: 2331020
aaucaucuuagugucuccc

SEQ ID NO: 2331022 - RNA, 19 nt, Artificial Sequence
  Description of Artificial Sequence: Synthetic oligonucleotide
  Sense strand starting at position 3429 of SEQ ID NO: 1885291
ugaggagcaccuugaaagu

SEQ ID NO: 2331023 - RNA, 19 nt, Artificial Sequence
  Description of Artificial Sequence: Synthetic oligonucleotide
  Antisense strand to SEQ ID NO: 2331022
acuuucaaggugcuccuca

SEQ ID NO: 2331024 - RNA, 19 nt, Artificial Sequence
  Description of Artificial Sequence: Synthetic oligonucleotide
  Sense strand starting at position 301 of SEQ ID NO: 1885292
cagggaucgcugggauaaa

SEQ ID NO: 2331025 - RNA, 19 nt, Artificial Sequence
  Description of Artificial Sequence: Synthetic oligonucleotide
  Antisense strand to SEQ ID NO: 2331024
uuuaucccagcgaucccug

SEQ ID NO: 2331026 - RNA, 19 nt, Artificial Sequence
  Description of Artificial Sequence: Synthetic oligonucleotide
  Sense strand starting at position 316 of SEQ ID NO: 1885292
uaaaguauugcaggacauc

SEQ ID NO: 2331027 - RNA, 19 nt, Artificial Sequence
  Description of Artificial Sequence: Synthetic oligonucleotide
  Antisense strand to SEQ ID NO: 2331026
gauguccugcaauacuuua

SEQ ID NO: 2331028 - RNA, 19 nt, Artificial Sequence
  Description of Artificial Sequence: Synthetic oligonucleotide
  Sense strand starting at position 529 of SEQ ID NO: 1885292
uccuaaagucuugggaucu

SEQ ID NO: 2331029 - RNA, 19 nt, Artificial Sequence
  Description of Artificial Sequence: Synthetic oligonucleotide
  Antisense strand to SEQ ID NO: 2331028
agaucccaagacuuuagga

SEQ ID NO: 2331030 - RNA, 19 nt, Artificial Sequence
  Description of Artificial Sequence: Synthetic oligonucleotide
  Sense strand starting at position 545 of SEQ ID NO: 1885292
ucuuaagucgucuagauag

SEQ ID NO: 2331031 - RNA, 19 nt, Artificial Sequence
  Description of Artificial Sequence: Synthetic oligonucleotide
  Antisense strand to SEQ ID NO: 2331030
cuaucuagacgacuuaaga

SEQ ID NO: 2331032 - RNA, 19 nt, Artificial Sequence
  Description of Artificial Sequence: Synthetic oligonucleotide
  Sense strand starting at position 607 of SEQ ID NO: 1885292
uauugcuuaggucaagauc

SEQ ID NO: 2331033 - RNA, 19 nt, Artificial Sequence
  Description of Artificial Sequence: Synthetic oligonucleotide
  Antisense strand to SEQ ID NO: 2331032
gaucuugaccuaagcaaua

SEQ ID NO: 2331034 - RNA, 19 nt, Artificial Sequence
  Description of Artificial Sequence: Synthetic oligonucleotide
  Sense strand starting at position 859 of SEQ ID NO: 1885292
ugagcauguuuccugaaua

SEQ ID NO: 2331035 - RNA, 19 nt, Artificial Sequence
  Description of Artificial Sequence: Synthetic oligonucleotide
  Antisense strand to SEQ ID NO: 2331034
uauucaggaaacaugcuca

SEQ ID NO: 2331036 - RNA, 19 nt, Artificial Sequence
  Description of Artificial Sequence: Synthetic oligonucleotide
  Sense strand starting at position 878 of SEQ ID NO: 1885292
uguuauuguccucuugcuu

SEQ ID NO: 2331037 - RNA, 19 nt, Artificial Sequence
  Description of Artificial Sequence: Synthetic oligonucleotide
  Antisense strand to SEQ ID NO: 2331036
aagcaagaggacaauaaca

SEQ ID NO: 2331038 - RNA, 19 nt, Artificial Sequence
  Description of Artificial Sequence: Synthetic oligonucleotide
  Sense strand starting at position 879 of SEQ ID NO: 1885292
guuauuguccucuugcuuu

SEQ ID NO: 2331039 - RNA, 19 nt, Artificial Sequence
  Description of Artificial Sequence: Synthetic oligonucleotide
  Antisense strand to SEQ ID NO: 2331038
aaagcaagaggacaauaac

SEQ ID NO: 2331040 - RNA, 19 nt, Artificial Sequence
  Description of Artificial Sequence: Synthetic oligonucleotide
  Sense strand starting at position 1090 of SEQ ID NO: 1885292
gcugacuucccauaaguug

SEQ ID NO: 2331041 - RNA, 19 nt, Artificial Sequence
  Description of Artificial Sequence: Synthetic oligonucleotide
  Antisense strand to SEQ ID NO: 2331040
caacuuaugggaagucagc

SEQ ID NO: 2331042 - RNA, 19 nt, Artificial Sequence
  Description of Artificial Sequence: Synthetic oligonucleotide
  Sense strand starting at position 1122 of SEQ ID NO: 1885292
ccgaaagaggguugugaug

SEQ ID NO: 2331043 - RNA, 19 nt, Artificial Sequence
  Description of Artificial Sequence: Synthetic oligonucleotide
  Antisense strand to SEQ ID NO: 2331042
caucacaacccucuuucgg

SEQ ID NO: 2331044 - RNA, 19 nt, Artificial Sequence
  Description of Artificial Sequence: Synthetic oligonucleotide
  Sense strand starting at position 1133 of SEQ ID NO: 1885292
uugugaugagagugagaag

SEQ ID NO: 2331045 - RNA, 19 nt, Artificial Sequence
  Description of Artificial Sequence: Synthetic oligonucleotide
  Antisense strand to SEQ ID NO: 2331044
cuucucacucucaucacaa

SEQ ID NO: 2331046 - RNA, 19 nt, Artificial Sequence
  Description of Artificial Sequence: Synthetic oligonucleotide
  Sense strand starting at position 1202 of SEQ ID NO: 1885292
acuugaguggcucaaucau

SEQ ID NO: 2331047 - RNA, 19 nt, Artificial Sequence
  Description of Artificial Sequence: Synthetic oligonucleotide
  Antisense strand to SEQ ID NO: 2331046
augauugagccacucaagu

SEQ ID NO: 2331048 - RNA, 19 nt, Artificial Sequence
  Description of Artificial Sequence: Synthetic oligonucleotide
  Sense strand starting at position 1300 of SEQ ID NO: 1885292
uucccuugguagucaaaua

SEQ ID NO: 2331049 - RNA, 19 nt, Artificial Sequence
  Description of Artificial Sequence: Synthetic oligonucleotide
  Antisense strand to SEQ ID NO: 2331048
uauuugacuaccaagggaa

SEQ ID NO: 2331050 - RNA, 19 nt, Artificial Sequence
  Description of Artificial Sequence: Synthetic oligonucleotide
  Sense strand starting at position 1320 of SEQ ID NO: 1885292
gcuacuuaagaucaugcua

SEQ ID NO: 2331051 - RNA, 19 nt, Artificial Sequence
  Description of Artificial Sequence: Synthetic oligonucleotide
  Antisense strand to SEQ ID NO: 2331050
uagcaugaucuuaaguagc

SEQ ID NO: 2331052 - RNA, 19 nt, Artificial Sequence
  Description of Artificial Sequence: Synthetic oligonucleotide
  Sense strand starting at position 1379 of SEQ ID NO: 1885292
ucaauagaggucuauucuu

SEQ ID NO: 2331053 - RNA, 19 nt, Artificial Sequence
  Description of Artificial Sequence: Synthetic oligonucleotide
  Antisense strand to SEQ ID NO: 2331052
aagaauagaccucuauuga

SEQ ID NO: 2331054 - RNA, 19 nt, Artificial Sequence
  Description of Artificial Sequence: Synthetic oligonucleotide
  Sense strand starting at position 1384 of SEQ ID NO: 1885292
agaggucuauucuuacuca

SEQ ID NO: 2331055 - RNA, 19 nt, Artificial Sequence
  Description of Artificial Sequence: Synthetic oligonucleotide
  Antisense strand to SEQ ID NO: 2331054
ugaguaagaauagaccucu

SEQ ID NO: 2331056 - RNA, 19 nt, Artificial Sequence
  Description of Artificial Sequence: Synthetic oligonucleotide
  Sense strand starting at position 1521 of SEQ ID NO: 1885292
cagauuagcuaucugguga

SEQ ID NO: 2331057 - RNA, 19 nt, Artificial Sequence
  Description of Artificial Sequence: Synthetic oligonucleotide
  Antisense strand to SEQ ID NO: 2331056
ucaccagauagcuaaucug

SEQ ID NO: 2331058 - RNA, 19 nt, Artificial Sequence
  Description of Artificial Sequence: Synthetic oligonucleotide
  Sense strand starting at position 1577 of SEQ ID NO: 1885292
ugugucaucacauaguaga

SEQ ID NO: 2331059 - RNA, 19 nt, Artificial Sequence
  Description of Artificial Sequence: Synthetic oligonucleotide
  Antisense strand to SEQ ID NO: 2331058
ucuacuaugugaugacaca

SEQ ID NO: 2331060 - RNA, 19 nt, Artificial Sequence
  Description of Artificial Sequence: Synthetic oligonucleotide
  Sense strand starting at position 1651 of SEQ ID NO: 1885292
agacaucacccuugugacu

SEQ ID NO: 2331061 - RNA, 19 nt, Artificial Sequence
  Description of Artificial Sequence: Synthetic oligonucleotide
  Antisense strand to SEQ ID NO: 2331060
agucacaagggugaugucu

SEQ ID NO: 2331062 - RNA, 19 nt, Artificial Sequence
  Description of Artificial Sequence: Synthetic oligonucleotide
  Sense strand starting at position 1800 of SEQ ID NO: 1885292
aagggugagucucuuccau

SEQ ID NO: 2331063 - RNA, 19 nt, Artificial Sequence
  Description of Artificial Sequence: Synthetic oligonucleotide
  Antisense strand to SEQ ID NO: 2331062
auggaagagacucacccuu

SEQ ID NO: 2331064 - RNA, 19 nt, Artificial Sequence
  Description of Artificial Sequence: Synthetic oligonucleotide
  Sense strand starting at position 1879 of SEQ ID NO: 1885292
cugcauuuagcugguggaa

SEQ ID NO: 2331065 - RNA, 19 nt, Artificial Sequence
  Description of Artificial Sequence: Synthetic oligonucleotide
  Antisense strand to SEQ ID NO: 2331064
uuccaccagcuaaaugcag

SEQ ID NO: 2331066 - RNA, 19 nt, Artificial Sequence
  Description of Artificial Sequence: Synthetic oligonucleotide
  Sense strand starting at position 1936 of SEQ ID NO: 1885292
gaagcuugacuccgacaug

SEQ ID NO: 2331067 - RNA, 19 nt, Artificial Sequence
  Description of Artificial Sequence: Synthetic oligonucleotide
  Antisense strand to SEQ ID NO: 2331066
caugucggagucaagcuuc

SEQ ID NO: 2331068 - RNA, 19 nt, Artificial Sequence
  Description of Artificial Sequence: Synthetic oligonucleotide
  Sense strand starting at position 1939 of SEQ ID NO: 1885292
gcuugacuccgacauggaa

SEQ ID NO: 2331069 - RNA, 19 nt, Artificial Sequence
  Description of Artificial Sequence: Synthetic oligonucleotide
  Antisense strand to SEQ ID NO: 2331068
uuccaugucggagucaagc

SEQ ID NO: 2331070 - RNA, 19 nt, Artificial Sequence
  Description of Artificial Sequence: Synthetic oligonucleotide
  Sense strand starting at position 1983 of SEQ ID NO: 1885292
ggugacaucuagucacaug

SEQ ID NO: 2331071 - RNA, 19 nt, Artificial Sequence
  Description of Artificial Sequence: Synthetic oligonucleotide
  Antisense strand to SEQ ID NO: 2331070
caugugacuagaugucacc

SEQ ID NO: 2331072 - RNA, 19 nt, Artificial Sequence
  Description of Artificial Sequence: Synthetic oligonucleotide
  Sense strand starting at position 2002 of SEQ ID NO: 1885292
gccacaucuggcuacuaga

SEQ ID NO: 2331073 - RNA, 19 nt, Artificial Sequence
  Description of Artificial Sequence: Synthetic oligonucleotide
  Antisense strand to SEQ ID NO: 2331072
ucuaguagccagauguggc

SEQ ID NO: 2331074 - RNA, 19 nt, Artificial Sequence
  Description of Artificial Sequence: Synthetic oligonucleotide
  Sense strand starting at position 2417 of SEQ ID NO: 1885292
uccauuccgugagcauuua

SEQ ID NO: 2331075 - RNA, 19 nt, Artificial Sequence
  Description of Artificial Sequence: Synthetic oligonucleotide
  Antisense strand to SEQ ID NO: 2331074
uaaaugcucacggaaugga

SEQ ID NO: 2331076 - RNA, 19 nt, Artificial Sequence
  Description of Artificial Sequence: Synthetic oligonucleotide
  Sense strand starting at position 2609 of SEQ ID NO: 1885292
gcagcuuggguguuaguuu

SEQ ID NO: 2331077 - RNA, 19 nt, Artificial Sequence
  Description of Artificial Sequence: Synthetic oligonucleotide
  Antisense strand to SEQ ID NO: 2331076
aaacuaacacccaagcugc

SEQ ID NO: 2331078 - RNA, 19 nt, Artificial Sequence
  Description of Artificial Sequence: Synthetic oligonucleotide
  Sense strand starting at position 2702 of SEQ ID NO: 1885292
acuucugucccggauccua

SEQ ID NO: 2331079 - RNA, 19 nt, Artificial Sequence
  Description of Artificial Sequence: Synthetic oligonucleotide
  Antisense strand to SEQ ID NO: 2331078
uaggauccgggacagaagu

SEQ ID NO: 2331080 - RNA, 19 nt, Artificial Sequence
  Description of Artificial Sequence: Synthetic oligonucleotide
  Sense strand starting at position 2837 of SEQ ID NO: 1885292
cagaaaucucagcagaugu

SEQ ID NO: 2331081 - RNA, 19 nt, Artificial Sequence
  Description of Artificial Sequence: Synthetic oligonucleotide
  Antisense strand to SEQ ID NO: 2331080
acaucugcugagauuucug

SEQ ID NO: 2331082 - RNA, 19 nt, Artificial Sequence
  Description of Artificial Sequence: Synthetic oligonucleotide
  Sense strand starting at position 2839 of SEQ ID NO: 1885292
gaaaucucagcagauguau

SEQ ID NO: 2331083 - RNA, 19 nt, Artificial Sequence
  Description of Artificial Sequence: Synthetic oligonucleotide
  Antisense strand to SEQ ID NO: 2331082
auacaucugcugagauuuc

SEQ ID NO: 2331084 - RNA, 19 nt, Artificial Sequence
  Description of Artificial Sequence: Synthetic oligonucleotide
  Sense strand starting at position 2863 of SEQ ID NO: 1885292
cugggauguuuccuggacu

SEQ ID NO: 2331085 - RNA, 19 nt, Artificial Sequence
  Description of Artificial Sequence: Synthetic oligonucleotide
  Antisense strand to SEQ ID NO: 2331084
aguccaggaaacaucccag

SEQ ID NO: 2331086 - RNA, 19 nt, Artificial Sequence
  Description of Artificial Sequence: Synthetic oligonucleotide
  Sense strand starting at position 2866 of SEQ ID NO: 1885292
ggauguuuccuggacucac

SEQ ID NO: 2331087 - RNA, 19 nt, Artificial Sequence
  Description of Artificial Sequence: Synthetic oligonucleotide
  Antisense strand to SEQ ID NO: 2331086
gugaguccaggaaacaucc

SEQ ID NO: 2331088 - RNA, 19 nt, Artificial Sequence
  Description of Artificial Sequence: Synthetic oligonucleotide
  Sense strand starting at position 2986 of SEQ ID NO: 1885292
augugauuugcgcauagca

SEQ ID NO: 2331089 - RNA, 19 nt, Artificial Sequence
  Description of Artificial Sequence: Synthetic oligonucleotide
  Antisense strand to SEQ ID NO: 2331088
ugcuaugcgcaaaucacau

SEQ ID NO: 2331090 - RNA, 19 nt, Artificial Sequence
  Description of Artificial Sequence: Synthetic oligonucleotide
  Sense strand starting at position 3026 of SEQ ID NO: 1885292
gugagcagugacugaaauu

SEQ ID NO: 2331091 - RNA, 19 nt, Artificial Sequence
  Description of Artificial Sequence: Synthetic oligonucleotide
  Antisense strand to SEQ ID NO: 2331090
aauuucagucacugcucac

SEQ ID NO: 2331092 - RNA, 19 nt, Artificial Sequence
  Description of Artificial Sequence: Synthetic oligonucleotide
  Sense strand starting at position 3027 of SEQ ID NO: 1885292
ugagcagugacugaaauuc

SEQ ID NO: 2331093 - RNA, 19 nt, Artificial Sequence
  Description of Artificial Sequence: Synthetic oligonucleotide
  Antisense strand to SEQ ID NO: 2331092
gaauuucagucacugcuca

SEQ ID NO: 2331094 - RNA, 19 nt, Artificial Sequence
  Description of Artificial Sequence: Synthetic oligonucleotide
  Sense strand starting at position 3130 of SEQ ID NO: 1885292
acaggaaauuucuagguca

SEQ ID NO: 2331095 - RNA, 19 nt, Artificial Sequence
  Description of Artificial Sequence: Synthetic oligonucleotide
  Antisense strand to SEQ ID NO: 2331094
ugaccuagaaauuuccugu

SEQ ID NO: 2331096 - RNA, 19 nt, Artificial Sequence
  Description of Artificial Sequence: Synthetic oligonucleotide
  Sense strand starting at position 3520 of SEQ ID NO: 1885292
cuagacugaccugguaaga

SEQ ID NO: 2331097 - RNA, 19 nt, Artificial Sequence
  Description of Artificial Sequence: Synthetic oligonucleotide
  Antisense strand to SEQ ID NO: 2331096
ucuuaccaggucagucuag

SEQ ID NO: 2331098 - RNA, 19 nt, Artificial Sequence
  Description of Artificial Sequence: Synthetic oligonucleotide
  Sense strand starting at position 3609 of SEQ ID NO: 1885292
acuuuaugagacugucaca

SEQ ID NO: 2331099 - RNA, 19 nt, Artificial Sequence
  Description of Artificial Sequence: Synthetic oligonucleotide
  Antisense strand to SEQ ID NO: 2331098
ugugacagucucauaaagu

SEQ ID NO: 2331100 - RNA, 19 nt, Artificial Sequence
  Description of Artificial Sequence: Synthetic oligonucleotide
  Sense strand starting at position 3675 of SEQ ID NO: 1885292
ugaagaaaucgguaccucu

SEQ ID NO: 2331101 - RNA, 19 nt, Artificial Sequence
  Description of Artificial Sequence: Synthetic oligonucleotide
  Antisense strand to SEQ ID NO: 2331100
agagguaccgauuucuuca

SEQ ID NO: 2331102 - RNA, 19 nt, Artificial Sequence
  Description of Artificial Sequence: Synthetic oligonucleotide
  Sense strand starting at position 3970 of SEQ ID NO: 1885292
ggauguguucaggaacauu

SEQ ID NO: 2331103 - RNA, 19 nt, Artificial Sequence
  Description of Artificial Sequence: Synthetic oligonucleotide
  Antisense strand to SEQ ID NO: 2331102
aauguuccugaacacaucc

SEQ ID NO: 2331104 - RNA, 19 nt, Artificial Sequence
  Description of Artificial Sequence: Synthetic oligonucleotide
  Sense strand starting at position 119 of SEQ ID NO: 1885293
ccucccuggccuugugaga

SEQ ID NO: 2331105 - RNA, 19 nt, Artificial Sequence
  Description of Artificial Sequence: Synthetic oligonucleotide
  Antisense strand to SEQ ID NO: 2331104
ucucacaaggccagggagg

SEQ ID NO: 2331106 - RNA, 19 nt, Artificial Sequence
  Description of Artificial Sequence: Synthetic oligonucleotide
  Sense strand starting at position 191 of SEQ ID NO: 1885293
gcacacaugucacuguuga

SEQ ID NO: 2331107 - RNA, 19 nt, Artificial Sequence
  Description of Artificial Sequence: Synthetic oligonucleotide
  Antisense strand to SEQ ID NO: 2331106
ucaacagugacaugugugc

SEQ ID NO: 2331108 - RNA, 19 nt, Artificial Sequence
  Description of Artificial Sequence: Synthetic oligonucleotide
  Sense strand starting at position 198 of SEQ ID NO: 1885293
ugucacuguugacuugaaa

SEQ ID NO: 2331109 - RNA, 19 nt, Artificial Sequence
  Description of Artificial Sequence: Synthetic oligonucleotide
  Antisense strand to SEQ ID NO: 2331108
uuucaagucaacagugaca

SEQ ID NO: 2331110 - RNA, 19 nt, Artificial Sequence
  Description of Artificial Sequence: Synthetic oligonucleotide
  Sense strand starting at position 324 of SEQ ID NO: 1885293
gcacucuguuaccuugaca

SEQ ID NO: 2331111 - RNA, 19 nt, Artificial Sequence
  Description of Artificial Sequence: Synthetic oligonucleotide
  Antisense strand to SEQ ID NO: 2331110
ugucaagguaacagagugc

SEQ ID NO: 2331112 - RNA, 19 nt, Artificial Sequence
  Description of Artificial Sequence: Synthetic oligonucleotide
  Sense strand starting at position 551 of SEQ ID NO: 1885293
gacagacaucccuagcugu

SEQ ID NO: 2331113 - RNA, 19 nt, Artificial Sequence
  Description of Artificial Sequence: Synthetic oligonucleotide
  Antisense strand to SEQ ID NO: 2331112
acagcuagggaugucuguc

SEQ ID NO: 2331114 - RNA, 19 nt, Artificial Sequence
  Description of Artificial Sequence: Synthetic oligonucleotide
  Sense strand starting at position 686 of SEQ ID NO: 1885293
acacaaucuuggcccaaga

SEQ ID NO: 2331115 - RNA, 19 nt, Artificial Sequence
  Description of Artificial Sequence: Synthetic oligonucleotide
  Antisense strand to SEQ ID NO: 2331114
ucuugggccaagauugugu

SEQ ID NO: 2331116 - RNA, 19 nt, Artificial Sequence
  Description of Artificial Sequence: Synthetic oligonucleotide
  Sense strand starting at position 688 of SEQ ID NO: 1885293
acaaucuuggcccaagauu

SEQ ID NO: 2331117 - RNA, 19 nt, Artificial Sequence
  Description of Artificial Sequence: Synthetic oligonucleotide
  Antisense strand to SEQ ID NO: 2331116
aaucuugggccaagauugu

SEQ ID NO: 2331118 - RNA, 19 nt, Artificial Sequence
  Description of Artificial Sequence: Synthetic oligonucleotide
  Sense strand starting at position 699 of SEQ ID NO: 1885293
ccaagauuugcuuggccca

SEQ ID NO: 2331119 - RNA, 19 nt, Artificial Sequence
  Description of Artificial Sequence: Synthetic oligonucleotide
  Antisense strand to SEQ ID NO: 2331118
ugggccaagcaaaucuugg

SEQ ID NO: 2331120 - RNA, 19 nt, Artificial Sequence
  Description of Artificial Sequence: Synthetic oligonucleotide
  Sense strand starting at position 723 of SEQ ID NO: 1885293
cuggacgcuugaucucaua

SEQ ID NO: 2331121 - RNA, 19 nt, Artificial Sequence
  Description of Artificial Sequence: Synthetic oligonucleotide
  Antisense strand to SEQ ID NO: 2331120
uaugagaucaagcguccag

SEQ ID NO: 2331122 - RNA, 19 nt, Artificial Sequence
  Description of Artificial Sequence: Synthetic oligonucleotide
  Sense strand starting at position 738 of SEQ ID NO: 1885293
cauagauggucuguccaug

SEQ ID NO: 2331123 - RNA, 19 nt, Artificial Sequence
  Description of Artificial Sequence: Synthetic oligonucleotide
  Antisense strand to SEQ ID NO: 2331122
cauggacagaccaucuaug

SEQ ID NO: 2331124 - RNA, 19 nt, Artificial Sequence
  Description of Artificial Sequence: Synthetic oligonucleotide
  Sense strand starting at position 850 of SEQ ID NO: 1885293
gugagaagcucucugugac

SEQ ID NO: 2331125 - RNA, 19 nt, Artificial Sequence
  Description of Artificial Sequence: Synthetic oligonucleotide
  Antisense strand to SEQ ID NO: 2331124
gucacagagagcuucucac

SEQ ID NO: 2331126 - RNA, 19 nt, Artificial Sequence
  Description of Artificial Sequence: Synthetic oligonucleotide
  Sense strand starting at position 972 of SEQ ID NO: 1885293
cuuuacguacguuacuaau

SEQ ID NO: 2331127 - RNA, 19 nt, Artificial Sequence
  Description of Artificial Sequence: Synthetic oligonucleotide
  Antisense strand to SEQ ID NO: 2331126
auuaguaacguacguaaag

SEQ ID NO: 2331128 - RNA, 19 nt, Artificial Sequence
  Description of Artificial Sequence: Synthetic oligonucleotide
  Sense strand starting at position 974 of SEQ ID NO: 1885293
uuacguacguuacuaauga

SEQ ID NO: 2331129 - RNA, 19 nt, Artificial Sequence
  Description of Artificial Sequence: Synthetic oligonucleotide
  Antisense strand to SEQ ID NO: 2331128
ucauuaguaacguacguaa

SEQ ID NO: 2331130 - RNA, 19 nt, Artificial Sequence
  Description of Artificial Sequence: Synthetic oligonucleotide
  Sense strand starting at position 1680 of SEQ ID NO: 1885293
gugcuugugauucuuuguu

SEQ ID NO: 2331131 - RNA, 19 nt, Artificial Sequence
  Description of Artificial Sequence: Synthetic oligonucleotide
  Antisense strand to SEQ ID NO: 2331130
aacaaagaaucacaagcac

SEQ ID NO: 2331132 - RNA, 19 nt, Artificial Sequence
  Description of Artificial Sequence: Synthetic oligonucleotide
  Sense strand starting at position 1992 of SEQ ID NO: 1885293
gcaucuuuccugcagagca

SEQ ID NO: 2331133 - RNA, 19 nt, Artificial Sequence
  Description of Artificial Sequence: Synthetic oligonucleotide
  Antisense strand to SEQ ID NO: 2331132
ugcucugcaggaaagaugc

SEQ ID NO: 2331134 - RNA, 19 nt, Artificial Sequence
  Description of Artificial Sequence: Synthetic oligonucleotide
  Sense strand starting at position 2046 of SEQ ID NO: 1885293
ucaguuuccucccuugagu

SEQ ID NO: 2331135 - RNA, 19 nt, Artificial Sequence
  Description of Artificial Sequence: Synthetic oligonucleotide
  Antisense strand to SEQ ID NO: 2331134
acucaagggaggaaacuga

SEQ ID NO: 2331136 - RNA, 19 nt, Artificial Sequence
  Description of Artificial Sequence: Synthetic oligonucleotide
  Sense strand starting at position 2048 of SEQ ID NO: 1885293
aguuuccucccuugaguuu

SEQ ID NO: 2331137 - RNA, 19 nt, Artificial Sequence
  Description of Artificial Sequence: Synthetic oligonucleotide
  Antisense strand to SEQ ID NO: 2331136
aaacucaagggaggaaacu

SEQ ID NO: 2331138 - RNA, 19 nt, Artificial Sequence
  Description of Artificial Sequence: Synthetic oligonucleotide
  Sense strand starting at position 2072 of SEQ ID NO: 1885293
guggacuuccggcagaguu

SEQ ID NO: 2331139 - RNA, 19 nt, Artificial Sequence
  Description of Artificial Sequence: Synthetic oligonucleotide
  Antisense strand to SEQ ID NO: 2331138
aacucugccggaaguccac

SEQ ID NO: 2331140 - RNA, 19 nt, Artificial Sequence
  Description of Artificial Sequence: Synthetic oligonucleotide
  Sense strand starting at position 2109 of SEQ ID NO: 1885293
gcaguuaaacaaugugucu

SEQ ID NO: 2331141 - RNA, 19 nt, Artificial Sequence
  Description of Artificial Sequence: Synthetic oligonucleotide
  Antisense strand to SEQ ID NO: 2331140
agacacauuguuuaacugc

SEQ ID NO: 2331142 - RNA, 19 nt, Artificial Sequence
  Description of Artificial Sequence: Synthetic oligonucleotide
  Sense strand starting at position 2114 of SEQ ID NO: 1885293
uaaacaaugugucuggcaa

SEQ ID NO: 2331143 - RNA, 19 nt, Artificial Sequence
  Description of Artificial Sequence: Synthetic oligonucleotide
  Antisense strand to SEQ ID NO: 2331142
uugccagacacauuguuua

SEQ ID NO: 2331144 - RNA, 19 nt, Artificial Sequence
  Description of Artificial Sequence: Synthetic oligonucleotide
  Sense strand starting at position 2115 of SEQ ID NO: 1885293
aaacaaugugucuggcaag

SEQ ID NO: 2331145 - RNA, 19 nt, Artificial Sequence
  Description of Artificial Sequence: Synthetic oligonucleotide
  Antisense strand to SEQ ID NO: 2331144
cuugccagacacauuguuu

SEQ ID NO: 2331146 - RNA, 19 nt, Artificial Sequence
  Description of Artificial Sequence: Synthetic oligonucleotide
  Sense strand starting at position 2208 of SEQ ID NO: 1885293
uguggaguccgcgaucuaa

SEQ ID NO: 2331147 - RNA, 19 nt, Artificial Sequence
  Description of Artificial Sequence: Synthetic oligonucleotide
  Antisense strand to SEQ ID NO: 2331146
uuagaucgcggacuccaca

SEQ ID NO: 2331148 - RNA, 19 nt, Artificial Sequence
  Description of Artificial Sequence: Synthetic oligonucleotide
  Sense strand starting at position 2267 of SEQ ID NO: 1885293
gcuggagaacucuagguuc

SEQ ID NO: 2331149 - RNA, 19 nt, Artificial Sequence
  Description of Artificial Sequence: Synthetic oligonucleotide
  Antisense strand to SEQ ID NO: 2331148
gaaccuagaguucuccagc

SEQ ID NO: 2331150 - RNA, 19 nt, Artificial Sequence
  Description of Artificial Sequence: Synthetic oligonucleotide
  Sense strand starting at position 2269 of SEQ ID NO: 1885293
uggagaacucuagguucuc

SEQ ID NO: 2331151 - RNA, 19 nt, Artificial Sequence
  Description of Artificial Sequence: Synthetic oligonucleotide
  Antisense strand to SEQ ID NO: 2331150
gagaaccuagaguucucca

SEQ ID NO: 2331152 - RNA, 19 nt, Artificial Sequence
  Description of Artificial Sequence: Synthetic oligonucleotide
  Sense strand starting at position 2270 of SEQ ID NO: 1885293
ggagaacucuagguucucu

SEQ ID NO: 2331153 - RNA, 19 nt, Artificial Sequence
  Description of Artificial Sequence: Synthetic oligonucleotide
  Antisense strand to SEQ ID NO: 2331152
agagaaccuagaguucucc

SEQ ID NO: 2331154 - RNA, 19 nt, Artificial Sequence
  Description of Artificial Sequence: Synthetic oligonucleotide
  Sense strand starting at position 2317 of SEQ ID NO: 1885293
guggcuugagguggguaau

SEQ ID NO: 2331155 - RNA, 19 nt, Artificial Sequence
  Description of Artificial Sequence: Synthetic oligonucleotide
  Antisense strand to SEQ ID NO: 2331154
auuacccaccucaagccac

SEQ ID NO: 2331156 - RNA, 19 nt, Artificial Sequence
  Description of Artificial Sequence: Synthetic oligonucleotide
  Sense strand starting at position 2383 of SEQ ID NO: 1885293
guaguuaguguaggagagu

SEQ ID NO: 2331157 - RNA, 19 nt, Artificial Sequence
  Description of Artificial Sequence: Synthetic oligonucleotide
  Antisense strand to SEQ ID NO: 2331156
acucuccuacacuaacuac

SEQ ID NO: 2331158 - RNA, 19 nt, Artificial Sequence
  Description of Artificial Sequence: Synthetic oligonucleotide
  Sense strand starting at position 2421 of SEQ ID NO: 1885293
aagacuuggcucugucacu

SEQ ID NO: 2331159 - RNA, 19 nt, Artificial Sequence
  Description of Artificial Sequence: Synthetic oligonucleotide
  Antisense strand to SEQ ID NO: 2331158
agugacagagccaagucuu

SEQ ID NO: 2331160 - RNA, 19 nt, Artificial Sequence
  Description of Artificial Sequence: Synthetic oligonucleotide
  Sense strand starting at position 2765 of SEQ ID NO: 1885293
ugaagaaguuacuuagcuu

SEQ ID NO: 2331161 - RNA, 19 nt, Artificial Sequence
  Description of Artificial Sequence: Synthetic oligonucleotide
  Antisense strand to SEQ ID NO: 2331160
aagcuaaguaacuucuuca

SEQ ID NO: 2331162 - RNA, 19 nt, Artificial Sequence
  Description of Artificial Sequence: Synthetic oligonucleotide
  Sense strand starting at position 2808 of SEQ ID NO: 1885293
guauaauggaagcaauagu

SEQ ID NO: 2331163 - RNA, 19 nt, Artificial Sequence
  Description of Artificial Sequence: Synthetic oligonucleotide
  Antisense strand to SEQ ID NO: 2331162
acuauugcuuccauuauac

SEQ ID NO: 2331164 - RNA, 19 nt, Artificial Sequence
  Description of Artificial Sequence: Synthetic oligonucleotide
  Sense strand starting at position 2847 of SEQ ID NO: 1885293
augccugguaaaugagaau

SEQ ID NO: 2331165 - RNA, 19 nt, Artificial Sequence
  Description of Artificial Sequence: Synthetic oligonucleotide
  Antisense strand to SEQ ID NO: 2331164
auucucauuuaccaggcau

SEQ ID NO: 2331166 - RNA, 19 nt, Artificial Sequence
  Description of Artificial Sequence: Synthetic oligonucleotide
  Sense strand starting at position 2907 of SEQ ID NO: 1885293
guucuacuauuaccaguga

SEQ ID NO: 2331167 - RNA, 19 nt, Artificial Sequence
  Description of Artificial Sequence: Synthetic oligonucleotide
  Antisense strand to SEQ ID NO: 2331166
ucacugguaauaguagaac

SEQ ID NO: 2331168 - RNA, 19 nt, Artificial Sequence
  Description of Artificial Sequence: Synthetic oligonucleotide
  Sense strand starting at position 3181 of SEQ ID NO: 1885293
gagggugcuaccugaauug

SEQ ID NO: 2331169 - RNA, 19 nt, Artificial Sequence
  Description of Artificial Sequence: Synthetic oligonucleotide
  Antisense strand to SEQ ID NO: 2331168
caauucagguagcacccuc

SEQ ID NO: 2331170 - RNA, 19 nt, Artificial Sequence
  Description of Artificial Sequence: Synthetic oligonucleotide
  Sense strand starting at position 3264 of SEQ ID NO: 1885293
ucgucugaaguugaggaua

SEQ ID NO: 2331171 - RNA, 19 nt, Artificial Sequence
  Description of Artificial Sequence: Synthetic oligonucleotide
  Antisense strand to SEQ ID NO: 2331170
uauccucaacuucagacga

SEQ ID NO: 2331172 - RNA, 19 nt, Artificial Sequence
  Description of Artificial Sequence: Synthetic oligonucleotide
  Sense strand starting at position 3443 of SEQ ID NO: 1885293
uuuggagauguuggaguuu

SEQ ID NO: 2331173 - RNA, 19 nt, Artificial Sequence
  Description of Artificial Sequence: Synthetic oligonucleotide
  Antisense strand to SEQ ID NO: 2331172
aaacuccaacaucuccaaa

SEQ ID NO: 2331174 - RNA, 19 nt, Artificial Sequence
  Description of Artificial Sequence: Synthetic oligonucleotide
  Sense strand starting at position 3532 of SEQ ID NO: 1885293
agcuccgugcauguaauua

SEQ ID NO: 2331175 - RNA, 19 nt, Artificial Sequence
  Description of Artificial Sequence: Synthetic oligonucleotide
  Antisense strand to SEQ ID NO: 2331174
uaauuacaugcacggagcu

SEQ ID NO: 2331176 - RNA, 19 nt, Artificial Sequence
  Description of Artificial Sequence: Synthetic oligonucleotide
  Sense strand starting at position 3620 of SEQ ID NO: 1885293
uuaugauucuggccugaga

SEQ ID NO: 2331177 - RNA, 19 nt, Artificial Sequence
  Description of Artificial Sequence: Synthetic oligonucleotide
  Antisense strand to SEQ ID NO: 2331176
ucucaggccagaaucauaa

SEQ ID NO: 2331178 - RNA, 19 nt, Artificial Sequence
  Description of Artificial Sequence: Synthetic oligonucleotide
  Sense strand starting at position 3622 of SEQ ID NO: 1885293
augauucuggccugagaag

SEQ ID NO: 2331179 - RNA, 19 nt, Artificial Sequence
  Description of Artificial Sequence: Synthetic oligonucleotide
  Antisense strand to SEQ ID NO: 2331178
cuucucaggccagaaucau

SEQ ID NO: 2331180 - RNA, 19 nt, Artificial Sequence
  Description of Artificial Sequence: Synthetic oligonucleotide
  Sense strand starting at position 3918 of SEQ ID NO: 1885293
cccucucaggucuaguaaa

SEQ ID NO: 2331181 - RNA, 19 nt, Artificial Sequence
  Description of Artificial Sequence: Synthetic oligonucleotide
  Antisense strand to SEQ ID NO: 2331180
uuuacuagaccugagaggg

SEQ ID NO: 2331182 - RNA, 19 nt, Artificial Sequence
  Description of Artificial Sequence: Synthetic oligonucleotide
  Sense strand starting at position 3938 of SEQ ID NO: 1885293
gugagcuuccuacagaaau

SEQ ID NO: 2331183 - RNA, 19 nt, Artificial Sequence
  Description of Artificial Sequence: Synthetic oligonucleotide
  Antisense strand to SEQ ID NO: 2331182
auuucuguaggaagcucac

SEQ ID NO: 2331184 - RNA, 19 nt, Artificial Sequence
  Description of Artificial Sequence: Synthetic oligonucleotide
  Sense strand starting at position 46 of SEQ ID NO: 1885294
ccucccuggccuugugaga

SEQ ID NO: 2331185 - RNA, 19 nt, Artificial Sequence
  Description of Artificial Sequence: Synthetic oligonucleotide
  Antisense strand to SEQ ID NO: 2331184
ucucacaaggccagggagg

SEQ ID NO: 2331186 - RNA, 19 nt, Artificial Sequence
  Description of Artificial Sequence: Synthetic oligonucleotide
  Sense strand starting at position 118 of SEQ ID NO: 1885294
gcacacaugucacuguuga

SEQ ID NO: 2331187 - RNA, 19 nt, Artificial Sequence
  Description of Artificial Sequence: Synthetic oligonucleotide
  Antisense strand to SEQ ID NO: 2331186
ucaacagugacaugugugc

SEQ ID NO: 2331188 - RNA, 19 nt, Artificial Sequence
  Description of Artificial Sequence: Synthetic oligonucleotide
  Sense strand starting at position 125 of SEQ ID NO: 1885294
ugucacuguugacuugaaa

SEQ ID NO: 2331189 - RNA, 19 nt, Artificial Sequence
  Description of Artificial Sequence: Synthetic oligonucleotide
  Antisense strand to SEQ ID NO: 2331188
uuucaagucaacagugaca

SEQ ID NO: 2331190 - RNA, 19 nt, Artificial Sequence
  Description of Artificial Sequence: Synthetic oligonucleotide
  Sense strand starting at position 251 of SEQ ID NO: 1885294
gcacucuguuaccuugaca

SEQ ID NO: 2331191 - RNA, 19 nt, Artificial Sequence
  Description of Artificial Sequence: Synthetic oligonucleotide
  Antisense strand to SEQ ID NO: 2331190
ugucaagguaacagagugc

SEQ ID NO: 2331192 - RNA, 19 nt, Artificial Sequence
  Description of Artificial Sequence: Synthetic oligonucleotide
  Sense strand starting at position 478 of SEQ ID NO: 1885294
gacagacaucccuagcugu

SEQ ID NO: 2331193 - RNA, 19 nt, Artificial Sequence
  Description of Artificial Sequence: Synthetic oligonucleotide
  Antisense strand to SEQ ID NO: 2331192
acagcuagggaugucuguc

SEQ ID NO: 2331194 - RNA, 19 nt, Artificial Sequence
  Description of Artificial Sequence: Synthetic oligonucleotide
  Sense strand starting at position 613 of SEQ ID NO: 1885294
acacaaucuuggcccaaga

SEQ ID NO: 2331195 - RNA, 19 nt, Artificial Sequence
  Description of Artificial Sequence: Synthetic oligonucleotide
  Antisense strand to SEQ ID NO: 2331194
ucuugggccaagauugugu

SEQ ID NO: 2331196 - RNA, 19 nt, Artificial Sequence
  Description of Artificial Sequence: Synthetic oligonucleotide
  Sense strand starting at position 615 of SEQ ID NO: 1885294
acaaucuuggcccaagauu

SEQ ID NO: 2331197 - RNA, 19 nt, Artificial Sequence
  Description of Artificial Sequence: Synthetic oligonucleotide
  Antisense strand to SEQ ID NO: 2331196
aaucuugggccaagauugu

SEQ ID NO: 2331198 - RNA, 19 nt, Artificial Sequence
  Description of Artificial Sequence: Synthetic oligonucleotide
  Sense strand starting at position 626 of SEQ ID NO: 1885294
ccaagauuugcuuggccca

SEQ ID NO: 2331199 - RNA, 19 nt, Artificial Sequence
  Description of Artificial Sequence: Synthetic oligonucleotide
  Antisense strand to SEQ ID NO: 2331198
ugggccaagcaaaucuugg

SEQ ID NO: 2331200 - RNA, 19 nt, Artificial Sequence
  Description of Artificial Sequence: Synthetic oligonucleotide
  Sense strand starting at position 650 of SEQ ID NO: 1885294
cuggacgcuugaucucaua

SEQ ID NO: 2331201 - RNA, 19 nt, Artificial Sequence
  Description of Artificial Sequence: Synthetic oligonucleotide
  Antisense strand to SEQ ID NO: 2331200
uaugagaucaagcguccag

SEQ ID NO: 2331202 - RNA, 19 nt, Artificial Sequence
  Description of Artificial Sequence: Synthetic oligonucleotide
  Sense strand starting at position 665 of SEQ ID NO: 1885294
cauagauggucuguccaug

SEQ ID NO: 2331203 - RNA, 19 nt, Artificial Sequence
  Description of Artificial Sequence: Synthetic oligonucleotide
  Antisense strand to SEQ ID NO: 2331202
cauggacagaccaucuaug

SEQ ID NO: 2331204 - RNA, 19 nt, Artificial Sequence
  Description of Artificial Sequence: Synthetic oligonucleotide
  Sense strand starting at position 777 of SEQ ID NO: 1885294
gugagaagcucucugugac

SEQ ID NO: 2331205 - RNA, 19 nt, Artificial Sequence
  Description of Artificial Sequence: Synthetic oligonucleotide
  Antisense strand to SEQ ID NO: 2331204
gucacagagagcuucucac

SEQ ID NO: 2331206 - RNA, 19 nt, Artificial Sequence
  Description of Artificial Sequence: Synthetic oligonucleotide
  Sense strand starting at position 899 of SEQ ID NO: 1885294
cuuuacguacguuacuaau

SEQ ID NO: 2331207 - RNA, 19 nt, Artificial Sequence
  Description of Artificial Sequence: Synthetic oligonucleotide
  Antisense strand to SEQ ID NO: 2331206
auuaguaacguacguaaag

SEQ ID NO: 2331208 - RNA, 19 nt, Artificial Sequence
  Description of Artificial Sequence: Synthetic oligonucleotide
  Sense strand starting at position 901 of SEQ ID NO: 1885294
uuacguacguuacuaauga

SEQ ID NO: 2331209 - RNA, 19 nt, Artificial Sequence
  Description of Artificial Sequence: Synthetic oligonucleotide
  Antisense strand to SEQ ID NO: 2331208
ucauuaguaacguacguaa

SEQ ID NO: 2331210 - RNA, 19 nt, Artificial Sequence
  Description of Artificial Sequence: Synthetic oligonucleotide
  Sense strand starting at position 1607 of SEQ ID NO: 1885294
gugcuugugauucuuuguu

SEQ ID NO: 2331211 - RNA, 19 nt, Artificial Sequence
  Description of Artificial Sequence: Synthetic oligonucleotide
  Antisense strand to SEQ ID NO: 2331210
aacaaagaaucacaagcac

SEQ ID NO: 2331212 - RNA, 19 nt, Artificial Sequence
  Description of Artificial Sequence: Synthetic oligonucleotide
  Sense strand starting at position 1919 of SEQ ID NO: 1885294
gcaucuuuccugcagagca

SEQ ID NO: 2331213 - RNA, 19 nt, Artificial Sequence
  Description of Artificial Sequence: Synthetic oligonucleotide
  Antisense strand to SEQ ID NO: 2331212
ugcucugcaggaaagaugc

SEQ ID NO: 2331214 - RNA, 19 nt, Artificial Sequence
  Description of Artificial Sequence: Synthetic oligonucleotide
  Sense strand starting at position 1973 of SEQ ID NO: 1885294
ucaguuuccucccuugagu

SEQ ID NO: 2331215 - RNA, 19 nt, Artificial Sequence
  Description of Artificial Sequence: Synthetic oligonucleotide
  Antisense strand to SEQ ID NO: 2331214
acucaagggaggaaacuga

SEQ ID NO: 2331216 - RNA, 19 nt, Artificial Sequence
  Description of Artificial Sequence: Synthetic oligonucleotide
  Sense strand starting at position 1975 of SEQ ID NO: 1885294
aguuuccucccuugaguuu

SEQ ID NO: 2331217 - RNA, 19 nt, Artificial Sequence
  Description of Artificial Sequence: Synthetic oligonucleotide
  Antisense strand to SEQ ID NO: 2331216
aaacucaagggaggaaacu

SEQ ID NO: 2331218 - RNA, 19 nt, Artificial Sequence
  Description of Artificial Sequence: Synthetic oligonucleotide
  Sense strand starting at position 1999 of SEQ ID NO: 1885294
guggacuuccggcagaguu

SEQ ID NO: 2331219 - RNA, 19 nt, Artificial Sequence
  Description of Artificial Sequence: Synthetic oligonucleotide
  Antisense strand to SEQ ID NO: 2331218
aacucugccggaaguccac

SEQ ID NO: 2331220 - RNA, 19 nt, Artificial Sequence
  Description of Artificial Sequence: Synthetic oligonucleotide
  Sense strand starting at position 2036 of SEQ ID NO: 1885294
gcaguuaaacaaugugucu

SEQ ID NO: 2331221 - RNA, 19 nt, Artificial Sequence
  Description of Artificial Sequence: Synthetic oligonucleotide
  Antisense strand to SEQ ID NO: 2331220
agacacauuguuuaacugc

SEQ ID NO: 2331222 - RNA, 19 nt, Artificial Sequence
  Description of Artificial Sequence: Synthetic oligonucleotide
  Sense strand starting at position 2041 of SEQ ID NO: 1885294
uaaacaaugugucuggcaa

SEQ ID NO: 2331223 - RNA, 19 nt, Artificial Sequence
  Description of Artificial Sequence: Synthetic oligonucleotide
  Antisense strand to SEQ ID NO: 2331222
uugccagacacauuguuua

SEQ ID NO: 2331224 - RNA, 19 nt, Artificial Sequence
  Description of Artificial Sequence: Synthetic oligonucleotide
  Sense strand starting at position 2042 of SEQ ID NO: 1885294
aaacaaugugucuggcaag

SEQ ID NO: 2331225 - RNA, 19 nt, Artificial Sequence
  Description of Artificial Sequence: Synthetic oligonucleotide
  Antisense strand to SEQ ID NO: 2331224
cuugccagacacauuguuu

SEQ ID NO: 2331226 - RNA, 19 nt, Artificial Sequence
  Description of Artificial Sequence: Synthetic oligonucleotide
  Sense strand starting at position 2135 of SEQ ID NO: 1885294
uguggaguccgcgaucuaa

SEQ ID NO: 2331227 - RNA, 19 nt, Artificial Sequence
  Description of Artificial Sequence: Synthetic oligonucleotide
  Antisense strand to SEQ ID NO: 2331226
uuagaucgcggacuccaca

SEQ ID NO: 2331228 - RNA, 19 nt, Artificial Sequence
  Description of Artificial Sequence: Synthetic oligonucleotide
  Sense strand starting at position 2194 of SEQ ID NO: 1885294
gcuggagaacucuagguuc

SEQ ID NO: 2331229 - RNA, 19 nt, Artificial Sequence
  Description of Artificial Sequence: Synthetic oligonucleotide
  Antisense strand to SEQ ID NO: 2331228
gaaccuagaguucuccagc

SEQ ID NO: 2331230 - RNA, 19 nt, Artificial Sequence
  Description of Artificial Sequence: Synthetic oligonucleotide
  Sense strand starting at position 2196 of SEQ ID NO: 1885294
uggagaacucuagguucuc

SEQ ID NO: 2331231 - RNA, 19 nt, Artificial Sequence
  Description of Artificial Sequence: Synthetic oligonucleotide
  Antisense strand to SEQ ID NO: 2331230
gagaaccuagaguucucca

SEQ ID NO: 2331232 - RNA, 19 nt, Artificial Sequence
  Description of Artificial Sequence: Synthetic oligonucleotide
  Sense strand starting at position 2197 of SEQ ID NO: 1885294
ggagaacucuagguucucu

SEQ ID NO: 2331233 - RNA, 19 nt, Artificial Sequence
  Description of Artificial Sequence: Synthetic oligonucleotide
  Antisense strand to SEQ ID NO: 2331232
agagaaccuagaguucucc

SEQ ID NO: 2331234 - RNA, 19 nt, Artificial Sequence
  Description of Artificial Sequence: Synthetic oligonucleotide
  Sense strand starting at position 2244 of SEQ ID NO: 1885294
guggcuugagguggguaau

SEQ ID NO: 2331235 - RNA, 19 nt, Artificial Sequence
  Description of Artificial Sequence: Synthetic oligonucleotide
  Antisense strand to SEQ ID NO: 2331234
auuacccaccucaagccac

SEQ ID NO: 2331236 - RNA, 19 nt, Artificial Sequence
  Description of Artificial Sequence: Synthetic oligonucleotide
  Sense strand starting at position 2310 of SEQ ID NO: 1885294
guaguuaguguaggagagu

SEQ ID NO: 2331237 - RNA, 19 nt, Artificial Sequence
  Description of Artificial Sequence: Synthetic oligonucleotide
  Antisense strand to SEQ ID NO: 2331236
acucuccuacacuaacuac

SEQ ID NO: 2331238 - RNA, 19 nt, Artificial Sequence
  Description of Artificial Sequence: Synthetic oligonucleotide
  Sense strand starting at position 2348 of SEQ ID NO: 1885294
aagacuuggcucugucacu

SEQ ID NO: 2331239 - RNA, 19 nt, Artificial Sequence
  Description of Artificial Sequence: Synthetic oligonucleotide
  Antisense strand to SEQ ID NO: 2331238
agugacagagccaagucuu

SEQ ID NO: 2331240 - RNA, 19 nt, Artificial Sequence
  Description of Artificial Sequence: Synthetic oligonucleotide
  Sense strand starting at position 2692 of SEQ ID NO: 1885294
ugaagaaguuacuuagcuu

SEQ ID NO: 2331241 - RNA, 19 nt, Artificial Sequence
  Description of Artificial Sequence: Synthetic oligonucleotide
  Antisense strand to SEQ ID NO: 2331240
aagcuaaguaacuucuuca

SEQ ID NO: 2331242 - RNA, 19 nt, Artificial Sequence
  Description of Artificial Sequence: Synthetic oligonucleotide
  Sense strand starting at position 2735 of SEQ ID NO: 1885294
guauaauggaagcaauagu

SEQ ID NO: 2331243 - RNA, 19 nt, Artificial Sequence
  Description of Artificial Sequence: Synthetic oligonucleotide
  Antisense strand to SEQ ID NO: 2331242
acuauugcuuccauuauac

SEQ ID NO: 2331244 - RNA, 19 nt, Artificial Sequence
  Description of Artificial Sequence: Synthetic oligonucleotide
  Sense strand starting at position 2774 of SEQ ID NO: 1885294
augccugguaaaugagaau

SEQ ID NO: 2331245 - RNA, 19 nt, Artificial Sequence
  Description of Artificial Sequence: Synthetic oligonucleotide
  Antisense strand to SEQ ID NO: 2331244
auucucauuuaccaggcau

SEQ ID NO: 2331246 - RNA, 19 nt, Artificial Sequence
  Description of Artificial Sequence: Synthetic oligonucleotide
  Sense strand starting at position 2834 of SEQ ID NO: 1885294
guucuacuauuaccaguga

SEQ ID NO: 2331247 - RNA, 19 nt, Artificial Sequence
  Description of Artificial Sequence: Synthetic oligonucleotide
  Antisense strand to SEQ ID NO: 2331246
ucacugguaauaguagaac

SEQ ID NO: 2331248 - RNA, 19 nt, Artificial Sequence
  Description of Artificial Sequence: Synthetic oligonucleotide
  Sense strand starting at position 3108 of SEQ ID NO: 1885294
gagggugcuaccugaauug

SEQ ID NO: 2331249 - RNA, 19 nt, Artificial Sequence
  Description of Artificial Sequence: Synthetic oligonucleotide
  Antisense strand to SEQ ID NO: 2331248
caauucagguagcacccuc

SEQ ID NO: 2331250 - RNA, 19 nt, Artificial Sequence
  Description of Artificial Sequence: Synthetic oligonucleotide
  Sense strand starting at position 3191 of SEQ ID NO: 1885294
ucgucugaaguugaggaua

SEQ ID NO: 2331251 - RNA, 19 nt, Artificial Sequence
  Description of Artificial Sequence: Synthetic oligonucleotide
  Antisense strand to SEQ ID NO: 2331250
uauccucaacuucagacga

SEQ ID NO: 2331252 - RNA, 19 nt, Artificial Sequence
  Description of Artificial Sequence: Synthetic oligonucleotide
  Sense strand starting at position 3370 of SEQ ID NO: 1885294
uuuggagauguuggaguuu

SEQ ID NO: 2331253 - RNA, 19 nt, Artificial Sequence
  Description of Artificial Sequence: Synthetic oligonucleotide
  Antisense strand to SEQ ID NO: 2331252
aaacuccaacaucuccaaa

SEQ ID NO: 2331254 - RNA, 19 nt, Artificial Sequence
  Description of Artificial Sequence: Synthetic oligonucleotide
  Sense strand starting at position 3459 of SEQ ID NO: 1885294
agcuccgugcauguaauua

SEQ ID NO: 2331255 - RNA, 19 nt, Artificial Sequence
  Description of Artificial Sequence: Synthetic oligonucleotide
  Antisense strand to SEQ ID NO: 2331254
uaauuacaugcacggagcu

SEQ ID NO: 2331256 - RNA, 19 nt, Artificial Sequence
  Description of Artificial Sequence: Synthetic oligonucleotide
  Sense strand starting at position 3547 of SEQ ID NO: 1885294
uuaugauucuggccugaga

SEQ ID NO: 2331257 - RNA, 19 nt, Artificial Sequence
  Description of Artificial Sequence: Synthetic oligonucleotide
  Antisense strand to SEQ ID NO: 2331256
ucucaggccagaaucauaa

SEQ ID NO: 2331258 - RNA, 19 nt, Artificial Sequence
  Description of Artificial Sequence: Synthetic oligonucleotide
  Sense strand starting at position 3549 of SEQ ID NO: 1885294
augauucuggccugagaag

SEQ ID NO: 2331259 - RNA, 19 nt, Artificial Sequence
  Description of Artificial Sequence: Synthetic oligonucleotide
  Antisense strand to SEQ ID NO: 2331258
cuucucaggccagaaucau

SEQ ID NO: 2331260 - RNA, 19 nt, Artificial Sequence
  Description of Artificial Sequence: Synthetic oligonucleotide
  Sense strand starting at position 3845 of SEQ ID NO: 1885294
cccucucaggucuaguaaa

SEQ ID NO: 2331261 - RNA, 19 nt, Artificial Sequence
  Description of Artificial Sequence: Synthetic oligonucleotide
  Antisense strand to SEQ ID NO: 2331260
uuuacuagaccugagaggg

SEQ ID NO: 2331262 - RNA, 19 nt, Artificial Sequence
  Description of Artificial Sequence: Synthetic oligonucleotide
  Sense strand starting at position 3865 of SEQ ID NO: 1885294
gugagcuuccuacagaaau

SEQ ID NO: 2331263 - RNA, 19 nt, Artificial Sequence
  Description of Artificial Sequence: Synthetic oligonucleotide
  Antisense strand to SEQ ID NO: 2331262
auuucuguaggaagcucac

SEQ ID NO: 2331264 - RNA, 19 nt, Artificial Sequence
  Description of Artificial Sequence: Synthetic oligonucleotide
  Sense strand starting at position 124 of SEQ ID NO: 1885295
uggugacugccuuaauguc

SEQ ID NO: 2331265 - RNA, 19 nt, Artificial Sequence
  Description of Artificial Sequence: Synthetic oligonucleotide
  Antisense strand to SEQ ID NO: 2331264
gacauuaaggcagucacca

SEQ ID NO: 2331266 - RNA, 19 nt, Artificial Sequence
  Description of Artificial Sequence: Synthetic oligonucleotide
  Sense strand starting at position 193 of SEQ ID NO: 1885295
ucugacucacucgaugagu

SEQ ID NO: 2331267 - RNA, 19 nt, Artificial Sequence
  Description of Artificial Sequence: Synthetic oligonucleotide
  Antisense strand to SEQ ID NO: 2331266
acucaucgagugagucaga

SEQ ID NO: 2331268 - RNA, 19 nt, Artificial Sequence
  Description of Artificial Sequence: Synthetic oligonucleotide
  Sense strand starting at position 195 of SEQ ID NO: 1885295
ugacucacucgaugagucu

SEQ ID NO: 2331269 - RNA, 19 nt, Artificial Sequence
  Description of Artificial Sequence: Synthetic oligonucleotide
  Antisense strand to SEQ ID NO: 2331268
agacucaucgagugaguca

SEQ ID NO: 2331270 - RNA, 19 nt, Artificial Sequence
  Description of Artificial Sequence: Synthetic oligonucleotide
  Sense strand starting at position 201 of SEQ ID NO: 1885295
acucgaugagucugagaua

SEQ ID NO: 2331271 - RNA, 19 nt, Artificial Sequence
  Description of Artificial Sequence: Synthetic oligonucleotide
  Antisense strand to SEQ ID NO: 2331270
uaucucagacucaucgagu

SEQ ID NO: 2331272 - RNA, 19 nt, Artificial Sequence
  Description of Artificial Sequence: Synthetic oligonucleotide
  Sense strand starting at position 259 of SEQ ID NO: 1885295
gugcgauguaaccacugaa

SEQ ID NO: 2331273 - RNA, 19 nt, Artificial Sequence
  Description of Artificial Sequence: Synthetic oligonucleotide
  Antisense strand to SEQ ID NO: 2331272
uucagugguuacaucgcac

SEQ ID NO: 2331274 - RNA, 19 nt, Artificial Sequence
  Description of Artificial Sequence: Synthetic oligonucleotide
  Sense strand starting at position 425 of SEQ ID NO: 1885295
ugacuaugauuaguuuaga

SEQ ID NO: 2331275 - RNA, 19 nt, Artificial Sequence
  Description of Artificial Sequence: Synthetic oligonucleotide
  Antisense strand to SEQ ID NO: 2331274
ucuaaacuaaucauaguca

SEQ ID NO: 2331276 - RNA, 19 nt, Artificial Sequence
  Description of Artificial Sequence: Synthetic oligonucleotide
  Sense strand starting at position 426 of SEQ ID NO: 1885295
gacuaugauuaguuuagaa

SEQ ID NO: 2331277 - RNA, 19 nt, Artificial Sequence
  Description of Artificial Sequence: Synthetic oligonucleotide
  Antisense strand to SEQ ID NO: 2331276
uucuaaacuaaucauaguc

SEQ ID NO: 2331278 - RNA, 19 nt, Artificial Sequence
  Description of Artificial Sequence: Synthetic oligonucleotide
  Sense strand starting at position 433 of SEQ ID NO: 1885295
auuaguuuagaaggaggua

SEQ ID NO: 2331279 - RNA, 19 nt, Artificial Sequence
  Description of Artificial Sequence: Synthetic oligonucleotide
  Antisense strand to SEQ ID NO: 2331278
uaccuccuucuaaacuaau

SEQ ID NO: 2331280 - RNA, 19 nt, Artificial Sequence
  Description of Artificial Sequence: Synthetic oligonucleotide
  Sense strand starting at position 446 of SEQ ID NO: 1885295
gagguaacuugagugguga

SEQ ID NO: 2331281 - RNA, 19 nt, Artificial Sequence
  Description of Artificial Sequence: Synthetic oligonucleotide
  Antisense strand to SEQ ID NO: 2331280
ucaccacucaaguuaccuc

SEQ ID NO: 2331282 - RNA, 19 nt, Artificial Sequence
  Description of Artificial Sequence: Synthetic oligonucleotide
  Sense strand starting at position 481 of SEQ ID NO: 1885295
cuguuuaaugagggauuga

SEQ ID NO: 2331283 - RNA, 19 nt, Artificial Sequence
  Description of Artificial Sequence: Synthetic oligonucleotide
  Antisense strand to SEQ ID NO: 2331282
ucaaucccucauuaaacag

SEQ ID NO: 2331284 - RNA, 19 nt, Artificial Sequence
  Description of Artificial Sequence: Synthetic oligonucleotide
  Sense strand starting at position 509 of SEQ ID NO: 1885295
ggguguugacaauguggaa

SEQ ID NO: 2331285 - RNA, 19 nt, Artificial Sequence
  Description of Artificial Sequence: Synthetic oligonucleotide
  Antisense strand to SEQ ID NO: 2331284
uuccacauugucaacaccc

SEQ ID NO: 2331286 - RNA, 19 nt, Artificial Sequence
  Description of Artificial Sequence: Synthetic oligonucleotide
  Sense strand starting at position 909 of SEQ ID NO: 1885295
ugaagugugacucagagca

SEQ ID NO: 2331287 - RNA, 19 nt, Artificial Sequence
  Description of Artificial Sequence: Synthetic oligonucleotide
  Antisense strand to SEQ ID NO: 2331286
ugcucugagucacacuuca

SEQ ID NO: 2331288 - RNA, 19 nt, Artificial Sequence
  Description of Artificial Sequence: Synthetic oligonucleotide
  Sense strand starting at position 971 of SEQ ID NO: 1885295
cuuuccauggucuauaagu

SEQ ID NO: 2331289 - RNA, 19 nt, Artificial Sequence
  Description of Artificial Sequence: Synthetic oligonucleotide
  Antisense strand to SEQ ID NO: 2331288
acuuauagaccauggaaag

SEQ ID NO: 2331290 - RNA, 19 nt, Artificial Sequence
  Description of Artificial Sequence: Synthetic oligonucleotide
  Sense strand starting at position 973 of SEQ ID NO: 1885295
uuccauggucuauaaguau

SEQ ID NO: 2331291 - RNA, 19 nt, Artificial Sequence
  Description of Artificial Sequence: Synthetic oligonucleotide
  Antisense strand to SEQ ID NO: 2331290
auacuuauagaccauggaa

SEQ ID NO: 2331292 - RNA, 19 nt, Artificial Sequence
  Description of Artificial Sequence: Synthetic oligonucleotide
  Sense strand starting at position 1059 of SEQ ID NO: 1885295
cacaguuagcgggagacau

SEQ ID NO: 2331293 - RNA, 19 nt, Artificial Sequence
  Description of Artificial Sequence: Synthetic oligonucleotide
  Antisense strand to SEQ ID NO: 2331292
augucucccgcuaacugug

SEQ ID NO: 2331294 - RNA, 19 nt, Artificial Sequence
  Description of Artificial Sequence: Synthetic oligonucleotide
  Sense strand starting at position 1070 of SEQ ID NO: 1885295
ggagacaugaaguguauau

SEQ ID NO: 2331295 - RNA, 19 nt, Artificial Sequence
  Description of Artificial Sequence: Synthetic oligonucleotide
  Antisense strand to SEQ ID NO: 2331294
auauacacuucaugucucc

SEQ ID NO: 2331296 - RNA, 19 nt, Artificial Sequence
  Description of Artificial Sequence: Synthetic oligonucleotide
  Sense strand starting at position 1072 of SEQ ID NO: 1885295
agacaugaaguguauaugu

SEQ ID NO: 2331297 - RNA, 19 nt, Artificial Sequence
  Description of Artificial Sequence: Synthetic oligonucleotide
  Antisense strand to SEQ ID NO: 2331296
acauauacacuucaugucu

SEQ ID NO: 2331298 - RNA, 19 nt, Artificial Sequence
  Description of Artificial Sequence: Synthetic oligonucleotide
  Sense strand starting at position 1074 of SEQ ID NO: 1885295
acaugaaguguauauguau

SEQ ID NO: 2331299 - RNA, 19 nt, Artificial Sequence
  Description of Artificial Sequence: Synthetic oligonucleotide
  Antisense strand to SEQ ID NO: 2331298
auacauauacacuucaugu

SEQ ID NO: 2331300 - RNA, 19 nt, Artificial Sequence
  Description of Artificial Sequence: Synthetic oligonucleotide
  Sense strand starting at position 1363 of SEQ ID NO: 1885295
agacaccagcaguaugauu

SEQ ID NO: 2331301 - RNA, 19 nt, Artificial Sequence
  Description of Artificial Sequence: Synthetic oligonucleotide
  Antisense strand to SEQ ID NO: 2331300
aaucauacugcuggugucu

SEQ ID NO: 2331302 - RNA, 19 nt, Artificial Sequence
  Description of Artificial Sequence: Synthetic oligonucleotide
  Sense strand starting at position 1389 of SEQ ID NO: 1885295
ugaccugguacuugugaca

SEQ ID NO: 2331303 - RNA, 19 nt, Artificial Sequence
  Description of Artificial Sequence: Synthetic oligonucleotide
  Antisense strand to SEQ ID NO: 2331302
ugucacaaguaccagguca

SEQ ID NO: 2331304 - RNA, 19 nt, Artificial Sequence
  Description of Artificial Sequence: Synthetic oligonucleotide
  Sense strand starting at position 1409 of SEQ ID NO: 1885295
accuuuaguaggugacagu

SEQ ID NO: 2331305 - RNA, 19 nt, Artificial Sequence
  Description of Artificial Sequence: Synthetic oligonucleotide
  Antisense strand to SEQ ID NO: 2331304
acugucaccuacuaaaggu

SEQ ID NO: 2331306 - RNA, 19 nt, Artificial Sequence
  Description of Artificial Sequence: Synthetic oligonucleotide
  Sense strand starting at position 2048 of SEQ ID NO: 1885295
uucugaaguuagucugaac

SEQ ID NO: 2331307 - RNA, 19 nt, Artificial Sequence
  Description of Artificial Sequence: Synthetic oligonucleotide
  Antisense strand to SEQ ID NO: 2331306
guucagacuaacuucagaa

SEQ ID NO: 2331308 - RNA, 19 nt, Artificial Sequence
  Description of Artificial Sequence: Synthetic oligonucleotide
  Sense strand starting at position 2128 of SEQ ID NO: 1885295
uuagaacaccaguaauugu

SEQ ID NO: 2331309 - RNA, 19 nt, Artificial Sequence
  Description of Artificial Sequence: Synthetic oligonucleotide
  Antisense strand to SEQ ID NO: 2331308
acaauuacugguguucuaa

SEQ ID NO: 2331310 - RNA, 19 nt, Artificial Sequence
  Description of Artificial Sequence: Synthetic oligonucleotide
  Sense strand starting at position 2195 of SEQ ID NO: 1885295
ucaccaaaguccuuagaag

SEQ ID NO: 2331311 - RNA, 19 nt, Artificial Sequence
  Description of Artificial Sequence: Synthetic oligonucleotide
  Antisense strand to SEQ ID NO: 2331310
cuucuaaggacuuugguga

SEQ ID NO: 2331312 - RNA, 19 nt, Artificial Sequence
  Description of Artificial Sequence: Synthetic oligonucleotide
  Sense strand starting at position 2209 of SEQ ID NO: 1885295
agaagauacuuccucagua

SEQ ID NO: 2331313 - RNA, 19 nt, Artificial Sequence
  Description of Artificial Sequence: Synthetic oligonucleotide
  Antisense strand to SEQ ID NO: 2331312
uacugaggaaguaucuucu

SEQ ID NO: 2331314 - RNA, 19 nt, Artificial Sequence
  Description of Artificial Sequence: Synthetic oligonucleotide
  Sense strand starting at position 2210 of SEQ ID NO: 1885295
gaagauacuuccucaguag

SEQ ID NO: 2331315 - RNA, 19 nt, Artificial Sequence
  Description of Artificial Sequence: Synthetic oligonucleotide
  Antisense strand to SEQ ID NO: 2331314
cuacugaggaaguaucuuc

SEQ ID NO: 2331316 - RNA, 19 nt, Artificial Sequence
  Description of Artificial Sequence: Synthetic oligonucleotide
  Sense strand starting at position 2328 of SEQ ID NO: 1885295
auuguuagcaaagggaaau

SEQ ID NO: 2331317 - RNA, 19 nt, Artificial Sequence
  Description of Artificial Sequence: Synthetic oligonucleotide
  Antisense strand to SEQ ID NO: 2331316
auuucccuuugcuaacaau

SEQ ID NO: 2331318 - RNA, 19 nt, Artificial Sequence
  Description of Artificial Sequence: Synthetic oligonucleotide
  Sense strand starting at position 2329 of SEQ ID NO: 1885295
uuguuagcaaagggaaauu

SEQ ID NO: 2331319 - RNA, 19 nt, Artificial Sequence
  Description of Artificial Sequence: Synthetic oligonucleotide
  Antisense strand to SEQ ID NO: 2331318
aauuucccuuugcuaacaa

SEQ ID NO: 2331320 - RNA, 19 nt, Artificial Sequence
  Description of Artificial Sequence: Synthetic oligonucleotide
  Sense strand starting at position 2342 of SEQ ID NO: 1885295
gaaauugugacauaguggu

SEQ ID NO: 2331321 - RNA, 19 nt, Artificial Sequence
  Description of Artificial Sequence: Synthetic oligonucleotide
  Antisense strand to SEQ ID NO: 2331320
accacuaugucacaauuuc

SEQ ID NO: 2331322 - RNA, 19 nt, Artificial Sequence
  Description of Artificial Sequence: Synthetic oligonucleotide
  Sense strand starting at position 2356 of SEQ ID NO: 1885295
guggucuuuccucauacaa

SEQ ID NO: 2331323 - RNA, 19 nt, Artificial Sequence
  Description of Artificial Sequence: Synthetic oligonucleotide
  Antisense strand to SEQ ID NO: 2331322
uuguaugaggaaagaccac

SEQ ID NO: 2331324 - RNA, 19 nt, Artificial Sequence
  Description of Artificial Sequence: Synthetic oligonucleotide
  Sense strand starting at position 2877 of SEQ ID NO: 1885295
cgacuccuuccauagaguu

SEQ ID NO: 2331325 - RNA, 19 nt, Artificial Sequence
  Description of Artificial Sequence: Synthetic oligonucleotide
  Antisense strand to SEQ ID NO: 2331324
aacucuauggaaggagucg

SEQ ID NO: 2331326 - RNA, 19 nt, Artificial Sequence
  Description of Artificial Sequence: Synthetic oligonucleotide
  Sense strand starting at position 2992 of SEQ ID NO: 1885295
ucuuuauaagaugguuguu

SEQ ID NO: 2331327 - RNA, 19 nt, Artificial Sequence
  Description of Artificial Sequence: Synthetic oligonucleotide
  Antisense strand to SEQ ID NO: 2331326
aacaaccaucuuauaaaga

SEQ ID NO: 2331328 - RNA, 19 nt, Artificial Sequence
  Description of Artificial Sequence: Synthetic oligonucleotide
  Sense strand starting at position 2997 of SEQ ID NO: 1885295
auaagaugguuguuuccaa

SEQ ID NO: 2331329 - RNA, 19 nt, Artificial Sequence
  Description of Artificial Sequence: Synthetic oligonucleotide
  Antisense strand to SEQ ID NO: 2331328
uuggaaacaaccaucuuau

SEQ ID NO: 2331330 - RNA, 19 nt, Artificial Sequence
  Description of Artificial Sequence: Synthetic oligonucleotide
  Sense strand starting at position 2998 of SEQ ID NO: 1885295
uaagaugguuguuuccaaa

SEQ ID NO: 2331331 - RNA, 19 nt, Artificial Sequence
  Description of Artificial Sequence: Synthetic oligonucleotide
  Antisense strand to SEQ ID NO: 2331330
uuuggaaacaaccaucuua

SEQ ID NO: 2331332 - RNA, 19 nt, Artificial Sequence
  Description of Artificial Sequence: Synthetic oligonucleotide
  Sense strand starting at position 3543 of SEQ ID NO: 1885295
acgaccagccaucauauua

SEQ ID NO: 2331333 - RNA, 19 nt, Artificial Sequence
  Description of Artificial Sequence: Synthetic oligonucleotide
  Antisense strand to SEQ ID NO: 2331332
uaauaugauggcuggucgu

SEQ ID NO: 2331334 - RNA, 19 nt, Artificial Sequence
  Description of Artificial Sequence: Synthetic oligonucleotide
  Sense strand starting at position 3578 of SEQ ID NO: 1885295
auuacaaauuguuccuagu

SEQ ID NO: 2331335 - RNA, 19 nt, Artificial Sequence
  Description of Artificial Sequence: Synthetic oligonucleotide
  Antisense strand to SEQ ID NO: 2331334
acuaggaacaauuuguaau

SEQ ID NO: 2331336 - RNA, 19 nt, Artificial Sequence
  Description of Artificial Sequence: Synthetic oligonucleotide
  Sense strand starting at position 3630 of SEQ ID NO: 1885295
ccacauaauugagugcuuu

SEQ ID NO: 2331337 - RNA, 19 nt, Artificial Sequence
  Description of Artificial Sequence: Synthetic oligonucleotide
  Antisense strand to SEQ ID NO: 2331336
aaagcacucaauuaugugg

SEQ ID NO: 2331338 - RNA, 19 nt, Artificial Sequence
  Description of Artificial Sequence: Synthetic oligonucleotide
  Sense strand starting at position 3697 of SEQ ID NO: 1885295
uaagguaucagagaggugu

SEQ ID NO: 2331339 - RNA, 19 nt, Artificial Sequence
  Description of Artificial Sequence: Synthetic oligonucleotide
  Antisense strand to SEQ ID NO: 2331338
acaccucucugauaccuua

SEQ ID NO: 2331340 - RNA, 19 nt, Artificial Sequence
  Description of Artificial Sequence: Synthetic oligonucleotide
  Sense strand starting at position 3857 of SEQ ID NO: 1885295
ggaagccuuccuggauucu

SEQ ID NO: 2331341 - RNA, 19 nt, Artificial Sequence
  Description of Artificial Sequence: Synthetic oligonucleotide
  Antisense strand to SEQ ID NO: 2331340
agaauccaggaaggcuucc

SEQ ID NO: 2331342 - RNA, 19 nt, Artificial Sequence
  Description of Artificial Sequence: Synthetic oligonucleotide
  Sense strand starting at position 3908 of SEQ ID NO: 1885295
acugaauaagugcauacua

SEQ ID NO: 2331343 - RNA, 19 nt, Artificial Sequence
  Description of Artificial Sequence: Synthetic oligonucleotide
  Antisense strand to SEQ ID NO: 2331342
uaguaugcacuuauucagu

SEQ ID NO: 2331344 - RNA, 19 nt, Artificial Sequence
  Description of Artificial Sequence: Synthetic oligonucleotide
  Sense strand starting at position 304 of SEQ ID NO: 1885296
gaguguucugcggcugagu

SEQ ID NO: 2331345 - RNA, 19 nt, Artificial Sequence
  Description of Artificial Sequence: Synthetic oligonucleotide
  Antisense strand to SEQ ID NO: 2331344
acucagccgcagaacacuc

SEQ ID NO: 2331346 - RNA, 19 nt, Artificial Sequence
  Description of Artificial Sequence: Synthetic oligonucleotide
  Sense strand starting at position 305 of SEQ ID NO: 1885296
aguguucugcggcugaguu

SEQ ID NO: 2331347 - RNA, 19 nt, Artificial Sequence
  Description of Artificial Sequence: Synthetic oligonucleotide
  Antisense strand to SEQ ID NO: 2331346
aacucagccgcagaacacu

SEQ ID NO: 2331348 - RNA, 19 nt, Artificial Sequence
  Description of Artificial Sequence: Synthetic oligonucleotide
  Sense strand starting at position 473 of SEQ ID NO: 1885296
gcaguucucacuuaaggag

SEQ ID NO: 2331349 - RNA, 19 nt, Artificial Sequence
  Description of Artificial Sequence: Synthetic oligonucleotide
  Antisense strand to SEQ ID NO: 2331348
cuccuuaagugagaacugc

SEQ ID NO: 2331350 - RNA, 19 nt, Artificial Sequence
  Description of Artificial Sequence: Synthetic oligonucleotide
  Sense strand starting at position 616 of SEQ ID NO: 1885296
uuguucucugccuaaggaa

SEQ ID NO: 2331351 - RNA, 19 nt, Artificial Sequence
  Description of Artificial Sequence: Synthetic oligonucleotide
  Antisense strand to SEQ ID NO: 2331350
uuccuuaggcagagaacaa

SEQ ID NO: 2331352 - RNA, 19 nt, Artificial Sequence
  Description of Artificial Sequence: Synthetic oligonucleotide
  Sense strand starting at position 662 of SEQ ID NO: 1885296
aggacugaccuuugguaca

SEQ ID NO: 2331353 - RNA, 19 nt, Artificial Sequence
  Description of Artificial Sequence: Synthetic oligonucleotide
  Antisense strand to SEQ ID NO: 2331352
uguaccaaaggucaguccu

SEQ ID NO: 2331354 - RNA, 19 nt, Artificial Sequence
  Description of Artificial Sequence: Synthetic oligonucleotide
  Sense strand starting at position 664 of SEQ ID NO: 1885296
gacugaccuuugguacaau

SEQ ID NO: 2331355 - RNA, 19 nt, Artificial Sequence
  Description of Artificial Sequence: Synthetic oligonucleotide
  Antisense strand to SEQ ID NO: 2331354
auuguaccaaaggucaguc

SEQ ID NO: 2331356 - RNA, 19 nt, Artificial Sequence
  Description of Artificial Sequence: Synthetic oligonucleotide
  Sense strand starting at position 667 of SEQ ID NO: 1885296
ugaccuuugguacaauguu

SEQ ID NO: 2331357 - RNA, 19 nt, Artificial Sequence
  Description of Artificial Sequence: Synthetic oligonucleotide
  Antisense strand to SEQ ID NO: 2331356
aacauuguaccaaagguca

SEQ ID NO: 2331358 - RNA, 19 nt, Artificial Sequence
  Description of Artificial Sequence: Synthetic oligonucleotide
  Sense strand starting at position 674 of SEQ ID NO: 1885296
ugguacaauguuggaaaua

SEQ ID NO: 2331359 - RNA, 19 nt, Artificial Sequence
  Description of Artificial Sequence: Synthetic oligonucleotide
  Antisense strand to SEQ ID NO: 2331358
uauuuccaacauuguacca

SEQ ID NO: 2331360 - RNA, 19 nt, Artificial Sequence
  Description of Artificial Sequence: Synthetic oligonucleotide
  Sense strand starting at position 1202 of SEQ ID NO: 1885296
cagagcuuuccugauggag

SEQ ID NO: 2331361 - RNA, 19 nt, Artificial Sequence
  Description of Artificial Sequence: Synthetic oligonucleotide
  Antisense strand to SEQ ID NO: 2331360
cuccaucaggaaagcucug

SEQ ID NO: 2331362 - RNA, 19 nt, Artificial Sequence
  Description of Artificial Sequence: Synthetic oligonucleotide
  Sense strand starting at position 1325 of SEQ ID NO: 1885296
ggugaacugugguuagaua

SEQ ID NO: 2331363 - RNA, 19 nt, Artificial Sequence
  Description of Artificial Sequence: Synthetic oligonucleotide
  Antisense strand to SEQ ID NO: 2331362
uaucuaaccacaguucacc

SEQ ID NO: 2331364 - RNA, 19 nt, Artificial Sequence
  Description of Artificial Sequence: Synthetic oligonucleotide
  Sense strand starting at position 1326 of SEQ ID NO: 1885296
gugaacugugguuagauaa

SEQ ID NO: 2331365 - RNA, 19 nt, Artificial Sequence
  Description of Artificial Sequence: Synthetic oligonucleotide
  Antisense strand to SEQ ID NO: 2331364
uuaucuaaccacaguucac

SEQ ID NO: 2331366 - RNA, 19 nt, Artificial Sequence
  Description of Artificial Sequence: Synthetic oligonucleotide
  Sense strand starting at position 1345 of SEQ ID NO: 1885296
uaaagaguugcuggugaaa

SEQ ID NO: 2331367 - RNA, 19 nt, Artificial Sequence
  Description of Artificial Sequence: Synthetic oligonucleotide
  Antisense strand to SEQ ID NO: 2331366
uuucaccagcaacucuuua

SEQ ID NO: 2331368 - RNA, 19 nt, Artificial Sequence
  Description of Artificial Sequence: Synthetic oligonucleotide
  Sense strand starting at position 1357 of SEQ ID NO: 1885296
ggugaaaugccucagggug

SEQ ID NO: 2331369 - RNA, 19 nt, Artificial Sequence
  Description of Artificial Sequence: Synthetic oligonucleotide
  Antisense strand to SEQ ID NO: 2331368
cacccugaggcauuucacc

SEQ ID NO: 2331370 - RNA, 19 nt, Artificial Sequence
  Description of Artificial Sequence: Synthetic oligonucleotide
  Sense strand starting at position 1496 of SEQ ID NO: 1885296
cucuauagcucaucuagag

SEQ ID NO: 2331371 - RNA, 19 nt, Artificial Sequence
  Description of Artificial Sequence: Synthetic oligonucleotide
  Antisense strand to SEQ ID NO: 2331370
cucuagaugagcuauagag

SEQ ID NO: 2331372 - RNA, 19 nt, Artificial Sequence
  Description of Artificial Sequence: Synthetic oligonucleotide
  Sense strand starting at position 1506 of SEQ ID NO: 1885296
caucuagagugagccaaau

SEQ ID NO: 2331373 - RNA, 19 nt, Artificial Sequence
  Description of Artificial Sequence: Synthetic oligonucleotide
  Antisense strand to SEQ ID NO: 2331372
auuuggcucacucuagaug

SEQ ID NO: 2331374 - RNA, 19 nt, Artificial Sequence
  Description of Artificial Sequence: Synthetic oligonucleotide
  Sense strand starting at position 1615 of SEQ ID NO: 1885296
acauaauugagcugaggug

SEQ ID NO: 2331375 - RNA, 19 nt, Artificial Sequence
  Description of Artificial Sequence: Synthetic oligonucleotide
  Antisense strand to SEQ ID NO: 2331374
caccucagcucaauuaugu

SEQ ID NO: 2331376 - RNA, 19 nt, Artificial Sequence
  Description of Artificial Sequence: Synthetic oligonucleotide
  Sense strand starting at position 1650 of SEQ ID NO: 1885296
agagguuuauaagcuaaua

SEQ ID NO: 2331377 - RNA, 19 nt, Artificial Sequence
  Description of Artificial Sequence: Synthetic oligonucleotide
  Antisense strand to SEQ ID NO: 2331376
uauuagcuuauaaaccucu

SEQ ID NO: 2331378 - RNA, 19 nt, Artificial Sequence
  Description of Artificial Sequence: Synthetic oligonucleotide
  Sense strand starting at position 1662 of SEQ ID NO: 1885296
gcuaauaguggugaugaag

SEQ ID NO: 2331379 - RNA, 19 nt, Artificial Sequence
  Description of Artificial Sequence: Synthetic oligonucleotide
  Antisense strand to SEQ ID NO: 2331378
cuucaucaccacuauuagc

SEQ ID NO: 2331380 - RNA, 19 nt, Artificial Sequence
  Description of Artificial Sequence: Synthetic oligonucleotide
  Sense strand starting at position 1685 of SEQ ID NO: 1885296
ggaagacucuuaguuccac

SEQ ID NO: 2331381 - RNA, 19 nt, Artificial Sequence
  Description of Artificial Sequence: Synthetic oligonucleotide
  Antisense strand to SEQ ID NO: 2331380
guggaacuaagagucuucc

SEQ ID NO: 2331382 - RNA, 19 nt, Artificial Sequence
  Description of Artificial Sequence: Synthetic oligonucleotide
  Sense strand starting at position 1770 of SEQ ID NO: 1885296
uggcaaauuguugaugauu

SEQ ID NO: 2331383 - RNA, 19 nt, Artificial Sequence
  Description of Artificial Sequence: Synthetic oligonucleotide
  Antisense strand to SEQ ID NO: 2331382
aaucaucaacaauuugcca

SEQ ID NO: 2331384 - RNA, 19 nt, Artificial Sequence
  Description of Artificial Sequence: Synthetic oligonucleotide
  Sense strand starting at position 1776 of SEQ ID NO: 1885296
auuguugaugauuguugaa

SEQ ID NO: 2331385 - RNA, 19 nt, Artificial Sequence
  Description of Artificial Sequence: Synthetic oligonucleotide
  Antisense strand to SEQ ID NO: 2331384
uucaacaaucaucaacaau

SEQ ID NO: 2331386 - RNA, 19 nt, Artificial Sequence
  Description of Artificial Sequence: Synthetic oligonucleotide
  Sense strand starting at position 1778 of SEQ ID NO: 1885296
uguugaugauuguugaaac

SEQ ID NO: 2331387 - RNA, 19 nt, Artificial Sequence
  Description of Artificial Sequence: Synthetic oligonucleotide
  Antisense strand to SEQ ID NO: 2331386
guuucaacaaucaucaaca

SEQ ID NO: 2331388 - RNA, 19 nt, Artificial Sequence
  Description of Artificial Sequence: Synthetic oligonucleotide
  Sense strand starting at position 1788 of SEQ ID NO: 1885296
uguugaaacugagcaauga

SEQ ID NO: 2331389 - RNA, 19 nt, Artificial Sequence
  Description of Artificial Sequence: Synthetic oligonucleotide
  Antisense strand to SEQ ID NO: 2331388
ucauugcucaguuucaaca

SEQ ID NO: 2331390 - RNA, 19 nt, Artificial Sequence
  Description of Artificial Sequence: Synthetic oligonucleotide
  Sense strand starting at position 1792 of SEQ ID NO: 1885296
gaaacugagcaaugaguau

SEQ ID NO: 2331391 - RNA, 19 nt, Artificial Sequence
  Description of Artificial Sequence: Synthetic oligonucleotide
  Antisense strand to SEQ ID NO: 2331390
auacucauugcucaguuuc

SEQ ID NO: 2331392 - RNA, 19 nt, Artificial Sequence
  Description of Artificial Sequence: Synthetic oligonucleotide
  Sense strand starting at position 1818 of SEQ ID NO: 1885296
cagggaucauuaccugacu

SEQ ID NO: 2331393 - RNA, 19 nt, Artificial Sequence
  Description of Artificial Sequence: Synthetic oligonucleotide
  Antisense strand to SEQ ID NO: 2331392
agucagguaaugaucccug

SEQ ID NO: 2331394 - RNA, 19 nt, Artificial Sequence
  Description of Artificial Sequence: Synthetic oligonucleotide
  Sense strand starting at position 2018 of SEQ ID NO: 1885296
ugggucaacccugaaaggu

SEQ ID NO: 2331395 - RNA, 19 nt, Artificial Sequence
  Description of Artificial Sequence: Synthetic oligonucleotide
  Antisense strand to SEQ ID NO: 2331394
accuuucaggguugaccca

SEQ ID NO: 2331396 - RNA, 19 nt, Artificial Sequence
  Description of Artificial Sequence: Synthetic oligonucleotide
  Sense strand starting at position 2481 of SEQ ID NO: 1885296
agcccaaacgcucaaauua

SEQ ID NO: 2331397 - RNA, 19 nt, Artificial Sequence
  Description of Artificial Sequence: Synthetic oligonucleotide
  Antisense strand to SEQ ID NO: 2331396
uaauuugagcguuugggcu

SEQ ID NO: 2331398 - RNA, 19 nt, Artificial Sequence
  Description of Artificial Sequence: Synthetic oligonucleotide
  Sense strand starting at position 2776 of SEQ ID NO: 1885296
cucugucuuggucauaaug

SEQ ID NO: 2331399 - RNA, 19 nt, Artificial Sequence
  Description of Artificial Sequence: Synthetic oligonucleotide
  Antisense strand to SEQ ID NO: 2331398
cauuaugaccaagacagag

SEQ ID NO: 2331400 - RNA, 19 nt, Artificial Sequence
  Description of Artificial Sequence: Synthetic oligonucleotide
  Sense strand starting at position 2885 of SEQ ID NO: 1885296
ggagacuccuucccucuua

SEQ ID NO: 2331401 - RNA, 19 nt, Artificial Sequence
  Description of Artificial Sequence: Synthetic oligonucleotide
  Antisense strand to SEQ ID NO: 2331400
uaagagggaaggagucucc

SEQ ID NO: 2331402 - RNA, 19 nt, Artificial Sequence
  Description of Artificial Sequence: Synthetic oligonucleotide
  Sense strand starting at position 3277 of SEQ ID NO: 1885296
agccacauuguggaauaua

SEQ ID NO: 2331403 - RNA, 19 nt, Artificial Sequence
  Description of Artificial Sequence: Synthetic oligonucleotide
  Antisense strand to SEQ ID NO: 2331402
uauauuccacaauguggcu

SEQ ID NO: 2331404 - RNA, 19 nt, Artificial Sequence
  Description of Artificial Sequence: Synthetic oligonucleotide
  Sense strand starting at position 3304 of SEQ ID NO: 1885296
gauacuuuguacucaggag

SEQ ID NO: 2331405 - RNA, 19 nt, Artificial Sequence
  Description of Artificial Sequence: Synthetic oligonucleotide
  Antisense strand to SEQ ID NO: 2331404
cuccugaguacaaaguauc

SEQ ID NO: 2331406 - RNA, 19 nt, Artificial Sequence
  Description of Artificial Sequence: Synthetic oligonucleotide
  Sense strand starting at position 3330 of SEQ ID NO: 1885296
uuaucagaggagugugaug

SEQ ID NO: 2331407 - RNA, 19 nt, Artificial Sequence
  Description of Artificial Sequence: Synthetic oligonucleotide
  Antisense strand to SEQ ID NO: 2331406
caucacacuccucugauaa

SEQ ID NO: 2331408 - RNA, 19 nt, Artificial Sequence
  Description of Artificial Sequence: Synthetic oligonucleotide
  Sense strand starting at position 3344 of SEQ ID NO: 1885296
ugaugcacucugcaaacau

SEQ ID NO: 2331409 - RNA, 19 nt, Artificial Sequence
  Description of Artificial Sequence: Synthetic oligonucleotide
  Antisense strand to SEQ ID NO: 2331408
auguuugcagagugcauca

SEQ ID NO: 2331410 - RNA, 19 nt, Artificial Sequence
  Description of Artificial Sequence: Synthetic oligonucleotide
  Sense strand starting at position 3417 of SEQ ID NO: 1885296
ggcuuacagcuagagagau

SEQ ID NO: 2331411 - RNA, 19 nt, Artificial Sequence
  Description of Artificial Sequence: Synthetic oligonucleotide
  Antisense strand to SEQ ID NO: 2331410
aucucucuagcuguaagcc

SEQ ID NO: 2331412 - RNA, 19 nt, Artificial Sequence
  Description of Artificial Sequence: Synthetic oligonucleotide
  Sense strand starting at position 3735 of SEQ ID NO: 1885296
cucgaugcucaggacagau

SEQ ID NO: 2331413 - RNA, 19 nt, Artificial Sequence
  Description of Artificial Sequence: Synthetic oligonucleotide
  Antisense strand to SEQ ID NO: 2331412
aucuguccugagcaucgag

SEQ ID NO: 2331414 - RNA, 19 nt, Artificial Sequence
  Description of Artificial Sequence: Synthetic oligonucleotide
  Sense strand starting at position 3737 of SEQ ID NO: 1885296
cgaugcucaggacagauau

SEQ ID NO: 2331415 - RNA, 19 nt, Artificial Sequence
  Description of Artificial Sequence: Synthetic oligonucleotide
  Antisense strand to SEQ ID NO: 2331414
auaucuguccugagcaucg

SEQ ID NO: 2331416 - RNA, 19 nt, Artificial Sequence
  Description of Artificial Sequence: Synthetic oligonucleotide
  Sense strand starting at position 3816 of SEQ ID NO: 1885296
cugugaaacucugcauaaa

SEQ ID NO: 2331417 - RNA, 19 nt, Artificial Sequence
  Description of Artificial Sequence: Synthetic oligonucleotide
  Antisense strand to SEQ ID NO: 2331416
uuuaugcagaguuucacag

SEQ ID NO: 2331418 - RNA, 19 nt, Artificial Sequence
  Description of Artificial Sequence: Synthetic oligonucleotide
  Sense strand starting at position 3817 of SEQ ID NO: 1885296
ugugaaacucugcauaaag

SEQ ID NO: 2331419 - RNA, 19 nt, Artificial Sequence
  Description of Artificial Sequence: Synthetic oligonucleotide
  Antisense strand to SEQ ID NO: 2331418
cuuuaugcagaguuucaca

SEQ ID NO: 2331420 - RNA, 19 nt, Artificial Sequence
  Description of Artificial Sequence: Synthetic oligonucleotide
  Sense strand starting at position 3913 of SEQ ID NO: 1885296
cagacugcccuguaguaga

SEQ ID NO: 2331421 - RNA, 19 nt, Artificial Sequence
  Description of Artificial Sequence: Synthetic oligonucleotide
  Antisense strand to SEQ ID NO: 2331420
ucuacuacagggcagucug

SEQ ID NO: 2331422 - RNA, 19 nt, Artificial Sequence
  Description of Artificial Sequence: Synthetic oligonucleotide
  Sense strand starting at position 3974 of SEQ ID NO: 1885296
cagggauuccuugggcaca

SEQ ID NO: 2331423 - RNA, 19 nt, Artificial Sequence
  Description of Artificial Sequence: Synthetic oligonucleotide
  Antisense strand to SEQ ID NO: 2331422
ugugcccaaggaaucccug

SEQ ID NO: 2331424 - RNA, 19 nt, Artificial Sequence
  Description of Artificial Sequence: Synthetic oligonucleotide
  Sense strand starting at position 44 of SEQ ID NO: 1885297
auauccuuggcaugagaug

SEQ ID NO: 2331425 - RNA, 19 nt, Artificial Sequence
  Description of Artificial Sequence: Synthetic oligonucleotide
  Antisense strand to SEQ ID NO: 2331424
caucucaugccaaggauau

SEQ ID NO: 2331426 - RNA, 19 nt, Artificial Sequence
  Description of Artificial Sequence: Synthetic oligonucleotide
  Sense strand starting at position 85 of SEQ ID NO: 1885297
agagaaugauguuucuuug

SEQ ID NO: 2331427 - RNA, 19 nt, Artificial Sequence
  Description of Artificial Sequence: Synthetic oligonucleotide
  Antisense strand to SEQ ID NO: 2331426
caaagaaacaucauucucu

SEQ ID NO: 2331428 - RNA, 19 nt, Artificial Sequence
  Description of Artificial Sequence: Synthetic oligonucleotide
  Sense strand starting at position 88 of SEQ ID NO: 1885297
gaaugauguuucuuuggaa

SEQ ID NO: 2331429 - RNA, 19 nt, Artificial Sequence
  Description of Artificial Sequence: Synthetic oligonucleotide
  Antisense strand to SEQ ID NO: 2331428
uuccaaagaaacaucauuc

SEQ ID NO: 2331430 - RNA, 19 nt, Artificial Sequence
  Description of Artificial Sequence: Synthetic oligonucleotide
  Sense strand starting at position 89 of SEQ ID NO: 1885297
aaugauguuucuuuggaau

SEQ ID NO: 2331431 - RNA, 19 nt, Artificial Sequence
  Description of Artificial Sequence: Synthetic oligonucleotide
  Antisense strand to SEQ ID NO: 2331430
auuccaaagaaacaucauu

SEQ ID NO: 2331432 - RNA, 19 nt, Artificial Sequence
  Description of Artificial Sequence: Synthetic oligonucleotide
  Sense strand starting at position 274 of SEQ ID NO: 1885297
cuuccuaaugagugugaag

SEQ ID NO: 2331433 - RNA, 19 nt, Artificial Sequence
  Description of Artificial Sequence: Synthetic oligonucleotide
  Antisense strand to SEQ ID NO: 2331432
cuucacacucauuaggaag

SEQ ID NO: 2331434 - RNA, 19 nt, Artificial Sequence
  Description of Artificial Sequence: Synthetic oligonucleotide
  Sense strand starting at position 325 of SEQ ID NO: 1885297
ccuaaugauugauuaguga

SEQ ID NO: 2331435 - RNA, 19 nt, Artificial Sequence
  Description of Artificial Sequence: Synthetic oligonucleotide
  Antisense strand to SEQ ID NO: 2331434
ucacuaaucaaucauuagg

SEQ ID NO: 2331436 - RNA, 19 nt, Artificial Sequence
  Description of Artificial Sequence: Synthetic oligonucleotide
  Sense strand starting at position 1112 of SEQ ID NO: 1885297
auccuauuaugagaauuug

SEQ ID NO: 2331437 - RNA, 19 nt, Artificial Sequence
  Description of Artificial Sequence: Synthetic oligonucleotide
  Antisense strand to SEQ ID NO: 2331436
caaauucucauaauaggau

SEQ ID NO: 2331438 - RNA, 19 nt, Artificial Sequence
  Description of Artificial Sequence: Synthetic oligonucleotide
  Sense strand starting at position 1524 of SEQ ID NO: 1885297
guuuaacugcugugauuug

SEQ ID NO: 2331439 - RNA, 19 nt, Artificial Sequence
  Description of Artificial Sequence: Synthetic oligonucleotide
  Antisense strand to SEQ ID NO: 2331438
caaaucacagcaguuaaac

SEQ ID NO: 2331440 - RNA, 19 nt, Artificial Sequence
  Description of Artificial Sequence: Synthetic oligonucleotide
  Sense strand starting at position 1568 of SEQ ID NO: 1885297
cucaguuucccacauggaa

SEQ ID NO: 2331441 - RNA, 19 nt, Artificial Sequence
  Description of Artificial Sequence: Synthetic oligonucleotide
  Antisense strand to SEQ ID NO: 2331440
uuccaugugggaaacugag

SEQ ID NO: 2331442 - RNA, 19 nt, Artificial Sequence
  Description of Artificial Sequence: Synthetic oligonucleotide
  Sense strand starting at position 1589 of SEQ ID NO: 1885297
ucaaaucgaucauuguuau

SEQ ID NO: 2331443 - RNA, 19 nt, Artificial Sequence
  Description of Artificial Sequence: Synthetic oligonucleotide
  Antisense strand to SEQ ID NO: 2331442
auaacaaugaucgauuuga

SEQ ID NO: 2331444 - RNA, 19 nt, Artificial Sequence
  Description of Artificial Sequence: Synthetic oligonucleotide
  Sense strand starting at position 1653 of SEQ ID NO: 1885297
cguauacguuauccaauuu

SEQ ID NO: 2331445 - RNA, 19 nt, Artificial Sequence
  Description of Artificial Sequence: Synthetic oligonucleotide
  Antisense strand to SEQ ID NO: 2331444
aaauuggauaacguauacg

SEQ ID NO: 2331446 - RNA, 19 nt, Artificial Sequence
  Description of Artificial Sequence: Synthetic oligonucleotide
  Sense strand starting at position 1713 of SEQ ID NO: 1885297
ugcuuaacauaugugagga

SEQ ID NO: 2331447 - RNA, 19 nt, Artificial Sequence
  Description of Artificial Sequence: Synthetic oligonucleotide
  Antisense strand to SEQ ID NO: 2331446
uccucacauauguuaagca

SEQ ID NO: 2331448 - RNA, 19 nt, Artificial Sequence
  Description of Artificial Sequence: Synthetic oligonucleotide
  Sense strand starting at position 1714 of SEQ ID NO: 1885297
gcuuaacauaugugaggaa

SEQ ID NO: 2331449 - RNA, 19 nt, Artificial Sequence
  Description of Artificial Sequence: Synthetic oligonucleotide
  Antisense strand to SEQ ID NO: 2331448
uuccucacauauguuaagc

SEQ ID NO: 2331450 - RNA, 19 nt, Artificial Sequence
  Description of Artificial Sequence: Synthetic oligonucleotide
  Sense strand starting at position 1803 of SEQ ID NO: 1885297
gagacaugguuccuuaucu

SEQ ID NO: 2331451 - RNA, 19 nt, Artificial Sequence
  Description of Artificial Sequence: Synthetic oligonucleotide
  Antisense strand to SEQ ID NO: 2331450
agauaaggaaccaugucuc

SEQ ID NO: 2331452 - RNA, 19 nt, Artificial Sequence
  Description of Artificial Sequence: Synthetic oligonucleotide
  Sense strand starting at position 1804 of SEQ ID NO: 1885297
agacaugguuccuuaucuu

SEQ ID NO: 2331453 - RNA, 19 nt, Artificial Sequence
  Description of Artificial Sequence: Synthetic oligonucleotide
  Antisense strand to SEQ ID NO: 2331452
aagauaaggaaccaugucu

SEQ ID NO: 2331454 - RNA, 19 nt, Artificial Sequence
  Description of Artificial Sequence: Synthetic oligonucleotide
  Sense strand starting at position 2139 of SEQ ID NO: 1885297
ugauuuccguguguaggga

SEQ ID NO: 2331455 - RNA, 19 nt, Artificial Sequence
  Description of Artificial Sequence: Synthetic oligonucleotide
  Antisense strand to SEQ ID NO: 2331454
ucccuacacacggaaauca

SEQ ID NO: 2331456 - RNA, 19 nt, Artificial Sequence
  Description of Artificial Sequence: Synthetic oligonucleotide
  Sense strand starting at position 2153 of SEQ ID NO: 1885297
agggaugguucagucauaa

SEQ ID NO: 2331457 - RNA, 19 nt, Artificial Sequence
  Description of Artificial Sequence: Synthetic oligonucleotide
  Antisense strand to SEQ ID NO: 2331456
uuaugacugaaccaucccu

SEQ ID NO: 2331458 - RNA, 19 nt, Artificial Sequence
  Description of Artificial Sequence: Synthetic oligonucleotide
  Sense strand starting at position 2164 of SEQ ID NO: 1885297
agucauaaaucaguguauu

SEQ ID NO: 2331459 - RNA, 19 nt, Artificial Sequence
  Description of Artificial Sequence: Synthetic oligonucleotide
  Antisense strand to SEQ ID NO: 2331458
aauacacugauuuaugacu

SEQ ID NO: 2331460 - RNA, 19 nt, Artificial Sequence
  Description of Artificial Sequence: Synthetic oligonucleotide
  Sense strand starting at position 2394 of SEQ ID NO: 1885297
acagaugucuuccucccua

SEQ ID NO: 2331461 - RNA, 19 nt, Artificial Sequence
  Description of Artificial Sequence: Synthetic oligonucleotide
  Antisense strand to SEQ ID NO: 2331460
uagggaggaagacaucugu

SEQ ID NO: 2331462 - RNA, 19 nt, Artificial Sequence
  Description of Artificial Sequence: Synthetic oligonucleotide
  Sense strand starting at position 2486 of SEQ ID NO: 1885297
ucuguuuccagugagucaa

SEQ ID NO: 2331463 - RNA, 19 nt, Artificial Sequence
  Description of Artificial Sequence: Synthetic oligonucleotide
  Antisense strand to SEQ ID NO: 2331462
uugacucacuggaaacaga

SEQ ID NO: 2331464 - RNA, 19 nt, Artificial Sequence
  Description of Artificial Sequence: Synthetic oligonucleotide
  Sense strand starting at position 2521 of SEQ ID NO: 1885297
uugcccuguggagaugaau

SEQ ID NO: 2331465 - RNA, 19 nt, Artificial Sequence
  Description of Artificial Sequence: Synthetic oligonucleotide
  Antisense strand to SEQ ID NO: 2331464
auucaucuccacagggcaa

SEQ ID NO: 2331466 - RNA, 19 nt, Artificial Sequence
  Description of Artificial Sequence: Synthetic oligonucleotide
  Sense strand starting at position 2840 of SEQ ID NO: 1885297
uuuauuauugcagauugac

SEQ ID NO: 2331467 - RNA, 19 nt, Artificial Sequence
  Description of Artificial Sequence: Synthetic oligonucleotide
  Antisense strand to SEQ ID NO: 2331466
gucaaucugcaauaauaaa

SEQ ID NO: 2331468 - RNA, 19 nt, Artificial Sequence
  Description of Artificial Sequence: Synthetic oligonucleotide
  Sense strand starting at position 2843 of SEQ ID NO: 1885297
auuauugcagauugaccaa

SEQ ID NO: 2331469 - RNA, 19 nt, Artificial Sequence
  Description of Artificial Sequence: Synthetic oligonucleotide
  Antisense strand to SEQ ID NO: 2331468
uuggucaaucugcaauaau

SEQ ID NO: 2331470 - RNA, 19 nt, Artificial Sequence
  Description of Artificial Sequence: Synthetic oligonucleotide
  Sense strand starting at position 2854 of SEQ ID NO: 1885297
uugaccaaaugucuaugaa

SEQ ID NO: 2331471 - RNA, 19 nt, Artificial Sequence
  Description of Artificial Sequence: Synthetic oligonucleotide
  Antisense strand to SEQ ID NO: 2331470
uucauagacauuuggucaa

SEQ ID NO: 2331472 - RNA, 19 nt, Artificial Sequence
  Description of Artificial Sequence: Synthetic oligonucleotide
  Sense strand starting at position 2857 of SEQ ID NO: 1885297
accaaaugucuaugaagcu

SEQ ID NO: 2331473 - RNA, 19 nt, Artificial Sequence
  Description of Artificial Sequence: Synthetic oligonucleotide
  Antisense strand to SEQ ID NO: 2331472
agcuucauagacauuuggu

SEQ ID NO: 2331474 - RNA, 19 nt, Artificial Sequence
  Description of Artificial Sequence: Synthetic oligonucleotide
  Sense strand starting at position 3071 of SEQ ID NO: 1885297
gagccaugacagugucaga

SEQ ID NO: 2331475 - RNA, 19 nt, Artificial Sequence
  Description of Artificial Sequence: Synthetic oligonucleotide
  Antisense strand to SEQ ID NO: 2331474
ucugacacugucauggcuc

SEQ ID NO: 2331476 - RNA, 19 nt, Artificial Sequence
  Description of Artificial Sequence: Synthetic oligonucleotide
  Sense strand starting at position 3104 of SEQ ID NO: 1885297
ccagacuucugggugaagu

SEQ ID NO: 2331477 - RNA, 19 nt, Artificial Sequence
  Description of Artificial Sequence: Synthetic oligonucleotide
  Antisense strand to SEQ ID NO: 2331476
acuucacccagaagucugg

SEQ ID NO: 2331478 - RNA, 19 nt, Artificial Sequence
  Description of Artificial Sequence: Synthetic oligonucleotide
  Sense strand starting at position 3105 of SEQ ID NO: 1885297
cagacuucugggugaagug

SEQ ID NO: 2331479 - RNA, 19 nt, Artificial Sequence
  Description of Artificial Sequence: Synthetic oligonucleotide
  Antisense strand to SEQ ID NO: 2331478
cacuucacccagaagucug

SEQ ID NO: 2331480 - RNA, 19 nt, Artificial Sequence
  Description of Artificial Sequence: Synthetic oligonucleotide
  Sense strand starting at position 3135 of SEQ ID NO: 1885297
caaagcuugguuuggaaga

SEQ ID NO: 2331481 - RNA, 19 nt, Artificial Sequence
  Description of Artificial Sequence: Synthetic oligonucleotide
  Antisense strand to SEQ ID NO: 2331480
ucuuccaaaccaagcuuug

SEQ ID NO: 2331482 - RNA, 19 nt, Artificial Sequence
  Description of Artificial Sequence: Synthetic oligonucleotide
  Sense strand starting at position 3145 of SEQ ID NO: 1885297
uuuggaagauuuggagaau

SEQ ID NO: 2331483 - RNA, 19 nt, Artificial Sequence
  Description of Artificial Sequence: Synthetic oligonucleotide
  Antisense strand to SEQ ID NO: 2331482
auucuccaaaucuuccaaa

SEQ ID NO: 2331484 - RNA, 19 nt, Artificial Sequence
  Description of Artificial Sequence: Synthetic oligonucleotide
  Sense strand starting at position 3164 of SEQ ID NO: 1885297
gggaaagaauguucucuua

SEQ ID NO: 2331485 - RNA, 19 nt, Artificial Sequence
  Description of Artificial Sequence: Synthetic oligonucleotide
  Antisense strand to SEQ ID NO: 2331484
uaagagaacauucuuuccc

SEQ ID NO: 2331486 - RNA, 19 nt, Artificial Sequence
  Description of Artificial Sequence: Synthetic oligonucleotide
  Sense strand starting at position 3319 of SEQ ID NO: 1885297
cucagagugucacugaauc

SEQ ID NO: 2331487 - RNA, 19 nt, Artificial Sequence
  Description of Artificial Sequence: Synthetic oligonucleotide
  Antisense strand to SEQ ID NO: 2331486
gauucagugacacucugag

SEQ ID NO: 2331488 - RNA, 19 nt, Artificial Sequence
  Description of Artificial Sequence: Synthetic oligonucleotide
  Sense strand starting at position 3356 of SEQ ID NO: 1885297
ugcccaugucaugaagaua

SEQ ID NO: 2331489 - RNA, 19 nt, Artificial Sequence
  Description of Artificial Sequence: Synthetic oligonucleotide
  Antisense strand to SEQ ID NO: 2331488
uaucuucaugacaugggca

SEQ ID NO: 2331490 - RNA, 19 nt, Artificial Sequence
  Description of Artificial Sequence: Synthetic oligonucleotide
  Sense strand starting at position 3496 of SEQ ID NO: 1885297
aacagagaucucuguuuga

SEQ ID NO: 2331491 - RNA, 19 nt, Artificial Sequence
  Description of Artificial Sequence: Synthetic oligonucleotide
  Antisense strand to SEQ ID NO: 2331490
ucaaacagagaucucuguu

SEQ ID NO: 2331492 - RNA, 19 nt, Artificial Sequence
  Description of Artificial Sequence: Synthetic oligonucleotide
  Sense strand starting at position 3499 of SEQ ID NO: 1885297
agagaucucuguuugaaag

SEQ ID NO: 2331493 - RNA, 19 nt, Artificial Sequence
  Description of Artificial Sequence: Synthetic oligonucleotide
  Antisense strand to SEQ ID NO: 2331492
cuuucaaacagagaucucu

SEQ ID NO: 2331494 - RNA, 19 nt, Artificial Sequence
  Description of Artificial Sequence: Synthetic oligonucleotide
  Sense strand starting at position 3538 of SEQ ID NO: 1885297
auuugcucugccugguaaa

SEQ ID NO: 2331495 - RNA, 19 nt, Artificial Sequence
  Description of Artificial Sequence: Synthetic oligonucleotide
  Antisense strand to SEQ ID NO: 2331494
uuuaccaggcagagcaaau

SEQ ID NO: 2331496 - RNA, 19 nt, Artificial Sequence
  Description of Artificial Sequence: Synthetic oligonucleotide
  Sense strand starting at position 3562 of SEQ ID NO: 1885297
guguaaugcguggcuuuaa

SEQ ID NO: 2331497 - RNA, 19 nt, Artificial Sequence
  Description of Artificial Sequence: Synthetic oligonucleotide
  Antisense strand to SEQ ID NO: 2331496
uuaaagccacgcauuacac

SEQ ID NO: 2331498 - RNA, 19 nt, Artificial Sequence
  Description of Artificial Sequence: Synthetic oligonucleotide
  Sense strand starting at position 3644 of SEQ ID NO: 1885297
gacugugugggucacuaaa

SEQ ID NO: 2331499 - RNA, 19 nt, Artificial Sequence
  Description of Artificial Sequence: Synthetic oligonucleotide
  Antisense strand to SEQ ID NO: 2331498
uuuagugacccacacaguc

SEQ ID NO: 2331500 - RNA, 19 nt, Artificial Sequence
  Description of Artificial Sequence: Synthetic oligonucleotide
  Sense strand starting at position 3688 of SEQ ID NO: 1885297
gcuggugucccgcuuaaag

SEQ ID NO: 2331501 - RNA, 19 nt, Artificial Sequence
  Description of Artificial Sequence: Synthetic oligonucleotide
  Antisense strand to SEQ ID NO: 2331500
cuuuaagcgggacaccagc

SEQ ID NO: 2331502 - RNA, 19 nt, Artificial Sequence
  Description of Artificial Sequence: Synthetic oligonucleotide
  Sense strand starting at position 3919 of SEQ ID NO: 1885297
ugcuaauuauuggcagaga

SEQ ID NO: 2331503 - RNA, 19 nt, Artificial Sequence
  Description of Artificial Sequence: Synthetic oligonucleotide
  Antisense strand to SEQ ID NO: 2331502
ucucugccaauaauuagca

SEQ ID NO: 2331504 - RNA, 19 nt, Artificial Sequence
  Description of Artificial Sequence: Synthetic oligonucleotide
  Sense strand starting at position 81 of SEQ ID NO: 1885298
gaccguaagaguugauuag

SEQ ID NO: 2331505 - RNA, 19 nt, Artificial Sequence
  Description of Artificial Sequence: Synthetic oligonucleotide
  Antisense strand to SEQ ID NO: 2331504
cuaaucaacucuuacgguc

SEQ ID NO: 2331506 - RNA, 19 nt, Artificial Sequence
  Description of Artificial Sequence: Synthetic oligonucleotide
  Sense strand starting at position 85 of SEQ ID NO: 1885298
guaagaguugauuaggccu

SEQ ID NO: 2331507 - RNA, 19 nt, Artificial Sequence
  Description of Artificial Sequence: Synthetic oligonucleotide
  Antisense strand to SEQ ID NO: 2331506
aggccuaaucaacucuuac

SEQ ID NO: 2331508 - RNA, 19 nt, Artificial Sequence
  Description of Artificial Sequence: Synthetic oligonucleotide
  Sense strand starting at position 93 of SEQ ID NO: 1885298
ugauuaggccuugaggguu

SEQ ID NO: 2331509 - RNA, 19 nt, Artificial Sequence
  Description of Artificial Sequence: Synthetic oligonucleotide
  Antisense strand to SEQ ID NO: 2331508
aacccucaaggccuaauca

SEQ ID NO: 2331510 - RNA, 19 nt, Artificial Sequence
  Description of Artificial Sequence: Synthetic oligonucleotide
  Sense strand starting at position 105 of SEQ ID NO: 1885298
gaggguuccuuccucagga

SEQ ID NO: 2331511 - RNA, 19 nt, Artificial Sequence
  Description of Artificial Sequence: Synthetic oligonucleotide
  Antisense strand to SEQ ID NO: 2331510
uccugaggaaggaacccuc

SEQ ID NO: 2331512 - RNA, 19 nt, Artificial Sequence
  Description of Artificial Sequence: Synthetic oligonucleotide
  Sense strand starting at position 106 of SEQ ID NO: 1885298
aggguuccuuccucaggaa

SEQ ID NO: 2331513 - RNA, 19 nt, Artificial Sequence
  Description of Artificial Sequence: Synthetic oligonucleotide
  Antisense strand to SEQ ID NO: 2331512
uuccugaggaaggaacccu

SEQ ID NO: 2331514 - RNA, 19 nt, Artificial Sequence
  Description of Artificial Sequence: Synthetic oligonucleotide
  Sense strand starting at position 107 of SEQ ID NO: 1885298
ggguuccuuccucaggaau

SEQ ID NO: 2331515 - RNA, 19 nt, Artificial Sequence
  Description of Artificial Sequence: Synthetic oligonucleotide
  Antisense strand to SEQ ID NO: 2331514
auuccugaggaaggaaccc

SEQ ID NO: 2331516 - RNA, 19 nt, Artificial Sequence
  Description of Artificial Sequence: Synthetic oligonucleotide
  Sense strand starting at position 113 of SEQ ID NO: 1885298
cuuccucaggaaugagauu

SEQ ID NO: 2331517 - RNA, 19 nt, Artificial Sequence
  Description of Artificial Sequence: Synthetic oligonucleotide
  Antisense strand to SEQ ID NO: 2331516
aaucucauuccugaggaag

SEQ ID NO: 2331518 - RNA, 19 nt, Artificial Sequence
  Description of Artificial Sequence: Synthetic oligonucleotide
  Sense strand starting at position 360 of SEQ ID NO: 1885298
cuacauuagugucuaauug

SEQ ID NO: 2331519 - RNA, 19 nt, Artificial Sequence
  Description of Artificial Sequence: Synthetic oligonucleotide
  Antisense strand to SEQ ID NO: 2331518
caauuagacacuaauguag

SEQ ID NO: 2331520 - RNA, 19 nt, Artificial Sequence
  Description of Artificial Sequence: Synthetic oligonucleotide
  Sense strand starting at position 770 of SEQ ID NO: 1885298
ucugauaaguugucuuaac

SEQ ID NO: 2331521 - RNA, 19 nt, Artificial Sequence
  Description of Artificial Sequence: Synthetic oligonucleotide
  Antisense strand to SEQ ID NO: 2331520
guuaagacaacuuaucaga

SEQ ID NO: 2331522 - RNA, 19 nt, Artificial Sequence
  Description of Artificial Sequence: Synthetic oligonucleotide
  Sense strand starting at position 892 of SEQ ID NO: 1885298
acuagaagucuuugaggca

SEQ ID NO: 2331523 - RNA, 19 nt, Artificial Sequence
  Description of Artificial Sequence: Synthetic oligonucleotide
  Antisense strand to SEQ ID NO: 2331522
ugccucaaagacuucuagu

SEQ ID NO: 2331524 - RNA, 19 nt, Artificial Sequence
  Description of Artificial Sequence: Synthetic oligonucleotide
  Sense strand starting at position 930 of SEQ ID NO: 1885298
cuuguagcuccagaacaua

SEQ ID NO: 2331525 - RNA, 19 nt, Artificial Sequence
  Description of Artificial Sequence: Synthetic oligonucleotide
  Antisense strand to SEQ ID NO: 2331524
uauguucuggagcuacaag

SEQ ID NO: 2331526 - RNA, 19 nt, Artificial Sequence
  Description of Artificial Sequence: Synthetic oligonucleotide
  Sense strand starting at position 960 of SEQ ID NO: 1885298
ggcaauugugcugaacaug

SEQ ID NO: 2331527 - RNA, 19 nt, Artificial Sequence
  Description of Artificial Sequence: Synthetic oligonucleotide
  Antisense strand to SEQ ID NO: 2331526
cauguucagcacaauugcc

SEQ ID NO: 2331528 - RNA, 19 nt, Artificial Sequence
  Description of Artificial Sequence: Synthetic oligonucleotide
  Sense strand starting at position 965 of SEQ ID NO: 1885298
uugugcugaacaugagaua

SEQ ID NO: 2331529 - RNA, 19 nt, Artificial Sequence
  Description of Artificial Sequence: Synthetic oligonucleotide
  Antisense strand to SEQ ID NO: 2331528
uaucucauguucagcacaa

SEQ ID NO: 2331530 - RNA, 19 nt, Artificial Sequence
  Description of Artificial Sequence: Synthetic oligonucleotide
  Sense strand starting at position 966 of SEQ ID NO: 1885298
ugugcugaacaugagauau

SEQ ID NO: 2331531 - RNA, 19 nt, Artificial Sequence
  Description of Artificial Sequence: Synthetic oligonucleotide
  Antisense strand to SEQ ID NO: 2331530
auaucucauguucagcaca

SEQ ID NO: 2331532 - RNA, 19 nt, Artificial Sequence
  Description of Artificial Sequence: Synthetic oligonucleotide
  Sense strand starting at position 1163 of SEQ ID NO: 1885298
guuuaugagccugaaauca

SEQ ID NO: 2331533 - RNA, 19 nt, Artificial Sequence
  Description of Artificial Sequence: Synthetic oligonucleotide
  Antisense strand to SEQ ID NO: 2331532
ugauuucaggcucauaaac

SEQ ID NO: 2331534 - RNA, 19 nt, Artificial Sequence
  Description of Artificial Sequence: Synthetic oligonucleotide
  Sense strand starting at position 1226 of SEQ ID NO: 1885298
cuaagaauugcagauguca

SEQ ID NO: 2331535 - RNA, 19 nt, Artificial Sequence
  Description of Artificial Sequence: Synthetic oligonucleotide
  Antisense strand to SEQ ID NO: 2331534
ugacaucugcaauucuuag

SEQ ID NO: 2331536 - RNA, 19 nt, Artificial Sequence
  Description of Artificial Sequence: Synthetic oligonucleotide
  Sense strand starting at position 1414 of SEQ ID NO: 1885298
aacguuauucuauaugguu

SEQ ID NO: 2331537 - RNA, 19 nt, Artificial Sequence
  Description of Artificial Sequence: Synthetic oligonucleotide
  Antisense strand to SEQ ID NO: 2331536
aaccauauagaauaacguu

SEQ ID NO: 2331538 - RNA, 19 nt, Artificial Sequence
  Description of Artificial Sequence: Synthetic oligonucleotide
  Sense strand starting at position 1445 of SEQ ID NO: 1885298
cuagaauugugacugcaag

SEQ ID NO: 2331539 - RNA, 19 nt, Artificial Sequence
  Description of Artificial Sequence: Synthetic oligonucleotide
  Antisense strand to SEQ ID NO: 2331538
cuugcagucacaauucuag

SEQ ID NO: 2331540 - RNA, 19 nt, Artificial Sequence
  Description of Artificial Sequence: Synthetic oligonucleotide
  Sense strand starting at position 2119 of SEQ ID NO: 1885298
uuguuuauaggucaugaac

SEQ ID NO: 2331541 - RNA, 19 nt, Artificial Sequence
  Description of Artificial Sequence: Synthetic oligonucleotide
  Antisense strand to SEQ ID NO: 2331540
guucaugaccuauaaacaa

SEQ ID NO: 2331542 - RNA, 19 nt, Artificial Sequence
  Description of Artificial Sequence: Synthetic oligonucleotide
  Sense strand starting at position 2147 of SEQ ID NO: 1885298
uugauuacuugauugucau

SEQ ID NO: 2331543 - RNA, 19 nt, Artificial Sequence
  Description of Artificial Sequence: Synthetic oligonucleotide
  Antisense strand to SEQ ID NO: 2331542
augacaaucaaguaaucaa

SEQ ID NO: 2331544 - RNA, 19 nt, Artificial Sequence
  Description of Artificial Sequence: Synthetic oligonucleotide
  Sense strand starting at position 2148 of SEQ ID NO: 1885298
ugauuacuugauugucauu

SEQ ID NO: 2331545 - RNA, 19 nt, Artificial Sequence
  Description of Artificial Sequence: Synthetic oligonucleotide
  Antisense strand to SEQ ID NO: 2331544
aaugacaaucaaguaauca

SEQ ID NO: 2331546 - RNA, 19 nt, Artificial Sequence
  Description of Artificial Sequence: Synthetic oligonucleotide
  Sense strand starting at position 2378 of SEQ ID NO: 1885298
ugaauucgucuguaaucca

SEQ ID NO: 2331547 - RNA, 19 nt, Artificial Sequence
  Description of Artificial Sequence: Synthetic oligonucleotide
  Antisense strand to SEQ ID NO: 2331546
uggauuacagacgaauuca

SEQ ID NO: 2331548 - RNA, 19 nt, Artificial Sequence
  Description of Artificial Sequence: Synthetic oligonucleotide
  Sense strand starting at position 2385 of SEQ ID NO: 1885298
gucuguaauccacaucuca

SEQ ID NO: 2331549 - RNA, 19 nt, Artificial Sequence
  Description of Artificial Sequence: Synthetic oligonucleotide
  Antisense strand to SEQ ID NO: 2331548
ugagauguggauuacagac

SEQ ID NO: 2331550 - RNA, 19 nt, Artificial Sequence
  Description of Artificial Sequence: Synthetic oligonucleotide
  Sense strand starting at position 2558 of SEQ ID NO: 1885298
gggauaucauguuugauac

SEQ ID NO: 2331551 - RNA, 19 nt, Artificial Sequence
  Description of Artificial Sequence: Synthetic oligonucleotide
  Antisense strand to SEQ ID NO: 2331550
guaucaaacaugauauccc

SEQ ID NO: 2331552 - RNA, 19 nt, Artificial Sequence
  Description of Artificial Sequence: Synthetic oligonucleotide
  Sense strand starting at position 2559 of SEQ ID NO: 1885298
ggauaucauguuugauacu

SEQ ID NO: 2331553 - RNA, 19 nt, Artificial Sequence
  Description of Artificial Sequence: Synthetic oligonucleotide
  Antisense strand to SEQ ID NO: 2331552
aguaucaaacaugauaucc

SEQ ID NO: 2331554 - RNA, 19 nt, Artificial Sequence
  Description of Artificial Sequence: Synthetic oligonucleotide
  Sense strand starting at position 2591 of SEQ ID NO: 1885298
gugucauaaugagucagau

SEQ ID NO: 2331555 - RNA, 19 nt, Artificial Sequence
  Description of Artificial Sequence: Synthetic oligonucleotide
  Antisense strand to SEQ ID NO: 2331554
aucugacucauuaugacac

SEQ ID NO: 2331556 - RNA, 19 nt, Artificial Sequence
  Description of Artificial Sequence: Synthetic oligonucleotide
  Sense strand starting at position 2636 of SEQ ID NO: 1885298
ccaugaugagauugcauua

SEQ ID NO: 2331557 - RNA, 19 nt, Artificial Sequence
  Description of Artificial Sequence: Synthetic oligonucleotide
  Antisense strand to SEQ ID NO: 2331556
uaaugcaaucucaucaugg

SEQ ID NO: 2331558 - RNA, 19 nt, Artificial Sequence
  Description of Artificial Sequence: Synthetic oligonucleotide
  Sense strand starting at position 2641 of SEQ ID NO: 1885298
augagauugcauuauucca

SEQ ID NO: 2331559 - RNA, 19 nt, Artificial Sequence
  Description of Artificial Sequence: Synthetic oligonucleotide
  Antisense strand to SEQ ID NO: 2331558
uggaauaaugcaaucucau

SEQ ID NO: 2331560 - RNA, 19 nt, Artificial Sequence
  Description of Artificial Sequence: Synthetic oligonucleotide
  Sense strand starting at position 2851 of SEQ ID NO: 1885298
uuuggauugugauuugcuu

SEQ ID NO: 2331561 - RNA, 19 nt, Artificial Sequence
  Description of Artificial Sequence: Synthetic oligonucleotide
  Antisense strand to SEQ ID NO: 2331560
aagcaaaucacaauccaaa

SEQ ID NO: 2331562 - RNA, 19 nt, Artificial Sequence
  Description of Artificial Sequence: Synthetic oligonucleotide
  Sense strand starting at position 3042 of SEQ ID NO: 1885298
acuacaucuuuaucuguga

SEQ ID NO: 2331563 - RNA, 19 nt, Artificial Sequence
  Description of Artificial Sequence: Synthetic oligonucleotide
  Antisense strand to SEQ ID NO: 2331562
ucacagauaaagauguagu

SEQ ID NO: 2331564 - RNA, 19 nt, Artificial Sequence
  Description of Artificial Sequence: Synthetic oligonucleotide
  Sense strand starting at position 3220 of SEQ ID NO: 1885298
aauaacuauuggguaaguu

SEQ ID NO: 2331565 - RNA, 19 nt, Artificial Sequence
  Description of Artificial Sequence: Synthetic oligonucleotide
  Antisense strand to SEQ ID NO: 2331564
aacuuacccaauaguuauu

SEQ ID NO: 2331566 - RNA, 19 nt, Artificial Sequence
  Description of Artificial Sequence: Synthetic oligonucleotide
  Sense strand starting at position 3230 of SEQ ID NO: 1885298
ggguaaguucugcaaagug

SEQ ID NO: 2331567 - RNA, 19 nt, Artificial Sequence
  Description of Artificial Sequence: Synthetic oligonucleotide
  Antisense strand to SEQ ID NO: 2331566
cacuuugcagaacuuaccc

SEQ ID NO: 2331568 - RNA, 19 nt, Artificial Sequence
  Description of Artificial Sequence: Synthetic oligonucleotide
  Sense strand starting at position 3401 of SEQ ID NO: 1885298
ugagaucuuugcuuuggga

SEQ ID NO: 2331569 - RNA, 19 nt, Artificial Sequence
  Description of Artificial Sequence: Synthetic oligonucleotide
  Antisense strand to SEQ ID NO: 2331568
ucccaaagcaaagaucuca

SEQ ID NO: 2331570 - RNA, 19 nt, Artificial Sequence
  Description of Artificial Sequence: Synthetic oligonucleotide
  Sense strand starting at position 3403 of SEQ ID NO: 1885298
agaucuuugcuuugggauc

SEQ ID NO: 2331571 - RNA, 19 nt, Artificial Sequence
  Description of Artificial Sequence: Synthetic oligonucleotide
  Antisense strand to SEQ ID NO: 2331570
gaucccaaagcaaagaucu

SEQ ID NO: 2331572 - RNA, 19 nt, Artificial Sequence
  Description of Artificial Sequence: Synthetic oligonucleotide
  Sense strand starting at position 3439 of SEQ ID NO: 1885298
aguugauacuaucuguaca

SEQ ID NO: 2331573 - RNA, 19 nt, Artificial Sequence
  Description of Artificial Sequence: Synthetic oligonucleotide
  Antisense strand to SEQ ID NO: 2331572
uguacagauaguaucaacu

SEQ ID NO: 2331574 - RNA, 19 nt, Artificial Sequence
  Description of Artificial Sequence: Synthetic oligonucleotide
  Sense strand starting at position 3535 of SEQ ID NO: 1885298
agacuauaucgauagccau

SEQ ID NO: 2331575 - RNA, 19 nt, Artificial Sequence
  Description of Artificial Sequence: Synthetic oligonucleotide
  Antisense strand to SEQ ID NO: 2331574
auggcuaucgauauagucu

SEQ ID NO: 2331576 - RNA, 19 nt, Artificial Sequence
  Description of Artificial Sequence: Synthetic oligonucleotide
  Sense strand starting at position 3638 of SEQ ID NO: 1885298
agugucuggcuuuaauaca

SEQ ID NO: 2331577 - RNA, 19 nt, Artificial Sequence
  Description of Artificial Sequence: Synthetic oligonucleotide
  Antisense strand to SEQ ID NO: 2331576
uguauuaaagccagacacu

SEQ ID NO: 2331578 - RNA, 19 nt, Artificial Sequence
  Description of Artificial Sequence: Synthetic oligonucleotide
  Sense strand starting at position 3674 of SEQ ID NO: 1885298
ccgcuaagaguuuacaaug

SEQ ID NO: 2331579 - RNA, 19 nt, Artificial Sequence
  Description of Artificial Sequence: Synthetic oligonucleotide
  Antisense strand to SEQ ID NO: 2331578
cauuguaaacucuuagcgg

SEQ ID NO: 2331580 - RNA, 19 nt, Artificial Sequence
  Description of Artificial Sequence: Synthetic oligonucleotide
  Sense strand starting at position 3709 of SEQ ID NO: 1885298
guuacugcaguauaaauaa

SEQ ID NO: 2331581 - RNA, 19 nt, Artificial Sequence
  Description of Artificial Sequence: Synthetic oligonucleotide
  Antisense strand to SEQ ID NO: 2331580
uuauuuauacugcaguaac

SEQ ID NO: 2331582 - RNA, 19 nt, Artificial Sequence
  Description of Artificial Sequence: Synthetic oligonucleotide
  Sense strand starting at position 3772 of SEQ ID NO: 1885298
ugguaauaaucugucuuag

SEQ ID NO: 2331583 - RNA, 19 nt, Artificial Sequence
  Description of Artificial Sequence: Synthetic oligonucleotide
  Antisense strand to SEQ ID NO: 2331582
cuaagacagauuauuacca

SEQ ID NO: 2331584 - RNA, 19 nt, Artificial Sequence
  Description of Artificial Sequence: Synthetic oligonucleotide
  Sense strand starting at position 104 of SEQ ID NO: 1885299
agucgcuacgaggauuaaa

SEQ ID NO: 2331585 - RNA, 19 nt, Artificial Sequence
  Description of Artificial Sequence: Synthetic oligonucleotide
  Antisense strand to SEQ ID NO: 2331584
uuuaauccucguagcgacu

SEQ ID NO: 2331586 - RNA, 19 nt, Artificial Sequence
  Description of Artificial Sequence: Synthetic oligonucleotide
  Sense strand starting at position 107 of SEQ ID NO: 1885299
cgcuacgaggauuaaagau

SEQ ID NO: 2331587 - RNA, 19 nt, Artificial Sequence
  Description of Artificial Sequence: Synthetic oligonucleotide
  Antisense strand to SEQ ID NO: 2331586
aucuuuaauccucguagcg

SEQ ID NO: 2331588 - RNA, 19 nt, Artificial Sequence
  Description of Artificial Sequence: Synthetic oligonucleotide
  Sense strand starting at position 320 of SEQ ID NO: 1885299
uaaagucuucuaugggaau

SEQ ID NO: 2331589 - RNA, 19 nt, Artificial Sequence
  Description of Artificial Sequence: Synthetic oligonucleotide
  Antisense strand to SEQ ID NO: 2331588
auucccauagaagacuuua

SEQ ID NO: 2331590 - RNA, 19 nt, Artificial Sequence
  Description of Artificial Sequence: Synthetic oligonucleotide
  Sense strand starting at position 566 of SEQ ID NO: 1885299
uuaaauauugugggauaca

SEQ ID NO: 2331591 - RNA, 19 nt, Artificial Sequence
  Description of Artificial Sequence: Synthetic oligonucleotide
  Antisense strand to SEQ ID NO: 2331590
uguaucccacaauauuuaa

SEQ ID NO: 2331592 - RNA, 19 nt, Artificial Sequence
  Description of Artificial Sequence: Synthetic oligonucleotide
  Sense strand starting at position 681 of SEQ ID NO: 1885299
aguuauugaaagugaauga

SEQ ID NO: 2331593 - RNA, 19 nt, Artificial Sequence
  Description of Artificial Sequence: Synthetic oligonucleotide
  Antisense strand to SEQ ID NO: 2331592
ucauucacuuucaauaacu

SEQ ID NO: 2331594 - RNA, 19 nt, Artificial Sequence
  Description of Artificial Sequence: Synthetic oligonucleotide
  Sense strand starting at position 702 of SEQ ID NO: 1885299
ggcauugccacauggaaag

SEQ ID NO: 2331595 - RNA, 19 nt, Artificial Sequence
  Description of Artificial Sequence: Synthetic oligonucleotide
  Antisense strand to SEQ ID NO: 2331594
cuuuccauguggcaaugcc

SEQ ID NO: 2331596 - RNA, 19 nt, Artificial Sequence
  Description of Artificial Sequence: Synthetic oligonucleotide
  Sense strand starting at position 932 of SEQ ID NO: 1885299
auugcauuccaggagugga

SEQ ID NO: 2331597 - RNA, 19 nt, Artificial Sequence
  Description of Artificial Sequence: Synthetic oligonucleotide
  Antisense strand to SEQ ID NO: 2331596
uccacuccuggaaugcaau

SEQ ID NO: 2331598 - RNA, 19 nt, Artificial Sequence
  Description of Artificial Sequence: Synthetic oligonucleotide
  Sense strand starting at position 1042 of SEQ ID NO: 1885299
agguaaugucuugagaguu

SEQ ID NO: 2331599 - RNA, 19 nt, Artificial Sequence
  Description of Artificial Sequence: Synthetic oligonucleotide
  Antisense strand to SEQ ID NO: 2331598
aacucucaagacauuaccu

SEQ ID NO: 2331600 - RNA, 19 nt, Artificial Sequence
  Description of Artificial Sequence: Synthetic oligonucleotide
  Sense strand starting at position 1048 of SEQ ID NO: 1885299
ugucuugagaguuagauuc

SEQ ID NO: 2331601 - RNA, 19 nt, Artificial Sequence
  Description of Artificial Sequence: Synthetic oligonucleotide
  Antisense strand to SEQ ID NO: 2331600
gaaucuaacucucaagaca

SEQ ID NO: 2331602 - RNA, 19 nt, Artificial Sequence
  Description of Artificial Sequence: Synthetic oligonucleotide
  Sense strand starting at position 1256 of SEQ ID NO: 1885299
agucaaucacuuugcagaa

SEQ ID NO: 2331603 - RNA, 19 nt, Artificial Sequence
  Description of Artificial Sequence: Synthetic oligonucleotide
  Antisense strand to SEQ ID NO: 2331602
uucugcaaagugauugacu

SEQ ID NO: 2331604 - RNA, 19 nt, Artificial Sequence
  Description of Artificial Sequence: Synthetic oligonucleotide
  Sense strand starting at position 1257 of SEQ ID NO: 1885299
gucaaucacuuugcagaaa

SEQ ID NO: 2331605 - RNA, 19 nt, Artificial Sequence
  Description of Artificial Sequence: Synthetic oligonucleotide
  Antisense strand to SEQ ID NO: 2331604
uuucugcaaagugauugac

SEQ ID NO: 2331606 - RNA, 19 nt, Artificial Sequence
  Description of Artificial Sequence: Synthetic oligonucleotide
  Sense strand starting at position 1275 of SEQ ID NO: 1885299
agucaaagucccuauugag

SEQ ID NO: 2331607 - RNA, 19 nt, Artificial Sequence
  Description of Artificial Sequence: Synthetic oligonucleotide
  Antisense strand to SEQ ID NO: 2331606
cucaauagggacuuugacu

SEQ ID NO: 2331608 - RNA, 19 nt, Artificial Sequence
  Description of Artificial Sequence: Synthetic oligonucleotide
  Sense strand starting at position 1384 of SEQ ID NO: 1885299
ggcuguucucgucuccaau

SEQ ID NO: 2331609 - RNA, 19 nt, Artificial Sequence
  Description of Artificial Sequence: Synthetic oligonucleotide
  Antisense strand to SEQ ID NO: 2331608
auuggagacgagaacagcc

SEQ ID NO: 2331610 - RNA, 19 nt, Artificial Sequence
  Description of Artificial Sequence: Synthetic oligonucleotide
  Sense strand starting at position 1385 of SEQ ID NO: 1885299
gcuguucucgucuccaauu

SEQ ID NO: 2331611 - RNA, 19 nt, Artificial Sequence
  Description of Artificial Sequence: Synthetic oligonucleotide
  Antisense strand to SEQ ID NO: 2331610
aauuggagacgagaacagc

SEQ ID NO: 2331612 - RNA, 19 nt, Artificial Sequence
  Description of Artificial Sequence: Synthetic oligonucleotide
  Sense strand starting at position 1617 of SEQ ID NO: 1885299
cugguaaacgccuacucau

SEQ ID NO: 2331613 - RNA, 19 nt, Artificial Sequence
  Description of Artificial Sequence: Synthetic oligonucleotide
  Antisense strand to SEQ ID NO: 2331612
augaguaggcguuuaccag

SEQ ID NO: 2331614 - RNA, 19 nt, Artificial Sequence
  Description of Artificial Sequence: Synthetic oligonucleotide
  Sense strand starting at position 1641 of SEQ ID NO: 1885299
aagccuuagcuccagaguu

SEQ ID NO: 2331615 - RNA, 19 nt, Artificial Sequence
  Description of Artificial Sequence: Synthetic oligonucleotide
  Antisense strand to SEQ ID NO: 2331614
aacucuggagcuaaggcuu

SEQ ID NO: 2331616 - RNA, 19 nt, Artificial Sequence
  Description of Artificial Sequence: Synthetic oligonucleotide
  Sense strand starting at position 1654 of SEQ ID NO: 1885299
agaguugucugaucuagaa

SEQ ID NO: 2331617 - RNA, 19 nt, Artificial Sequence
  Description of Artificial Sequence: Synthetic oligonucleotide
  Antisense strand to SEQ ID NO: 2331616
uucuagaucagacaacucu

SEQ ID NO: 2331618 - RNA, 19 nt, Artificial Sequence
  Description of Artificial Sequence: Synthetic oligonucleotide
  Sense strand starting at position 1816 of SEQ ID NO: 1885299
gcaggauacucugucuuag

SEQ ID NO: 2331619 - RNA, 19 nt, Artificial Sequence
  Description of Artificial Sequence: Synthetic oligonucleotide
  Antisense strand to SEQ ID NO: 2331618
cuaagacagaguauccugc

SEQ ID NO: 2331620 - RNA, 19 nt, Artificial Sequence
  Description of Artificial Sequence: Synthetic oligonucleotide
  Sense strand starting at position 1818 of SEQ ID NO: 1885299
aggauacucugucuuaguu

SEQ ID NO: 2331621 - RNA, 19 nt, Artificial Sequence
  Description of Artificial Sequence: Synthetic oligonucleotide
  Antisense strand to SEQ ID NO: 2331620
aacuaagacagaguauccu

SEQ ID NO: 2331622 - RNA, 19 nt, Artificial Sequence
  Description of Artificial Sequence: Synthetic oligonucleotide
  Sense strand starting at position 1892 of SEQ ID NO: 1885299
auuugucaauaacaagagu

SEQ ID NO: 2331623 - RNA, 19 nt, Artificial Sequence
  Description of Artificial Sequence: Synthetic oligonucleotide
  Antisense strand to SEQ ID NO: 2331622
acucuuguuauugacaaau

SEQ ID NO: 2331624 - RNA, 19 nt, Artificial Sequence
  Description of Artificial Sequence: Synthetic oligonucleotide
  Sense strand starting at position 2205 of SEQ ID NO: 1885299
cgcugaaacagugggaaau

SEQ ID NO: 2331625 - RNA, 19 nt, Artificial Sequence
  Description of Artificial Sequence: Synthetic oligonucleotide
  Antisense strand to SEQ ID NO: 2331624
auuucccacuguuucagcg

SEQ ID NO: 2331626 - RNA, 19 nt, Artificial Sequence
  Description of Artificial Sequence: Synthetic oligonucleotide
  Sense strand starting at position 2435 of SEQ ID NO: 1885299
uggugagaauucuuccuua

SEQ ID NO: 2331627 - RNA, 19 nt, Artificial Sequence
  Description of Artificial Sequence: Synthetic oligonucleotide
  Antisense strand to SEQ ID NO: 2331626
uaaggaagaauucucacca

SEQ ID NO: 2331628 - RNA, 19 nt, Artificial Sequence
  Description of Artificial Sequence: Synthetic oligonucleotide
  Sense strand starting at position 2957 of SEQ ID NO: 1885299
agguguacaguuuaaauga

SEQ ID NO: 2331629 - RNA, 19 nt, Artificial Sequence
  Description of Artificial Sequence: Synthetic oligonucleotide
  Antisense strand to SEQ ID NO: 2331628
ucauuuaaacuguacaccu

SEQ ID NO: 2331630 - RNA, 19 nt, Artificial Sequence
  Description of Artificial Sequence: Synthetic oligonucleotide
  Sense strand starting at position 2965 of SEQ ID NO: 1885299
aguuuaaaugauugcacaa

SEQ ID NO: 2331631 - RNA, 19 nt, Artificial Sequence
  Description of Artificial Sequence: Synthetic oligonucleotide
  Antisense strand to SEQ ID NO: 2331630
uugugcaaucauuuaaacu

SEQ ID NO: 2331632 - RNA, 19 nt, Artificial Sequence
  Description of Artificial Sequence: Synthetic oligonucleotide
  Sense strand starting at position 3021 of SEQ ID NO: 1885299
gaggcuuaauuagccugaa

SEQ ID NO: 2331633 - RNA, 19 nt, Artificial Sequence
  Description of Artificial Sequence: Synthetic oligonucleotide
  Antisense strand to SEQ ID NO: 2331632
uucaggcuaauuaagccuc

SEQ ID NO: 2331634 - RNA, 19 nt, Artificial Sequence
  Description of Artificial Sequence: Synthetic oligonucleotide
  Sense strand starting at position 3259 of SEQ ID NO: 1885299
guguguauucugagagugu

SEQ ID NO: 2331635 - RNA, 19 nt, Artificial Sequence
  Description of Artificial Sequence: Synthetic oligonucleotide
  Antisense strand to SEQ ID NO: 2331634
acacucucagaauacacac

SEQ ID NO: 2331636 - RNA, 19 nt, Artificial Sequence
  Description of Artificial Sequence: Synthetic oligonucleotide
  Sense strand starting at position 3261 of SEQ ID NO: 1885299
guguauucugagagugugu

SEQ ID NO: 2331637 - RNA, 19 nt, Artificial Sequence
  Description of Artificial Sequence: Synthetic oligonucleotide
  Antisense strand to SEQ ID NO: 2331636
acacacucucagaauacac

SEQ ID NO: 2331638 - RNA, 19 nt, Artificial Sequence
  Description of Artificial Sequence: Synthetic oligonucleotide
  Sense strand starting at position 3374 of SEQ ID NO: 1885299
ccaaguguucugggaugag

SEQ ID NO: 2331639 - RNA, 19 nt, Artificial Sequence
  Description of Artificial Sequence: Synthetic oligonucleotide
  Antisense strand to SEQ ID NO: 2331638
cucaucccagaacacuugg

SEQ ID NO: 2331640 - RNA, 19 nt, Artificial Sequence
  Description of Artificial Sequence: Synthetic oligonucleotide
  Sense strand starting at position 3377 of SEQ ID NO: 1885299
aguguucugggaugagaag

SEQ ID NO: 2331641 - RNA, 19 nt, Artificial Sequence
  Description of Artificial Sequence: Synthetic oligonucleotide
  Antisense strand to SEQ ID NO: 2331640
cuucucaucccagaacacu

SEQ ID NO: 2331642 - RNA, 19 nt, Artificial Sequence
  Description of Artificial Sequence: Synthetic oligonucleotide
  Sense strand starting at position 3388 of SEQ ID NO: 1885299
augagaagauuguuccaua

SEQ ID NO: 2331643 - RNA, 19 nt, Artificial Sequence
  Description of Artificial Sequence: Synthetic oligonucleotide
  Antisense strand to SEQ ID NO: 2331642
uauggaacaaucuucucau

SEQ ID NO: 2331644 - RNA, 19 nt, Artificial Sequence
  Description of Artificial Sequence: Synthetic oligonucleotide
  Sense strand starting at position 3389 of SEQ ID NO: 1885299
ugagaagauuguuccauag

SEQ ID NO: 2331645 - RNA, 19 nt, Artificial Sequence
  Description of Artificial Sequence: Synthetic oligonucleotide
  Antisense strand to SEQ ID NO: 2331644
cuauggaacaaucuucuca

SEQ ID NO: 2331646 - RNA, 19 nt, Artificial Sequence
  Description of Artificial Sequence: Synthetic oligonucleotide
  Sense strand starting at position 3398 of SEQ ID NO: 1885299
uguuccauaguuuacauau

SEQ ID NO: 2331647 - RNA, 19 nt, Artificial Sequence
  Description of Artificial Sequence: Synthetic oligonucleotide
  Antisense strand to SEQ ID NO: 2331646
auauguaaacuauggaaca

SEQ ID NO: 2331648 - RNA, 19 nt, Artificial Sequence
  Description of Artificial Sequence: Synthetic oligonucleotide
  Sense strand starting at position 3534 of SEQ ID NO: 1885299
cuaucauugcuguaauaga

SEQ ID NO: 2331649 - RNA, 19 nt, Artificial Sequence
  Description of Artificial Sequence: Synthetic oligonucleotide
  Antisense strand to SEQ ID NO: 2331648
ucuauuacagcaaugauag

SEQ ID NO: 2331650 - RNA, 19 nt, Artificial Sequence
  Description of Artificial Sequence: Synthetic oligonucleotide
  Sense strand starting at position 3542 of SEQ ID NO: 1885299
gcuguaauagauuaccaca

SEQ ID NO: 2331651 - RNA, 19 nt, Artificial Sequence
  Description of Artificial Sequence: Synthetic oligonucleotide
  Antisense strand to SEQ ID NO: 2331650
ugugguaaucuauuacagc

SEQ ID NO: 2331652 - RNA, 19 nt, Artificial Sequence
  Description of Artificial Sequence: Synthetic oligonucleotide
  Sense strand starting at position 3597 of SEQ ID NO: 1885299
ugcagaucagagugucaga

SEQ ID NO: 2331653 - RNA, 19 nt, Artificial Sequence
  Description of Artificial Sequence: Synthetic oligonucleotide
  Antisense strand to SEQ ID NO: 2331652
ucugacacucugaucugca

SEQ ID NO: 2331654 - RNA, 19 nt, Artificial Sequence
  Description of Artificial Sequence: Synthetic oligonucleotide
  Sense strand starting at position 3624 of SEQ ID NO: 1885299
cugggucucacugggugaa

SEQ ID NO: 2331655 - RNA, 19 nt, Artificial Sequence
  Description of Artificial Sequence: Synthetic oligonucleotide
  Antisense strand to SEQ ID NO: 2331654
uucacccagugagacccag

SEQ ID NO: 2331656 - RNA, 19 nt, Artificial Sequence
  Description of Artificial Sequence: Synthetic oligonucleotide
  Sense strand starting at position 3625 of SEQ ID NO: 1885299
ugggucucacugggugaaa

SEQ ID NO: 2331657 - RNA, 19 nt, Artificial Sequence
  Description of Artificial Sequence: Synthetic oligonucleotide
  Antisense strand to SEQ ID NO: 2331656
uuucacccagugagaccca

SEQ ID NO: 2331658 - RNA, 19 nt, Artificial Sequence
  Description of Artificial Sequence: Synthetic oligonucleotide
  Sense strand starting at position 3862 of SEQ ID NO: 1885299
uuaggauuccugugauuac

SEQ ID NO: 2331659 - RNA, 19 nt, Artificial Sequence
  Description of Artificial Sequence: Synthetic oligonucleotide
  Antisense strand to SEQ ID NO: 2331658
guaaucacaggaauccuaa

SEQ ID NO: 2331660 - RNA, 19 nt, Artificial Sequence
  Description of Artificial Sequence: Synthetic oligonucleotide
  Sense strand starting at position 3865 of SEQ ID NO: 1885299
ggauuccugugauuacauu

SEQ ID NO: 2331661 - RNA, 19 nt, Artificial Sequence
  Description of Artificial Sequence: Synthetic oligonucleotide
  Antisense strand to SEQ ID NO: 2331660
aauguaaucacaggaaucc

SEQ ID NO: 2331662 - RNA, 19 nt, Artificial Sequence
  Description of Artificial Sequence: Synthetic oligonucleotide
  Sense strand starting at position 3943 of SEQ ID NO: 1885299
cugcgaaguccguuuacca

SEQ ID NO: 2331663 - RNA, 19 nt, Artificial Sequence
  Description of Artificial Sequence: Synthetic oligonucleotide
  Antisense strand to SEQ ID NO: 2331662
ugguaaacggacuucgcag

SEQ ID NO: 2331664 - RNA, 19 nt, Artificial Sequence
  Description of Artificial Sequence: Synthetic oligonucleotide
  Sense strand starting at position 66 of SEQ ID NO: 1885300
gaacgagaacacugucaag

SEQ ID NO: 2331665 - RNA, 19 nt, Artificial Sequence
  Description of Artificial Sequence: Synthetic oligonucleotide
  Antisense strand to SEQ ID NO: 2331664
cuugacaguguucucguuc

SEQ ID NO: 2331666 - RNA, 19 nt, Artificial Sequence
  Description of Artificial Sequence: Synthetic oligonucleotide
  Sense strand starting at position 72 of SEQ ID NO: 1885300
gaacacugucaaggugaaa

SEQ ID NO: 2331667 - RNA, 19 nt, Artificial Sequence
  Description of Artificial Sequence: Synthetic oligonucleotide
  Antisense strand to SEQ ID NO: 2331666
uuucaccuugacaguguuc

SEQ ID NO: 2331668 - RNA, 19 nt, Artificial Sequence
  Description of Artificial Sequence: Synthetic oligonucleotide
  Sense strand starting at position 463 of SEQ ID NO: 1885300
guagacuagcugggaaagu

SEQ ID NO: 2331669 - RNA, 19 nt, Artificial Sequence
  Description of Artificial Sequence: Synthetic oligonucleotide
  Antisense strand to SEQ ID NO: 2331668
acuuucccagcuagucuac

SEQ ID NO: 2331670 - RNA, 19 nt, Artificial Sequence
  Description of Artificial Sequence: Synthetic oligonucleotide
  Sense strand starting at position 480 of SEQ ID NO: 1885300
guagacuaguaaguaagaa

SEQ ID NO: 2331671 - RNA, 19 nt, Artificial Sequence
  Description of Artificial Sequence: Synthetic oligonucleotide
  Antisense strand to SEQ ID NO: 2331670
uucuuacuuacuagucuac

SEQ ID NO: 2331672 - RNA, 19 nt, Artificial Sequence
  Description of Artificial Sequence: Synthetic oligonucleotide
  Sense strand starting at position 608 of SEQ ID NO: 1885300
gggagaagcucuucuuauu

SEQ ID NO: 2331673 - RNA, 19 nt, Artificial Sequence
  Description of Artificial Sequence: Synthetic oligonucleotide
  Antisense strand to SEQ ID NO: 2331672
aauaagaagagcuucuccc

SEQ ID NO: 2331674 - RNA, 19 nt, Artificial Sequence
  Description of Artificial Sequence: Synthetic oligonucleotide
  Sense strand starting at position 628 of SEQ ID NO: 1885300
uguaaauguacugaggcaa

SEQ ID NO: 2331675 - RNA, 19 nt, Artificial Sequence
  Description of Artificial Sequence: Synthetic oligonucleotide
  Antisense strand to SEQ ID NO: 2331674
uugccucaguacauuuaca

SEQ ID NO: 2331676 - RNA, 19 nt, Artificial Sequence
  Description of Artificial Sequence: Synthetic oligonucleotide
  Sense strand starting at position 686 of SEQ ID NO: 1885300
gauguacacuggucauuau

SEQ ID NO: 2331677 - RNA, 19 nt, Artificial Sequence
  Description of Artificial Sequence: Synthetic oligonucleotide
  Antisense strand to SEQ ID NO: 2331676
auaaugaccaguguacauc

SEQ ID NO: 2331678 - RNA, 19 nt, Artificial Sequence
  Description of Artificial Sequence: Synthetic oligonucleotide
  Sense strand starting at position 728 of SEQ ID NO: 1885300
agucuaauguuacugaaac

SEQ ID NO: 2331679 - RNA, 19 nt, Artificial Sequence
  Description of Artificial Sequence: Synthetic oligonucleotide
  Antisense strand to SEQ ID NO: 2331678
guuucaguaacauuagacu

SEQ ID NO: 2331680 - RNA, 19 nt, Artificial Sequence
  Description of Artificial Sequence: Synthetic oligonucleotide
  Sense strand starting at position 780 of SEQ ID NO: 1885300
uauuguacugaugaaagca

SEQ ID NO: 2331681 - RNA, 19 nt, Artificial Sequence
  Description of Artificial Sequence: Synthetic oligonucleotide
  Antisense strand to SEQ ID NO: 2331680
ugcuuucaucaguacaaua

SEQ ID NO: 2331682 - RNA, 19 nt, Artificial Sequence
  Description of Artificial Sequence: Synthetic oligonucleotide
  Sense strand starting at position 841 of SEQ ID NO: 1885300
aacacugggugcucuuuaa

SEQ ID NO: 2331683 - RNA, 19 nt, Artificial Sequence
  Description of Artificial Sequence: Synthetic oligonucleotide
  Antisense strand to SEQ ID NO: 2331682
uuaaagagcacccaguguu

SEQ ID NO: 2331684 - RNA, 19 nt, Artificial Sequence
  Description of Artificial Sequence: Synthetic oligonucleotide
  Sense strand starting at position 845 of SEQ ID NO: 1885300
cugggugcucuuuaacuuu

SEQ ID NO: 2331685 - RNA, 19 nt, Artificial Sequence
  Description of Artificial Sequence: Synthetic oligonucleotide
  Antisense strand to SEQ ID NO: 2331684
aaaguuaaagagcacccag

SEQ ID NO: 2331686 - RNA, 19 nt, Artificial Sequence
  Description of Artificial Sequence: Synthetic oligonucleotide
  Sense strand starting at position 915 of SEQ ID NO: 1885300
auuaaagagcauuguauca

SEQ ID NO: 2331687 - RNA, 19 nt, Artificial Sequence
  Description of Artificial Sequence: Synthetic oligonucleotide
  Antisense strand to SEQ ID NO: 2331686
ugauacaaugcucuuuaau

SEQ ID NO: 2331688 - RNA, 19 nt, Artificial Sequence
  Description of Artificial Sequence: Synthetic oligonucleotide
  Sense strand starting at position 1183 of SEQ ID NO: 1885300
uguuuaaccuguuccauaa

SEQ ID NO: 2331689 - RNA, 19 nt, Artificial Sequence
  Description of Artificial Sequence: Synthetic oligonucleotide
  Antisense strand to SEQ ID NO: 2331688
uuauggaacagguuaaaca

SEQ ID NO: 2331690 - RNA, 19 nt, Artificial Sequence
  Description of Artificial Sequence: Synthetic oligonucleotide
  Sense strand starting at position 1258 of SEQ ID NO: 1885300
cuggguuggccuugagaaa

SEQ ID NO: 2331691 - RNA, 19 nt, Artificial Sequence
  Description of Artificial Sequence: Synthetic oligonucleotide
  Antisense strand to SEQ ID NO: 2331690
uuucucaaggccaacccag

SEQ ID NO: 2331692 - RNA, 19 nt, Artificial Sequence
  Description of Artificial Sequence: Synthetic oligonucleotide
  Sense strand starting at position 1280 of SEQ ID NO: 1885300
cucugaacuugagcaagaa

SEQ ID NO: 2331693 - RNA, 19 nt, Artificial Sequence
  Description of Artificial Sequence: Synthetic oligonucleotide
  Antisense strand to SEQ ID NO: 2331692
uucuugcucaaguucagag

SEQ ID NO: 2331694 - RNA, 19 nt, Artificial Sequence
  Description of Artificial Sequence: Synthetic oligonucleotide
  Sense strand starting at position 1803 of SEQ ID NO: 1885300
ugaguaucagauugucuug

SEQ ID NO: 2331695 - RNA, 19 nt, Artificial Sequence
  Description of Artificial Sequence: Synthetic oligonucleotide
  Antisense strand to SEQ ID NO: 2331694
caagacaaucugauacuca

SEQ ID NO: 2331696 - RNA, 19 nt, Artificial Sequence
  Description of Artificial Sequence: Synthetic oligonucleotide
  Sense strand starting at position 1928 of SEQ ID NO: 1885300
uugugaccucccuauggga

SEQ ID NO: 2331697 - RNA, 19 nt, Artificial Sequence
  Description of Artificial Sequence: Synthetic oligonucleotide
  Antisense strand to SEQ ID NO: 2331696
ucccauagggaggucacaa

SEQ ID NO: 2331698 - RNA, 19 nt, Artificial Sequence
  Description of Artificial Sequence: Synthetic oligonucleotide
  Sense strand starting at position 1930 of SEQ ID NO: 1885300
gugaccucccuaugggaca

SEQ ID NO: 2331699 - RNA, 19 nt, Artificial Sequence
  Description of Artificial Sequence: Synthetic oligonucleotide
  Antisense strand to SEQ ID NO: 2331698
ugucccauagggaggucac

SEQ ID NO: 2331700 - RNA, 19 nt, Artificial Sequence
  Description of Artificial Sequence: Synthetic oligonucleotide
  Sense strand starting at position 2073 of SEQ ID NO: 1885300
ccacguauccaacaugauu

SEQ ID NO: 2331701 - RNA, 19 nt, Artificial Sequence
  Description of Artificial Sequence: Synthetic oligonucleotide
  Antisense strand to SEQ ID NO: 2331700
aaucauguuggauacgugg

SEQ ID NO: 2331702 - RNA, 19 nt, Artificial Sequence
  Description of Artificial Sequence: Synthetic oligonucleotide
  Sense strand starting at position 2166 of SEQ ID NO: 1885300
uagugaaucccauguugga

SEQ ID NO: 2331703 - RNA, 19 nt, Artificial Sequence
  Description of Artificial Sequence: Synthetic oligonucleotide
  Antisense strand to SEQ ID NO: 2331702
uccaacaugggauucacua

SEQ ID NO: 2331704 - RNA, 19 nt, Artificial Sequence
  Description of Artificial Sequence: Synthetic oligonucleotide
  Sense strand starting at position 2407 of SEQ ID NO: 1885300
gugaguauuugggcacugu

SEQ ID NO: 2331705 - RNA, 19 nt, Artificial Sequence
  Description of Artificial Sequence: Synthetic oligonucleotide
  Antisense strand to SEQ ID NO: 2331704
acagugcccaaauacucac

SEQ ID NO: 2331706 - RNA, 19 nt, Artificial Sequence
  Description of Artificial Sequence: Synthetic oligonucleotide
  Sense strand starting at position 2411 of SEQ ID NO: 1885300
guauuugggcacugugaug

SEQ ID NO: 2331707 - RNA, 19 nt, Artificial Sequence
  Description of Artificial Sequence: Synthetic oligonucleotide
  Antisense strand to SEQ ID NO: 2331706
caucacagugcccaaauac

SEQ ID NO: 2331708 - RNA, 19 nt, Artificial Sequence
  Description of Artificial Sequence: Synthetic oligonucleotide
  Sense strand starting at position 2442 of SEQ ID NO: 1885300
ugucaauuuccaugcgcca

SEQ ID NO: 2331709 - RNA, 19 nt, Artificial Sequence
  Description of Artificial Sequence: Synthetic oligonucleotide
  Antisense strand to SEQ ID NO: 2331708
uggcgcauggaaauugaca

SEQ ID NO: 2331710 - RNA, 19 nt, Artificial Sequence
  Description of Artificial Sequence: Synthetic oligonucleotide
  Sense strand starting at position 2497 of SEQ ID NO: 1885300
cugugaaggugauuccuga

SEQ ID NO: 2331711 - RNA, 19 nt, Artificial Sequence
  Description of Artificial Sequence: Synthetic oligonucleotide
  Antisense strand to SEQ ID NO: 2331710
ucaggaaucaccuucacag

SEQ ID NO: 2331712 - RNA, 19 nt, Artificial Sequence
  Description of Artificial Sequence: Synthetic oligonucleotide
  Sense strand starting at position 2527 of SEQ ID NO: 1885300
uuugaauucguggacucaa

SEQ ID NO: 2331713 - RNA, 19 nt, Artificial Sequence
  Description of Artificial Sequence: Synthetic oligonucleotide
  Antisense strand to SEQ ID NO: 2331712
uugaguccacgaauucaaa

SEQ ID NO: 2331714 - RNA, 19 nt, Artificial Sequence
  Description of Artificial Sequence: Synthetic oligonucleotide
  Sense strand starting at position 2771 of SEQ ID NO: 1885300
gggagucccaauugcagau

SEQ ID NO: 2331715 - RNA, 19 nt, Artificial Sequence
  Description of Artificial Sequence: Synthetic oligonucleotide
  Antisense strand to SEQ ID NO: 2331714
aucugcaauugggacuccc

SEQ ID NO: 2331716 - RNA, 19 nt, Artificial Sequence
  Description of Artificial Sequence: Synthetic oligonucleotide
  Sense strand starting at position 2775 of SEQ ID NO: 1885300
gucccaauugcagaugaca

SEQ ID NO: 2331717 - RNA, 19 nt, Artificial Sequence
  Description of Artificial Sequence: Synthetic oligonucleotide
  Antisense strand to SEQ ID NO: 2331716
ugucaucugcaauugggac

SEQ ID NO: 2331718 - RNA, 19 nt, Artificial Sequence
  Description of Artificial Sequence: Synthetic oligonucleotide
  Sense strand starting at position 2953 of SEQ ID NO: 1885300
ugaagccucuacucagaua

SEQ ID NO: 2331719 - RNA, 19 nt, Artificial Sequence
  Description of Artificial Sequence: Synthetic oligonucleotide
  Antisense strand to SEQ ID NO: 2331718
uaucugaguagaggcuuca

SEQ ID NO: 2331720 - RNA, 19 nt, Artificial Sequence
  Description of Artificial Sequence: Synthetic oligonucleotide
  Sense strand starting at position 3004 of SEQ ID NO: 1885300
caaaguacucauggucaag

SEQ ID NO: 2331721 - RNA, 19 nt, Artificial Sequence
  Description of Artificial Sequence: Synthetic oligonucleotide
  Antisense strand to SEQ ID NO: 2331720
cuugaccaugaguacuuug

SEQ ID NO: 2331722 - RNA, 19 nt, Artificial Sequence
  Description of Artificial Sequence: Synthetic oligonucleotide
  Sense strand starting at position 3260 of SEQ ID NO: 1885300
cugaauuguuuacugagca

SEQ ID NO: 2331723 - RNA, 19 nt, Artificial Sequence
  Description of Artificial Sequence: Synthetic oligonucleotide
  Antisense strand to SEQ ID NO: 2331722
ugcucaguaaacaauucag

SEQ ID NO: 2331724 - RNA, 19 nt, Artificial Sequence
  Description of Artificial Sequence: Synthetic oligonucleotide
  Sense strand starting at position 3265 of SEQ ID NO: 1885300
uuguuuacugagcaaaggu

SEQ ID NO: 2331725 - RNA, 19 nt, Artificial Sequence
  Description of Artificial Sequence: Synthetic oligonucleotide
  Antisense strand to SEQ ID NO: 2331724
accuuugcucaguaaacaa

SEQ ID NO: 2331726 - RNA, 19 nt, Artificial Sequence
  Description of Artificial Sequence: Synthetic oligonucleotide
  Sense strand starting at position 3316 of SEQ ID NO: 1885300
uuaggauuauagccuagaa

SEQ ID NO: 2331727 - RNA, 19 nt, Artificial Sequence
  Description of Artificial Sequence: Synthetic oligonucleotide
  Antisense strand to SEQ ID NO: 2331726
uucuaggcuauaauccuaa

SEQ ID NO: 2331728 - RNA, 19 nt, Artificial Sequence
  Description of Artificial Sequence: Synthetic oligonucleotide
  Sense strand starting at position 3495 of SEQ ID NO: 1885300
acuuguucugaaugaagua

SEQ ID NO: 2331729 - RNA, 19 nt, Artificial Sequence
  Description of Artificial Sequence: Synthetic oligonucleotide
  Antisense strand to SEQ ID NO: 2331728
uacuucauucagaacaagu

SEQ ID NO: 2331730 - RNA, 19 nt, Artificial Sequence
  Description of Artificial Sequence: Synthetic oligonucleotide
  Sense strand starting at position 3535 of SEQ ID NO: 1885300
acuuuaguucuaggagaau

SEQ ID NO: 2331731 - RNA, 19 nt, Artificial Sequence
  Description of Artificial Sequence: Synthetic oligonucleotide
  Antisense strand to SEQ ID NO: 2331730
auucuccuagaacuaaagu

SEQ ID NO: 2331732 - RNA, 19 nt, Artificial Sequence
  Description of Artificial Sequence: Synthetic oligonucleotide
  Sense strand starting at position 3603 of SEQ ID NO: 1885300
gugggauggagaugugaga

SEQ ID NO: 2331733 - RNA, 19 nt, Artificial Sequence
  Description of Artificial Sequence: Synthetic oligonucleotide
  Antisense strand to SEQ ID NO: 2331732
ucucacaucuccaucccac

SEQ ID NO: 2331734 - RNA, 19 nt, Artificial Sequence
  Description of Artificial Sequence: Synthetic oligonucleotide
  Sense strand starting at position 3690 of SEQ ID NO: 1885300
augucaagauugucuauaa

SEQ ID NO: 2331735 - RNA, 19 nt, Artificial Sequence
  Description of Artificial Sequence: Synthetic oligonucleotide
  Antisense strand to SEQ ID NO: 2331734
uuauagacaaucuugacau

SEQ ID NO: 2331736 - RNA, 19 nt, Artificial Sequence
  Description of Artificial Sequence: Synthetic oligonucleotide
  Sense strand starting at position 3691 of SEQ ID NO: 1885300
ugucaagauugucuauaaa

SEQ ID NO: 2331737 - RNA, 19 nt, Artificial Sequence
  Description of Artificial Sequence: Synthetic oligonucleotide
  Antisense strand to SEQ ID NO: 2331736
uuuauagacaaucuugaca

SEQ ID NO: 2331738 - RNA, 19 nt, Artificial Sequence
  Description of Artificial Sequence: Synthetic oligonucleotide
  Sense strand starting at position 3715 of SEQ ID NO: 1885300
augucuuguuaauuaccaa

SEQ ID NO: 2331739 - RNA, 19 nt, Artificial Sequence
  Description of Artificial Sequence: Synthetic oligonucleotide
  Antisense strand to SEQ ID NO: 2331738
uugguaauuaacaagacau

SEQ ID NO: 2331740 - RNA, 19 nt, Artificial Sequence
  Description of Artificial Sequence: Synthetic oligonucleotide
  Sense strand starting at position 3847 of SEQ ID NO: 1885300
cgcugaaggcaagagaaua

SEQ ID NO: 2331741 - RNA, 19 nt, Artificial Sequence
  Description of Artificial Sequence: Synthetic oligonucleotide
  Antisense strand to SEQ ID NO: 2331740
uauucucuugccuucagcg

SEQ ID NO: 2331742 - RNA, 19 nt, Artificial Sequence
  Description of Artificial Sequence: Synthetic oligonucleotide
  Sense strand starting at position 3855 of SEQ ID NO: 1885300
gcaagagaauaccuaauuc

SEQ ID NO: 2331743 - RNA, 19 nt, Artificial Sequence
  Description of Artificial Sequence: Synthetic oligonucleotide
  Antisense strand to SEQ ID NO: 2331742
gaauuagguauucucuugc

SEQ ID NO: 2331744 - RNA, 19 nt, Artificial Sequence
  Description of Artificial Sequence: Synthetic oligonucleotide
  Sense strand starting at position 19 of SEQ ID NO: 1885301
gccuuugaccuguaaccua

SEQ ID NO: 2331745 - RNA, 19 nt, Artificial Sequence
  Description of Artificial Sequence: Synthetic oligonucleotide
  Antisense strand to SEQ ID NO: 2331744
uagguuacaggucaaaggc

SEQ ID NO: 2331746 - RNA, 19 nt, Artificial Sequence
  Description of Artificial Sequence: Synthetic oligonucleotide
  Sense strand starting at position 82 of SEQ ID NO: 1885301
ccuauaaucucagugagau

SEQ ID NO: 2331747 - RNA, 19 nt, Artificial Sequence
  Description of Artificial Sequence: Synthetic oligonucleotide
  Antisense strand to SEQ ID NO: 2331746
aucucacugagauuauagg

SEQ ID NO: 2331748 - RNA, 19 nt, Artificial Sequence
  Description of Artificial Sequence: Synthetic oligonucleotide
  Sense strand starting at position 83 of SEQ ID NO: 1885301
cuauaaucucagugagaua

SEQ ID NO: 2331749 - RNA, 19 nt, Artificial Sequence
  Description of Artificial Sequence: Synthetic oligonucleotide
  Antisense strand to SEQ ID NO: 2331748
uaucucacugagauuauag

SEQ ID NO: 2331750 - RNA, 19 nt, Artificial Sequence
  Description of Artificial Sequence: Synthetic oligonucleotide
  Sense strand starting at position 182 of SEQ ID NO: 1885301
aguagaaaucagcauugca

SEQ ID NO: 2331751 - RNA, 19 nt, Artificial Sequence
  Description of Artificial Sequence: Synthetic oligonucleotide
  Antisense strand to SEQ ID NO: 2331750
ugcaaugcugauuucuacu

SEQ ID NO: 2331752 - RNA, 19 nt, Artificial Sequence
  Description of Artificial Sequence: Synthetic oligonucleotide
  Sense strand starting at position 250 of SEQ ID NO: 1885301
ccacguuucccagaaauag

SEQ ID NO: 2331753 - RNA, 19 nt, Artificial Sequence
  Description of Artificial Sequence: Synthetic oligonucleotide
  Antisense strand to SEQ ID NO: 2331752
cuauuucugggaaacgugg

SEQ ID NO: 2331754 - RNA, 19 nt, Artificial Sequence
  Description of Artificial Sequence: Synthetic oligonucleotide
  Sense strand starting at position 299 of SEQ ID NO: 1885301
cauugucugguuugagaca

SEQ ID NO: 2331755 - RNA, 19 nt, Artificial Sequence
  Description of Artificial Sequence: Synthetic oligonucleotide
  Antisense strand to SEQ ID NO: 2331754
ugucucaaaccagacaaug

SEQ ID NO: 2331756 - RNA, 19 nt, Artificial Sequence
  Description of Artificial Sequence: Synthetic oligonucleotide
  Sense strand starting at position 742 of SEQ ID NO: 1885301
caggaacuuugacuguauu

SEQ ID NO: 2331757 - RNA, 19 nt, Artificial Sequence
  Description of Artificial Sequence: Synthetic oligonucleotide
  Antisense strand to SEQ ID NO: 2331756
aauacagucaaaguuccug

SEQ ID NO: 2331758 - RNA, 19 nt, Artificial Sequence
  Description of Artificial Sequence: Synthetic oligonucleotide
  Sense strand starting at position 745 of SEQ ID NO: 1885301
gaacuuugacuguauuguu

SEQ ID NO: 2331759 - RNA, 19 nt, Artificial Sequence
  Description of Artificial Sequence: Synthetic oligonucleotide
  Antisense strand to SEQ ID NO: 2331758
aacaauacagucaaaguuc

SEQ ID NO: 2331760 - RNA, 19 nt, Artificial Sequence
  Description of Artificial Sequence: Synthetic oligonucleotide
  Sense strand starting at position 802 of SEQ ID NO: 1885301
gcaaacguuccauaaauau

SEQ ID NO: 2331761 - RNA, 19 nt, Artificial Sequence
  Description of Artificial Sequence: Synthetic oligonucleotide
  Antisense strand to SEQ ID NO: 2331760
auauuuauggaacguuugc

SEQ ID NO: 2331762 - RNA, 19 nt, Artificial Sequence
  Description of Artificial Sequence: Synthetic oligonucleotide
  Sense strand starting at position 847 of SEQ ID NO: 1885301
uagaaagcuuccucuggua

SEQ ID NO: 2331763 - RNA, 19 nt, Artificial Sequence
  Description of Artificial Sequence: Synthetic oligonucleotide
  Antisense strand to SEQ ID NO: 2331762
uaccagaggaagcuuucua

SEQ ID NO: 2331764 - RNA, 19 nt, Artificial Sequence
  Description of Artificial Sequence: Synthetic oligonucleotide
  Sense strand starting at position 869 of SEQ ID NO: 1885301
uuguaagagcuguggauaa

SEQ ID NO: 2331765 - RNA, 19 nt, Artificial Sequence
  Description of Artificial Sequence: Synthetic oligonucleotide
  Antisense strand to SEQ ID NO: 2331764
uuauccacagcucuuacaa

SEQ ID NO: 2331766 - RNA, 19 nt, Artificial Sequence
  Description of Artificial Sequence: Synthetic oligonucleotide
  Sense strand starting at position 871 of SEQ ID NO: 1885301
guaagagcuguggauaaug

SEQ ID NO: 2331767 - RNA, 19 nt, Artificial Sequence
  Description of Artificial Sequence: Synthetic oligonucleotide
  Antisense strand to SEQ ID NO: 2331766
cauuauccacagcucuuac

SEQ ID NO: 2331768 - RNA, 19 nt, Artificial Sequence
  Description of Artificial Sequence: Synthetic oligonucleotide
  Sense strand starting at position 982 of SEQ ID NO: 1885301
uuccaaacagguugugaua

SEQ ID NO: 2331769 - RNA, 19 nt, Artificial Sequence
  Description of Artificial Sequence: Synthetic oligonucleotide
  Antisense strand to SEQ ID NO: 2331768
uaucacaaccuguuuggaa

SEQ ID NO: 2331770 - RNA, 19 nt, Artificial Sequence
  Description of Artificial Sequence: Synthetic oligonucleotide
  Sense strand starting at position 997 of SEQ ID NO: 1885301
gauauuggugcugggaacu

SEQ ID NO: 2331771 - RNA, 19 nt, Artificial Sequence
  Description of Artificial Sequence: Synthetic oligonucleotide
  Antisense strand to SEQ ID NO: 2331770
aguucccagcaccaauauc

SEQ ID NO: 2331772 - RNA, 19 nt, Artificial Sequence
  Description of Artificial Sequence: Synthetic oligonucleotide
  Sense strand starting at position 1076 of SEQ ID NO: 1885301
acagguaucguacagauau

SEQ ID NO: 2331773 - RNA, 19 nt, Artificial Sequence
  Description of Artificial Sequence: Synthetic oligonucleotide
  Antisense strand to SEQ ID NO: 2331772
auaucuguacgauaccugu

SEQ ID NO: 2331774 - RNA, 19 nt, Artificial Sequence
  Description of Artificial Sequence: Synthetic oligonucleotide
  Sense strand starting at position 1078 of SEQ ID NO: 1885301
agguaucguacagauauag

SEQ ID NO: 2331775 - RNA, 19 nt, Artificial Sequence
  Description of Artificial Sequence: Synthetic oligonucleotide
  Antisense strand to SEQ ID NO: 2331774
cuauaucuguacgauaccu

SEQ ID NO: 2331776 - RNA, 19 nt, Artificial Sequence
  Description of Artificial Sequence: Synthetic oligonucleotide
  Sense strand starting at position 1307 of SEQ ID NO: 1885301
auagaaaccuuggaagaau

SEQ ID NO: 2331777 - RNA, 19 nt, Artificial Sequence
  Description of Artificial Sequence: Synthetic oligonucleotide
  Antisense strand to SEQ ID NO: 2331776
auucuuccaagguuucuau

SEQ ID NO: 2331778 - RNA, 19 nt, Artificial Sequence
  Description of Artificial Sequence: Synthetic oligonucleotide
  Sense strand starting at position 1642 of SEQ ID NO: 1885301
gcaagauugaccgauuccu

SEQ ID NO: 2331779 - RNA, 19 nt, Artificial Sequence
  Description of Artificial Sequence: Synthetic oligonucleotide
  Antisense strand to SEQ ID NO: 2331778
aggaaucggucaaucuugc

SEQ ID NO: 2331780 - RNA, 19 nt, Artificial Sequence
  Description of Artificial Sequence: Synthetic oligonucleotide
  Sense strand starting at position 1698 of SEQ ID NO: 1885301
cccaguguuaccgcguuua

SEQ ID NO: 2331781 - RNA, 19 nt, Artificial Sequence
  Description of Artificial Sequence: Synthetic oligonucleotide
  Antisense strand to SEQ ID NO: 2331780
uaaacgcgguaacacuggg

SEQ ID NO: 2331782 - RNA, 19 nt, Artificial Sequence
  Description of Artificial Sequence: Synthetic oligonucleotide
  Sense strand starting at position 1700 of SEQ ID NO: 1885301
caguguuaccgcguuuacu

SEQ ID NO: 2331783 - RNA, 19 nt, Artificial Sequence
  Description of Artificial Sequence: Synthetic oligonucleotide
  Antisense strand to SEQ ID NO: 2331782
aguaaacgcgguaacacug

SEQ ID NO: 2331784 - RNA, 19 nt, Artificial Sequence
  Description of Artificial Sequence: Synthetic oligonucleotide
  Sense strand starting at position 1701 of SEQ ID NO: 1885301
aguguuaccgcguuuacuc

SEQ ID NO: 2331785 - RNA, 19 nt, Artificial Sequence
  Description of Artificial Sequence: Synthetic oligonucleotide
  Antisense strand to SEQ ID NO: 2331784
gaguaaacgcgguaacacu

SEQ ID NO: 2331786 - RNA, 19 nt, Artificial Sequence
  Description of Artificial Sequence: Synthetic oligonucleotide
  Sense strand starting at position 1708 of SEQ ID NO: 1885301
ccgcguuuacuccuuuaua

SEQ ID NO: 2331787 - RNA, 19 nt, Artificial Sequence
  Description of Artificial Sequence: Synthetic oligonucleotide
  Antisense strand to SEQ ID NO: 2331786
uauaaaggaguaaacgcgg

SEQ ID NO: 2331788 - RNA, 19 nt, Artificial Sequence
  Description of Artificial Sequence: Synthetic oligonucleotide
  Sense strand starting at position 2105 of SEQ ID NO: 1885301
agggcugugaaucaucauu

SEQ ID NO: 2331789 - RNA, 19 nt, Artificial Sequence
  Description of Artificial Sequence: Synthetic oligonucleotide
  Antisense strand to SEQ ID NO: 2331788
aaugaugauucacagcccu

SEQ ID NO: 2331790 - RNA, 19 nt, Artificial Sequence
  Description of Artificial Sequence: Synthetic oligonucleotide
  Sense strand starting at position 2107 of SEQ ID NO: 1885301
ggcugugaaucaucauuga

SEQ ID NO: 2331791 - RNA, 19 nt, Artificial Sequence
  Description of Artificial Sequence: Synthetic oligonucleotide
  Antisense strand to SEQ ID NO: 2331790
ucaaugaugauucacagcc

SEQ ID NO: 2331792 - RNA, 19 nt, Artificial Sequence
  Description of Artificial Sequence: Synthetic oligonucleotide
  Sense strand starting at position 2110 of SEQ ID NO: 1885301
ugugaaucaucauugaaag

SEQ ID NO: 2331793 - RNA, 19 nt, Artificial Sequence
  Description of Artificial Sequence: Synthetic oligonucleotide
  Antisense strand to SEQ ID NO: 2331792
cuuucaaugaugauucaca

SEQ ID NO: 2331794 - RNA, 19 nt, Artificial Sequence
  Description of Artificial Sequence: Synthetic oligonucleotide
  Sense strand starting at position 2280 of SEQ ID NO: 1885301
ucugguuauggcuaugaca

SEQ ID NO: 2331795 - RNA, 19 nt, Artificial Sequence
  Description of Artificial Sequence: Synthetic oligonucleotide
  Antisense strand to SEQ ID NO: 2331794
ugucauagccauaaccaga

SEQ ID NO: 2331796 - RNA, 19 nt, Artificial Sequence
  Description of Artificial Sequence: Synthetic oligonucleotide
  Sense strand starting at position 2282 of SEQ ID NO: 1885301
ugguuauggcuaugacaau

SEQ ID NO: 2331797 - RNA, 19 nt, Artificial Sequence
  Description of Artificial Sequence: Synthetic oligonucleotide
  Antisense strand to SEQ ID NO: 2331796
auugucauagccauaacca

SEQ ID NO: 2331798 - RNA, 19 nt, Artificial Sequence
  Description of Artificial Sequence: Synthetic oligonucleotide
  Sense strand starting at position 2308 of SEQ ID NO: 1885301
gccuauuagggaugagaga

SEQ ID NO: 2331799 - RNA, 19 nt, Artificial Sequence
  Description of Artificial Sequence: Synthetic oligonucleotide
  Antisense strand to SEQ ID NO: 2331798
ucucucaucccuaauaggc

SEQ ID NO: 2331800 - RNA, 19 nt, Artificial Sequence
  Description of Artificial Sequence: Synthetic oligonucleotide
  Sense strand starting at position 2705 of SEQ ID NO: 1885301
cccugaccucccugugaga

SEQ ID NO: 2331801 - RNA, 19 nt, Artificial Sequence
  Description of Artificial Sequence: Synthetic oligonucleotide
  Antisense strand to SEQ ID NO: 2331800
ucucacagggaggucaggg

SEQ ID NO: 2331802 - RNA, 19 nt, Artificial Sequence
  Description of Artificial Sequence: Synthetic oligonucleotide
  Sense strand starting at position 2831 of SEQ ID NO: 1885301
acuagagucaagugagaca

SEQ ID NO: 2331803 - RNA, 19 nt, Artificial Sequence
  Description of Artificial Sequence: Synthetic oligonucleotide
  Antisense strand to SEQ ID NO: 2331802
ugucucacuugacucuagu

SEQ ID NO: 2331804 - RNA, 19 nt, Artificial Sequence
  Description of Artificial Sequence: Synthetic oligonucleotide
  Sense strand starting at position 3142 of SEQ ID NO: 1885301
gaugaaaugccacaagugu

SEQ ID NO: 2331805 - RNA, 19 nt, Artificial Sequence
  Description of Artificial Sequence: Synthetic oligonucleotide
  Antisense strand to SEQ ID NO: 2331804
acacuuguggcauuucauc

SEQ ID NO: 2331806 - RNA, 19 nt, Artificial Sequence
  Description of Artificial Sequence: Synthetic oligonucleotide
  Sense strand starting at position 3155 of SEQ ID NO: 1885301
aagugugugauagaugaug

SEQ ID NO: 2331807 - RNA, 19 nt, Artificial Sequence
  Description of Artificial Sequence: Synthetic oligonucleotide
  Antisense strand to SEQ ID NO: 2331806
caucaucuaucacacacuu

SEQ ID NO: 2331808 - RNA, 19 nt, Artificial Sequence
  Description of Artificial Sequence: Synthetic oligonucleotide
  Sense strand starting at position 3157 of SEQ ID NO: 1885301
gugugugauagaugaugga

SEQ ID NO: 2331809 - RNA, 19 nt, Artificial Sequence
  Description of Artificial Sequence: Synthetic oligonucleotide
  Antisense strand to SEQ ID NO: 2331808
uccaucaucuaucacacac

SEQ ID NO: 2331810 - RNA, 19 nt, Artificial Sequence
  Description of Artificial Sequence: Synthetic oligonucleotide
  Sense strand starting at position 3190 of SEQ ID NO: 1885301
agaucuuaauccuugaguc

SEQ ID NO: 2331811 - RNA, 19 nt, Artificial Sequence
  Description of Artificial Sequence: Synthetic oligonucleotide
  Antisense strand to SEQ ID NO: 2331810
gacucaaggauuaagaucu

SEQ ID NO: 2331812 - RNA, 19 nt, Artificial Sequence
  Description of Artificial Sequence: Synthetic oligonucleotide
  Sense strand starting at position 3192 of SEQ ID NO: 1885301
aucuuaauccuugagucag

SEQ ID NO: 2331813 - RNA, 19 nt, Artificial Sequence
  Description of Artificial Sequence: Synthetic oligonucleotide
  Antisense strand to SEQ ID NO: 2331812
cugacucaaggauuaagau

SEQ ID NO: 2331814 - RNA, 19 nt, Artificial Sequence
  Description of Artificial Sequence: Synthetic oligonucleotide
  Sense strand starting at position 3294 of SEQ ID NO: 1885301
aaugguucuuugccaaaug

SEQ ID NO: 2331815 - RNA, 19 nt, Artificial Sequence
  Description of Artificial Sequence: Synthetic oligonucleotide
  Antisense strand to SEQ ID NO: 2331814
cauuuggcaaagaaccauu

SEQ ID NO: 2331816 - RNA, 19 nt, Artificial Sequence
  Description of Artificial Sequence: Synthetic oligonucleotide
  Sense strand starting at position 3371 of SEQ ID NO: 1885301
uugagaaaugcuggacaca

SEQ ID NO: 2331817 - RNA, 19 nt, Artificial Sequence
  Description of Artificial Sequence: Synthetic oligonucleotide
  Antisense strand to SEQ ID NO: 2331816
uguguccagcauuucucaa

SEQ ID NO: 2331818 - RNA, 19 nt, Artificial Sequence
  Description of Artificial Sequence: Synthetic oligonucleotide
  Sense strand starting at position 3943 of SEQ ID NO: 1885301
gagaguuguggugaauaua

SEQ ID NO: 2331819 - RNA, 19 nt, Artificial Sequence
  Description of Artificial Sequence: Synthetic oligonucleotide
  Antisense strand to SEQ ID NO: 2331818
uauauucaccacaacucuc

SEQ ID NO: 2331820 - RNA, 19 nt, Artificial Sequence
  Description of Artificial Sequence: Synthetic oligonucleotide
  Sense strand starting at position 3946 of SEQ ID NO: 1885301
aguuguggugaauauaagu

SEQ ID NO: 2331821 - RNA, 19 nt, Artificial Sequence
  Description of Artificial Sequence: Synthetic oligonucleotide
  Antisense strand to SEQ ID NO: 2331820
acuuauauucaccacaacu

SEQ ID NO: 2331822 - RNA, 19 nt, Artificial Sequence
  Description of Artificial Sequence: Synthetic oligonucleotide
  Sense strand starting at position 3969 of SEQ ID NO: 1885301
augaauuggccaugauaau

SEQ ID NO: 2331823 - RNA, 19 nt, Artificial Sequence
  Description of Artificial Sequence: Synthetic oligonucleotide
  Antisense strand to SEQ ID NO: 2331822
auuaucauggccaauucau

SEQ ID NO: 2331824 - RNA, 19 nt, Artificial Sequence
  Description of Artificial Sequence: Synthetic oligonucleotide
  Sense strand starting at position 678 of SEQ ID NO: 1885302
ccaagugcuccuggaaguu

SEQ ID NO: 2331825 - RNA, 19 nt, Artificial Sequence
  Description of Artificial Sequence: Synthetic oligonucleotide
  Antisense strand to SEQ ID NO: 2331824
aacuuccaggagcacuugg

SEQ ID NO: 2331826 - RNA, 19 nt, Artificial Sequence
  Description of Artificial Sequence: Synthetic oligonucleotide
  Sense strand starting at position 721 of SEQ ID NO: 1885302
uuaugucuggccuguuuga

SEQ ID NO: 2331827 - RNA, 19 nt, Artificial Sequence
  Description of Artificial Sequence: Synthetic oligonucleotide
  Antisense strand to SEQ ID NO: 2331826
ucaaacaggccagacauaa

SEQ ID NO: 2331828 - RNA, 19 nt, Artificial Sequence
  Description of Artificial Sequence: Synthetic oligonucleotide
  Sense strand starting at position 769 of SEQ ID NO: 1885302
ccuuguuuaucugcccaga

SEQ ID NO: 2331829 - RNA, 19 nt, Artificial Sequence
  Description of Artificial Sequence: Synthetic oligonucleotide
  Antisense strand to SEQ ID NO: 2331828
ucugggcagauaaacaagg

SEQ ID NO: 2331830 - RNA, 19 nt, Artificial Sequence
  Description of Artificial Sequence: Synthetic oligonucleotide
  Sense strand starting at position 771 of SEQ ID NO: 1885302
uuguuuaucugcccagacu

SEQ ID NO: 2331831 - RNA, 19 nt, Artificial Sequence
  Description of Artificial Sequence: Synthetic oligonucleotide
  Antisense strand to SEQ ID NO: 2331830
agucugggcagauaaacaa

SEQ ID NO: 2331832 - RNA, 19 nt, Artificial Sequence
  Description of Artificial Sequence: Synthetic oligonucleotide
  Sense strand starting at position 786 of SEQ ID NO: 1885302
gacucuucgggcugugcau

SEQ ID NO: 2331833 - RNA, 19 nt, Artificial Sequence
  Description of Artificial Sequence: Synthetic oligonucleotide
  Antisense strand to SEQ ID NO: 2331832
augcacagcccgaagaguc

SEQ ID NO: 2331834 - RNA, 19 nt, Artificial Sequence
  Description of Artificial Sequence: Synthetic oligonucleotide
  Sense strand starting at position 806 of SEQ ID NO: 1885302
uguugaagcguuggcauca

SEQ ID NO: 2331835 - RNA, 19 nt, Artificial Sequence
  Description of Artificial Sequence: Synthetic oligonucleotide
  Antisense strand to SEQ ID NO: 2331834
ugaugccaacgcuucaaca

SEQ ID NO: 2331836 - RNA, 19 nt, Artificial Sequence
  Description of Artificial Sequence: Synthetic oligonucleotide
  Sense strand starting at position 807 of SEQ ID NO: 1885302
guugaagcguuggcaucau

SEQ ID NO: 2331837 - RNA, 19 nt, Artificial Sequence
  Description of Artificial Sequence: Synthetic oligonucleotide
  Antisense strand to SEQ ID NO: 2331836
augaugccaacgcuucaac

SEQ ID NO: 2331838 - RNA, 19 nt, Artificial Sequence
  Description of Artificial Sequence: Synthetic oligonucleotide
  Sense strand starting at position 817 of SEQ ID NO: 1885302
uggcaucauuuguuccaca

SEQ ID NO: 2331839 - RNA, 19 nt, Artificial Sequence
  Description of Artificial Sequence: Synthetic oligonucleotide
  Antisense strand to SEQ ID NO: 2331838
uguggaacaaaugaugcca

SEQ ID NO: 2331840 - RNA, 19 nt, Artificial Sequence
  Description of Artificial Sequence: Synthetic oligonucleotide
  Sense strand starting at position 1002 of SEQ ID NO: 1885302
cuuugagcucgugaggcuu

SEQ ID NO: 2331841 - RNA, 19 nt, Artificial Sequence
  Description of Artificial Sequence: Synthetic oligonucleotide
  Antisense strand to SEQ ID NO: 2331840
aagccucacgagcucaaag

SEQ ID NO: 2331842 - RNA, 19 nt, Artificial Sequence
  Description of Artificial Sequence: Synthetic oligonucleotide
  Sense strand starting at position 1013 of SEQ ID NO: 1885302
ugaggcuucucgccaccau

SEQ ID NO: 2331843 - RNA, 19 nt, Artificial Sequence
  Description of Artificial Sequence: Synthetic oligonucleotide
  Antisense strand to SEQ ID NO: 2331842
augguggcgagaagccuca

SEQ ID NO: 2331844 - RNA, 19 nt, Artificial Sequence
  Description of Artificial Sequence: Synthetic oligonucleotide
  Sense strand starting at position 1048 of SEQ ID NO: 1885302
cagugacguuccuugugau

SEQ ID NO: 2331845 - RNA, 19 nt, Artificial Sequence
  Description of Artificial Sequence: Synthetic oligonucleotide
  Antisense strand to SEQ ID NO: 2331844
aucacaaggaacgucacug

SEQ ID NO: 2331846 - RNA, 19 nt, Artificial Sequence
  Description of Artificial Sequence: Synthetic oligonucleotide
  Sense strand starting at position 1049 of SEQ ID NO: 1885302
agugacguuccuugugaug

SEQ ID NO: 2331847 - RNA, 19 nt, Artificial Sequence
  Description of Artificial Sequence: Synthetic oligonucleotide
  Antisense strand to SEQ ID NO: 2331846
caucacaaggaacgucacu

SEQ ID NO: 2331848 - RNA, 19 nt, Artificial Sequence
  Description of Artificial Sequence: Synthetic oligonucleotide
  Sense strand starting at position 1154 of SEQ ID NO: 1885302
accaguuuccauggaacaa

SEQ ID NO: 2331849 - RNA, 19 nt, Artificial Sequence
  Description of Artificial Sequence: Synthetic oligonucleotide
  Antisense strand to SEQ ID NO: 2331848
uuguuccauggaaacuggu

SEQ ID NO: 2331850 - RNA, 19 nt, Artificial Sequence
  Description of Artificial Sequence: Synthetic oligonucleotide
  Sense strand starting at position 1229 of SEQ ID NO: 1885302
agcccaucccuguaaggaa

SEQ ID NO: 2331851 - RNA, 19 nt, Artificial Sequence
  Description of Artificial Sequence: Synthetic oligonucleotide
  Antisense strand to SEQ ID NO: 2331850
uuccuuacagggaugggcu

SEQ ID NO: 2331852 - RNA, 19 nt, Artificial Sequence
  Description of Artificial Sequence: Synthetic oligonucleotide
  Sense strand starting at position 1258 of SEQ ID NO: 1885302
aguaucuggcaccaaugau

SEQ ID NO: 2331853 - RNA, 19 nt, Artificial Sequence
  Description of Artificial Sequence: Synthetic oligonucleotide
  Antisense strand to SEQ ID NO: 2331852
aucauuggugccagauacu

SEQ ID NO: 2331854 - RNA, 19 nt, Artificial Sequence
  Description of Artificial Sequence: Synthetic oligonucleotide
  Sense strand starting at position 1326 of SEQ ID NO: 1885302
ucgcauugugagugugaca

SEQ ID NO: 2331855 - RNA, 19 nt, Artificial Sequence
  Description of Artificial Sequence: Synthetic oligonucleotide
  Antisense strand to SEQ ID NO: 2331854
ugucacacucacaaugcga

SEQ ID NO: 2331856 - RNA, 19 nt, Artificial Sequence
  Description of Artificial Sequence: Synthetic oligonucleotide
  Sense strand starting at position 1342 of SEQ ID NO: 1885302
acagcuuccgaauaauucu

SEQ ID NO: 2331857 - RNA, 19 nt, Artificial Sequence
  Description of Artificial Sequence: Synthetic oligonucleotide
  Antisense strand to SEQ ID NO: 2331856
agaauuauucggaagcugu

SEQ ID NO: 2331858 - RNA, 19 nt, Artificial Sequence
  Description of Artificial Sequence: Synthetic oligonucleotide
  Sense strand starting at position 1349 of SEQ ID NO: 1885302
ccgaauaauucuccacaug

SEQ ID NO: 2331859 - RNA, 19 nt, Artificial Sequence
  Description of Artificial Sequence: Synthetic oligonucleotide
  Antisense strand to SEQ ID NO: 2331858
cauguggagaauuauucgg

SEQ ID NO: 2331860 - RNA, 19 nt, Artificial Sequence
  Description of Artificial Sequence: Synthetic oligonucleotide
  Sense strand starting at position 1363 of SEQ ID NO: 1885302
acaugaccagcgugugauu

SEQ ID NO: 2331861 - RNA, 19 nt, Artificial Sequence
  Description of Artificial Sequence: Synthetic oligonucleotide
  Antisense strand to SEQ ID NO: 2331860
aaucacacgcuggucaugu

SEQ ID NO: 2331862 - RNA, 19 nt, Artificial Sequence
  Description of Artificial Sequence: Synthetic oligonucleotide
  Sense strand starting at position 1469 of SEQ ID NO: 1885302
gcagaaaguugucuccaca

SEQ ID NO: 2331863 - RNA, 19 nt, Artificial Sequence
  Description of Artificial Sequence: Synthetic oligonucleotide
  Antisense strand to SEQ ID NO: 2331862
uguggagacaacuuucugc

SEQ ID NO: 2331864 - RNA, 19 nt, Artificial Sequence
  Description of Artificial Sequence: Synthetic oligonucleotide
  Sense strand starting at position 1493 of SEQ ID NO: 1885302
gcauuuauguguuugugaa

SEQ ID NO: 2331865 - RNA, 19 nt, Artificial Sequence
  Description of Artificial Sequence: Synthetic oligonucleotide
  Antisense strand to SEQ ID NO: 2331864
uucacaaacacauaaaugc

SEQ ID NO: 2331866 - RNA, 19 nt, Artificial Sequence
  Description of Artificial Sequence: Synthetic oligonucleotide
  Sense strand starting at position 1494 of SEQ ID NO: 1885302
cauuuauguguuugugaau

SEQ ID NO: 2331867 - RNA, 19 nt, Artificial Sequence
  Description of Artificial Sequence: Synthetic oligonucleotide
  Antisense strand to SEQ ID NO: 2331866
auucacaaacacauaaaug

SEQ ID NO: 2331868 - RNA, 19 nt, Artificial Sequence
  Description of Artificial Sequence: Synthetic oligonucleotide
  Sense strand starting at position 1509 of SEQ ID NO: 1885302
gaaugugugucucugugua

SEQ ID NO: 2331869 - RNA, 19 nt, Artificial Sequence
  Description of Artificial Sequence: Synthetic oligonucleotide
  Antisense strand to SEQ ID NO: 2331868
uacacagagacacacauuc

SEQ ID NO: 2331870 - RNA, 19 nt, Artificial Sequence
  Description of Artificial Sequence: Synthetic oligonucleotide
  Sense strand starting at position 1791 of SEQ ID NO: 1885302
gcauuugcaugugugcaua

SEQ ID NO: 2331871 - RNA, 19 nt, Artificial Sequence
  Description of Artificial Sequence: Synthetic oligonucleotide
  Antisense strand to SEQ ID NO: 2331870
uaugcacacaugcaaaugc

SEQ ID NO: 2331872 - RNA, 19 nt, Artificial Sequence
  Description of Artificial Sequence: Synthetic oligonucleotide
  Sense strand starting at position 1930 of SEQ ID NO: 1885302
gugcacaugugugcauaua

SEQ ID NO: 2331873 - RNA, 19 nt, Artificial Sequence
  Description of Artificial Sequence: Synthetic oligonucleotide
  Antisense strand to SEQ ID NO: 2331872
uauaugcacacaugugcac

SEQ ID NO: 2331874 - RNA, 19 nt, Artificial Sequence
  Description of Artificial Sequence: Synthetic oligonucleotide
  Sense strand starting at position 1940 of SEQ ID NO: 1885302
gugcauauacgugugcaua

SEQ ID NO: 2331875 - RNA, 19 nt, Artificial Sequence
  Description of Artificial Sequence: Synthetic oligonucleotide
  Antisense strand to SEQ ID NO: 2331874
uaugcacacguauaugcac

SEQ ID NO: 2331876 - RNA, 19 nt, Artificial Sequence
  Description of Artificial Sequence: Synthetic oligonucleotide
  Sense strand starting at position 1941 of SEQ ID NO: 1885302
ugcauauacgugugcauau

SEQ ID NO: 2331877 - RNA, 19 nt, Artificial Sequence
  Description of Artificial Sequence: Synthetic oligonucleotide
  Antisense strand to SEQ ID NO: 2331876
auaugcacacguauaugca

SEQ ID NO: 2331878 - RNA, 19 nt, Artificial Sequence
  Description of Artificial Sequence: Synthetic oligonucleotide
  Sense strand starting at position 1942 of SEQ ID NO: 1885302
gcauauacgugugcauauc

SEQ ID NO: 2331879 - RNA, 19 nt, Artificial Sequence
  Description of Artificial Sequence: Synthetic oligonucleotide
  Antisense strand to SEQ ID NO: 2331878
gauaugcacacguauaugc

SEQ ID NO: 2331880 - RNA, 19 nt, Artificial Sequence
  Description of Artificial Sequence: Synthetic oligonucleotide
  Sense strand starting at position 1948 of SEQ ID NO: 1885302
acgugugcauaucugcaua

SEQ ID NO: 2331881 - RNA, 19 nt, Artificial Sequence
  Description of Artificial Sequence: Synthetic oligonucleotide
  Antisense strand to SEQ ID NO: 2331880
uaugcagauaugcacacgu

SEQ ID NO: 2331882 - RNA, 19 nt, Artificial Sequence
  Description of Artificial Sequence: Synthetic oligonucleotide
  Sense strand starting at position 1951 of SEQ ID NO: 1885302
ugugcauaucugcauaugu

SEQ ID NO: 2331883 - RNA, 19 nt, Artificial Sequence
  Description of Artificial Sequence: Synthetic oligonucleotide
  Antisense strand to SEQ ID NO: 2331882
acauaugcagauaugcaca

SEQ ID NO: 2331884 - RNA, 19 nt, Artificial Sequence
  Description of Artificial Sequence: Synthetic oligonucleotide
  Sense strand starting at position 1959 of SEQ ID NO: 1885302
ucugcauaugugcauguau

SEQ ID NO: 2331885 - RNA, 19 nt, Artificial Sequence
  Description of Artificial Sequence: Synthetic oligonucleotide
  Antisense strand to SEQ ID NO: 2331884
auacaugcacauaugcaga

SEQ ID NO: 2331886 - RNA, 19 nt, Artificial Sequence
  Description of Artificial Sequence: Synthetic oligonucleotide
  Sense strand starting at position 1982 of SEQ ID NO: 1885302
acauguguguaggugcaua

SEQ ID NO: 2331887 - RNA, 19 nt, Artificial Sequence
  Description of Artificial Sequence: Synthetic oligonucleotide
  Antisense strand to SEQ ID NO: 2331886
uaugcaccuacacacaugu

SEQ ID NO: 2331888 - RNA, 19 nt, Artificial Sequence
  Description of Artificial Sequence: Synthetic oligonucleotide
  Sense strand starting at position 2324 of SEQ ID NO: 1885302
cgugaauccuccuccuuga

SEQ ID NO: 2331889 - RNA, 19 nt, Artificial Sequence
  Description of Artificial Sequence: Synthetic oligonucleotide
  Antisense strand to SEQ ID NO: 2331888
ucaaggaggaggauucacg

SEQ ID NO: 2331890 - RNA, 19 nt, Artificial Sequence
  Description of Artificial Sequence: Synthetic oligonucleotide
  Sense strand starting at position 2378 of SEQ ID NO: 1885302
gaagcugagugcucuguaa

SEQ ID NO: 2331891 - RNA, 19 nt, Artificial Sequence
  Description of Artificial Sequence: Synthetic oligonucleotide
  Antisense strand to SEQ ID NO: 2331890
uuacagagcacucagcuuc

SEQ ID NO: 2331892 - RNA, 19 nt, Artificial Sequence
  Description of Artificial Sequence: Synthetic oligonucleotide
  Sense strand starting at position 2629 of SEQ ID NO: 1885302
agaugugaacgcugugcua

SEQ ID NO: 2331893 - RNA, 19 nt, Artificial Sequence
  Description of Artificial Sequence: Synthetic oligonucleotide
  Antisense strand to SEQ ID NO: 2331892
uagcacagcguucacaucu

SEQ ID NO: 2331894 - RNA, 19 nt, Artificial Sequence
  Description of Artificial Sequence: Synthetic oligonucleotide
  Sense strand starting at position 2806 of SEQ ID NO: 1885302
gagaguugcuuuccaguug

SEQ ID NO: 2331895 - RNA, 19 nt, Artificial Sequence
  Description of Artificial Sequence: Synthetic oligonucleotide
  Antisense strand to SEQ ID NO: 2331894
caacuggaaagcaacucuc

SEQ ID NO: 2331896 - RNA, 19 nt, Artificial Sequence
  Description of Artificial Sequence: Synthetic oligonucleotide
  Sense strand starting at position 3884 of SEQ ID NO: 1885302
ugaaguguccugggcugau

SEQ ID NO: 2331897 - RNA, 19 nt, Artificial Sequence
  Description of Artificial Sequence: Synthetic oligonucleotide
  Antisense strand to SEQ ID NO: 2331896
aucagcccaggacacuuca

SEQ ID NO: 2331898 - RNA, 19 nt, Artificial Sequence
  Description of Artificial Sequence: Synthetic oligonucleotide
  Sense strand starting at position 3920 of SEQ ID NO: 1885302
cgagucaaaugcucucuaa

SEQ ID NO: 2331899 - RNA, 19 nt, Artificial Sequence
  Description of Artificial Sequence: Synthetic oligonucleotide
  Antisense strand to SEQ ID NO: 2331898
uuagagagcauuugacucg

SEQ ID NO: 2331900 - RNA, 19 nt, Artificial Sequence
  Description of Artificial Sequence: Synthetic oligonucleotide
  Sense strand starting at position 3923 of SEQ ID NO: 1885302
gucaaaugcucucuaaagg

SEQ ID NO: 2331901 - RNA, 19 nt, Artificial Sequence
  Description of Artificial Sequence: Synthetic oligonucleotide
  Antisense strand to SEQ ID NO: 2331900
ccuuuagagagcauuugac

SEQ ID NO: 2331902 - RNA, 19 nt, Artificial Sequence
  Description of Artificial Sequence: Synthetic oligonucleotide
  Sense strand starting at position 3939 of SEQ ID NO: 1885302
aggaaauucucagaagauc

SEQ ID NO: 2331903 - RNA, 19 nt, Artificial Sequence
  Description of Artificial Sequence: Synthetic oligonucleotide
  Antisense strand to SEQ ID NO: 2331902
gaucuucugagaauuuccu

SEQ ID NO: 2331904 - RNA, 19 nt, Artificial Sequence
  Description of Artificial Sequence: Synthetic oligonucleotide
  Sense strand starting at position 25 of SEQ ID NO: 1885303
ucgcgcauuucccuaaaga

SEQ ID NO: 2331905 - RNA, 19 nt, Artificial Sequence
  Description of Artificial Sequence: Synthetic oligonucleotide
  Antisense strand to SEQ ID NO: 2331904
ucuuuagggaaaugcgcga

SEQ ID NO: 2331906 - RNA, 19 nt, Artificial Sequence
  Description of Artificial Sequence: Synthetic oligonucleotide
  Sense strand starting at position 26 of SEQ ID NO: 1885303
cgcgcauuucccuaaagag

SEQ ID NO: 2331907 - RNA, 19 nt, Artificial Sequence
  Description of Artificial Sequence: Synthetic oligonucleotide
  Antisense strand to SEQ ID NO: 2331906
cucuuuagggaaaugcgcg

SEQ ID NO: 2331908 - RNA, 19 nt, Artificial Sequence
  Description of Artificial Sequence: Synthetic oligonucleotide
  Sense strand starting at position 140 of SEQ ID NO: 1885303
auucguuccaaauauggga

SEQ ID NO: 2331909 - RNA, 19 nt, Artificial Sequence
  Description of Artificial Sequence: Synthetic oligonucleotide
  Antisense strand to SEQ ID NO: 2331908
ucccauauuuggaacgaau

SEQ ID NO: 2331910 - RNA, 19 nt, Artificial Sequence
  Description of Artificial Sequence: Synthetic oligonucleotide
  Sense strand starting at position 142 of SEQ ID NO: 1885303
ucguuccaaauaugggaua

SEQ ID NO: 2331911 - RNA, 19 nt, Artificial Sequence
  Description of Artificial Sequence: Synthetic oligonucleotide
  Antisense strand to SEQ ID NO: 2331910
uaucccauauuuggaacga

SEQ ID NO: 2331912 - RNA, 19 nt, Artificial Sequence
  Description of Artificial Sequence: Synthetic oligonucleotide
  Sense strand starting at position 144 of SEQ ID NO: 1885303
guuccaaauaugggauaug

SEQ ID NO: 2331913 - RNA, 19 nt, Artificial Sequence
  Description of Artificial Sequence: Synthetic oligonucleotide
  Antisense strand to SEQ ID NO: 2331912
cauaucccauauuuggaac

SEQ ID NO: 2331914 - RNA, 19 nt, Artificial Sequence
  Description of Artificial Sequence: Synthetic oligonucleotide
  Sense strand starting at position 162 of SEQ ID NO: 1885303
ggaucaauauucccaugcu

SEQ ID NO: 2331915 - RNA, 19 nt, Artificial Sequence
  Description of Artificial Sequence: Synthetic oligonucleotide
  Antisense strand to SEQ ID NO: 2331914
agcaugggaauauugaucc

SEQ ID NO: 2331916 - RNA, 19 nt, Artificial Sequence
  Description of Artificial Sequence: Synthetic oligonucleotide
  Sense strand starting at position 250 of SEQ ID NO: 1885303
gguugccuguuauuucuca

SEQ ID NO: 2331917 - RNA, 19 nt, Artificial Sequence
  Description of Artificial Sequence: Synthetic oligonucleotide
  Antisense strand to SEQ ID NO: 2331916
ugagaaauaacaggcaacc

SEQ ID NO: 2331918 - RNA, 19 nt, Artificial Sequence
  Description of Artificial Sequence: Synthetic oligonucleotide
  Sense strand starting at position 254 of SEQ ID NO: 1885303
gccuguuauuucucaugau

SEQ ID NO: 2331919 - RNA, 19 nt, Artificial Sequence
  Description of Artificial Sequence: Synthetic oligonucleotide
  Antisense strand to SEQ ID NO: 2331918
aucaugagaaauaacaggc

SEQ ID NO: 2331920 - RNA, 19 nt, Artificial Sequence
  Description of Artificial Sequence: Synthetic oligonucleotide
  Sense strand starting at position 392 of SEQ ID NO: 1885303
ucuagacauugugccaaga

SEQ ID NO: 2331921 - RNA, 19 nt, Artificial Sequence
  Description of Artificial Sequence: Synthetic oligonucleotide
  Antisense strand to SEQ ID NO: 2331920
ucuuggcacaaugucuaga

SEQ ID NO: 2331922 - RNA, 19 nt, Artificial Sequence
  Description of Artificial Sequence: Synthetic oligonucleotide
  Sense strand starting at position 401 of SEQ ID NO: 1885303
ugugccaagaaguguauuu

SEQ ID NO: 2331923 - RNA, 19 nt, Artificial Sequence
  Description of Artificial Sequence: Synthetic oligonucleotide
  Antisense strand to SEQ ID NO: 2331922
aaauacacuucuuggcaca

SEQ ID NO: 2331924 - RNA, 19 nt, Artificial Sequence
  Description of Artificial Sequence: Synthetic oligonucleotide
  Sense strand starting at position 422 of SEQ ID NO: 1885303
agcagauaaguacguauaa

SEQ ID NO: 2331925 - RNA, 19 nt, Artificial Sequence
  Description of Artificial Sequence: Synthetic oligonucleotide
  Antisense strand to SEQ ID NO: 2331924
uuauacguacuuaucugcu

SEQ ID NO: 2331926 - RNA, 19 nt, Artificial Sequence
  Description of Artificial Sequence: Synthetic oligonucleotide
  Sense strand starting at position 451 of SEQ ID NO: 1885303
ucuuguuagaccugaugga

SEQ ID NO: 2331927 - RNA, 19 nt, Artificial Sequence
  Description of Artificial Sequence: Synthetic oligonucleotide
  Antisense strand to SEQ ID NO: 2331926
uccaucaggucuaacaaga

SEQ ID NO: 2331928 - RNA, 19 nt, Artificial Sequence
  Description of Artificial Sequence: Synthetic oligonucleotide
  Sense strand starting at position 458 of SEQ ID NO: 1885303
agaccugauggaugcuauu

SEQ ID NO: 2331929 - RNA, 19 nt, Artificial Sequence
  Description of Artificial Sequence: Synthetic oligonucleotide
  Antisense strand to SEQ ID NO: 2331928
aauagcauccaucaggucu

SEQ ID NO: 2331930 - RNA, 19 nt, Artificial Sequence
  Description of Artificial Sequence: Synthetic oligonucleotide
  Sense strand starting at position 551 of SEQ ID NO: 1885303
ggucuauuaagagcgcguu

SEQ ID NO: 2331931 - RNA, 19 nt, Artificial Sequence
  Description of Artificial Sequence: Synthetic oligonucleotide
  Antisense strand to SEQ ID NO: 2331930
aacgcgcucuuaauagacc

SEQ ID NO: 2331932 - RNA, 19 nt, Artificial Sequence
  Description of Artificial Sequence: Synthetic oligonucleotide
  Sense strand starting at position 571 of SEQ ID NO: 1885303
agcuauuucucgcuuccau

SEQ ID NO: 2331933 - RNA, 19 nt, Artificial Sequence
  Description of Artificial Sequence: Synthetic oligonucleotide
  Antisense strand to SEQ ID NO: 2331932
auggaagcgagaaauagcu

SEQ ID NO: 2331934 - RNA, 19 nt, Artificial Sequence
  Description of Artificial Sequence: Synthetic oligonucleotide
  Sense strand starting at position 686 of SEQ ID NO: 1885303
gguagcucuguuuaauuaa

SEQ ID NO: 2331935 - RNA, 19 nt, Artificial Sequence
  Description of Artificial Sequence: Synthetic oligonucleotide
  Antisense strand to SEQ ID NO: 2331934
uuaauuaaacagagcuacc

SEQ ID NO: 2331936 - RNA, 19 nt, Artificial Sequence
  Description of Artificial Sequence: Synthetic oligonucleotide
  Sense strand starting at position 778 of SEQ ID NO: 1885303
acuagcaauggguauaauu

SEQ ID NO: 2331937 - RNA, 19 nt, Artificial Sequence
  Description of Artificial Sequence: Synthetic oligonucleotide
  Antisense strand to SEQ ID NO: 2331936
aauuauacccauugcuagu

SEQ ID NO: 2331938 - RNA, 19 nt, Artificial Sequence
  Description of Artificial Sequence: Synthetic oligonucleotide
  Sense strand starting at position 873 of SEQ ID NO: 1885303
gauggcuauugccuuagaa

SEQ ID NO: 2331939 - RNA, 19 nt, Artificial Sequence
  Description of Artificial Sequence: Synthetic oligonucleotide
  Antisense strand to SEQ ID NO: 2331938
uucuaaggcaauagccauc

SEQ ID NO: 2331940 - RNA, 19 nt, Artificial Sequence
  Description of Artificial Sequence: Synthetic oligonucleotide
  Sense strand starting at position 875 of SEQ ID NO: 1885303
uggcuauugccuuagaaac

SEQ ID NO: 2331941 - RNA, 19 nt, Artificial Sequence
  Description of Artificial Sequence: Synthetic oligonucleotide
  Antisense strand to SEQ ID NO: 2331940
guuucuaaggcaauagcca

SEQ ID NO: 2331942 - RNA, 19 nt, Artificial Sequence
  Description of Artificial Sequence: Synthetic oligonucleotide
  Sense strand starting at position 886 of SEQ ID NO: 1885303
uuagaaaccugauuaacgu

SEQ ID NO: 2331943 - RNA, 19 nt, Artificial Sequence
  Description of Artificial Sequence: Synthetic oligonucleotide
  Antisense strand to SEQ ID NO: 2331942
acguuaaucagguuucuaa

SEQ ID NO: 2331944 - RNA, 19 nt, Artificial Sequence
  Description of Artificial Sequence: Synthetic oligonucleotide
  Sense strand starting at position 1024 of SEQ ID NO: 1885303
cguccuggcauuuaaaugu

SEQ ID NO: 2331945 - RNA, 19 nt, Artificial Sequence
  Description of Artificial Sequence: Synthetic oligonucleotide
  Antisense strand to SEQ ID NO: 2331944
acauuuaaaugccaggacg

SEQ ID NO: 2331946 - RNA, 19 nt, Artificial Sequence
  Description of Artificial Sequence: Synthetic oligonucleotide
  Sense strand starting at position 1031 of SEQ ID NO: 1885303
gcauuuaaaugucuuuguu

SEQ ID NO: 2331947 - RNA, 19 nt, Artificial Sequence
  Description of Artificial Sequence: Synthetic oligonucleotide
  Antisense strand to SEQ ID NO: 2331946
aacaaagacauuuaaaugc

SEQ ID NO: 2331948 - RNA, 19 nt, Artificial Sequence
  Description of Artificial Sequence: Synthetic oligonucleotide
  Sense strand starting at position 1074 of SEQ ID NO: 1885303
acugcaugcccggaauauu

SEQ ID NO: 2331949 - RNA, 19 nt, Artificial Sequence
  Description of Artificial Sequence: Synthetic oligonucleotide
  Antisense strand to SEQ ID NO: 2331948
aauauuccgggcaugcagu

SEQ ID NO: 2331950 - RNA, 19 nt, Artificial Sequence
  Description of Artificial Sequence: Synthetic oligonucleotide
  Sense strand starting at position 1290 of SEQ ID NO: 1885303
cgaauuccuccauggagac

SEQ ID NO: 2331951 - RNA, 19 nt, Artificial Sequence
  Description of Artificial Sequence: Synthetic oligonucleotide
  Antisense strand to SEQ ID NO: 2331950
gucuccauggaggaauucg

SEQ ID NO: 2331952 - RNA, 19 nt, Artificial Sequence
  Description of Artificial Sequence: Synthetic oligonucleotide
  Sense strand starting at position 1304 of SEQ ID NO: 1885303
gagacucccuccuugggaa

SEQ ID NO: 2331953 - RNA, 19 nt, Artificial Sequence
  Description of Artificial Sequence: Synthetic oligonucleotide
  Antisense strand to SEQ ID NO: 2331952
uucccaaggagggagucuc

SEQ ID NO: 2331954 - RNA, 19 nt, Artificial Sequence
  Description of Artificial Sequence: Synthetic oligonucleotide
  Sense strand starting at position 2240 of SEQ ID NO: 1885303
uuaggccuacagugaauua

SEQ ID NO: 2331955 - RNA, 19 nt, Artificial Sequence
  Description of Artificial Sequence: Synthetic oligonucleotide
  Antisense strand to SEQ ID NO: 2331954
uaauucacuguaggccuaa

SEQ ID NO: 2331956 - RNA, 19 nt, Artificial Sequence
  Description of Artificial Sequence: Synthetic oligonucleotide
  Sense strand starting at position 2390 of SEQ ID NO: 1885303
gcaggaguaauguaagugu

SEQ ID NO: 2331957 - RNA, 19 nt, Artificial Sequence
  Description of Artificial Sequence: Synthetic oligonucleotide
  Antisense strand to SEQ ID NO: 2331956
acacuuacauuacuccugc

SEQ ID NO: 2331958 - RNA, 19 nt, Artificial Sequence
  Description of Artificial Sequence: Synthetic oligonucleotide
  Sense strand starting at position 2393 of SEQ ID NO: 1885303
ggaguaauguaaguguuua

SEQ ID NO: 2331959 - RNA, 19 nt, Artificial Sequence
  Description of Artificial Sequence: Synthetic oligonucleotide
  Antisense strand to SEQ ID NO: 2331958
uaaacacuuacauuacucc

SEQ ID NO: 2331960 - RNA, 19 nt, Artificial Sequence
  Description of Artificial Sequence: Synthetic oligonucleotide
  Sense strand starting at position 2398 of SEQ ID NO: 1885303
aauguaaguguuuaaacgu

SEQ ID NO: 2331961 - RNA, 19 nt, Artificial Sequence
  Description of Artificial Sequence: Synthetic oligonucleotide
  Antisense strand to SEQ ID NO: 2331960
acguuuaaacacuuacauu

SEQ ID NO: 2331962 - RNA, 19 nt, Artificial Sequence
  Description of Artificial Sequence: Synthetic oligonucleotide
  Sense strand starting at position 2463 of SEQ ID NO: 1885303
agauuuaacugauaccuga

SEQ ID NO: 2331963 - RNA, 19 nt, Artificial Sequence
  Description of Artificial Sequence: Synthetic oligonucleotide
  Antisense strand to SEQ ID NO: 2331962
ucagguaucaguuaaaucu

SEQ ID NO: 2331964 - RNA, 19 nt, Artificial Sequence
  Description of Artificial Sequence: Synthetic oligonucleotide
  Sense strand starting at position 2476 of SEQ ID NO: 1885303
accugaaggacuuggcaua

SEQ ID NO: 2331965 - RNA, 19 nt, Artificial Sequence
  Description of Artificial Sequence: Synthetic oligonucleotide
  Antisense strand to SEQ ID NO: 2331964
uaugccaaguccuucaggu

SEQ ID NO: 2331966 - RNA, 19 nt, Artificial Sequence
  Description of Artificial Sequence: Synthetic oligonucleotide
  Sense strand starting at position 2625 of SEQ ID NO: 1885303
ggaggaguuugaccaguuc

SEQ ID NO: 2331967 - RNA, 19 nt, Artificial Sequence
  Description of Artificial Sequence: Synthetic oligonucleotide
  Antisense strand to SEQ ID NO: 2331966
gaacuggucaaacuccucc

SEQ ID NO: 2331968 - RNA, 19 nt, Artificial Sequence
  Description of Artificial Sequence: Synthetic oligonucleotide
  Sense strand starting at position 2766 of SEQ ID NO: 1885303
cccagacuggaguguauau

SEQ ID NO: 2331969 - RNA, 19 nt, Artificial Sequence
  Description of Artificial Sequence: Synthetic oligonucleotide
  Antisense strand to SEQ ID NO: 2331968
auauacacuccagucuggg

SEQ ID NO: 2331970 - RNA, 19 nt, Artificial Sequence
  Description of Artificial Sequence: Synthetic oligonucleotide
  Sense strand starting at position 3108 of SEQ ID NO: 1885303
gugucugcugcugugacau

SEQ ID NO: 2331971 - RNA, 19 nt, Artificial Sequence
  Description of Artificial Sequence: Synthetic oligonucleotide
  Antisense strand to SEQ ID NO: 2331970
augucacagcagcagacac

SEQ ID NO: 2331972 - RNA, 19 nt, Artificial Sequence
  Description of Artificial Sequence: Synthetic oligonucleotide
  Sense strand starting at position 3114 of SEQ ID NO: 1885303
gcugcugugacauugcuau

SEQ ID NO: 2331973 - RNA, 19 nt, Artificial Sequence
  Description of Artificial Sequence: Synthetic oligonucleotide
  Antisense strand to SEQ ID NO: 2331972
auagcaaugucacagcagc

SEQ ID NO: 2331974 - RNA, 19 nt, Artificial Sequence
  Description of Artificial Sequence: Synthetic oligonucleotide
  Sense strand starting at position 3120 of SEQ ID NO: 1885303
gugacauugcuaugacauc

SEQ ID NO: 2331975 - RNA, 19 nt, Artificial Sequence
  Description of Artificial Sequence: Synthetic oligonucleotide
  Antisense strand to SEQ ID NO: 2331974
gaugucauagcaaugucac

SEQ ID NO: 2331976 - RNA, 19 nt, Artificial Sequence
  Description of Artificial Sequence: Synthetic oligonucleotide
  Sense strand starting at position 3249 of SEQ ID NO: 1885303
ucauucucgucccuagaaa

SEQ ID NO: 2331977 - RNA, 19 nt, Artificial Sequence
  Description of Artificial Sequence: Synthetic oligonucleotide
  Antisense strand to SEQ ID NO: 2331976
uuucuagggacgagaauga

SEQ ID NO: 2331978 - RNA, 19 nt, Artificial Sequence
  Description of Artificial Sequence: Synthetic oligonucleotide
  Sense strand starting at position 3250 of SEQ ID NO: 1885303
cauucucgucccuagaaag

SEQ ID NO: 2331979 - RNA, 19 nt, Artificial Sequence
  Description of Artificial Sequence: Synthetic oligonucleotide
  Antisense strand to SEQ ID NO: 2331978
cuuucuagggacgagaaug

SEQ ID NO: 2331980 - RNA, 19 nt, Artificial Sequence
  Description of Artificial Sequence: Synthetic oligonucleotide
  Sense strand starting at position 3650 of SEQ ID NO: 1885303
guauacuguguggaaauua

SEQ ID NO: 2331981 - RNA, 19 nt, Artificial Sequence
  Description of Artificial Sequence: Synthetic oligonucleotide
  Antisense strand to SEQ ID NO: 2331980
uaauuuccacacaguauac

SEQ ID NO: 2331982 - RNA, 19 nt, Artificial Sequence
  Description of Artificial Sequence: Synthetic oligonucleotide
  Sense strand starting at position 3882 of SEQ ID NO: 1885303
uauaauuaucgucagugua

SEQ ID NO: 2331983 - RNA, 19 nt, Artificial Sequence
  Description of Artificial Sequence: Synthetic oligonucleotide
  Antisense strand to SEQ ID NO: 2331982
uacacugacgauaauuaua

SEQ ID NO: 2331984 - RNA, 19 nt, Artificial Sequence
  Description of Artificial Sequence: Synthetic oligonucleotide
  Sense strand starting at position 35 of SEQ ID NO: 1885304
uggguuguugccuaaagga

SEQ ID NO: 2331985 - RNA, 19 nt, Artificial Sequence
  Description of Artificial Sequence: Synthetic oligonucleotide
  Antisense strand to SEQ ID NO: 2331984
uccuuuaggcaacaaccca

SEQ ID NO: 2331986 - RNA, 19 nt, Artificial Sequence
  Description of Artificial Sequence: Synthetic oligonucleotide
  Sense strand starting at position 155 of SEQ ID NO: 1885304
gguauauuaauggguacuu

SEQ ID NO: 2331987 - RNA, 19 nt, Artificial Sequence
  Description of Artificial Sequence: Synthetic oligonucleotide
  Antisense strand to SEQ ID NO: 2331986
aaguacccauuaauauacc

SEQ ID NO: 2331988 - RNA, 19 nt, Artificial Sequence
  Description of Artificial Sequence: Synthetic oligonucleotide
  Sense strand starting at position 156 of SEQ ID NO: 1885304
guauauuaauggguacuuu

SEQ ID NO: 2331989 - RNA, 19 nt, Artificial Sequence
  Description of Artificial Sequence: Synthetic oligonucleotide
  Antisense strand to SEQ ID NO: 2331988
aaaguacccauuaauauac

SEQ ID NO: 2331990 - RNA, 19 nt, Artificial Sequence
  Description of Artificial Sequence: Synthetic oligonucleotide
  Sense strand starting at position 164 of SEQ ID NO: 1885304
auggguacuuuauuagaga

SEQ ID NO: 2331991 - RNA, 19 nt, Artificial Sequence
  Description of Artificial Sequence: Synthetic oligonucleotide
  Antisense strand to SEQ ID NO: 2331990
ucucuaauaaaguacccau

SEQ ID NO: 2331992 - RNA, 19 nt, Artificial Sequence
  Description of Artificial Sequence: Synthetic oligonucleotide
  Sense strand starting at position 326 of SEQ ID NO: 1885304
ugaaauuccuguccaggua

SEQ ID NO: 2331993 - RNA, 19 nt, Artificial Sequence
  Description of Artificial Sequence: Synthetic oligonucleotide
  Antisense strand to SEQ ID NO: 2331992
uaccuggacaggaauuuca

SEQ ID NO: 2331994 - RNA, 19 nt, Artificial Sequence
  Description of Artificial Sequence: Synthetic oligonucleotide
  Sense strand starting at position 355 of SEQ ID NO: 1885304
cuuuaaaggcauugauucu

SEQ ID NO: 2331995 - RNA, 19 nt, Artificial Sequence
  Description of Artificial Sequence: Synthetic oligonucleotide
  Antisense strand to SEQ ID NO: 2331994
agaaucaaugccuuuaaag

SEQ ID NO: 2331996 - RNA, 19 nt, Artificial Sequence
  Description of Artificial Sequence: Synthetic oligonucleotide
  Sense strand starting at position 847 of SEQ ID NO: 1885304
ugaacauuccuauggaguu

SEQ ID NO: 2331997 - RNA, 19 nt, Artificial Sequence
  Description of Artificial Sequence: Synthetic oligonucleotide
  Antisense strand to SEQ ID NO: 2331996
aacuccauaggaauguuca

SEQ ID NO: 2331998 - RNA, 19 nt, Artificial Sequence
  Description of Artificial Sequence: Synthetic oligonucleotide
  Sense strand starting at position 951 of SEQ ID NO: 1885304
agugucauggcaggaaaca

SEQ ID NO: 2331999 - RNA, 19 nt, Artificial Sequence
  Description of Artificial Sequence: Synthetic oligonucleotide
  Antisense strand to SEQ ID NO: 2331998
uguuuccugccaugacacu

SEQ ID NO: 2332000 - RNA, 19 nt, Artificial Sequence
  Description of Artificial Sequence: Synthetic oligonucleotide
  Sense strand starting at position 969 of SEQ ID NO: 1885304
aggucaugcccucaaauug

SEQ ID NO: 2332001 - RNA, 19 nt, Artificial Sequence
  Description of Artificial Sequence: Synthetic oligonucleotide
  Antisense strand to SEQ ID NO: 2332000
caauuugagggcaugaccu

SEQ ID NO: 2332002 - RNA, 19 nt, Artificial Sequence
  Description of Artificial Sequence: Synthetic oligonucleotide
  Sense strand starting at position 1582 of SEQ ID NO: 1885304
uuucuuaggugaguaugau

SEQ ID NO: 2332003 - RNA, 19 nt, Artificial Sequence
  Description of Artificial Sequence: Synthetic oligonucleotide
  Antisense strand to SEQ ID NO: 2332002
aucauacucaccuaagaaa

SEQ ID NO: 2332004 - RNA, 19 nt, Artificial Sequence
  Description of Artificial Sequence: Synthetic oligonucleotide
  Sense strand starting at position 1583 of SEQ ID NO: 1885304
uucuuaggugaguaugaug

SEQ ID NO: 2332005 - RNA, 19 nt, Artificial Sequence
  Description of Artificial Sequence: Synthetic oligonucleotide
  Antisense strand to SEQ ID NO: 2332004
caucauacucaccuaagaa

SEQ ID NO: 2332006 - RNA, 19 nt, Artificial Sequence
  Description of Artificial Sequence: Synthetic oligonucleotide
  Sense strand starting at position 1590 of SEQ ID NO: 1885304
gugaguaugaugcauccaa

SEQ ID NO: 2332007 - RNA, 19 nt, Artificial Sequence
  Description of Artificial Sequence: Synthetic oligonucleotide
  Antisense strand to SEQ ID NO: 2332006
uuggaugcaucauacucac

SEQ ID NO: 2332008 - RNA, 19 nt, Artificial Sequence
  Description of Artificial Sequence: Synthetic oligonucleotide
  Sense strand starting at position 1742 of SEQ ID NO: 1885304
ucauaaugauccucgacuc

SEQ ID NO: 2332009 - RNA, 19 nt, Artificial Sequence
  Description of Artificial Sequence: Synthetic oligonucleotide
  Antisense strand to SEQ ID NO: 2332008
gagucgaggaucauuauga

SEQ ID NO: 2332010 - RNA, 19 nt, Artificial Sequence
  Description of Artificial Sequence: Synthetic oligonucleotide
  Sense strand starting at position 1848 of SEQ ID NO: 1885304
ugucaccaucacuaaugua

SEQ ID NO: 2332011 - RNA, 19 nt, Artificial Sequence
  Description of Artificial Sequence: Synthetic oligonucleotide
  Antisense strand to SEQ ID NO: 2332010
uacauuagugauggugaca

SEQ ID NO: 2332012 - RNA, 19 nt, Artificial Sequence
  Description of Artificial Sequence: Synthetic oligonucleotide
  Sense strand starting at position 1915 of SEQ ID NO: 1885304
ugaagagcuuaccuagaau

SEQ ID NO: 2332013 - RNA, 19 nt, Artificial Sequence
  Description of Artificial Sequence: Synthetic oligonucleotide
  Antisense strand to SEQ ID NO: 2332012
auucuagguaagcucuuca

SEQ ID NO: 2332014 - RNA, 19 nt, Artificial Sequence
  Description of Artificial Sequence: Synthetic oligonucleotide
  Sense strand starting at position 1987 of SEQ ID NO: 1885304
ggaugaauaacacguacuu

SEQ ID NO: 2332015 - RNA, 19 nt, Artificial Sequence
  Description of Artificial Sequence: Synthetic oligonucleotide
  Antisense strand to SEQ ID NO: 2332014
aaguacguguuauucaucc

SEQ ID NO: 2332016 - RNA, 19 nt, Artificial Sequence
  Description of Artificial Sequence: Synthetic oligonucleotide
  Sense strand starting at position 2006 of SEQ ID NO: 1885304
gggcaaauggugggaaagu

SEQ ID NO: 2332017 - RNA, 19 nt, Artificial Sequence
  Description of Artificial Sequence: Synthetic oligonucleotide
  Antisense strand to SEQ ID NO: 2332016
acuuucccaccauuugccc

SEQ ID NO: 2332018 - RNA, 19 nt, Artificial Sequence
  Description of Artificial Sequence: Synthetic oligonucleotide
  Sense strand starting at position 2107 of SEQ ID NO: 1885304
guauaacugagauguaagg

SEQ ID NO: 2332019 - RNA, 19 nt, Artificial Sequence
  Description of Artificial Sequence: Synthetic oligonucleotide
  Antisense strand to SEQ ID NO: 2332018
ccuuacaucucaguuauac

SEQ ID NO: 2332020 - RNA, 19 nt, Artificial Sequence
  Description of Artificial Sequence: Synthetic oligonucleotide
  Sense strand starting at position 2192 of SEQ ID NO: 1885304
ugcaaagggcuuuagaugu

SEQ ID NO: 2332021 - RNA, 19 nt, Artificial Sequence
  Description of Artificial Sequence: Synthetic oligonucleotide
  Antisense strand to SEQ ID NO: 2332020
acaucuaaagcccuuugca

SEQ ID NO: 2332022 - RNA, 19 nt, Artificial Sequence
  Description of Artificial Sequence: Synthetic oligonucleotide
  Sense strand starting at position 2215 of SEQ ID NO: 1885304
augugaauuugugacauaa

SEQ ID NO: 2332023 - RNA, 19 nt, Artificial Sequence
  Description of Artificial Sequence: Synthetic oligonucleotide
  Antisense strand to SEQ ID NO: 2332022
uuaugucacaaauucacau

SEQ ID NO: 2332024 - RNA, 19 nt, Artificial Sequence
  Description of Artificial Sequence: Synthetic oligonucleotide
  Sense strand starting at position 2226 of SEQ ID NO: 1885304
ugacauaaugcuuauagua

SEQ ID NO: 2332025 - RNA, 19 nt, Artificial Sequence
  Description of Artificial Sequence: Synthetic oligonucleotide
  Antisense strand to SEQ ID NO: 2332024
uacuauaagcauuauguca

SEQ ID NO: 2332026 - RNA, 19 nt, Artificial Sequence
  Description of Artificial Sequence: Synthetic oligonucleotide
  Sense strand starting at position 2321 of SEQ ID NO: 1885304
agucuuaaucuguaaagua

SEQ ID NO: 2332027 - RNA, 19 nt, Artificial Sequence
  Description of Artificial Sequence: Synthetic oligonucleotide
  Antisense strand to SEQ ID NO: 2332026
uacuuuacagauuaagacu

SEQ ID NO: 2332028 - RNA, 19 nt, Artificial Sequence
  Description of Artificial Sequence: Synthetic oligonucleotide
  Sense strand starting at position 2345 of SEQ ID NO: 1885304
gcauaucauccaggugaga

SEQ ID NO: 2332029 - RNA, 19 nt, Artificial Sequence
  Description of Artificial Sequence: Synthetic oligonucleotide
  Antisense strand to SEQ ID NO: 2332028
ucucaccuggaugauaugc

SEQ ID NO: 2332030 - RNA, 19 nt, Artificial Sequence
  Description of Artificial Sequence: Synthetic oligonucleotide
  Sense strand starting at position 2509 of SEQ ID NO: 1885304
aggacuucucuuuguaaag

SEQ ID NO: 2332031 - RNA, 19 nt, Artificial Sequence
  Description of Artificial Sequence: Synthetic oligonucleotide
  Antisense strand to SEQ ID NO: 2332030
cuuuacaaagagaaguccu

SEQ ID NO: 2332032 - RNA, 19 nt, Artificial Sequence
  Description of Artificial Sequence: Synthetic oligonucleotide
  Sense strand starting at position 2510 of SEQ ID NO: 1885304
ggacuucucuuuguaaagg

SEQ ID NO: 2332033 - RNA, 19 nt, Artificial Sequence
  Description of Artificial Sequence: Synthetic oligonucleotide
  Antisense strand to SEQ ID NO: 2332032
ccuuuacaaagagaagucc

SEQ ID NO: 2332034 - RNA, 19 nt, Artificial Sequence
  Description of Artificial Sequence: Synthetic oligonucleotide
  Sense strand starting at position 2633 of SEQ ID NO: 1885304
ucauuuaucuaagagaugu

SEQ ID NO: 2332035 - RNA, 19 nt, Artificial Sequence
  Description of Artificial Sequence: Synthetic oligonucleotide
  Antisense strand to SEQ ID NO: 2332034
acaucucuuagauaaauga

SEQ ID NO: 2332036 - RNA, 19 nt, Artificial Sequence
  Description of Artificial Sequence: Synthetic oligonucleotide
  Sense strand starting at position 2800 of SEQ ID NO: 1885304
gucugaaauucugcaaaca

SEQ ID NO: 2332037 - RNA, 19 nt, Artificial Sequence
  Description of Artificial Sequence: Synthetic oligonucleotide
  Antisense strand to SEQ ID NO: 2332036
uguuugcagaauuucagac

SEQ ID NO: 2332038 - RNA, 19 nt, Artificial Sequence
  Description of Artificial Sequence: Synthetic oligonucleotide
  Sense strand starting at position 2828 of SEQ ID NO: 1885304
ugagcaugagaaugcucaa

SEQ ID NO: 2332039 - RNA, 19 nt, Artificial Sequence
  Description of Artificial Sequence: Synthetic oligonucleotide
  Antisense strand to SEQ ID NO: 2332038
uugagcauucucaugcuca

SEQ ID NO: 2332040 - RNA, 19 nt, Artificial Sequence
  Description of Artificial Sequence: Synthetic oligonucleotide
  Sense strand starting at position 2856 of SEQ ID NO: 1885304
ucaucucaagcaugagaau

SEQ ID NO: 2332041 - RNA, 19 nt, Artificial Sequence
  Description of Artificial Sequence: Synthetic oligonucleotide
  Antisense strand to SEQ ID NO: 2332040
auucucaugcuugagauga

SEQ ID NO: 2332042 - RNA, 19 nt, Artificial Sequence
  Description of Artificial Sequence: Synthetic oligonucleotide
  Sense strand starting at position 2997 of SEQ ID NO: 1885304
agaauaacagcauguaauc

SEQ ID NO: 2332043 - RNA, 19 nt, Artificial Sequence
  Description of Artificial Sequence: Synthetic oligonucleotide
  Antisense strand to SEQ ID NO: 2332042
gauuacaugcuguuauucu

SEQ ID NO: 2332044 - RNA, 19 nt, Artificial Sequence
  Description of Artificial Sequence: Synthetic oligonucleotide
  Sense strand starting at position 3093 of SEQ ID NO: 1885304
aguguuaguaauuagauag

SEQ ID NO: 2332045 - RNA, 19 nt, Artificial Sequence
  Description of Artificial Sequence: Synthetic oligonucleotide
  Antisense strand to SEQ ID NO: 2332044
cuaucuaauuacuaacacu

SEQ ID NO: 2332046 - RNA, 19 nt, Artificial Sequence
  Description of Artificial Sequence: Synthetic oligonucleotide
  Sense strand starting at position 3107 of SEQ ID NO: 1885304
gauagcagauauguuccaa

SEQ ID NO: 2332047 - RNA, 19 nt, Artificial Sequence
  Description of Artificial Sequence: Synthetic oligonucleotide
  Antisense strand to SEQ ID NO: 2332046
uuggaacauaucugcuauc

SEQ ID NO: 2332048 - RNA, 19 nt, Artificial Sequence
  Description of Artificial Sequence: Synthetic oligonucleotide
  Sense strand starting at position 3184 of SEQ ID NO: 1885304
agcacauguguauauacau

SEQ ID NO: 2332049 - RNA, 19 nt, Artificial Sequence
  Description of Artificial Sequence: Synthetic oligonucleotide
  Antisense strand to SEQ ID NO: 2332048
auguauauacacaugugcu

SEQ ID NO: 2332050 - RNA, 19 nt, Artificial Sequence
  Description of Artificial Sequence: Synthetic oligonucleotide
  Sense strand starting at position 3411 of SEQ ID NO: 1885304
aacacuguccaguggagaa

SEQ ID NO: 2332051 - RNA, 19 nt, Artificial Sequence
  Description of Artificial Sequence: Synthetic oligonucleotide
  Antisense strand to SEQ ID NO: 2332050
uucuccacuggacaguguu

SEQ ID NO: 2332052 - RNA, 19 nt, Artificial Sequence
  Description of Artificial Sequence: Synthetic oligonucleotide
  Sense strand starting at position 3413 of SEQ ID NO: 1885304
cacuguccaguggagaauu

SEQ ID NO: 2332053 - RNA, 19 nt, Artificial Sequence
  Description of Artificial Sequence: Synthetic oligonucleotide
  Antisense strand to SEQ ID NO: 2332052
aauucuccacuggacagug

SEQ ID NO: 2332054 - RNA, 19 nt, Artificial Sequence
  Description of Artificial Sequence: Synthetic oligonucleotide
  Sense strand starting at position 3491 of SEQ ID NO: 1885304
gcuagagauaucggaagua

SEQ ID NO: 2332055 - RNA, 19 nt, Artificial Sequence
  Description of Artificial Sequence: Synthetic oligonucleotide
  Antisense strand to SEQ ID NO: 2332054
uacuuccgauaucucuagc

SEQ ID NO: 2332056 - RNA, 19 nt, Artificial Sequence
  Description of Artificial Sequence: Synthetic oligonucleotide
  Sense strand starting at position 3684 of SEQ ID NO: 1885304
gaaugugugaggugaucau

SEQ ID NO: 2332057 - RNA, 19 nt, Artificial Sequence
  Description of Artificial Sequence: Synthetic oligonucleotide
  Antisense strand to SEQ ID NO: 2332056
augaucaccucacacauuc

SEQ ID NO: 2332058 - RNA, 19 nt, Artificial Sequence
  Description of Artificial Sequence: Synthetic oligonucleotide
  Sense strand starting at position 3693 of SEQ ID NO: 1885304
aggugaucauagcuuugau

SEQ ID NO: 2332059 - RNA, 19 nt, Artificial Sequence
  Description of Artificial Sequence: Synthetic oligonucleotide
  Antisense strand to SEQ ID NO: 2332058
aucaaagcuaugaucaccu

SEQ ID NO: 2332060 - RNA, 19 nt, Artificial Sequence
  Description of Artificial Sequence: Synthetic oligonucleotide
  Sense strand starting at position 3696 of SEQ ID NO: 1885304
ugaucauagcuuugauuac

SEQ ID NO: 2332061 - RNA, 19 nt, Artificial Sequence
  Description of Artificial Sequence: Synthetic oligonucleotide
  Antisense strand to SEQ ID NO: 2332060
guaaucaaagcuaugauca

SEQ ID NO: 2332062 - RNA, 19 nt, Artificial Sequence
  Description of Artificial Sequence: Synthetic oligonucleotide
  Sense strand starting at position 3793 of SEQ ID NO: 1885304
uagucugcaggaugaaauu

SEQ ID NO: 2332063 - RNA, 19 nt, Artificial Sequence
  Description of Artificial Sequence: Synthetic oligonucleotide
  Antisense strand to SEQ ID NO: 2332062
aauuucauccugcagacua

SEQ ID NO: 2332064 - RNA, 19 nt, Artificial Sequence
  Description of Artificial Sequence: Synthetic oligonucleotide
  Sense strand starting at position 351 of SEQ ID NO: 1885305
auggauuuauaguagcaaa

SEQ ID NO: 2332065 - RNA, 19 nt, Artificial Sequence
  Description of Artificial Sequence: Synthetic oligonucleotide
  Antisense strand to SEQ ID NO: 2332064
uuugcuacuauaaauccau

SEQ ID NO: 2332066 - RNA, 19 nt, Artificial Sequence
  Description of Artificial Sequence: Synthetic oligonucleotide
  Sense strand starting at position 354 of SEQ ID NO: 1885305
gauuuauaguagcaaauag

SEQ ID NO: 2332067 - RNA, 19 nt, Artificial Sequence
  Description of Artificial Sequence: Synthetic oligonucleotide
  Antisense strand to SEQ ID NO: 2332066
cuauuugcuacuauaaauc

SEQ ID NO: 2332068 - RNA, 19 nt, Artificial Sequence
  Description of Artificial Sequence: Synthetic oligonucleotide
  Sense strand starting at position 364 of SEQ ID NO: 1885305
agcaaauaguagucacaaa

SEQ ID NO: 2332069 - RNA, 19 nt, Artificial Sequence
  Description of Artificial Sequence: Synthetic oligonucleotide
  Antisense strand to SEQ ID NO: 2332068
uuugugacuacuauuugcu

SEQ ID NO: 2332070 - RNA, 19 nt, Artificial Sequence
  Description of Artificial Sequence: Synthetic oligonucleotide
  Sense strand starting at position 677 of SEQ ID NO: 1885305
cucgauagucaacagguuu

SEQ ID NO: 2332071 - RNA, 19 nt, Artificial Sequence
  Description of Artificial Sequence: Synthetic oligonucleotide
  Antisense strand to SEQ ID NO: 2332070
aaaccuguugacuaucgag

SEQ ID NO: 2332072 - RNA, 19 nt, Artificial Sequence
  Description of Artificial Sequence: Synthetic oligonucleotide
  Sense strand starting at position 932 of SEQ ID NO: 1885305
cagagaaaggaaugugcuu

SEQ ID NO: 2332073 - RNA, 19 nt, Artificial Sequence
  Description of Artificial Sequence: Synthetic oligonucleotide
  Antisense strand to SEQ ID NO: 2332072
aagcacauuccuuucucug

SEQ ID NO: 2332074 - RNA, 19 nt, Artificial Sequence
  Description of Artificial Sequence: Synthetic oligonucleotide
  Sense strand starting at position 1124 of SEQ ID NO: 1885305
cuagaaagggaguguuugu

SEQ ID NO: 2332075 - RNA, 19 nt, Artificial Sequence
  Description of Artificial Sequence: Synthetic oligonucleotide
  Antisense strand to SEQ ID NO: 2332074
acaaacacucccuuucuag

SEQ ID NO: 2332076 - RNA, 19 nt, Artificial Sequence
  Description of Artificial Sequence: Synthetic oligonucleotide
  Sense strand starting at position 1135 of SEQ ID NO: 1885305
guguuugucagagaugaug

SEQ ID NO: 2332077 - RNA, 19 nt, Artificial Sequence
  Description of Artificial Sequence: Synthetic oligonucleotide
  Antisense strand to SEQ ID NO: 2332076
caucaucucugacaaacac

SEQ ID NO: 2332078 - RNA, 19 nt, Artificial Sequence
  Description of Artificial Sequence: Synthetic oligonucleotide
  Sense strand starting at position 1137 of SEQ ID NO: 1885305
guuugucagagaugauggu

SEQ ID NO: 2332079 - RNA, 19 nt, Artificial Sequence
  Description of Artificial Sequence: Synthetic oligonucleotide
  Antisense strand to SEQ ID NO: 2332078
accaucaucucugacaaac

SEQ ID NO: 2332080 - RNA, 19 nt, Artificial Sequence
  Description of Artificial Sequence: Synthetic oligonucleotide
  Sense strand starting at position 1160 of SEQ ID NO: 1885305
augcucugucaggaaguua

SEQ ID NO: 2332081 - RNA, 19 nt, Artificial Sequence
  Description of Artificial Sequence: Synthetic oligonucleotide
  Antisense strand to SEQ ID NO: 2332080
uaacuuccugacagagcau

SEQ ID NO: 2332082 - RNA, 19 nt, Artificial Sequence
  Description of Artificial Sequence: Synthetic oligonucleotide
  Sense strand starting at position 1203 of SEQ ID NO: 1885305
cgguaaauaugauuacauu

SEQ ID NO: 2332083 - RNA, 19 nt, Artificial Sequence
  Description of Artificial Sequence: Synthetic oligonucleotide
  Antisense strand to SEQ ID NO: 2332082
aauguaaucauauuuaccg

SEQ ID NO: 2332084 - RNA, 19 nt, Artificial Sequence
  Description of Artificial Sequence: Synthetic oligonucleotide
  Sense strand starting at position 1609 of SEQ ID NO: 1885305
agcugcuuccgucuuuaga

SEQ ID NO: 2332085 - RNA, 19 nt, Artificial Sequence
  Description of Artificial Sequence: Synthetic oligonucleotide
  Antisense strand to SEQ ID NO: 2332084
ucuaaagacggaagcagcu

SEQ ID NO: 2332086 - RNA, 19 nt, Artificial Sequence
  Description of Artificial Sequence: Synthetic oligonucleotide
  Sense strand starting at position 1610 of SEQ ID NO: 1885305
gcugcuuccgucuuuagaa

SEQ ID NO: 2332087 - RNA, 19 nt, Artificial Sequence
  Description of Artificial Sequence: Synthetic oligonucleotide
  Antisense strand to SEQ ID NO: 2332086
uucuaaagacggaagcagc

SEQ ID NO: 2332088 - RNA, 19 nt, Artificial Sequence
  Description of Artificial Sequence: Synthetic oligonucleotide
  Sense strand starting at position 1756 of SEQ ID NO: 1885305
gccuucugagauugugaga

SEQ ID NO: 2332089 - RNA, 19 nt, Artificial Sequence
  Description of Artificial Sequence: Synthetic oligonucleotide
  Antisense strand to SEQ ID NO: 2332088
ucucacaaucucagaaggc

SEQ ID NO: 2332090 - RNA, 19 nt, Artificial Sequence
  Description of Artificial Sequence: Synthetic oligonucleotide
  Sense strand starting at position 1769 of SEQ ID NO: 1885305
gugagaggaucugcuuaag

SEQ ID NO: 2332091 - RNA, 19 nt, Artificial Sequence
  Description of Artificial Sequence: Synthetic oligonucleotide
  Antisense strand to SEQ ID NO: 2332090
cuuaagcagauccucucac

SEQ ID NO: 2332092 - RNA, 19 nt, Artificial Sequence
  Description of Artificial Sequence: Synthetic oligonucleotide
  Sense strand starting at position 1802 of SEQ ID NO: 1885305
cuuguaagauggucaucuu

SEQ ID NO: 2332093 - RNA, 19 nt, Artificial Sequence
  Description of Artificial Sequence: Synthetic oligonucleotide
  Antisense strand to SEQ ID NO: 2332092
aagaugaccaucuuacaag

SEQ ID NO: 2332094 - RNA, 19 nt, Artificial Sequence
  Description of Artificial Sequence: Synthetic oligonucleotide
  Sense strand starting at position 1803 of SEQ ID NO: 1885305
uuguaagauggucaucuuu

SEQ ID NO: 2332095 - RNA, 19 nt, Artificial Sequence
  Description of Artificial Sequence: Synthetic oligonucleotide
  Antisense strand to SEQ ID NO: 2332094
aaagaugaccaucuuacaa

SEQ ID NO: 2332096 - RNA, 19 nt, Artificial Sequence
  Description of Artificial Sequence: Synthetic oligonucleotide
  Sense strand starting at position 1805 of SEQ ID NO: 1885305
guaagauggucaucuuucu

SEQ ID NO: 2332097 - RNA, 19 nt, Artificial Sequence
  Description of Artificial Sequence: Synthetic oligonucleotide
  Antisense strand to SEQ ID NO: 2332096
agaaagaugaccaucuuac

SEQ ID NO: 2332098 - RNA, 19 nt, Artificial Sequence
  Description of Artificial Sequence: Synthetic oligonucleotide
  Sense strand starting at position 1907 of SEQ ID NO: 1885305
auuagagcccacuguaaug

SEQ ID NO: 2332099 - RNA, 19 nt, Artificial Sequence
  Description of Artificial Sequence: Synthetic oligonucleotide
  Antisense strand to SEQ ID NO: 2332098
cauuacagugggcucuaau

SEQ ID NO: 2332100 - RNA, 19 nt, Artificial Sequence
  Description of Artificial Sequence: Synthetic oligonucleotide
  Sense strand starting at position 2085 of SEQ ID NO: 1885305
uuaagugaauccuuguauu

SEQ ID NO: 2332101 - RNA, 19 nt, Artificial Sequence
  Description of Artificial Sequence: Synthetic oligonucleotide
  Antisense strand to SEQ ID NO: 2332100
aauacaaggauucacuuaa

SEQ ID NO: 2332102 - RNA, 19 nt, Artificial Sequence
  Description of Artificial Sequence: Synthetic oligonucleotide
  Sense strand starting at position 2095 of SEQ ID NO: 1885305
ccuuguauuugucucucau

SEQ ID NO: 2332103 - RNA, 19 nt, Artificial Sequence
  Description of Artificial Sequence: Synthetic oligonucleotide
  Antisense strand to SEQ ID NO: 2332102
augagagacaaauacaagg

SEQ ID NO: 2332104 - RNA, 19 nt, Artificial Sequence
  Description of Artificial Sequence: Synthetic oligonucleotide
  Sense strand starting at position 2107 of SEQ ID NO: 1885305
cucucauucugagcaagau

SEQ ID NO: 2332105 - RNA, 19 nt, Artificial Sequence
  Description of Artificial Sequence: Synthetic oligonucleotide
  Antisense strand to SEQ ID NO: 2332104
aucuugcucagaaugagag

SEQ ID NO: 2332106 - RNA, 19 nt, Artificial Sequence
  Description of Artificial Sequence: Synthetic oligonucleotide
  Sense strand starting at position 2108 of SEQ ID NO: 1885305
ucucauucugagcaagauu

SEQ ID NO: 2332107 - RNA, 19 nt, Artificial Sequence
  Description of Artificial Sequence: Synthetic oligonucleotide
  Antisense strand to SEQ ID NO: 2332106
aaucuugcucagaaugaga

SEQ ID NO: 2332108 - RNA, 19 nt, Artificial Sequence
  Description of Artificial Sequence: Synthetic oligonucleotide
  Sense strand starting at position 2160 of SEQ ID NO: 1885305
uuaaaucuguuugcagaca

SEQ ID NO: 2332109 - RNA, 19 nt, Artificial Sequence
  Description of Artificial Sequence: Synthetic oligonucleotide
  Antisense strand to SEQ ID NO: 2332108
ugucugcaaacagauuuaa

SEQ ID NO: 2332110 - RNA, 19 nt, Artificial Sequence
  Description of Artificial Sequence: Synthetic oligonucleotide
  Sense strand starting at position 2441 of SEQ ID NO: 1885305
aggaaucaugcauguaaua

SEQ ID NO: 2332111 - RNA, 19 nt, Artificial Sequence
  Description of Artificial Sequence: Synthetic oligonucleotide
  Antisense strand to SEQ ID NO: 2332110
uauuacaugcaugauuccu

SEQ ID NO: 2332112 - RNA, 19 nt, Artificial Sequence
  Description of Artificial Sequence: Synthetic oligonucleotide
  Sense strand starting at position 2484 of SEQ ID NO: 1885305
cugaaagcagguuaguuaa

SEQ ID NO: 2332113 - RNA, 19 nt, Artificial Sequence
  Description of Artificial Sequence: Synthetic oligonucleotide
  Antisense strand to SEQ ID NO: 2332112
uuaacuaaccugcuuucag

SEQ ID NO: 2332114 - RNA, 19 nt, Artificial Sequence
  Description of Artificial Sequence: Synthetic oligonucleotide
  Sense strand starting at position 2710 of SEQ ID NO: 1885305
agcugaaacucauuaugua

SEQ ID NO: 2332115 - RNA, 19 nt, Artificial Sequence
  Description of Artificial Sequence: Synthetic oligonucleotide
  Antisense strand to SEQ ID NO: 2332114
uacauaaugaguuucagcu

SEQ ID NO: 2332116 - RNA, 19 nt, Artificial Sequence
  Description of Artificial Sequence: Synthetic oligonucleotide
  Sense strand starting at position 2711 of SEQ ID NO: 1885305
gcugaaacucauuauguau

SEQ ID NO: 2332117 - RNA, 19 nt, Artificial Sequence
  Description of Artificial Sequence: Synthetic oligonucleotide
  Antisense strand to SEQ ID NO: 2332116
auacauaaugaguuucagc

SEQ ID NO: 2332118 - RNA, 19 nt, Artificial Sequence
  Description of Artificial Sequence: Synthetic oligonucleotide
  Sense strand starting at position 2845 of SEQ ID NO: 1885305
agcccagcccuuuagaaau

SEQ ID NO: 2332119 - RNA, 19 nt, Artificial Sequence
  Description of Artificial Sequence: Synthetic oligonucleotide
  Antisense strand to SEQ ID NO: 2332118
auuucuaaagggcugggcu

SEQ ID NO: 2332120 - RNA, 19 nt, Artificial Sequence
  Description of Artificial Sequence: Synthetic oligonucleotide
  Sense strand starting at position 2851 of SEQ ID NO: 1885305
gcccuuuagaaaugaugga

SEQ ID NO: 2332121 - RNA, 19 nt, Artificial Sequence
  Description of Artificial Sequence: Synthetic oligonucleotide
  Antisense strand to SEQ ID NO: 2332120
uccaucauuucuaaagggc

SEQ ID NO: 2332122 - RNA, 19 nt, Artificial Sequence
  Description of Artificial Sequence: Synthetic oligonucleotide
  Sense strand starting at position 2872 of SEQ ID NO: 1885305
ggaugacugaagugcaauu

SEQ ID NO: 2332123 - RNA, 19 nt, Artificial Sequence
  Description of Artificial Sequence: Synthetic oligonucleotide
  Antisense strand to SEQ ID NO: 2332122
aauugcacuucagucaucc

SEQ ID NO: 2332124 - RNA, 19 nt, Artificial Sequence
  Description of Artificial Sequence: Synthetic oligonucleotide
  Sense strand starting at position 2970 of SEQ ID NO: 1885305
auaucauguugggcuggaa

SEQ ID NO: 2332125 - RNA, 19 nt, Artificial Sequence
  Description of Artificial Sequence: Synthetic oligonucleotide
  Antisense strand to SEQ ID NO: 2332124
uuccagcccaacaugauau

SEQ ID NO: 2332126 - RNA, 19 nt, Artificial Sequence
  Description of Artificial Sequence: Synthetic oligonucleotide
  Sense strand starting at position 2973 of SEQ ID NO: 1885305
ucauguugggcuggaacau

SEQ ID NO: 2332127 - RNA, 19 nt, Artificial Sequence
  Description of Artificial Sequence: Synthetic oligonucleotide
  Antisense strand to SEQ ID NO: 2332126
auguuccagcccaacauga

SEQ ID NO: 2332128 - RNA, 19 nt, Artificial Sequence
  Description of Artificial Sequence: Synthetic oligonucleotide
  Sense strand starting at position 2974 of SEQ ID NO: 1885305
cauguugggcuggaacauu

SEQ ID NO: 2332129 - RNA, 19 nt, Artificial Sequence
  Description of Artificial Sequence: Synthetic oligonucleotide
  Antisense strand to SEQ ID NO: 2332128
aauguuccagcccaacaug

SEQ ID NO: 2332130 - RNA, 19 nt, Artificial Sequence
  Description of Artificial Sequence: Synthetic oligonucleotide
  Sense strand starting at position 2985 of SEQ ID NO: 1885305
ggaacauucuaagaaugga

SEQ ID NO: 2332131 - RNA, 19 nt, Artificial Sequence
  Description of Artificial Sequence: Synthetic oligonucleotide
  Antisense strand to SEQ ID NO: 2332130
uccauucuuagaauguucc

SEQ ID NO: 2332132 - RNA, 19 nt, Artificial Sequence
  Description of Artificial Sequence: Synthetic oligonucleotide
  Sense strand starting at position 3015 of SEQ ID NO: 1885305
uggauauggcaacguaauu

SEQ ID NO: 2332133 - RNA, 19 nt, Artificial Sequence
  Description of Artificial Sequence: Synthetic oligonucleotide
  Antisense strand to SEQ ID NO: 2332132
aauuacguugccauaucca

SEQ ID NO: 2332134 - RNA, 19 nt, Artificial Sequence
  Description of Artificial Sequence: Synthetic oligonucleotide
  Sense strand starting at position 3126 of SEQ ID NO: 1885305
aaguuaaggguaugaggua

SEQ ID NO: 2332135 - RNA, 19 nt, Artificial Sequence
  Description of Artificial Sequence: Synthetic oligonucleotide
  Antisense strand to SEQ ID NO: 2332134
uaccucauacccuuaacuu

SEQ ID NO: 2332136 - RNA, 19 nt, Artificial Sequence
  Description of Artificial Sequence: Synthetic oligonucleotide
  Sense strand starting at position 3258 of SEQ ID NO: 1885305
cauauaugugugggauaug

SEQ ID NO: 2332137 - RNA, 19 nt, Artificial Sequence
  Description of Artificial Sequence: Synthetic oligonucleotide
  Antisense strand to SEQ ID NO: 2332136
cauaucccacacauauaug

SEQ ID NO: 2332138 - RNA, 19 nt, Artificial Sequence
  Description of Artificial Sequence: Synthetic oligonucleotide
  Sense strand starting at position 3261 of SEQ ID NO: 1885305
auaugugugggauauguga

SEQ ID NO: 2332139 - RNA, 19 nt, Artificial Sequence
  Description of Artificial Sequence: Synthetic oligonucleotide
  Antisense strand to SEQ ID NO: 2332138
ucacauaucccacacauau

SEQ ID NO: 2332140 - RNA, 19 nt, Artificial Sequence
  Description of Artificial Sequence: Synthetic oligonucleotide
  Sense strand starting at position 3263 of SEQ ID NO: 1885305
augugugggauaugugaua

SEQ ID NO: 2332141 - RNA, 19 nt, Artificial Sequence
  Description of Artificial Sequence: Synthetic oligonucleotide
  Antisense strand to SEQ ID NO: 2332140
uaucacauaucccacacau

SEQ ID NO: 2332142 - RNA, 19 nt, Artificial Sequence
  Description of Artificial Sequence: Synthetic oligonucleotide
  Sense strand starting at position 3549 of SEQ ID NO: 1885305
acuuaaguacagugaacau

SEQ ID NO: 2332143 - RNA, 19 nt, Artificial Sequence
  Description of Artificial Sequence: Synthetic oligonucleotide
  Antisense strand to SEQ ID NO: 2332142
auguucacuguacuuaagu

SEQ ID NO: 2332144 - RNA, 19 nt, Artificial Sequence
  Description of Artificial Sequence: Synthetic oligonucleotide
  Sense strand starting at position 401 of SEQ ID NO: 1885306
gggcaucucaaaggucaaa

SEQ ID NO: 2332145 - RNA, 19 nt, Artificial Sequence
  Description of Artificial Sequence: Synthetic oligonucleotide
  Antisense strand to SEQ ID NO: 2332144
uuugaccuuugagaugccc

SEQ ID NO: 2332146 - RNA, 19 nt, Artificial Sequence
  Description of Artificial Sequence: Synthetic oligonucleotide
  Sense strand starting at position 509 of SEQ ID NO: 1885306
acuguuacacacuaagagu

SEQ ID NO: 2332147 - RNA, 19 nt, Artificial Sequence
  Description of Artificial Sequence: Synthetic oligonucleotide
  Antisense strand to SEQ ID NO: 2332146
acucuuaguguguaacagu

SEQ ID NO: 2332148 - RNA, 19 nt, Artificial Sequence
  Description of Artificial Sequence: Synthetic oligonucleotide
  Sense strand starting at position 533 of SEQ ID NO: 1885306
augaacagcaggugaaaua

SEQ ID NO: 2332149 - RNA, 19 nt, Artificial Sequence
  Description of Artificial Sequence: Synthetic oligonucleotide
  Antisense strand to SEQ ID NO: 2332148
uauuucaccugcuguucau

SEQ ID NO: 2332150 - RNA, 19 nt, Artificial Sequence
  Description of Artificial Sequence: Synthetic oligonucleotide
  Sense strand starting at position 641 of SEQ ID NO: 1885306
ggacaagaauguucuccua

SEQ ID NO: 2332151 - RNA, 19 nt, Artificial Sequence
  Description of Artificial Sequence: Synthetic oligonucleotide
  Antisense strand to SEQ ID NO: 2332150
uaggagaacauucuugucc

SEQ ID NO: 2332152 - RNA, 19 nt, Artificial Sequence
  Description of Artificial Sequence: Synthetic oligonucleotide
  Sense strand starting at position 643 of SEQ ID NO: 1885306
acaagaauguucuccuaug

SEQ ID NO: 2332153 - RNA, 19 nt, Artificial Sequence
  Description of Artificial Sequence: Synthetic oligonucleotide
  Antisense strand to SEQ ID NO: 2332152
cauaggagaacauucuugu

SEQ ID NO: 2332154 - RNA, 19 nt, Artificial Sequence
  Description of Artificial Sequence: Synthetic oligonucleotide
  Sense strand starting at position 890 of SEQ ID NO: 1885306
ucuccuauugaucauugua

SEQ ID NO: 2332155 - RNA, 19 nt, Artificial Sequence
  Description of Artificial Sequence: Synthetic oligonucleotide
  Antisense strand to SEQ ID NO: 2332154
uacaaugaucaauaggaga

SEQ ID NO: 2332156 - RNA, 19 nt, Artificial Sequence
  Description of Artificial Sequence: Synthetic oligonucleotide
  Sense strand starting at position 892 of SEQ ID NO: 1885306
uccuauugaucauuguaua

SEQ ID NO: 2332157 - RNA, 19 nt, Artificial Sequence
  Description of Artificial Sequence: Synthetic oligonucleotide
  Antisense strand to SEQ ID NO: 2332156
uauacaaugaucaauagga

SEQ ID NO: 2332158 - RNA, 19 nt, Artificial Sequence
  Description of Artificial Sequence: Synthetic oligonucleotide
  Sense strand starting at position 893 of SEQ ID NO: 1885306
ccuauugaucauuguauac

SEQ ID NO: 2332159 - RNA, 19 nt, Artificial Sequence
  Description of Artificial Sequence: Synthetic oligonucleotide
  Antisense strand to SEQ ID NO: 2332158
guauacaaugaucaauagg

SEQ ID NO: 2332160 - RNA, 19 nt, Artificial Sequence
  Description of Artificial Sequence: Synthetic oligonucleotide
  Sense strand starting at position 940 of SEQ ID NO: 1885306
auaggaggugugcacuuaa

SEQ ID NO: 2332161 - RNA, 19 nt, Artificial Sequence
  Description of Artificial Sequence: Synthetic oligonucleotide
  Antisense strand to SEQ ID NO: 2332160
uuaagugcacaccuccuau

SEQ ID NO: 2332162 - RNA, 19 nt, Artificial Sequence
  Description of Artificial Sequence: Synthetic oligonucleotide
  Sense strand starting at position 1004 of SEQ ID NO: 1885306
auaacuguguacuugaaag

SEQ ID NO: 2332163 - RNA, 19 nt, Artificial Sequence
  Description of Artificial Sequence: Synthetic oligonucleotide
  Antisense strand to SEQ ID NO: 2332162
cuuucaaguacacaguuau

SEQ ID NO: 2332164 - RNA, 19 nt, Artificial Sequence
  Description of Artificial Sequence: Synthetic oligonucleotide
  Sense strand starting at position 1138 of SEQ ID NO: 1885306
augguaaugcaauaguaau

SEQ ID NO: 2332165 - RNA, 19 nt, Artificial Sequence
  Description of Artificial Sequence: Synthetic oligonucleotide
  Antisense strand to SEQ ID NO: 2332164
auuacuauugcauuaccau

SEQ ID NO: 2332166 - RNA, 19 nt, Artificial Sequence
  Description of Artificial Sequence: Synthetic oligonucleotide
  Sense strand starting at position 1170 of SEQ ID NO: 1885306
uucuaaauugauggucaaa

SEQ ID NO: 2332167 - RNA, 19 nt, Artificial Sequence
  Description of Artificial Sequence: Synthetic oligonucleotide
  Antisense strand to SEQ ID NO: 2332166
uuugaccaucaauuuagaa

SEQ ID NO: 2332168 - RNA, 19 nt, Artificial Sequence
  Description of Artificial Sequence: Synthetic oligonucleotide
  Sense strand starting at position 1630 of SEQ ID NO: 1885306
ucuucuuugggcuauauaa

SEQ ID NO: 2332169 - RNA, 19 nt, Artificial Sequence
  Description of Artificial Sequence: Synthetic oligonucleotide
  Antisense strand to SEQ ID NO: 2332168
uuauauagcccaaagaaga

SEQ ID NO: 2332170 - RNA, 19 nt, Artificial Sequence
  Description of Artificial Sequence: Synthetic oligonucleotide
  Sense strand starting at position 1632 of SEQ ID NO: 1885306
uucuuugggcuauauaacu

SEQ ID NO: 2332171 - RNA, 19 nt, Artificial Sequence
  Description of Artificial Sequence: Synthetic oligonucleotide
  Antisense strand to SEQ ID NO: 2332170
aguuauauagcccaaagaa

SEQ ID NO: 2332172 - RNA, 19 nt, Artificial Sequence
  Description of Artificial Sequence: Synthetic oligonucleotide
  Sense strand starting at position 1820 of SEQ ID NO: 1885306
ccacccagucauggagaua

SEQ ID NO: 2332173 - RNA, 19 nt, Artificial Sequence
  Description of Artificial Sequence: Synthetic oligonucleotide
  Antisense strand to SEQ ID NO: 2332172
uaucuccaugacugggugg

SEQ ID NO: 2332174 - RNA, 19 nt, Artificial Sequence
  Description of Artificial Sequence: Synthetic oligonucleotide
  Sense strand starting at position 1875 of SEQ ID NO: 1885306
cucaaauggcugugaagac

SEQ ID NO: 2332175 - RNA, 19 nt, Artificial Sequence
  Description of Artificial Sequence: Synthetic oligonucleotide
  Antisense strand to SEQ ID NO: 2332174
gucuucacagccauuugag

SEQ ID NO: 2332176 - RNA, 19 nt, Artificial Sequence
  Description of Artificial Sequence: Synthetic oligonucleotide
  Sense strand starting at position 1897 of SEQ ID NO: 1885306
guuuguuaccggucugcaa

SEQ ID NO: 2332177 - RNA, 19 nt, Artificial Sequence
  Description of Artificial Sequence: Synthetic oligonucleotide
  Antisense strand to SEQ ID NO: 2332176
uugcagaccgguaacaaac

SEQ ID NO: 2332178 - RNA, 19 nt, Artificial Sequence
  Description of Artificial Sequence: Synthetic oligonucleotide
  Sense strand starting at position 1904 of SEQ ID NO: 1885306
accggucugcaauaagaua

SEQ ID NO: 2332179 - RNA, 19 nt, Artificial Sequence
  Description of Artificial Sequence: Synthetic oligonucleotide
  Antisense strand to SEQ ID NO: 2332178
uaucuuauugcagaccggu

SEQ ID NO: 2332180 - RNA, 19 nt, Artificial Sequence
  Description of Artificial Sequence: Synthetic oligonucleotide
  Sense strand starting at position 1951 of SEQ ID NO: 1885306
ugaagcuuccugcauugga

SEQ ID NO: 2332181 - RNA, 19 nt, Artificial Sequence
  Description of Artificial Sequence: Synthetic oligonucleotide
  Antisense strand to SEQ ID NO: 2332180
uccaaugcaggaagcuuca

SEQ ID NO: 2332182 - RNA, 19 nt, Artificial Sequence
  Description of Artificial Sequence: Synthetic oligonucleotide
  Sense strand starting at position 2075 of SEQ ID NO: 1885306
guugcaagucaggaacaaa

SEQ ID NO: 2332183 - RNA, 19 nt, Artificial Sequence
  Description of Artificial Sequence: Synthetic oligonucleotide
  Antisense strand to SEQ ID NO: 2332182
uuuguuccugacuugcaac

SEQ ID NO: 2332184 - RNA, 19 nt, Artificial Sequence
  Description of Artificial Sequence: Synthetic oligonucleotide
  Sense strand starting at position 2198 of SEQ ID NO: 1885306
aggaaucauucccuaagca

SEQ ID NO: 2332185 - RNA, 19 nt, Artificial Sequence
  Description of Artificial Sequence: Synthetic oligonucleotide
  Antisense strand to SEQ ID NO: 2332184
ugcuuagggaaugauuccu

SEQ ID NO: 2332186 - RNA, 19 nt, Artificial Sequence
  Description of Artificial Sequence: Synthetic oligonucleotide
  Sense strand starting at position 2199 of SEQ ID NO: 1885306
ggaaucauucccuaagcac

SEQ ID NO: 2332187 - RNA, 19 nt, Artificial Sequence
  Description of Artificial Sequence: Synthetic oligonucleotide
  Antisense strand to SEQ ID NO: 2332186
gugcuuagggaaugauucc

SEQ ID NO: 2332188 - RNA, 19 nt, Artificial Sequence
  Description of Artificial Sequence: Synthetic oligonucleotide
  Sense strand starting at position 2233 of SEQ ID NO: 1885306
uagggauauuaugucucga

SEQ ID NO: 2332189 - RNA, 19 nt, Artificial Sequence
  Description of Artificial Sequence: Synthetic oligonucleotide
  Antisense strand to SEQ ID NO: 2332188
ucgagacauaauaucccua

SEQ ID NO: 2332190 - RNA, 19 nt, Artificial Sequence
  Description of Artificial Sequence: Synthetic oligonucleotide
  Sense strand starting at position 2235 of SEQ ID NO: 1885306
gggauauuaugucucgaac

SEQ ID NO: 2332191 - RNA, 19 nt, Artificial Sequence
  Description of Artificial Sequence: Synthetic oligonucleotide
  Antisense strand to SEQ ID NO: 2332190
guucgagacauaauauccc

SEQ ID NO: 2332192 - RNA, 19 nt, Artificial Sequence
  Description of Artificial Sequence: Synthetic oligonucleotide
  Sense strand starting at position 2238 of SEQ ID NO: 1885306
auauuaugucucgaacagg

SEQ ID NO: 2332193 - RNA, 19 nt, Artificial Sequence
  Description of Artificial Sequence: Synthetic oligonucleotide
  Antisense strand to SEQ ID NO: 2332192
ccuguucgagacauaauau

SEQ ID NO: 2332194 - RNA, 19 nt, Artificial Sequence
  Description of Artificial Sequence: Synthetic oligonucleotide
  Sense strand starting at position 2406 of SEQ ID NO: 1885306
gcauuagaaucaccuaaga

SEQ ID NO: 2332195 - RNA, 19 nt, Artificial Sequence
  Description of Artificial Sequence: Synthetic oligonucleotide
  Antisense strand to SEQ ID NO: 2332194
ucuuaggugauucuaaugc

SEQ ID NO: 2332196 - RNA, 19 nt, Artificial Sequence
  Description of Artificial Sequence: Synthetic oligonucleotide
  Sense strand starting at position 2458 of SEQ ID NO: 1885306
gaauuagaauagcugggua

SEQ ID NO: 2332197 - RNA, 19 nt, Artificial Sequence
  Description of Artificial Sequence: Synthetic oligonucleotide
  Antisense strand to SEQ ID NO: 2332196
uacccagcuauucuaauuc

SEQ ID NO: 2332198 - RNA, 19 nt, Artificial Sequence
  Description of Artificial Sequence: Synthetic oligonucleotide
  Sense strand starting at position 2471 of SEQ ID NO: 1885306
uggguaugggccuaggaau

SEQ ID NO: 2332199 - RNA, 19 nt, Artificial Sequence
  Description of Artificial Sequence: Synthetic oligonucleotide
  Antisense strand to SEQ ID NO: 2332198
auuccuaggcccauaccca

SEQ ID NO: 2332200 - RNA, 19 nt, Artificial Sequence
  Description of Artificial Sequence: Synthetic oligonucleotide
  Sense strand starting at position 2486 of SEQ ID NO: 1885306
gaaucuguaugcuuaacag

SEQ ID NO: 2332201 - RNA, 19 nt, Artificial Sequence
  Description of Artificial Sequence: Synthetic oligonucleotide
  Antisense strand to SEQ ID NO: 2332200
cuguuaagcauacagauuc

SEQ ID NO: 2332202 - RNA, 19 nt, Artificial Sequence
  Description of Artificial Sequence: Synthetic oligonucleotide
  Sense strand starting at position 2741 of SEQ ID NO: 1885306
ccaguuacuguuuaagcaa

SEQ ID NO: 2332203 - RNA, 19 nt, Artificial Sequence
  Description of Artificial Sequence: Synthetic oligonucleotide
  Antisense strand to SEQ ID NO: 2332202
uugcuuaaacaguaacugg

SEQ ID NO: 2332204 - RNA, 19 nt, Artificial Sequence
  Description of Artificial Sequence: Synthetic oligonucleotide
  Sense strand starting at position 2773 of SEQ ID NO: 1885306
ugccauuaaccucauagga

SEQ ID NO: 2332205 - RNA, 19 nt, Artificial Sequence
  Description of Artificial Sequence: Synthetic oligonucleotide
  Antisense strand to SEQ ID NO: 2332204
uccuaugagguuaauggca

SEQ ID NO: 2332206 - RNA, 19 nt, Artificial Sequence
  Description of Artificial Sequence: Synthetic oligonucleotide
  Sense strand starting at position 2790 of SEQ ID NO: 1885306
gauuauugacacuggguau

SEQ ID NO: 2332207 - RNA, 19 nt, Artificial Sequence
  Description of Artificial Sequence: Synthetic oligonucleotide
  Antisense strand to SEQ ID NO: 2332206
auacccagugucaauaauc

SEQ ID NO: 2332208 - RNA, 19 nt, Artificial Sequence
  Description of Artificial Sequence: Synthetic oligonucleotide
  Sense strand starting at position 2892 of SEQ ID NO: 1885306
ggaacuuccucaccucaga

SEQ ID NO: 2332209 - RNA, 19 nt, Artificial Sequence
  Description of Artificial Sequence: Synthetic oligonucleotide
  Antisense strand to SEQ ID NO: 2332208
ucugaggugaggaaguucc

SEQ ID NO: 2332210 - RNA, 19 nt, Artificial Sequence
  Description of Artificial Sequence: Synthetic oligonucleotide
  Sense strand starting at position 2906 of SEQ ID NO: 1885306
ucagaaacagcauguaagu

SEQ ID NO: 2332211 - RNA, 19 nt, Artificial Sequence
  Description of Artificial Sequence: Synthetic oligonucleotide
  Antisense strand to SEQ ID NO: 2332210
acuuacaugcuguuucuga

SEQ ID NO: 2332212 - RNA, 19 nt, Artificial Sequence
  Description of Artificial Sequence: Synthetic oligonucleotide
  Sense strand starting at position 3261 of SEQ ID NO: 1885306
gguagaaccuaacuguuaa

SEQ ID NO: 2332213 - RNA, 19 nt, Artificial Sequence
  Description of Artificial Sequence: Synthetic oligonucleotide
  Antisense strand to SEQ ID NO: 2332212
uuaacaguuagguucuacc

SEQ ID NO: 2332214 - RNA, 19 nt, Artificial Sequence
  Description of Artificial Sequence: Synthetic oligonucleotide
  Sense strand starting at position 3444 of SEQ ID NO: 1885306
gacauuagucaacaugugu

SEQ ID NO: 2332215 - RNA, 19 nt, Artificial Sequence
  Description of Artificial Sequence: Synthetic oligonucleotide
  Antisense strand to SEQ ID NO: 2332214
acacauguugacuaauguc

SEQ ID NO: 2332216 - RNA, 19 nt, Artificial Sequence
  Description of Artificial Sequence: Synthetic oligonucleotide
  Sense strand starting at position 3449 of SEQ ID NO: 1885306
uagucaacauguguaagau

SEQ ID NO: 2332217 - RNA, 19 nt, Artificial Sequence
  Description of Artificial Sequence: Synthetic oligonucleotide
  Antisense strand to SEQ ID NO: 2332216
aucuuacacauguugacua

SEQ ID NO: 2332218 - RNA, 19 nt, Artificial Sequence
  Description of Artificial Sequence: Synthetic oligonucleotide
  Sense strand starting at position 3668 of SEQ ID NO: 1885306
gugagucucagagggauga

SEQ ID NO: 2332219 - RNA, 19 nt, Artificial Sequence
  Description of Artificial Sequence: Synthetic oligonucleotide
  Antisense strand to SEQ ID NO: 2332218
ucaucccucugagacucac

SEQ ID NO: 2332220 - RNA, 19 nt, Artificial Sequence
  Description of Artificial Sequence: Synthetic oligonucleotide
  Sense strand starting at position 3761 of SEQ ID NO: 1885306
guauguagcuauguuauuu

SEQ ID NO: 2332221 - RNA, 19 nt, Artificial Sequence
  Description of Artificial Sequence: Synthetic oligonucleotide
  Antisense strand to SEQ ID NO: 2332220
aaauaacauagcuacauac

SEQ ID NO: 2332222 - RNA, 19 nt, Artificial Sequence
  Description of Artificial Sequence: Synthetic oligonucleotide
  Sense strand starting at position 3936 of SEQ ID NO: 1885306
cagauauggcuccaagucu

SEQ ID NO: 2332223 - RNA, 19 nt, Artificial Sequence
  Description of Artificial Sequence: Synthetic oligonucleotide
  Antisense strand to SEQ ID NO: 2332222
agacuuggagccauaucug

SEQ ID NO: 2332224 - RNA, 19 nt, Artificial Sequence
  Description of Artificial Sequence: Synthetic oligonucleotide
  Sense strand starting at position 542 of SEQ ID NO: 1885307
uguucagaugaauggugaa

SEQ ID NO: 2332225 - RNA, 19 nt, Artificial Sequence
  Description of Artificial Sequence: Synthetic oligonucleotide
  Antisense strand to SEQ ID NO: 2332224
uucaccauucaucugaaca

SEQ ID NO: 2332226 - RNA, 19 nt, Artificial Sequence
  Description of Artificial Sequence: Synthetic oligonucleotide
  Sense strand starting at position 590 of SEQ ID NO: 1885307
accacaaaucaguggcuua

SEQ ID NO: 2332227 - RNA, 19 nt, Artificial Sequence
  Description of Artificial Sequence: Synthetic oligonucleotide
  Antisense strand to SEQ ID NO: 2332226
uaagccacugauuuguggu

SEQ ID NO: 2332228 - RNA, 19 nt, Artificial Sequence
  Description of Artificial Sequence: Synthetic oligonucleotide
  Sense strand starting at position 1259 of SEQ ID NO: 1885307
gcauaugacucagcagaaa

SEQ ID NO: 2332229 - RNA, 19 nt, Artificial Sequence
  Description of Artificial Sequence: Synthetic oligonucleotide
  Antisense strand to SEQ ID NO: 2332228
uuucugcugagucauaugc

SEQ ID NO: 2332230 - RNA, 19 nt, Artificial Sequence
  Description of Artificial Sequence: Synthetic oligonucleotide
  Sense strand starting at position 1282 of SEQ ID NO: 1885307
agaggaaauucugcuuccu

SEQ ID NO: 2332231 - RNA, 19 nt, Artificial Sequence
  Description of Artificial Sequence: Synthetic oligonucleotide
  Antisense strand to SEQ ID NO: 2332230
aggaagcagaauuuccucu

SEQ ID NO: 2332232 - RNA, 19 nt, Artificial Sequence
  Description of Artificial Sequence: Synthetic oligonucleotide
  Sense strand starting at position 1284 of SEQ ID NO: 1885307
aggaaauucugcuuccuuc

SEQ ID NO: 2332233 - RNA, 19 nt, Artificial Sequence
  Description of Artificial Sequence: Synthetic oligonucleotide
  Antisense strand to SEQ ID NO: 2332232
gaaggaagcagaauuuccu

SEQ ID NO: 2332234 - RNA, 19 nt, Artificial Sequence
  Description of Artificial Sequence: Synthetic oligonucleotide
  Sense strand starting at position 1319 of SEQ ID NO: 1885307
gguggugauuggaaagagu

SEQ ID NO: 2332235 - RNA, 19 nt, Artificial Sequence
  Description of Artificial Sequence: Synthetic oligonucleotide
  Antisense strand to SEQ ID NO: 2332234
acucuuuccaaucaccacc

SEQ ID NO: 2332236 - RNA, 19 nt, Artificial Sequence
  Description of Artificial Sequence: Synthetic oligonucleotide
  Sense strand starting at position 1449 of SEQ ID NO: 1885307
acuagauggugucuaagac

SEQ ID NO: 2332237 - RNA, 19 nt, Artificial Sequence
  Description of Artificial Sequence: Synthetic oligonucleotide
  Antisense strand to SEQ ID NO: 2332236
gucuuagacaccaucuagu

SEQ ID NO: 2332238 - RNA, 19 nt, Artificial Sequence
  Description of Artificial Sequence: Synthetic oligonucleotide
  Sense strand starting at position 1486 of SEQ ID NO: 1885307
ucuauaauugaauggucuu

SEQ ID NO: 2332239 - RNA, 19 nt, Artificial Sequence
  Description of Artificial Sequence: Synthetic oligonucleotide
  Antisense strand to SEQ ID NO: 2332238
aagaccauucaauuauaga

SEQ ID NO: 2332240 - RNA, 19 nt, Artificial Sequence
  Description of Artificial Sequence: Synthetic oligonucleotide
  Sense strand starting at position 1489 of SEQ ID NO: 1885307
auaauugaauggucuuaug

SEQ ID NO: 2332241 - RNA, 19 nt, Artificial Sequence
  Description of Artificial Sequence: Synthetic oligonucleotide
  Antisense strand to SEQ ID NO: 2332240
cauaagaccauucaauuau

SEQ ID NO: 2332242 - RNA, 19 nt, Artificial Sequence
  Description of Artificial Sequence: Synthetic oligonucleotide
  Sense strand starting at position 1514 of SEQ ID NO: 1885307
accacuuugcugcagaaca

SEQ ID NO: 2332243 - RNA, 19 nt, Artificial Sequence
  Description of Artificial Sequence: Synthetic oligonucleotide
  Antisense strand to SEQ ID NO: 2332242
uguucugcagcaaaguggu

SEQ ID NO: 2332244 - RNA, 19 nt, Artificial Sequence
  Description of Artificial Sequence: Synthetic oligonucleotide
  Sense strand starting at position 1561 of SEQ ID NO: 1885307
ucugucaguccagaguauu

SEQ ID NO: 2332245 - RNA, 19 nt, Artificial Sequence
  Description of Artificial Sequence: Synthetic oligonucleotide
  Antisense strand to SEQ ID NO: 2332244
aauacucuggacugacaga

SEQ ID NO: 2332246 - RNA, 19 nt, Artificial Sequence
  Description of Artificial Sequence: Synthetic oligonucleotide
  Sense strand starting at position 1582 of SEQ ID NO: 1885307
guaccuguccaugacaaga

SEQ ID NO: 2332247 - RNA, 19 nt, Artificial Sequence
  Description of Artificial Sequence: Synthetic oligonucleotide
  Antisense strand to SEQ ID NO: 2332246
ucuugucauggacagguac

SEQ ID NO: 2332248 - RNA, 19 nt, Artificial Sequence
  Description of Artificial Sequence: Synthetic oligonucleotide
  Sense strand starting at position 1684 of SEQ ID NO: 1885307
ggcuuucguggugaaggaa

SEQ ID NO: 2332249 - RNA, 19 nt, Artificial Sequence
  Description of Artificial Sequence: Synthetic oligonucleotide
  Antisense strand to SEQ ID NO: 2332248
uuccuucaccacgaaagcc

SEQ ID NO: 2332250 - RNA, 19 nt, Artificial Sequence
  Description of Artificial Sequence: Synthetic oligonucleotide
  Sense strand starting at position 1759 of SEQ ID NO: 1885307
caaauaguuccuggaugag

SEQ ID NO: 2332251 - RNA, 19 nt, Artificial Sequence
  Description of Artificial Sequence: Synthetic oligonucleotide
  Antisense strand to SEQ ID NO: 2332250
cucauccaggaacuauuug

SEQ ID NO: 2332252 - RNA, 19 nt, Artificial Sequence
  Description of Artificial Sequence: Synthetic oligonucleotide
  Sense strand starting at position 1762 of SEQ ID NO: 1885307
auaguuccuggaugagauu

SEQ ID NO: 2332253 - RNA, 19 nt, Artificial Sequence
  Description of Artificial Sequence: Synthetic oligonucleotide
  Antisense strand to SEQ ID NO: 2332252
aaucucauccaggaacuau

SEQ ID NO: 2332254 - RNA, 19 nt, Artificial Sequence
  Description of Artificial Sequence: Synthetic oligonucleotide
  Sense strand starting at position 1817 of SEQ ID NO: 1885307
agaggugaauaugugcuua

SEQ ID NO: 2332255 - RNA, 19 nt, Artificial Sequence
  Description of Artificial Sequence: Synthetic oligonucleotide
  Antisense strand to SEQ ID NO: 2332254
uaagcacauauucaccucu

SEQ ID NO: 2332256 - RNA, 19 nt, Artificial Sequence
  Description of Artificial Sequence: Synthetic oligonucleotide
  Sense strand starting at position 1822 of SEQ ID NO: 1885307
ugaauaugugcuuaauauc

SEQ ID NO: 2332257 - RNA, 19 nt, Artificial Sequence
  Description of Artificial Sequence: Synthetic oligonucleotide
  Antisense strand to SEQ ID NO: 2332256
gauauuaagcacauauuca

SEQ ID NO: 2332258 - RNA, 19 nt, Artificial Sequence
  Description of Artificial Sequence: Synthetic oligonucleotide
  Sense strand starting at position 1868 of SEQ ID NO: 1885307
uuguucuugccucacagaa

SEQ ID NO: 2332259 - RNA, 19 nt, Artificial Sequence
  Description of Artificial Sequence: Synthetic oligonucleotide
  Antisense strand to SEQ ID NO: 2332258
uucugugaggcaagaacaa

SEQ ID NO: 2332260 - RNA, 19 nt, Artificial Sequence
  Description of Artificial Sequence: Synthetic oligonucleotide
  Sense strand starting at position 1927 of SEQ ID NO: 1885307
ugaaacuaucuuugggauc

SEQ ID NO: 2332261 - RNA, 19 nt, Artificial Sequence
  Description of Artificial Sequence: Synthetic oligonucleotide
  Antisense strand to SEQ ID NO: 2332260
gaucccaaagauaguuuca

SEQ ID NO: 2332262 - RNA, 19 nt, Artificial Sequence
  Description of Artificial Sequence: Synthetic oligonucleotide
  Sense strand starting at position 1934 of SEQ ID NO: 1885307
aucuuugggaucugugaua

SEQ ID NO: 2332263 - RNA, 19 nt, Artificial Sequence
  Description of Artificial Sequence: Synthetic oligonucleotide
  Antisense strand to SEQ ID NO: 2332262
uaucacagaucccaaagau

SEQ ID NO: 2332264 - RNA, 19 nt, Artificial Sequence
  Description of Artificial Sequence: Synthetic oligonucleotide
  Sense strand starting at position 1941 of SEQ ID NO: 1885307
ggaucugugauagacugca

SEQ ID NO: 2332265 - RNA, 19 nt, Artificial Sequence
  Description of Artificial Sequence: Synthetic oligonucleotide
  Antisense strand to SEQ ID NO: 2332264
ugcagucuaucacagaucc

SEQ ID NO: 2332266 - RNA, 19 nt, Artificial Sequence
  Description of Artificial Sequence: Synthetic oligonucleotide
  Sense strand starting at position 1946 of SEQ ID NO: 1885307
ugugauagacugcaguauu

SEQ ID NO: 2332267 - RNA, 19 nt, Artificial Sequence
  Description of Artificial Sequence: Synthetic oligonucleotide
  Antisense strand to SEQ ID NO: 2332266
aauacugcagucuaucaca

SEQ ID NO: 2332268 - RNA, 19 nt, Artificial Sequence
  Description of Artificial Sequence: Synthetic oligonucleotide
  Sense strand starting at position 1956 of SEQ ID NO: 1885307
ugcaguauuucuuccagau

SEQ ID NO: 2332269 - RNA, 19 nt, Artificial Sequence
  Description of Artificial Sequence: Synthetic oligonucleotide
  Antisense strand to SEQ ID NO: 2332268
aucuggaagaaauacugca

SEQ ID NO: 2332270 - RNA, 19 nt, Artificial Sequence
  Description of Artificial Sequence: Synthetic oligonucleotide
  Sense strand starting at position 2025 of SEQ ID NO: 1885307
ggccuuccuguggaauaca

SEQ ID NO: 2332271 - RNA, 19 nt, Artificial Sequence
  Description of Artificial Sequence: Synthetic oligonucleotide
  Antisense strand to SEQ ID NO: 2332270
uguauuccacaggaaggcc

SEQ ID NO: 2332272 - RNA, 19 nt, Artificial Sequence
  Description of Artificial Sequence: Synthetic oligonucleotide
  Sense strand starting at position 2077 of SEQ ID NO: 1885307
agggacuugccuugguuaa

SEQ ID NO: 2332273 - RNA, 19 nt, Artificial Sequence
  Description of Artificial Sequence: Synthetic oligonucleotide
  Antisense strand to SEQ ID NO: 2332272
uuaaccaaggcaagucccu

SEQ ID NO: 2332274 - RNA, 19 nt, Artificial Sequence
  Description of Artificial Sequence: Synthetic oligonucleotide
  Sense strand starting at position 2118 of SEQ ID NO: 1885307
uaccaugucucagcagaag

SEQ ID NO: 2332275 - RNA, 19 nt, Artificial Sequence
  Description of Artificial Sequence: Synthetic oligonucleotide
  Antisense strand to SEQ ID NO: 2332274
cuucugcugagacauggua

SEQ ID NO: 2332276 - RNA, 19 nt, Artificial Sequence
  Description of Artificial Sequence: Synthetic oligonucleotide
  Sense strand starting at position 2121 of SEQ ID NO: 1885307
caugucucagcagaaguuu

SEQ ID NO: 2332277 - RNA, 19 nt, Artificial Sequence
  Description of Artificial Sequence: Synthetic oligonucleotide
  Antisense strand to SEQ ID NO: 2332276
aaacuucugcugagacaug

SEQ ID NO: 2332278 - RNA, 19 nt, Artificial Sequence
  Description of Artificial Sequence: Synthetic oligonucleotide
  Sense strand starting at position 2567 of SEQ ID NO: 1885307
agagcagagcuauagucaa

SEQ ID NO: 2332279 - RNA, 19 nt, Artificial Sequence
  Description of Artificial Sequence: Synthetic oligonucleotide
  Antisense strand to SEQ ID NO: 2332278
uugacuauagcucugcucu

SEQ ID NO: 2332280 - RNA, 19 nt, Artificial Sequence
  Description of Artificial Sequence: Synthetic oligonucleotide
  Sense strand starting at position 2671 of SEQ ID NO: 1885307
cgaacaaaugcugguagaa

SEQ ID NO: 2332281 - RNA, 19 nt, Artificial Sequence
  Description of Artificial Sequence: Synthetic oligonucleotide
  Antisense strand to SEQ ID NO: 2332280
uucuaccagcauuuguucg

SEQ ID NO: 2332282 - RNA, 19 nt, Artificial Sequence
  Description of Artificial Sequence: Synthetic oligonucleotide
  Sense strand starting at position 3016 of SEQ ID NO: 1885307
ucaggacugcuuuaucuca

SEQ ID NO: 2332283 - RNA, 19 nt, Artificial Sequence
  Description of Artificial Sequence: Synthetic oligonucleotide
  Antisense strand to SEQ ID NO: 2332282
ugagauaaagcaguccuga

SEQ ID NO: 2332284 - RNA, 19 nt, Artificial Sequence
  Description of Artificial Sequence: Synthetic oligonucleotide
  Sense strand starting at position 3018 of SEQ ID NO: 1885307
aggacugcuuuaucucaaa

SEQ ID NO: 2332285 - RNA, 19 nt, Artificial Sequence
  Description of Artificial Sequence: Synthetic oligonucleotide
  Antisense strand to SEQ ID NO: 2332284
uuugagauaaagcaguccu

SEQ ID NO: 2332286 - RNA, 19 nt, Artificial Sequence
  Description of Artificial Sequence: Synthetic oligonucleotide
  Sense strand starting at position 3060 of SEQ ID NO: 1885307
uuaugaagucaaugacagu

SEQ ID NO: 2332287 - RNA, 19 nt, Artificial Sequence
  Description of Artificial Sequence: Synthetic oligonucleotide
  Antisense strand to SEQ ID NO: 2332286
acugucauugacuucauaa

SEQ ID NO: 2332288 - RNA, 19 nt, Artificial Sequence
  Description of Artificial Sequence: Synthetic oligonucleotide
  Sense strand starting at position 3066 of SEQ ID NO: 1885307
agucaaugacaguagcauu

SEQ ID NO: 2332289 - RNA, 19 nt, Artificial Sequence
  Description of Artificial Sequence: Synthetic oligonucleotide
  Antisense strand to SEQ ID NO: 2332288
aaugcuacugucauugacu

SEQ ID NO: 2332290 - RNA, 19 nt, Artificial Sequence
  Description of Artificial Sequence: Synthetic oligonucleotide
  Sense strand starting at position 3106 of SEQ ID NO: 1885307
uuucuuauugcugagagca

SEQ ID NO: 2332291 - RNA, 19 nt, Artificial Sequence
  Description of Artificial Sequence: Synthetic oligonucleotide
  Antisense strand to SEQ ID NO: 2332290
ugcucucagcaauaagaaa

SEQ ID NO: 2332292 - RNA, 19 nt, Artificial Sequence
  Description of Artificial Sequence: Synthetic oligonucleotide
  Sense strand starting at position 3175 of SEQ ID NO: 1885307
aguugaaugguucaagugu

SEQ ID NO: 2332293 - RNA, 19 nt, Artificial Sequence
  Description of Artificial Sequence: Synthetic oligonucleotide
  Antisense strand to SEQ ID NO: 2332292
acacuugaaccauucaacu

SEQ ID NO: 2332294 - RNA, 19 nt, Artificial Sequence
  Description of Artificial Sequence: Synthetic oligonucleotide
  Sense strand starting at position 3323 of SEQ ID NO: 1885307
cucucaucuggacaauugu

SEQ ID NO: 2332295 - RNA, 19 nt, Artificial Sequence
  Description of Artificial Sequence: Synthetic oligonucleotide
  Antisense strand to SEQ ID NO: 2332294
acaauuguccagaugagag

SEQ ID NO: 2332296 - RNA, 19 nt, Artificial Sequence
  Description of Artificial Sequence: Synthetic oligonucleotide
  Sense strand starting at position 3332 of SEQ ID NO: 1885307
ggacaauugugauaauuua

SEQ ID NO: 2332297 - RNA, 19 nt, Artificial Sequence
  Description of Artificial Sequence: Synthetic oligonucleotide
  Antisense strand to SEQ ID NO: 2332296
uaaauuaucacaauugucc

SEQ ID NO: 2332298 - RNA, 19 nt, Artificial Sequence
  Description of Artificial Sequence: Synthetic oligonucleotide
  Sense strand starting at position 3525 of SEQ ID NO: 1885307
cugucucuacauggugaaa

SEQ ID NO: 2332299 - RNA, 19 nt, Artificial Sequence
  Description of Artificial Sequence: Synthetic oligonucleotide
  Antisense strand to SEQ ID NO: 2332298
uuucaccauguagagacag

SEQ ID NO: 2332300 - RNA, 19 nt, Artificial Sequence
  Description of Artificial Sequence: Synthetic oligonucleotide
  Sense strand starting at position 3943 of SEQ ID NO: 1885307
ugauaagaguaagucuuua

SEQ ID NO: 2332301 - RNA, 19 nt, Artificial Sequence
  Description of Artificial Sequence: Synthetic oligonucleotide
  Antisense strand to SEQ ID NO: 2332300
uaaagacuuacucuuauca

SEQ ID NO: 2332302 - RNA, 19 nt, Artificial Sequence
  Description of Artificial Sequence: Synthetic oligonucleotide
  Sense strand starting at position 3948 of SEQ ID NO: 1885307
agaguaagucuuuaccuau

SEQ ID NO: 2332303 - RNA, 19 nt, Artificial Sequence
  Description of Artificial Sequence: Synthetic oligonucleotide
  Antisense strand to SEQ ID NO: 2332302
auagguaaagacuuacucu

SEQ ID NO: 2332304 - RNA, 19 nt, Artificial Sequence
  Description of Artificial Sequence: Synthetic oligonucleotide
  Sense strand starting at position 130 of SEQ ID NO: 1885308
caaaguucuguccgacaaa

SEQ ID NO: 2332305 - RNA, 19 nt, Artificial Sequence
  Description of Artificial Sequence: Synthetic oligonucleotide
  Antisense strand to SEQ ID NO: 2332304
uuugucggacagaacuuug

SEQ ID NO: 2332306 - RNA, 19 nt, Artificial Sequence
  Description of Artificial Sequence: Synthetic oligonucleotide
  Sense strand starting at position 244 of SEQ ID NO: 1885308
gggagcucuggucagugaa

SEQ ID NO: 2332307 - RNA, 19 nt, Artificial Sequence
  Description of Artificial Sequence: Synthetic oligonucleotide
  Antisense strand to SEQ ID NO: 2332306
uucacugaccagagcuccc

SEQ ID NO: 2332308 - RNA, 19 nt, Artificial Sequence
  Description of Artificial Sequence: Synthetic oligonucleotide
  Sense strand starting at position 246 of SEQ ID NO: 1885308
gagcucuggucagugaaac

SEQ ID NO: 2332309 - RNA, 19 nt, Artificial Sequence
  Description of Artificial Sequence: Synthetic oligonucleotide
  Antisense strand to SEQ ID NO: 2332308
guuucacugaccagagcuc

SEQ ID NO: 2332310 - RNA, 19 nt, Artificial Sequence
  Description of Artificial Sequence: Synthetic oligonucleotide
  Sense strand starting at position 247 of SEQ ID NO: 1885308
agcucuggucagugaaacu

SEQ ID NO: 2332311 - RNA, 19 nt, Artificial Sequence
  Description of Artificial Sequence: Synthetic oligonucleotide
  Antisense strand to SEQ ID NO: 2332310
aguuucacugaccagagcu

SEQ ID NO: 2332312 - RNA, 19 nt, Artificial Sequence
  Description of Artificial Sequence: Synthetic oligonucleotide
  Sense strand starting at position 474 of SEQ ID NO: 1885308
aguacaaguccugggcuau

SEQ ID NO: 2332313 - RNA, 19 nt, Artificial Sequence
  Description of Artificial Sequence: Synthetic oligonucleotide
  Antisense strand to SEQ ID NO: 2332312
auagcccaggacuuguacu

SEQ ID NO: 2332314 - RNA, 19 nt, Artificial Sequence
  Description of Artificial Sequence: Synthetic oligonucleotide
  Sense strand starting at position 475 of SEQ ID NO: 1885308
guacaaguccugggcuauc

SEQ ID NO: 2332315 - RNA, 19 nt, Artificial Sequence
  Description of Artificial Sequence: Synthetic oligonucleotide
  Antisense strand to SEQ ID NO: 2332314
gauagcccaggacuuguac

SEQ ID NO: 2332316 - RNA, 19 nt, Artificial Sequence
  Description of Artificial Sequence: Synthetic oligonucleotide
  Sense strand starting at position 642 of SEQ ID NO: 1885308
agugguuccugcuccaaua

SEQ ID NO: 2332317 - RNA, 19 nt, Artificial Sequence
  Description of Artificial Sequence: Synthetic oligonucleotide
  Antisense strand to SEQ ID NO: 2332316
uauuggagcaggaaccacu

SEQ ID NO: 2332318 - RNA, 19 nt, Artificial Sequence
  Description of Artificial Sequence: Synthetic oligonucleotide
  Sense strand starting at position 673 of SEQ ID NO: 1885308
auuaauaacugugacuaag

SEQ ID NO: 2332319 - RNA, 19 nt, Artificial Sequence
  Description of Artificial Sequence: Synthetic oligonucleotide
  Antisense strand to SEQ ID NO: 2332318
cuuagucacaguuauuaau

SEQ ID NO: 2332320 - RNA, 19 nt, Artificial Sequence
  Description of Artificial Sequence: Synthetic oligonucleotide
  Sense strand starting at position 679 of SEQ ID NO: 1885308
aacugugacuaaguuagaa

SEQ ID NO: 2332321 - RNA, 19 nt, Artificial Sequence
  Description of Artificial Sequence: Synthetic oligonucleotide
  Antisense strand to SEQ ID NO: 2332320
uucuaacuuagucacaguu

SEQ ID NO: 2332322 - RNA, 19 nt, Artificial Sequence
  Description of Artificial Sequence: Synthetic oligonucleotide
  Sense strand starting at position 831 of SEQ ID NO: 1885308
ggaccaacgugcuuuccau

SEQ ID NO: 2332323 - RNA, 19 nt, Artificial Sequence
  Description of Artificial Sequence: Synthetic oligonucleotide
  Antisense strand to SEQ ID NO: 2332322
auggaaagcacguuggucc

SEQ ID NO: 2332324 - RNA, 19 nt, Artificial Sequence
  Description of Artificial Sequence: Synthetic oligonucleotide
  Sense strand starting at position 849 of SEQ ID NO: 1885308
uguccaacuuugucaagau

SEQ ID NO: 2332325 - RNA, 19 nt, Artificial Sequence
  Description of Artificial Sequence: Synthetic oligonucleotide
  Antisense strand to SEQ ID NO: 2332324
aucuugacaaaguuggaca

SEQ ID NO: 2332326 - RNA, 19 nt, Artificial Sequence
  Description of Artificial Sequence: Synthetic oligonucleotide
  Sense strand starting at position 881 of SEQ ID NO: 1885308
uccagcaagucucuuggaa

SEQ ID NO: 2332327 - RNA, 19 nt, Artificial Sequence
  Description of Artificial Sequence: Synthetic oligonucleotide
  Antisense strand to SEQ ID NO: 2332326
uuccaagagacuugcugga

SEQ ID NO: 2332328 - RNA, 19 nt, Artificial Sequence
  Description of Artificial Sequence: Synthetic oligonucleotide
  Sense strand starting at position 893 of SEQ ID NO: 1885308
cuuggaaacaugugcaugu

SEQ ID NO: 2332329 - RNA, 19 nt, Artificial Sequence
  Description of Artificial Sequence: Synthetic oligonucleotide
  Antisense strand to SEQ ID NO: 2332328
acaugcacauguuuccaag

SEQ ID NO: 2332330 - RNA, 19 nt, Artificial Sequence
  Description of Artificial Sequence: Synthetic oligonucleotide
  Sense strand starting at position 933 of SEQ ID NO: 1885308
ugcagucugccugcguuau

SEQ ID NO: 2332331 - RNA, 19 nt, Artificial Sequence
  Description of Artificial Sequence: Synthetic oligonucleotide
  Antisense strand to SEQ ID NO: 2332330
auaacgcaggcagacugca

SEQ ID NO: 2332332 - RNA, 19 nt, Artificial Sequence
  Description of Artificial Sequence: Synthetic oligonucleotide
  Sense strand starting at position 1241 of SEQ ID NO: 1885308
gcgcauuccggaccuguga

SEQ ID NO: 2332333 - RNA, 19 nt, Artificial Sequence
  Description of Artificial Sequence: Synthetic oligonucleotide
  Antisense strand to SEQ ID NO: 2332332
ucacagguccggaaugcgc

SEQ ID NO: 2332334 - RNA, 19 nt, Artificial Sequence
  Description of Artificial Sequence: Synthetic oligonucleotide
  Sense strand starting at position 1303 of SEQ ID NO: 1885308
agaagaaagucuucgcaaa

SEQ ID NO: 2332335 - RNA, 19 nt, Artificial Sequence
  Description of Artificial Sequence: Synthetic oligonucleotide
  Antisense strand to SEQ ID NO: 2332334
uuugcgaagacuuucuucu

SEQ ID NO: 2332336 - RNA, 19 nt, Artificial Sequence
  Description of Artificial Sequence: Synthetic oligonucleotide
  Sense strand starting at position 1304 of SEQ ID NO: 1885308
gaagaaagucuucgcaaag

SEQ ID NO: 2332337 - RNA, 19 nt, Artificial Sequence
  Description of Artificial Sequence: Synthetic oligonucleotide
  Antisense strand to SEQ ID NO: 2332336
cuuugcgaagacuuucuuc

SEQ ID NO: 2332338 - RNA, 19 nt, Artificial Sequence
  Description of Artificial Sequence: Synthetic oligonucleotide
  Sense strand starting at position 1451 of SEQ ID NO: 1885308
gauggucgcaggugaagaa

SEQ ID NO: 2332339 - RNA, 19 nt, Artificial Sequence
  Description of Artificial Sequence: Synthetic oligonucleotide
  Antisense strand to SEQ ID NO: 2332338
uucuucaccugcgaccauc

SEQ ID NO: 2332340 - RNA, 19 nt, Artificial Sequence
  Description of Artificial Sequence: Synthetic oligonucleotide
  Sense strand starting at position 1722 of SEQ ID NO: 1885308
cugagugcugccuugucau

SEQ ID NO: 2332341 - RNA, 19 nt, Artificial Sequence
  Description of Artificial Sequence: Synthetic oligonucleotide
  Antisense strand to SEQ ID NO: 2332340
augacaaggcagcacucag

SEQ ID NO: 2332342 - RNA, 19 nt, Artificial Sequence
  Description of Artificial Sequence: Synthetic oligonucleotide
  Sense strand starting at position 1773 of SEQ ID NO: 1885308
ccgggaaggucuguuucua

SEQ ID NO: 2332343 - RNA, 19 nt, Artificial Sequence
  Description of Artificial Sequence: Synthetic oligonucleotide
  Antisense strand to SEQ ID NO: 2332342
uagaaacagaccuucccgg

SEQ ID NO: 2332344 - RNA, 19 nt, Artificial Sequence
  Description of Artificial Sequence: Synthetic oligonucleotide
  Sense strand starting at position 1983 of SEQ ID NO: 1885308
aagcuaaguccugacugca

SEQ ID NO: 2332345 - RNA, 19 nt, Artificial Sequence
  Description of Artificial Sequence: Synthetic oligonucleotide
  Antisense strand to SEQ ID NO: 2332344
ugcagucaggacuuagcuu

SEQ ID NO: 2332346 - RNA, 19 nt, Artificial Sequence
  Description of Artificial Sequence: Synthetic oligonucleotide
  Sense strand starting at position 2218 of SEQ ID NO: 1885308
ugagcugaugucuggaaga

SEQ ID NO: 2332347 - RNA, 19 nt, Artificial Sequence
  Description of Artificial Sequence: Synthetic oligonucleotide
  Antisense strand to SEQ ID NO: 2332346
ucuuccagacaucagcuca

SEQ ID NO: 2332348 - RNA, 19 nt, Artificial Sequence
  Description of Artificial Sequence: Synthetic oligonucleotide
  Sense strand starting at position 2475 of SEQ ID NO: 1885308
gagucauugccuguugcuu

SEQ ID NO: 2332349 - RNA, 19 nt, Artificial Sequence
  Description of Artificial Sequence: Synthetic oligonucleotide
  Antisense strand to SEQ ID NO: 2332348
aagcaacaggcaaugacuc

SEQ ID NO: 2332350 - RNA, 19 nt, Artificial Sequence
  Description of Artificial Sequence: Synthetic oligonucleotide
  Sense strand starting at position 2626 of SEQ ID NO: 1885308
gggagugaccaugggugaa

SEQ ID NO: 2332351 - RNA, 19 nt, Artificial Sequence
  Description of Artificial Sequence: Synthetic oligonucleotide
  Antisense strand to SEQ ID NO: 2332350
uucacccauggucacuccc

SEQ ID NO: 2332352 - RNA, 19 nt, Artificial Sequence
  Description of Artificial Sequence: Synthetic oligonucleotide
  Sense strand starting at position 2638 of SEQ ID NO: 1885308
gggugaagucgcgcuguga

SEQ ID NO: 2332353 - RNA, 19 nt, Artificial Sequence
  Description of Artificial Sequence: Synthetic oligonucleotide
  Antisense strand to SEQ ID NO: 2332352
ucacagcgcgacuucaccc

SEQ ID NO: 2332354 - RNA, 19 nt, Artificial Sequence
  Description of Artificial Sequence: Synthetic oligonucleotide
  Sense strand starting at position 2653 of SEQ ID NO: 1885308
gugagugacugccuguuau

SEQ ID NO: 2332355 - RNA, 19 nt, Artificial Sequence
  Description of Artificial Sequence: Synthetic oligonucleotide
  Antisense strand to SEQ ID NO: 2332354
auaacaggcagucacucac

SEQ ID NO: 2332356 - RNA, 19 nt, Artificial Sequence
  Description of Artificial Sequence: Synthetic oligonucleotide
  Sense strand starting at position 2659 of SEQ ID NO: 1885308
gacugccuguuaucacuga

SEQ ID NO: 2332357 - RNA, 19 nt, Artificial Sequence
  Description of Artificial Sequence: Synthetic oligonucleotide
  Antisense strand to SEQ ID NO: 2332356
ucagugauaacaggcaguc

SEQ ID NO: 2332358 - RNA, 19 nt, Artificial Sequence
  Description of Artificial Sequence: Synthetic oligonucleotide
  Sense strand starting at position 2663 of SEQ ID NO: 1885308
gccuguuaucacugaccac

SEQ ID NO: 2332359 - RNA, 19 nt, Artificial Sequence
  Description of Artificial Sequence: Synthetic oligonucleotide
  Antisense strand to SEQ ID NO: 2332358
guggucagugauaacaggc

SEQ ID NO: 2332360 - RNA, 19 nt, Artificial Sequence
  Description of Artificial Sequence: Synthetic oligonucleotide
  Sense strand starting at position 2876 of SEQ ID NO: 1885308
uucaguucugcccgaggau

SEQ ID NO: 2332361 - RNA, 19 nt, Artificial Sequence
  Description of Artificial Sequence: Synthetic oligonucleotide
  Antisense strand to SEQ ID NO: 2332360
auccucgggcagaacugaa

SEQ ID NO: 2332362 - RNA, 19 nt, Artificial Sequence
  Description of Artificial Sequence: Synthetic oligonucleotide
  Sense strand starting at position 2877 of SEQ ID NO: 1885308
ucaguucugcccgaggauc

SEQ ID NO: 2332363 - RNA, 19 nt, Artificial Sequence
  Description of Artificial Sequence: Synthetic oligonucleotide
  Antisense strand to SEQ ID NO: 2332362
gauccucgggcagaacuga

SEQ ID NO: 2332364 - RNA, 19 nt, Artificial Sequence
  Description of Artificial Sequence: Synthetic oligonucleotide
  Sense strand starting at position 2985 of SEQ ID NO: 1885308
aguggacuuacguggacaa

SEQ ID NO: 2332365 - RNA, 19 nt, Artificial Sequence
  Description of Artificial Sequence: Synthetic oligonucleotide
  Antisense strand to SEQ ID NO: 2332364
uuguccacguaaguccacu

SEQ ID NO: 2332366 - RNA, 19 nt, Artificial Sequence
  Description of Artificial Sequence: Synthetic oligonucleotide
  Sense strand starting at position 2986 of SEQ ID NO: 1885308
guggacuuacguggacaaa

SEQ ID NO: 2332367 - RNA, 19 nt, Artificial Sequence
  Description of Artificial Sequence: Synthetic oligonucleotide
  Antisense strand to SEQ ID NO: 2332366
uuuguccacguaaguccac

SEQ ID NO: 2332368 - RNA, 19 nt, Artificial Sequence
  Description of Artificial Sequence: Synthetic oligonucleotide
  Sense strand starting at position 3063 of SEQ ID NO: 1885308
acgugcauuucugcagauu

SEQ ID NO: 2332369 - RNA, 19 nt, Artificial Sequence
  Description of Artificial Sequence: Synthetic oligonucleotide
  Antisense strand to SEQ ID NO: 2332368
aaucugcagaaaugcacgu

SEQ ID NO: 2332370 - RNA, 19 nt, Artificial Sequence
  Description of Artificial Sequence: Synthetic oligonucleotide
  Sense strand starting at position 3158 of SEQ ID NO: 1885308
ccaggaaccucccaggaau

SEQ ID NO: 2332371 - RNA, 19 nt, Artificial Sequence
  Description of Artificial Sequence: Synthetic oligonucleotide
  Antisense strand to SEQ ID NO: 2332370
auuccugggagguuccugg

SEQ ID NO: 2332372 - RNA, 19 nt, Artificial Sequence
  Description of Artificial Sequence: Synthetic oligonucleotide
  Sense strand starting at position 3177 of SEQ ID NO: 1885308
gugacugugccuggagaga

SEQ ID NO: 2332373 - RNA, 19 nt, Artificial Sequence
  Description of Artificial Sequence: Synthetic oligonucleotide
  Antisense strand to SEQ ID NO: 2332372
ucucuccaggcacagucac

SEQ ID NO: 2332374 - RNA, 19 nt, Artificial Sequence
  Description of Artificial Sequence: Synthetic oligonucleotide
  Sense strand starting at position 3454 of SEQ ID NO: 1885308
cugagcugucucuagugau

SEQ ID NO: 2332375 - RNA, 19 nt, Artificial Sequence
  Description of Artificial Sequence: Synthetic oligonucleotide
  Antisense strand to SEQ ID NO: 2332374
aucacuagagacagcucag

SEQ ID NO: 2332376 - RNA, 19 nt, Artificial Sequence
  Description of Artificial Sequence: Synthetic oligonucleotide
  Sense strand starting at position 3460 of SEQ ID NO: 1885308
ugucucuagugaucucuca

SEQ ID NO: 2332377 - RNA, 19 nt, Artificial Sequence
  Description of Artificial Sequence: Synthetic oligonucleotide
  Antisense strand to SEQ ID NO: 2332376
ugagagaucacuagagaca

SEQ ID NO: 2332378 - RNA, 19 nt, Artificial Sequence
  Description of Artificial Sequence: Synthetic oligonucleotide
  Sense strand starting at position 3517 of SEQ ID NO: 1885308
guguguccucgccuccaaa

SEQ ID NO: 2332379 - RNA, 19 nt, Artificial Sequence
  Description of Artificial Sequence: Synthetic oligonucleotide
  Antisense strand to SEQ ID NO: 2332378
uuuggaggcgaggacacac

SEQ ID NO: 2332380 - RNA, 19 nt, Artificial Sequence
  Description of Artificial Sequence: Synthetic oligonucleotide
  Sense strand starting at position 3739 of SEQ ID NO: 1885308
accuguaaagugggaguau

SEQ ID NO: 2332381 - RNA, 19 nt, Artificial Sequence
  Description of Artificial Sequence: Synthetic oligonucleotide
  Antisense strand to SEQ ID NO: 2332380
auacucccacuuuacaggu

SEQ ID NO: 2332382 - RNA, 19 nt, Artificial Sequence
  Description of Artificial Sequence: Synthetic oligonucleotide
  Sense strand starting at position 3770 of SEQ ID NO: 1885308
caucaaagggccuggauua

SEQ ID NO: 2332383 - RNA, 19 nt, Artificial Sequence
  Description of Artificial Sequence: Synthetic oligonucleotide
  Antisense strand to SEQ ID NO: 2332382
uaauccaggcccuuugaug

SEQ ID NO: 2332384 - RNA, 19 nt, Artificial Sequence
  Description of Artificial Sequence: Synthetic oligonucleotide
  Sense strand starting at position 366 of SEQ ID NO: 1885309
auaugccagccagaauuaa

SEQ ID NO: 2332385 - RNA, 19 nt, Artificial Sequence
  Description of Artificial Sequence: Synthetic oligonucleotide
  Antisense strand to SEQ ID NO: 2332384
uuaauucuggcuggcauau

SEQ ID NO: 2332386 - RNA, 19 nt, Artificial Sequence
  Description of Artificial Sequence: Synthetic oligonucleotide
  Sense strand starting at position 461 of SEQ ID NO: 1885309
gccaguauuaaaugggauc

SEQ ID NO: 2332387 - RNA, 19 nt, Artificial Sequence
  Description of Artificial Sequence: Synthetic oligonucleotide
  Antisense strand to SEQ ID NO: 2332386
gaucccauuuaauacuggc

SEQ ID NO: 2332388 - RNA, 19 nt, Artificial Sequence
  Description of Artificial Sequence: Synthetic oligonucleotide
  Sense strand starting at position 748 of SEQ ID NO: 1885309
gugccaaguuagucauaga

SEQ ID NO: 2332389 - RNA, 19 nt, Artificial Sequence
  Description of Artificial Sequence: Synthetic oligonucleotide
  Antisense strand to SEQ ID NO: 2332388
ucuaugacuaacuuggcac

SEQ ID NO: 2332390 - RNA, 19 nt, Artificial Sequence
  Description of Artificial Sequence: Synthetic oligonucleotide
  Sense strand starting at position 793 of SEQ ID NO: 1885309
cugauauucuuaguuguuu

SEQ ID NO: 2332391 - RNA, 19 nt, Artificial Sequence
  Description of Artificial Sequence: Synthetic oligonucleotide
  Antisense strand to SEQ ID NO: 2332390
aaacaacuaagaauaucag

SEQ ID NO: 2332392 - RNA, 19 nt, Artificial Sequence
  Description of Artificial Sequence: Synthetic oligonucleotide
  Sense strand starting at position 1043 of SEQ ID NO: 1885309
uugugugauaauugcagga

SEQ ID NO: 2332393 - RNA, 19 nt, Artificial Sequence
  Description of Artificial Sequence: Synthetic oligonucleotide
  Antisense strand to SEQ ID NO: 2332392
uccugcaauuaucacacaa

SEQ ID NO: 2332394 - RNA, 19 nt, Artificial Sequence
  Description of Artificial Sequence: Synthetic oligonucleotide
  Sense strand starting at position 1047 of SEQ ID NO: 1885309
gugauaauugcaggaucuc

SEQ ID NO: 2332395 - RNA, 19 nt, Artificial Sequence
  Description of Artificial Sequence: Synthetic oligonucleotide
  Antisense strand to SEQ ID NO: 2332394
gagauccugcaauuaucac

SEQ ID NO: 2332396 - RNA, 19 nt, Artificial Sequence
  Description of Artificial Sequence: Synthetic oligonucleotide
  Sense strand starting at position 1067 of SEQ ID NO: 1885309
gggcaauauccuugcaaau

SEQ ID NO: 2332397 - RNA, 19 nt, Artificial Sequence
  Description of Artificial Sequence: Synthetic oligonucleotide
  Antisense strand to SEQ ID NO: 2332396
auuugcaaggauauugccc

SEQ ID NO: 2332398 - RNA, 19 nt, Artificial Sequence
  Description of Artificial Sequence: Synthetic oligonucleotide
  Sense strand starting at position 1098 of SEQ ID NO: 1885309
guucuuggaugucuuuauu

SEQ ID NO: 2332399 - RNA, 19 nt, Artificial Sequence
  Description of Artificial Sequence: Synthetic oligonucleotide
  Antisense strand to SEQ ID NO: 2332398
aauaaagacauccaagaac

SEQ ID NO: 2332400 - RNA, 19 nt, Artificial Sequence
  Description of Artificial Sequence: Synthetic oligonucleotide
  Sense strand starting at position 1166 of SEQ ID NO: 1885309
guaccuggcucugugauaa

SEQ ID NO: 2332401 - RNA, 19 nt, Artificial Sequence
  Description of Artificial Sequence: Synthetic oligonucleotide
  Antisense strand to SEQ ID NO: 2332400
uuaucacagagccagguac

SEQ ID NO: 2332402 - RNA, 19 nt, Artificial Sequence
  Description of Artificial Sequence: Synthetic oligonucleotide
  Sense strand starting at position 1174 of SEQ ID NO: 1885309
cucugugauaauugugaag

SEQ ID NO: 2332403 - RNA, 19 nt, Artificial Sequence
  Description of Artificial Sequence: Synthetic oligonucleotide
  Antisense strand to SEQ ID NO: 2332402
cuucacaauuaucacagag

SEQ ID NO: 2332404 - RNA, 19 nt, Artificial Sequence
  Description of Artificial Sequence: Synthetic oligonucleotide
  Sense strand starting at position 1517 of SEQ ID NO: 1885309
agccuaccacugugagaau

SEQ ID NO: 2332405 - RNA, 19 nt, Artificial Sequence
  Description of Artificial Sequence: Synthetic oligonucleotide
  Antisense strand to SEQ ID NO: 2332404
auucucacagugguaggcu

SEQ ID NO: 2332406 - RNA, 19 nt, Artificial Sequence
  Description of Artificial Sequence: Synthetic oligonucleotide
  Sense strand starting at position 1584 of SEQ ID NO: 1885309
guuuguguuauugaucaga

SEQ ID NO: 2332407 - RNA, 19 nt, Artificial Sequence
  Description of Artificial Sequence: Synthetic oligonucleotide
  Antisense strand to SEQ ID NO: 2332406
ucugaucaauaacacaaac

SEQ ID NO: 2332408 - RNA, 19 nt, Artificial Sequence
  Description of Artificial Sequence: Synthetic oligonucleotide
  Sense strand starting at position 1586 of SEQ ID NO: 1885309
uuguguuauugaucagacu

SEQ ID NO: 2332409 - RNA, 19 nt, Artificial Sequence
  Description of Artificial Sequence: Synthetic oligonucleotide
  Antisense strand to SEQ ID NO: 2332408
agucugaucaauaacacaa

SEQ ID NO: 2332410 - RNA, 19 nt, Artificial Sequence
  Description of Artificial Sequence: Synthetic oligonucleotide
  Sense strand starting at position 1587 of SEQ ID NO: 1885309
uguguuauugaucagacuu

SEQ ID NO: 2332411 - RNA, 19 nt, Artificial Sequence
  Description of Artificial Sequence: Synthetic oligonucleotide
  Antisense strand to SEQ ID NO: 2332410
aagucugaucaauaacaca

SEQ ID NO: 2332412 - RNA, 19 nt, Artificial Sequence
  Description of Artificial Sequence: Synthetic oligonucleotide
  Sense strand starting at position 1610 of SEQ ID NO: 1885309
ucaacaguagucuauuaau

SEQ ID NO: 2332413 - RNA, 19 nt, Artificial Sequence
  Description of Artificial Sequence: Synthetic oligonucleotide
  Antisense strand to SEQ ID NO: 2332412
auuaauagacuacuguuga

SEQ ID NO: 2332414 - RNA, 19 nt, Artificial Sequence
  Description of Artificial Sequence: Synthetic oligonucleotide
  Sense strand starting at position 1801 of SEQ ID NO: 1885309
augggauucuaggagagaa

SEQ ID NO: 2332415 - RNA, 19 nt, Artificial Sequence
  Description of Artificial Sequence: Synthetic oligonucleotide
  Antisense strand to SEQ ID NO: 2332414
uucucuccuagaaucccau

SEQ ID NO: 2332416 - RNA, 19 nt, Artificial Sequence
  Description of Artificial Sequence: Synthetic oligonucleotide
  Sense strand starting at position 1870 of SEQ ID NO: 1885309
aaauguacguacuuuagau

SEQ ID NO: 2332417 - RNA, 19 nt, Artificial Sequence
  Description of Artificial Sequence: Synthetic oligonucleotide
  Antisense strand to SEQ ID NO: 2332416
aucuaaaguacguacauuu

SEQ ID NO: 2332418 - RNA, 19 nt, Artificial Sequence
  Description of Artificial Sequence: Synthetic oligonucleotide
  Sense strand starting at position 1872 of SEQ ID NO: 1885309
auguacguacuuuagauau

SEQ ID NO: 2332419 - RNA, 19 nt, Artificial Sequence
  Description of Artificial Sequence: Synthetic oligonucleotide
  Antisense strand to SEQ ID NO: 2332418
auaucuaaaguacguacau

SEQ ID NO: 2332420 - RNA, 19 nt, Artificial Sequence
  Description of Artificial Sequence: Synthetic oligonucleotide
  Sense strand starting at position 2207 of SEQ ID NO: 1885309
uguacuuaggguuguaaug

SEQ ID NO: 2332421 - RNA, 19 nt, Artificial Sequence
  Description of Artificial Sequence: Synthetic oligonucleotide
  Antisense strand to SEQ ID NO: 2332420
cauuacaacccuaaguaca

SEQ ID NO: 2332422 - RNA, 19 nt, Artificial Sequence
  Description of Artificial Sequence: Synthetic oligonucleotide
  Sense strand starting at position 2217 of SEQ ID NO: 1885309
guuguaaugcuauaaucaa

SEQ ID NO: 2332423 - RNA, 19 nt, Artificial Sequence
  Description of Artificial Sequence: Synthetic oligonucleotide
  Antisense strand to SEQ ID NO: 2332422
uugauuauagcauuacaac

SEQ ID NO: 2332424 - RNA, 19 nt, Artificial Sequence
  Description of Artificial Sequence: Synthetic oligonucleotide
  Sense strand starting at position 2325 of SEQ ID NO: 1885309
uuucuauuagauuauggca

SEQ ID NO: 2332425 - RNA, 19 nt, Artificial Sequence
  Description of Artificial Sequence: Synthetic oligonucleotide
  Antisense strand to SEQ ID NO: 2332424
ugccauaaucuaauagaaa

SEQ ID NO: 2332426 - RNA, 19 nt, Artificial Sequence
  Description of Artificial Sequence: Synthetic oligonucleotide
  Sense strand starting at position 2479 of SEQ ID NO: 1885309
aguacagggucuucuggaa

SEQ ID NO: 2332427 - RNA, 19 nt, Artificial Sequence
  Description of Artificial Sequence: Synthetic oligonucleotide
  Antisense strand to SEQ ID NO: 2332426
uuccagaagacccuguacu

SEQ ID NO: 2332428 - RNA, 19 nt, Artificial Sequence
  Description of Artificial Sequence: Synthetic oligonucleotide
  Sense strand starting at position 2504 of SEQ ID NO: 1885309
gguagcauacaguaaaugu

SEQ ID NO: 2332429 - RNA, 19 nt, Artificial Sequence
  Description of Artificial Sequence: Synthetic oligonucleotide
  Antisense strand to SEQ ID NO: 2332428
acauuuacuguaugcuacc

SEQ ID NO: 2332430 - RNA, 19 nt, Artificial Sequence
  Description of Artificial Sequence: Synthetic oligonucleotide
  Sense strand starting at position 2574 of SEQ ID NO: 1885309
uaaggcaguguguacuaaa

SEQ ID NO: 2332431 - RNA, 19 nt, Artificial Sequence
  Description of Artificial Sequence: Synthetic oligonucleotide
  Antisense strand to SEQ ID NO: 2332430
uuuaguacacacugccuua

SEQ ID NO: 2332432 - RNA, 19 nt, Artificial Sequence
  Description of Artificial Sequence: Synthetic oligonucleotide
  Sense strand starting at position 2754 of SEQ ID NO: 1885309
uggucaugcaguugauuga

SEQ ID NO: 2332433 - RNA, 19 nt, Artificial Sequence
  Description of Artificial Sequence: Synthetic oligonucleotide
  Antisense strand to SEQ ID NO: 2332432
ucaaucaacugcaugacca

SEQ ID NO: 2332434 - RNA, 19 nt, Artificial Sequence
  Description of Artificial Sequence: Synthetic oligonucleotide
  Sense strand starting at position 2758 of SEQ ID NO: 1885309
caugcaguugauugacaga

SEQ ID NO: 2332435 - RNA, 19 nt, Artificial Sequence
  Description of Artificial Sequence: Synthetic oligonucleotide
  Antisense strand to SEQ ID NO: 2332434
ucugucaaucaacugcaug

SEQ ID NO: 2332436 - RNA, 19 nt, Artificial Sequence
  Description of Artificial Sequence: Synthetic oligonucleotide
  Sense strand starting at position 2795 of SEQ ID NO: 1885309
augcauugauucccaggaa

SEQ ID NO: 2332437 - RNA, 19 nt, Artificial Sequence
  Description of Artificial Sequence: Synthetic oligonucleotide
  Antisense strand to SEQ ID NO: 2332436
uuccugggaaucaaugcau

SEQ ID NO: 2332438 - RNA, 19 nt, Artificial Sequence
  Description of Artificial Sequence: Synthetic oligonucleotide
  Sense strand starting at position 2837 of SEQ ID NO: 1885309
ucaccagauuguucuauga

SEQ ID NO: 2332439 - RNA, 19 nt, Artificial Sequence
  Description of Artificial Sequence: Synthetic oligonucleotide
  Antisense strand to SEQ ID NO: 2332438
ucauagaacaaucugguga

SEQ ID NO: 2332440 - RNA, 19 nt, Artificial Sequence
  Description of Artificial Sequence: Synthetic oligonucleotide
  Sense strand starting at position 2845 of SEQ ID NO: 1885309
uuguucuaugacuauaugu

SEQ ID NO: 2332441 - RNA, 19 nt, Artificial Sequence
  Description of Artificial Sequence: Synthetic oligonucleotide
  Antisense strand to SEQ ID NO: 2332440
acauauagucauagaacaa

SEQ ID NO: 2332442 - RNA, 19 nt, Artificial Sequence
  Description of Artificial Sequence: Synthetic oligonucleotide
  Sense strand starting at position 2852 of SEQ ID NO: 1885309
augacuauauguccgugau

SEQ ID NO: 2332443 - RNA, 19 nt, Artificial Sequence
  Description of Artificial Sequence: Synthetic oligonucleotide
  Antisense strand to SEQ ID NO: 2332442
aucacggacauauagucau

SEQ ID NO: 2332444 - RNA, 19 nt, Artificial Sequence
  Description of Artificial Sequence: Synthetic oligonucleotide
  Sense strand starting at position 2853 of SEQ ID NO: 1885309
ugacuauauguccgugaug

SEQ ID NO: 2332445 - RNA, 19 nt, Artificial Sequence
  Description of Artificial Sequence: Synthetic oligonucleotide
  Antisense strand to SEQ ID NO: 2332444
caucacggacauauaguca

SEQ ID NO: 2332446 - RNA, 19 nt, Artificial Sequence
  Description of Artificial Sequence: Synthetic oligonucleotide
  Sense strand starting at position 2994 of SEQ ID NO: 1885309
aauguaugcugugugggaa

SEQ ID NO: 2332447 - RNA, 19 nt, Artificial Sequence
  Description of Artificial Sequence: Synthetic oligonucleotide
  Antisense strand to SEQ ID NO: 2332446
uucccacacagcauacauu

SEQ ID NO: 2332448 - RNA, 19 nt, Artificial Sequence
  Description of Artificial Sequence: Synthetic oligonucleotide
  Sense strand starting at position 3099 of SEQ ID NO: 1885309
cacuguaaccaaggaguuu

SEQ ID NO: 2332449 - RNA, 19 nt, Artificial Sequence
  Description of Artificial Sequence: Synthetic oligonucleotide
  Antisense strand to SEQ ID NO: 2332448
aaacuccuugguuacagug

SEQ ID NO: 2332450 - RNA, 19 nt, Artificial Sequence
  Description of Artificial Sequence: Synthetic oligonucleotide
  Sense strand starting at position 3111 of SEQ ID NO: 1885309
ggaguuuccugccuagaaa

SEQ ID NO: 2332451 - RNA, 19 nt, Artificial Sequence
  Description of Artificial Sequence: Synthetic oligonucleotide
  Antisense strand to SEQ ID NO: 2332450
uuucuaggcaggaaacucc

SEQ ID NO: 2332452 - RNA, 19 nt, Artificial Sequence
  Description of Artificial Sequence: Synthetic oligonucleotide
  Sense strand starting at position 3112 of SEQ ID NO: 1885309
gaguuuccugccuagaaau

SEQ ID NO: 2332453 - RNA, 19 nt, Artificial Sequence
  Description of Artificial Sequence: Synthetic oligonucleotide
  Antisense strand to SEQ ID NO: 2332452
auuucuaggcaggaaacuc

SEQ ID NO: 2332454 - RNA, 19 nt, Artificial Sequence
  Description of Artificial Sequence: Synthetic oligonucleotide
  Sense strand starting at position 3190 of SEQ ID NO: 1885309
agcuuuauucuuuguaaug

SEQ ID NO: 2332455 - RNA, 19 nt, Artificial Sequence
  Description of Artificial Sequence: Synthetic oligonucleotide
  Antisense strand to SEQ ID NO: 2332454
cauuacaaagaauaaagcu

SEQ ID NO: 2332456 - RNA, 19 nt, Artificial Sequence
  Description of Artificial Sequence: Synthetic oligonucleotide
  Sense strand starting at position 3191 of SEQ ID NO: 1885309
gcuuuauucuuuguaauga

SEQ ID NO: 2332457 - RNA, 19 nt, Artificial Sequence
  Description of Artificial Sequence: Synthetic oligonucleotide
  Antisense strand to SEQ ID NO: 2332456
ucauuacaaagaauaaagc

SEQ ID NO: 2332458 - RNA, 19 nt, Artificial Sequence
  Description of Artificial Sequence: Synthetic oligonucleotide
  Sense strand starting at position 3221 of SEQ ID NO: 1885309
cuguccaaguuucuacaga

SEQ ID NO: 2332459 - RNA, 19 nt, Artificial Sequence
  Description of Artificial Sequence: Synthetic oligonucleotide
  Antisense strand to SEQ ID NO: 2332458
ucuguagaaacuuggacag

SEQ ID NO: 2332460 - RNA, 19 nt, Artificial Sequence
  Description of Artificial Sequence: Synthetic oligonucleotide
  Sense strand starting at position 3357 of SEQ ID NO: 1885309
uuuccagaaggugauguau

SEQ ID NO: 2332461 - RNA, 19 nt, Artificial Sequence
  Description of Artificial Sequence: Synthetic oligonucleotide
  Antisense strand to SEQ ID NO: 2332460
auacaucaccuucuggaaa

SEQ ID NO: 2332462 - RNA, 19 nt, Artificial Sequence
  Description of Artificial Sequence: Synthetic oligonucleotide
  Sense strand starting at position 3485 of SEQ ID NO: 1885309
acacauaugggcuaucuuu

SEQ ID NO: 2332463 - RNA, 19 nt, Artificial Sequence
  Description of Artificial Sequence: Synthetic oligonucleotide
  Antisense strand to SEQ ID NO: 2332462
aaagauagcccauaugugu

SEQ ID NO: 2332464 - RNA, 19 nt, Artificial Sequence
  Description of Artificial Sequence: Synthetic oligonucleotide
  Sense strand starting at position 222 of SEQ ID NO: 1885310
ugugucuuuccauggagga

SEQ ID NO: 2332465 - RNA, 19 nt, Artificial Sequence
  Description of Artificial Sequence: Synthetic oligonucleotide
  Antisense strand to SEQ ID NO: 2332464
uccuccauggaaagacaca

SEQ ID NO: 2332466 - RNA, 19 nt, Artificial Sequence
  Description of Artificial Sequence: Synthetic oligonucleotide
  Sense strand starting at position 223 of SEQ ID NO: 1885310
gugucuuuccauggaggaa

SEQ ID NO: 2332467 - RNA, 19 nt, Artificial Sequence
  Description of Artificial Sequence: Synthetic oligonucleotide
  Antisense strand to SEQ ID NO: 2332466
uuccuccauggaaagacac

SEQ ID NO: 2332468 - RNA, 19 nt, Artificial Sequence
  Description of Artificial Sequence: Synthetic oligonucleotide
  Sense strand starting at position 348 of SEQ ID NO: 1885310
agcauaagccaucagcaga

SEQ ID NO: 2332469 - RNA, 19 nt, Artificial Sequence
  Description of Artificial Sequence: Synthetic oligonucleotide
  Antisense strand to SEQ ID NO: 2332468
ucugcugauggcuuaugcu

SEQ ID NO: 2332470 - RNA, 19 nt, Artificial Sequence
  Description of Artificial Sequence: Synthetic oligonucleotide
  Sense strand starting at position 665 of SEQ ID NO: 1885310
uacugagauugauagggaa

SEQ ID NO: 2332471 - RNA, 19 nt, Artificial Sequence
  Description of Artificial Sequence: Synthetic oligonucleotide
  Antisense strand to SEQ ID NO: 2332470
uucccuaucaaucucagua

SEQ ID NO: 2332472 - RNA, 19 nt, Artificial Sequence
  Description of Artificial Sequence: Synthetic oligonucleotide
  Sense strand starting at position 737 of SEQ ID NO: 1885310
agggcuuacucuucucuca

SEQ ID NO: 2332473 - RNA, 19 nt, Artificial Sequence
  Description of Artificial Sequence: Synthetic oligonucleotide
  Antisense strand to SEQ ID NO: 2332472
ugagagaagaguaagcccu

SEQ ID NO: 2332474 - RNA, 19 nt, Artificial Sequence
  Description of Artificial Sequence: Synthetic oligonucleotide
  Sense strand starting at position 838 of SEQ ID NO: 1885310
ucaugaggcuuucucagga

SEQ ID NO: 2332475 - RNA, 19 nt, Artificial Sequence
  Description of Artificial Sequence: Synthetic oligonucleotide
  Antisense strand to SEQ ID NO: 2332474
uccugagaaagccucauga

SEQ ID NO: 2332476 - RNA, 19 nt, Artificial Sequence
  Description of Artificial Sequence: Synthetic oligonucleotide
  Sense strand starting at position 863 of SEQ ID NO: 1885310
cugcaaguugucuauuaag

SEQ ID NO: 2332477 - RNA, 19 nt, Artificial Sequence
  Description of Artificial Sequence: Synthetic oligonucleotide
  Antisense strand to SEQ ID NO: 2332476
cuuaauagacaacuugcag

SEQ ID NO: 2332478 - RNA, 19 nt, Artificial Sequence
  Description of Artificial Sequence: Synthetic oligonucleotide
  Sense strand starting at position 1043 of SEQ ID NO: 1885310
uucucuuggugacugacaa

SEQ ID NO: 2332479 - RNA, 19 nt, Artificial Sequence
  Description of Artificial Sequence: Synthetic oligonucleotide
  Antisense strand to SEQ ID NO: 2332478
uugucagucaccaagagaa

SEQ ID NO: 2332480 - RNA, 19 nt, Artificial Sequence
  Description of Artificial Sequence: Synthetic oligonucleotide
  Sense strand starting at position 1154 of SEQ ID NO: 1885310
uggaaacccugcuugacua

SEQ ID NO: 2332481 - RNA, 19 nt, Artificial Sequence
  Description of Artificial Sequence: Synthetic oligonucleotide
  Antisense strand to SEQ ID NO: 2332480
uagucaagcaggguuucca

SEQ ID NO: 2332482 - RNA, 19 nt, Artificial Sequence
  Description of Artificial Sequence: Synthetic oligonucleotide
  Sense strand starting at position 1155 of SEQ ID NO: 1885310
ggaaacccugcuugacuaa

SEQ ID NO: 2332483 - RNA, 19 nt, Artificial Sequence
  Description of Artificial Sequence: Synthetic oligonucleotide
  Antisense strand to SEQ ID NO: 2332482
uuagucaagcaggguuucc

SEQ ID NO: 2332484 - RNA, 19 nt, Artificial Sequence
  Description of Artificial Sequence: Synthetic oligonucleotide
  Sense strand starting at position 1435 of SEQ ID NO: 1885310
cuuguaguaggauggagau

SEQ ID NO: 2332485 - RNA, 19 nt, Artificial Sequence
  Description of Artificial Sequence: Synthetic oligonucleotide
  Antisense strand to SEQ ID NO: 2332484
aucuccauccuacuacaag

SEQ ID NO: 2332486 - RNA, 19 nt, Artificial Sequence
  Description of Artificial Sequence: Synthetic oligonucleotide
  Sense strand starting at position 1832 of SEQ ID NO: 1885310
caccuuugguugccacaga

SEQ ID NO: 2332487 - RNA, 19 nt, Artificial Sequence
  Description of Artificial Sequence: Synthetic oligonucleotide
  Antisense strand to SEQ ID NO: 2332486
ucuguggcaaccaaaggug

SEQ ID NO: 2332488 - RNA, 19 nt, Artificial Sequence
  Description of Artificial Sequence: Synthetic oligonucleotide
  Sense strand starting at position 1886 of SEQ ID NO: 1885310
aaauguggcugaguuguaa

SEQ ID NO: 2332489 - RNA, 19 nt, Artificial Sequence
  Description of Artificial Sequence: Synthetic oligonucleotide
  Antisense strand to SEQ ID NO: 2332488
uuacaacucagccacauuu

SEQ ID NO: 2332490 - RNA, 19 nt, Artificial Sequence
  Description of Artificial Sequence: Synthetic oligonucleotide
  Sense strand starting at position 2203 of SEQ ID NO: 1885310
cugacuuugacugggcaga

SEQ ID NO: 2332491 - RNA, 19 nt, Artificial Sequence
  Description of Artificial Sequence: Synthetic oligonucleotide
  Antisense strand to SEQ ID NO: 2332490
ucugcccagucaaagucag

SEQ ID NO: 2332492 - RNA, 19 nt, Artificial Sequence
  Description of Artificial Sequence: Synthetic oligonucleotide
  Sense strand starting at position 2204 of SEQ ID NO: 1885310
ugacuuugacugggcagau

SEQ ID NO: 2332493 - RNA, 19 nt, Artificial Sequence
  Description of Artificial Sequence: Synthetic oligonucleotide
  Antisense strand to SEQ ID NO: 2332492
aucugcccagucaaaguca

SEQ ID NO: 2332494 - RNA, 19 nt, Artificial Sequence
  Description of Artificial Sequence: Synthetic oligonucleotide
  Sense strand starting at position 2205 of SEQ ID NO: 1885310
gacuuugacugggcagaua

SEQ ID NO: 2332495 - RNA, 19 nt, Artificial Sequence
  Description of Artificial Sequence: Synthetic oligonucleotide
  Antisense strand to SEQ ID NO: 2332494
uaucugcccagucaaaguc

SEQ ID NO: 2332496 - RNA, 19 nt, Artificial Sequence
  Description of Artificial Sequence: Synthetic oligonucleotide
  Sense strand starting at position 2237 of SEQ ID NO: 1885310
gucugaaagucaucauaau

SEQ ID NO: 2332497 - RNA, 19 nt, Artificial Sequence
  Description of Artificial Sequence: Synthetic oligonucleotide
  Antisense strand to SEQ ID NO: 2332496
auuaugaugacuuucagac

SEQ ID NO: 2332498 - RNA, 19 nt, Artificial Sequence
  Description of Artificial Sequence: Synthetic oligonucleotide
  Sense strand starting at position 2248 of SEQ ID NO: 1885310
aucauaauacuuggaaugu

SEQ ID NO: 2332499 - RNA, 19 nt, Artificial Sequence
  Description of Artificial Sequence: Synthetic oligonucleotide
  Antisense strand to SEQ ID NO: 2332498
acauuccaaguauuaugau

SEQ ID NO: 2332500 - RNA, 19 nt, Artificial Sequence
  Description of Artificial Sequence: Synthetic oligonucleotide
  Sense strand starting at position 2488 of SEQ ID NO: 1885310
auaucuuugcuaugggaaa

SEQ ID NO: 2332501 - RNA, 19 nt, Artificial Sequence
  Description of Artificial Sequence: Synthetic oligonucleotide
  Antisense strand to SEQ ID NO: 2332500
uuucccauagcaaagauau

SEQ ID NO: 2332502 - RNA, 19 nt, Artificial Sequence
  Description of Artificial Sequence: Synthetic oligonucleotide
  Sense strand starting at position 2500 of SEQ ID NO: 1885310
ugggaaauagcuuguuaaa

SEQ ID NO: 2332503 - RNA, 19 nt, Artificial Sequence
  Description of Artificial Sequence: Synthetic oligonucleotide
  Antisense strand to SEQ ID NO: 2332502
uuuaacaagcuauuuccca

SEQ ID NO: 2332504 - RNA, 19 nt, Artificial Sequence
  Description of Artificial Sequence: Synthetic oligonucleotide
  Sense strand starting at position 2502 of SEQ ID NO: 1885310
ggaaauagcuuguuaaaug

SEQ ID NO: 2332505 - RNA, 19 nt, Artificial Sequence
  Description of Artificial Sequence: Synthetic oligonucleotide
  Antisense strand to SEQ ID NO: 2332504
cauuuaacaagcuauuucc

SEQ ID NO: 2332506 - RNA, 19 nt, Artificial Sequence
  Description of Artificial Sequence: Synthetic oligonucleotide
  Sense strand starting at position 2584 of SEQ ID NO: 1885310
ugggaauuagauuggguau

SEQ ID NO: 2332507 - RNA, 19 nt, Artificial Sequence
  Description of Artificial Sequence: Synthetic oligonucleotide
  Antisense strand to SEQ ID NO: 2332506
auacccaaucuaauuccca

SEQ ID NO: 2332508 - RNA, 19 nt, Artificial Sequence
  Description of Artificial Sequence: Synthetic oligonucleotide
  Sense strand starting at position 2585 of SEQ ID NO: 1885310
gggaauuagauuggguauu

SEQ ID NO: 2332509 - RNA, 19 nt, Artificial Sequence
  Description of Artificial Sequence: Synthetic oligonucleotide
  Antisense strand to SEQ ID NO: 2332508
aauacccaaucuaauuccc

SEQ ID NO: 2332510 - RNA, 19 nt, Artificial Sequence
  Description of Artificial Sequence: Synthetic oligonucleotide
  Sense strand starting at position 2587 of SEQ ID NO: 1885310
gaauuagauuggguauucu

SEQ ID NO: 2332511 - RNA, 19 nt, Artificial Sequence
  Description of Artificial Sequence: Synthetic oligonucleotide
  Antisense strand to SEQ ID NO: 2332510
agaauacccaaucuaauuc

SEQ ID NO: 2332512 - RNA, 19 nt, Artificial Sequence
  Description of Artificial Sequence: Synthetic oligonucleotide
  Sense strand starting at position 2591 of SEQ ID NO: 1885310
uagauuggguauucugauu

SEQ ID NO: 2332513 - RNA, 19 nt, Artificial Sequence
  Description of Artificial Sequence: Synthetic oligonucleotide
  Antisense strand to SEQ ID NO: 2332512
aaucagaauacccaaucua

SEQ ID NO: 2332514 - RNA, 19 nt, Artificial Sequence
  Description of Artificial Sequence: Synthetic oligonucleotide
  Sense strand starting at position 2915 of SEQ ID NO: 1885310
gcaccagaaguguagucau

SEQ ID NO: 2332515 - RNA, 19 nt, Artificial Sequence
  Description of Artificial Sequence: Synthetic oligonucleotide
  Antisense strand to SEQ ID NO: 2332514
augacuacacuucuggugc

SEQ ID NO: 2332516 - RNA, 19 nt, Artificial Sequence
  Description of Artificial Sequence: Synthetic oligonucleotide
  Sense strand starting at position 2926 of SEQ ID NO: 1885310
guagucauugcugaauuag

SEQ ID NO: 2332517 - RNA, 19 nt, Artificial Sequence
  Description of Artificial Sequence: Synthetic oligonucleotide
  Antisense strand to SEQ ID NO: 2332516
cuaauucagcaaugacuac

SEQ ID NO: 2332518 - RNA, 19 nt, Artificial Sequence
  Description of Artificial Sequence: Synthetic oligonucleotide
  Sense strand starting at position 3000 of SEQ ID NO: 1885310
cuuaucagauuuggaauau

SEQ ID NO: 2332519 - RNA, 19 nt, Artificial Sequence
  Description of Artificial Sequence: Synthetic oligonucleotide
  Antisense strand to SEQ ID NO: 2332518
auauuccaaaucugauaag

SEQ ID NO: 2332520 - RNA, 19 nt, Artificial Sequence
  Description of Artificial Sequence: Synthetic oligonucleotide
  Sense strand starting at position 3194 of SEQ ID NO: 1885310
aaaugaguuugugccugaa

SEQ ID NO: 2332521 - RNA, 19 nt, Artificial Sequence
  Description of Artificial Sequence: Synthetic oligonucleotide
  Antisense strand to SEQ ID NO: 2332520
uucaggcacaaacucauuu

SEQ ID NO: 2332522 - RNA, 19 nt, Artificial Sequence
  Description of Artificial Sequence: Synthetic oligonucleotide
  Sense strand starting at position 3196 of SEQ ID NO: 1885310
augaguuugugccugaaac

SEQ ID NO: 2332523 - RNA, 19 nt, Artificial Sequence
  Description of Artificial Sequence: Synthetic oligonucleotide
  Antisense strand to SEQ ID NO: 2332522
guuucaggcacaaacucau

SEQ ID NO: 2332524 - RNA, 19 nt, Artificial Sequence
  Description of Artificial Sequence: Synthetic oligonucleotide
  Sense strand starting at position 3197 of SEQ ID NO: 1885310
ugaguuugugccugaaaca

SEQ ID NO: 2332525 - RNA, 19 nt, Artificial Sequence
  Description of Artificial Sequence: Synthetic oligonucleotide
  Antisense strand to SEQ ID NO: 2332524
uguuucaggcacaaacuca

SEQ ID NO: 2332526 - RNA, 19 nt, Artificial Sequence
  Description of Artificial Sequence: Synthetic oligonucleotide
  Sense strand starting at position 3198 of SEQ ID NO: 1885310
gaguuugugccugaaacaa

SEQ ID NO: 2332527 - RNA, 19 nt, Artificial Sequence
  Description of Artificial Sequence: Synthetic oligonucleotide
  Antisense strand to SEQ ID NO: 2332526
uuguuucaggcacaaacuc

SEQ ID NO: 2332528 - RNA, 19 nt, Artificial Sequence
  Description of Artificial Sequence: Synthetic oligonucleotide
  Sense strand starting at position 3210 of SEQ ID NO: 1885310
gaaacaaagcuuugacugu

SEQ ID NO: 2332529 - RNA, 19 nt, Artificial Sequence
  Description of Artificial Sequence: Synthetic oligonucleotide
  Antisense strand to SEQ ID NO: 2332528
acagucaaagcuuuguuuc

SEQ ID NO: 2332530 - RNA, 19 nt, Artificial Sequence
  Description of Artificial Sequence: Synthetic oligonucleotide
  Sense strand starting at position 3365 of SEQ ID NO: 1885310
uacuuuaaggagcaguauu

SEQ ID NO: 2332531 - RNA, 19 nt, Artificial Sequence
  Description of Artificial Sequence: Synthetic oligonucleotide
  Antisense strand to SEQ ID NO: 2332530
aauacugcuccuuaaagua

SEQ ID NO: 2332532 - RNA, 19 nt, Artificial Sequence
  Description of Artificial Sequence: Synthetic oligonucleotide
  Sense strand starting at position 3432 of SEQ ID NO: 1885310
gauauuuggugcuuuaagu

SEQ ID NO: 2332533 - RNA, 19 nt, Artificial Sequence
  Description of Artificial Sequence: Synthetic oligonucleotide
  Antisense strand to SEQ ID NO: 2332532
acuuaaagcaccaaauauc

SEQ ID NO: 2332534 - RNA, 19 nt, Artificial Sequence
  Description of Artificial Sequence: Synthetic oligonucleotide
  Sense strand starting at position 3496 of SEQ ID NO: 1885310
guauaaucuccauaaagug

SEQ ID NO: 2332535 - RNA, 19 nt, Artificial Sequence
  Description of Artificial Sequence: Synthetic oligonucleotide
  Antisense strand to SEQ ID NO: 2332534
cacuuuauggagauuauac

SEQ ID NO: 2332536 - RNA, 19 nt, Artificial Sequence
  Description of Artificial Sequence: Synthetic oligonucleotide
  Sense strand starting at position 3582 of SEQ ID NO: 1885310
uagguugcugaaugagaau

SEQ ID NO: 2332537 - RNA, 19 nt, Artificial Sequence
  Description of Artificial Sequence: Synthetic oligonucleotide
  Antisense strand to SEQ ID NO: 2332536
auucucauucagcaaccua

SEQ ID NO: 2332538 - RNA, 19 nt, Artificial Sequence
  Description of Artificial Sequence: Synthetic oligonucleotide
  Sense strand starting at position 3626 of SEQ ID NO: 1885310
cuucuauguucuuuaugga

SEQ ID NO: 2332539 - RNA, 19 nt, Artificial Sequence
  Description of Artificial Sequence: Synthetic oligonucleotide
  Antisense strand to SEQ ID NO: 2332538
uccauaaagaacauagaag

SEQ ID NO: 2332540 - RNA, 19 nt, Artificial Sequence
  Description of Artificial Sequence: Synthetic oligonucleotide
  Sense strand starting at position 3724 of SEQ ID NO: 1885310
agugcuaagcauuacuaua

SEQ ID NO: 2332541 - RNA, 19 nt, Artificial Sequence
  Description of Artificial Sequence: Synthetic oligonucleotide
  Antisense strand to SEQ ID NO: 2332540
uauaguaaugcuuagcacu

SEQ ID NO: 2332542 - RNA, 19 nt, Artificial Sequence
  Description of Artificial Sequence: Synthetic oligonucleotide
  Sense strand starting at position 3776 of SEQ ID NO: 1885310
caaccaugguguccaaaug

SEQ ID NO: 2332543 - RNA, 19 nt, Artificial Sequence
  Description of Artificial Sequence: Synthetic oligonucleotide
  Antisense strand to SEQ ID NO: 2332542
cauuuggacaccaugguug

SEQ ID NO: 2332544 - RNA, 19 nt, Artificial Sequence
  Description of Artificial Sequence: Synthetic oligonucleotide
  Sense strand starting at position 83 of SEQ ID NO: 1885311
uagguugagguccggaaau

SEQ ID NO: 2332545 - RNA, 19 nt, Artificial Sequence
  Description of Artificial Sequence: Synthetic oligonucleotide
  Antisense strand to SEQ ID NO: 2332544
auuuccggaccucaaccua

SEQ ID NO: 2332546 - RNA, 19 nt, Artificial Sequence
  Description of Artificial Sequence: Synthetic oligonucleotide
  Sense strand starting at position 85 of SEQ ID NO: 1885311
gguugagguccggaaauga

SEQ ID NO: 2332547 - RNA, 19 nt, Artificial Sequence
  Description of Artificial Sequence: Synthetic oligonucleotide
  Antisense strand to SEQ ID NO: 2332546
ucauuuccggaccucaacc

SEQ ID NO: 2332548 - RNA, 19 nt, Artificial Sequence
  Description of Artificial Sequence: Synthetic oligonucleotide
  Sense strand starting at position 187 of SEQ ID NO: 1885311
ccagguguuauuuguacac

SEQ ID NO: 2332549 - RNA, 19 nt, Artificial Sequence
  Description of Artificial Sequence: Synthetic oligonucleotide
  Antisense strand to SEQ ID NO: 2332548
guguacaaauaacaccugg

SEQ ID NO: 2332550 - RNA, 19 nt, Artificial Sequence
  Description of Artificial Sequence: Synthetic oligonucleotide
  Sense strand starting at position 280 of SEQ ID NO: 1885311
gaaacuucugggcaguguu

SEQ ID NO: 2332551 - RNA, 19 nt, Artificial Sequence
  Description of Artificial Sequence: Synthetic oligonucleotide
  Antisense strand to SEQ ID NO: 2332550
aacacugcccagaaguuuc

SEQ ID NO: 2332552 - RNA, 19 nt, Artificial Sequence
  Description of Artificial Sequence: Synthetic oligonucleotide
  Sense strand starting at position 294 of SEQ ID NO: 1885311
guguuucucaguuaugaaa

SEQ ID NO: 2332553 - RNA, 19 nt, Artificial Sequence
  Description of Artificial Sequence: Synthetic oligonucleotide
  Antisense strand to SEQ ID NO: 2332552
uuucauaacugagaaacac

SEQ ID NO: 2332554 - RNA, 19 nt, Artificial Sequence
  Description of Artificial Sequence: Synthetic oligonucleotide
  Sense strand starting at position 742 of SEQ ID NO: 1885311
aaugaauccuguuugucag

SEQ ID NO: 2332555 - RNA, 19 nt, Artificial Sequence
  Description of Artificial Sequence: Synthetic oligonucleotide
  Antisense strand to SEQ ID NO: 2332554
cugacaaacaggauucauu

SEQ ID NO: 2332556 - RNA, 19 nt, Artificial Sequence
  Description of Artificial Sequence: Synthetic oligonucleotide
  Sense strand starting at position 812 of SEQ ID NO: 1885311
cuaaaugacggcugagaaa

SEQ ID NO: 2332557 - RNA, 19 nt, Artificial Sequence
  Description of Artificial Sequence: Synthetic oligonucleotide
  Antisense strand to SEQ ID NO: 2332556
uuucucagccgucauuuag

SEQ ID NO: 2332558 - RNA, 19 nt, Artificial Sequence
  Description of Artificial Sequence: Synthetic oligonucleotide
  Sense strand starting at position 1034 of SEQ ID NO: 1885311
ggugcaauuucuuuguuga

SEQ ID NO: 2332559 - RNA, 19 nt, Artificial Sequence
  Description of Artificial Sequence: Synthetic oligonucleotide
  Antisense strand to SEQ ID NO: 2332558
ucaacaaagaaauugcacc

SEQ ID NO: 2332560 - RNA, 19 nt, Artificial Sequence
  Description of Artificial Sequence: Synthetic oligonucleotide
  Sense strand starting at position 1035 of SEQ ID NO: 1885311
gugcaauuucuuuguugaa

SEQ ID NO: 2332561 - RNA, 19 nt, Artificial Sequence
  Description of Artificial Sequence: Synthetic oligonucleotide
  Antisense strand to SEQ ID NO: 2332560
uucaacaaagaaauugcac

SEQ ID NO: 2332562 - RNA, 19 nt, Artificial Sequence
  Description of Artificial Sequence: Synthetic oligonucleotide
  Sense strand starting at position 1109 of SEQ ID NO: 1885311
ucaguaaagcucuauuguu

SEQ ID NO: 2332563 - RNA, 19 nt, Artificial Sequence
  Description of Artificial Sequence: Synthetic oligonucleotide
  Antisense strand to SEQ ID NO: 2332562
aacaauagagcuuuacuga

SEQ ID NO: 2332564 - RNA, 19 nt, Artificial Sequence
  Description of Artificial Sequence: Synthetic oligonucleotide
  Sense strand starting at position 1122 of SEQ ID NO: 1885311
auuguuuaaucagcugaca

SEQ ID NO: 2332565 - RNA, 19 nt, Artificial Sequence
  Description of Artificial Sequence: Synthetic oligonucleotide
  Antisense strand to SEQ ID NO: 2332564
ugucagcugauuaaacaau

SEQ ID NO: 2332566 - RNA, 19 nt, Artificial Sequence
  Description of Artificial Sequence: Synthetic oligonucleotide
  Sense strand starting at position 1180 of SEQ ID NO: 1885311
accaguaaugggugcauaa

SEQ ID NO: 2332567 - RNA, 19 nt, Artificial Sequence
  Description of Artificial Sequence: Synthetic oligonucleotide
  Antisense strand to SEQ ID NO: 2332566
uuaugcacccauuacuggu

SEQ ID NO: 2332568 - RNA, 19 nt, Artificial Sequence
  Description of Artificial Sequence: Synthetic oligonucleotide
  Sense strand starting at position 1182 of SEQ ID NO: 1885311
caguaaugggugcauaaug

SEQ ID NO: 2332569 - RNA, 19 nt, Artificial Sequence
  Description of Artificial Sequence: Synthetic oligonucleotide
  Antisense strand to SEQ ID NO: 2332568
cauuaugcacccauuacug

SEQ ID NO: 2332570 - RNA, 19 nt, Artificial Sequence
  Description of Artificial Sequence: Synthetic oligonucleotide
  Sense strand starting at position 1193 of SEQ ID NO: 1885311
gcauaaugagagugagaau

SEQ ID NO: 2332571 - RNA, 19 nt, Artificial Sequence
  Description of Artificial Sequence: Synthetic oligonucleotide
  Antisense strand to SEQ ID NO: 2332570
auucucacucucauuaugc

SEQ ID NO: 2332572 - RNA, 19 nt, Artificial Sequence
  Description of Artificial Sequence: Synthetic oligonucleotide
  Sense strand starting at position 1323 of SEQ ID NO: 1885311
ugcagaggacaguguuauu

SEQ ID NO: 2332573 - RNA, 19 nt, Artificial Sequence
  Description of Artificial Sequence: Synthetic oligonucleotide
  Antisense strand to SEQ ID NO: 2332572
aauaacacuguccucugca

SEQ ID NO: 2332574 - RNA, 19 nt, Artificial Sequence
  Description of Artificial Sequence: Synthetic oligonucleotide
  Sense strand starting at position 1376 of SEQ ID NO: 1885311
cacaaagggucguugugaa

SEQ ID NO: 2332575 - RNA, 19 nt, Artificial Sequence
  Description of Artificial Sequence: Synthetic oligonucleotide
  Antisense strand to SEQ ID NO: 2332574
uucacaacgacccuuugug

SEQ ID NO: 2332576 - RNA, 19 nt, Artificial Sequence
  Description of Artificial Sequence: Synthetic oligonucleotide
  Sense strand starting at position 1487 of SEQ ID NO: 1885311
uggucacuucuagaaggca

SEQ ID NO: 2332577 - RNA, 19 nt, Artificial Sequence
  Description of Artificial Sequence: Synthetic oligonucleotide
  Antisense strand to SEQ ID NO: 2332576
ugccuucuagaagugacca

SEQ ID NO: 2332578 - RNA, 19 nt, Artificial Sequence
  Description of Artificial Sequence: Synthetic oligonucleotide
  Sense strand starting at position 1523 of SEQ ID NO: 1885311
cucucugugaguuagcaga

SEQ ID NO: 2332579 - RNA, 19 nt, Artificial Sequence
  Description of Artificial Sequence: Synthetic oligonucleotide
  Antisense strand to SEQ ID NO: 2332578
ucugcuaacucacagagag

SEQ ID NO: 2332580 - RNA, 19 nt, Artificial Sequence
  Description of Artificial Sequence: Synthetic oligonucleotide
  Sense strand starting at position 1525 of SEQ ID NO: 1885311
cucugugaguuagcagaaa

SEQ ID NO: 2332581 - RNA, 19 nt, Artificial Sequence
  Description of Artificial Sequence: Synthetic oligonucleotide
  Antisense strand to SEQ ID NO: 2332580
uuucugcuaacucacagag

SEQ ID NO: 2332582 - RNA, 19 nt, Artificial Sequence
  Description of Artificial Sequence: Synthetic oligonucleotide
  Sense strand starting at position 1573 of SEQ ID NO: 1885311
ugucuuucugggcaggcaa

SEQ ID NO: 2332583 - RNA, 19 nt, Artificial Sequence
  Description of Artificial Sequence: Synthetic oligonucleotide
  Antisense strand to SEQ ID NO: 2332582
uugccugcccagaaagaca

SEQ ID NO: 2332584 - RNA, 19 nt, Artificial Sequence
  Description of Artificial Sequence: Synthetic oligonucleotide
  Sense strand starting at position 1726 of SEQ ID NO: 1885311
ugccuuuaaccgcugugua

SEQ ID NO: 2332585 - RNA, 19 nt, Artificial Sequence
  Description of Artificial Sequence: Synthetic oligonucleotide
  Antisense strand to SEQ ID NO: 2332584
uacacagcgguuaaaggca

SEQ ID NO: 2332586 - RNA, 19 nt, Artificial Sequence
  Description of Artificial Sequence: Synthetic oligonucleotide
  Sense strand starting at position 1753 of SEQ ID NO: 1885311
gggaaacgucaaggucaaa

SEQ ID NO: 2332587 - RNA, 19 nt, Artificial Sequence
  Description of Artificial Sequence: Synthetic oligonucleotide
  Antisense strand to SEQ ID NO: 2332586
uuugaccuugacguuuccc

SEQ ID NO: 2332588 - RNA, 19 nt, Artificial Sequence
  Description of Artificial Sequence: Synthetic oligonucleotide
  Sense strand starting at position 1929 of SEQ ID NO: 1885311
cugcguguugcagugaagu

SEQ ID NO: 2332589 - RNA, 19 nt, Artificial Sequence
  Description of Artificial Sequence: Synthetic oligonucleotide
  Antisense strand to SEQ ID NO: 2332588
acuucacugcaacacgcag

SEQ ID NO: 2332590 - RNA, 19 nt, Artificial Sequence
  Description of Artificial Sequence: Synthetic oligonucleotide
  Sense strand starting at position 2449 of SEQ ID NO: 1885311
gcuguaaggccagacugua

SEQ ID NO: 2332591 - RNA, 19 nt, Artificial Sequence
  Description of Artificial Sequence: Synthetic oligonucleotide
  Antisense strand to SEQ ID NO: 2332590
uacagucuggccuuacagc

SEQ ID NO: 2332592 - RNA, 19 nt, Artificial Sequence
  Description of Artificial Sequence: Synthetic oligonucleotide
  Sense strand starting at position 2480 of SEQ ID NO: 1885311
auaggcaucaccuggaaga

SEQ ID NO: 2332593 - RNA, 19 nt, Artificial Sequence
  Description of Artificial Sequence: Synthetic oligonucleotide
  Antisense strand to SEQ ID NO: 2332592
ucuuccaggugaugccuau

SEQ ID NO: 2332594 - RNA, 19 nt, Artificial Sequence
  Description of Artificial Sequence: Synthetic oligonucleotide
  Sense strand starting at position 2639 of SEQ ID NO: 1885311
uuggaaggccaauguugaa

SEQ ID NO: 2332595 - RNA, 19 nt, Artificial Sequence
  Description of Artificial Sequence: Synthetic oligonucleotide
  Antisense strand to SEQ ID NO: 2332594
uucaacauuggccuuccaa

SEQ ID NO: 2332596 - RNA, 19 nt, Artificial Sequence
  Description of Artificial Sequence: Synthetic oligonucleotide
  Sense strand starting at position 2693 of SEQ ID NO: 1885311
aaugcaguccuguagaaau

SEQ ID NO: 2332597 - RNA, 19 nt, Artificial Sequence
  Description of Artificial Sequence: Synthetic oligonucleotide
  Antisense strand to SEQ ID NO: 2332596
auuucuacaggacugcauu

SEQ ID NO: 2332598 - RNA, 19 nt, Artificial Sequence
  Description of Artificial Sequence: Synthetic oligonucleotide
  Sense strand starting at position 2703 of SEQ ID NO: 1885311
uguagaaaugcauaacagu

SEQ ID NO: 2332599 - RNA, 19 nt, Artificial Sequence
  Description of Artificial Sequence: Synthetic oligonucleotide
  Antisense strand to SEQ ID NO: 2332598
acuguuaugcauuucuaca

SEQ ID NO: 2332600 - RNA, 19 nt, Artificial Sequence
  Description of Artificial Sequence: Synthetic oligonucleotide
  Sense strand starting at position 2721 of SEQ ID NO: 1885311
uuaacuaaccagcgaugaa

SEQ ID NO: 2332601 - RNA, 19 nt, Artificial Sequence
  Description of Artificial Sequence: Synthetic oligonucleotide
  Antisense strand to SEQ ID NO: 2332600
uucaucgcugguuaguuaa

SEQ ID NO: 2332602 - RNA, 19 nt, Artificial Sequence
  Description of Artificial Sequence: Synthetic oligonucleotide
  Sense strand starting at position 2779 of SEQ ID NO: 1885311
gaacuagggcccuguacaa

SEQ ID NO: 2332603 - RNA, 19 nt, Artificial Sequence
  Description of Artificial Sequence: Synthetic oligonucleotide
  Antisense strand to SEQ ID NO: 2332602
uuguacagggcccuaguuc

SEQ ID NO: 2332604 - RNA, 19 nt, Artificial Sequence
  Description of Artificial Sequence: Synthetic oligonucleotide
  Sense strand starting at position 2826 of SEQ ID NO: 1885311
gaguaauugggucagggca

SEQ ID NO: 2332605 - RNA, 19 nt, Artificial Sequence
  Description of Artificial Sequence: Synthetic oligonucleotide
  Antisense strand to SEQ ID NO: 2332604
ugcccugacccaauuacuc

SEQ ID NO: 2332606 - RNA, 19 nt, Artificial Sequence
  Description of Artificial Sequence: Synthetic oligonucleotide
  Sense strand starting at position 2840 of SEQ ID NO: 1885311
gggcaacaguucucagacu

SEQ ID NO: 2332607 - RNA, 19 nt, Artificial Sequence
  Description of Artificial Sequence: Synthetic oligonucleotide
  Antisense strand to SEQ ID NO: 2332606
agucugagaacuguugccc

SEQ ID NO: 2332608 - RNA, 19 nt, Artificial Sequence
  Description of Artificial Sequence: Synthetic oligonucleotide
  Sense strand starting at position 2887 of SEQ ID NO: 1885311
gugggaggccacugacaau

SEQ ID NO: 2332609 - RNA, 19 nt, Artificial Sequence
  Description of Artificial Sequence: Synthetic oligonucleotide
  Antisense strand to SEQ ID NO: 2332608
auugucaguggccucccac

SEQ ID NO: 2332610 - RNA, 19 nt, Artificial Sequence
  Description of Artificial Sequence: Synthetic oligonucleotide
  Sense strand starting at position 3101 of SEQ ID NO: 1885311
aguuaauucucacuggcca

SEQ ID NO: 2332611 - RNA, 19 nt, Artificial Sequence
  Description of Artificial Sequence: Synthetic oligonucleotide
  Antisense strand to SEQ ID NO: 2332610
uggccagugagaauuaacu

SEQ ID NO: 2332612 - RNA, 19 nt, Artificial Sequence
  Description of Artificial Sequence: Synthetic oligonucleotide
  Sense strand starting at position 3133 of SEQ ID NO: 1885311
ugaaauuagccucgggaga

SEQ ID NO: 2332613 - RNA, 19 nt, Artificial Sequence
  Description of Artificial Sequence: Synthetic oligonucleotide
  Antisense strand to SEQ ID NO: 2332612
ucucccgaggcuaauuuca

SEQ ID NO: 2332614 - RNA, 19 nt, Artificial Sequence
  Description of Artificial Sequence: Synthetic oligonucleotide
  Sense strand starting at position 3134 of SEQ ID NO: 1885311
gaaauuagccucgggagaa

SEQ ID NO: 2332615 - RNA, 19 nt, Artificial Sequence
  Description of Artificial Sequence: Synthetic oligonucleotide
  Antisense strand to SEQ ID NO: 2332614
uucucccgaggcuaauuuc

SEQ ID NO: 2332616 - RNA, 19 nt, Artificial Sequence
  Description of Artificial Sequence: Synthetic oligonucleotide
  Sense strand starting at position 3247 of SEQ ID NO: 1885311
ugggcauuguuggugaaac

SEQ ID NO: 2332617 - RNA, 19 nt, Artificial Sequence
  Description of Artificial Sequence: Synthetic oligonucleotide
  Antisense strand to SEQ ID NO: 2332616
guuucaccaacaaugccca

SEQ ID NO: 2332618 - RNA, 19 nt, Artificial Sequence
  Description of Artificial Sequence: Synthetic oligonucleotide
  Sense strand starting at position 3259 of SEQ ID NO: 1885311
gugaaacggcuuagugguu

SEQ ID NO: 2332619 - RNA, 19 nt, Artificial Sequence
  Description of Artificial Sequence: Synthetic oligonucleotide
  Antisense strand to SEQ ID NO: 2332618
aaccacuaagccguuucac

SEQ ID NO: 2332620 - RNA, 19 nt, Artificial Sequence
  Description of Artificial Sequence: Synthetic oligonucleotide
  Sense strand starting at position 3478 of SEQ ID NO: 1885311
uguguagaaucacuuccaa

SEQ ID NO: 2332621 - RNA, 19 nt, Artificial Sequence
  Description of Artificial Sequence: Synthetic oligonucleotide
  Antisense strand to SEQ ID NO: 2332620
uuggaagugauucuacaca

SEQ ID NO: 2332622 - RNA, 19 nt, Artificial Sequence
  Description of Artificial Sequence: Synthetic oligonucleotide
  Sense strand starting at position 3720 of SEQ ID NO: 1885311
acuuacaauccuggugaca

SEQ ID NO: 2332623 - RNA, 19 nt, Artificial Sequence
  Description of Artificial Sequence: Synthetic oligonucleotide
  Antisense strand to SEQ ID NO: 2332622
ugucaccaggauuguaagu

SEQ ID NO: 2332624 - RNA, 19 nt, Artificial Sequence
  Description of Artificial Sequence: Synthetic oligonucleotide
  Sense strand starting at position 25 of SEQ ID NO: 1885312
uguugugaucucgccucau

SEQ ID NO: 2332625 - RNA, 19 nt, Artificial Sequence
  Description of Artificial Sequence: Synthetic oligonucleotide
  Antisense strand to SEQ ID NO: 2332624
augaggcgagaucacaaca

SEQ ID NO: 2332626 - RNA, 19 nt, Artificial Sequence
  Description of Artificial Sequence: Synthetic oligonucleotide
  Sense strand starting at position 353 of SEQ ID NO: 1885312
gaaugagguaagcagaguu

SEQ ID NO: 2332627 - RNA, 19 nt, Artificial Sequence
  Description of Artificial Sequence: Synthetic oligonucleotide
  Antisense strand to SEQ ID NO: 2332626
aacucugcuuaccucauuc

SEQ ID NO: 2332628 - RNA, 19 nt, Artificial Sequence
  Description of Artificial Sequence: Synthetic oligonucleotide
  Sense strand starting at position 409 of SEQ ID NO: 1885312
cuaaauggcuucccgaaau

SEQ ID NO: 2332629 - RNA, 19 nt, Artificial Sequence
  Description of Artificial Sequence: Synthetic oligonucleotide
  Antisense strand to SEQ ID NO: 2332628
auuucgggaagccauuuag

SEQ ID NO: 2332630 - RNA, 19 nt, Artificial Sequence
  Description of Artificial Sequence: Synthetic oligonucleotide
  Sense strand starting at position 500 of SEQ ID NO: 1885312
guucuauaucacgauggca

SEQ ID NO: 2332631 - RNA, 19 nt, Artificial Sequence
  Description of Artificial Sequence: Synthetic oligonucleotide
  Antisense strand to SEQ ID NO: 2332630
ugccaucgugauauagaac

SEQ ID NO: 2332632 - RNA, 19 nt, Artificial Sequence
  Description of Artificial Sequence: Synthetic oligonucleotide
  Sense strand starting at position 616 of SEQ ID NO: 1885312
gcaccuucugcagaaccua

SEQ ID NO: 2332633 - RNA, 19 nt, Artificial Sequence
  Description of Artificial Sequence: Synthetic oligonucleotide
  Antisense strand to SEQ ID NO: 2332632
uagguucugcagaaggugc

SEQ ID NO: 2332634 - RNA, 19 nt, Artificial Sequence
  Description of Artificial Sequence: Synthetic oligonucleotide
  Sense strand starting at position 737 of SEQ ID NO: 1885312
agcgguauuuggguuauga

SEQ ID NO: 2332635 - RNA, 19 nt, Artificial Sequence
  Description of Artificial Sequence: Synthetic oligonucleotide
  Antisense strand to SEQ ID NO: 2332634
ucauaacccaaauaccgcu

SEQ ID NO: 2332636 - RNA, 19 nt, Artificial Sequence
  Description of Artificial Sequence: Synthetic oligonucleotide
  Sense strand starting at position 859 of SEQ ID NO: 1885312
gugguauugcucuuucugu

SEQ ID NO: 2332637 - RNA, 19 nt, Artificial Sequence
  Description of Artificial Sequence: Synthetic oligonucleotide
  Antisense strand to SEQ ID NO: 2332636
acagaaagagcaauaccac

SEQ ID NO: 2332638 - RNA, 19 nt, Artificial Sequence
  Description of Artificial Sequence: Synthetic oligonucleotide
  Sense strand starting at position 946 of SEQ ID NO: 1885312
uggaacuugccugaaagca

SEQ ID NO: 2332639 - RNA, 19 nt, Artificial Sequence
  Description of Artificial Sequence: Synthetic oligonucleotide
  Antisense strand to SEQ ID NO: 2332638
ugcuuucaggcaaguucca

SEQ ID NO: 2332640 - RNA, 19 nt, Artificial Sequence
  Description of Artificial Sequence: Synthetic oligonucleotide
  Sense strand starting at position 980 of SEQ ID NO: 1885312
agagcuguuugauuuccuu

SEQ ID NO: 2332641 - RNA, 19 nt, Artificial Sequence
  Description of Artificial Sequence: Synthetic oligonucleotide
  Antisense strand to SEQ ID NO: 2332640
aaggaaaucaaacagcucu

SEQ ID NO: 2332642 - RNA, 19 nt, Artificial Sequence
  Description of Artificial Sequence: Synthetic oligonucleotide
  Sense strand starting at position 984 of SEQ ID NO: 1885312
cuguuugauuuccuuuguu

SEQ ID NO: 2332643 - RNA, 19 nt, Artificial Sequence
  Description of Artificial Sequence: Synthetic oligonucleotide
  Antisense strand to SEQ ID NO: 2332642
aacaaaggaaaucaaacag

SEQ ID NO: 2332644 - RNA, 19 nt, Artificial Sequence
  Description of Artificial Sequence: Synthetic oligonucleotide
  Sense strand starting at position 996 of SEQ ID NO: 1885312
cuuuguugcggcuuucuua

SEQ ID NO: 2332645 - RNA, 19 nt, Artificial Sequence
  Description of Artificial Sequence: Synthetic oligonucleotide
  Antisense strand to SEQ ID NO: 2332644
uaagaaagccgcaacaaag

SEQ ID NO: 2332646 - RNA, 19 nt, Artificial Sequence
  Description of Artificial Sequence: Synthetic oligonucleotide
  Sense strand starting at position 1023 of SEQ ID NO: 1885312
cuaccuuuggaauguguga

SEQ ID NO: 2332647 - RNA, 19 nt, Artificial Sequence
  Description of Artificial Sequence: Synthetic oligonucleotide
  Antisense strand to SEQ ID NO: 2332646
ucacacauuccaaagguag

SEQ ID NO: 2332648 - RNA, 19 nt, Artificial Sequence
  Description of Artificial Sequence: Synthetic oligonucleotide
  Sense strand starting at position 1025 of SEQ ID NO: 1885312
accuuuggaaugugugaca

SEQ ID NO: 2332649 - RNA, 19 nt, Artificial Sequence
  Description of Artificial Sequence: Synthetic oligonucleotide
  Antisense strand to SEQ ID NO: 2332648
ugucacacauuccaaaggu

SEQ ID NO: 2332650 - RNA, 19 nt, Artificial Sequence
  Description of Artificial Sequence: Synthetic oligonucleotide
  Sense strand starting at position 1049 of SEQ ID NO: 1885312
gucucuccugguuaggaaa

SEQ ID NO: 2332651 - RNA, 19 nt, Artificial Sequence
  Description of Artificial Sequence: Synthetic oligonucleotide
  Antisense strand to SEQ ID NO: 2332650
uuuccuaaccaggagagac

SEQ ID NO: 2332652 - RNA, 19 nt, Artificial Sequence
  Description of Artificial Sequence: Synthetic oligonucleotide
  Sense strand starting at position 1236 of SEQ ID NO: 1885312
ucccuagcuugagcagaaa

SEQ ID NO: 2332653 - RNA, 19 nt, Artificial Sequence
  Description of Artificial Sequence: Synthetic oligonucleotide
  Antisense strand to SEQ ID NO: 2332652
uuucugcucaagcuaggga

SEQ ID NO: 2332654 - RNA, 19 nt, Artificial Sequence
  Description of Artificial Sequence: Synthetic oligonucleotide
  Sense strand starting at position 1416 of SEQ ID NO: 1885312
ggagaagucagaggcuuga

SEQ ID NO: 2332655 - RNA, 19 nt, Artificial Sequence
  Description of Artificial Sequence: Synthetic oligonucleotide
  Antisense strand to SEQ ID NO: 2332654
ucaagccucugacuucucc

SEQ ID NO: 2332656 - RNA, 19 nt, Artificial Sequence
  Description of Artificial Sequence: Synthetic oligonucleotide
  Sense strand starting at position 1987 of SEQ ID NO: 1885312
gaggauuugcauugcagug

SEQ ID NO: 2332657 - RNA, 19 nt, Artificial Sequence
  Description of Artificial Sequence: Synthetic oligonucleotide
  Antisense strand to SEQ ID NO: 2332656
cacugcaaugcaaauccuc

SEQ ID NO: 2332658 - RNA, 19 nt, Artificial Sequence
  Description of Artificial Sequence: Synthetic oligonucleotide
  Sense strand starting at position 2113 of SEQ ID NO: 1885312
cugggagacuccucaguca

SEQ ID NO: 2332659 - RNA, 19 nt, Artificial Sequence
  Description of Artificial Sequence: Synthetic oligonucleotide
  Antisense strand to SEQ ID NO: 2332658
ugacugaggagucucccag

SEQ ID NO: 2332660 - RNA, 19 nt, Artificial Sequence
  Description of Artificial Sequence: Synthetic oligonucleotide
  Sense strand starting at position 2304 of SEQ ID NO: 1885312
gcuugauaugacgauggag

SEQ ID NO: 2332661 - RNA, 19 nt, Artificial Sequence
  Description of Artificial Sequence: Synthetic oligonucleotide
  Antisense strand to SEQ ID NO: 2332660
cuccaucgucauaucaagc

SEQ ID NO: 2332662 - RNA, 19 nt, Artificial Sequence
  Description of Artificial Sequence: Synthetic oligonucleotide
  Sense strand starting at position 2441 of SEQ ID NO: 1885312
gugcuuguugaauauuugu

SEQ ID NO: 2332663 - RNA, 19 nt, Artificial Sequence
  Description of Artificial Sequence: Synthetic oligonucleotide
  Antisense strand to SEQ ID NO: 2332662
acaaauauucaacaagcac

SEQ ID NO: 2332664 - RNA, 19 nt, Artificial Sequence
  Description of Artificial Sequence: Synthetic oligonucleotide
  Sense strand starting at position 2495 of SEQ ID NO: 1885312
ugcagaccuauggguagaa

SEQ ID NO: 2332665 - RNA, 19 nt, Artificial Sequence
  Description of Artificial Sequence: Synthetic oligonucleotide
  Antisense strand to SEQ ID NO: 2332664
uucuacccauaggucugca

SEQ ID NO: 2332666 - RNA, 19 nt, Artificial Sequence
  Description of Artificial Sequence: Synthetic oligonucleotide
  Sense strand starting at position 2527 of SEQ ID NO: 1885312
uggaguuuccuggaaguua

SEQ ID NO: 2332667 - RNA, 19 nt, Artificial Sequence
  Description of Artificial Sequence: Synthetic oligonucleotide
  Antisense strand to SEQ ID NO: 2332666
uaacuuccaggaaacucca

SEQ ID NO: 2332668 - RNA, 19 nt, Artificial Sequence
  Description of Artificial Sequence: Synthetic oligonucleotide
  Sense strand starting at position 2569 of SEQ ID NO: 1885312
acagccaugugaucucaca

SEQ ID NO: 2332669 - RNA, 19 nt, Artificial Sequence
  Description of Artificial Sequence: Synthetic oligonucleotide
  Antisense strand to SEQ ID NO: 2332668
ugugagaucacauggcugu

SEQ ID NO: 2332670 - RNA, 19 nt, Artificial Sequence
  Description of Artificial Sequence: Synthetic oligonucleotide
  Sense strand starting at position 2635 of SEQ ID NO: 1885312
ccacuuugucagggaucau

SEQ ID NO: 2332671 - RNA, 19 nt, Artificial Sequence
  Description of Artificial Sequence: Synthetic oligonucleotide
  Antisense strand to SEQ ID NO: 2332670
augaucccugacaaagugg

SEQ ID NO: 2332672 - RNA, 19 nt, Artificial Sequence
  Description of Artificial Sequence: Synthetic oligonucleotide
  Sense strand starting at position 3160 of SEQ ID NO: 1885312
uuuccucuucuuggauaga

SEQ ID NO: 2332673 - RNA, 19 nt, Artificial Sequence
  Description of Artificial Sequence: Synthetic oligonucleotide
  Antisense strand to SEQ ID NO: 2332672
ucuauccaagaagaggaaa

SEQ ID NO: 2332674 - RNA, 19 nt, Artificial Sequence
  Description of Artificial Sequence: Synthetic oligonucleotide
  Sense strand starting at position 3163 of SEQ ID NO: 1885312
ccucuucuuggauagaguu

SEQ ID NO: 2332675 - RNA, 19 nt, Artificial Sequence
  Description of Artificial Sequence: Synthetic oligonucleotide
  Antisense strand to SEQ ID NO: 2332674
aacucuauccaagaagagg

SEQ ID NO: 2332676 - RNA, 19 nt, Artificial Sequence
  Description of Artificial Sequence: Synthetic oligonucleotide
  Sense strand starting at position 3272 of SEQ ID NO: 1885312
uuaacucucguguauaaau

SEQ ID NO: 2332677 - RNA, 19 nt, Artificial Sequence
  Description of Artificial Sequence: Synthetic oligonucleotide
  Antisense strand to SEQ ID NO: 2332676
auuuauacacgagaguuaa

SEQ ID NO: 2332678 - RNA, 19 nt, Artificial Sequence
  Description of Artificial Sequence: Synthetic oligonucleotide
  Sense strand starting at position 3274 of SEQ ID NO: 1885312
aacucucguguauaaauga

SEQ ID NO: 2332679 - RNA, 19 nt, Artificial Sequence
  Description of Artificial Sequence: Synthetic oligonucleotide
  Antisense strand to SEQ ID NO: 2332678
ucauuuauacacgagaguu

SEQ ID NO: 2332680 - RNA, 19 nt, Artificial Sequence
  Description of Artificial Sequence: Synthetic oligonucleotide
  Sense strand starting at position 3347 of SEQ ID NO: 1885312
augggaucagauuguacau

SEQ ID NO: 2332681 - RNA, 19 nt, Artificial Sequence
  Description of Artificial Sequence: Synthetic oligonucleotide
  Antisense strand to SEQ ID NO: 2332680
auguacaaucugaucccau

SEQ ID NO: 2332682 - RNA, 19 nt, Artificial Sequence
  Description of Artificial Sequence: Synthetic oligonucleotide
  Sense strand starting at position 3468 of SEQ ID NO: 1885312
uucuguguugaagagguuu

SEQ ID NO: 2332683 - RNA, 19 nt, Artificial Sequence
  Description of Artificial Sequence: Synthetic oligonucleotide
  Antisense strand to SEQ ID NO: 2332682
aaaccucuucaacacagaa

SEQ ID NO: 2332684 - RNA, 19 nt, Artificial Sequence
  Description of Artificial Sequence: Synthetic oligonucleotide
  Sense strand starting at position 3621 of SEQ ID NO: 1885312
gcucaugaaguuuaacagu

SEQ ID NO: 2332685 - RNA, 19 nt, Artificial Sequence
  Description of Artificial Sequence: Synthetic oligonucleotide
  Antisense strand to SEQ ID NO: 2332684
acuguuaaacuucaugagc

SEQ ID NO: 2332686 - RNA, 19 nt, Artificial Sequence
  Description of Artificial Sequence: Synthetic oligonucleotide
  Sense strand starting at position 3631 of SEQ ID NO: 1885312
uuuaacaguucccuggauu

SEQ ID NO: 2332687 - RNA, 19 nt, Artificial Sequence
  Description of Artificial Sequence: Synthetic oligonucleotide
  Antisense strand to SEQ ID NO: 2332686
aauccagggaacuguuaaa

SEQ ID NO: 2332688 - RNA, 19 nt, Artificial Sequence
  Description of Artificial Sequence: Synthetic oligonucleotide
  Sense strand starting at position 3632 of SEQ ID NO: 1885312
uuaacaguucccuggauug

SEQ ID NO: 2332689 - RNA, 19 nt, Artificial Sequence
  Description of Artificial Sequence: Synthetic oligonucleotide
  Antisense strand to SEQ ID NO: 2332688
caauccagggaacuguuaa

SEQ ID NO: 2332690 - RNA, 19 nt, Artificial Sequence
  Description of Artificial Sequence: Synthetic oligonucleotide
  Sense strand starting at position 3704 of SEQ ID NO: 1885312
aagagaucucacugaguca

SEQ ID NO: 2332691 - RNA, 19 nt, Artificial Sequence
  Description of Artificial Sequence: Synthetic oligonucleotide
  Antisense strand to SEQ ID NO: 2332690
ugacucagugagaucucuu

SEQ ID NO: 2332692 - RNA, 19 nt, Artificial Sequence
  Description of Artificial Sequence: Synthetic oligonucleotide
  Sense strand starting at position 3758 of SEQ ID NO: 1885312
gggagcugagguugagaau

SEQ ID NO: 2332693 - RNA, 19 nt, Artificial Sequence
  Description of Artificial Sequence: Synthetic oligonucleotide
  Antisense strand to SEQ ID NO: 2332692
auucucaaccucagcuccc

SEQ ID NO: 2332694 - RNA, 19 nt, Artificial Sequence
  Description of Artificial Sequence: Synthetic oligonucleotide
  Sense strand starting at position 3767 of SEQ ID NO: 1885312
gguugagaauucgcauuuc

SEQ ID NO: 2332695 - RNA, 19 nt, Artificial Sequence
  Description of Artificial Sequence: Synthetic oligonucleotide
  Antisense strand to SEQ ID NO: 2332694
gaaaugcgaauucucaacc

SEQ ID NO: 2332696 - RNA, 19 nt, Artificial Sequence
  Description of Artificial Sequence: Synthetic oligonucleotide
  Sense strand starting at position 3862 of SEQ ID NO: 1885312
ccagauggucaaugauauc

SEQ ID NO: 2332697 - RNA, 19 nt, Artificial Sequence
  Description of Artificial Sequence: Synthetic oligonucleotide
  Antisense strand to SEQ ID NO: 2332696
gauaucauugaccaucugg

SEQ ID NO: 2332698 - RNA, 19 nt, Artificial Sequence
  Description of Artificial Sequence: Synthetic oligonucleotide
  Sense strand starting at position 3868 of SEQ ID NO: 1885312
ggucaaugauauccggaga

SEQ ID NO: 2332699 - RNA, 19 nt, Artificial Sequence
  Description of Artificial Sequence: Synthetic oligonucleotide
  Antisense strand to SEQ ID NO: 2332698
ucuccggauaucauugacc

SEQ ID NO: 2332700 - RNA, 19 nt, Artificial Sequence
  Description of Artificial Sequence: Synthetic oligonucleotide
  Sense strand starting at position 3869 of SEQ ID NO: 1885312
gucaaugauauccggagaa

SEQ ID NO: 2332701 - RNA, 19 nt, Artificial Sequence
  Description of Artificial Sequence: Synthetic oligonucleotide
  Antisense strand to SEQ ID NO: 2332700
uucuccggauaucauugac

SEQ ID NO: 2332702 - RNA, 19 nt, Artificial Sequence
  Description of Artificial Sequence: Synthetic oligonucleotide
  Sense strand starting at position 3937 of SEQ ID NO: 1885312
cuaacauccucucuggagu

SEQ ID NO: 2332703 - RNA, 19 nt, Artificial Sequence
  Description of Artificial Sequence: Synthetic oligonucleotide
  Antisense strand to SEQ ID NO: 2332702
acuccagagaggauguuag

SEQ ID NO: 2332704 - RNA, 19 nt, Artificial Sequence
  Description of Artificial Sequence: Synthetic oligonucleotide
  Sense strand starting at position 241 of SEQ ID NO: 1885313
gucuuaauuccugacacug

SEQ ID NO: 2332705 - RNA, 19 nt, Artificial Sequence
  Description of Artificial Sequence: Synthetic oligonucleotide
  Antisense strand to SEQ ID NO: 2332704
cagugucaggaauuaagac

SEQ ID NO: 2332706 - RNA, 19 nt, Artificial Sequence
  Description of Artificial Sequence: Synthetic oligonucleotide
  Sense strand starting at position 297 of SEQ ID NO: 1885313
cccacugaccugggauuaa

SEQ ID NO: 2332707 - RNA, 19 nt, Artificial Sequence
  Description of Artificial Sequence: Synthetic oligonucleotide
  Antisense strand to SEQ ID NO: 2332706
uuaaucccaggucaguggg

SEQ ID NO: 2332708 - RNA, 19 nt, Artificial Sequence
  Description of Artificial Sequence: Synthetic oligonucleotide
  Sense strand starting at position 324 of SEQ ID NO: 1885313
gugggaacauuugaauauu

SEQ ID NO: 2332709 - RNA, 19 nt, Artificial Sequence
  Description of Artificial Sequence: Synthetic oligonucleotide
  Antisense strand to SEQ ID NO: 2332708
aauauucaaauguucccac

SEQ ID NO: 2332710 - RNA, 19 nt, Artificial Sequence
  Description of Artificial Sequence: Synthetic oligonucleotide
  Sense strand starting at position 1192 of SEQ ID NO: 1885313
ucauuacuugcucagauag

SEQ ID NO: 2332711 - RNA, 19 nt, Artificial Sequence
  Description of Artificial Sequence: Synthetic oligonucleotide
  Antisense strand to SEQ ID NO: 2332710
cuaucugagcaaguaauga

SEQ ID NO: 2332712 - RNA, 19 nt, Artificial Sequence
  Description of Artificial Sequence: Synthetic oligonucleotide
  Sense strand starting at position 1384 of SEQ ID NO: 1885313
aggcuauucucagucaaau

SEQ ID NO: 2332713 - RNA, 19 nt, Artificial Sequence
  Description of Artificial Sequence: Synthetic oligonucleotide
  Antisense strand to SEQ ID NO: 2332712
auuugacugagaauagccu

SEQ ID NO: 2332714 - RNA, 19 nt, Artificial Sequence
  Description of Artificial Sequence: Synthetic oligonucleotide
  Sense strand starting at position 1394 of SEQ ID NO: 1885313
cagucaaauggucagaagu

SEQ ID NO: 2332715 - RNA, 19 nt, Artificial Sequence
  Description of Artificial Sequence: Synthetic oligonucleotide
  Antisense strand to SEQ ID NO: 2332714
acuucugaccauuugacug

SEQ ID NO: 2332716 - RNA, 19 nt, Artificial Sequence
  Description of Artificial Sequence: Synthetic oligonucleotide
  Sense strand starting at position 1527 of SEQ ID NO: 1885313
ccaugagaucuccaguucu

SEQ ID NO: 2332717 - RNA, 19 nt, Artificial Sequence
  Description of Artificial Sequence: Synthetic oligonucleotide
  Antisense strand to SEQ ID NO: 2332716
agaacuggagaucucaugg

SEQ ID NO: 2332718 - RNA, 19 nt, Artificial Sequence
  Description of Artificial Sequence: Synthetic oligonucleotide
  Sense strand starting at position 1824 of SEQ ID NO: 1885313
gcaagcugugucucugcau

SEQ ID NO: 2332719 - RNA, 19 nt, Artificial Sequence
  Description of Artificial Sequence: Synthetic oligonucleotide
  Antisense strand to SEQ ID NO: 2332718
augcagagacacagcuugc

SEQ ID NO: 2332720 - RNA, 19 nt, Artificial Sequence
  Description of Artificial Sequence: Synthetic oligonucleotide
  Sense strand starting at position 1831 of SEQ ID NO: 1885313
gugucucugcaucuguauu

SEQ ID NO: 2332721 - RNA, 19 nt, Artificial Sequence
  Description of Artificial Sequence: Synthetic oligonucleotide
  Antisense strand to SEQ ID NO: 2332720
aauacagaugcagagacac

SEQ ID NO: 2332722 - RNA, 19 nt, Artificial Sequence
  Description of Artificial Sequence: Synthetic oligonucleotide
  Sense strand starting at position 2021 of SEQ ID NO: 1885313
gccuuucucagacagcgau

SEQ ID NO: 2332723 - RNA, 19 nt, Artificial Sequence
  Description of Artificial Sequence: Synthetic oligonucleotide
  Antisense strand to SEQ ID NO: 2332722
aucgcugucugagaaaggc

SEQ ID NO: 2332724 - RNA, 19 nt, Artificial Sequence
  Description of Artificial Sequence: Synthetic oligonucleotide
  Sense strand starting at position 2024 of SEQ ID NO: 1885313
uuucucagacagcgauaua

SEQ ID NO: 2332725 - RNA, 19 nt, Artificial Sequence
  Description of Artificial Sequence: Synthetic oligonucleotide
  Antisense strand to SEQ ID NO: 2332724
uauaucgcugucugagaaa

SEQ ID NO: 2332726 - RNA, 19 nt, Artificial Sequence
  Description of Artificial Sequence: Synthetic oligonucleotide
  Sense strand starting at position 2077 of SEQ ID NO: 1885313
augacaucacaguagcuau

SEQ ID NO: 2332727 - RNA, 19 nt, Artificial Sequence
  Description of Artificial Sequence: Synthetic oligonucleotide
  Antisense strand to SEQ ID NO: 2332726
auagcuacugugaugucau

SEQ ID NO: 2332728 - RNA, 19 nt, Artificial Sequence
  Description of Artificial Sequence: Synthetic oligonucleotide
  Sense strand starting at position 2247 of SEQ ID NO: 1885313
uguguuuauguugaggaga

SEQ ID NO: 2332729 - RNA, 19 nt, Artificial Sequence
  Description of Artificial Sequence: Synthetic oligonucleotide
  Antisense strand to SEQ ID NO: 2332728
ucuccucaacauaaacaca

SEQ ID NO: 2332730 - RNA, 19 nt, Artificial Sequence
  Description of Artificial Sequence: Synthetic oligonucleotide
  Sense strand starting at position 2255 of SEQ ID NO: 1885313
uguugaggagaauguguuu

SEQ ID NO: 2332731 - RNA, 19 nt, Artificial Sequence
  Description of Artificial Sequence: Synthetic oligonucleotide
  Antisense strand to SEQ ID NO: 2332730
aaacacauucuccucaaca

SEQ ID NO: 2332732 - RNA, 19 nt, Artificial Sequence
  Description of Artificial Sequence: Synthetic oligonucleotide
  Sense strand starting at position 2260 of SEQ ID NO: 1885313
aggagaauguguuugcauu

SEQ ID NO: 2332733 - RNA, 19 nt, Artificial Sequence
  Description of Artificial Sequence: Synthetic oligonucleotide
  Antisense strand to SEQ ID NO: 2332732
aaugcaaacacauucuccu

SEQ ID NO: 2332734 - RNA, 19 nt, Artificial Sequence
  Description of Artificial Sequence: Synthetic oligonucleotide
  Sense strand starting at position 2347 of SEQ ID NO: 1885313
ugagcuccaucuccugaaa

SEQ ID NO: 2332735 - RNA, 19 nt, Artificial Sequence
  Description of Artificial Sequence: Synthetic oligonucleotide
  Antisense strand to SEQ ID NO: 2332734
uuucaggagauggagcuca

SEQ ID NO: 2332736 - RNA, 19 nt, Artificial Sequence
  Description of Artificial Sequence: Synthetic oligonucleotide
  Sense strand starting at position 2365 of SEQ ID NO: 1885313
agguuaaagacagguuauu

SEQ ID NO: 2332737 - RNA, 19 nt, Artificial Sequence
  Description of Artificial Sequence: Synthetic oligonucleotide
  Antisense strand to SEQ ID NO: 2332736
aauaaccugucuuuaaccu

SEQ ID NO: 2332738 - RNA, 19 nt, Artificial Sequence
  Description of Artificial Sequence: Synthetic oligonucleotide
  Sense strand starting at position 2472 of SEQ ID NO: 1885313
gagggaguaugugcuguaa

SEQ ID NO: 2332739 - RNA, 19 nt, Artificial Sequence
  Description of Artificial Sequence: Synthetic oligonucleotide
  Antisense strand to SEQ ID NO: 2332738
uuacagcacauacucccuc

SEQ ID NO: 2332740 - RNA, 19 nt, Artificial Sequence
  Description of Artificial Sequence: Synthetic oligonucleotide
  Sense strand starting at position 2476 of SEQ ID NO: 1885313
gaguaugugcuguaauacc

SEQ ID NO: 2332741 - RNA, 19 nt, Artificial Sequence
  Description of Artificial Sequence: Synthetic oligonucleotide
  Antisense strand to SEQ ID NO: 2332740
gguauuacagcacauacuc

SEQ ID NO: 2332742 - RNA, 19 nt, Artificial Sequence
  Description of Artificial Sequence: Synthetic oligonucleotide
  Sense strand starting at position 2486 of SEQ ID NO: 1885313
uguaauaccgucuauccca

SEQ ID NO: 2332743 - RNA, 19 nt, Artificial Sequence
  Description of Artificial Sequence: Synthetic oligonucleotide
  Antisense strand to SEQ ID NO: 2332742
ugggauagacgguauuaca

SEQ ID NO: 2332744 - RNA, 19 nt, Artificial Sequence
  Description of Artificial Sequence: Synthetic oligonucleotide
  Sense strand starting at position 2552 of SEQ ID NO: 1885313
cuaugaauccuacauguug

SEQ ID NO: 2332745 - RNA, 19 nt, Artificial Sequence
  Description of Artificial Sequence: Synthetic oligonucleotide
  Antisense strand to SEQ ID NO: 2332744
caacauguaggauucauag

SEQ ID NO: 2332746 - RNA, 19 nt, Artificial Sequence
  Description of Artificial Sequence: Synthetic oligonucleotide
  Sense strand starting at position 2821 of SEQ ID NO: 1885313
gccaccauuugugcuaagu

SEQ ID NO: 2332747 - RNA, 19 nt, Artificial Sequence
  Description of Artificial Sequence: Synthetic oligonucleotide
  Antisense strand to SEQ ID NO: 2332746
acuuagcacaaaugguggc

SEQ ID NO: 2332748 - RNA, 19 nt, Artificial Sequence
  Description of Artificial Sequence: Synthetic oligonucleotide
  Sense strand starting at position 2843 of SEQ ID NO: 1885313
ugacuuguuaugggaagug

SEQ ID NO: 2332749 - RNA, 19 nt, Artificial Sequence
  Description of Artificial Sequence: Synthetic oligonucleotide
  Antisense strand to SEQ ID NO: 2332748
cacuucccauaacaaguca

SEQ ID NO: 2332750 - RNA, 19 nt, Artificial Sequence
  Description of Artificial Sequence: Synthetic oligonucleotide
  Sense strand starting at position 2957 of SEQ ID NO: 1885313
aggccugagcucuaacaag

SEQ ID NO: 2332751 - RNA, 19 nt, Artificial Sequence
  Description of Artificial Sequence: Synthetic oligonucleotide
  Antisense strand to SEQ ID NO: 2332750
cuuguuagagcucaggccu

SEQ ID NO: 2332752 - RNA, 19 nt, Artificial Sequence
  Description of Artificial Sequence: Synthetic oligonucleotide
  Sense strand starting at position 2984 of SEQ ID NO: 1885313
ugugaauuacuguaaguag

SEQ ID NO: 2332753 - RNA, 19 nt, Artificial Sequence
  Description of Artificial Sequence: Synthetic oligonucleotide
  Antisense strand to SEQ ID NO: 2332752
cuacuuacaguaauucaca

SEQ ID NO: 2332754 - RNA, 19 nt, Artificial Sequence
  Description of Artificial Sequence: Synthetic oligonucleotide
  Sense strand starting at position 2987 of SEQ ID NO: 1885313
gaauuacuguaaguaguuu

SEQ ID NO: 2332755 - RNA, 19 nt, Artificial Sequence
  Description of Artificial Sequence: Synthetic oligonucleotide
  Antisense strand to SEQ ID NO: 2332754
aaacuacuuacaguaauuc

SEQ ID NO: 2332756 - RNA, 19 nt, Artificial Sequence
  Description of Artificial Sequence: Synthetic oligonucleotide
  Sense strand starting at position 3294 of SEQ ID NO: 1885313
ccucuaugucuguaugaua

SEQ ID NO: 2332757 - RNA, 19 nt, Artificial Sequence
  Description of Artificial Sequence: Synthetic oligonucleotide
  Antisense strand to SEQ ID NO: 2332756
uaucauacagacauagagg

SEQ ID NO: 2332758 - RNA, 19 nt, Artificial Sequence
  Description of Artificial Sequence: Synthetic oligonucleotide
  Sense strand starting at position 3302 of SEQ ID NO: 1885313
ucuguaugauacucugaga

SEQ ID NO: 2332759 - RNA, 19 nt, Artificial Sequence
  Description of Artificial Sequence: Synthetic oligonucleotide
  Antisense strand to SEQ ID NO: 2332758
ucucagaguaucauacaga

SEQ ID NO: 2332760 - RNA, 19 nt, Artificial Sequence
  Description of Artificial Sequence: Synthetic oligonucleotide
  Sense strand starting at position 3323 of SEQ ID NO: 1885313
uagcaaugggcauguaauu

SEQ ID NO: 2332761 - RNA, 19 nt, Artificial Sequence
  Description of Artificial Sequence: Synthetic oligonucleotide
  Antisense strand to SEQ ID NO: 2332760
aauuacaugcccauugcua

SEQ ID NO: 2332762 - RNA, 19 nt, Artificial Sequence
  Description of Artificial Sequence: Synthetic oligonucleotide
  Sense strand starting at position 3328 of SEQ ID NO: 1885313
augggcauguaauuaacua

SEQ ID NO: 2332763 - RNA, 19 nt, Artificial Sequence
  Description of Artificial Sequence: Synthetic oligonucleotide
  Antisense strand to SEQ ID NO: 2332762
uaguuaauuacaugcccau

SEQ ID NO: 2332764 - RNA, 19 nt, Artificial Sequence
  Description of Artificial Sequence: Synthetic oligonucleotide
  Sense strand starting at position 3534 of SEQ ID NO: 1885313
gcccuacugaggcagauua

SEQ ID NO: 2332765 - RNA, 19 nt, Artificial Sequence
  Description of Artificial Sequence: Synthetic oligonucleotide
  Antisense strand to SEQ ID NO: 2332764
uaaucugccucaguagggc

SEQ ID NO: 2332766 - RNA, 19 nt, Artificial Sequence
  Description of Artificial Sequence: Synthetic oligonucleotide
  Sense strand starting at position 3545 of SEQ ID NO: 1885313
gcagauuaaugauuauccu

SEQ ID NO: 2332767 - RNA, 19 nt, Artificial Sequence
  Description of Artificial Sequence: Synthetic oligonucleotide
  Antisense strand to SEQ ID NO: 2332766
aggauaaucauuaaucugc

SEQ ID NO: 2332768 - RNA, 19 nt, Artificial Sequence
  Description of Artificial Sequence: Synthetic oligonucleotide
  Sense strand starting at position 3552 of SEQ ID NO: 1885313
aaugauuauccuggaguag

SEQ ID NO: 2332769 - RNA, 19 nt, Artificial Sequence
  Description of Artificial Sequence: Synthetic oligonucleotide
  Antisense strand to SEQ ID NO: 2332768
cuacuccaggauaaucauu

SEQ ID NO: 2332770 - RNA, 19 nt, Artificial Sequence
  Description of Artificial Sequence: Synthetic oligonucleotide
  Sense strand starting at position 3553 of SEQ ID NO: 1885313
augauuauccuggaguagu

SEQ ID NO: 2332771 - RNA, 19 nt, Artificial Sequence
  Description of Artificial Sequence: Synthetic oligonucleotide
  Antisense strand to SEQ ID NO: 2332770
acuacuccaggauaaucau

SEQ ID NO: 2332772 - RNA, 19 nt, Artificial Sequence
  Description of Artificial Sequence: Synthetic oligonucleotide
  Sense strand starting at position 3591 of SEQ ID NO: 1885313
gggccaaauccggaugcua

SEQ ID NO: 2332773 - RNA, 19 nt, Artificial Sequence
  Description of Artificial Sequence: Synthetic oligonucleotide
  Antisense strand to SEQ ID NO: 2332772
uagcauccggauuuggccc

SEQ ID NO: 2332774 - RNA, 19 nt, Artificial Sequence
  Description of Artificial Sequence: Synthetic oligonucleotide
  Sense strand starting at position 3603 of SEQ ID NO: 1885313
gaugcuacugaggaaguuu

SEQ ID NO: 2332775 - RNA, 19 nt, Artificial Sequence
  Description of Artificial Sequence: Synthetic oligonucleotide
  Antisense strand to SEQ ID NO: 2332774
aaacuuccucaguagcauc

SEQ ID NO: 2332776 - RNA, 19 nt, Artificial Sequence
  Description of Artificial Sequence: Synthetic oligonucleotide
  Sense strand starting at position 3670 of SEQ ID NO: 1885313
augccagcuggucaucaaa

SEQ ID NO: 2332777 - RNA, 19 nt, Artificial Sequence
  Description of Artificial Sequence: Synthetic oligonucleotide
  Antisense strand to SEQ ID NO: 2332776
uuugaugaccagcuggcau

SEQ ID NO: 2332778 - RNA, 19 nt, Artificial Sequence
  Description of Artificial Sequence: Synthetic oligonucleotide
  Sense strand starting at position 3673 of SEQ ID NO: 1885313
ccagcuggucaucaaauua

SEQ ID NO: 2332779 - RNA, 19 nt, Artificial Sequence
  Description of Artificial Sequence: Synthetic oligonucleotide
  Antisense strand to SEQ ID NO: 2332778
uaauuugaugaccagcugg

SEQ ID NO: 2332780 - RNA, 19 nt, Artificial Sequence
  Description of Artificial Sequence: Synthetic oligonucleotide
  Sense strand starting at position 3734 of SEQ ID NO: 1885313
gagccuauguugucacaga

SEQ ID NO: 2332781 - RNA, 19 nt, Artificial Sequence
  Description of Artificial Sequence: Synthetic oligonucleotide
  Antisense strand to SEQ ID NO: 2332780
ucugugacaacauaggcuc

SEQ ID NO: 2332782 - RNA, 19 nt, Artificial Sequence
  Description of Artificial Sequence: Synthetic oligonucleotide
  Sense strand starting at position 3750 of SEQ ID NO: 1885313
agaggcacuccuuaccaua

SEQ ID NO: 2332783 - RNA, 19 nt, Artificial Sequence
  Description of Artificial Sequence: Synthetic oligonucleotide
  Antisense strand to SEQ ID NO: 2332782
uaugguaaggagugccucu

SEQ ID NO: 2332784 - RNA, 19 nt, Artificial Sequence
  Description of Artificial Sequence: Synthetic oligonucleotide
  Sense strand starting at position 80 of SEQ ID NO: 1885314
aguguugucucacucagaa

SEQ ID NO: 2332785 - RNA, 19 nt, Artificial Sequence
  Description of Artificial Sequence: Synthetic oligonucleotide
  Antisense strand to SEQ ID NO: 2332784
uucugagugagacaacacu

SEQ ID NO: 2332786 - RNA, 19 nt, Artificial Sequence
  Description of Artificial Sequence: Synthetic oligonucleotide
  Sense strand starting at position 150 of SEQ ID NO: 1885314
aaaggcaucugugcucaga

SEQ ID NO: 2332787 - RNA, 19 nt, Artificial Sequence
  Description of Artificial Sequence: Synthetic oligonucleotide
  Antisense strand to SEQ ID NO: 2332786
ucugagcacagaugccuuu

SEQ ID NO: 2332788 - RNA, 19 nt, Artificial Sequence
  Description of Artificial Sequence: Synthetic oligonucleotide
  Sense strand starting at position 152 of SEQ ID NO: 1885314
aggcaucugugcucagaau

SEQ ID NO: 2332789 - RNA, 19 nt, Artificial Sequence
  Description of Artificial Sequence: Synthetic oligonucleotide
  Antisense strand to SEQ ID NO: 2332788
auucugagcacagaugccu

SEQ ID NO: 2332790 - RNA, 19 nt, Artificial Sequence
  Description of Artificial Sequence: Synthetic oligonucleotide
  Sense strand starting at position 153 of SEQ ID NO: 1885314
ggcaucugugcucagaauc

SEQ ID NO: 2332791 - RNA, 19 nt, Artificial Sequence
  Description of Artificial Sequence: Synthetic oligonucleotide
  Antisense strand to SEQ ID NO: 2332790
gauucugagcacagaugcc

SEQ ID NO: 2332792 - RNA, 19 nt, Artificial Sequence
  Description of Artificial Sequence: Synthetic oligonucleotide
  Sense strand starting at position 265 of SEQ ID NO: 1885314
cuagguuacggucaaauua

SEQ ID NO: 2332793 - RNA, 19 nt, Artificial Sequence
  Description of Artificial Sequence: Synthetic oligonucleotide
  Antisense strand to SEQ ID NO: 2332792
uaauuugaccguaaccuag

SEQ ID NO: 2332794 - RNA, 19 nt, Artificial Sequence
  Description of Artificial Sequence: Synthetic oligonucleotide
  Sense strand starting at position 309 of SEQ ID NO: 1885314
gcucccucagaugguuauu

SEQ ID NO: 2332795 - RNA, 19 nt, Artificial Sequence
  Description of Artificial Sequence: Synthetic oligonucleotide
  Antisense strand to SEQ ID NO: 2332794
aauaaccaucugagggagc

SEQ ID NO: 2332796 - RNA, 19 nt, Artificial Sequence
  Description of Artificial Sequence: Synthetic oligonucleotide
  Sense strand starting at position 369 of SEQ ID NO: 1885314
cuuacuagacuugggacau

SEQ ID NO: 2332797 - RNA, 19 nt, Artificial Sequence
  Description of Artificial Sequence: Synthetic oligonucleotide
  Antisense strand to SEQ ID NO: 2332796
augucccaagucuaguaag

SEQ ID NO: 2332798 - RNA, 19 nt, Artificial Sequence
  Description of Artificial Sequence: Synthetic oligonucleotide
  Sense strand starting at position 482 of SEQ ID NO: 1885314
ggucaagguccugagauca

SEQ ID NO: 2332799 - RNA, 19 nt, Artificial Sequence
  Description of Artificial Sequence: Synthetic oligonucleotide
  Antisense strand to SEQ ID NO: 2332798
ugaucucaggaccuugacc

SEQ ID NO: 2332800 - RNA, 19 nt, Artificial Sequence
  Description of Artificial Sequence: Synthetic oligonucleotide
  Sense strand starting at position 505 of SEQ ID NO: 1885314
ccaugcucccugugaaauc

SEQ ID NO: 2332801 - RNA, 19 nt, Artificial Sequence
  Description of Artificial Sequence: Synthetic oligonucleotide
  Antisense strand to SEQ ID NO: 2332800
gauuucacagggagcaugg

SEQ ID NO: 2332802 - RNA, 19 nt, Artificial Sequence
  Description of Artificial Sequence: Synthetic oligonucleotide
  Sense strand starting at position 745 of SEQ ID NO: 1885314
ugaugucauguucagaggu

SEQ ID NO: 2332803 - RNA, 19 nt, Artificial Sequence
  Description of Artificial Sequence: Synthetic oligonucleotide
  Antisense strand to SEQ ID NO: 2332802
accucugaacaugacauca

SEQ ID NO: 2332804 - RNA, 19 nt, Artificial Sequence
  Description of Artificial Sequence: Synthetic oligonucleotide
  Sense strand starting at position 952 of SEQ ID NO: 1885314
acaaguuauuccuugugca

SEQ ID NO: 2332805 - RNA, 19 nt, Artificial Sequence
  Description of Artificial Sequence: Synthetic oligonucleotide
  Antisense strand to SEQ ID NO: 2332804
ugcacaaggaauaacuugu

SEQ ID NO: 2332806 - RNA, 19 nt, Artificial Sequence
  Description of Artificial Sequence: Synthetic oligonucleotide
  Sense strand starting at position 959 of SEQ ID NO: 1885314
auuccuugugcauaauagu

SEQ ID NO: 2332807 - RNA, 19 nt, Artificial Sequence
  Description of Artificial Sequence: Synthetic oligonucleotide
  Antisense strand to SEQ ID NO: 2332806
acuauuaugcacaaggaau

SEQ ID NO: 2332808 - RNA, 19 nt, Artificial Sequence
  Description of Artificial Sequence: Synthetic oligonucleotide
  Sense strand starting at position 968 of SEQ ID NO: 1885314
gcauaauaguucuugggcu

SEQ ID NO: 2332809 - RNA, 19 nt, Artificial Sequence
  Description of Artificial Sequence: Synthetic oligonucleotide
  Antisense strand to SEQ ID NO: 2332808
agcccaagaacuauuaugc

SEQ ID NO: 2332810 - RNA, 19 nt, Artificial Sequence
  Description of Artificial Sequence: Synthetic oligonucleotide
  Sense strand starting at position 970 of SEQ ID NO: 1885314
auaauaguucuugggcuca

SEQ ID NO: 2332811 - RNA, 19 nt, Artificial Sequence
  Description of Artificial Sequence: Synthetic oligonucleotide
  Antisense strand to SEQ ID NO: 2332810
ugagcccaagaacuauuau

SEQ ID NO: 2332812 - RNA, 19 nt, Artificial Sequence
  Description of Artificial Sequence: Synthetic oligonucleotide
  Sense strand starting at position 999 of SEQ ID NO: 1885314
gugcucuuucuauguauuu

SEQ ID NO: 2332813 - RNA, 19 nt, Artificial Sequence
  Description of Artificial Sequence: Synthetic oligonucleotide
  Antisense strand to SEQ ID NO: 2332812
aaauacauagaaagagcac

SEQ ID NO: 2332814 - RNA, 19 nt, Artificial Sequence
  Description of Artificial Sequence: Synthetic oligonucleotide
  Sense strand starting at position 1000 of SEQ ID NO: 1885314
ugcucuuucuauguauuua

SEQ ID NO: 2332815 - RNA, 19 nt, Artificial Sequence
  Description of Artificial Sequence: Synthetic oligonucleotide
  Antisense strand to SEQ ID NO: 2332814
uaaauacauagaaagagca

SEQ ID NO: 2332816 - RNA, 19 nt, Artificial Sequence
  Description of Artificial Sequence: Synthetic oligonucleotide
  Sense strand starting at position 1421 of SEQ ID NO: 1885314
ccuggucuccuuuagagua

SEQ ID NO: 2332817 - RNA, 19 nt, Artificial Sequence
  Description of Artificial Sequence: Synthetic oligonucleotide
  Antisense strand to SEQ ID NO: 2332816
uacucuaaaggagaccagg

SEQ ID NO: 2332818 - RNA, 19 nt, Artificial Sequence
  Description of Artificial Sequence: Synthetic oligonucleotide
  Sense strand starting at position 1434 of SEQ ID NO: 1885314
agaguaaugugcuuugauu

SEQ ID NO: 2332819 - RNA, 19 nt, Artificial Sequence
  Description of Artificial Sequence: Synthetic oligonucleotide
  Antisense strand to SEQ ID NO: 2332818
aaucaaagcacauuacucu

SEQ ID NO: 2332820 - RNA, 19 nt, Artificial Sequence
  Description of Artificial Sequence: Synthetic oligonucleotide
  Sense strand starting at position 1436 of SEQ ID NO: 1885314
aguaaugugcuuugauuau

SEQ ID NO: 2332821 - RNA, 19 nt, Artificial Sequence
  Description of Artificial Sequence: Synthetic oligonucleotide
  Antisense strand to SEQ ID NO: 2332820
auaaucaaagcacauuacu

SEQ ID NO: 2332822 - RNA, 19 nt, Artificial Sequence
  Description of Artificial Sequence: Synthetic oligonucleotide
  Sense strand starting at position 1440 of SEQ ID NO: 1885314
augugcuuugauuauguaa

SEQ ID NO: 2332823 - RNA, 19 nt, Artificial Sequence
  Description of Artificial Sequence: Synthetic oligonucleotide
  Antisense strand to SEQ ID NO: 2332822
uuacauaaucaaagcacau

SEQ ID NO: 2332824 - RNA, 19 nt, Artificial Sequence
  Description of Artificial Sequence: Synthetic oligonucleotide
  Sense strand starting at position 1443 of SEQ ID NO: 1885314
ugcuuugauuauguaacaa

SEQ ID NO: 2332825 - RNA, 19 nt, Artificial Sequence
  Description of Artificial Sequence: Synthetic oligonucleotide
  Antisense strand to SEQ ID NO: 2332824
uuguuacauaaucaaagca

SEQ ID NO: 2332826 - RNA, 19 nt, Artificial Sequence
  Description of Artificial Sequence: Synthetic oligonucleotide
  Sense strand starting at position 1455 of SEQ ID NO: 1885314
guaacaauuguggaguucu

SEQ ID NO: 2332827 - RNA, 19 nt, Artificial Sequence
  Description of Artificial Sequence: Synthetic oligonucleotide
  Antisense strand to SEQ ID NO: 2332826
agaacuccacaauuguuac

SEQ ID NO: 2332828 - RNA, 19 nt, Artificial Sequence
  Description of Artificial Sequence: Synthetic oligonucleotide
  Sense strand starting at position 1572 of SEQ ID NO: 1885314
cuauguuucuauguguaca

SEQ ID NO: 2332829 - RNA, 19 nt, Artificial Sequence
  Description of Artificial Sequence: Synthetic oligonucleotide
  Antisense strand to SEQ ID NO: 2332828
uguacacauagaaacauag

SEQ ID NO: 2332830 - RNA, 19 nt, Artificial Sequence
  Description of Artificial Sequence: Synthetic oligonucleotide
  Sense strand starting at position 1605 of SEQ ID NO: 1885314
gccauccuucccuaggaga

SEQ ID NO: 2332831 - RNA, 19 nt, Artificial Sequence
  Description of Artificial Sequence: Synthetic oligonucleotide
  Antisense strand to SEQ ID NO: 2332830
ucuccuagggaaggauggc

SEQ ID NO: 2332832 - RNA, 19 nt, Artificial Sequence
  Description of Artificial Sequence: Synthetic oligonucleotide
  Sense strand starting at position 1620 of SEQ ID NO: 1885314
gagaauaacuggucaccug

SEQ ID NO: 2332833 - RNA, 19 nt, Artificial Sequence
  Description of Artificial Sequence: Synthetic oligonucleotide
  Antisense strand to SEQ ID NO: 2332832
caggugaccaguuauucuc

SEQ ID NO: 2332834 - RNA, 19 nt, Artificial Sequence
  Description of Artificial Sequence: Synthetic oligonucleotide
  Sense strand starting at position 1801 of SEQ ID NO: 1885314
gggagaugucuguaggucu

SEQ ID NO: 2332835 - RNA, 19 nt, Artificial Sequence
  Description of Artificial Sequence: Synthetic oligonucleotide
  Antisense strand to SEQ ID NO: 2332834
agaccuacagacaucuccc

SEQ ID NO: 2332836 - RNA, 19 nt, Artificial Sequence
  Description of Artificial Sequence: Synthetic oligonucleotide
  Sense strand starting at position 1921 of SEQ ID NO: 1885314
aucaaauucuguuuagagg

SEQ ID NO: 2332837 - RNA, 19 nt, Artificial Sequence
  Description of Artificial Sequence: Synthetic oligonucleotide
  Antisense strand to SEQ ID NO: 2332836
ccucuaaacagaauuugau

SEQ ID NO: 2332838 - RNA, 19 nt, Artificial Sequence
  Description of Artificial Sequence: Synthetic oligonucleotide
  Sense strand starting at position 2003 of SEQ ID NO: 1885314
cagagaguucuggaauguc

SEQ ID NO: 2332839 - RNA, 19 nt, Artificial Sequence
  Description of Artificial Sequence: Synthetic oligonucleotide
  Antisense strand to SEQ ID NO: 2332838
gacauuccagaacucucug

SEQ ID NO: 2332840 - RNA, 19 nt, Artificial Sequence
  Description of Artificial Sequence: Synthetic oligonucleotide
  Sense strand starting at position 2883 of SEQ ID NO: 1885314
agucacgcccucuaacaau

SEQ ID NO: 2332841 - RNA, 19 nt, Artificial Sequence
  Description of Artificial Sequence: Synthetic oligonucleotide
  Antisense strand to SEQ ID NO: 2332840
auuguuagagggcgugacu

SEQ ID NO: 2332842 - RNA, 19 nt, Artificial Sequence
  Description of Artificial Sequence: Synthetic oligonucleotide
  Sense strand starting at position 3039 of SEQ ID NO: 1885314
gugucugugugacuagaaa

SEQ ID NO: 2332843 - RNA, 19 nt, Artificial Sequence
  Description of Artificial Sequence: Synthetic oligonucleotide
  Antisense strand to SEQ ID NO: 2332842
uuucuagucacacagacac

SEQ ID NO: 2332844 - RNA, 19 nt, Artificial Sequence
  Description of Artificial Sequence: Synthetic oligonucleotide
  Sense strand starting at position 3070 of SEQ ID NO: 1885314
acagguaguccaggcuuau

SEQ ID NO: 2332845 - RNA, 19 nt, Artificial Sequence
  Description of Artificial Sequence: Synthetic oligonucleotide
  Antisense strand to SEQ ID NO: 2332844
auaagccuggacuaccugu

SEQ ID NO: 2332846 - RNA, 19 nt, Artificial Sequence
  Description of Artificial Sequence: Synthetic oligonucleotide
  Sense strand starting at position 3074 of SEQ ID NO: 1885314
guaguccaggcuuauugua

SEQ ID NO: 2332847 - RNA, 19 nt, Artificial Sequence
  Description of Artificial Sequence: Synthetic oligonucleotide
  Antisense strand to SEQ ID NO: 2332846
uacaauaagccuggacuac

SEQ ID NO: 2332848 - RNA, 19 nt, Artificial Sequence
  Description of Artificial Sequence: Synthetic oligonucleotide
  Sense strand starting at position 3128 of SEQ ID NO: 1885314
guuccuugcccacagaacu

SEQ ID NO: 2332849 - RNA, 19 nt, Artificial Sequence
  Description of Artificial Sequence: Synthetic oligonucleotide
  Antisense strand to SEQ ID NO: 2332848
aguucugugggcaaggaac

SEQ ID NO: 2332850 - RNA, 19 nt, Artificial Sequence
  Description of Artificial Sequence: Synthetic oligonucleotide
  Sense strand starting at position 3276 of SEQ ID NO: 1885314
uuucuaugugaccguaaua

SEQ ID NO: 2332851 - RNA, 19 nt, Artificial Sequence
  Description of Artificial Sequence: Synthetic oligonucleotide
  Antisense strand to SEQ ID NO: 2332850
uauuacggucacauagaaa

SEQ ID NO: 2332852 - RNA, 19 nt, Artificial Sequence
  Description of Artificial Sequence: Synthetic oligonucleotide
  Sense strand starting at position 3547 of SEQ ID NO: 1885314
ggagauuccuaacccuauc

SEQ ID NO: 2332853 - RNA, 19 nt, Artificial Sequence
  Description of Artificial Sequence: Synthetic oligonucleotide
  Antisense strand to SEQ ID NO: 2332852
gauaggguuaggaaucucc

SEQ ID NO: 2332854 - RNA, 19 nt, Artificial Sequence
  Description of Artificial Sequence: Synthetic oligonucleotide
  Sense strand starting at position 3587 of SEQ ID NO: 1885314
gggcguugacuucaaacca

SEQ ID NO: 2332855 - RNA, 19 nt, Artificial Sequence
  Description of Artificial Sequence: Synthetic oligonucleotide
  Antisense strand to SEQ ID NO: 2332854
ugguuugaagucaacgccc

SEQ ID NO: 2332856 - RNA, 19 nt, Artificial Sequence
  Description of Artificial Sequence: Synthetic oligonucleotide
  Sense strand starting at position 3690 of SEQ ID NO: 1885314
uacauugagugugcugaga

SEQ ID NO: 2332857 - RNA, 19 nt, Artificial Sequence
  Description of Artificial Sequence: Synthetic oligonucleotide
  Antisense strand to SEQ ID NO: 2332856
ucucagcacacucaaugua

SEQ ID NO: 2332858 - RNA, 19 nt, Artificial Sequence
  Description of Artificial Sequence: Synthetic oligonucleotide
  Sense strand starting at position 3787 of SEQ ID NO: 1885314
uguuacucacaugguuuaa

SEQ ID NO: 2332859 - RNA, 19 nt, Artificial Sequence
  Description of Artificial Sequence: Synthetic oligonucleotide
  Antisense strand to SEQ ID NO: 2332858
uuaaaccaugugaguaaca

SEQ ID NO: 2332860 - RNA, 19 nt, Artificial Sequence
  Description of Artificial Sequence: Synthetic oligonucleotide
  Sense strand starting at position 3876 of SEQ ID NO: 1885314
gugacugacuucucccgaa

SEQ ID NO: 2332861 - RNA, 19 nt, Artificial Sequence
  Description of Artificial Sequence: Synthetic oligonucleotide
  Antisense strand to SEQ ID NO: 2332860
uucgggagaagucagucac

SEQ ID NO: 2332862 - RNA, 19 nt, Artificial Sequence
  Description of Artificial Sequence: Synthetic oligonucleotide
  Sense strand starting at position 3880 of SEQ ID NO: 1885314
cugacuucucccgaaacga

SEQ ID NO: 2332863 - RNA, 19 nt, Artificial Sequence
  Description of Artificial Sequence: Synthetic oligonucleotide
  Antisense strand to SEQ ID NO: 2332862
ucguuucgggagaagucag

SEQ ID NO: 2332864 - RNA, 19 nt, Artificial Sequence
  Description of Artificial Sequence: Synthetic oligonucleotide
  Sense strand starting at position 97 of SEQ ID NO: 1885315
gcaggaguucccgaguccu

SEQ ID NO: 2332865 - RNA, 19 nt, Artificial Sequence
  Description of Artificial Sequence: Synthetic oligonucleotide
  Antisense strand to SEQ ID NO: 2332864
aggacucgggaacuccugc

SEQ ID NO: 2332866 - RNA, 19 nt, Artificial Sequence
  Description of Artificial Sequence: Synthetic oligonucleotide
  Sense strand starting at position 117 of SEQ ID NO: 1885315
aguucugagccagguguuu

SEQ ID NO: 2332867 - RNA, 19 nt, Artificial Sequence
  Description of Artificial Sequence: Synthetic oligonucleotide
  Antisense strand to SEQ ID NO: 2332866
aaacaccuggcucagaacu

SEQ ID NO: 2332868 - RNA, 19 nt, Artificial Sequence
  Description of Artificial Sequence: Synthetic oligonucleotide
  Sense strand starting at position 190 of SEQ ID NO: 1885315
gaaggaauguucucuaugg

SEQ ID NO: 2332869 - RNA, 19 nt, Artificial Sequence
  Description of Artificial Sequence: Synthetic oligonucleotide
  Antisense strand to SEQ ID NO: 2332868
ccauagagaacauuccuuc

SEQ ID NO: 2332870 - RNA, 19 nt, Artificial Sequence
  Description of Artificial Sequence: Synthetic oligonucleotide
  Sense strand starting at position 191 of SEQ ID NO: 1885315
aaggaauguucucuaugga

SEQ ID NO: 2332871 - RNA, 19 nt, Artificial Sequence
  Description of Artificial Sequence: Synthetic oligonucleotide
  Antisense strand to SEQ ID NO: 2332870
uccauagagaacauuccuu

SEQ ID NO: 2332872 - RNA, 19 nt, Artificial Sequence
  Description of Artificial Sequence: Synthetic oligonucleotide
  Sense strand starting at position 194 of SEQ ID NO: 1885315
gaauguucucuauggacuu

SEQ ID NO: 2332873 - RNA, 19 nt, Artificial Sequence
  Description of Artificial Sequence: Synthetic oligonucleotide
  Antisense strand to SEQ ID NO: 2332872
aaguccauagagaacauuc

SEQ ID NO: 2332874 - RNA, 19 nt, Artificial Sequence
  Description of Artificial Sequence: Synthetic oligonucleotide
  Sense strand starting at position 326 of SEQ ID NO: 1885315
ggcagagcucgcuuuguuc

SEQ ID NO: 2332875 - RNA, 19 nt, Artificial Sequence
  Description of Artificial Sequence: Synthetic oligonucleotide
  Antisense strand to SEQ ID NO: 2332874
gaacaaagcgagcucugcc

SEQ ID NO: 2332876 - RNA, 19 nt, Artificial Sequence
  Description of Artificial Sequence: Synthetic oligonucleotide
  Sense strand starting at position 888 of SEQ ID NO: 1885315
aaggaaagccgucagggau

SEQ ID NO: 2332877 - RNA, 19 nt, Artificial Sequence
  Description of Artificial Sequence: Synthetic oligonucleotide
  Antisense strand to SEQ ID NO: 2332876
aucccugacggcuuuccuu

SEQ ID NO: 2332878 - RNA, 19 nt, Artificial Sequence
  Description of Artificial Sequence: Synthetic oligonucleotide
  Sense strand starting at position 896 of SEQ ID NO: 1885315
ccgucagggaugcauguua

SEQ ID NO: 2332879 - RNA, 19 nt, Artificial Sequence
  Description of Artificial Sequence: Synthetic oligonucleotide
  Antisense strand to SEQ ID NO: 2332878
uaacaugcaucccugacgg

SEQ ID NO: 2332880 - RNA, 19 nt, Artificial Sequence
  Description of Artificial Sequence: Synthetic oligonucleotide
  Sense strand starting at position 1361 of SEQ ID NO: 1885315
gcauuagaaaugugucaug

SEQ ID NO: 2332881 - RNA, 19 nt, Artificial Sequence
  Description of Artificial Sequence: Synthetic oligonucleotide
  Antisense strand to SEQ ID NO: 2332880
caugacacauuucuaaugc

SEQ ID NO: 2332882 - RNA, 19 nt, Artificial Sequence
  Description of Artificial Sequence: Synthetic oligonucleotide
  Sense strand starting at position 1383 of SEQ ID NO: 1885315
agaagagacuucuaauuaa

SEQ ID NO: 2332883 - RNA, 19 nt, Artificial Sequence
  Description of Artificial Sequence: Synthetic oligonucleotide
  Antisense strand to SEQ ID NO: 2332882
uuaauuagaagucucuucu

SEQ ID NO: 2332884 - RNA, 19 nt, Artificial Sequence
  Description of Artificial Sequence: Synthetic oligonucleotide
  Sense strand starting at position 1386 of SEQ ID NO: 1885315
agagacuucuaauuaaagc

SEQ ID NO: 2332885 - RNA, 19 nt, Artificial Sequence
  Description of Artificial Sequence: Synthetic oligonucleotide
  Antisense strand to SEQ ID NO: 2332884
gcuuuaauuagaagucucu

SEQ ID NO: 2332886 - RNA, 19 nt, Artificial Sequence
  Description of Artificial Sequence: Synthetic oligonucleotide
  Sense strand starting at position 1861 of SEQ ID NO: 1885315
cuuucuggugucugugaaa

SEQ ID NO: 2332887 - RNA, 19 nt, Artificial Sequence
  Description of Artificial Sequence: Synthetic oligonucleotide
  Antisense strand to SEQ ID NO: 2332886
uuucacagacaccagaaag

SEQ ID NO: 2332888 - RNA, 19 nt, Artificial Sequence
  Description of Artificial Sequence: Synthetic oligonucleotide
  Sense strand starting at position 1890 of SEQ ID NO: 1885315
ggacaucgauccguuucaa

SEQ ID NO: 2332889 - RNA, 19 nt, Artificial Sequence
  Description of Artificial Sequence: Synthetic oligonucleotide
  Antisense strand to SEQ ID NO: 2332888
uugaaacggaucgaugucc

SEQ ID NO: 2332890 - RNA, 19 nt, Artificial Sequence
  Description of Artificial Sequence: Synthetic oligonucleotide
  Sense strand starting at position 2036 of SEQ ID NO: 1885315
cucgcugugaccgaacaaa

SEQ ID NO: 2332891 - RNA, 19 nt, Artificial Sequence
  Description of Artificial Sequence: Synthetic oligonucleotide
  Antisense strand to SEQ ID NO: 2332890
uuuguucggucacagcgag

SEQ ID NO: 2332892 - RNA, 19 nt, Artificial Sequence
  Description of Artificial Sequence: Synthetic oligonucleotide
  Sense strand starting at position 2201 of SEQ ID NO: 1885315
agggauucauggcuguguu

SEQ ID NO: 2332893 - RNA, 19 nt, Artificial Sequence
  Description of Artificial Sequence: Synthetic oligonucleotide
  Antisense strand to SEQ ID NO: 2332892
aacacagccaugaaucccu

SEQ ID NO: 2332894 - RNA, 19 nt, Artificial Sequence
  Description of Artificial Sequence: Synthetic oligonucleotide
  Sense strand starting at position 2202 of SEQ ID NO: 1885315
gggauucauggcuguguuu

SEQ ID NO: 2332895 - RNA, 19 nt, Artificial Sequence
  Description of Artificial Sequence: Synthetic oligonucleotide
  Antisense strand to SEQ ID NO: 2332894
aaacacagccaugaauccc

SEQ ID NO: 2332896 - RNA, 19 nt, Artificial Sequence
  Description of Artificial Sequence: Synthetic oligonucleotide
  Sense strand starting at position 2280 of SEQ ID NO: 1885315
uccuaucuggcucaucaga

SEQ ID NO: 2332897 - RNA, 19 nt, Artificial Sequence
  Description of Artificial Sequence: Synthetic oligonucleotide
  Antisense strand to SEQ ID NO: 2332896
ucugaugagccagauagga

SEQ ID NO: 2332898 - RNA, 19 nt, Artificial Sequence
  Description of Artificial Sequence: Synthetic oligonucleotide
  Sense strand starting at position 2282 of SEQ ID NO: 1885315
cuaucuggcucaucagauc

SEQ ID NO: 2332899 - RNA, 19 nt, Artificial Sequence
  Description of Artificial Sequence: Synthetic oligonucleotide
  Antisense strand to SEQ ID NO: 2332898
gaucugaugagccagauag

SEQ ID NO: 2332900 - RNA, 19 nt, Artificial Sequence
  Description of Artificial Sequence: Synthetic oligonucleotide
  Sense strand starting at position 2384 of SEQ ID NO: 1885315
gucacaacuccacgaaugu

SEQ ID NO: 2332901 - RNA, 19 nt, Artificial Sequence
  Description of Artificial Sequence: Synthetic oligonucleotide
  Antisense strand to SEQ ID NO: 2332900
acauucguggaguugugac

SEQ ID NO: 2332902 - RNA, 19 nt, Artificial Sequence
  Description of Artificial Sequence: Synthetic oligonucleotide
  Sense strand starting at position 2385 of SEQ ID NO: 1885315
ucacaacuccacgaauguu

SEQ ID NO: 2332903 - RNA, 19 nt, Artificial Sequence
  Description of Artificial Sequence: Synthetic oligonucleotide
  Antisense strand to SEQ ID NO: 2332902
aacauucguggaguuguga

SEQ ID NO: 2332904 - RNA, 19 nt, Artificial Sequence
  Description of Artificial Sequence: Synthetic oligonucleotide
  Sense strand starting at position 2472 of SEQ ID NO: 1885315
ccagcaauuaucuggccga

SEQ ID NO: 2332905 - RNA, 19 nt, Artificial Sequence
  Description of Artificial Sequence: Synthetic oligonucleotide
  Antisense strand to SEQ ID NO: 2332904
ucggccagauaauugcugg

SEQ ID NO: 2332906 - RNA, 19 nt, Artificial Sequence
  Description of Artificial Sequence: Synthetic oligonucleotide
  Sense strand starting at position 2476 of SEQ ID NO: 1885315
caauuaucuggccgagcuu

SEQ ID NO: 2332907 - RNA, 19 nt, Artificial Sequence
  Description of Artificial Sequence: Synthetic oligonucleotide
  Antisense strand to SEQ ID NO: 2332906
aagcucggccagauaauug

SEQ ID NO: 2332908 - RNA, 19 nt, Artificial Sequence
  Description of Artificial Sequence: Synthetic oligonucleotide
  Sense strand starting at position 2477 of SEQ ID NO: 1885315
aauuaucuggccgagcuuu

SEQ ID NO: 2332909 - RNA, 19 nt, Artificial Sequence
  Description of Artificial Sequence: Synthetic oligonucleotide
  Antisense strand to SEQ ID NO: 2332908
aaagcucggccagauaauu

SEQ ID NO: 2332910 - RNA, 19 nt, Artificial Sequence
  Description of Artificial Sequence: Synthetic oligonucleotide
  Sense strand starting at position 2617 of SEQ ID NO: 1885315
ccgugacaucuguguagac

SEQ ID NO: 2332911 - RNA, 19 nt, Artificial Sequence
  Description of Artificial Sequence: Synthetic oligonucleotide
  Antisense strand to SEQ ID NO: 2332910
gucuacacagaugucacgg

SEQ ID NO: 2332912 - RNA, 19 nt, Artificial Sequence
  Description of Artificial Sequence: Synthetic oligonucleotide
  Sense strand starting at position 2619 of SEQ ID NO: 1885315
gugacaucuguguagacgu

SEQ ID NO: 2332913 - RNA, 19 nt, Artificial Sequence
  Description of Artificial Sequence: Synthetic oligonucleotide
  Antisense strand to SEQ ID NO: 2332912
acgucuacacagaugucac

SEQ ID NO: 2332914 - RNA, 19 nt, Artificial Sequence
  Description of Artificial Sequence: Synthetic oligonucleotide
  Sense strand starting at position 2691 of SEQ ID NO: 1885315
gugccaagagcaggaaauu

SEQ ID NO: 2332915 - RNA, 19 nt, Artificial Sequence
  Description of Artificial Sequence: Synthetic oligonucleotide
  Antisense strand to SEQ ID NO: 2332914
aauuuccugcucuuggcac

SEQ ID NO: 2332916 - RNA, 19 nt, Artificial Sequence
  Description of Artificial Sequence: Synthetic oligonucleotide
  Sense strand starting at position 2769 of SEQ ID NO: 1885315
gcgccuuggccuccggaua

SEQ ID NO: 2332917 - RNA, 19 nt, Artificial Sequence
  Description of Artificial Sequence: Synthetic oligonucleotide
  Antisense strand to SEQ ID NO: 2332916
uauccggaggccaaggcgc

SEQ ID NO: 2332918 - RNA, 19 nt, Artificial Sequence
  Description of Artificial Sequence: Synthetic oligonucleotide
  Sense strand starting at position 2889 of SEQ ID NO: 1885315
ccugcucaagcauaaauga

SEQ ID NO: 2332919 - RNA, 19 nt, Artificial Sequence
  Description of Artificial Sequence: Synthetic oligonucleotide
  Antisense strand to SEQ ID NO: 2332918
ucauuuaugcuugagcagg

SEQ ID NO: 2332920 - RNA, 19 nt, Artificial Sequence
  Description of Artificial Sequence: Synthetic oligonucleotide
  Sense strand starting at position 2934 of SEQ ID NO: 1885315
cugagaggaucucaaaugu

SEQ ID NO: 2332921 - RNA, 19 nt, Artificial Sequence
  Description of Artificial Sequence: Synthetic oligonucleotide
  Antisense strand to SEQ ID NO: 2332920
acauuugagauccucucag

SEQ ID NO: 2332922 - RNA, 19 nt, Artificial Sequence
  Description of Artificial Sequence: Synthetic oligonucleotide
  Sense strand starting at position 2938 of SEQ ID NO: 1885315
gaggaucucaaauguguag

SEQ ID NO: 2332923 - RNA, 19 nt, Artificial Sequence
  Description of Artificial Sequence: Synthetic oligonucleotide
  Antisense strand to SEQ ID NO: 2332922
cuacacauuugagauccuc

SEQ ID NO: 2332924 - RNA, 19 nt, Artificial Sequence
  Description of Artificial Sequence: Synthetic oligonucleotide
  Sense strand starting at position 2945 of SEQ ID NO: 1885315
ucaaauguguagcccuuau

SEQ ID NO: 2332925 - RNA, 19 nt, Artificial Sequence
  Description of Artificial Sequence: Synthetic oligonucleotide
  Antisense strand to SEQ ID NO: 2332924
auaagggcuacacauuuga

SEQ ID NO: 2332926 - RNA, 19 nt, Artificial Sequence
  Description of Artificial Sequence: Synthetic oligonucleotide
  Sense strand starting at position 3047 of SEQ ID NO: 1885315
aagagacggugauugugau

SEQ ID NO: 2332927 - RNA, 19 nt, Artificial Sequence
  Description of Artificial Sequence: Synthetic oligonucleotide
  Antisense strand to SEQ ID NO: 2332926
aucacaaucaccgucucuu

SEQ ID NO: 2332928 - RNA, 19 nt, Artificial Sequence
  Description of Artificial Sequence: Synthetic oligonucleotide
  Sense strand starting at position 3053 of SEQ ID NO: 1885315
cggugauugugaucugcua

SEQ ID NO: 2332929 - RNA, 19 nt, Artificial Sequence
  Description of Artificial Sequence: Synthetic oligonucleotide
  Antisense strand to SEQ ID NO: 2332928
uagcagaucacaaucaccg

SEQ ID NO: 2332930 - RNA, 19 nt, Artificial Sequence
  Description of Artificial Sequence: Synthetic oligonucleotide
  Sense strand starting at position 3055 of SEQ ID NO: 1885315
gugauugugaucugcuacu

SEQ ID NO: 2332931 - RNA, 19 nt, Artificial Sequence
  Description of Artificial Sequence: Synthetic oligonucleotide
  Antisense strand to SEQ ID NO: 2332930
aguagcagaucacaaucac

SEQ ID NO: 2332932 - RNA, 19 nt, Artificial Sequence
  Description of Artificial Sequence: Synthetic oligonucleotide
  Sense strand starting at position 3246 of SEQ ID NO: 1885315
uuucuugccguuugaggau

SEQ ID NO: 2332933 - RNA, 19 nt, Artificial Sequence
  Description of Artificial Sequence: Synthetic oligonucleotide
  Antisense strand to SEQ ID NO: 2332932
auccucaaacggcaagaaa

SEQ ID NO: 2332934 - RNA, 19 nt, Artificial Sequence
  Description of Artificial Sequence: Synthetic oligonucleotide
  Sense strand starting at position 3252 of SEQ ID NO: 1885315
gccguuugaggaugagaug

SEQ ID NO: 2332935 - RNA, 19 nt, Artificial Sequence
  Description of Artificial Sequence: Synthetic oligonucleotide
  Antisense strand to SEQ ID NO: 2332934
caucucauccucaaacggc

SEQ ID NO: 2332936 - RNA, 19 nt, Artificial Sequence
  Description of Artificial Sequence: Synthetic oligonucleotide
  Sense strand starting at position 3360 of SEQ ID NO: 1885315
ggacgcgugugauuucaga

SEQ ID NO: 2332937 - RNA, 19 nt, Artificial Sequence
  Description of Artificial Sequence: Synthetic oligonucleotide
  Antisense strand to SEQ ID NO: 2332936
ucugaaaucacacgcgucc

SEQ ID NO: 2332938 - RNA, 19 nt, Artificial Sequence
  Description of Artificial Sequence: Synthetic oligonucleotide
  Sense strand starting at position 3484 of SEQ ID NO: 1885315
ggccuuugguccuuuauga

SEQ ID NO: 2332939 - RNA, 19 nt, Artificial Sequence
  Description of Artificial Sequence: Synthetic oligonucleotide
  Antisense strand to SEQ ID NO: 2332938
ucauaaaggaccaaaggcc

SEQ ID NO: 2332940 - RNA, 19 nt, Artificial Sequence
  Description of Artificial Sequence: Synthetic oligonucleotide
  Sense strand starting at position 3632 of SEQ ID NO: 1885315
ggcacagucuggccuuauu

SEQ ID NO: 2332941 - RNA, 19 nt, Artificial Sequence
  Description of Artificial Sequence: Synthetic oligonucleotide
  Antisense strand to SEQ ID NO: 2332940
aauaaggccagacugugcc

SEQ ID NO: 2332942 - RNA, 19 nt, Artificial Sequence
  Description of Artificial Sequence: Synthetic oligonucleotide
  Sense strand starting at position 3669 of SEQ ID NO: 1885315
gccugacacggucagaguu

SEQ ID NO: 2332943 - RNA, 19 nt, Artificial Sequence
  Description of Artificial Sequence: Synthetic oligonucleotide
  Antisense strand to SEQ ID NO: 2332942
aacucugaccgugucaggc

SEQ ID NO: 2332944 - RNA, 19 nt, Artificial Sequence
  Description of Artificial Sequence: Synthetic oligonucleotide
  Sense strand starting at position 125 of SEQ ID NO: 1885316
acaguugaauuaucuggaa

SEQ ID NO: 2332945 - RNA, 19 nt, Artificial Sequence
  Description of Artificial Sequence: Synthetic oligonucleotide
  Antisense strand to SEQ ID NO: 2332944
uuccagauaauucaacugu

SEQ ID NO: 2332946 - RNA, 19 nt, Artificial Sequence
  Description of Artificial Sequence: Synthetic oligonucleotide
  Sense strand starting at position 186 of SEQ ID NO: 1885316
ggaccuugcaccgagaucu

SEQ ID NO: 2332947 - RNA, 19 nt, Artificial Sequence
  Description of Artificial Sequence: Synthetic oligonucleotide
  Antisense strand to SEQ ID NO: 2332946
agaucucggugcaaggucc

SEQ ID NO: 2332948 - RNA, 19 nt, Artificial Sequence
  Description of Artificial Sequence: Synthetic oligonucleotide
  Sense strand starting at position 222 of SEQ ID NO: 1885316
acugucgugggugagaauu

SEQ ID NO: 2332949 - RNA, 19 nt, Artificial Sequence
  Description of Artificial Sequence: Synthetic oligonucleotide
  Antisense strand to SEQ ID NO: 2332948
aauucucacccacgacagu

SEQ ID NO: 2332950 - RNA, 19 nt, Artificial Sequence
  Description of Artificial Sequence: Synthetic oligonucleotide
  Sense strand starting at position 230 of SEQ ID NO: 1885316
gggugagaauuugagaacu

SEQ ID NO: 2332951 - RNA, 19 nt, Artificial Sequence
  Description of Artificial Sequence: Synthetic oligonucleotide
  Antisense strand to SEQ ID NO: 2332950
aguucucaaauucucaccc

SEQ ID NO: 2332952 - RNA, 19 nt, Artificial Sequence
  Description of Artificial Sequence: Synthetic oligonucleotide
  Sense strand starting at position 232 of SEQ ID NO: 1885316
gugagaauuugagaacucu

SEQ ID NO: 2332953 - RNA, 19 nt, Artificial Sequence
  Description of Artificial Sequence: Synthetic oligonucleotide
  Antisense strand to SEQ ID NO: 2332952
agaguucucaaauucucac

SEQ ID NO: 2332954 - RNA, 19 nt, Artificial Sequence
  Description of Artificial Sequence: Synthetic oligonucleotide
  Sense strand starting at position 388 of SEQ ID NO: 1885316
agccuauuaccagaaguca

SEQ ID NO: 2332955 - RNA, 19 nt, Artificial Sequence
  Description of Artificial Sequence: Synthetic oligonucleotide
  Antisense strand to SEQ ID NO: 2332954
ugacuucugguaauaggcu

SEQ ID NO: 2332956 - RNA, 19 nt, Artificial Sequence
  Description of Artificial Sequence: Synthetic oligonucleotide
  Sense strand starting at position 403 of SEQ ID NO: 1885316
gucaccagacauuguacau

SEQ ID NO: 2332957 - RNA, 19 nt, Artificial Sequence
  Description of Artificial Sequence: Synthetic oligonucleotide
  Antisense strand to SEQ ID NO: 2332956
auguacaaugucuggugac

SEQ ID NO: 2332958 - RNA, 19 nt, Artificial Sequence
  Description of Artificial Sequence: Synthetic oligonucleotide
  Sense strand starting at position 445 of SEQ ID NO: 1885316
ggucuaggaugacugcaua

SEQ ID NO: 2332959 - RNA, 19 nt, Artificial Sequence
  Description of Artificial Sequence: Synthetic oligonucleotide
  Antisense strand to SEQ ID NO: 2332958
uaugcagucauccuagacc

SEQ ID NO: 2332960 - RNA, 19 nt, Artificial Sequence
  Description of Artificial Sequence: Synthetic oligonucleotide
  Sense strand starting at position 563 of SEQ ID NO: 1885316
agaccugauuccuccagau

SEQ ID NO: 2332961 - RNA, 19 nt, Artificial Sequence
  Description of Artificial Sequence: Synthetic oligonucleotide
  Antisense strand to SEQ ID NO: 2332960
aucuggaggaaucaggucu

SEQ ID NO: 2332962 - RNA, 19 nt, Artificial Sequence
  Description of Artificial Sequence: Synthetic oligonucleotide
  Sense strand starting at position 654 of SEQ ID NO: 1885316
ggaagaauaugcuuguuuc

SEQ ID NO: 2332963 - RNA, 19 nt, Artificial Sequence
  Description of Artificial Sequence: Synthetic oligonucleotide
  Antisense strand to SEQ ID NO: 2332962
gaaacaagcauauucuucc

SEQ ID NO: 2332964 - RNA, 19 nt, Artificial Sequence
  Description of Artificial Sequence: Synthetic oligonucleotide
  Sense strand starting at position 1103 of SEQ ID NO: 1885316
cuccacuugugaucaguga

SEQ ID NO: 2332965 - RNA, 19 nt, Artificial Sequence
  Description of Artificial Sequence: Synthetic oligonucleotide
  Antisense strand to SEQ ID NO: 2332964
ucacugaucacaaguggag

SEQ ID NO: 2332966 - RNA, 19 nt, Artificial Sequence
  Description of Artificial Sequence: Synthetic oligonucleotide
  Sense strand starting at position 1123 of SEQ ID NO: 1885316
gcauguuugagagacaccu

SEQ ID NO: 2332967 - RNA, 19 nt, Artificial Sequence
  Description of Artificial Sequence: Synthetic oligonucleotide
  Antisense strand to SEQ ID NO: 2332966
aggugucucucaaacaugc

SEQ ID NO: 2332968 - RNA, 19 nt, Artificial Sequence
  Description of Artificial Sequence: Synthetic oligonucleotide
  Sense strand starting at position 1186 of SEQ ID NO: 1885316
uuccuaauggaaugagguu

SEQ ID NO: 2332969 - RNA, 19 nt, Artificial Sequence
  Description of Artificial Sequence: Synthetic oligonucleotide
  Antisense strand to SEQ ID NO: 2332968
aaccucauuccauuaggaa

SEQ ID NO: 2332970 - RNA, 19 nt, Artificial Sequence
  Description of Artificial Sequence: Synthetic oligonucleotide
  Sense strand starting at position 1323 of SEQ ID NO: 1885316
ccuuaaccacgggauuauu

SEQ ID NO: 2332971 - RNA, 19 nt, Artificial Sequence
  Description of Artificial Sequence: Synthetic oligonucleotide
  Antisense strand to SEQ ID NO: 2332970
aauaaucccgugguuaagg

SEQ ID NO: 2332972 - RNA, 19 nt, Artificial Sequence
  Description of Artificial Sequence: Synthetic oligonucleotide
  Sense strand starting at position 1679 of SEQ ID NO: 1885316
aaaggcuguuggucaaaca

SEQ ID NO: 2332973 - RNA, 19 nt, Artificial Sequence
  Description of Artificial Sequence: Synthetic oligonucleotide
  Antisense strand to SEQ ID NO: 2332972
uguuugaccaacagccuuu

SEQ ID NO: 2332974 - RNA, 19 nt, Artificial Sequence
  Description of Artificial Sequence: Synthetic oligonucleotide
  Sense strand starting at position 1833 of SEQ ID NO: 1885316
uccuguuauguccacauga

SEQ ID NO: 2332975 - RNA, 19 nt, Artificial Sequence
  Description of Artificial Sequence: Synthetic oligonucleotide
  Antisense strand to SEQ ID NO: 2332974
ucauguggacauaacagga

SEQ ID NO: 2332976 - RNA, 19 nt, Artificial Sequence
  Description of Artificial Sequence: Synthetic oligonucleotide
  Sense strand starting at position 1835 of SEQ ID NO: 1885316
cuguuauguccacaugaau

SEQ ID NO: 2332977 - RNA, 19 nt, Artificial Sequence
  Description of Artificial Sequence: Synthetic oligonucleotide
  Antisense strand to SEQ ID NO: 2332976
auucauguggacauaacag

SEQ ID NO: 2332978 - RNA, 19 nt, Artificial Sequence
  Description of Artificial Sequence: Synthetic oligonucleotide
  Sense strand starting at position 1841 of SEQ ID NO: 1885316
uguccacaugaaugugaau

SEQ ID NO: 2332979 - RNA, 19 nt, Artificial Sequence
  Description of Artificial Sequence: Synthetic oligonucleotide
  Antisense strand to SEQ ID NO: 2332978
auucacauucauguggaca

SEQ ID NO: 2332980 - RNA, 19 nt, Artificial Sequence
  Description of Artificial Sequence: Synthetic oligonucleotide
  Sense strand starting at position 2016 of SEQ ID NO: 1885316
gauaucacggcuugacaau

SEQ ID NO: 2332981 - RNA, 19 nt, Artificial Sequence
  Description of Artificial Sequence: Synthetic oligonucleotide
  Antisense strand to SEQ ID NO: 2332980
auugucaagccgugauauc

SEQ ID NO: 2332982 - RNA, 19 nt, Artificial Sequence
  Description of Artificial Sequence: Synthetic oligonucleotide
  Sense strand starting at position 2154 of SEQ ID NO: 1885316
uuaugucgacucuaagaua

SEQ ID NO: 2332983 - RNA, 19 nt, Artificial Sequence
  Description of Artificial Sequence: Synthetic oligonucleotide
  Antisense strand to SEQ ID NO: 2332982
uaucuuagagucgacauaa

SEQ ID NO: 2332984 - RNA, 19 nt, Artificial Sequence
  Description of Artificial Sequence: Synthetic oligonucleotide
  Sense strand starting at position 2195 of SEQ ID NO: 1885316
auuggaauucucuguauuc

SEQ ID NO: 2332985 - RNA, 19 nt, Artificial Sequence
  Description of Artificial Sequence: Synthetic oligonucleotide
  Antisense strand to SEQ ID NO: 2332984
gaauacagagaauuccaau

SEQ ID NO: 2332986 - RNA, 19 nt, Artificial Sequence
  Description of Artificial Sequence: Synthetic oligonucleotide
  Sense strand starting at position 2196 of SEQ ID NO: 1885316
uuggaauucucuguauucu

SEQ ID NO: 2332987 - RNA, 19 nt, Artificial Sequence
  Description of Artificial Sequence: Synthetic oligonucleotide
  Antisense strand to SEQ ID NO: 2332986
agaauacagagaauuccaa

SEQ ID NO: 2332988 - RNA, 19 nt, Artificial Sequence
  Description of Artificial Sequence: Synthetic oligonucleotide
  Sense strand starting at position 2197 of SEQ ID NO: 1885316
uggaauucucuguauucug

SEQ ID NO: 2332989 - RNA, 19 nt, Artificial Sequence
  Description of Artificial Sequence: Synthetic oligonucleotide
  Antisense strand to SEQ ID NO: 2332988
cagaauacagagaauucca

SEQ ID NO: 2332990 - RNA, 19 nt, Artificial Sequence
  Description of Artificial Sequence: Synthetic oligonucleotide
  Sense strand starting at position 2236 of SEQ ID NO: 1885316
aguuauuugugcuuuaaug

SEQ ID NO: 2332991 - RNA, 19 nt, Artificial Sequence
  Description of Artificial Sequence: Synthetic oligonucleotide
  Antisense strand to SEQ ID NO: 2332990
cauuaaagcacaaauaacu

SEQ ID NO: 2332992 - RNA, 19 nt, Artificial Sequence
  Description of Artificial Sequence: Synthetic oligonucleotide
  Sense strand starting at position 2518 of SEQ ID NO: 1885316
agcccaccagauugaaauu

SEQ ID NO: 2332993 - RNA, 19 nt, Artificial Sequence
  Description of Artificial Sequence: Synthetic oligonucleotide
  Antisense strand to SEQ ID NO: 2332992
aauuucaaucuggugggcu

SEQ ID NO: 2332994 - RNA, 19 nt, Artificial Sequence
  Description of Artificial Sequence: Synthetic oligonucleotide
  Sense strand starting at position 2575 of SEQ ID NO: 1885316
uuugacagccagugauaug

SEQ ID NO: 2332995 - RNA, 19 nt, Artificial Sequence
  Description of Artificial Sequence: Synthetic oligonucleotide
  Antisense strand to SEQ ID NO: 2332994
cauaucacuggcugucaaa

SEQ ID NO: 2332996 - RNA, 19 nt, Artificial Sequence
  Description of Artificial Sequence: Synthetic oligonucleotide
  Sense strand starting at position 2828 of SEQ ID NO: 1885316
ucuuauccuucugugauau

SEQ ID NO: 2332997 - RNA, 19 nt, Artificial Sequence
  Description of Artificial Sequence: Synthetic oligonucleotide
  Antisense strand to SEQ ID NO: 2332996
auaucacagaaggauaaga

SEQ ID NO: 2332998 - RNA, 19 nt, Artificial Sequence
  Description of Artificial Sequence: Synthetic oligonucleotide
  Sense strand starting at position 2829 of SEQ ID NO: 1885316
cuuauccuucugugauaug

SEQ ID NO: 2332999 - RNA, 19 nt, Artificial Sequence
  Description of Artificial Sequence: Synthetic oligonucleotide
  Antisense strand to SEQ ID NO: 2332998
cauaucacagaaggauaag

SEQ ID NO: 2333000 - RNA, 19 nt, Artificial Sequence
  Description of Artificial Sequence: Synthetic oligonucleotide
  Sense strand starting at position 2920 of SEQ ID NO: 1885316
aauggucuguaaucuguaa

SEQ ID NO: 2333001 - RNA, 19 nt, Artificial Sequence
  Description of Artificial Sequence: Synthetic oligonucleotide
  Antisense strand to SEQ ID NO: 2333000
uuacagauuacagaccauu

SEQ ID NO: 2333002 - RNA, 19 nt, Artificial Sequence
  Description of Artificial Sequence: Synthetic oligonucleotide
  Sense strand starting at position 2932 of SEQ ID NO: 1885316
ucuguaauguuucuagaau

SEQ ID NO: 2333003 - RNA, 19 nt, Artificial Sequence
  Description of Artificial Sequence: Synthetic oligonucleotide
  Antisense strand to SEQ ID NO: 2333002
auucuagaaacauuacaga

SEQ ID NO: 2333004 - RNA, 19 nt, Artificial Sequence
  Description of Artificial Sequence: Synthetic oligonucleotide
  Sense strand starting at position 2943 of SEQ ID NO: 1885316
ucuagaauuugguagaaag

SEQ ID NO: 2333005 - RNA, 19 nt, Artificial Sequence
  Description of Artificial Sequence: Synthetic oligonucleotide
  Antisense strand to SEQ ID NO: 2333004
cuuucuaccaaauucuaga

SEQ ID NO: 2333006 - RNA, 19 nt, Artificial Sequence
  Description of Artificial Sequence: Synthetic oligonucleotide
  Sense strand starting at position 2977 of SEQ ID NO: 1885316
aauggauuaguguagguca

SEQ ID NO: 2333007 - RNA, 19 nt, Artificial Sequence
  Description of Artificial Sequence: Synthetic oligonucleotide
  Antisense strand to SEQ ID NO: 2333006
ugaccuacacuaauccauu

SEQ ID NO: 2333008 - RNA, 19 nt, Artificial Sequence
  Description of Artificial Sequence: Synthetic oligonucleotide
  Sense strand starting at position 3019 of SEQ ID NO: 1885316
guauaagagcuccaggcua

SEQ ID NO: 2333009 - RNA, 19 nt, Artificial Sequence
  Description of Artificial Sequence: Synthetic oligonucleotide
  Antisense strand to SEQ ID NO: 2333008
uagccuggagcucuuauac

SEQ ID NO: 2333010 - RNA, 19 nt, Artificial Sequence
  Description of Artificial Sequence: Synthetic oligonucleotide
  Sense strand starting at position 3042 of SEQ ID NO: 1885316
ggaacuugucccuaaguca

SEQ ID NO: 2333011 - RNA, 19 nt, Artificial Sequence
  Description of Artificial Sequence: Synthetic oligonucleotide
  Antisense strand to SEQ ID NO: 2333010
ugacuuagggacaaguucc

SEQ ID NO: 2333012 - RNA, 19 nt, Artificial Sequence
  Description of Artificial Sequence: Synthetic oligonucleotide
  Sense strand starting at position 3045 of SEQ ID NO: 1885316
acuugucccuaagucauau

SEQ ID NO: 2333013 - RNA, 19 nt, Artificial Sequence
  Description of Artificial Sequence: Synthetic oligonucleotide
  Antisense strand to SEQ ID NO: 2333012
auaugacuuagggacaagu

SEQ ID NO: 2333014 - RNA, 19 nt, Artificial Sequence
  Description of Artificial Sequence: Synthetic oligonucleotide
  Sense strand starting at position 3455 of SEQ ID NO: 1885316
aagugaaacuaguucugaa

SEQ ID NO: 2333015 - RNA, 19 nt, Artificial Sequence
  Description of Artificial Sequence: Synthetic oligonucleotide
  Antisense strand to SEQ ID NO: 2333014
uucagaacuaguuucacuu

SEQ ID NO: 2333016 - RNA, 19 nt, Artificial Sequence
  Description of Artificial Sequence: Synthetic oligonucleotide
  Sense strand starting at position 3581 of SEQ ID NO: 1885316
ucaagccuuguggauuaua

SEQ ID NO: 2333017 - RNA, 19 nt, Artificial Sequence
  Description of Artificial Sequence: Synthetic oligonucleotide
  Antisense strand to SEQ ID NO: 2333016
uauaauccacaaggcuuga

SEQ ID NO: 2333018 - RNA, 19 nt, Artificial Sequence
  Description of Artificial Sequence: Synthetic oligonucleotide
  Sense strand starting at position 3584 of SEQ ID NO: 1885316
agccuuguggauuauacau

SEQ ID NO: 2333019 - RNA, 19 nt, Artificial Sequence
  Description of Artificial Sequence: Synthetic oligonucleotide
  Antisense strand to SEQ ID NO: 2333018
auguauaauccacaaggcu

SEQ ID NO: 2333020 - RNA, 19 nt, Artificial Sequence
  Description of Artificial Sequence: Synthetic oligonucleotide
  Sense strand starting at position 3786 of SEQ ID NO: 1885316
gguccaguacauuacugua

SEQ ID NO: 2333021 - RNA, 19 nt, Artificial Sequence
  Description of Artificial Sequence: Synthetic oligonucleotide
  Antisense strand to SEQ ID NO: 2333020
uacaguaauguacuggacc

SEQ ID NO: 2333022 - RNA, 19 nt, Artificial Sequence
  Description of Artificial Sequence: Synthetic oligonucleotide
  Sense strand starting at position 3858 of SEQ ID NO: 1885316
gcuggcagcuugguaauuu

SEQ ID NO: 2333023 - RNA, 19 nt, Artificial Sequence
  Description of Artificial Sequence: Synthetic oligonucleotide
  Antisense strand to SEQ ID NO: 2333022
aaauuaccaagcugccagc

SEQ ID NO: 2333024 - RNA, 19 nt, Artificial Sequence
  Description of Artificial Sequence: Synthetic oligonucleotide
  Sense strand starting at position 150 of SEQ ID NO: 1885317
guguacauuguauaccuau

SEQ ID NO: 2333025 - RNA, 19 nt, Artificial Sequence
  Description of Artificial Sequence: Synthetic oligonucleotide
  Antisense strand to SEQ ID NO: 2333024
auagguauacaauguacac

SEQ ID NO: 2333026 - RNA, 19 nt, Artificial Sequence
  Description of Artificial Sequence: Synthetic oligonucleotide
  Sense strand starting at position 219 of SEQ ID NO: 1885317
guuuaaugauuguuccaca

SEQ ID NO: 2333027 - RNA, 19 nt, Artificial Sequence
  Description of Artificial Sequence: Synthetic oligonucleotide
  Antisense strand to SEQ ID NO: 2333026
uguggaacaaucauuaaac

SEQ ID NO: 2333028 - RNA, 19 nt, Artificial Sequence
  Description of Artificial Sequence: Synthetic oligonucleotide
  Sense strand starting at position 237 of SEQ ID NO: 1885317
acaaacuuugcugaaagua

SEQ ID NO: 2333029 - RNA, 19 nt, Artificial Sequence
  Description of Artificial Sequence: Synthetic oligonucleotide
  Antisense strand to SEQ ID NO: 2333028
uacuuucagcaaaguuugu

SEQ ID NO: 2333030 - RNA, 19 nt, Artificial Sequence
  Description of Artificial Sequence: Synthetic oligonucleotide
  Sense strand starting at position 434 of SEQ ID NO: 1885317
ucaaaugagcuguaaguaa

SEQ ID NO: 2333031 - RNA, 19 nt, Artificial Sequence
  Description of Artificial Sequence: Synthetic oligonucleotide
  Antisense strand to SEQ ID NO: 2333030
uuacuuacagcucauuuga

SEQ ID NO: 2333032 - RNA, 19 nt, Artificial Sequence
  Description of Artificial Sequence: Synthetic oligonucleotide
  Sense strand starting at position 722 of SEQ ID NO: 1885317
ggguucacuguggauuaua

SEQ ID NO: 2333033 - RNA, 19 nt, Artificial Sequence
  Description of Artificial Sequence: Synthetic oligonucleotide
  Antisense strand to SEQ ID NO: 2333032
uauaauccacagugaaccc

SEQ ID NO: 2333034 - RNA, 19 nt, Artificial Sequence
  Description of Artificial Sequence: Synthetic oligonucleotide
  Sense strand starting at position 1299 of SEQ ID NO: 1885317
uguugaaaucuugagcuuu

SEQ ID NO: 2333035 - RNA, 19 nt, Artificial Sequence
  Description of Artificial Sequence: Synthetic oligonucleotide
  Antisense strand to SEQ ID NO: 2333034
aaagcucaagauuucaaca

SEQ ID NO: 2333036 - RNA, 19 nt, Artificial Sequence
  Description of Artificial Sequence: Synthetic oligonucleotide
  Sense strand starting at position 1301 of SEQ ID NO: 1885317
uugaaaucuugagcuuuau

SEQ ID NO: 2333037 - RNA, 19 nt, Artificial Sequence
  Description of Artificial Sequence: Synthetic oligonucleotide
  Antisense strand to SEQ ID NO: 2333036
auaaagcucaagauuucaa

SEQ ID NO: 2333038 - RNA, 19 nt, Artificial Sequence
  Description of Artificial Sequence: Synthetic oligonucleotide
  Sense strand starting at position 1443 of SEQ ID NO: 1885317
ugacauuagcaagaaugcu

SEQ ID NO: 2333039 - RNA, 19 nt, Artificial Sequence
  Description of Artificial Sequence: Synthetic oligonucleotide
  Antisense strand to SEQ ID NO: 2333038
agcauucuugcuaauguca

SEQ ID NO: 2333040 - RNA, 19 nt, Artificial Sequence
  Description of Artificial Sequence: Synthetic oligonucleotide
  Sense strand starting at position 1451 of SEQ ID NO: 1885317
gcaagaaugcuuuaagaac

SEQ ID NO: 2333041 - RNA, 19 nt, Artificial Sequence
  Description of Artificial Sequence: Synthetic oligonucleotide
  Antisense strand to SEQ ID NO: 2333040
guucuuaaagcauucuugc

SEQ ID NO: 2333042 - RNA, 19 nt, Artificial Sequence
  Description of Artificial Sequence: Synthetic oligonucleotide
  Sense strand starting at position 1522 of SEQ ID NO: 1885317
uguguugagaagcaguaaa

SEQ ID NO: 2333043 - RNA, 19 nt, Artificial Sequence
  Description of Artificial Sequence: Synthetic oligonucleotide
  Antisense strand to SEQ ID NO: 2333042
uuuacugcuucucaacaca

SEQ ID NO: 2333044 - RNA, 19 nt, Artificial Sequence
  Description of Artificial Sequence: Synthetic oligonucleotide
  Sense strand starting at position 1599 of SEQ ID NO: 1885317
cucugaagucacuagugua

SEQ ID NO: 2333045 - RNA, 19 nt, Artificial Sequence
  Description of Artificial Sequence: Synthetic oligonucleotide
  Antisense strand to SEQ ID NO: 2333044
uacacuagugacuucagag

SEQ ID NO: 2333046 - RNA, 19 nt, Artificial Sequence
  Description of Artificial Sequence: Synthetic oligonucleotide
  Sense strand starting at position 2293 of SEQ ID NO: 1885317
gcaucaguucuuuacuuga

SEQ ID NO: 2333047 - RNA, 19 nt, Artificial Sequence
  Description of Artificial Sequence: Synthetic oligonucleotide
  Antisense strand to SEQ ID NO: 2333046
ucaaguaaagaacugaugc

SEQ ID NO: 2333048 - RNA, 19 nt, Artificial Sequence
  Description of Artificial Sequence: Synthetic oligonucleotide
  Sense strand starting at position 2295 of SEQ ID NO: 1885317
aucaguucuuuacuugaga

SEQ ID NO: 2333049 - RNA, 19 nt, Artificial Sequence
  Description of Artificial Sequence: Synthetic oligonucleotide
  Antisense strand to SEQ ID NO: 2333048
ucucaaguaaagaacugau

SEQ ID NO: 2333050 - RNA, 19 nt, Artificial Sequence
  Description of Artificial Sequence: Synthetic oligonucleotide
  Sense strand starting at position 2296 of SEQ ID NO: 1885317
ucaguucuuuacuugagag

SEQ ID NO: 2333051 - RNA, 19 nt, Artificial Sequence
  Description of Artificial Sequence: Synthetic oligonucleotide
  Antisense strand to SEQ ID NO: 2333050
cucucaaguaaagaacuga

SEQ ID NO: 2333052 - RNA, 19 nt, Artificial Sequence
  Description of Artificial Sequence: Synthetic oligonucleotide
  Sense strand starting at position 2438 of SEQ ID NO: 1885317
gcagccuauauuuguggaa

SEQ ID NO: 2333053 - RNA, 19 nt, Artificial Sequence
  Description of Artificial Sequence: Synthetic oligonucleotide
  Antisense strand to SEQ ID NO: 2333052
uuccacaaauauaggcugc

SEQ ID NO: 2333054 - RNA, 19 nt, Artificial Sequence
  Description of Artificial Sequence: Synthetic oligonucleotide
  Sense strand starting at position 2464 of SEQ ID NO: 1885317
cagccuauauuugugguaa

SEQ ID NO: 2333055 - RNA, 19 nt, Artificial Sequence
  Description of Artificial Sequence: Synthetic oligonucleotide
  Antisense strand to SEQ ID NO: 2333054
uuaccacaaauauaggcug

SEQ ID NO: 2333056 - RNA, 19 nt, Artificial Sequence
  Description of Artificial Sequence: Synthetic oligonucleotide
  Sense strand starting at position 2511 of SEQ ID NO: 1885317
ggauaauuaauguguuuga

SEQ ID NO: 2333057 - RNA, 19 nt, Artificial Sequence
  Description of Artificial Sequence: Synthetic oligonucleotide
  Antisense strand to SEQ ID NO: 2333056
ucaaacacauuaauuaucc

SEQ ID NO: 2333058 - RNA, 19 nt, Artificial Sequence
  Description of Artificial Sequence: Synthetic oligonucleotide
  Sense strand starting at position 2550 of SEQ ID NO: 1885317
ucuguaaggugaucauauu

SEQ ID NO: 2333059 - RNA, 19 nt, Artificial Sequence
  Description of Artificial Sequence: Synthetic oligonucleotide
  Antisense strand to SEQ ID NO: 2333058
aauaugaucaccuuacaga

SEQ ID NO: 2333060 - RNA, 19 nt, Artificial Sequence
  Description of Artificial Sequence: Synthetic oligonucleotide
  Sense strand starting at position 2551 of SEQ ID NO: 1885317
cuguaaggugaucauauua

SEQ ID NO: 2333061 - RNA, 19 nt, Artificial Sequence
  Description of Artificial Sequence: Synthetic oligonucleotide
  Antisense strand to SEQ ID NO: 2333060
uaauaugaucaccuuacag

SEQ ID NO: 2333062 - RNA, 19 nt, Artificial Sequence
  Description of Artificial Sequence: Synthetic oligonucleotide
  Sense strand starting at position 2558 of SEQ ID NO: 1885317
gugaucauauuagcaacau

SEQ ID NO: 2333063 - RNA, 19 nt, Artificial Sequence
  Description of Artificial Sequence: Synthetic oligonucleotide
  Antisense strand to SEQ ID NO: 2333062
auguugcuaauaugaucac

SEQ ID NO: 2333064 - RNA, 19 nt, Artificial Sequence
  Description of Artificial Sequence: Synthetic oligonucleotide
  Sense strand starting at position 2614 of SEQ ID NO: 1885317
gaaggaguugcuugacauu

SEQ ID NO: 2333065 - RNA, 19 nt, Artificial Sequence
  Description of Artificial Sequence: Synthetic oligonucleotide
  Antisense strand to SEQ ID NO: 2333064
aaugucaagcaacuccuuc

SEQ ID NO: 2333066 - RNA, 19 nt, Artificial Sequence
  Description of Artificial Sequence: Synthetic oligonucleotide
  Sense strand starting at position 2623 of SEQ ID NO: 1885317
gcuugacauuucccaguau

SEQ ID NO: 2333067 - RNA, 19 nt, Artificial Sequence
  Description of Artificial Sequence: Synthetic oligonucleotide
  Antisense strand to SEQ ID NO: 2333066
auacugggaaaugucaagc

SEQ ID NO: 2333068 - RNA, 19 nt, Artificial Sequence
  Description of Artificial Sequence: Synthetic oligonucleotide
  Sense strand starting at position 2803 of SEQ ID NO: 1885317
gaaguagggucacuuauga

SEQ ID NO: 2333069 - RNA, 19 nt, Artificial Sequence
  Description of Artificial Sequence: Synthetic oligonucleotide
  Antisense strand to SEQ ID NO: 2333068
ucauaagugacccuacuuc

SEQ ID NO: 2333070 - RNA, 19 nt, Artificial Sequence
  Description of Artificial Sequence: Synthetic oligonucleotide
  Sense strand starting at position 2810 of SEQ ID NO: 1885317
ggucacuuaugauuggaaa

SEQ ID NO: 2333071 - RNA, 19 nt, Artificial Sequence
  Description of Artificial Sequence: Synthetic oligonucleotide
  Antisense strand to SEQ ID NO: 2333070
uuuccaaucauaagugacc

SEQ ID NO: 2333072 - RNA, 19 nt, Artificial Sequence
  Description of Artificial Sequence: Synthetic oligonucleotide
  Sense strand starting at position 2811 of SEQ ID NO: 1885317
gucacuuaugauuggaaau

SEQ ID NO: 2333073 - RNA, 19 nt, Artificial Sequence
  Description of Artificial Sequence: Synthetic oligonucleotide
  Antisense strand to SEQ ID NO: 2333072
auuuccaaucauaagugac

SEQ ID NO: 2333074 - RNA, 19 nt, Artificial Sequence
  Description of Artificial Sequence: Synthetic oligonucleotide
  Sense strand starting at position 2828 of SEQ ID NO: 1885317
auguuugagcuguagaaac

SEQ ID NO: 2333075 - RNA, 19 nt, Artificial Sequence
  Description of Artificial Sequence: Synthetic oligonucleotide
  Antisense strand to SEQ ID NO: 2333074
guuucuacagcucaaacau

SEQ ID NO: 2333076 - RNA, 19 nt, Artificial Sequence
  Description of Artificial Sequence: Synthetic oligonucleotide
  Sense strand starting at position 2835 of SEQ ID NO: 1885317
agcuguagaaacuguugaa

SEQ ID NO: 2333077 - RNA, 19 nt, Artificial Sequence
  Description of Artificial Sequence: Synthetic oligonucleotide
  Antisense strand to SEQ ID NO: 2333076
uucaacaguuucuacagcu

SEQ ID NO: 2333078 - RNA, 19 nt, Artificial Sequence
  Description of Artificial Sequence: Synthetic oligonucleotide
  Sense strand starting at position 3000 of SEQ ID NO: 1885317
aaauguuguguuggagaau

SEQ ID NO: 2333079 - RNA, 19 nt, Artificial Sequence
  Description of Artificial Sequence: Synthetic oligonucleotide
  Antisense strand to SEQ ID NO: 2333078
auucuccaacacaacauuu

SEQ ID NO: 2333080 - RNA, 19 nt, Artificial Sequence
  Description of Artificial Sequence: Synthetic oligonucleotide
  Sense strand starting at position 3003 of SEQ ID NO: 1885317
uguuguguuggagaauaau

SEQ ID NO: 2333081 - RNA, 19 nt, Artificial Sequence
  Description of Artificial Sequence: Synthetic oligonucleotide
  Antisense strand to SEQ ID NO: 2333080
auuauucuccaacacaaca

SEQ ID NO: 2333082 - RNA, 19 nt, Artificial Sequence
  Description of Artificial Sequence: Synthetic oligonucleotide
  Sense strand starting at position 3006 of SEQ ID NO: 1885317
uguguuggagaauaaugca

SEQ ID NO: 2333083 - RNA, 19 nt, Artificial Sequence
  Description of Artificial Sequence: Synthetic oligonucleotide
  Antisense strand to SEQ ID NO: 2333082
ugcauuauucuccaacaca

SEQ ID NO: 2333084 - RNA, 19 nt, Artificial Sequence
  Description of Artificial Sequence: Synthetic oligonucleotide
  Sense strand starting at position 3077 of SEQ ID NO: 1885317
agugauuuguggcuacuca

SEQ ID NO: 2333085 - RNA, 19 nt, Artificial Sequence
  Description of Artificial Sequence: Synthetic oligonucleotide
  Antisense strand to SEQ ID NO: 2333084
ugaguagccacaaaucacu

SEQ ID NO: 2333086 - RNA, 19 nt, Artificial Sequence
  Description of Artificial Sequence: Synthetic oligonucleotide
  Sense strand starting at position 3097 of SEQ ID NO: 1885317
ugccaaaugacuggagcau

SEQ ID NO: 2333087 - RNA, 19 nt, Artificial Sequence
  Description of Artificial Sequence: Synthetic oligonucleotide
  Antisense strand to SEQ ID NO: 2333086
augcuccagucauuuggca

SEQ ID NO: 2333088 - RNA, 19 nt, Artificial Sequence
  Description of Artificial Sequence: Synthetic oligonucleotide
  Sense strand starting at position 3302 of SEQ ID NO: 1885317
auugguguuuaauucccaa

SEQ ID NO: 2333089 - RNA, 19 nt, Artificial Sequence
  Description of Artificial Sequence: Synthetic oligonucleotide
  Antisense strand to SEQ ID NO: 2333088
uugggaauuaaacaccaau

SEQ ID NO: 2333090 - RNA, 19 nt, Artificial Sequence
  Description of Artificial Sequence: Synthetic oligonucleotide
  Sense strand starting at position 3366 of SEQ ID NO: 1885317
guccucacauaaguagauu

SEQ ID NO: 2333091 - RNA, 19 nt, Artificial Sequence
  Description of Artificial Sequence: Synthetic oligonucleotide
  Antisense strand to SEQ ID NO: 2333090
aaucuacuuaugugaggac

SEQ ID NO: 2333092 - RNA, 19 nt, Artificial Sequence
  Description of Artificial Sequence: Synthetic oligonucleotide
  Sense strand starting at position 3387 of SEQ ID NO: 1885317
uggcgauugcuccugcacu

SEQ ID NO: 2333093 - RNA, 19 nt, Artificial Sequence
  Description of Artificial Sequence: Synthetic oligonucleotide
  Antisense strand to SEQ ID NO: 2333092
agugcaggagcaaucgcca

SEQ ID NO: 2333094 - RNA, 19 nt, Artificial Sequence
  Description of Artificial Sequence: Synthetic oligonucleotide
  Sense strand starting at position 3389 of SEQ ID NO: 1885317
gcgauugcuccugcacuuu

SEQ ID NO: 2333095 - RNA, 19 nt, Artificial Sequence
  Description of Artificial Sequence: Synthetic oligonucleotide
  Antisense strand to SEQ ID NO: 2333094
aaagugcaggagcaaucgc

SEQ ID NO: 2333096 - RNA, 19 nt, Artificial Sequence
  Description of Artificial Sequence: Synthetic oligonucleotide
  Sense strand starting at position 3730 of SEQ ID NO: 1885317
uuuagagguuucucuuaau

SEQ ID NO: 2333097 - RNA, 19 nt, Artificial Sequence
  Description of Artificial Sequence: Synthetic oligonucleotide
  Antisense strand to SEQ ID NO: 2333096
auuaagagaaaccucuaaa

SEQ ID NO: 2333098 - RNA, 19 nt, Artificial Sequence
  Description of Artificial Sequence: Synthetic oligonucleotide
  Sense strand starting at position 3789 of SEQ ID NO: 1885317
agcacaugugucugggaaa

SEQ ID NO: 2333099 - RNA, 19 nt, Artificial Sequence
  Description of Artificial Sequence: Synthetic oligonucleotide
  Antisense strand to SEQ ID NO: 2333098
uuucccagacacaugugcu

SEQ ID NO: 2333100 - RNA, 19 nt, Artificial Sequence
  Description of Artificial Sequence: Synthetic oligonucleotide
  Sense strand starting at position 3847 of SEQ ID NO: 1885317
agagaauggugagcaacuu

SEQ ID NO: 2333101 - RNA, 19 nt, Artificial Sequence
  Description of Artificial Sequence: Synthetic oligonucleotide
  Antisense strand to SEQ ID NO: 2333100
aaguugcucaccauucucu

SEQ ID NO: 2333102 - RNA, 19 nt, Artificial Sequence
  Description of Artificial Sequence: Synthetic oligonucleotide
  Sense strand starting at position 3896 of SEQ ID NO: 1885317
gugccucuccaccaagaaa

SEQ ID NO: 2333103 - RNA, 19 nt, Artificial Sequence
  Description of Artificial Sequence: Synthetic oligonucleotide
  Antisense strand to SEQ ID NO: 2333102
uuucuugguggagaggcac

SEQ ID NO: 2333104 - RNA, 19 nt, Artificial Sequence
  Description of Artificial Sequence: Synthetic oligonucleotide
  Sense strand starting at position 793 of SEQ ID NO: 1885318
cuaacaaagucauuguuac

SEQ ID NO: 2333105 - RNA, 19 nt, Artificial Sequence
  Description of Artificial Sequence: Synthetic oligonucleotide
  Antisense strand to SEQ ID NO: 2333104
guaacaaugacuuuguuag

SEQ ID NO: 2333106 - RNA, 19 nt, Artificial Sequence
  Description of Artificial Sequence: Synthetic oligonucleotide
  Sense strand starting at position 822 of SEQ ID NO: 1885318
guggccaugcauuauaauu

SEQ ID NO: 2333107 - RNA, 19 nt, Artificial Sequence
  Description of Artificial Sequence: Synthetic oligonucleotide
  Antisense strand to SEQ ID NO: 2333106
aauuauaaugcauggccac

SEQ ID NO: 2333108 - RNA, 19 nt, Artificial Sequence
  Description of Artificial Sequence: Synthetic oligonucleotide
  Sense strand starting at position 944 of SEQ ID NO: 1885318
gaucuuaguagugauggca

SEQ ID NO: 2333109 - RNA, 19 nt, Artificial Sequence
  Description of Artificial Sequence: Synthetic oligonucleotide
  Antisense strand to SEQ ID NO: 2333108
ugccaucacuacuaagauc

SEQ ID NO: 2333110 - RNA, 19 nt, Artificial Sequence
  Description of Artificial Sequence: Synthetic oligonucleotide
  Sense strand starting at position 947 of SEQ ID NO: 1885318
cuuaguagugauggcagaa

SEQ ID NO: 2333111 - RNA, 19 nt, Artificial Sequence
  Description of Artificial Sequence: Synthetic oligonucleotide
  Antisense strand to SEQ ID NO: 2333110
uucugccaucacuacuaag

SEQ ID NO: 2333112 - RNA, 19 nt, Artificial Sequence
  Description of Artificial Sequence: Synthetic oligonucleotide
  Sense strand starting at position 960 of SEQ ID NO: 1885318
gcagaaagauagccaaaca

SEQ ID NO: 2333113 - RNA, 19 nt, Artificial Sequence
  Description of Artificial Sequence: Synthetic oligonucleotide
  Antisense strand to SEQ ID NO: 2333112
uguuuggcuaucuuucugc

SEQ ID NO: 2333114 - RNA, 19 nt, Artificial Sequence
  Description of Artificial Sequence: Synthetic oligonucleotide
  Sense strand starting at position 1064 of SEQ ID NO: 1885318
uggaaaccagccugagaua

SEQ ID NO: 2333115 - RNA, 19 nt, Artificial Sequence
  Description of Artificial Sequence: Synthetic oligonucleotide
  Antisense strand to SEQ ID NO: 2333114
uaucucaggcugguuucca

SEQ ID NO: 2333116 - RNA, 19 nt, Artificial Sequence
  Description of Artificial Sequence: Synthetic oligonucleotide
  Sense strand starting at position 1117 of SEQ ID NO: 1885318
ucagaaggguaagaagaau

SEQ ID NO: 2333117 - RNA, 19 nt, Artificial Sequence
  Description of Artificial Sequence: Synthetic oligonucleotide
  Antisense strand to SEQ ID NO: 2333116
auucuucuuacccuucuga

SEQ ID NO: 2333118 - RNA, 19 nt, Artificial Sequence
  Description of Artificial Sequence: Synthetic oligonucleotide
  Sense strand starting at position 1269 of SEQ ID NO: 1885318
cuaagaugcuacucaggaa

SEQ ID NO: 2333119 - RNA, 19 nt, Artificial Sequence
  Description of Artificial Sequence: Synthetic oligonucleotide
  Antisense strand to SEQ ID NO: 2333118
uuccugaguagcaucuuag

SEQ ID NO: 2333120 - RNA, 19 nt, Artificial Sequence
  Description of Artificial Sequence: Synthetic oligonucleotide
  Sense strand starting at position 1321 of SEQ ID NO: 1885318
ggagaaauggcauggcuug

SEQ ID NO: 2333121 - RNA, 19 nt, Artificial Sequence
  Description of Artificial Sequence: Synthetic oligonucleotide
  Antisense strand to SEQ ID NO: 2333120
caagccaugccauuucucc

SEQ ID NO: 2333122 - RNA, 19 nt, Artificial Sequence
  Description of Artificial Sequence: Synthetic oligonucleotide
  Sense strand starting at position 1571 of SEQ ID NO: 1885318
cugccuagucagggaaaca

SEQ ID NO: 2333123 - RNA, 19 nt, Artificial Sequence
  Description of Artificial Sequence: Synthetic oligonucleotide
  Antisense strand to SEQ ID NO: 2333122
uguuucccugacuaggcag

SEQ ID NO: 2333124 - RNA, 19 nt, Artificial Sequence
  Description of Artificial Sequence: Synthetic oligonucleotide
  Sense strand starting at position 1595 of SEQ ID NO: 1885318
ucaccuauuugugagaaga

SEQ ID NO: 2333125 - RNA, 19 nt, Artificial Sequence
  Description of Artificial Sequence: Synthetic oligonucleotide
  Antisense strand to SEQ ID NO: 2333124
ucuucucacaaauagguga

SEQ ID NO: 2333126 - RNA, 19 nt, Artificial Sequence
  Description of Artificial Sequence: Synthetic oligonucleotide
  Sense strand starting at position 1597 of SEQ ID NO: 1885318
accuauuugugagaagaga

SEQ ID NO: 2333127 - RNA, 19 nt, Artificial Sequence
  Description of Artificial Sequence: Synthetic oligonucleotide
  Antisense strand to SEQ ID NO: 2333126
ucucuucucacaaauaggu

SEQ ID NO: 2333128 - RNA, 19 nt, Artificial Sequence
  Description of Artificial Sequence: Synthetic oligonucleotide
  Sense strand starting at position 1744 of SEQ ID NO: 1885318
agucuuacuuuauccggaa

SEQ ID NO: 2333129 - RNA, 19 nt, Artificial Sequence
  Description of Artificial Sequence: Synthetic oligonucleotide
  Antisense strand to SEQ ID NO: 2333128
uuccggauaaaguaagacu

SEQ ID NO: 2333130 - RNA, 19 nt, Artificial Sequence
  Description of Artificial Sequence: Synthetic oligonucleotide
  Sense strand starting at position 1745 of SEQ ID NO: 1885318
gucuuacuuuauccggaaa

SEQ ID NO: 2333131 - RNA, 19 nt, Artificial Sequence
  Description of Artificial Sequence: Synthetic oligonucleotide
  Antisense strand to SEQ ID NO: 2333130
uuuccggauaaaguaagac

SEQ ID NO: 2333132 - RNA, 19 nt, Artificial Sequence
  Description of Artificial Sequence: Synthetic oligonucleotide
  Sense strand starting at position 1748 of SEQ ID NO: 1885318
uuacuuuauccggaaaguc

SEQ ID NO: 2333133 - RNA, 19 nt, Artificial Sequence
  Description of Artificial Sequence: Synthetic oligonucleotide
  Antisense strand to SEQ ID NO: 2333132
gacuuuccggauaaaguaa

SEQ ID NO: 2333134 - RNA, 19 nt, Artificial Sequence
  Description of Artificial Sequence: Synthetic oligonucleotide
  Sense strand starting at position 1985 of SEQ ID NO: 1885318
accagaagccauuguauua

SEQ ID NO: 2333135 - RNA, 19 nt, Artificial Sequence
  Description of Artificial Sequence: Synthetic oligonucleotide
  Antisense strand to SEQ ID NO: 2333134
uaauacaauggcuucuggu

SEQ ID NO: 2333136 - RNA, 19 nt, Artificial Sequence
  Description of Artificial Sequence: Synthetic oligonucleotide
  Sense strand starting at position 2304 of SEQ ID NO: 1885318
agauaagacucugucucua

SEQ ID NO: 2333137 - RNA, 19 nt, Artificial Sequence
  Description of Artificial Sequence: Synthetic oligonucleotide
  Antisense strand to SEQ ID NO: 2333136
uagagacagagucuuaucu

SEQ ID NO: 2333138 - RNA, 19 nt, Artificial Sequence
  Description of Artificial Sequence: Synthetic oligonucleotide
  Sense strand starting at position 2398 of SEQ ID NO: 1885318
gagaguagauugcuugagu

SEQ ID NO: 2333139 - RNA, 19 nt, Artificial Sequence
  Description of Artificial Sequence: Synthetic oligonucleotide
  Antisense strand to SEQ ID NO: 2333138
acucaagcaaucuacucuc

SEQ ID NO: 2333140 - RNA, 19 nt, Artificial Sequence
  Description of Artificial Sequence: Synthetic oligonucleotide
  Sense strand starting at position 2399 of SEQ ID NO: 1885318
agaguagauugcuugaguc

SEQ ID NO: 2333141 - RNA, 19 nt, Artificial Sequence
  Description of Artificial Sequence: Synthetic oligonucleotide
  Antisense strand to SEQ ID NO: 2333140
gacucaagcaaucuacucu

SEQ ID NO: 2333142 - RNA, 19 nt, Artificial Sequence
  Description of Artificial Sequence: Synthetic oligonucleotide
  Sense strand starting at position 2409 of SEQ ID NO: 1885318
gcuugagucccagaaguuu

SEQ ID NO: 2333143 - RNA, 19 nt, Artificial Sequence
  Description of Artificial Sequence: Synthetic oligonucleotide
  Antisense strand to SEQ ID NO: 2333142
aaacuucugggacucaagc

SEQ ID NO: 2333144 - RNA, 19 nt, Artificial Sequence
  Description of Artificial Sequence: Synthetic oligonucleotide
  Sense strand starting at position 2431 of SEQ ID NO: 1885318
gcugcaaugagauaugguu

SEQ ID NO: 2333145 - RNA, 19 nt, Artificial Sequence
  Description of Artificial Sequence: Synthetic oligonucleotide
  Antisense strand to SEQ ID NO: 2333144
aaccauaucucauugcagc

SEQ ID NO: 2333146 - RNA, 19 nt, Artificial Sequence
  Description of Artificial Sequence: Synthetic oligonucleotide
  Sense strand starting at position 2433 of SEQ ID NO: 1885318
ugcaaugagauaugguuga

SEQ ID NO: 2333147 - RNA, 19 nt, Artificial Sequence
  Description of Artificial Sequence: Synthetic oligonucleotide
  Antisense strand to SEQ ID NO: 2333146
ucaaccauaucucauugca

SEQ ID NO: 2333148 - RNA, 19 nt, Artificial Sequence
  Description of Artificial Sequence: Synthetic oligonucleotide
  Sense strand starting at position 2437 of SEQ ID NO: 1885318
augagauaugguugacagu

SEQ ID NO: 2333149 - RNA, 19 nt, Artificial Sequence
  Description of Artificial Sequence: Synthetic oligonucleotide
  Antisense strand to SEQ ID NO: 2333148
acugucaaccauaucucau

SEQ ID NO: 2333150 - RNA, 19 nt, Artificial Sequence
  Description of Artificial Sequence: Synthetic oligonucleotide
  Sense strand starting at position 2903 of SEQ ID NO: 1885318
cuggguugaucagucagaa

SEQ ID NO: 2333151 - RNA, 19 nt, Artificial Sequence
  Description of Artificial Sequence: Synthetic oligonucleotide
  Antisense strand to SEQ ID NO: 2333150
uucugacugaucaacccag

SEQ ID NO: 2333152 - RNA, 19 nt, Artificial Sequence
  Description of Artificial Sequence: Synthetic oligonucleotide
  Sense strand starting at position 2998 of SEQ ID NO: 1885318
ugggaauuaugggacacaa

SEQ ID NO: 2333153 - RNA, 19 nt, Artificial Sequence
  Description of Artificial Sequence: Synthetic oligonucleotide
  Antisense strand to SEQ ID NO: 2333152
uugugucccauaauuccca

SEQ ID NO: 2333154 - RNA, 19 nt, Artificial Sequence
  Description of Artificial Sequence: Synthetic oligonucleotide
  Sense strand starting at position 3076 of SEQ ID NO: 1885318
ccagaaagcacaugugaag

SEQ ID NO: 2333155 - RNA, 19 nt, Artificial Sequence
  Description of Artificial Sequence: Synthetic oligonucleotide
  Antisense strand to SEQ ID NO: 2333154
cuucacaugugcuuucugg

SEQ ID NO: 2333156 - RNA, 19 nt, Artificial Sequence
  Description of Artificial Sequence: Synthetic oligonucleotide
  Sense strand starting at position 3082 of SEQ ID NO: 1885318
agcacaugugaaggaauaa

SEQ ID NO: 2333157 - RNA, 19 nt, Artificial Sequence
  Description of Artificial Sequence: Synthetic oligonucleotide
  Antisense strand to SEQ ID NO: 2333156
uuauuccuucacaugugcu

SEQ ID NO: 2333158 - RNA, 19 nt, Artificial Sequence
  Description of Artificial Sequence: Synthetic oligonucleotide
  Sense strand starting at position 3111 of SEQ ID NO: 1885318
cuucuuuaaucugugagua

SEQ ID NO: 2333159 - RNA, 19 nt, Artificial Sequence
  Description of Artificial Sequence: Synthetic oligonucleotide
  Antisense strand to SEQ ID NO: 2333158
uacucacagauuaaagaag

SEQ ID NO: 2333160 - RNA, 19 nt, Artificial Sequence
  Description of Artificial Sequence: Synthetic oligonucleotide
  Sense strand starting at position 3112 of SEQ ID NO: 1885318
uucuuuaaucugugaguag

SEQ ID NO: 2333161 - RNA, 19 nt, Artificial Sequence
  Description of Artificial Sequence: Synthetic oligonucleotide
  Antisense strand to SEQ ID NO: 2333160
cuacucacagauuaaagaa

SEQ ID NO: 2333162 - RNA, 19 nt, Artificial Sequence
  Description of Artificial Sequence: Synthetic oligonucleotide
  Sense strand starting at position 3151 of SEQ ID NO: 1885318
gaagcacagugaucuccaa

SEQ ID NO: 2333163 - RNA, 19 nt, Artificial Sequence
  Description of Artificial Sequence: Synthetic oligonucleotide
  Antisense strand to SEQ ID NO: 2333162
uuggagaucacugugcuuc

SEQ ID NO: 2333164 - RNA, 19 nt, Artificial Sequence
  Description of Artificial Sequence: Synthetic oligonucleotide
  Sense strand starting at position 3293 of SEQ ID NO: 1885318
acaugaguaucagcagaau

SEQ ID NO: 2333165 - RNA, 19 nt, Artificial Sequence
  Description of Artificial Sequence: Synthetic oligonucleotide
  Antisense strand to SEQ ID NO: 2333164
auucugcugauacucaugu

SEQ ID NO: 2333166 - RNA, 19 nt, Artificial Sequence
  Description of Artificial Sequence: Synthetic oligonucleotide
  Sense strand starting at position 3296 of SEQ ID NO: 1885318
ugaguaucagcagaauucu

SEQ ID NO: 2333167 - RNA, 19 nt, Artificial Sequence
  Description of Artificial Sequence: Synthetic oligonucleotide
  Antisense strand to SEQ ID NO: 2333166
agaauucugcugauacuca

SEQ ID NO: 2333168 - RNA, 19 nt, Artificial Sequence
  Description of Artificial Sequence: Synthetic oligonucleotide
  Sense strand starting at position 3457 of SEQ ID NO: 1885318
ucuaacagaguuuaguuua

SEQ ID NO: 2333169 - RNA, 19 nt, Artificial Sequence
  Description of Artificial Sequence: Synthetic oligonucleotide
  Antisense strand to SEQ ID NO: 2333168
uaaacuaaacucuguuaga

SEQ ID NO: 2333170 - RNA, 19 nt, Artificial Sequence
  Description of Artificial Sequence: Synthetic oligonucleotide
  Sense strand starting at position 3479 of SEQ ID NO: 1885318
ucauuagaccuguguuaca

SEQ ID NO: 2333171 - RNA, 19 nt, Artificial Sequence
  Description of Artificial Sequence: Synthetic oligonucleotide
  Antisense strand to SEQ ID NO: 2333170
uguaacacaggucuaauga

SEQ ID NO: 2333172 - RNA, 19 nt, Artificial Sequence
  Description of Artificial Sequence: Synthetic oligonucleotide
  Sense strand starting at position 3628 of SEQ ID NO: 1885318
uuauguauaucuuuagcca

SEQ ID NO: 2333173 - RNA, 19 nt, Artificial Sequence
  Description of Artificial Sequence: Synthetic oligonucleotide
  Antisense strand to SEQ ID NO: 2333172
uggcuaaagauauacauaa

SEQ ID NO: 2333174 - RNA, 19 nt, Artificial Sequence
  Description of Artificial Sequence: Synthetic oligonucleotide
  Sense strand starting at position 3631 of SEQ ID NO: 1885318
uguauaucuuuagccauuu

SEQ ID NO: 2333175 - RNA, 19 nt, Artificial Sequence
  Description of Artificial Sequence: Synthetic oligonucleotide
  Antisense strand to SEQ ID NO: 2333174
aaauggcuaaagauauaca

SEQ ID NO: 2333176 - RNA, 19 nt, Artificial Sequence
  Description of Artificial Sequence: Synthetic oligonucleotide
  Sense strand starting at position 3711 of SEQ ID NO: 1885318
ugucacuauuggguauaua

SEQ ID NO: 2333177 - RNA, 19 nt, Artificial Sequence
  Description of Artificial Sequence: Synthetic oligonucleotide
  Antisense strand to SEQ ID NO: 2333176
uauauacccaauagugaca

SEQ ID NO: 2333178 - RNA, 19 nt, Artificial Sequence
  Description of Artificial Sequence: Synthetic oligonucleotide
  Sense strand starting at position 3712 of SEQ ID NO: 1885318
gucacuauuggguauauau

SEQ ID NO: 2333179 - RNA, 19 nt, Artificial Sequence
  Description of Artificial Sequence: Synthetic oligonucleotide
  Antisense strand to SEQ ID NO: 2333178
auauauacccaauagugac

SEQ ID NO: 2333180 - RNA, 19 nt, Artificial Sequence
  Description of Artificial Sequence: Synthetic oligonucleotide
  Sense strand starting at position 3829 of SEQ ID NO: 1885318
ucuauccauggaugaauau

SEQ ID NO: 2333181 - RNA, 19 nt, Artificial Sequence
  Description of Artificial Sequence: Synthetic oligonucleotide
  Antisense strand to SEQ ID NO: 2333180
auauucauccauggauaga

SEQ ID NO: 2333182 - RNA, 19 nt, Artificial Sequence
  Description of Artificial Sequence: Synthetic oligonucleotide
  Sense strand starting at position 3909 of SEQ ID NO: 1885318
ugucauuugugacaacaac

SEQ ID NO: 2333183 - RNA, 19 nt, Artificial Sequence
  Description of Artificial Sequence: Synthetic oligonucleotide
  Antisense strand to SEQ ID NO: 2333182
guuguugucacaaaugaca

SEQ ID NO: 2333184 - RNA, 19 nt, Artificial Sequence
  Description of Artificial Sequence: Synthetic oligonucleotide
  Sense strand starting at position 122 of SEQ ID NO: 1885319
ggaugcugacuauggauaa

SEQ ID NO: 2333185 - RNA, 19 nt, Artificial Sequence
  Description of Artificial Sequence: Synthetic oligonucleotide
  Antisense strand to SEQ ID NO: 2333184
uuauccauagucagcaucc

SEQ ID NO: 2333186 - RNA, 19 nt, Artificial Sequence
  Description of Artificial Sequence: Synthetic oligonucleotide
  Sense strand starting at position 178 of SEQ ID NO: 1885319
cuuucuguauccuuggaaa

SEQ ID NO: 2333187 - RNA, 19 nt, Artificial Sequence
  Description of Artificial Sequence: Synthetic oligonucleotide
  Antisense strand to SEQ ID NO: 2333186
uuuccaaggauacagaaag

SEQ ID NO: 2333188 - RNA, 19 nt, Artificial Sequence
  Description of Artificial Sequence: Synthetic oligonucleotide
  Sense strand starting at position 180 of SEQ ID NO: 1885319
uucuguauccuuggaaaga

SEQ ID NO: 2333189 - RNA, 19 nt, Artificial Sequence
  Description of Artificial Sequence: Synthetic oligonucleotide
  Antisense strand to SEQ ID NO: 2333188
ucuuuccaaggauacagaa

SEQ ID NO: 2333190 - RNA, 19 nt, Artificial Sequence
  Description of Artificial Sequence: Synthetic oligonucleotide
  Sense strand starting at position 540 of SEQ ID NO: 1885319
agagcugagccuuagggaa

SEQ ID NO: 2333191 - RNA, 19 nt, Artificial Sequence
  Description of Artificial Sequence: Synthetic oligonucleotide
  Antisense strand to SEQ ID NO: 2333190
uucccuaaggcucagcucu

SEQ ID NO: 2333192 - RNA, 19 nt, Artificial Sequence
  Description of Artificial Sequence: Synthetic oligonucleotide
  Sense strand starting at position 562 of SEQ ID NO: 1885319
cuaguaggcccagauucuu

SEQ ID NO: 2333193 - RNA, 19 nt, Artificial Sequence
  Description of Artificial Sequence: Synthetic oligonucleotide
  Antisense strand to SEQ ID NO: 2333192
aagaaucugggccuacuag

SEQ ID NO: 2333194 - RNA, 19 nt, Artificial Sequence
  Description of Artificial Sequence: Synthetic oligonucleotide
  Sense strand starting at position 583 of SEQ ID NO: 1885319
ggugacuuccuucgaagac

SEQ ID NO: 2333195 - RNA, 19 nt, Artificial Sequence
  Description of Artificial Sequence: Synthetic oligonucleotide
  Antisense strand to SEQ ID NO: 2333194
gucuucgaaggaagucacc

SEQ ID NO: 2333196 - RNA, 19 nt, Artificial Sequence
  Description of Artificial Sequence: Synthetic oligonucleotide
  Sense strand starting at position 630 of SEQ ID NO: 1885319
uuguuaguuucagugggaa

SEQ ID NO: 2333197 - RNA, 19 nt, Artificial Sequence
  Description of Artificial Sequence: Synthetic oligonucleotide
  Antisense strand to SEQ ID NO: 2333196
uucccacugaaacuaacaa

SEQ ID NO: 2333198 - RNA, 19 nt, Artificial Sequence
  Description of Artificial Sequence: Synthetic oligonucleotide
  Sense strand starting at position 633 of SEQ ID NO: 1885319
uuaguuucagugggaagua

SEQ ID NO: 2333199 - RNA, 19 nt, Artificial Sequence
  Description of Artificial Sequence: Synthetic oligonucleotide
  Antisense strand to SEQ ID NO: 2333198
uacuucccacugaaacuaa

SEQ ID NO: 2333200 - RNA, 19 nt, Artificial Sequence
  Description of Artificial Sequence: Synthetic oligonucleotide
  Sense strand starting at position 725 of SEQ ID NO: 1885319
aagggauuggugugggaug

SEQ ID NO: 2333201 - RNA, 19 nt, Artificial Sequence
  Description of Artificial Sequence: Synthetic oligonucleotide
  Antisense strand to SEQ ID NO: 2333200
caucccacaccaaucccuu

SEQ ID NO: 2333202 - RNA, 19 nt, Artificial Sequence
  Description of Artificial Sequence: Synthetic oligonucleotide
  Sense strand starting at position 768 of SEQ ID NO: 1885319
gcgugaaugcuacaugaag

SEQ ID NO: 2333203 - RNA, 19 nt, Artificial Sequence
  Description of Artificial Sequence: Synthetic oligonucleotide
  Antisense strand to SEQ ID NO: 2333202
cuucauguagcauucacgc

SEQ ID NO: 2333204 - RNA, 19 nt, Artificial Sequence
  Description of Artificial Sequence: Synthetic oligonucleotide
  Sense strand starting at position 770 of SEQ ID NO: 1885319
gugaaugcuacaugaagga

SEQ ID NO: 2333205 - RNA, 19 nt, Artificial Sequence
  Description of Artificial Sequence: Synthetic oligonucleotide
  Antisense strand to SEQ ID NO: 2333204
uccuucauguagcauucac

SEQ ID NO: 2333206 - RNA, 19 nt, Artificial Sequence
  Description of Artificial Sequence: Synthetic oligonucleotide
  Sense strand starting at position 796 of SEQ ID NO: 1885319
guuguuugguggaagagga

SEQ ID NO: 2333207 - RNA, 19 nt, Artificial Sequence
  Description of Artificial Sequence: Synthetic oligonucleotide
  Antisense strand to SEQ ID NO: 2333206
uccucuuccaccaaacaac

SEQ ID NO: 2333208 - RNA, 19 nt, Artificial Sequence
  Description of Artificial Sequence: Synthetic oligonucleotide
  Sense strand starting at position 816 of SEQ ID NO: 1885319
gagguaugcaugugaggag

SEQ ID NO: 2333209 - RNA, 19 nt, Artificial Sequence
  Description of Artificial Sequence: Synthetic oligonucleotide
  Antisense strand to SEQ ID NO: 2333208
cuccucacaugcauaccuc

SEQ ID NO: 2333210 - RNA, 19 nt, Artificial Sequence
  Description of Artificial Sequence: Synthetic oligonucleotide
  Sense strand starting at position 920 of SEQ ID NO: 1885319
ucuugaguguuucugaaug

SEQ ID NO: 2333211 - RNA, 19 nt, Artificial Sequence
  Description of Artificial Sequence: Synthetic oligonucleotide
  Antisense strand to SEQ ID NO: 2333210
cauucagaaacacucaaga

SEQ ID NO: 2333212 - RNA, 19 nt, Artificial Sequence
  Description of Artificial Sequence: Synthetic oligonucleotide
  Sense strand starting at position 990 of SEQ ID NO: 1885319
uguaaagagaaguguauac

SEQ ID NO: 2333213 - RNA, 19 nt, Artificial Sequence
  Description of Artificial Sequence: Synthetic oligonucleotide
  Antisense strand to SEQ ID NO: 2333212
guauacacuucucuuuaca

SEQ ID NO: 2333214 - RNA, 19 nt, Artificial Sequence
  Description of Artificial Sequence: Synthetic oligonucleotide
  Sense strand starting at position 1030 of SEQ ID NO: 1885319
ggcuuugaauccuucuaga

SEQ ID NO: 2333215 - RNA, 19 nt, Artificial Sequence
  Description of Artificial Sequence: Synthetic oligonucleotide
  Antisense strand to SEQ ID NO: 2333214
ucuagaaggauucaaagcc

SEQ ID NO: 2333216 - RNA, 19 nt, Artificial Sequence
  Description of Artificial Sequence: Synthetic oligonucleotide
  Sense strand starting at position 1355 of SEQ ID NO: 1885319
caagauuauuacgugauua

SEQ ID NO: 2333217 - RNA, 19 nt, Artificial Sequence
  Description of Artificial Sequence: Synthetic oligonucleotide
  Antisense strand to SEQ ID NO: 2333216
uaaucacguaauaaucuug

SEQ ID NO: 2333218 - RNA, 19 nt, Artificial Sequence
  Description of Artificial Sequence: Synthetic oligonucleotide
  Sense strand starting at position 1733 of SEQ ID NO: 1885319
cccaauauucuagauugug

SEQ ID NO: 2333219 - RNA, 19 nt, Artificial Sequence
  Description of Artificial Sequence: Synthetic oligonucleotide
  Antisense strand to SEQ ID NO: 2333218
cacaaucuagaauauuggg

SEQ ID NO: 2333220 - RNA, 19 nt, Artificial Sequence
  Description of Artificial Sequence: Synthetic oligonucleotide
  Sense strand starting at position 1736 of SEQ ID NO: 1885319
aauauucuagauugugaga

SEQ ID NO: 2333221 - RNA, 19 nt, Artificial Sequence
  Description of Artificial Sequence: Synthetic oligonucleotide
  Antisense strand to SEQ ID NO: 2333220
ucucacaaucuagaauauu

SEQ ID NO: 2333222 - RNA, 19 nt, Artificial Sequence
  Description of Artificial Sequence: Synthetic oligonucleotide
  Sense strand starting at position 1808 of SEQ ID NO: 1885319
gcaagaggagucugugaca

SEQ ID NO: 2333223 - RNA, 19 nt, Artificial Sequence
  Description of Artificial Sequence: Synthetic oligonucleotide
  Antisense strand to SEQ ID NO: 2333222
ugucacagacuccucuugc

SEQ ID NO: 2333224 - RNA, 19 nt, Artificial Sequence
  Description of Artificial Sequence: Synthetic oligonucleotide
  Sense strand starting at position 1821 of SEQ ID NO: 1885319
gugacaaaccugugguuaa

SEQ ID NO: 2333225 - RNA, 19 nt, Artificial Sequence
  Description of Artificial Sequence: Synthetic oligonucleotide
  Antisense strand to SEQ ID NO: 2333224
uuaaccacagguuugucac

SEQ ID NO: 2333226 - RNA, 19 nt, Artificial Sequence
  Description of Artificial Sequence: Synthetic oligonucleotide
  Sense strand starting at position 1836 of SEQ ID NO: 1885319
uuaagcucucuuugaagaa

SEQ ID NO: 2333227 - RNA, 19 nt, Artificial Sequence
  Description of Artificial Sequence: Synthetic oligonucleotide
  Antisense strand to SEQ ID NO: 2333226
uucuucaaagagagcuuaa

SEQ ID NO: 2333228 - RNA, 19 nt, Artificial Sequence
  Description of Artificial Sequence: Synthetic oligonucleotide
  Sense strand starting at position 1849 of SEQ ID NO: 1885319
gaagaaaucgcacaguaug

SEQ ID NO: 2333229 - RNA, 19 nt, Artificial Sequence
  Description of Artificial Sequence: Synthetic oligonucleotide
  Antisense strand to SEQ ID NO: 2333228
cauacugugcgauuucuuc

SEQ ID NO: 2333230 - RNA, 19 nt, Artificial Sequence
  Description of Artificial Sequence: Synthetic oligonucleotide
  Sense strand starting at position 2052 of SEQ ID NO: 1885319
gcauucuuucuggagguua

SEQ ID NO: 2333231 - RNA, 19 nt, Artificial Sequence
  Description of Artificial Sequence: Synthetic oligonucleotide
  Antisense strand to SEQ ID NO: 2333230
uaaccuccagaaagaaugc

SEQ ID NO: 2333232 - RNA, 19 nt, Artificial Sequence
  Description of Artificial Sequence: Synthetic oligonucleotide
  Sense strand starting at position 2139 of SEQ ID NO: 1885319
cauccuugagguugaauag

SEQ ID NO: 2333233 - RNA, 19 nt, Artificial Sequence
  Description of Artificial Sequence: Synthetic oligonucleotide
  Antisense strand to SEQ ID NO: 2333232
cuauucaaccucaaggaug

SEQ ID NO: 2333234 - RNA, 19 nt, Artificial Sequence
  Description of Artificial Sequence: Synthetic oligonucleotide
  Sense strand starting at position 2258 of SEQ ID NO: 1885319
uuauguuccucucuuggga

SEQ ID NO: 2333235 - RNA, 19 nt, Artificial Sequence
  Description of Artificial Sequence: Synthetic oligonucleotide
  Antisense strand to SEQ ID NO: 2333234
ucccaagagaggaacauaa

SEQ ID NO: 2333236 - RNA, 19 nt, Artificial Sequence
  Description of Artificial Sequence: Synthetic oligonucleotide
  Sense strand starting at position 3028 of SEQ ID NO: 1885319
ggaugugugacugagucuu

SEQ ID NO: 2333237 - RNA, 19 nt, Artificial Sequence
  Description of Artificial Sequence: Synthetic oligonucleotide
  Antisense strand to SEQ ID NO: 2333236
aagacucagucacacaucc

SEQ ID NO: 2333238 - RNA, 19 nt, Artificial Sequence
  Description of Artificial Sequence: Synthetic oligonucleotide
  Sense strand starting at position 3034 of SEQ ID NO: 1885319
gugacugagucuuuaagag

SEQ ID NO: 2333239 - RNA, 19 nt, Artificial Sequence
  Description of Artificial Sequence: Synthetic oligonucleotide
  Antisense strand to SEQ ID NO: 2333238
cucuuaaagacucagucac

SEQ ID NO: 2333240 - RNA, 19 nt, Artificial Sequence
  Description of Artificial Sequence: Synthetic oligonucleotide
  Sense strand starting at position 3043 of SEQ ID NO: 1885319
ucuuuaagagguggaguga

SEQ ID NO: 2333241 - RNA, 19 nt, Artificial Sequence
  Description of Artificial Sequence: Synthetic oligonucleotide
  Antisense strand to SEQ ID NO: 2333240
ucacuccaccucuuaaaga

SEQ ID NO: 2333242 - RNA, 19 nt, Artificial Sequence
  Description of Artificial Sequence: Synthetic oligonucleotide
  Sense strand starting at position 3052 of SEQ ID NO: 1885319
gguggagugacuuacuuua

SEQ ID NO: 2333243 - RNA, 19 nt, Artificial Sequence
  Description of Artificial Sequence: Synthetic oligonucleotide
  Antisense strand to SEQ ID NO: 2333242
uaaaguaagucacuccacc

SEQ ID NO: 2333244 - RNA, 19 nt, Artificial Sequence
  Description of Artificial Sequence: Synthetic oligonucleotide
  Sense strand starting at position 3054 of SEQ ID NO: 1885319
uggagugacuuacuuuaau

SEQ ID NO: 2333245 - RNA, 19 nt, Artificial Sequence
  Description of Artificial Sequence: Synthetic oligonucleotide
  Antisense strand to SEQ ID NO: 2333244
auuaaaguaagucacucca

SEQ ID NO: 2333246 - RNA, 19 nt, Artificial Sequence
  Description of Artificial Sequence: Synthetic oligonucleotide
  Sense strand starting at position 3073 of SEQ ID NO: 1885319
ucaguaagucaauauguuu

SEQ ID NO: 2333247 - RNA, 19 nt, Artificial Sequence
  Description of Artificial Sequence: Synthetic oligonucleotide
  Antisense strand to SEQ ID NO: 2333246
aaacauauugacuuacuga

SEQ ID NO: 2333248 - RNA, 19 nt, Artificial Sequence
  Description of Artificial Sequence: Synthetic oligonucleotide
  Sense strand starting at position 3097 of SEQ ID NO: 1885319
ucagauuguuuguuccaca

SEQ ID NO: 2333249 - RNA, 19 nt, Artificial Sequence
  Description of Artificial Sequence: Synthetic oligonucleotide
  Antisense strand to SEQ ID NO: 2333248
uguggaacaaacaaucuga

SEQ ID NO: 2333250 - RNA, 19 nt, Artificial Sequence
  Description of Artificial Sequence: Synthetic oligonucleotide
  Sense strand starting at position 3127 of SEQ ID NO: 1885319
cugugaaauuucuugucuc

SEQ ID NO: 2333251 - RNA, 19 nt, Artificial Sequence
  Description of Artificial Sequence: Synthetic oligonucleotide
  Antisense strand to SEQ ID NO: 2333250
gagacaagaaauuucacag

SEQ ID NO: 2333252 - RNA, 19 nt, Artificial Sequence
  Description of Artificial Sequence: Synthetic oligonucleotide
  Sense strand starting at position 3130 of SEQ ID NO: 1885319
ugaaauuucuugucucagc

SEQ ID NO: 2333253 - RNA, 19 nt, Artificial Sequence
  Description of Artificial Sequence: Synthetic oligonucleotide
  Antisense strand to SEQ ID NO: 2333252
gcugagacaagaaauuuca

SEQ ID NO: 2333254 - RNA, 19 nt, Artificial Sequence
  Description of Artificial Sequence: Synthetic oligonucleotide
  Sense strand starting at position 3244 of SEQ ID NO: 1885319
caagaaugguucuuugggu

SEQ ID NO: 2333255 - RNA, 19 nt, Artificial Sequence
  Description of Artificial Sequence: Synthetic oligonucleotide
  Antisense strand to SEQ ID NO: 2333254
acccaaagaaccauucuug

SEQ ID NO: 2333256 - RNA, 19 nt, Artificial Sequence
  Description of Artificial Sequence: Synthetic oligonucleotide
  Sense strand starting at position 3441 of SEQ ID NO: 1885319
cuacacugauggucaaaua

SEQ ID NO: 2333257 - RNA, 19 nt, Artificial Sequence
  Description of Artificial Sequence: Synthetic oligonucleotide
  Antisense strand to SEQ ID NO: 2333256
uauuugaccaucaguguag

SEQ ID NO: 2333258 - RNA, 19 nt, Artificial Sequence
  Description of Artificial Sequence: Synthetic oligonucleotide
  Sense strand starting at position 3647 of SEQ ID NO: 1885319
cuggcuaccuacucuuaga

SEQ ID NO: 2333259 - RNA, 19 nt, Artificial Sequence
  Description of Artificial Sequence: Synthetic oligonucleotide
  Antisense strand to SEQ ID NO: 2333258
ucuaagaguagguagccag

SEQ ID NO: 2333260 - RNA, 19 nt, Artificial Sequence
  Description of Artificial Sequence: Synthetic oligonucleotide
  Sense strand starting at position 3805 of SEQ ID NO: 1885319
ggacgaucuguuuacuuau

SEQ ID NO: 2333261 - RNA, 19 nt, Artificial Sequence
  Description of Artificial Sequence: Synthetic oligonucleotide
  Antisense strand to SEQ ID NO: 2333260
auaaguaaacagaucgucc

SEQ ID NO: 2333262 - RNA, 19 nt, Artificial Sequence
  Description of Artificial Sequence: Synthetic oligonucleotide
  Sense strand starting at position 3873 of SEQ ID NO: 1885319
gucuuuauuguugcauguu

SEQ ID NO: 2333263 - RNA, 19 nt, Artificial Sequence
  Description of Artificial Sequence: Synthetic oligonucleotide
  Antisense strand to SEQ ID NO: 2333262
aacaugcaacaauaaagac

SEQ ID NO: 2333264 - RNA, 19 nt, Artificial Sequence
  Description of Artificial Sequence: Synthetic oligonucleotide
  Sense strand starting at position 19 of SEQ ID NO: 1885320
cuggcucugugacuuauuu

SEQ ID NO: 2333265 - RNA, 19 nt, Artificial Sequence
  Description of Artificial Sequence: Synthetic oligonucleotide
  Antisense strand to SEQ ID NO: 2333264
aaauaagucacagagccag

SEQ ID NO: 2333266 - RNA, 19 nt, Artificial Sequence
  Description of Artificial Sequence: Synthetic oligonucleotide
  Sense strand starting at position 59 of SEQ ID NO: 1885320
gaauguaauguguauaaca

SEQ ID NO: 2333267 - RNA, 19 nt, Artificial Sequence
  Description of Artificial Sequence: Synthetic oligonucleotide
  Antisense strand to SEQ ID NO: 2333266
uguuauacacauuacauuc

SEQ ID NO: 2333268 - RNA, 19 nt, Artificial Sequence
  Description of Artificial Sequence: Synthetic oligonucleotide
  Sense strand starting at position 61 of SEQ ID NO: 1885320
auguaauguguauaacauc

SEQ ID NO: 2333269 - RNA, 19 nt, Artificial Sequence
  Description of Artificial Sequence: Synthetic oligonucleotide
  Antisense strand to SEQ ID NO: 2333268
gauguuauacacauuacau

SEQ ID NO: 2333270 - RNA, 19 nt, Artificial Sequence
  Description of Artificial Sequence: Synthetic oligonucleotide
  Sense strand starting at position 82 of SEQ ID NO: 1885320
aggcuaggucuguacagau

SEQ ID NO: 2333271 - RNA, 19 nt, Artificial Sequence
  Description of Artificial Sequence: Synthetic oligonucleotide
  Antisense strand to SEQ ID NO: 2333270
aucuguacagaccuagccu

SEQ ID NO: 2333272 - RNA, 19 nt, Artificial Sequence
  Description of Artificial Sequence: Synthetic oligonucleotide
  Sense strand starting at position 180 of SEQ ID NO: 1885320
uggugugagccacauggaa

SEQ ID NO: 2333273 - RNA, 19 nt, Artificial Sequence
  Description of Artificial Sequence: Synthetic oligonucleotide
  Antisense strand to SEQ ID NO: 2333272
uuccauguggcucacacca

SEQ ID NO: 2333274 - RNA, 19 nt, Artificial Sequence
  Description of Artificial Sequence: Synthetic oligonucleotide
  Sense strand starting at position 298 of SEQ ID NO: 1885320
cuguguggagcagaagauu

SEQ ID NO: 2333275 - RNA, 19 nt, Artificial Sequence
  Description of Artificial Sequence: Synthetic oligonucleotide
  Antisense strand to SEQ ID NO: 2333274
aaucuucugcuccacacag

SEQ ID NO: 2333276 - RNA, 19 nt, Artificial Sequence
  Description of Artificial Sequence: Synthetic oligonucleotide
  Sense strand starting at position 309 of SEQ ID NO: 1885320
agaagauucgcccagcuua

SEQ ID NO: 2333277 - RNA, 19 nt, Artificial Sequence
  Description of Artificial Sequence: Synthetic oligonucleotide
  Antisense strand to SEQ ID NO: 2333276
uaagcugggcgaaucuucu

SEQ ID NO: 2333278 - RNA, 19 nt, Artificial Sequence
  Description of Artificial Sequence: Synthetic oligonucleotide
  Sense strand starting at position 407 of SEQ ID NO: 1885320
uauguuacucaguaguaga

SEQ ID NO: 2333279 - RNA, 19 nt, Artificial Sequence
  Description of Artificial Sequence: Synthetic oligonucleotide
  Antisense strand to SEQ ID NO: 2333278
ucuacuacugaguaacaua

SEQ ID NO: 2333280 - RNA, 19 nt, Artificial Sequence
  Description of Artificial Sequence: Synthetic oligonucleotide
  Sense strand starting at position 813 of SEQ ID NO: 1885320
aguuacugaccuugagcaa

SEQ ID NO: 2333281 - RNA, 19 nt, Artificial Sequence
  Description of Artificial Sequence: Synthetic oligonucleotide
  Antisense strand to SEQ ID NO: 2333280
uugcucaaggucaguaacu

SEQ ID NO: 2333282 - RNA, 19 nt, Artificial Sequence
  Description of Artificial Sequence: Synthetic oligonucleotide
  Sense strand starting at position 814 of SEQ ID NO: 1885320
guuacugaccuugagcaaa

SEQ ID NO: 2333283 - RNA, 19 nt, Artificial Sequence
  Description of Artificial Sequence: Synthetic oligonucleotide
  Antisense strand to SEQ ID NO: 2333282
uuugcucaaggucaguaac

SEQ ID NO: 2333284 - RNA, 19 nt, Artificial Sequence
  Description of Artificial Sequence: Synthetic oligonucleotide
  Sense strand starting at position 959 of SEQ ID NO: 1885320
ugcucaauacaggaguaua

SEQ ID NO: 2333285 - RNA, 19 nt, Artificial Sequence
  Description of Artificial Sequence: Synthetic oligonucleotide
  Antisense strand to SEQ ID NO: 2333284
uauacuccuguauugagca

SEQ ID NO: 2333286 - RNA, 19 nt, Artificial Sequence
  Description of Artificial Sequence: Synthetic oligonucleotide
  Sense strand starting at position 1060 of SEQ ID NO: 1885320
ggaguaaacugccucugga

SEQ ID NO: 2333287 - RNA, 19 nt, Artificial Sequence
  Description of Artificial Sequence: Synthetic oligonucleotide
  Antisense strand to SEQ ID NO: 2333286
uccagaggcaguuuacucc

SEQ ID NO: 2333288 - RNA, 19 nt, Artificial Sequence
  Description of Artificial Sequence: Synthetic oligonucleotide
  Sense strand starting at position 1192 of SEQ ID NO: 1885320
ggaugagguaggcauucua

SEQ ID NO: 2333289 - RNA, 19 nt, Artificial Sequence
  Description of Artificial Sequence: Synthetic oligonucleotide
  Antisense strand to SEQ ID NO: 2333288
uagaaugccuaccucaucc

SEQ ID NO: 2333290 - RNA, 19 nt, Artificial Sequence
  Description of Artificial Sequence: Synthetic oligonucleotide
  Sense strand starting at position 1391 of SEQ ID NO: 1885320
agaccuaaguggcuuauua

SEQ ID NO: 2333291 - RNA, 19 nt, Artificial Sequence
  Description of Artificial Sequence: Synthetic oligonucleotide
  Antisense strand to SEQ ID NO: 2333290
uaauaagccacuuaggucu

SEQ ID NO: 2333292 - RNA, 19 nt, Artificial Sequence
  Description of Artificial Sequence: Synthetic oligonucleotide
  Sense strand starting at position 1393 of SEQ ID NO: 1885320
accuaaguggcuuauuaau

SEQ ID NO: 2333293 - RNA, 19 nt, Artificial Sequence
  Description of Artificial Sequence: Synthetic oligonucleotide
  Antisense strand to SEQ ID NO: 2333292
auuaauaagccacuuaggu

SEQ ID NO: 2333294 - RNA, 19 nt, Artificial Sequence
  Description of Artificial Sequence: Synthetic oligonucleotide
  Sense strand starting at position 2080 of SEQ ID NO: 1885320
agcuguaauaauuggguaa

SEQ ID NO: 2333295 - RNA, 19 nt, Artificial Sequence
  Description of Artificial Sequence: Synthetic oligonucleotide
  Antisense strand to SEQ ID NO: 2333294
uuacccaauuauuacagcu

SEQ ID NO: 2333296 - RNA, 19 nt, Artificial Sequence
  Description of Artificial Sequence: Synthetic oligonucleotide
  Sense strand starting at position 2083 of SEQ ID NO: 1885320
uguaauaauuggguaauca

SEQ ID NO: 2333297 - RNA, 19 nt, Artificial Sequence
  Description of Artificial Sequence: Synthetic oligonucleotide
  Antisense strand to SEQ ID NO: 2333296
ugauuacccaauuauuaca

SEQ ID NO: 2333298 - RNA, 19 nt, Artificial Sequence
  Description of Artificial Sequence: Synthetic oligonucleotide
  Sense strand starting at position 2175 of SEQ ID NO: 1885320
aaguauagcugaccuagaa

SEQ ID NO: 2333299 - RNA, 19 nt, Artificial Sequence
  Description of Artificial Sequence: Synthetic oligonucleotide
  Antisense strand to SEQ ID NO: 2333298
uucuaggucagcuauacuu

SEQ ID NO: 2333300 - RNA, 19 nt, Artificial Sequence
  Description of Artificial Sequence: Synthetic oligonucleotide
  Sense strand starting at position 2246 of SEQ ID NO: 1885320
aaggaugcauguuuagaaa

SEQ ID NO: 2333301 - RNA, 19 nt, Artificial Sequence
  Description of Artificial Sequence: Synthetic oligonucleotide
  Antisense strand to SEQ ID NO: 2333300
uuucuaaacaugcauccuu

SEQ ID NO: 2333302 - RNA, 19 nt, Artificial Sequence
  Description of Artificial Sequence: Synthetic oligonucleotide
  Sense strand starting at position 2446 of SEQ ID NO: 1885320
gugugaguccaggaaacau

SEQ ID NO: 2333303 - RNA, 19 nt, Artificial Sequence
  Description of Artificial Sequence: Synthetic oligonucleotide
  Antisense strand to SEQ ID NO: 2333302
auguuuccuggacucacac

SEQ ID NO: 2333304 - RNA, 19 nt, Artificial Sequence
  Description of Artificial Sequence: Synthetic oligonucleotide
  Sense strand starting at position 2471 of SEQ ID NO: 1885320
augaauacaucugcugaga

SEQ ID NO: 2333305 - RNA, 19 nt, Artificial Sequence
  Description of Artificial Sequence: Synthetic oligonucleotide
  Antisense strand to SEQ ID NO: 2333304
ucucagcagauguauucau

SEQ ID NO: 2333306 - RNA, 19 nt, Artificial Sequence
  Description of Artificial Sequence: Synthetic oligonucleotide
  Sense strand starting at position 2523 of SEQ ID NO: 1885320
guggauagcaaaugaaaca

SEQ ID NO: 2333307 - RNA, 19 nt, Artificial Sequence
  Description of Artificial Sequence: Synthetic oligonucleotide
  Antisense strand to SEQ ID NO: 2333306
uguuucauuugcuauccac

SEQ ID NO: 2333308 - RNA, 19 nt, Artificial Sequence
  Description of Artificial Sequence: Synthetic oligonucleotide
  Sense strand starting at position 2625 of SEQ ID NO: 1885320
agaaguaagccugacuauu

SEQ ID NO: 2333309 - RNA, 19 nt, Artificial Sequence
  Description of Artificial Sequence: Synthetic oligonucleotide
  Antisense strand to SEQ ID NO: 2333308
aauagucaggcuuacuucu

SEQ ID NO: 2333310 - RNA, 19 nt, Artificial Sequence
  Description of Artificial Sequence: Synthetic oligonucleotide
  Sense strand starting at position 2728 of SEQ ID NO: 1885320
gccugaucacacugaccua

SEQ ID NO: 2333311 - RNA, 19 nt, Artificial Sequence
  Description of Artificial Sequence: Synthetic oligonucleotide
  Antisense strand to SEQ ID NO: 2333310
uaggucagugugaucaggc

SEQ ID NO: 2333312 - RNA, 19 nt, Artificial Sequence
  Description of Artificial Sequence: Synthetic oligonucleotide
  Sense strand starting at position 2777 of SEQ ID NO: 1885320
ccugaugagcuggagaguu

SEQ ID NO: 2333313 - RNA, 19 nt, Artificial Sequence
  Description of Artificial Sequence: Synthetic oligonucleotide
  Antisense strand to SEQ ID NO: 2333312
aacucuccagcucaucagg

SEQ ID NO: 2333314 - RNA, 19 nt, Artificial Sequence
  Description of Artificial Sequence: Synthetic oligonucleotide
  Sense strand starting at position 2841 of SEQ ID NO: 1885320
cagggcaggcauuaugauu

SEQ ID NO: 2333315 - RNA, 19 nt, Artificial Sequence
  Description of Artificial Sequence: Synthetic oligonucleotide
  Antisense strand to SEQ ID NO: 2333314
aaucauaaugccugcccug

SEQ ID NO: 2333316 - RNA, 19 nt, Artificial Sequence
  Description of Artificial Sequence: Synthetic oligonucleotide
  Sense strand starting at position 2893 of SEQ ID NO: 1885320
ucuauaaaugcucacggaa

SEQ ID NO: 2333317 - RNA, 19 nt, Artificial Sequence
  Description of Artificial Sequence: Synthetic oligonucleotide
  Antisense strand to SEQ ID NO: 2333316
uuccgugagcauuuauaga

SEQ ID NO: 2333318 - RNA, 19 nt, Artificial Sequence
  Description of Artificial Sequence: Synthetic oligonucleotide
  Sense strand starting at position 3001 of SEQ ID NO: 1885320
uuucuagacguguuugcuu

SEQ ID NO: 2333319 - RNA, 19 nt, Artificial Sequence
  Description of Artificial Sequence: Synthetic oligonucleotide
  Antisense strand to SEQ ID NO: 2333318
aagcaaacacgucuagaaa

SEQ ID NO: 2333320 - RNA, 19 nt, Artificial Sequence
  Description of Artificial Sequence: Synthetic oligonucleotide
  Sense strand starting at position 3079 of SEQ ID NO: 1885320
ggcgauagagauugguaca

SEQ ID NO: 2333321 - RNA, 19 nt, Artificial Sequence
  Description of Artificial Sequence: Synthetic oligonucleotide
  Antisense strand to SEQ ID NO: 2333320
uguaccaaucucuaucgcc

SEQ ID NO: 2333322 - RNA, 19 nt, Artificial Sequence
  Description of Artificial Sequence: Synthetic oligonucleotide
  Sense strand starting at position 3110 of SEQ ID NO: 1885320
gaggaaaugcacugucuug

SEQ ID NO: 2333323 - RNA, 19 nt, Artificial Sequence
  Description of Artificial Sequence: Synthetic oligonucleotide
  Antisense strand to SEQ ID NO: 2333322
caagacagugcauuuccuc

SEQ ID NO: 2333324 - RNA, 19 nt, Artificial Sequence
  Description of Artificial Sequence: Synthetic oligonucleotide
  Sense strand starting at position 3228 of SEQ ID NO: 1885320
gccagcugccugcucuaau

SEQ ID NO: 2333325 - RNA, 19 nt, Artificial Sequence
  Description of Artificial Sequence: Synthetic oligonucleotide
  Antisense strand to SEQ ID NO: 2333324
auuagagcaggcagcuggc

SEQ ID NO: 2333326 - RNA, 19 nt, Artificial Sequence
  Description of Artificial Sequence: Synthetic oligonucleotide
  Sense strand starting at position 3327 of SEQ ID NO: 1885320
uggccaugugacuagaugu

SEQ ID NO: 2333327 - RNA, 19 nt, Artificial Sequence
  Description of Artificial Sequence: Synthetic oligonucleotide
  Antisense strand to SEQ ID NO: 2333326
acaucuagucacauggcca

SEQ ID NO: 2333328 - RNA, 19 nt, Artificial Sequence
  Description of Artificial Sequence: Synthetic oligonucleotide
  Sense strand starting at position 3368 of SEQ ID NO: 1885320
ugauuuguuccaugucgga

SEQ ID NO: 2333329 - RNA, 19 nt, Artificial Sequence
  Description of Artificial Sequence: Synthetic oligonucleotide
  Antisense strand to SEQ ID NO: 2333328
uccgacauggaacaaauca

SEQ ID NO: 2333330 - RNA, 19 nt, Artificial Sequence
  Description of Artificial Sequence: Synthetic oligonucleotide
  Sense strand starting at position 3385 of SEQ ID NO: 1885320
gagucaagcuucuuagaaa

SEQ ID NO: 2333331 - RNA, 19 nt, Artificial Sequence
  Description of Artificial Sequence: Synthetic oligonucleotide
  Antisense strand to SEQ ID NO: 2333330
uuucuaagaagcuugacuc

SEQ ID NO: 2333332 - RNA, 19 nt, Artificial Sequence
  Description of Artificial Sequence: Synthetic oligonucleotide
  Sense strand starting at position 3542 of SEQ ID NO: 1885320
auauuugacuuauagguga

SEQ ID NO: 2333333 - RNA, 19 nt, Artificial Sequence
  Description of Artificial Sequence: Synthetic oligonucleotide
  Antisense strand to SEQ ID NO: 2333332
ucaccuauaagucaaauau

SEQ ID NO: 2333334 - RNA, 19 nt, Artificial Sequence
  Description of Artificial Sequence: Synthetic oligonucleotide
  Sense strand starting at position 3624 of SEQ ID NO: 1885320
uggugguaucaggagguga

SEQ ID NO: 2333335 - RNA, 19 nt, Artificial Sequence
  Description of Artificial Sequence: Synthetic oligonucleotide
  Antisense strand to SEQ ID NO: 2333334
ucaccuccugauaccacca

SEQ ID NO: 2333336 - RNA, 19 nt, Artificial Sequence
  Description of Artificial Sequence: Synthetic oligonucleotide
  Sense strand starting at position 3671 of SEQ ID NO: 1885320
gggugaugucuucaugaau

SEQ ID NO: 2333337 - RNA, 19 nt, Artificial Sequence
  Description of Artificial Sequence: Synthetic oligonucleotide
  Antisense strand to SEQ ID NO: 2333336
auucaugaagacaucaccc

SEQ ID NO: 2333338 - RNA, 19 nt, Artificial Sequence
  Description of Artificial Sequence: Synthetic oligonucleotide
  Sense strand starting at position 3733 of SEQ ID NO: 1885320
cccuucuacuaugugauga

SEQ ID NO: 2333339 - RNA, 19 nt, Artificial Sequence
  Description of Artificial Sequence: Synthetic oligonucleotide
  Antisense strand to SEQ ID NO: 2333338
ucaucacauaguagaaggg

SEQ ID NO: 2333340 - RNA, 19 nt, Artificial Sequence
  Description of Artificial Sequence: Synthetic oligonucleotide
  Sense strand starting at position 3744 of SEQ ID NO: 1885320
ugugaugacacagguagaa

SEQ ID NO: 2333341 - RNA, 19 nt, Artificial Sequence
  Description of Artificial Sequence: Synthetic oligonucleotide
  Antisense strand to SEQ ID NO: 2333340
uucuaccugugucaucaca

SEQ ID NO: 2333342 - RNA, 19 nt, Artificial Sequence
  Description of Artificial Sequence: Synthetic oligonucleotide
  Sense strand starting at position 3769 of SEQ ID NO: 1885320
aucugugaaccauaaagca

SEQ ID NO: 2333343 - RNA, 19 nt, Artificial Sequence
  Description of Artificial Sequence: Synthetic oligonucleotide
  Antisense strand to SEQ ID NO: 2333342
ugcuuuaugguucacagau

SEQ ID NO: 2333344 - RNA, 19 nt, Artificial Sequence
  Description of Artificial Sequence: Synthetic oligonucleotide
  Sense strand starting at position 103 of SEQ ID NO: 1885321
gcacauucuuuacuuggaa

SEQ ID NO: 2333345 - RNA, 19 nt, Artificial Sequence
  Description of Artificial Sequence: Synthetic oligonucleotide
  Antisense strand to SEQ ID NO: 2333344
uuccaaguaaagaaugugc

SEQ ID NO: 2333346 - RNA, 19 nt, Artificial Sequence
  Description of Artificial Sequence: Synthetic oligonucleotide
  Sense strand starting at position 135 of SEQ ID NO: 1885321
gagaaugccugacugaaau

SEQ ID NO: 2333347 - RNA, 19 nt, Artificial Sequence
  Description of Artificial Sequence: Synthetic oligonucleotide
  Antisense strand to SEQ ID NO: 2333346
auuucagucaggcauucuc

SEQ ID NO: 2333348 - RNA, 19 nt, Artificial Sequence
  Description of Artificial Sequence: Synthetic oligonucleotide
  Sense strand starting at position 251 of SEQ ID NO: 1885321
aggccuagaucuguucuga

SEQ ID NO: 2333349 - RNA, 19 nt, Artificial Sequence
  Description of Artificial Sequence: Synthetic oligonucleotide
  Antisense strand to SEQ ID NO: 2333348
ucagaacagaucuaggccu

SEQ ID NO: 2333350 - RNA, 19 nt, Artificial Sequence
  Description of Artificial Sequence: Synthetic oligonucleotide
  Sense strand starting at position 294 of SEQ ID NO: 1885321
gugaguagccucugauuug

SEQ ID NO: 2333351 - RNA, 19 nt, Artificial Sequence
  Description of Artificial Sequence: Synthetic oligonucleotide
  Antisense strand to SEQ ID NO: 2333350
caaaucagaggcuacucac

SEQ ID NO: 2333352 - RNA, 19 nt, Artificial Sequence
  Description of Artificial Sequence: Synthetic oligonucleotide
  Sense strand starting at position 870 of SEQ ID NO: 1885321
auacauugugauuagcuga

SEQ ID NO: 2333353 - RNA, 19 nt, Artificial Sequence
  Description of Artificial Sequence: Synthetic oligonucleotide
  Antisense strand to SEQ ID NO: 2333352
ucagcuaaucacaauguau

SEQ ID NO: 2333354 - RNA, 19 nt, Artificial Sequence
  Description of Artificial Sequence: Synthetic oligonucleotide
  Sense strand starting at position 963 of SEQ ID NO: 1885321
ugaagaagcuguguugauu

SEQ ID NO: 2333355 - RNA, 19 nt, Artificial Sequence
  Description of Artificial Sequence: Synthetic oligonucleotide
  Antisense strand to SEQ ID NO: 2333354
aaucaacacagcuucuuca

SEQ ID NO: 2333356 - RNA, 19 nt, Artificial Sequence
  Description of Artificial Sequence: Synthetic oligonucleotide
  Sense strand starting at position 1078 of SEQ ID NO: 1885321
ggauuuaaaugguacagcu

SEQ ID NO: 2333357 - RNA, 19 nt, Artificial Sequence
  Description of Artificial Sequence: Synthetic oligonucleotide
  Antisense strand to SEQ ID NO: 2333356
agcuguaccauuuaaaucc

SEQ ID NO: 2333358 - RNA, 19 nt, Artificial Sequence
  Description of Artificial Sequence: Synthetic oligonucleotide
  Sense strand starting at position 1282 of SEQ ID NO: 1885321
ccaacugaugagcggauaa

SEQ ID NO: 2333359 - RNA, 19 nt, Artificial Sequence
  Description of Artificial Sequence: Synthetic oligonucleotide
  Antisense strand to SEQ ID NO: 2333358
uuauccgcucaucaguugg

SEQ ID NO: 2333360 - RNA, 19 nt, Artificial Sequence
  Description of Artificial Sequence: Synthetic oligonucleotide
  Sense strand starting at position 1421 of SEQ ID NO: 1885321
guuagaauuaaauaguggu

SEQ ID NO: 2333361 - RNA, 19 nt, Artificial Sequence
  Description of Artificial Sequence: Synthetic oligonucleotide
  Antisense strand to SEQ ID NO: 2333360
accacuauuuaauucuaac

SEQ ID NO: 2333362 - RNA, 19 nt, Artificial Sequence
  Description of Artificial Sequence: Synthetic oligonucleotide
  Sense strand starting at position 1428 of SEQ ID NO: 1885321
uuaaauaguggugaaguuu

SEQ ID NO: 2333363 - RNA, 19 nt, Artificial Sequence
  Description of Artificial Sequence: Synthetic oligonucleotide
  Antisense strand to SEQ ID NO: 2333362
aaacuucaccacuauuuaa

SEQ ID NO: 2333364 - RNA, 19 nt, Artificial Sequence
  Description of Artificial Sequence: Synthetic oligonucleotide
  Sense strand starting at position 1633 of SEQ ID NO: 1885321
ugugaaauuugauaacauc

SEQ ID NO: 2333365 - RNA, 19 nt, Artificial Sequence
  Description of Artificial Sequence: Synthetic oligonucleotide
  Antisense strand to SEQ ID NO: 2333364
gauguuaucaaauuucaca

SEQ ID NO: 2333366 - RNA, 19 nt, Artificial Sequence
  Description of Artificial Sequence: Synthetic oligonucleotide
  Sense strand starting at position 1837 of SEQ ID NO: 1885321
ugagaauagugcucaggca

SEQ ID NO: 2333367 - RNA, 19 nt, Artificial Sequence
  Description of Artificial Sequence: Synthetic oligonucleotide
  Antisense strand to SEQ ID NO: 2333366
ugccugagcacuauucuca

SEQ ID NO: 2333368 - RNA, 19 nt, Artificial Sequence
  Description of Artificial Sequence: Synthetic oligonucleotide
  Sense strand starting at position 1838 of SEQ ID NO: 1885321
gagaauagugcucaggcau

SEQ ID NO: 2333369 - RNA, 19 nt, Artificial Sequence
  Description of Artificial Sequence: Synthetic oligonucleotide
  Antisense strand to SEQ ID NO: 2333368
augccugagcacuauucuc

SEQ ID NO: 2333370 - RNA, 19 nt, Artificial Sequence
  Description of Artificial Sequence: Synthetic oligonucleotide
  Sense strand starting at position 2087 of SEQ ID NO: 1885321
ugugguaauuaucucuuau

SEQ ID NO: 2333371 - RNA, 19 nt, Artificial Sequence
  Description of Artificial Sequence: Synthetic oligonucleotide
  Antisense strand to SEQ ID NO: 2333370
auaagagauaauuaccaca

SEQ ID NO: 2333372 - RNA, 19 nt, Artificial Sequence
  Description of Artificial Sequence: Synthetic oligonucleotide
  Sense strand starting at position 2094 of SEQ ID NO: 1885321
auuaucucuuaucugguua

SEQ ID NO: 2333373 - RNA, 19 nt, Artificial Sequence
  Description of Artificial Sequence: Synthetic oligonucleotide
  Antisense strand to SEQ ID NO: 2333372
uaaccagauaagagauaau

SEQ ID NO: 2333374 - RNA, 19 nt, Artificial Sequence
  Description of Artificial Sequence: Synthetic oligonucleotide
  Sense strand starting at position 2099 of SEQ ID NO: 1885321
cucuuaucugguuacaaug

SEQ ID NO: 2333375 - RNA, 19 nt, Artificial Sequence
  Description of Artificial Sequence: Synthetic oligonucleotide
  Antisense strand to SEQ ID NO: 2333374
cauuguaaccagauaagag

SEQ ID NO: 2333376 - RNA, 19 nt, Artificial Sequence
  Description of Artificial Sequence: Synthetic oligonucleotide
  Sense strand starting at position 2172 of SEQ ID NO: 1885321
agcacuugugguuauagac

SEQ ID NO: 2333377 - RNA, 19 nt, Artificial Sequence
  Description of Artificial Sequence: Synthetic oligonucleotide
  Antisense strand to SEQ ID NO: 2333376
gucuauaaccacaagugcu

SEQ ID NO: 2333378 - RNA, 19 nt, Artificial Sequence
  Description of Artificial Sequence: Synthetic oligonucleotide
  Sense strand starting at position 2178 of SEQ ID NO: 1885321
ugugguuauagacaugagu

SEQ ID NO: 2333379 - RNA, 19 nt, Artificial Sequence
  Description of Artificial Sequence: Synthetic oligonucleotide
  Antisense strand to SEQ ID NO: 2333378
acucaugucuauaaccaca

SEQ ID NO: 2333380 - RNA, 19 nt, Artificial Sequence
  Description of Artificial Sequence: Synthetic oligonucleotide
  Sense strand starting at position 2180 of SEQ ID NO: 1885321
ugguuauagacaugagugu

SEQ ID NO: 2333381 - RNA, 19 nt, Artificial Sequence
  Description of Artificial Sequence: Synthetic oligonucleotide
  Antisense strand to SEQ ID NO: 2333380
acacucaugucuauaacca

SEQ ID NO: 2333382 - RNA, 19 nt, Artificial Sequence
  Description of Artificial Sequence: Synthetic oligonucleotide
  Sense strand starting at position 2181 of SEQ ID NO: 1885321
gguuauagacaugaguguu

SEQ ID NO: 2333383 - RNA, 19 nt, Artificial Sequence
  Description of Artificial Sequence: Synthetic oligonucleotide
  Antisense strand to SEQ ID NO: 2333382
aacacucaugucuauaacc

SEQ ID NO: 2333384 - RNA, 19 nt, Artificial Sequence
  Description of Artificial Sequence: Synthetic oligonucleotide
  Sense strand starting at position 2184 of SEQ ID NO: 1885321
uauagacaugaguguuuga

SEQ ID NO: 2333385 - RNA, 19 nt, Artificial Sequence
  Description of Artificial Sequence: Synthetic oligonucleotide
  Antisense strand to SEQ ID NO: 2333384
ucaaacacucaugucuaua

SEQ ID NO: 2333386 - RNA, 19 nt, Artificial Sequence
  Description of Artificial Sequence: Synthetic oligonucleotide
  Sense strand starting at position 2187 of SEQ ID NO: 1885321
agacaugaguguuugaauc

SEQ ID NO: 2333387 - RNA, 19 nt, Artificial Sequence
  Description of Artificial Sequence: Synthetic oligonucleotide
  Antisense strand to SEQ ID NO: 2333386
gauucaaacacucaugucu

SEQ ID NO: 2333388 - RNA, 19 nt, Artificial Sequence
  Description of Artificial Sequence: Synthetic oligonucleotide
  Sense strand starting at position 2326 of SEQ ID NO: 1885321
gaguguuauaaaggguagu

SEQ ID NO: 2333389 - RNA, 19 nt, Artificial Sequence
  Description of Artificial Sequence: Synthetic oligonucleotide
  Antisense strand to SEQ ID NO: 2333388
acuacccuuuauaacacuc

SEQ ID NO: 2333390 - RNA, 19 nt, Artificial Sequence
  Description of Artificial Sequence: Synthetic oligonucleotide
  Sense strand starting at position 2350 of SEQ ID NO: 1885321
caaugagcucgugacuaug

SEQ ID NO: 2333391 - RNA, 19 nt, Artificial Sequence
  Description of Artificial Sequence: Synthetic oligonucleotide
  Antisense strand to SEQ ID NO: 2333390
cauagucacgagcucauug

SEQ ID NO: 2333392 - RNA, 19 nt, Artificial Sequence
  Description of Artificial Sequence: Synthetic oligonucleotide
  Sense strand starting at position 2353 of SEQ ID NO: 1885321
ugagcucgugacuaugaaa

SEQ ID NO: 2333393 - RNA, 19 nt, Artificial Sequence
  Description of Artificial Sequence: Synthetic oligonucleotide
  Antisense strand to SEQ ID NO: 2333392
uuucauagucacgagcuca

SEQ ID NO: 2333394 - RNA, 19 nt, Artificial Sequence
  Description of Artificial Sequence: Synthetic oligonucleotide
  Sense strand starting at position 2364 of SEQ ID NO: 1885321
cuaugaaaugcuuagcaug

SEQ ID NO: 2333395 - RNA, 19 nt, Artificial Sequence
  Description of Artificial Sequence: Synthetic oligonucleotide
  Antisense strand to SEQ ID NO: 2333394
caugcuaagcauuucauag

SEQ ID NO: 2333396 - RNA, 19 nt, Artificial Sequence
  Description of Artificial Sequence: Synthetic oligonucleotide
  Sense strand starting at position 2399 of SEQ ID NO: 1885321
caguaaguggugcaacaau

SEQ ID NO: 2333397 - RNA, 19 nt, Artificial Sequence
  Description of Artificial Sequence: Synthetic oligonucleotide
  Antisense strand to SEQ ID NO: 2333396
auuguugcaccacuuacug

SEQ ID NO: 2333398 - RNA, 19 nt, Artificial Sequence
  Description of Artificial Sequence: Synthetic oligonucleotide
  Sense strand starting at position 2531 of SEQ ID NO: 1885321
aggugaggccucuaccaca

SEQ ID NO: 2333399 - RNA, 19 nt, Artificial Sequence
  Description of Artificial Sequence: Synthetic oligonucleotide
  Antisense strand to SEQ ID NO: 2333398
ugugguagaggccucaccu

SEQ ID NO: 2333400 - RNA, 19 nt, Artificial Sequence
  Description of Artificial Sequence: Synthetic oligonucleotide
  Sense strand starting at position 2676 of SEQ ID NO: 1885321
uuagaacucugcucaaaug

SEQ ID NO: 2333401 - RNA, 19 nt, Artificial Sequence
  Description of Artificial Sequence: Synthetic oligonucleotide
  Antisense strand to SEQ ID NO: 2333400
cauuugagcagaguucuaa

SEQ ID NO: 2333402 - RNA, 19 nt, Artificial Sequence
  Description of Artificial Sequence: Synthetic oligonucleotide
  Sense strand starting at position 2761 of SEQ ID NO: 1885321
cucuuaugacaaggcaaau

SEQ ID NO: 2333403 - RNA, 19 nt, Artificial Sequence
  Description of Artificial Sequence: Synthetic oligonucleotide
  Antisense strand to SEQ ID NO: 2333402
auuugccuugucauaagag

SEQ ID NO: 2333404 - RNA, 19 nt, Artificial Sequence
  Description of Artificial Sequence: Synthetic oligonucleotide
  Sense strand starting at position 2798 of SEQ ID NO: 1885321
ggucauugccaucacaaua

SEQ ID NO: 2333405 - RNA, 19 nt, Artificial Sequence
  Description of Artificial Sequence: Synthetic oligonucleotide
  Antisense strand to SEQ ID NO: 2333404
uauugugauggcaaugacc

SEQ ID NO: 2333406 - RNA, 19 nt, Artificial Sequence
  Description of Artificial Sequence: Synthetic oligonucleotide
  Sense strand starting at position 2990 of SEQ ID NO: 1885321
ggcugagggcuuugaccaa

SEQ ID NO: 2333407 - RNA, 19 nt, Artificial Sequence
  Description of Artificial Sequence: Synthetic oligonucleotide
  Antisense strand to SEQ ID NO: 2333406
uuggucaaagcccucagcc

SEQ ID NO: 2333408 - RNA, 19 nt, Artificial Sequence
  Description of Artificial Sequence: Synthetic oligonucleotide
  Sense strand starting at position 3015 of SEQ ID NO: 1885321
gggaauuggguugaguugu

SEQ ID NO: 2333409 - RNA, 19 nt, Artificial Sequence
  Description of Artificial Sequence: Synthetic oligonucleotide
  Antisense strand to SEQ ID NO: 2333408
acaacucaacccaauuccc

SEQ ID NO: 2333410 - RNA, 19 nt, Artificial Sequence
  Description of Artificial Sequence: Synthetic oligonucleotide
  Sense strand starting at position 3144 of SEQ ID NO: 1885321
cuacauguuucuccagagu

SEQ ID NO: 2333411 - RNA, 19 nt, Artificial Sequence
  Description of Artificial Sequence: Synthetic oligonucleotide
  Antisense strand to SEQ ID NO: 2333410
acucuggagaaacauguag

SEQ ID NO: 2333412 - RNA, 19 nt, Artificial Sequence
  Description of Artificial Sequence: Synthetic oligonucleotide
  Sense strand starting at position 3150 of SEQ ID NO: 1885321
guuucuccagaguaaccuu

SEQ ID NO: 2333413 - RNA, 19 nt, Artificial Sequence
  Description of Artificial Sequence: Synthetic oligonucleotide
  Antisense strand to SEQ ID NO: 2333412
aagguuacucuggagaaac

SEQ ID NO: 2333414 - RNA, 19 nt, Artificial Sequence
  Description of Artificial Sequence: Synthetic oligonucleotide
  Sense strand starting at position 3193 of SEQ ID NO: 1885321
acccauggcucuuccagau

SEQ ID NO: 2333415 - RNA, 19 nt, Artificial Sequence
  Description of Artificial Sequence: Synthetic oligonucleotide
  Antisense strand to SEQ ID NO: 2333414
aucuggaagagccaugggu

SEQ ID NO: 2333416 - RNA, 19 nt, Artificial Sequence
  Description of Artificial Sequence: Synthetic oligonucleotide
  Sense strand starting at position 3197 of SEQ ID NO: 1885321
auggcucuuccagaucuaa

SEQ ID NO: 2333417 - RNA, 19 nt, Artificial Sequence
  Description of Artificial Sequence: Synthetic oligonucleotide
  Antisense strand to SEQ ID NO: 2333416
uuagaucuggaagagccau

SEQ ID NO: 2333418 - RNA, 19 nt, Artificial Sequence
  Description of Artificial Sequence: Synthetic oligonucleotide
  Sense strand starting at position 3256 of SEQ ID NO: 1885321
cauaccugugaugguaaca

SEQ ID NO: 2333419 - RNA, 19 nt, Artificial Sequence
  Description of Artificial Sequence: Synthetic oligonucleotide
  Antisense strand to SEQ ID NO: 2333418
uguuaccaucacagguaug

SEQ ID NO: 2333420 - RNA, 19 nt, Artificial Sequence
  Description of Artificial Sequence: Synthetic oligonucleotide
  Sense strand starting at position 3286 of SEQ ID NO: 1885321
ucagucuaucauuguuuaa

SEQ ID NO: 2333421 - RNA, 19 nt, Artificial Sequence
  Description of Artificial Sequence: Synthetic oligonucleotide
  Antisense strand to SEQ ID NO: 2333420
uuaaacaaugauagacuga

SEQ ID NO: 2333422 - RNA, 19 nt, Artificial Sequence
  Description of Artificial Sequence: Synthetic oligonucleotide
  Sense strand starting at position 3790 of SEQ ID NO: 1885321
acuuacagauuggaagaaa

SEQ ID NO: 2333423 - RNA, 19 nt, Artificial Sequence
  Description of Artificial Sequence: Synthetic oligonucleotide
  Antisense strand to SEQ ID NO: 2333422
uuucuuccaaucuguaagu

SEQ ID NO: 2333424 - RNA, 19 nt, Artificial Sequence
  Description of Artificial Sequence: Synthetic oligonucleotide
  Sense strand starting at position 125 of SEQ ID NO: 1885322
auuacuugcccuuaaacga

SEQ ID NO: 2333425 - RNA, 19 nt, Artificial Sequence
  Description of Artificial Sequence: Synthetic oligonucleotide
  Antisense strand to SEQ ID NO: 2333424
ucguuuaagggcaaguaau

SEQ ID NO: 2333426 - RNA, 19 nt, Artificial Sequence
  Description of Artificial Sequence: Synthetic oligonucleotide
  Sense strand starting at position 195 of SEQ ID NO: 1885322
cguauacauucugcaaaua

SEQ ID NO: 2333427 - RNA, 19 nt, Artificial Sequence
  Description of Artificial Sequence: Synthetic oligonucleotide
  Antisense strand to SEQ ID NO: 2333426
uauuugcagaauguauacg

SEQ ID NO: 2333428 - RNA, 19 nt, Artificial Sequence
  Description of Artificial Sequence: Synthetic oligonucleotide
  Sense strand starting at position 196 of SEQ ID NO: 1885322
guauacauucugcaaauag

SEQ ID NO: 2333429 - RNA, 19 nt, Artificial Sequence
  Description of Artificial Sequence: Synthetic oligonucleotide
  Antisense strand to SEQ ID NO: 2333428
cuauuugcagaauguauac

SEQ ID NO: 2333430 - RNA, 19 nt, Artificial Sequence
  Description of Artificial Sequence: Synthetic oligonucleotide
  Sense strand starting at position 211 of SEQ ID NO: 1885322
auagaauuguuucucuugu

SEQ ID NO: 2333431 - RNA, 19 nt, Artificial Sequence
  Description of Artificial Sequence: Synthetic oligonucleotide
  Antisense strand to SEQ ID NO: 2333430
acaagagaaacaauucuau

SEQ ID NO: 2333432 - RNA, 19 nt, Artificial Sequence
  Description of Artificial Sequence: Synthetic oligonucleotide
  Sense strand starting at position 324 of SEQ ID NO: 1885322
ucuugaauugucugcaaua

SEQ ID NO: 2333433 - RNA, 19 nt, Artificial Sequence
  Description of Artificial Sequence: Synthetic oligonucleotide
  Antisense strand to SEQ ID NO: 2333432
uauugcagacaauucaaga

SEQ ID NO: 2333434 - RNA, 19 nt, Artificial Sequence
  Description of Artificial Sequence: Synthetic oligonucleotide
  Sense strand starting at position 325 of SEQ ID NO: 1885322
cuugaauugucugcaauau

SEQ ID NO: 2333435 - RNA, 19 nt, Artificial Sequence
  Description of Artificial Sequence: Synthetic oligonucleotide
  Antisense strand to SEQ ID NO: 2333434
auauugcagacaauucaag

SEQ ID NO: 2333436 - RNA, 19 nt, Artificial Sequence
  Description of Artificial Sequence: Synthetic oligonucleotide
  Sense strand starting at position 326 of SEQ ID NO: 1885322
uugaauugucugcaauaua

SEQ ID NO: 2333437 - RNA, 19 nt, Artificial Sequence
  Description of Artificial Sequence: Synthetic oligonucleotide
  Antisense strand to SEQ ID NO: 2333436
uauauugcagacaauucaa

SEQ ID NO: 2333438 - RNA, 19 nt, Artificial Sequence
  Description of Artificial Sequence: Synthetic oligonucleotide
  Sense strand starting at position 426 of SEQ ID NO: 1885322
auuucuuaauuggaaguga

SEQ ID NO: 2333439 - RNA, 19 nt, Artificial Sequence
  Description of Artificial Sequence: Synthetic oligonucleotide
  Antisense strand to SEQ ID NO: 2333438
ucacuuccaauuaagaaau

SEQ ID NO: 2333440 - RNA, 19 nt, Artificial Sequence
  Description of Artificial Sequence: Synthetic oligonucleotide
  Sense strand starting at position 446 of SEQ ID NO: 1885322
ccagcugcucaguaaguaa

SEQ ID NO: 2333441 - RNA, 19 nt, Artificial Sequence
  Description of Artificial Sequence: Synthetic oligonucleotide
  Antisense strand to SEQ ID NO: 2333440
uuacuuacugagcagcugg

SEQ ID NO: 2333442 - RNA, 19 nt, Artificial Sequence
  Description of Artificial Sequence: Synthetic oligonucleotide
  Sense strand starting at position 457 of SEQ ID NO: 1885322
guaaguaaaguaugauagu

SEQ ID NO: 2333443 - RNA, 19 nt, Artificial Sequence
  Description of Artificial Sequence: Synthetic oligonucleotide
  Antisense strand to SEQ ID NO: 2333442
acuaucauacuuuacuuac

SEQ ID NO: 2333444 - RNA, 19 nt, Artificial Sequence
  Description of Artificial Sequence: Synthetic oligonucleotide
  Sense strand starting at position 466 of SEQ ID NO: 1885322
guaugauaguaaguaucau

SEQ ID NO: 2333445 - RNA, 19 nt, Artificial Sequence
  Description of Artificial Sequence: Synthetic oligonucleotide
  Antisense strand to SEQ ID NO: 2333444
augauacuuacuaucauac

SEQ ID NO: 2333446 - RNA, 19 nt, Artificial Sequence
  Description of Artificial Sequence: Synthetic oligonucleotide
  Sense strand starting at position 572 of SEQ ID NO: 1885322
uaucuagauuaguuaugag

SEQ ID NO: 2333447 - RNA, 19 nt, Artificial Sequence
  Description of Artificial Sequence: Synthetic oligonucleotide
  Antisense strand to SEQ ID NO: 2333446
cucauaacuaaucuagaua

SEQ ID NO: 2333448 - RNA, 19 nt, Artificial Sequence
  Description of Artificial Sequence: Synthetic oligonucleotide
  Sense strand starting at position 603 of SEQ ID NO: 1885322
agacaaagcuagucaccau

SEQ ID NO: 2333449 - RNA, 19 nt, Artificial Sequence
  Description of Artificial Sequence: Synthetic oligonucleotide
  Antisense strand to SEQ ID NO: 2333448
auggugacuagcuuugucu

SEQ ID NO: 2333450 - RNA, 19 nt, Artificial Sequence
  Description of Artificial Sequence: Synthetic oligonucleotide
  Sense strand starting at position 841 of SEQ ID NO: 1885322
gccaaaccuggacaucuua

SEQ ID NO: 2333451 - RNA, 19 nt, Artificial Sequence
  Description of Artificial Sequence: Synthetic oligonucleotide
  Antisense strand to SEQ ID NO: 2333450
uaagauguccagguuuggc

SEQ ID NO: 2333452 - RNA, 19 nt, Artificial Sequence
  Description of Artificial Sequence: Synthetic oligonucleotide
  Sense strand starting at position 879 of SEQ ID NO: 1885322
auaucagcugaccaguaaa

SEQ ID NO: 2333453 - RNA, 19 nt, Artificial Sequence
  Description of Artificial Sequence: Synthetic oligonucleotide
  Antisense strand to SEQ ID NO: 2333452
uuuacuggucagcugauau

SEQ ID NO: 2333454 - RNA, 19 nt, Artificial Sequence
  Description of Artificial Sequence: Synthetic oligonucleotide
  Sense strand starting at position 999 of SEQ ID NO: 1885322
uugaaagcauuuggacuua

SEQ ID NO: 2333455 - RNA, 19 nt, Artificial Sequence
  Description of Artificial Sequence: Synthetic oligonucleotide
  Antisense strand to SEQ ID NO: 2333454
uaaguccaaaugcuuucaa

SEQ ID NO: 2333456 - RNA, 19 nt, Artificial Sequence
  Description of Artificial Sequence: Synthetic oligonucleotide
  Sense strand starting at position 1107 of SEQ ID NO: 1885322
acaagacaguuggaucaaa

SEQ ID NO: 2333457 - RNA, 19 nt, Artificial Sequence
  Description of Artificial Sequence: Synthetic oligonucleotide
  Antisense strand to SEQ ID NO: 2333456
uuugauccaacugucuugu

SEQ ID NO: 2333458 - RNA, 19 nt, Artificial Sequence
  Description of Artificial Sequence: Synthetic oligonucleotide
  Sense strand starting at position 1362 of SEQ ID NO: 1885322
caugguaacucuuuaagga

SEQ ID NO: 2333459 - RNA, 19 nt, Artificial Sequence
  Description of Artificial Sequence: Synthetic oligonucleotide
  Antisense strand to SEQ ID NO: 2333458
uccuuaaagaguuaccaug

SEQ ID NO: 2333460 - RNA, 19 nt, Artificial Sequence
  Description of Artificial Sequence: Synthetic oligonucleotide
  Sense strand starting at position 1522 of SEQ ID NO: 1885322
gucuuugaccucuguuaag

SEQ ID NO: 2333461 - RNA, 19 nt, Artificial Sequence
  Description of Artificial Sequence: Synthetic oligonucleotide
  Antisense strand to SEQ ID NO: 2333460
cuuaacagaggucaaagac

SEQ ID NO: 2333462 - RNA, 19 nt, Artificial Sequence
  Description of Artificial Sequence: Synthetic oligonucleotide
  Sense strand starting at position 1631 of SEQ ID NO: 1885322
uugccuuaauucuuuggga

SEQ ID NO: 2333463 - RNA, 19 nt, Artificial Sequence
  Description of Artificial Sequence: Synthetic oligonucleotide
  Antisense strand to SEQ ID NO: 2333462
ucccaaagaauuaaggcaa

SEQ ID NO: 2333464 - RNA, 19 nt, Artificial Sequence
  Description of Artificial Sequence: Synthetic oligonucleotide
  Sense strand starting at position 1633 of SEQ ID NO: 1885322
gccuuaauucuuugggacu

SEQ ID NO: 2333465 - RNA, 19 nt, Artificial Sequence
  Description of Artificial Sequence: Synthetic oligonucleotide
  Antisense strand to SEQ ID NO: 2333464
agucccaaagaauuaaggc

SEQ ID NO: 2333466 - RNA, 19 nt, Artificial Sequence
  Description of Artificial Sequence: Synthetic oligonucleotide
  Sense strand starting at position 1732 of SEQ ID NO: 1885322
uugggacucucauccauaa

SEQ ID NO: 2333467 - RNA, 19 nt, Artificial Sequence
  Description of Artificial Sequence: Synthetic oligonucleotide
  Antisense strand to SEQ ID NO: 2333466
uuauggaugagagucccaa

SEQ ID NO: 2333468 - RNA, 19 nt, Artificial Sequence
  Description of Artificial Sequence: Synthetic oligonucleotide
  Sense strand starting at position 1775 of SEQ ID NO: 1885322
aacccacagucguuaugau

SEQ ID NO: 2333469 - RNA, 19 nt, Artificial Sequence
  Description of Artificial Sequence: Synthetic oligonucleotide
  Antisense strand to SEQ ID NO: 2333468
aucauaacgacuguggguu

SEQ ID NO: 2333470 - RNA, 19 nt, Artificial Sequence
  Description of Artificial Sequence: Synthetic oligonucleotide
  Sense strand starting at position 1782 of SEQ ID NO: 1885322
agucguuaugaugaguuca

SEQ ID NO: 2333471 - RNA, 19 nt, Artificial Sequence
  Description of Artificial Sequence: Synthetic oligonucleotide
  Antisense strand to SEQ ID NO: 2333470
ugaacucaucauaacgacu

SEQ ID NO: 2333472 - RNA, 19 nt, Artificial Sequence
  Description of Artificial Sequence: Synthetic oligonucleotide
  Sense strand starting at position 2044 of SEQ ID NO: 1885322
ggguucuaguuuguuaaca

SEQ ID NO: 2333473 - RNA, 19 nt, Artificial Sequence
  Description of Artificial Sequence: Synthetic oligonucleotide
  Antisense strand to SEQ ID NO: 2333472
uguuaacaaacuagaaccc

SEQ ID NO: 2333474 - RNA, 19 nt, Artificial Sequence
  Description of Artificial Sequence: Synthetic oligonucleotide
  Sense strand starting at position 2045 of SEQ ID NO: 1885322
gguucuaguuuguuaacaa

SEQ ID NO: 2333475 - RNA, 19 nt, Artificial Sequence
  Description of Artificial Sequence: Synthetic oligonucleotide
  Antisense strand to SEQ ID NO: 2333474
uuguuaacaaacuagaacc

SEQ ID NO: 2333476 - RNA, 19 nt, Artificial Sequence
  Description of Artificial Sequence: Synthetic oligonucleotide
  Sense strand starting at position 2324 of SEQ ID NO: 1885322
uccugaguugcauggcaaa

SEQ ID NO: 2333477 - RNA, 19 nt, Artificial Sequence
  Description of Artificial Sequence: Synthetic oligonucleotide
  Antisense strand to SEQ ID NO: 2333476
uuugccaugcaacucagga

SEQ ID NO: 2333478 - RNA, 19 nt, Artificial Sequence
  Description of Artificial Sequence: Synthetic oligonucleotide
  Sense strand starting at position 2336 of SEQ ID NO: 1885322
uggcaaauucagggagagu

SEQ ID NO: 2333479 - RNA, 19 nt, Artificial Sequence
  Description of Artificial Sequence: Synthetic oligonucleotide
  Antisense strand to SEQ ID NO: 2333478
acucucccugaauuugcca

SEQ ID NO: 2333480 - RNA, 19 nt, Artificial Sequence
  Description of Artificial Sequence: Synthetic oligonucleotide
  Sense strand starting at position 2382 of SEQ ID NO: 1885322
cuaugacaucagcaagcuu

SEQ ID NO: 2333481 - RNA, 19 nt, Artificial Sequence
  Description of Artificial Sequence: Synthetic oligonucleotide
  Antisense strand to SEQ ID NO: 2333480
aagcuugcugaugucauag

SEQ ID NO: 2333482 - RNA, 19 nt, Artificial Sequence
  Description of Artificial Sequence: Synthetic oligonucleotide
  Sense strand starting at position 2531 of SEQ ID NO: 1885322
uuaaguaacugguuucuua

SEQ ID NO: 2333483 - RNA, 19 nt, Artificial Sequence
  Description of Artificial Sequence: Synthetic oligonucleotide
  Antisense strand to SEQ ID NO: 2333482
uaagaaaccaguuacuuaa

SEQ ID NO: 2333484 - RNA, 19 nt, Artificial Sequence
  Description of Artificial Sequence: Synthetic oligonucleotide
  Sense strand starting at position 2681 of SEQ ID NO: 1885322
ucuugucuccuugggaguu

SEQ ID NO: 2333485 - RNA, 19 nt, Artificial Sequence
  Description of Artificial Sequence: Synthetic oligonucleotide
  Antisense strand to SEQ ID NO: 2333484
aacucccaaggagacaaga

SEQ ID NO: 2333486 - RNA, 19 nt, Artificial Sequence
  Description of Artificial Sequence: Synthetic oligonucleotide
  Sense strand starting at position 2809 of SEQ ID NO: 1885322
auagcaucaggaugaaauu

SEQ ID NO: 2333487 - RNA, 19 nt, Artificial Sequence
  Description of Artificial Sequence: Synthetic oligonucleotide
  Antisense strand to SEQ ID NO: 2333486
aauuucauccugaugcuau

SEQ ID NO: 2333488 - RNA, 19 nt, Artificial Sequence
  Description of Artificial Sequence: Synthetic oligonucleotide
  Sense strand starting at position 2845 of SEQ ID NO: 1885322
guuggugucagagaauuaa

SEQ ID NO: 2333489 - RNA, 19 nt, Artificial Sequence
  Description of Artificial Sequence: Synthetic oligonucleotide
  Antisense strand to SEQ ID NO: 2333488
uuaauucucugacaccaac

SEQ ID NO: 2333490 - RNA, 19 nt, Artificial Sequence
  Description of Artificial Sequence: Synthetic oligonucleotide
  Sense strand starting at position 3003 of SEQ ID NO: 1885322
uuagccuggcagugagaau

SEQ ID NO: 2333491 - RNA, 19 nt, Artificial Sequence
  Description of Artificial Sequence: Synthetic oligonucleotide
  Antisense strand to SEQ ID NO: 2333490
auucucacugccaggcuaa

SEQ ID NO: 2333492 - RNA, 19 nt, Artificial Sequence
  Description of Artificial Sequence: Synthetic oligonucleotide
  Sense strand starting at position 3472 of SEQ ID NO: 1885322
guacauaauugacaagaga

SEQ ID NO: 2333493 - RNA, 19 nt, Artificial Sequence
  Description of Artificial Sequence: Synthetic oligonucleotide
  Antisense strand to SEQ ID NO: 2333492
ucucuugucaauuauguac

SEQ ID NO: 2333494 - RNA, 19 nt, Artificial Sequence
  Description of Artificial Sequence: Synthetic oligonucleotide
  Sense strand starting at position 3699 of SEQ ID NO: 1885322
cuaucaguguuagccagaa

SEQ ID NO: 2333495 - RNA, 19 nt, Artificial Sequence
  Description of Artificial Sequence: Synthetic oligonucleotide
  Antisense strand to SEQ ID NO: 2333494
uucuggcuaacacugauag

SEQ ID NO: 2333496 - RNA, 19 nt, Artificial Sequence
  Description of Artificial Sequence: Synthetic oligonucleotide
  Sense strand starting at position 3703 of SEQ ID NO: 1885322
caguguuagccagaauaac

SEQ ID NO: 2333497 - RNA, 19 nt, Artificial Sequence
  Description of Artificial Sequence: Synthetic oligonucleotide
  Antisense strand to SEQ ID NO: 2333496
guuauucuggcuaacacug

SEQ ID NO: 2333498 - RNA, 19 nt, Artificial Sequence
  Description of Artificial Sequence: Synthetic oligonucleotide
  Sense strand starting at position 3769 of SEQ ID NO: 1885322
agagauagucagggcuuca

SEQ ID NO: 2333499 - RNA, 19 nt, Artificial Sequence
  Description of Artificial Sequence: Synthetic oligonucleotide
  Antisense strand to SEQ ID NO: 2333498
ugaagcccugacuaucucu

SEQ ID NO: 2333500 - RNA, 19 nt, Artificial Sequence
  Description of Artificial Sequence: Synthetic oligonucleotide
  Sense strand starting at position 3884 of SEQ ID NO: 1885322
ugggucagaugaucuggua

SEQ ID NO: 2333501 - RNA, 19 nt, Artificial Sequence
  Description of Artificial Sequence: Synthetic oligonucleotide
  Antisense strand to SEQ ID NO: 2333500
uaccagaucaucugaccca

SEQ ID NO: 2333502 - RNA, 19 nt, Artificial Sequence
  Description of Artificial Sequence: Synthetic oligonucleotide
  Sense strand starting at position 3979 of SEQ ID NO: 1885322
gugcuuaguguugugcaau

SEQ ID NO: 2333503 - RNA, 19 nt, Artificial Sequence
  Description of Artificial Sequence: Synthetic oligonucleotide
  Antisense strand to SEQ ID NO: 2333502
auugcacaacacuaagcac

SEQ ID NO: 2333504 - RNA, 19 nt, Artificial Sequence
  Description of Artificial Sequence: Synthetic oligonucleotide
  Sense strand starting at position 6 of SEQ ID NO: 1885323
gauguuaagcgguaguaaa

SEQ ID NO: 2333505 - RNA, 19 nt, Artificial Sequence
  Description of Artificial Sequence: Synthetic oligonucleotide
  Antisense strand to SEQ ID NO: 2333504
uuuacuaccgcuuaacauc

SEQ ID NO: 2333506 - RNA, 19 nt, Artificial Sequence
  Description of Artificial Sequence: Synthetic oligonucleotide
  Sense strand starting at position 236 of SEQ ID NO: 1885323
uauugugugggccaggaau

SEQ ID NO: 2333507 - RNA, 19 nt, Artificial Sequence
  Description of Artificial Sequence: Synthetic oligonucleotide
  Antisense strand to SEQ ID NO: 2333506
auuccuggcccacacaaua

SEQ ID NO: 2333508 - RNA, 19 nt, Artificial Sequence
  Description of Artificial Sequence: Synthetic oligonucleotide
  Sense strand starting at position 247 of SEQ ID NO: 1885323
ccaggaaucccacgaauuc

SEQ ID NO: 2333509 - RNA, 19 nt, Artificial Sequence
  Description of Artificial Sequence: Synthetic oligonucleotide
  Antisense strand to SEQ ID NO: 2333508
gaauucgugggauuccugg

SEQ ID NO: 2333510 - RNA, 19 nt, Artificial Sequence
  Description of Artificial Sequence: Synthetic oligonucleotide
  Sense strand starting at position 306 of SEQ ID NO: 1885323
uggauaguccaguaacucu

SEQ ID NO: 2333511 - RNA, 19 nt, Artificial Sequence
  Description of Artificial Sequence: Synthetic oligonucleotide
  Antisense strand to SEQ ID NO: 2333510
agaguuacuggacuaucca

SEQ ID NO: 2333512 - RNA, 19 nt, Artificial Sequence
  Description of Artificial Sequence: Synthetic oligonucleotide
  Sense strand starting at position 504 of SEQ ID NO: 1885323
ggugaaaugugagugugag

SEQ ID NO: 2333513 - RNA, 19 nt, Artificial Sequence
  Description of Artificial Sequence: Synthetic oligonucleotide
  Antisense strand to SEQ ID NO: 2333512
cucacacucacauuucacc

SEQ ID NO: 2333514 - RNA, 19 nt, Artificial Sequence
  Description of Artificial Sequence: Synthetic oligonucleotide
  Sense strand starting at position 505 of SEQ ID NO: 1885323
gugaaaugugagugugaga

SEQ ID NO: 2333515 - RNA, 19 nt, Artificial Sequence
  Description of Artificial Sequence: Synthetic oligonucleotide
  Antisense strand to SEQ ID NO: 2333514
ucucacacucacauuucac

SEQ ID NO: 2333516 - RNA, 19 nt, Artificial Sequence
  Description of Artificial Sequence: Synthetic oligonucleotide
  Sense strand starting at position 521 of SEQ ID NO: 1885323
agagaacugugggaacaua

SEQ ID NO: 2333517 - RNA, 19 nt, Artificial Sequence
  Description of Artificial Sequence: Synthetic oligonucleotide
  Antisense strand to SEQ ID NO: 2333516
uauguucccacaguucucu

SEQ ID NO: 2333518 - RNA, 19 nt, Artificial Sequence
  Description of Artificial Sequence: Synthetic oligonucleotide
  Sense strand starting at position 640 of SEQ ID NO: 1885323
gaaguugucccauagcaug

SEQ ID NO: 2333519 - RNA, 19 nt, Artificial Sequence
  Description of Artificial Sequence: Synthetic oligonucleotide
  Antisense strand to SEQ ID NO: 2333518
caugcuaugggacaacuuc

SEQ ID NO: 2333520 - RNA, 19 nt, Artificial Sequence
  Description of Artificial Sequence: Synthetic oligonucleotide
  Sense strand starting at position 662 of SEQ ID NO: 1885323
uuuggaguccaagguuuga

SEQ ID NO: 2333521 - RNA, 19 nt, Artificial Sequence
  Description of Artificial Sequence: Synthetic oligonucleotide
  Antisense strand to SEQ ID NO: 2333520
ucaaaccuuggacuccaaa

SEQ ID NO: 2333522 - RNA, 19 nt, Artificial Sequence
  Description of Artificial Sequence: Synthetic oligonucleotide
  Sense strand starting at position 971 of SEQ ID NO: 1885323
ccggauagugaucauccuu

SEQ ID NO: 2333523 - RNA, 19 nt, Artificial Sequence
  Description of Artificial Sequence: Synthetic oligonucleotide
  Antisense strand to SEQ ID NO: 2333522
aaggaugaucacuauccgg

SEQ ID NO: 2333524 - RNA, 19 nt, Artificial Sequence
  Description of Artificial Sequence: Synthetic oligonucleotide
  Sense strand starting at position 1043 of SEQ ID NO: 1885323
cuaccuuggcguuaucaaa

SEQ ID NO: 2333525 - RNA, 19 nt, Artificial Sequence
  Description of Artificial Sequence: Synthetic oligonucleotide
  Antisense strand to SEQ ID NO: 2333524
uuugauaacgccaagguag

SEQ ID NO: 2333526 - RNA, 19 nt, Artificial Sequence
  Description of Artificial Sequence: Synthetic oligonucleotide
  Sense strand starting at position 1106 of SEQ ID NO: 1885323
auaggaaauuccgcucuca

SEQ ID NO: 2333527 - RNA, 19 nt, Artificial Sequence
  Description of Artificial Sequence: Synthetic oligonucleotide
  Antisense strand to SEQ ID NO: 2333526
ugagagcggaauuuccuau

SEQ ID NO: 2333528 - RNA, 19 nt, Artificial Sequence
  Description of Artificial Sequence: Synthetic oligonucleotide
  Sense strand starting at position 1269 of SEQ ID NO: 1885323
ggagcagaaucuucguuaa

SEQ ID NO: 2333529 - RNA, 19 nt, Artificial Sequence
  Description of Artificial Sequence: Synthetic oligonucleotide
  Antisense strand to SEQ ID NO: 2333528
uuaacgaagauucugcucc

SEQ ID NO: 2333530 - RNA, 19 nt, Artificial Sequence
  Description of Artificial Sequence: Synthetic oligonucleotide
  Sense strand starting at position 1271 of SEQ ID NO: 1885323
agcagaaucuucguuaaac

SEQ ID NO: 2333531 - RNA, 19 nt, Artificial Sequence
  Description of Artificial Sequence: Synthetic oligonucleotide
  Antisense strand to SEQ ID NO: 2333530
guuuaacgaagauucugcu

SEQ ID NO: 2333532 - RNA, 19 nt, Artificial Sequence
  Description of Artificial Sequence: Synthetic oligonucleotide
  Sense strand starting at position 1272 of SEQ ID NO: 1885323
gcagaaucuucguuaaacu

SEQ ID NO: 2333533 - RNA, 19 nt, Artificial Sequence
  Description of Artificial Sequence: Synthetic oligonucleotide
  Antisense strand to SEQ ID NO: 2333532
aguuuaacgaagauucugc

SEQ ID NO: 2333534 - RNA, 19 nt, Artificial Sequence
  Description of Artificial Sequence: Synthetic oligonucleotide
  Sense strand starting at position 1273 of SEQ ID NO: 1885323
cagaaucuucguuaaacug

SEQ ID NO: 2333535 - RNA, 19 nt, Artificial Sequence
  Description of Artificial Sequence: Synthetic oligonucleotide
  Antisense strand to SEQ ID NO: 2333534
caguuuaacgaagauucug

SEQ ID NO: 2333536 - RNA, 19 nt, Artificial Sequence
  Description of Artificial Sequence: Synthetic oligonucleotide
  Sense strand starting at position 1279 of SEQ ID NO: 1885323
cuucguuaaacugagcaga

SEQ ID NO: 2333537 - RNA, 19 nt, Artificial Sequence
  Description of Artificial Sequence: Synthetic oligonucleotide
  Antisense strand to SEQ ID NO: 2333536
ucugcucaguuuaacgaag

SEQ ID NO: 2333538 - RNA, 19 nt, Artificial Sequence
  Description of Artificial Sequence: Synthetic oligonucleotide
  Sense strand starting at position 1479 of SEQ ID NO: 1885323
ccgaauucuugaccgagag

SEQ ID NO: 2333539 - RNA, 19 nt, Artificial Sequence
  Description of Artificial Sequence: Synthetic oligonucleotide
  Antisense strand to SEQ ID NO: 2333538
cucucggucaagaauucgg

SEQ ID NO: 2333540 - RNA, 19 nt, Artificial Sequence
  Description of Artificial Sequence: Synthetic oligonucleotide
  Sense strand starting at position 1905 of SEQ ID NO: 1885323
gaagcaaguuccuuaguuu

SEQ ID NO: 2333541 - RNA, 19 nt, Artificial Sequence
  Description of Artificial Sequence: Synthetic oligonucleotide
  Antisense strand to SEQ ID NO: 2333540
aaacuaaggaacuugcuuc

SEQ ID NO: 2333542 - RNA, 19 nt, Artificial Sequence
  Description of Artificial Sequence: Synthetic oligonucleotide
  Sense strand starting at position 2278 of SEQ ID NO: 1885323
gaaagcuguucuccuuuga

SEQ ID NO: 2333543 - RNA, 19 nt, Artificial Sequence
  Description of Artificial Sequence: Synthetic oligonucleotide
  Antisense strand to SEQ ID NO: 2333542
ucaaaggagaacagcuuuc

SEQ ID NO: 2333544 - RNA, 19 nt, Artificial Sequence
  Description of Artificial Sequence: Synthetic oligonucleotide
  Sense strand starting at position 2473 of SEQ ID NO: 1885323
gucucugcugcguuuaaca

SEQ ID NO: 2333545 - RNA, 19 nt, Artificial Sequence
  Description of Artificial Sequence: Synthetic oligonucleotide
  Antisense strand to SEQ ID NO: 2333544
uguuaaacgcagcagagac

SEQ ID NO: 2333546 - RNA, 19 nt, Artificial Sequence
  Description of Artificial Sequence: Synthetic oligonucleotide
  Sense strand starting at position 2480 of SEQ ID NO: 1885323
cugcguuuaacaucgguca

SEQ ID NO: 2333547 - RNA, 19 nt, Artificial Sequence
  Description of Artificial Sequence: Synthetic oligonucleotide
  Antisense strand to SEQ ID NO: 2333546
ugaccgauguuaaacgcag

SEQ ID NO: 2333548 - RNA, 19 nt, Artificial Sequence
  Description of Artificial Sequence: Synthetic oligonucleotide
  Sense strand starting at position 2511 of SEQ ID NO: 1885323
gcauuaauuugcucuggug

SEQ ID NO: 2333549 - RNA, 19 nt, Artificial Sequence
  Description of Artificial Sequence: Synthetic oligonucleotide
  Antisense strand to SEQ ID NO: 2333548
caccagagcaaauuaaugc

SEQ ID NO: 2333550 - RNA, 19 nt, Artificial Sequence
  Description of Artificial Sequence: Synthetic oligonucleotide
  Sense strand starting at position 2525 of SEQ ID NO: 1885323
uggugaugauuucugcuuu

SEQ ID NO: 2333551 - RNA, 19 nt, Artificial Sequence
  Description of Artificial Sequence: Synthetic oligonucleotide
  Antisense strand to SEQ ID NO: 2333550
aaagcagaaaucaucacca

SEQ ID NO: 2333552 - RNA, 19 nt, Artificial Sequence
  Description of Artificial Sequence: Synthetic oligonucleotide
  Sense strand starting at position 2529 of SEQ ID NO: 1885323
gaugauuucugcuuugcua

SEQ ID NO: 2333553 - RNA, 19 nt, Artificial Sequence
  Description of Artificial Sequence: Synthetic oligonucleotide
  Antisense strand to SEQ ID NO: 2333552
uagcaaagcagaaaucauc

SEQ ID NO: 2333554 - RNA, 19 nt, Artificial Sequence
  Description of Artificial Sequence: Synthetic oligonucleotide
  Sense strand starting at position 2564 of SEQ ID NO: 1885323
cuuggugacacguaauaaa

SEQ ID NO: 2333555 - RNA, 19 nt, Artificial Sequence
  Description of Artificial Sequence: Synthetic oligonucleotide
  Antisense strand to SEQ ID NO: 2333554
uuuauuacgugucaccaag

SEQ ID NO: 2333556 - RNA, 19 nt, Artificial Sequence
  Description of Artificial Sequence: Synthetic oligonucleotide
  Sense strand starting at position 2698 of SEQ ID NO: 1885323
uauuuagacuguggagaua

SEQ ID NO: 2333557 - RNA, 19 nt, Artificial Sequence
  Description of Artificial Sequence: Synthetic oligonucleotide
  Antisense strand to SEQ ID NO: 2333556
uaucuccacagucuaaaua

SEQ ID NO: 2333558 - RNA, 19 nt, Artificial Sequence
  Description of Artificial Sequence: Synthetic oligonucleotide
  Sense strand starting at position 2837 of SEQ ID NO: 1885323
uagaauguuguuuaucaug

SEQ ID NO: 2333559 - RNA, 19 nt, Artificial Sequence
  Description of Artificial Sequence: Synthetic oligonucleotide
  Antisense strand to SEQ ID NO: 2333558
caugauaaacaacauucua

SEQ ID NO: 2333560 - RNA, 19 nt, Artificial Sequence
  Description of Artificial Sequence: Synthetic oligonucleotide
  Sense strand starting at position 2839 of SEQ ID NO: 1885323
gaauguuguuuaucauguc

SEQ ID NO: 2333561 - RNA, 19 nt, Artificial Sequence
  Description of Artificial Sequence: Synthetic oligonucleotide
  Antisense strand to SEQ ID NO: 2333560
gacaugauaaacaacauuc

SEQ ID NO: 2333562 - RNA, 19 nt, Artificial Sequence
  Description of Artificial Sequence: Synthetic oligonucleotide
  Sense strand starting at position 2851 of SEQ ID NO: 1885323
ucaugucauguauaguaaa

SEQ ID NO: 2333563 - RNA, 19 nt, Artificial Sequence
  Description of Artificial Sequence: Synthetic oligonucleotide
  Antisense strand to SEQ ID NO: 2333562
uuuacuauacaugacauga

SEQ ID NO: 2333564 - RNA, 19 nt, Artificial Sequence
  Description of Artificial Sequence: Synthetic oligonucleotide
  Sense strand starting at position 2915 of SEQ ID NO: 1885323
uggauaacuucugcucuga

SEQ ID NO: 2333565 - RNA, 19 nt, Artificial Sequence
  Description of Artificial Sequence: Synthetic oligonucleotide
  Antisense strand to SEQ ID NO: 2333564
ucagagcagaaguuaucca

SEQ ID NO: 2333566 - RNA, 19 nt, Artificial Sequence
  Description of Artificial Sequence: Synthetic oligonucleotide
  Sense strand starting at position 2950 of SEQ ID NO: 1885323
ggcuucuauacagagaagu

SEQ ID NO: 2333567 - RNA, 19 nt, Artificial Sequence
  Description of Artificial Sequence: Synthetic oligonucleotide
  Antisense strand to SEQ ID NO: 2333566
acuucucuguauagaagcc

SEQ ID NO: 2333568 - RNA, 19 nt, Artificial Sequence
  Description of Artificial Sequence: Synthetic oligonucleotide
  Sense strand starting at position 3010 of SEQ ID NO: 1885323
uacaauauggaguguuauu

SEQ ID NO: 2333569 - RNA, 19 nt, Artificial Sequence
  Description of Artificial Sequence: Synthetic oligonucleotide
  Antisense strand to SEQ ID NO: 2333568
aauaacacuccauauugua

SEQ ID NO: 2333570 - RNA, 19 nt, Artificial Sequence
  Description of Artificial Sequence: Synthetic oligonucleotide
  Sense strand starting at position 3015 of SEQ ID NO: 1885323
uauggaguguuauuaaacu

SEQ ID NO: 2333571 - RNA, 19 nt, Artificial Sequence
  Description of Artificial Sequence: Synthetic oligonucleotide
  Antisense strand to SEQ ID NO: 2333570
aguuuaauaacacuccaua

SEQ ID NO: 2333572 - RNA, 19 nt, Artificial Sequence
  Description of Artificial Sequence: Synthetic oligonucleotide
  Sense strand starting at position 3021 of SEQ ID NO: 1885323
guguuauuaaacuggaggu

SEQ ID NO: 2333573 - RNA, 19 nt, Artificial Sequence
  Description of Artificial Sequence: Synthetic oligonucleotide
  Antisense strand to SEQ ID NO: 2333572
accuccaguuuaauaacac

SEQ ID NO: 2333574 - RNA, 19 nt, Artificial Sequence
  Description of Artificial Sequence: Synthetic oligonucleotide
  Sense strand starting at position 3022 of SEQ ID NO: 1885323
uguuauuaaacuggagguu

SEQ ID NO: 2333575 - RNA, 19 nt, Artificial Sequence
  Description of Artificial Sequence: Synthetic oligonucleotide
  Antisense strand to SEQ ID NO: 2333574
aaccuccaguuuaauaaca

SEQ ID NO: 2333576 - RNA, 19 nt, Artificial Sequence
  Description of Artificial Sequence: Synthetic oligonucleotide
  Sense strand starting at position 3398 of SEQ ID NO: 1885323
uuggccagugcucauuaaa

SEQ ID NO: 2333577 - RNA, 19 nt, Artificial Sequence
  Description of Artificial Sequence: Synthetic oligonucleotide
  Antisense strand to SEQ ID NO: 2333576
uuuaaugagcacuggccaa

SEQ ID NO: 2333578 - RNA, 19 nt, Artificial Sequence
  Description of Artificial Sequence: Synthetic oligonucleotide
  Sense strand starting at position 3401 of SEQ ID NO: 1885323
gccagugcucauuaaagau

SEQ ID NO: 2333579 - RNA, 19 nt, Artificial Sequence
  Description of Artificial Sequence: Synthetic oligonucleotide
  Antisense strand to SEQ ID NO: 2333578
aucuuuaaugagcacuggc

SEQ ID NO: 2333580 - RNA, 19 nt, Artificial Sequence
  Description of Artificial Sequence: Synthetic oligonucleotide
  Sense strand starting at position 3575 of SEQ ID NO: 1885323
gaaauagugguagggauau

SEQ ID NO: 2333581 - RNA, 19 nt, Artificial Sequence
  Description of Artificial Sequence: Synthetic oligonucleotide
  Antisense strand to SEQ ID NO: 2333580
auaucccuaccacuauuuc

SEQ ID NO: 2333582 - RNA, 19 nt, Artificial Sequence
  Description of Artificial Sequence: Synthetic oligonucleotide
  Sense strand starting at position 3672 of SEQ ID NO: 1885323
gcuuaacgcccugggauuu

SEQ ID NO: 2333583 - RNA, 19 nt, Artificial Sequence
  Description of Artificial Sequence: Synthetic oligonucleotide
  Antisense strand to SEQ ID NO: 2333582
aaaucccagggcguuaagc

SEQ ID NO: 2333584 - RNA, 19 nt, Artificial Sequence
  Description of Artificial Sequence: Synthetic oligonucleotide
  Sense strand starting at position 95 of SEQ ID NO: 1885324
guaauaucacucuaagggu

SEQ ID NO: 2333585 - RNA, 19 nt, Artificial Sequence
  Description of Artificial Sequence: Synthetic oligonucleotide
  Antisense strand to SEQ ID NO: 2333584
acccuuagagugauauuac

SEQ ID NO: 2333586 - RNA, 19 nt, Artificial Sequence
  Description of Artificial Sequence: Synthetic oligonucleotide
  Sense strand starting at position 129 of SEQ ID NO: 1885324
aggagcuaauccuuaaaua

SEQ ID NO: 2333587 - RNA, 19 nt, Artificial Sequence
  Description of Artificial Sequence: Synthetic oligonucleotide
  Antisense strand to SEQ ID NO: 2333586
uauuuaaggauuagcuccu

SEQ ID NO: 2333588 - RNA, 19 nt, Artificial Sequence
  Description of Artificial Sequence: Synthetic oligonucleotide
  Sense strand starting at position 184 of SEQ ID NO: 1885324
gugugaaaggauuacgggu

SEQ ID NO: 2333589 - RNA, 19 nt, Artificial Sequence
  Description of Artificial Sequence: Synthetic oligonucleotide
  Antisense strand to SEQ ID NO: 2333588
acccguaauccuuucacac

SEQ ID NO: 2333590 - RNA, 19 nt, Artificial Sequence
  Description of Artificial Sequence: Synthetic oligonucleotide
  Sense strand starting at position 193 of SEQ ID NO: 1885324
gauuacggguaaucuuaua

SEQ ID NO: 2333591 - RNA, 19 nt, Artificial Sequence
  Description of Artificial Sequence: Synthetic oligonucleotide
  Antisense strand to SEQ ID NO: 2333590
uauaagauuacccguaauc

SEQ ID NO: 2333592 - RNA, 19 nt, Artificial Sequence
  Description of Artificial Sequence: Synthetic oligonucleotide
  Sense strand starting at position 335 of SEQ ID NO: 1885324
cagugauagggacggaaau

SEQ ID NO: 2333593 - RNA, 19 nt, Artificial Sequence
  Description of Artificial Sequence: Synthetic oligonucleotide
  Antisense strand to SEQ ID NO: 2333592
auuuccgucccuaucacug

SEQ ID NO: 2333594 - RNA, 19 nt, Artificial Sequence
  Description of Artificial Sequence: Synthetic oligonucleotide
  Sense strand starting at position 336 of SEQ ID NO: 1885324
agugauagggacggaaauu

SEQ ID NO: 2333595 - RNA, 19 nt, Artificial Sequence
  Description of Artificial Sequence: Synthetic oligonucleotide
  Antisense strand to SEQ ID NO: 2333594
aauuuccgucccuaucacu

SEQ ID NO: 2333596 - RNA, 19 nt, Artificial Sequence
  Description of Artificial Sequence: Synthetic oligonucleotide
  Sense strand starting at position 447 of SEQ ID NO: 1885324
cuguuaagaaugugaugaa

SEQ ID NO: 2333597 - RNA, 19 nt, Artificial Sequence
  Description of Artificial Sequence: Synthetic oligonucleotide
  Antisense strand to SEQ ID NO: 2333596
uucaucacauucuuaacag

SEQ ID NO: 2333598 - RNA, 19 nt, Artificial Sequence
  Description of Artificial Sequence: Synthetic oligonucleotide
  Sense strand starting at position 563 of SEQ ID NO: 1885324
ccaaccauugccgagaaga

SEQ ID NO: 2333599 - RNA, 19 nt, Artificial Sequence
  Description of Artificial Sequence: Synthetic oligonucleotide
  Antisense strand to SEQ ID NO: 2333598
ucuucucggcaaugguugg

SEQ ID NO: 2333600 - RNA, 19 nt, Artificial Sequence
  Description of Artificial Sequence: Synthetic oligonucleotide
  Sense strand starting at position 565 of SEQ ID NO: 1885324
aaccauugccgagaagacu

SEQ ID NO: 2333601 - RNA, 19 nt, Artificial Sequence
  Description of Artificial Sequence: Synthetic oligonucleotide
  Antisense strand to SEQ ID NO: 2333600
agucuucucggcaaugguu

SEQ ID NO: 2333602 - RNA, 19 nt, Artificial Sequence
  Description of Artificial Sequence: Synthetic oligonucleotide
  Sense strand starting at position 670 of SEQ ID NO: 1885324
uuuggauugagcuggaaug

SEQ ID NO: 2333603 - RNA, 19 nt, Artificial Sequence
  Description of Artificial Sequence: Synthetic oligonucleotide
  Antisense strand to SEQ ID NO: 2333602
cauuccagcucaauccaaa

SEQ ID NO: 2333604 - RNA, 19 nt, Artificial Sequence
  Description of Artificial Sequence: Synthetic oligonucleotide
  Sense strand starting at position 671 of SEQ ID NO: 1885324
uuggauugagcuggaauga

SEQ ID NO: 2333605 - RNA, 19 nt, Artificial Sequence
  Description of Artificial Sequence: Synthetic oligonucleotide
  Antisense strand to SEQ ID NO: 2333604
ucauuccagcucaauccaa

SEQ ID NO: 2333606 - RNA, 19 nt, Artificial Sequence
  Description of Artificial Sequence: Synthetic oligonucleotide
  Sense strand starting at position 692 of SEQ ID NO: 1885324
gagaacacuugaguacuau

SEQ ID NO: 2333607 - RNA, 19 nt, Artificial Sequence
  Description of Artificial Sequence: Synthetic oligonucleotide
  Antisense strand to SEQ ID NO: 2333606
auaguacucaaguguucuc

SEQ ID NO: 2333608 - RNA, 19 nt, Artificial Sequence
  Description of Artificial Sequence: Synthetic oligonucleotide
  Sense strand starting at position 744 of SEQ ID NO: 1885324
gacacuuugugagcagaga

SEQ ID NO: 2333609 - RNA, 19 nt, Artificial Sequence
  Description of Artificial Sequence: Synthetic oligonucleotide
  Antisense strand to SEQ ID NO: 2333608
ucucugcucacaaaguguc

SEQ ID NO: 2333610 - RNA, 19 nt, Artificial Sequence
  Description of Artificial Sequence: Synthetic oligonucleotide
  Sense strand starting at position 767 of SEQ ID NO: 1885324
ggugcuucuguguuacagu

SEQ ID NO: 2333611 - RNA, 19 nt, Artificial Sequence
  Description of Artificial Sequence: Synthetic oligonucleotide
  Antisense strand to SEQ ID NO: 2333610
acuguaacacagaagcacc

SEQ ID NO: 2333612 - RNA, 19 nt, Artificial Sequence
  Description of Artificial Sequence: Synthetic oligonucleotide
  Sense strand starting at position 887 of SEQ ID NO: 1885324
aaagauaagcagcaguuua

SEQ ID NO: 2333613 - RNA, 19 nt, Artificial Sequence
  Description of Artificial Sequence: Synthetic oligonucleotide
  Antisense strand to SEQ ID NO: 2333612
uaaacugcugcuuaucuuu

SEQ ID NO: 2333614 - RNA, 19 nt, Artificial Sequence
  Description of Artificial Sequence: Synthetic oligonucleotide
  Sense strand starting at position 898 of SEQ ID NO: 1885324
gcaguuuaauccuuauuug

SEQ ID NO: 2333615 - RNA, 19 nt, Artificial Sequence
  Description of Artificial Sequence: Synthetic oligonucleotide
  Antisense strand to SEQ ID NO: 2333614
caaauaaggauuaaacugc

SEQ ID NO: 2333616 - RNA, 19 nt, Artificial Sequence
  Description of Artificial Sequence: Synthetic oligonucleotide
  Sense strand starting at position 915 of SEQ ID NO: 1885324
ugaguaaucugaccugagg

SEQ ID NO: 2333617 - RNA, 19 nt, Artificial Sequence
  Description of Artificial Sequence: Synthetic oligonucleotide
  Antisense strand to SEQ ID NO: 2333616
ccucaggucagauuacuca

SEQ ID NO: 2333618 - RNA, 19 nt, Artificial Sequence
  Description of Artificial Sequence: Synthetic oligonucleotide
  Sense strand starting at position 1515 of SEQ ID NO: 1885324
guuguaauaggcuauacua

SEQ ID NO: 2333619 - RNA, 19 nt, Artificial Sequence
  Description of Artificial Sequence: Synthetic oligonucleotide
  Antisense strand to SEQ ID NO: 2333618
uaguauagccuauuacaac

SEQ ID NO: 2333620 - RNA, 19 nt, Artificial Sequence
  Description of Artificial Sequence: Synthetic oligonucleotide
  Sense strand starting at position 1751 of SEQ ID NO: 1885324
gggagcagucacuaggcau

SEQ ID NO: 2333621 - RNA, 19 nt, Artificial Sequence
  Description of Artificial Sequence: Synthetic oligonucleotide
  Antisense strand to SEQ ID NO: 2333620
augccuagugacugcuccc

SEQ ID NO: 2333622 - RNA, 19 nt, Artificial Sequence
  Description of Artificial Sequence: Synthetic oligonucleotide
  Sense strand starting at position 1763 of SEQ ID NO: 1885324
uaggcauagggcugaaaga

SEQ ID NO: 2333623 - RNA, 19 nt, Artificial Sequence
  Description of Artificial Sequence: Synthetic oligonucleotide
  Antisense strand to SEQ ID NO: 2333622
ucuuucagcccuaugccua

SEQ ID NO: 2333624 - RNA, 19 nt, Artificial Sequence
  Description of Artificial Sequence: Synthetic oligonucleotide
  Sense strand starting at position 1847 of SEQ ID NO: 1885324
uuuaauguggucuaguaga

SEQ ID NO: 2333625 - RNA, 19 nt, Artificial Sequence
  Description of Artificial Sequence: Synthetic oligonucleotide
  Antisense strand to SEQ ID NO: 2333624
ucuacuagaccacauuaaa

SEQ ID NO: 2333626 - RNA, 19 nt, Artificial Sequence
  Description of Artificial Sequence: Synthetic oligonucleotide
  Sense strand starting at position 1870 of SEQ ID NO: 1885324
agagaaguccacugaagug

SEQ ID NO: 2333627 - RNA, 19 nt, Artificial Sequence
  Description of Artificial Sequence: Synthetic oligonucleotide
  Antisense strand to SEQ ID NO: 2333626
cacuucaguggacuucucu

SEQ ID NO: 2333628 - RNA, 19 nt, Artificial Sequence
  Description of Artificial Sequence: Synthetic oligonucleotide
  Sense strand starting at position 1932 of SEQ ID NO: 1885324
gggugaaacucuuuggagg

SEQ ID NO: 2333629 - RNA, 19 nt, Artificial Sequence
  Description of Artificial Sequence: Synthetic oligonucleotide
  Antisense strand to SEQ ID NO: 2333628
ccuccaaagaguuucaccc

SEQ ID NO: 2333630 - RNA, 19 nt, Artificial Sequence
  Description of Artificial Sequence: Synthetic oligonucleotide
  Sense strand starting at position 2261 of SEQ ID NO: 1885324
uggagcugcggauaaauua

SEQ ID NO: 2333631 - RNA, 19 nt, Artificial Sequence
  Description of Artificial Sequence: Synthetic oligonucleotide
  Antisense strand to SEQ ID NO: 2333630
uaauuuauccgcagcucca

SEQ ID NO: 2333632 - RNA, 19 nt, Artificial Sequence
  Description of Artificial Sequence: Synthetic oligonucleotide
  Sense strand starting at position 2302 of SEQ ID NO: 1885324
gaccaugguccugaagugu

SEQ ID NO: 2333633 - RNA, 19 nt, Artificial Sequence
  Description of Artificial Sequence: Synthetic oligonucleotide
  Antisense strand to SEQ ID NO: 2333632
acacuucaggaccaugguc

SEQ ID NO: 2333634 - RNA, 19 nt, Artificial Sequence
  Description of Artificial Sequence: Synthetic oligonucleotide
  Sense strand starting at position 2313 of SEQ ID NO: 1885324
ugaaguguggcugaaagag

SEQ ID NO: 2333635 - RNA, 19 nt, Artificial Sequence
  Description of Artificial Sequence: Synthetic oligonucleotide
  Antisense strand to SEQ ID NO: 2333634
cucuuucagccacacuuca

SEQ ID NO: 2333636 - RNA, 19 nt, Artificial Sequence
  Description of Artificial Sequence: Synthetic oligonucleotide
  Sense strand starting at position 2477 of SEQ ID NO: 1885324
agguuugggcuucaaggaa

SEQ ID NO: 2333637 - RNA, 19 nt, Artificial Sequence
  Description of Artificial Sequence: Synthetic oligonucleotide
  Antisense strand to SEQ ID NO: 2333636
uuccuugaagcccaaaccu

SEQ ID NO: 2333638 - RNA, 19 nt, Artificial Sequence
  Description of Artificial Sequence: Synthetic oligonucleotide
  Sense strand starting at position 2498 of SEQ ID NO: 1885324
uaaugaauuguuuggacuu

SEQ ID NO: 2333639 - RNA, 19 nt, Artificial Sequence
  Description of Artificial Sequence: Synthetic oligonucleotide
  Antisense strand to SEQ ID NO: 2333638
aaguccaaacaauucauua

SEQ ID NO: 2333640 - RNA, 19 nt, Artificial Sequence
  Description of Artificial Sequence: Synthetic oligonucleotide
  Sense strand starting at position 3178 of SEQ ID NO: 1885324
gagcuaaugggcugagaag

SEQ ID NO: 2333641 - RNA, 19 nt, Artificial Sequence
  Description of Artificial Sequence: Synthetic oligonucleotide
  Antisense strand to SEQ ID NO: 2333640
cuucucagcccauuagcuc

SEQ ID NO: 2333642 - RNA, 19 nt, Artificial Sequence
  Description of Artificial Sequence: Synthetic oligonucleotide
  Sense strand starting at position 3179 of SEQ ID NO: 1885324
agcuaaugggcugagaagu

SEQ ID NO: 2333643 - RNA, 19 nt, Artificial Sequence
  Description of Artificial Sequence: Synthetic oligonucleotide
  Antisense strand to SEQ ID NO: 2333642
acuucucagcccauuagcu

SEQ ID NO: 2333644 - RNA, 19 nt, Artificial Sequence
  Description of Artificial Sequence: Synthetic oligonucleotide
  Sense strand starting at position 3295 of SEQ ID NO: 1885324
uguccaguugcuuucugua

SEQ ID NO: 2333645 - RNA, 19 nt, Artificial Sequence
  Description of Artificial Sequence: Synthetic oligonucleotide
  Antisense strand to SEQ ID NO: 2333644
uacagaaagcaacuggaca

SEQ ID NO: 2333646 - RNA, 19 nt, Artificial Sequence
  Description of Artificial Sequence: Synthetic oligonucleotide
  Sense strand starting at position 3337 of SEQ ID NO: 1885324
uacuuauuccuagagggca

SEQ ID NO: 2333647 - RNA, 19 nt, Artificial Sequence
  Description of Artificial Sequence: Synthetic oligonucleotide
  Antisense strand to SEQ ID NO: 2333646
ugcccucuaggaauaagua

SEQ ID NO: 2333648 - RNA, 19 nt, Artificial Sequence
  Description of Artificial Sequence: Synthetic oligonucleotide
  Sense strand starting at position 3471 of SEQ ID NO: 1885324
cuaggugauccuuggaaca

SEQ ID NO: 2333649 - RNA, 19 nt, Artificial Sequence
  Description of Artificial Sequence: Synthetic oligonucleotide
  Antisense strand to SEQ ID NO: 2333648
uguuccaaggaucaccuag

SEQ ID NO: 2333650 - RNA, 19 nt, Artificial Sequence
  Description of Artificial Sequence: Synthetic oligonucleotide
  Sense strand starting at position 3571 of SEQ ID NO: 1885324
aauauaguuggaugcuuaa

SEQ ID NO: 2333651 - RNA, 19 nt, Artificial Sequence
  Description of Artificial Sequence: Synthetic oligonucleotide
  Antisense strand to SEQ ID NO: 2333650
uuaagcauccaacuauauu

SEQ ID NO: 2333652 - RNA, 19 nt, Artificial Sequence
  Description of Artificial Sequence: Synthetic oligonucleotide
  Sense strand starting at position 3580 of SEQ ID NO: 1885324
ggaugcuuaaagugauaau

SEQ ID NO: 2333653 - RNA, 19 nt, Artificial Sequence
  Description of Artificial Sequence: Synthetic oligonucleotide
  Antisense strand to SEQ ID NO: 2333652
auuaucacuuuaagcaucc

SEQ ID NO: 2333654 - RNA, 19 nt, Artificial Sequence
  Description of Artificial Sequence: Synthetic oligonucleotide
  Sense strand starting at position 3687 of SEQ ID NO: 1885324
gaguuuacuggguaucaga

SEQ ID NO: 2333655 - RNA, 19 nt, Artificial Sequence
  Description of Artificial Sequence: Synthetic oligonucleotide
  Antisense strand to SEQ ID NO: 2333654
ucugauacccaguaaacuc

SEQ ID NO: 2333656 - RNA, 19 nt, Artificial Sequence
  Description of Artificial Sequence: Synthetic oligonucleotide
  Sense strand starting at position 3703 of SEQ ID NO: 1885324
agacacagugugggauaau

SEQ ID NO: 2333657 - RNA, 19 nt, Artificial Sequence
  Description of Artificial Sequence: Synthetic oligonucleotide
  Antisense strand to SEQ ID NO: 2333656
auuaucccacacugugucu

SEQ ID NO: 2333658 - RNA, 19 nt, Artificial Sequence
  Description of Artificial Sequence: Synthetic oligonucleotide
  Sense strand starting at position 3721 of SEQ ID NO: 1885324
ucagaacuccaguaguauu

SEQ ID NO: 2333659 - RNA, 19 nt, Artificial Sequence
  Description of Artificial Sequence: Synthetic oligonucleotide
  Antisense strand to SEQ ID NO: 2333658
aauacuacuggaguucuga

SEQ ID NO: 2333660 - RNA, 19 nt, Artificial Sequence
  Description of Artificial Sequence: Synthetic oligonucleotide
  Sense strand starting at position 3848 of SEQ ID NO: 1885324
acgaguuaaucuuccacaa

SEQ ID NO: 2333661 - RNA, 19 nt, Artificial Sequence
  Description of Artificial Sequence: Synthetic oligonucleotide
  Antisense strand to SEQ ID NO: 2333660
uuguggaagauuaacucgu

SEQ ID NO: 2333662 - RNA, 19 nt, Artificial Sequence
  Description of Artificial Sequence: Synthetic oligonucleotide
  Sense strand starting at position 3979 of SEQ ID NO: 1885324
aguauuguucuuuacauga

SEQ ID NO: 2333663 - RNA, 19 nt, Artificial Sequence
  Description of Artificial Sequence: Synthetic oligonucleotide
  Antisense strand to SEQ ID NO: 2333662
ucauguaaagaacaauacu

SEQ ID NO: 2333664 - RNA, 19 nt, Artificial Sequence
  Description of Artificial Sequence: Synthetic oligonucleotide
  Sense strand starting at position 157 of SEQ ID NO: 1885325
cacggaggaucucuacgua

SEQ ID NO: 2333665 - RNA, 19 nt, Artificial Sequence
  Description of Artificial Sequence: Synthetic oligonucleotide
  Antisense strand to SEQ ID NO: 2333664
uacguagagauccuccgug

SEQ ID NO: 2333666 - RNA, 19 nt, Artificial Sequence
  Description of Artificial Sequence: Synthetic oligonucleotide
  Sense strand starting at position 160 of SEQ ID NO: 1885325
ggaggaucucuacguaaca

SEQ ID NO: 2333667 - RNA, 19 nt, Artificial Sequence
  Description of Artificial Sequence: Synthetic oligonucleotide
  Antisense strand to SEQ ID NO: 2333666
uguuacguagagauccucc

SEQ ID NO: 2333668 - RNA, 19 nt, Artificial Sequence
  Description of Artificial Sequence: Synthetic oligonucleotide
  Sense strand starting at position 161 of SEQ ID NO: 1885325
gaggaucucuacguaacau

SEQ ID NO: 2333669 - RNA, 19 nt, Artificial Sequence
  Description of Artificial Sequence: Synthetic oligonucleotide
  Antisense strand to SEQ ID NO: 2333668
auguuacguagagauccuc

SEQ ID NO: 2333670 - RNA, 19 nt, Artificial Sequence
  Description of Artificial Sequence: Synthetic oligonucleotide
  Sense strand starting at position 174 of SEQ ID NO: 1885325
uaacauucugggugagcau

SEQ ID NO: 2333671 - RNA, 19 nt, Artificial Sequence
  Description of Artificial Sequence: Synthetic oligonucleotide
  Antisense strand to SEQ ID NO: 2333670
augcucacccagaauguua

SEQ ID NO: 2333672 - RNA, 19 nt, Artificial Sequence
  Description of Artificial Sequence: Synthetic oligonucleotide
  Sense strand starting at position 224 of SEQ ID NO: 1885325
uauggagacuguuucucau

SEQ ID NO: 2333673 - RNA, 19 nt, Artificial Sequence
  Description of Artificial Sequence: Synthetic oligonucleotide
  Antisense strand to SEQ ID NO: 2333672
augagaaacagucuccaua

SEQ ID NO: 2333674 - RNA, 19 nt, Artificial Sequence
  Description of Artificial Sequence: Synthetic oligonucleotide
  Sense strand starting at position 226 of SEQ ID NO: 1885325
uggagacuguuucucauaa

SEQ ID NO: 2333675 - RNA, 19 nt, Artificial Sequence
  Description of Artificial Sequence: Synthetic oligonucleotide
  Antisense strand to SEQ ID NO: 2333674
uuaugagaaacagucucca

SEQ ID NO: 2333676 - RNA, 19 nt, Artificial Sequence
  Description of Artificial Sequence: Synthetic oligonucleotide
  Sense strand starting at position 227 of SEQ ID NO: 1885325
ggagacuguuucucauaau

SEQ ID NO: 2333677 - RNA, 19 nt, Artificial Sequence
  Description of Artificial Sequence: Synthetic oligonucleotide
  Antisense strand to SEQ ID NO: 2333676
auuaugagaaacagucucc

SEQ ID NO: 2333678 - RNA, 19 nt, Artificial Sequence
  Description of Artificial Sequence: Synthetic oligonucleotide
  Sense strand starting at position 236 of SEQ ID NO: 1885325
uucucauaauggcuguaga

SEQ ID NO: 2333679 - RNA, 19 nt, Artificial Sequence
  Description of Artificial Sequence: Synthetic oligonucleotide
  Antisense strand to SEQ ID NO: 2333678
ucuacagccauuaugagaa

SEQ ID NO: 2333680 - RNA, 19 nt, Artificial Sequence
  Description of Artificial Sequence: Synthetic oligonucleotide
  Sense strand starting at position 342 of SEQ ID NO: 1885325
auuacauuguuucugggaa

SEQ ID NO: 2333681 - RNA, 19 nt, Artificial Sequence
  Description of Artificial Sequence: Synthetic oligonucleotide
  Antisense strand to SEQ ID NO: 2333680
uucccagaaacaauguaau

SEQ ID NO: 2333682 - RNA, 19 nt, Artificial Sequence
  Description of Artificial Sequence: Synthetic oligonucleotide
  Sense strand starting at position 589 of SEQ ID NO: 1885325
auaugucuggcauaaauaa

SEQ ID NO: 2333683 - RNA, 19 nt, Artificial Sequence
  Description of Artificial Sequence: Synthetic oligonucleotide
  Antisense strand to SEQ ID NO: 2333682
uuauuuaugccagacauau

SEQ ID NO: 2333684 - RNA, 19 nt, Artificial Sequence
  Description of Artificial Sequence: Synthetic oligonucleotide
  Sense strand starting at position 619 of SEQ ID NO: 1885325
aacagacacuguggaauuu

SEQ ID NO: 2333685 - RNA, 19 nt, Artificial Sequence
  Description of Artificial Sequence: Synthetic oligonucleotide
  Antisense strand to SEQ ID NO: 2333684
aaauuccacagugucuguu

SEQ ID NO: 2333686 - RNA, 19 nt, Artificial Sequence
  Description of Artificial Sequence: Synthetic oligonucleotide
  Sense strand starting at position 639 of SEQ ID NO: 1885325
cugacuauugggcauccua

SEQ ID NO: 2333687 - RNA, 19 nt, Artificial Sequence
  Description of Artificial Sequence: Synthetic oligonucleotide
  Antisense strand to SEQ ID NO: 2333686
uaggaugcccaauagucag

SEQ ID NO: 2333688 - RNA, 19 nt, Artificial Sequence
  Description of Artificial Sequence: Synthetic oligonucleotide
  Sense strand starting at position 661 of SEQ ID NO: 1885325
ccaaaugacugugcagaca

SEQ ID NO: 2333689 - RNA, 19 nt, Artificial Sequence
  Description of Artificial Sequence: Synthetic oligonucleotide
  Antisense strand to SEQ ID NO: 2333688
ugucugcacagucauuugg

SEQ ID NO: 2333690 - RNA, 19 nt, Artificial Sequence
  Description of Artificial Sequence: Synthetic oligonucleotide
  Sense strand starting at position 664 of SEQ ID NO: 1885325
aaugacugugcagacauua

SEQ ID NO: 2333691 - RNA, 19 nt, Artificial Sequence
  Description of Artificial Sequence: Synthetic oligonucleotide
  Antisense strand to SEQ ID NO: 2333690
uaaugucugcacagucauu

SEQ ID NO: 2333692 - RNA, 19 nt, Artificial Sequence
  Description of Artificial Sequence: Synthetic oligonucleotide
  Sense strand starting at position 669 of SEQ ID NO: 1885325
cugugcagacauuauaaga

SEQ ID NO: 2333693 - RNA, 19 nt, Artificial Sequence
  Description of Artificial Sequence: Synthetic oligonucleotide
  Antisense strand to SEQ ID NO: 2333692
ucuuauaaugucugcacag

SEQ ID NO: 2333694 - RNA, 19 nt, Artificial Sequence
  Description of Artificial Sequence: Synthetic oligonucleotide
  Sense strand starting at position 754 of SEQ ID NO: 1885325
gggauaacuucuuaauuuc

SEQ ID NO: 2333695 - RNA, 19 nt, Artificial Sequence
  Description of Artificial Sequence: Synthetic oligonucleotide
  Antisense strand to SEQ ID NO: 2333694
gaaauuaagaaguuauccc

SEQ ID NO: 2333696 - RNA, 19 nt, Artificial Sequence
  Description of Artificial Sequence: Synthetic oligonucleotide
  Sense strand starting at position 805 of SEQ ID NO: 1885325
ucuguuugaugaucuugga

SEQ ID NO: 2333697 - RNA, 19 nt, Artificial Sequence
  Description of Artificial Sequence: Synthetic oligonucleotide
  Antisense strand to SEQ ID NO: 2333696
uccaagaucaucaaacaga

SEQ ID NO: 2333698 - RNA, 19 nt, Artificial Sequence
  Description of Artificial Sequence: Synthetic oligonucleotide
  Sense strand starting at position 864 of SEQ ID NO: 1885325
gaguacagauagucuugua

SEQ ID NO: 2333699 - RNA, 19 nt, Artificial Sequence
  Description of Artificial Sequence: Synthetic oligonucleotide
  Antisense strand to SEQ ID NO: 2333698
uacaagacuaucuguacuc

SEQ ID NO: 2333700 - RNA, 19 nt, Artificial Sequence
  Description of Artificial Sequence: Synthetic oligonucleotide
  Sense strand starting at position 893 of SEQ ID NO: 1885325
uuauauugaagguggcuaa

SEQ ID NO: 2333701 - RNA, 19 nt, Artificial Sequence
  Description of Artificial Sequence: Synthetic oligonucleotide
  Antisense strand to SEQ ID NO: 2333700
uuagccaccuucaauauaa

SEQ ID NO: 2333702 - RNA, 19 nt, Artificial Sequence
  Description of Artificial Sequence: Synthetic oligonucleotide
  Sense strand starting at position 929 of SEQ ID NO: 1885325
agcagaucuaaugggaugu

SEQ ID NO: 2333703 - RNA, 19 nt, Artificial Sequence
  Description of Artificial Sequence: Synthetic oligonucleotide
  Antisense strand to SEQ ID NO: 2333702
acaucccauuagaucugcu

SEQ ID NO: 2333704 - RNA, 19 nt, Artificial Sequence
  Description of Artificial Sequence: Synthetic oligonucleotide
  Sense strand starting at position 930 of SEQ ID NO: 1885325
gcagaucuaaugggaugua

SEQ ID NO: 2333705 - RNA, 19 nt, Artificial Sequence
  Description of Artificial Sequence: Synthetic oligonucleotide
  Antisense strand to SEQ ID NO: 2333704
uacaucccauuagaucugc

SEQ ID NO: 2333706 - RNA, 19 nt, Artificial Sequence
  Description of Artificial Sequence: Synthetic oligonucleotide
  Sense strand starting at position 933 of SEQ ID NO: 1885325
gaucuaaugggauguauac

SEQ ID NO: 2333707 - RNA, 19 nt, Artificial Sequence
  Description of Artificial Sequence: Synthetic oligonucleotide
  Antisense strand to SEQ ID NO: 2333706
guauacaucccauuagauc

SEQ ID NO: 2333708 - RNA, 19 nt, Artificial Sequence
  Description of Artificial Sequence: Synthetic oligonucleotide
  Sense strand starting at position 942 of SEQ ID NO: 1885325
ggauguauacugugaguca

SEQ ID NO: 2333709 - RNA, 19 nt, Artificial Sequence
  Description of Artificial Sequence: Synthetic oligonucleotide
  Antisense strand to SEQ ID NO: 2333708
ugacucacaguauacaucc

SEQ ID NO: 2333710 - RNA, 19 nt, Artificial Sequence
  Description of Artificial Sequence: Synthetic oligonucleotide
  Sense strand starting at position 949 of SEQ ID NO: 1885325
uacugugagucacuaagga

SEQ ID NO: 2333711 - RNA, 19 nt, Artificial Sequence
  Description of Artificial Sequence: Synthetic oligonucleotide
  Antisense strand to SEQ ID NO: 2333710
uccuuagugacucacagua

SEQ ID NO: 2333712 - RNA, 19 nt, Artificial Sequence
  Description of Artificial Sequence: Synthetic oligonucleotide
  Sense strand starting at position 1244 of SEQ ID NO: 1885325
agaaguugagcagagcaua

SEQ ID NO: 2333713 - RNA, 19 nt, Artificial Sequence
  Description of Artificial Sequence: Synthetic oligonucleotide
  Antisense strand to SEQ ID NO: 2333712
uaugcucugcucaacuucu

SEQ ID NO: 2333714 - RNA, 19 nt, Artificial Sequence
  Description of Artificial Sequence: Synthetic oligonucleotide
  Sense strand starting at position 1419 of SEQ ID NO: 1885325
uucccaacaguguacuaaa

SEQ ID NO: 2333715 - RNA, 19 nt, Artificial Sequence
  Description of Artificial Sequence: Synthetic oligonucleotide
  Antisense strand to SEQ ID NO: 2333714
uuuaguacacuguugggaa

SEQ ID NO: 2333716 - RNA, 19 nt, Artificial Sequence
  Description of Artificial Sequence: Synthetic oligonucleotide
  Sense strand starting at position 1550 of SEQ ID NO: 1885325
gcauaugaauggcuaaagu

SEQ ID NO: 2333717 - RNA, 19 nt, Artificial Sequence
  Description of Artificial Sequence: Synthetic oligonucleotide
  Antisense strand to SEQ ID NO: 2333716
acuuuagccauucauaugc

SEQ ID NO: 2333718 - RNA, 19 nt, Artificial Sequence
  Description of Artificial Sequence: Synthetic oligonucleotide
  Sense strand starting at position 2547 of SEQ ID NO: 1885325
uuuauaauagagugaugug

SEQ ID NO: 2333719 - RNA, 19 nt, Artificial Sequence
  Description of Artificial Sequence: Synthetic oligonucleotide
  Antisense strand to SEQ ID NO: 2333718
cacaucacucuauuauaaa

SEQ ID NO: 2333720 - RNA, 19 nt, Artificial Sequence
  Description of Artificial Sequence: Synthetic oligonucleotide
  Sense strand starting at position 2582 of SEQ ID NO: 1885325
acggauugcuaagucaaau

SEQ ID NO: 2333721 - RNA, 19 nt, Artificial Sequence
  Description of Artificial Sequence: Synthetic oligonucleotide
  Antisense strand to SEQ ID NO: 2333720
auuugacuuagcaauccgu

SEQ ID NO: 2333722 - RNA, 19 nt, Artificial Sequence
  Description of Artificial Sequence: Synthetic oligonucleotide
  Sense strand starting at position 2619 of SEQ ID NO: 1885325
caauucuuugaggaaucgu

SEQ ID NO: 2333723 - RNA, 19 nt, Artificial Sequence
  Description of Artificial Sequence: Synthetic oligonucleotide
  Antisense strand to SEQ ID NO: 2333722
acgauuccucaaagaauug

SEQ ID NO: 2333724 - RNA, 19 nt, Artificial Sequence
  Description of Artificial Sequence: Synthetic oligonucleotide
  Sense strand starting at position 2852 of SEQ ID NO: 1885325
guuggccacauguaugauu

SEQ ID NO: 2333725 - RNA, 19 nt, Artificial Sequence
  Description of Artificial Sequence: Synthetic oligonucleotide
  Antisense strand to SEQ ID NO: 2333724
aaucauacauguggccaac

SEQ ID NO: 2333726 - RNA, 19 nt, Artificial Sequence
  Description of Artificial Sequence: Synthetic oligonucleotide
  Sense strand starting at position 2867 of SEQ ID NO: 1885325
gauugcuggcagcaugaga

SEQ ID NO: 2333727 - RNA, 19 nt, Artificial Sequence
  Description of Artificial Sequence: Synthetic oligonucleotide
  Antisense strand to SEQ ID NO: 2333726
ucucaugcugccagcaauc

SEQ ID NO: 2333728 - RNA, 19 nt, Artificial Sequence
  Description of Artificial Sequence: Synthetic oligonucleotide
  Sense strand starting at position 2999 of SEQ ID NO: 1885325
guccauuuacucugcugau

SEQ ID NO: 2333729 - RNA, 19 nt, Artificial Sequence
  Description of Artificial Sequence: Synthetic oligonucleotide
  Antisense strand to SEQ ID NO: 2333728
aucagcagaguaaauggac

SEQ ID NO: 2333730 - RNA, 19 nt, Artificial Sequence
  Description of Artificial Sequence: Synthetic oligonucleotide
  Sense strand starting at position 3017 of SEQ ID NO: 1885325
uaguuuauuuggcugugua

SEQ ID NO: 2333731 - RNA, 19 nt, Artificial Sequence
  Description of Artificial Sequence: Synthetic oligonucleotide
  Antisense strand to SEQ ID NO: 2333730
uacacagccaaauaaacua

SEQ ID NO: 2333732 - RNA, 19 nt, Artificial Sequence
  Description of Artificial Sequence: Synthetic oligonucleotide
  Sense strand starting at position 3018 of SEQ ID NO: 1885325
aguuuauuuggcuguguag

SEQ ID NO: 2333733 - RNA, 19 nt, Artificial Sequence
  Description of Artificial Sequence: Synthetic oligonucleotide
  Antisense strand to SEQ ID NO: 2333732
cuacacagccaaauaaacu

SEQ ID NO: 2333734 - RNA, 19 nt, Artificial Sequence
  Description of Artificial Sequence: Synthetic oligonucleotide
  Sense strand starting at position 3020 of SEQ ID NO: 1885325
uuuauuuggcuguguagaa

SEQ ID NO: 2333735 - RNA, 19 nt, Artificial Sequence
  Description of Artificial Sequence: Synthetic oligonucleotide
  Antisense strand to SEQ ID NO: 2333734
uucuacacagccaaauaaa

SEQ ID NO: 2333736 - RNA, 19 nt, Artificial Sequence
  Description of Artificial Sequence: Synthetic oligonucleotide
  Sense strand starting at position 3151 of SEQ ID NO: 1885325
uguccugaacaguauuaac

SEQ ID NO: 2333737 - RNA, 19 nt, Artificial Sequence
  Description of Artificial Sequence: Synthetic oligonucleotide
  Antisense strand to SEQ ID NO: 2333736
guuaauacuguucaggaca

SEQ ID NO: 2333738 - RNA, 19 nt, Artificial Sequence
  Description of Artificial Sequence: Synthetic oligonucleotide
  Sense strand starting at position 3240 of SEQ ID NO: 1885325
uuguuauaugguggaagaa

SEQ ID NO: 2333739 - RNA, 19 nt, Artificial Sequence
  Description of Artificial Sequence: Synthetic oligonucleotide
  Antisense strand to SEQ ID NO: 2333738
uucuuccaccauauaacaa

SEQ ID NO: 2333740 - RNA, 19 nt, Artificial Sequence
  Description of Artificial Sequence: Synthetic oligonucleotide
  Sense strand starting at position 3792 of SEQ ID NO: 1885325
uuaacugacuuccuaggua

SEQ ID NO: 2333741 - RNA, 19 nt, Artificial Sequence
  Description of Artificial Sequence: Synthetic oligonucleotide
  Antisense strand to SEQ ID NO: 2333740
uaccuaggaagucaguuaa

SEQ ID NO: 2333742 - RNA, 19 nt, Artificial Sequence
  Description of Artificial Sequence: Synthetic oligonucleotide
  Sense strand starting at position 3812 of SEQ ID NO: 1885325
uuucuuucugugggaauga

SEQ ID NO: 2333743 - RNA, 19 nt, Artificial Sequence
  Description of Artificial Sequence: Synthetic oligonucleotide
  Antisense strand to SEQ ID NO: 2333742
ucauucccacagaaagaaa

SEQ ID NO: 2333744 - RNA, 19 nt, Artificial Sequence
  Description of Artificial Sequence: Synthetic oligonucleotide
  Sense strand starting at position 36 of SEQ ID NO: 1885326
gagacauagugacuucuuu

SEQ ID NO: 2333745 - RNA, 19 nt, Artificial Sequence
  Description of Artificial Sequence: Synthetic oligonucleotide
  Antisense strand to SEQ ID NO: 2333744
aaagaagucacuaugucuc

SEQ ID NO: 2333746 - RNA, 19 nt, Artificial Sequence
  Description of Artificial Sequence: Synthetic oligonucleotide
  Sense strand starting at position 121 of SEQ ID NO: 1885326
gagaaauguuaccuucuga

SEQ ID NO: 2333747 - RNA, 19 nt, Artificial Sequence
  Description of Artificial Sequence: Synthetic oligonucleotide
  Antisense strand to SEQ ID NO: 2333746
ucagaagguaacauuucuc

SEQ ID NO: 2333748 - RNA, 19 nt, Artificial Sequence
  Description of Artificial Sequence: Synthetic oligonucleotide
  Sense strand starting at position 489 of SEQ ID NO: 1885326
uugguuuccugagcuaaga

SEQ ID NO: 2333749 - RNA, 19 nt, Artificial Sequence
  Description of Artificial Sequence: Synthetic oligonucleotide
  Antisense strand to SEQ ID NO: 2333748
ucuuagcucaggaaaccaa

SEQ ID NO: 2333750 - RNA, 19 nt, Artificial Sequence
  Description of Artificial Sequence: Synthetic oligonucleotide
  Sense strand starting at position 491 of SEQ ID NO: 1885326
gguuuccugagcuaagauu

SEQ ID NO: 2333751 - RNA, 19 nt, Artificial Sequence
  Description of Artificial Sequence: Synthetic oligonucleotide
  Antisense strand to SEQ ID NO: 2333750
aaucuuagcucaggaaacc

SEQ ID NO: 2333752 - RNA, 19 nt, Artificial Sequence
  Description of Artificial Sequence: Synthetic oligonucleotide
  Sense strand starting at position 532 of SEQ ID NO: 1885326
gcuggaaucucuuccugaa

SEQ ID NO: 2333753 - RNA, 19 nt, Artificial Sequence
  Description of Artificial Sequence: Synthetic oligonucleotide
  Antisense strand to SEQ ID NO: 2333752
uucaggaagagauuccagc

SEQ ID NO: 2333754 - RNA, 19 nt, Artificial Sequence
  Description of Artificial Sequence: Synthetic oligonucleotide
  Sense strand starting at position 534 of SEQ ID NO: 1885326
uggaaucucuuccugaaga

SEQ ID NO: 2333755 - RNA, 19 nt, Artificial Sequence
  Description of Artificial Sequence: Synthetic oligonucleotide
  Antisense strand to SEQ ID NO: 2333754
ucuucaggaagagauucca

SEQ ID NO: 2333756 - RNA, 19 nt, Artificial Sequence
  Description of Artificial Sequence: Synthetic oligonucleotide
  Sense strand starting at position 542 of SEQ ID NO: 1885326
cuuccugaagauugugauu

SEQ ID NO: 2333757 - RNA, 19 nt, Artificial Sequence
  Description of Artificial Sequence: Synthetic oligonucleotide
  Antisense strand to SEQ ID NO: 2333756
aaucacaaucuucaggaag

SEQ ID NO: 2333758 - RNA, 19 nt, Artificial Sequence
  Description of Artificial Sequence: Synthetic oligonucleotide
  Sense strand starting at position 626 of SEQ ID NO: 1885326
ggccuacaccucugacauu

SEQ ID NO: 2333759 - RNA, 19 nt, Artificial Sequence
  Description of Artificial Sequence: Synthetic oligonucleotide
  Antisense strand to SEQ ID NO: 2333758
aaugucagagguguaggcc

SEQ ID NO: 2333760 - RNA, 19 nt, Artificial Sequence
  Description of Artificial Sequence: Synthetic oligonucleotide
  Sense strand starting at position 1250 of SEQ ID NO: 1885326
gggagcuuguuaccacaaa

SEQ ID NO: 2333761 - RNA, 19 nt, Artificial Sequence
  Description of Artificial Sequence: Synthetic oligonucleotide
  Antisense strand to SEQ ID NO: 2333760
uuugugguaacaagcuccc

SEQ ID NO: 2333762 - RNA, 19 nt, Artificial Sequence
  Description of Artificial Sequence: Synthetic oligonucleotide
  Sense strand starting at position 1293 of SEQ ID NO: 1885326
gccagaaguuuaccuauuc

SEQ ID NO: 2333763 - RNA, 19 nt, Artificial Sequence
  Description of Artificial Sequence: Synthetic oligonucleotide
  Antisense strand to SEQ ID NO: 2333762
gaauagguaaacuucuggc

SEQ ID NO: 2333764 - RNA, 19 nt, Artificial Sequence
  Description of Artificial Sequence: Synthetic oligonucleotide
  Sense strand starting at position 1338 of SEQ ID NO: 1885326
augauaugcuaggcuggau

SEQ ID NO: 2333765 - RNA, 19 nt, Artificial Sequence
  Description of Artificial Sequence: Synthetic oligonucleotide
  Antisense strand to SEQ ID NO: 2333764
auccagccuagcauaucau

SEQ ID NO: 2333766 - RNA, 19 nt, Artificial Sequence
  Description of Artificial Sequence: Synthetic oligonucleotide
  Sense strand starting at position 1381 of SEQ ID NO: 1885326
uguauugccgucucuuauu

SEQ ID NO: 2333767 - RNA, 19 nt, Artificial Sequence
  Description of Artificial Sequence: Synthetic oligonucleotide
  Antisense strand to SEQ ID NO: 2333766
aauaagagacggcaauaca

SEQ ID NO: 2333768 - RNA, 19 nt, Artificial Sequence
  Description of Artificial Sequence: Synthetic oligonucleotide
  Sense strand starting at position 1675 of SEQ ID NO: 1885326
ggccaaugucuacauucca

SEQ ID NO: 2333769 - RNA, 19 nt, Artificial Sequence
  Description of Artificial Sequence: Synthetic oligonucleotide
  Antisense strand to SEQ ID NO: 2333768
uggaauguagacauuggcc

SEQ ID NO: 2333770 - RNA, 19 nt, Artificial Sequence
  Description of Artificial Sequence: Synthetic oligonucleotide
  Sense strand starting at position 1804 of SEQ ID NO: 1885326
ugggcuaguaguuaucaua

SEQ ID NO: 2333771 - RNA, 19 nt, Artificial Sequence
  Description of Artificial Sequence: Synthetic oligonucleotide
  Antisense strand to SEQ ID NO: 2333770
uaugauaacuacuagccca

SEQ ID NO: 2333772 - RNA, 19 nt, Artificial Sequence
  Description of Artificial Sequence: Synthetic oligonucleotide
  Sense strand starting at position 1811 of SEQ ID NO: 1885326
guaguuaucauagaaaugu

SEQ ID NO: 2333773 - RNA, 19 nt, Artificial Sequence
  Description of Artificial Sequence: Synthetic oligonucleotide
  Antisense strand to SEQ ID NO: 2333772
acauuucuaugauaacuac

SEQ ID NO: 2333774 - RNA, 19 nt, Artificial Sequence
  Description of Artificial Sequence: Synthetic oligonucleotide
  Sense strand starting at position 1829 of SEQ ID NO: 1885326
uugauaagauuaccuggua

SEQ ID NO: 2333775 - RNA, 19 nt, Artificial Sequence
  Description of Artificial Sequence: Synthetic oligonucleotide
  Antisense strand to SEQ ID NO: 2333774
uaccagguaaucuuaucaa

SEQ ID NO: 2333776 - RNA, 19 nt, Artificial Sequence
  Description of Artificial Sequence: Synthetic oligonucleotide
  Sense strand starting at position 1830 of SEQ ID NO: 1885326
ugauaagauuaccugguau

SEQ ID NO: 2333777 - RNA, 19 nt, Artificial Sequence
  Description of Artificial Sequence: Synthetic oligonucleotide
  Antisense strand to SEQ ID NO: 2333776
auaccagguaaucuuauca

SEQ ID NO: 2333778 - RNA, 19 nt, Artificial Sequence
  Description of Artificial Sequence: Synthetic oligonucleotide
  Sense strand starting at position 1832 of SEQ ID NO: 1885326
auaagauuaccugguauuc

SEQ ID NO: 2333779 - RNA, 19 nt, Artificial Sequence
  Description of Artificial Sequence: Synthetic oligonucleotide
  Antisense strand to SEQ ID NO: 2333778
gaauaccagguaaucuuau

SEQ ID NO: 2333780 - RNA, 19 nt, Artificial Sequence
  Description of Artificial Sequence: Synthetic oligonucleotide
  Sense strand starting at position 2489 of SEQ ID NO: 1885326
ugugcugucauguuaggca

SEQ ID NO: 2333781 - RNA, 19 nt, Artificial Sequence
  Description of Artificial Sequence: Synthetic oligonucleotide
  Antisense strand to SEQ ID NO: 2333780
ugccuaacaugacagcaca

SEQ ID NO: 2333782 - RNA, 19 nt, Artificial Sequence
  Description of Artificial Sequence: Synthetic oligonucleotide
  Sense strand starting at position 2539 of SEQ ID NO: 1885326
ucagaaagcucaucgauuc

SEQ ID NO: 2333783 - RNA, 19 nt, Artificial Sequence
  Description of Artificial Sequence: Synthetic oligonucleotide
  Antisense strand to SEQ ID NO: 2333782
gaaucgaugagcuuucuga

SEQ ID NO: 2333784 - RNA, 19 nt, Artificial Sequence
  Description of Artificial Sequence: Synthetic oligonucleotide
  Sense strand starting at position 2642 of SEQ ID NO: 1885326
acugcaauuucuuaaugga

SEQ ID NO: 2333785 - RNA, 19 nt, Artificial Sequence
  Description of Artificial Sequence: Synthetic oligonucleotide
  Antisense strand to SEQ ID NO: 2333784
uccauuaagaaauugcagu

SEQ ID NO: 2333786 - RNA, 19 nt, Artificial Sequence
  Description of Artificial Sequence: Synthetic oligonucleotide
  Sense strand starting at position 2673 of SEQ ID NO: 1885326
acagauauuugugaggcau

SEQ ID NO: 2333787 - RNA, 19 nt, Artificial Sequence
  Description of Artificial Sequence: Synthetic oligonucleotide
  Antisense strand to SEQ ID NO: 2333786
augccucacaaauaucugu

SEQ ID NO: 2333788 - RNA, 19 nt, Artificial Sequence
  Description of Artificial Sequence: Synthetic oligonucleotide
  Sense strand starting at position 2748 of SEQ ID NO: 1885326
aaguuuauguaccugugaa

SEQ ID NO: 2333789 - RNA, 19 nt, Artificial Sequence
  Description of Artificial Sequence: Synthetic oligonucleotide
  Antisense strand to SEQ ID NO: 2333788
uucacagguacauaaacuu

SEQ ID NO: 2333790 - RNA, 19 nt, Artificial Sequence
  Description of Artificial Sequence: Synthetic oligonucleotide
  Sense strand starting at position 2749 of SEQ ID NO: 1885326
aguuuauguaccugugaag

SEQ ID NO: 2333791 - RNA, 19 nt, Artificial Sequence
  Description of Artificial Sequence: Synthetic oligonucleotide
  Antisense strand to SEQ ID NO: 2333790
cuucacagguacauaaacu

SEQ ID NO: 2333792 - RNA, 19 nt, Artificial Sequence
  Description of Artificial Sequence: Synthetic oligonucleotide
  Sense strand starting at position 3407 of SEQ ID NO: 1885326
ccaugugaucccuauggca

SEQ ID NO: 2333793 - RNA, 19 nt, Artificial Sequence
  Description of Artificial Sequence: Synthetic oligonucleotide
  Antisense strand to SEQ ID NO: 2333792
ugccauagggaucacaugg

SEQ ID NO: 2333794 - RNA, 19 nt, Artificial Sequence
  Description of Artificial Sequence: Synthetic oligonucleotide
  Sense strand starting at position 3409 of SEQ ID NO: 1885326
augugaucccuauggcaag

SEQ ID NO: 2333795 - RNA, 19 nt, Artificial Sequence
  Description of Artificial Sequence: Synthetic oligonucleotide
  Antisense strand to SEQ ID NO: 2333794
cuugccauagggaucacau

SEQ ID NO: 2333796 - RNA, 19 nt, Artificial Sequence
  Description of Artificial Sequence: Synthetic oligonucleotide
  Sense strand starting at position 3493 of SEQ ID NO: 1885326
auagcucugugacuuugaa

SEQ ID NO: 2333797 - RNA, 19 nt, Artificial Sequence
  Description of Artificial Sequence: Synthetic oligonucleotide
  Antisense strand to SEQ ID NO: 2333796
uucaaagucacagagcuau

SEQ ID NO: 2333798 - RNA, 19 nt, Artificial Sequence
  Description of Artificial Sequence: Synthetic oligonucleotide
  Sense strand starting at position 3563 of SEQ ID NO: 1885326
ccuuucuugcaggauuauu

SEQ ID NO: 2333799 - RNA, 19 nt, Artificial Sequence
  Description of Artificial Sequence: Synthetic oligonucleotide
  Antisense strand to SEQ ID NO: 2333798
aauaauccugcaagaaagg

SEQ ID NO: 2333800 - RNA, 19 nt, Artificial Sequence
  Description of Artificial Sequence: Synthetic oligonucleotide
  Sense strand starting at position 3568 of SEQ ID NO: 1885326
cuugcaggauuauuguaau

SEQ ID NO: 2333801 - RNA, 19 nt, Artificial Sequence
  Description of Artificial Sequence: Synthetic oligonucleotide
  Antisense strand to SEQ ID NO: 2333800
auuacaauaauccugcaag

SEQ ID NO: 2333802 - RNA, 19 nt, Artificial Sequence
  Description of Artificial Sequence: Synthetic oligonucleotide
  Sense strand starting at position 3641 of SEQ ID NO: 1885326
cacuguuaggaauaguauu

SEQ ID NO: 2333803 - RNA, 19 nt, Artificial Sequence
  Description of Artificial Sequence: Synthetic oligonucleotide
  Antisense strand to SEQ ID NO: 2333802
aauacuauuccuaacagug

SEQ ID NO: 2333804 - RNA, 19 nt, Artificial Sequence
  Description of Artificial Sequence: Synthetic oligonucleotide
  Sense strand starting at position 3647 of SEQ ID NO: 1885326
uaggaauaguauucuuguu

SEQ ID NO: 2333805 - RNA, 19 nt, Artificial Sequence
  Description of Artificial Sequence: Synthetic oligonucleotide
  Antisense strand to SEQ ID NO: 2333804
aacaagaauacuauuccua

SEQ ID NO: 2333806 - RNA, 19 nt, Artificial Sequence
  Description of Artificial Sequence: Synthetic oligonucleotide
  Sense strand starting at position 3672 of SEQ ID NO: 1885326
cucaucuugacgugaauga

SEQ ID NO: 2333807 - RNA, 19 nt, Artificial Sequence
  Description of Artificial Sequence: Synthetic oligonucleotide
  Antisense strand to SEQ ID NO: 2333806
ucauucacgucaagaugag

SEQ ID NO: 2333808 - RNA, 19 nt, Artificial Sequence
  Description of Artificial Sequence: Synthetic oligonucleotide
  Sense strand starting at position 3676 of SEQ ID NO: 1885326
ucuugacgugaaugagaca

SEQ ID NO: 2333809 - RNA, 19 nt, Artificial Sequence
  Description of Artificial Sequence: Synthetic oligonucleotide
  Antisense strand to SEQ ID NO: 2333808
ugucucauucacgucaaga

SEQ ID NO: 2333810 - RNA, 19 nt, Artificial Sequence
  Description of Artificial Sequence: Synthetic oligonucleotide
  Sense strand starting at position 3681 of SEQ ID NO: 1885326
acgugaaugagacauaguu

SEQ ID NO: 2333811 - RNA, 19 nt, Artificial Sequence
  Description of Artificial Sequence: Synthetic oligonucleotide
  Antisense strand to SEQ ID NO: 2333810
aacuaugucucauucacgu

SEQ ID NO: 2333812 - RNA, 19 nt, Artificial Sequence
  Description of Artificial Sequence: Synthetic oligonucleotide
  Sense strand starting at position 3704 of SEQ ID NO: 1885326
ucuugaauccuccacguau

SEQ ID NO: 2333813 - RNA, 19 nt, Artificial Sequence
  Description of Artificial Sequence: Synthetic oligonucleotide
  Antisense strand to SEQ ID NO: 2333812
auacguggaggauucaaga

SEQ ID NO: 2333814 - RNA, 19 nt, Artificial Sequence
  Description of Artificial Sequence: Synthetic oligonucleotide
  Sense strand starting at position 3706 of SEQ ID NO: 1885326
uugaauccuccacguauua

SEQ ID NO: 2333815 - RNA, 19 nt, Artificial Sequence
  Description of Artificial Sequence: Synthetic oligonucleotide
  Antisense strand to SEQ ID NO: 2333814
uaauacguggaggauucaa

SEQ ID NO: 2333816 - RNA, 19 nt, Artificial Sequence
  Description of Artificial Sequence: Synthetic oligonucleotide
  Sense strand starting at position 3715 of SEQ ID NO: 1885326
ccacguauuagucauguga

SEQ ID NO: 2333817 - RNA, 19 nt, Artificial Sequence
  Description of Artificial Sequence: Synthetic oligonucleotide
  Antisense strand to SEQ ID NO: 2333816
ucacaugacuaauacgugg

SEQ ID NO: 2333818 - RNA, 19 nt, Artificial Sequence
  Description of Artificial Sequence: Synthetic oligonucleotide
  Sense strand starting at position 3719 of SEQ ID NO: 1885326
guauuagucaugugaacau

SEQ ID NO: 2333819 - RNA, 19 nt, Artificial Sequence
  Description of Artificial Sequence: Synthetic oligonucleotide
  Antisense strand to SEQ ID NO: 2333818
auguucacaugacuaauac

SEQ ID NO: 2333820 - RNA, 19 nt, Artificial Sequence
  Description of Artificial Sequence: Synthetic oligonucleotide
  Sense strand starting at position 3726 of SEQ ID NO: 1885326
ucaugugaacauuagguua

SEQ ID NO: 2333821 - RNA, 19 nt, Artificial Sequence
  Description of Artificial Sequence: Synthetic oligonucleotide
  Antisense strand to SEQ ID NO: 2333820
uaaccuaauguucacauga

SEQ ID NO: 2333822 - RNA, 19 nt, Artificial Sequence
  Description of Artificial Sequence: Synthetic oligonucleotide
  Sense strand starting at position 3837 of SEQ ID NO: 1885326
cguugauagaaguaccaaa

SEQ ID NO: 2333823 - RNA, 19 nt, Artificial Sequence
  Description of Artificial Sequence: Synthetic oligonucleotide
  Antisense strand to SEQ ID NO: 2333822
uuugguacuucuaucaacg

SEQ ID NO: 2333824 - RNA, 19 nt, Artificial Sequence
  Description of Artificial Sequence: Synthetic oligonucleotide
  Sense strand starting at position 200 of SEQ ID NO: 1885327
agucaucagcucugaagca

SEQ ID NO: 2333825 - RNA, 19 nt, Artificial Sequence
  Description of Artificial Sequence: Synthetic oligonucleotide
  Antisense strand to SEQ ID NO: 2333824
ugcuucagagcugaugacu

SEQ ID NO: 2333826 - RNA, 19 nt, Artificial Sequence
  Description of Artificial Sequence: Synthetic oligonucleotide
  Sense strand starting at position 232 of SEQ ID NO: 1885327
caaacugugucguuaaacu

SEQ ID NO: 2333827 - RNA, 19 nt, Artificial Sequence
  Description of Artificial Sequence: Synthetic oligonucleotide
  Antisense strand to SEQ ID NO: 2333826
aguuuaacgacacaguuug

SEQ ID NO: 2333828 - RNA, 19 nt, Artificial Sequence
  Description of Artificial Sequence: Synthetic oligonucleotide
  Sense strand starting at position 248 of SEQ ID NO: 1885327
acucuaacucgucaguucu

SEQ ID NO: 2333829 - RNA, 19 nt, Artificial Sequence
  Description of Artificial Sequence: Synthetic oligonucleotide
  Antisense strand to SEQ ID NO: 2333828
agaacugacgaguuagagu

SEQ ID NO: 2333830 - RNA, 19 nt, Artificial Sequence
  Description of Artificial Sequence: Synthetic oligonucleotide
  Sense strand starting at position 304 of SEQ ID NO: 1885327
gguacuauuuaccauauga

SEQ ID NO: 2333831 - RNA, 19 nt, Artificial Sequence
  Description of Artificial Sequence: Synthetic oligonucleotide
  Antisense strand to SEQ ID NO: 2333830
ucauaugguaaauaguacc

SEQ ID NO: 2333832 - RNA, 19 nt, Artificial Sequence
  Description of Artificial Sequence: Synthetic oligonucleotide
  Sense strand starting at position 367 of SEQ ID NO: 1885327
gggacggaucguggaucua

SEQ ID NO: 2333833 - RNA, 19 nt, Artificial Sequence
  Description of Artificial Sequence: Synthetic oligonucleotide
  Antisense strand to SEQ ID NO: 2333832
uagauccacgauccguccc

SEQ ID NO: 2333834 - RNA, 19 nt, Artificial Sequence
  Description of Artificial Sequence: Synthetic oligonucleotide
  Sense strand starting at position 592 of SEQ ID NO: 1885327
gaauguaggugccucucaa

SEQ ID NO: 2333835 - RNA, 19 nt, Artificial Sequence
  Description of Artificial Sequence: Synthetic oligonucleotide
  Antisense strand to SEQ ID NO: 2333834
uugagaggcaccuacauuc

SEQ ID NO: 2333836 - RNA, 19 nt, Artificial Sequence
  Description of Artificial Sequence: Synthetic oligonucleotide
  Sense strand starting at position 701 of SEQ ID NO: 1885327
caggauccgugccuuauaa

SEQ ID NO: 2333837 - RNA, 19 nt, Artificial Sequence
  Description of Artificial Sequence: Synthetic oligonucleotide
  Antisense strand to SEQ ID NO: 2333836
uuauaaggcacggauccug

SEQ ID NO: 2333838 - RNA, 19 nt, Artificial Sequence
  Description of Artificial Sequence: Synthetic oligonucleotide
  Sense strand starting at position 703 of SEQ ID NO: 1885327
ggauccgugccuuauaaug

SEQ ID NO: 2333839 - RNA, 19 nt, Artificial Sequence
  Description of Artificial Sequence: Synthetic oligonucleotide
  Antisense strand to SEQ ID NO: 2333838
cauuauaaggcacggaucc

SEQ ID NO: 2333840 - RNA, 19 nt, Artificial Sequence
  Description of Artificial Sequence: Synthetic oligonucleotide
  Sense strand starting at position 872 of SEQ ID NO: 1885327
ccagaacgauaagaaauaa

SEQ ID NO: 2333841 - RNA, 19 nt, Artificial Sequence
  Description of Artificial Sequence: Synthetic oligonucleotide
  Antisense strand to SEQ ID NO: 2333840
uuauuucuuaucguucugg

SEQ ID NO: 2333842 - RNA, 19 nt, Artificial Sequence
  Description of Artificial Sequence: Synthetic oligonucleotide
  Sense strand starting at position 959 of SEQ ID NO: 1885327
cugggcuuccuuugucaca

SEQ ID NO: 2333843 - RNA, 19 nt, Artificial Sequence
  Description of Artificial Sequence: Synthetic oligonucleotide
  Antisense strand to SEQ ID NO: 2333842
ugugacaaaggaagcccag

SEQ ID NO: 2333844 - RNA, 19 nt, Artificial Sequence
  Description of Artificial Sequence: Synthetic oligonucleotide
  Sense strand starting at position 969 of SEQ ID NO: 1885327
uuugucacaccuggucaaa

SEQ ID NO: 2333845 - RNA, 19 nt, Artificial Sequence
  Description of Artificial Sequence: Synthetic oligonucleotide
  Antisense strand to SEQ ID NO: 2333844
uuugaccaggugugacaaa

SEQ ID NO: 2333846 - RNA, 19 nt, Artificial Sequence
  Description of Artificial Sequence: Synthetic oligonucleotide
  Sense strand starting at position 1131 of SEQ ID NO: 1885327
uaaggauccugugugacuu

SEQ ID NO: 2333847 - RNA, 19 nt, Artificial Sequence
  Description of Artificial Sequence: Synthetic oligonucleotide
  Antisense strand to SEQ ID NO: 2333846
aagucacacaggauccuua

SEQ ID NO: 2333848 - RNA, 19 nt, Artificial Sequence
  Description of Artificial Sequence: Synthetic oligonucleotide
  Sense strand starting at position 1213 of SEQ ID NO: 1885327
uggauuccugcugaagcaa

SEQ ID NO: 2333849 - RNA, 19 nt, Artificial Sequence
  Description of Artificial Sequence: Synthetic oligonucleotide
  Antisense strand to SEQ ID NO: 2333848
uugcuucagcaggaaucca

SEQ ID NO: 2333850 - RNA, 19 nt, Artificial Sequence
  Description of Artificial Sequence: Synthetic oligonucleotide
  Sense strand starting at position 1228 of SEQ ID NO: 1885327
gcaaguguauaggucacau

SEQ ID NO: 2333851 - RNA, 19 nt, Artificial Sequence
  Description of Artificial Sequence: Synthetic oligonucleotide
  Antisense strand to SEQ ID NO: 2333850
augugaccuauacacuugc

SEQ ID NO: 2333852 - RNA, 19 nt, Artificial Sequence
  Description of Artificial Sequence: Synthetic oligonucleotide
  Sense strand starting at position 1230 of SEQ ID NO: 1885327
aaguguauaggucacauca

SEQ ID NO: 2333853 - RNA, 19 nt, Artificial Sequence
  Description of Artificial Sequence: Synthetic oligonucleotide
  Antisense strand to SEQ ID NO: 2333852
ugaugugaccuauacacuu

SEQ ID NO: 2333854 - RNA, 19 nt, Artificial Sequence
  Description of Artificial Sequence: Synthetic oligonucleotide
  Sense strand starting at position 1272 of SEQ ID NO: 1885327
uuggaugucuuccucagaa

SEQ ID NO: 2333855 - RNA, 19 nt, Artificial Sequence
  Description of Artificial Sequence: Synthetic oligonucleotide
  Antisense strand to SEQ ID NO: 2333854
uucugaggaagacauccaa

SEQ ID NO: 2333856 - RNA, 19 nt, Artificial Sequence
  Description of Artificial Sequence: Synthetic oligonucleotide
  Sense strand starting at position 1371 of SEQ ID NO: 1885327
caagcucucucggugagua

SEQ ID NO: 2333857 - RNA, 19 nt, Artificial Sequence
  Description of Artificial Sequence: Synthetic oligonucleotide
  Antisense strand to SEQ ID NO: 2333856
uacucaccgagagagcuug

SEQ ID NO: 2333858 - RNA, 19 nt, Artificial Sequence
  Description of Artificial Sequence: Synthetic oligonucleotide
  Sense strand starting at position 1372 of SEQ ID NO: 1885327
aagcucucucggugaguaa

SEQ ID NO: 2333859 - RNA, 19 nt, Artificial Sequence
  Description of Artificial Sequence: Synthetic oligonucleotide
  Antisense strand to SEQ ID NO: 2333858
uuacucaccgagagagcuu

SEQ ID NO: 2333860 - RNA, 19 nt, Artificial Sequence
  Description of Artificial Sequence: Synthetic oligonucleotide
  Sense strand starting at position 1376 of SEQ ID NO: 1885327
ucucucggugaguaacaau

SEQ ID NO: 2333861 - RNA, 19 nt, Artificial Sequence
  Description of Artificial Sequence: Synthetic oligonucleotide
  Antisense strand to SEQ ID NO: 2333860
auuguuacucaccgagaga

SEQ ID NO: 2333862 - RNA, 19 nt, Artificial Sequence
  Description of Artificial Sequence: Synthetic oligonucleotide
  Sense strand starting at position 1385 of SEQ ID NO: 1885327
gaguaacaaugccuggaga

SEQ ID NO: 2333863 - RNA, 19 nt, Artificial Sequence
  Description of Artificial Sequence: Synthetic oligonucleotide
  Antisense strand to SEQ ID NO: 2333862
ucuccaggcauuguuacuc

SEQ ID NO: 2333864 - RNA, 19 nt, Artificial Sequence
  Description of Artificial Sequence: Synthetic oligonucleotide
  Sense strand starting at position 1386 of SEQ ID NO: 1885327
aguaacaaugccuggagau

SEQ ID NO: 2333865 - RNA, 19 nt, Artificial Sequence
  Description of Artificial Sequence: Synthetic oligonucleotide
  Antisense strand to SEQ ID NO: 2333864
aucuccaggcauuguuacu

SEQ ID NO: 2333866 - RNA, 19 nt, Artificial Sequence
  Description of Artificial Sequence: Synthetic oligonucleotide
  Sense strand starting at position 1387 of SEQ ID NO: 1885327
guaacaaugccuggagaua

SEQ ID NO: 2333867 - RNA, 19 nt, Artificial Sequence
  Description of Artificial Sequence: Synthetic oligonucleotide
  Antisense strand to SEQ ID NO: 2333866
uaucuccaggcauuguuac

SEQ ID NO: 2333868 - RNA, 19 nt, Artificial Sequence
  Description of Artificial Sequence: Synthetic oligonucleotide
  Sense strand starting at position 1417 of SEQ ID NO: 1885327
ccauucgugccuugaccau

SEQ ID NO: 2333869 - RNA, 19 nt, Artificial Sequence
  Description of Artificial Sequence: Synthetic oligonucleotide
  Antisense strand to SEQ ID NO: 2333868
auggucaaggcacgaaugg

SEQ ID NO: 2333870 - RNA, 19 nt, Artificial Sequence
  Description of Artificial Sequence: Synthetic oligonucleotide
  Sense strand starting at position 1429 of SEQ ID NO: 1885327
ugaccaugccuguagucaa

SEQ ID NO: 2333871 - RNA, 19 nt, Artificial Sequence
  Description of Artificial Sequence: Synthetic oligonucleotide
  Antisense strand to SEQ ID NO: 2333870
uugacuacaggcaugguca

SEQ ID NO: 2333872 - RNA, 19 nt, Artificial Sequence
  Description of Artificial Sequence: Synthetic oligonucleotide
  Sense strand starting at position 1537 of SEQ ID NO: 1885327
cugggaucuugccucuaga

SEQ ID NO: 2333873 - RNA, 19 nt, Artificial Sequence
  Description of Artificial Sequence: Synthetic oligonucleotide
  Antisense strand to SEQ ID NO: 2333872
ucuagaggcaagaucccag

SEQ ID NO: 2333874 - RNA, 19 nt, Artificial Sequence
  Description of Artificial Sequence: Synthetic oligonucleotide
  Sense strand starting at position 1591 of SEQ ID NO: 1885327
guguuagucaggugaggac

SEQ ID NO: 2333875 - RNA, 19 nt, Artificial Sequence
  Description of Artificial Sequence: Synthetic oligonucleotide
  Antisense strand to SEQ ID NO: 2333874
guccucaccugacuaacac

SEQ ID NO: 2333876 - RNA, 19 nt, Artificial Sequence
  Description of Artificial Sequence: Synthetic oligonucleotide
  Sense strand starting at position 1623 of SEQ ID NO: 1885327
gaaaguguagccuggaguu

SEQ ID NO: 2333877 - RNA, 19 nt, Artificial Sequence
  Description of Artificial Sequence: Synthetic oligonucleotide
  Antisense strand to SEQ ID NO: 2333876
aacuccaggcuacacuuuc

SEQ ID NO: 2333878 - RNA, 19 nt, Artificial Sequence
  Description of Artificial Sequence: Synthetic oligonucleotide
  Sense strand starting at position 1630 of SEQ ID NO: 1885327
uagccuggaguuugaaaca

SEQ ID NO: 2333879 - RNA, 19 nt, Artificial Sequence
  Description of Artificial Sequence: Synthetic oligonucleotide
  Antisense strand to SEQ ID NO: 2333878
uguuucaaacuccaggcua

SEQ ID NO: 2333880 - RNA, 19 nt, Artificial Sequence
  Description of Artificial Sequence: Synthetic oligonucleotide
  Sense strand starting at position 1701 of SEQ ID NO: 1885327
uuuauuguacucgaagauc

SEQ ID NO: 2333881 - RNA, 19 nt, Artificial Sequence
  Description of Artificial Sequence: Synthetic oligonucleotide
  Antisense strand to SEQ ID NO: 2333880
gaucuucgaguacaauaaa

SEQ ID NO: 2333882 - RNA, 19 nt, Artificial Sequence
  Description of Artificial Sequence: Synthetic oligonucleotide
  Sense strand starting at position 1795 of SEQ ID NO: 1885327
ugacuugauuuccauuugu

SEQ ID NO: 2333883 - RNA, 19 nt, Artificial Sequence
  Description of Artificial Sequence: Synthetic oligonucleotide
  Antisense strand to SEQ ID NO: 2333882
acaaauggaaaucaaguca

SEQ ID NO: 2333884 - RNA, 19 nt, Artificial Sequence
  Description of Artificial Sequence: Synthetic oligonucleotide
  Sense strand starting at position 1829 of SEQ ID NO: 1885327
aaugaagacugugaugagu

SEQ ID NO: 2333885 - RNA, 19 nt, Artificial Sequence
  Description of Artificial Sequence: Synthetic oligonucleotide
  Antisense strand to SEQ ID NO: 2333884
acucaucacagucuucauu

SEQ ID NO: 2333886 - RNA, 19 nt, Artificial Sequence
  Description of Artificial Sequence: Synthetic oligonucleotide
  Sense strand starting at position 1835 of SEQ ID NO: 1885327
gacugugaugaguguuugu

SEQ ID NO: 2333887 - RNA, 19 nt, Artificial Sequence
  Description of Artificial Sequence: Synthetic oligonucleotide
  Antisense strand to SEQ ID NO: 2333886
acaaacacucaucacaguc

SEQ ID NO: 2333888 - RNA, 19 nt, Artificial Sequence
  Description of Artificial Sequence: Synthetic oligonucleotide
  Sense strand starting at position 1838 of SEQ ID NO: 1885327
ugugaugaguguuuguuua

SEQ ID NO: 2333889 - RNA, 19 nt, Artificial Sequence
  Description of Artificial Sequence: Synthetic oligonucleotide
  Antisense strand to SEQ ID NO: 2333888
uaaacaaacacucaucaca

SEQ ID NO: 2333890 - RNA, 19 nt, Artificial Sequence
  Description of Artificial Sequence: Synthetic oligonucleotide
  Sense strand starting at position 1840 of SEQ ID NO: 1885327
ugaugaguguuuguuuaau

SEQ ID NO: 2333891 - RNA, 19 nt, Artificial Sequence
  Description of Artificial Sequence: Synthetic oligonucleotide
  Antisense strand to SEQ ID NO: 2333890
auuaaacaaacacucauca

SEQ ID NO: 2333892 - RNA, 19 nt, Artificial Sequence
  Description of Artificial Sequence: Synthetic oligonucleotide
  Sense strand starting at position 3702 of SEQ ID NO: 1885327
gguacuaaauucuuguagu

SEQ ID NO: 2333893 - RNA, 19 nt, Artificial Sequence
  Description of Artificial Sequence: Synthetic oligonucleotide
  Antisense strand to SEQ ID NO: 2333892
acuacaagaauuuaguacc

SEQ ID NO: 2333894 - RNA, 19 nt, Artificial Sequence
  Description of Artificial Sequence: Synthetic oligonucleotide
  Sense strand starting at position 3757 of SEQ ID NO: 1885327
gacugugaaagguggagau

SEQ ID NO: 2333895 - RNA, 19 nt, Artificial Sequence
  Description of Artificial Sequence: Synthetic oligonucleotide
  Antisense strand to SEQ ID NO: 2333894
aucuccaccuuucacaguc

SEQ ID NO: 2333896 - RNA, 19 nt, Artificial Sequence
  Description of Artificial Sequence: Synthetic oligonucleotide
  Sense strand starting at position 3760 of SEQ ID NO: 1885327
ugugaaagguggagaugaa

SEQ ID NO: 2333897 - RNA, 19 nt, Artificial Sequence
  Description of Artificial Sequence: Synthetic oligonucleotide
  Antisense strand to SEQ ID NO: 2333896
uucaucuccaccuuucaca

SEQ ID NO: 2333898 - RNA, 19 nt, Artificial Sequence
  Description of Artificial Sequence: Synthetic oligonucleotide
  Sense strand starting at position 3817 of SEQ ID NO: 1885327
ggcuguguggaagagauga

SEQ ID NO: 2333899 - RNA, 19 nt, Artificial Sequence
  Description of Artificial Sequence: Synthetic oligonucleotide
  Antisense strand to SEQ ID NO: 2333898
ucaucucuuccacacagcc

SEQ ID NO: 2333900 - RNA, 19 nt, Artificial Sequence
  Description of Artificial Sequence: Synthetic oligonucleotide
  Sense strand starting at position 3919 of SEQ ID NO: 1885327
ucaacuaagaguggugauu

SEQ ID NO: 2333901 - RNA, 19 nt, Artificial Sequence
  Description of Artificial Sequence: Synthetic oligonucleotide
  Antisense strand to SEQ ID NO: 2333900
aaucaccacucuuaguuga

SEQ ID NO: 2333902 - RNA, 19 nt, Artificial Sequence
  Description of Artificial Sequence: Synthetic oligonucleotide
  Sense strand starting at position 3921 of SEQ ID NO: 1885327
aacuaagaguggugauuua

SEQ ID NO: 2333903 - RNA, 19 nt, Artificial Sequence
  Description of Artificial Sequence: Synthetic oligonucleotide
  Antisense strand to SEQ ID NO: 2333902
uaaaucaccacucuuaguu

SEQ ID NO: 2333904 - RNA, 19 nt, Artificial Sequence
  Description of Artificial Sequence: Synthetic oligonucleotide
  Sense strand starting at position 111 of SEQ ID NO: 1885328
guggcugaacucgauucuu

SEQ ID NO: 2333905 - RNA, 19 nt, Artificial Sequence
  Description of Artificial Sequence: Synthetic oligonucleotide
  Antisense strand to SEQ ID NO: 2333904
aagaaucgaguucagccac

SEQ ID NO: 2333906 - RNA, 19 nt, Artificial Sequence
  Description of Artificial Sequence: Synthetic oligonucleotide
  Sense strand starting at position 262 of SEQ ID NO: 1885328
uaggguacaccuugaggau

SEQ ID NO: 2333907 - RNA, 19 nt, Artificial Sequence
  Description of Artificial Sequence: Synthetic oligonucleotide
  Antisense strand to SEQ ID NO: 2333906
auccucaagguguacccua

SEQ ID NO: 2333908 - RNA, 19 nt, Artificial Sequence
  Description of Artificial Sequence: Synthetic oligonucleotide
  Sense strand starting at position 291 of SEQ ID NO: 1885328
cacuguagguauccaagua

SEQ ID NO: 2333909 - RNA, 19 nt, Artificial Sequence
  Description of Artificial Sequence: Synthetic oligonucleotide
  Antisense strand to SEQ ID NO: 2333908
uacuuggauaccuacagug

SEQ ID NO: 2333910 - RNA, 19 nt, Artificial Sequence
  Description of Artificial Sequence: Synthetic oligonucleotide
  Sense strand starting at position 318 of SEQ ID NO: 1885328
uccagugaauaaguaugaa

SEQ ID NO: 2333911 - RNA, 19 nt, Artificial Sequence
  Description of Artificial Sequence: Synthetic oligonucleotide
  Antisense strand to SEQ ID NO: 2333910
uucauacuuauucacugga

SEQ ID NO: 2333912 - RNA, 19 nt, Artificial Sequence
  Description of Artificial Sequence: Synthetic oligonucleotide
  Sense strand starting at position 345 of SEQ ID NO: 1885328
ggauauuguuaaguaugaa

SEQ ID NO: 2333913 - RNA, 19 nt, Artificial Sequence
  Description of Artificial Sequence: Synthetic oligonucleotide
  Antisense strand to SEQ ID NO: 2333912
uucauacuuaacaauaucc

SEQ ID NO: 2333914 - RNA, 19 nt, Artificial Sequence
  Description of Artificial Sequence: Synthetic oligonucleotide
  Sense strand starting at position 695 of SEQ ID NO: 1885328
gacauugaggccugaagau

SEQ ID NO: 2333915 - RNA, 19 nt, Artificial Sequence
  Description of Artificial Sequence: Synthetic oligonucleotide
  Antisense strand to SEQ ID NO: 2333914
aucuucaggccucaauguc

SEQ ID NO: 2333916 - RNA, 19 nt, Artificial Sequence
  Description of Artificial Sequence: Synthetic oligonucleotide
  Sense strand starting at position 734 of SEQ ID NO: 1885328
aggucacagcagugaguua

SEQ ID NO: 2333917 - RNA, 19 nt, Artificial Sequence
  Description of Artificial Sequence: Synthetic oligonucleotide
  Antisense strand to SEQ ID NO: 2333916
uaacucacugcugugaccu

SEQ ID NO: 2333918 - RNA, 19 nt, Artificial Sequence
  Description of Artificial Sequence: Synthetic oligonucleotide
  Sense strand starting at position 735 of SEQ ID NO: 1885328
ggucacagcagugaguuau

SEQ ID NO: 2333919 - RNA, 19 nt, Artificial Sequence
  Description of Artificial Sequence: Synthetic oligonucleotide
  Antisense strand to SEQ ID NO: 2333918
auaacucacugcugugacc

SEQ ID NO: 2333920 - RNA, 19 nt, Artificial Sequence
  Description of Artificial Sequence: Synthetic oligonucleotide
  Sense strand starting at position 739 of SEQ ID NO: 1885328
acagcagugaguuaugauc

SEQ ID NO: 2333921 - RNA, 19 nt, Artificial Sequence
  Description of Artificial Sequence: Synthetic oligonucleotide
  Antisense strand to SEQ ID NO: 2333920
gaucauaacucacugcugu

SEQ ID NO: 2333922 - RNA, 19 nt, Artificial Sequence
  Description of Artificial Sequence: Synthetic oligonucleotide
  Sense strand starting at position 813 of SEQ ID NO: 1885328
auuaaucuuggugacuuua

SEQ ID NO: 2333923 - RNA, 19 nt, Artificial Sequence
  Description of Artificial Sequence: Synthetic oligonucleotide
  Antisense strand to SEQ ID NO: 2333922
uaaagucaccaagauuaau

SEQ ID NO: 2333924 - RNA, 19 nt, Artificial Sequence
  Description of Artificial Sequence: Synthetic oligonucleotide
  Sense strand starting at position 894 of SEQ ID NO: 1885328
augauaguaaaguguagaa

SEQ ID NO: 2333925 - RNA, 19 nt, Artificial Sequence
  Description of Artificial Sequence: Synthetic oligonucleotide
  Antisense strand to SEQ ID NO: 2333924
uucuacacuuuacuaucau

SEQ ID NO: 2333926 - RNA, 19 nt, Artificial Sequence
  Description of Artificial Sequence: Synthetic oligonucleotide
  Sense strand starting at position 1055 of SEQ ID NO: 1885328
ggaauacugauaugcuuag

SEQ ID NO: 2333927 - RNA, 19 nt, Artificial Sequence
  Description of Artificial Sequence: Synthetic oligonucleotide
  Antisense strand to SEQ ID NO: 2333926
cuaagcauaucaguauucc

SEQ ID NO: 2333928 - RNA, 19 nt, Artificial Sequence
  Description of Artificial Sequence: Synthetic oligonucleotide
  Sense strand starting at position 1114 of SEQ ID NO: 1885328
ccucuuuaugguuaccauu

SEQ ID NO: 2333929 - RNA, 19 nt, Artificial Sequence
  Description of Artificial Sequence: Synthetic oligonucleotide
  Antisense strand to SEQ ID NO: 2333928
aaugguaaccauaaagagg

SEQ ID NO: 2333930 - RNA, 19 nt, Artificial Sequence
  Description of Artificial Sequence: Synthetic oligonucleotide
  Sense strand starting at position 1418 of SEQ ID NO: 1885328
acuccaaccugugcgauaa

SEQ ID NO: 2333931 - RNA, 19 nt, Artificial Sequence
  Description of Artificial Sequence: Synthetic oligonucleotide
  Antisense strand to SEQ ID NO: 2333930
uuaucgcacagguuggagu

SEQ ID NO: 2333932 - RNA, 19 nt, Artificial Sequence
  Description of Artificial Sequence: Synthetic oligonucleotide
  Sense strand starting at position 1419 of SEQ ID NO: 1885328
cuccaaccugugcgauaaa

SEQ ID NO: 2333933 - RNA, 19 nt, Artificial Sequence
  Description of Artificial Sequence: Synthetic oligonucleotide
  Antisense strand to SEQ ID NO: 2333932
uuuaucgcacagguuggag

SEQ ID NO: 2333934 - RNA, 19 nt, Artificial Sequence
  Description of Artificial Sequence: Synthetic oligonucleotide
  Sense strand starting at position 1422 of SEQ ID NO: 1885328
caaccugugcgauaaagua

SEQ ID NO: 2333935 - RNA, 19 nt, Artificial Sequence
  Description of Artificial Sequence: Synthetic oligonucleotide
  Antisense strand to SEQ ID NO: 2333934
uacuuuaucgcacagguug

SEQ ID NO: 2333936 - RNA, 19 nt, Artificial Sequence
  Description of Artificial Sequence: Synthetic oligonucleotide
  Sense strand starting at position 1515 of SEQ ID NO: 1885328
ccagaaagcugugauuuag

SEQ ID NO: 2333937 - RNA, 19 nt, Artificial Sequence
  Description of Artificial Sequence: Synthetic oligonucleotide
  Antisense strand to SEQ ID NO: 2333936
cuaaaucacagcuuucugg

SEQ ID NO: 2333938 - RNA, 19 nt, Artificial Sequence
  Description of Artificial Sequence: Synthetic oligonucleotide
  Sense strand starting at position 1557 of SEQ ID NO: 1885328
uaaggaguuucugcuaucu

SEQ ID NO: 2333939 - RNA, 19 nt, Artificial Sequence
  Description of Artificial Sequence: Synthetic oligonucleotide
  Antisense strand to SEQ ID NO: 2333938
agauagcagaaacuccuua

SEQ ID NO: 2333940 - RNA, 19 nt, Artificial Sequence
  Description of Artificial Sequence: Synthetic oligonucleotide
  Sense strand starting at position 1722 of SEQ ID NO: 1885328
ugauguucucauuagauuc

SEQ ID NO: 2333941 - RNA, 19 nt, Artificial Sequence
  Description of Artificial Sequence: Synthetic oligonucleotide
  Antisense strand to SEQ ID NO: 2333940
gaaucuaaugagaacauca

SEQ ID NO: 2333942 - RNA, 19 nt, Artificial Sequence
  Description of Artificial Sequence: Synthetic oligonucleotide
  Sense strand starting at position 2057 of SEQ ID NO: 1885328
aggaguuguaacugaugcu

SEQ ID NO: 2333943 - RNA, 19 nt, Artificial Sequence
  Description of Artificial Sequence: Synthetic oligonucleotide
  Antisense strand to SEQ ID NO: 2333942
agcaucaguuacaacuccu

SEQ ID NO: 2333944 - RNA, 19 nt, Artificial Sequence
  Description of Artificial Sequence: Synthetic oligonucleotide
  Sense strand starting at position 2064 of SEQ ID NO: 1885328
guaacugaugcugacaagu

SEQ ID NO: 2333945 - RNA, 19 nt, Artificial Sequence
  Description of Artificial Sequence: Synthetic oligonucleotide
  Antisense strand to SEQ ID NO: 2333944
acuugucagcaucaguuac

SEQ ID NO: 2333946 - RNA, 19 nt, Artificial Sequence
  Description of Artificial Sequence: Synthetic oligonucleotide
  Sense strand starting at position 2250 of SEQ ID NO: 1885328
ucaauaccaugauugcaga

SEQ ID NO: 2333947 - RNA, 19 nt, Artificial Sequence
  Description of Artificial Sequence: Synthetic oligonucleotide
  Antisense strand to SEQ ID NO: 2333946
ucugcaaucaugguauuga

SEQ ID NO: 2333948 - RNA, 19 nt, Artificial Sequence
  Description of Artificial Sequence: Synthetic oligonucleotide
  Sense strand starting at position 2402 of SEQ ID NO: 1885328
ccagaagugugagcaauac

SEQ ID NO: 2333949 - RNA, 19 nt, Artificial Sequence
  Description of Artificial Sequence: Synthetic oligonucleotide
  Antisense strand to SEQ ID NO: 2333948
guauugcucacacuucugg

SEQ ID NO: 2333950 - RNA, 19 nt, Artificial Sequence
  Description of Artificial Sequence: Synthetic oligonucleotide
  Sense strand starting at position 2532 of SEQ ID NO: 1885328
cuuuguccucuuggguaaa

SEQ ID NO: 2333951 - RNA, 19 nt, Artificial Sequence
  Description of Artificial Sequence: Synthetic oligonucleotide
  Antisense strand to SEQ ID NO: 2333950
uuuacccaagaggacaaag

SEQ ID NO: 2333952 - RNA, 19 nt, Artificial Sequence
  Description of Artificial Sequence: Synthetic oligonucleotide
  Sense strand starting at position 2550 of SEQ ID NO: 1885328
aaagucuuugcugauaaga

SEQ ID NO: 2333953 - RNA, 19 nt, Artificial Sequence
  Description of Artificial Sequence: Synthetic oligonucleotide
  Antisense strand to SEQ ID NO: 2333952
ucuuaucagcaaagacuuu

SEQ ID NO: 2333954 - RNA, 19 nt, Artificial Sequence
  Description of Artificial Sequence: Synthetic oligonucleotide
  Sense strand starting at position 2583 of SEQ ID NO: 1885328
gagacugagugccuugaaa

SEQ ID NO: 2333955 - RNA, 19 nt, Artificial Sequence
  Description of Artificial Sequence: Synthetic oligonucleotide
  Antisense strand to SEQ ID NO: 2333954
uuucaaggcacucagucuc

SEQ ID NO: 2333956 - RNA, 19 nt, Artificial Sequence
  Description of Artificial Sequence: Synthetic oligonucleotide
  Sense strand starting at position 2644 of SEQ ID NO: 1885328
gaaagauccucagagaaag

SEQ ID NO: 2333957 - RNA, 19 nt, Artificial Sequence
  Description of Artificial Sequence: Synthetic oligonucleotide
  Antisense strand to SEQ ID NO: 2333956
cuuucucugaggaucuuuc

SEQ ID NO: 2333958 - RNA, 19 nt, Artificial Sequence
  Description of Artificial Sequence: Synthetic oligonucleotide
  Sense strand starting at position 2724 of SEQ ID NO: 1885328
agcaacuaaucugcaguaa

SEQ ID NO: 2333959 - RNA, 19 nt, Artificial Sequence
  Description of Artificial Sequence: Synthetic oligonucleotide
  Antisense strand to SEQ ID NO: 2333958
uuacugcagauuaguugcu

SEQ ID NO: 2333960 - RNA, 19 nt, Artificial Sequence
  Description of Artificial Sequence: Synthetic oligonucleotide
  Sense strand starting at position 3002 of SEQ ID NO: 1885328
uauuauauugugggagaua

SEQ ID NO: 2333961 - RNA, 19 nt, Artificial Sequence
  Description of Artificial Sequence: Synthetic oligonucleotide
  Antisense strand to SEQ ID NO: 2333960
uaucucccacaauauaaua

SEQ ID NO: 2333962 - RNA, 19 nt, Artificial Sequence
  Description of Artificial Sequence: Synthetic oligonucleotide
  Sense strand starting at position 3033 of SEQ ID NO: 1885328
auuauuugucucuguuuac

SEQ ID NO: 2333963 - RNA, 19 nt, Artificial Sequence
  Description of Artificial Sequence: Synthetic oligonucleotide
  Antisense strand to SEQ ID NO: 2333962
guaaacagagacaaauaau

SEQ ID NO: 2333964 - RNA, 19 nt, Artificial Sequence
  Description of Artificial Sequence: Synthetic oligonucleotide
  Sense strand starting at position 3074 of SEQ ID NO: 1885328
uguaguagguccucaaauc

SEQ ID NO: 2333965 - RNA, 19 nt, Artificial Sequence
  Description of Artificial Sequence: Synthetic oligonucleotide
  Antisense strand to SEQ ID NO: 2333964
gauuugaggaccuacuaca

SEQ ID NO: 2333966 - RNA, 19 nt, Artificial Sequence
  Description of Artificial Sequence: Synthetic oligonucleotide
  Sense strand starting at position 3153 of SEQ ID NO: 1885328
acucuuugaugcucaagua

SEQ ID NO: 2333967 - RNA, 19 nt, Artificial Sequence
  Description of Artificial Sequence: Synthetic oligonucleotide
  Antisense strand to SEQ ID NO: 2333966
uacuugagcaucaaagagu

SEQ ID NO: 2333968 - RNA, 19 nt, Artificial Sequence
  Description of Artificial Sequence: Synthetic oligonucleotide
  Sense strand starting at position 3154 of SEQ ID NO: 1885328
cucuuugaugcucaaguau

SEQ ID NO: 2333969 - RNA, 19 nt, Artificial Sequence
  Description of Artificial Sequence: Synthetic oligonucleotide
  Antisense strand to SEQ ID NO: 2333968
auacuugagcaucaaagag

SEQ ID NO: 2333970 - RNA, 19 nt, Artificial Sequence
  Description of Artificial Sequence: Synthetic oligonucleotide
  Sense strand starting at position 3193 of SEQ ID NO: 1885328
gcuugaaauaauggaggca

SEQ ID NO: 2333971 - RNA, 19 nt, Artificial Sequence
  Description of Artificial Sequence: Synthetic oligonucleotide
  Antisense strand to SEQ ID NO: 2333970
ugccuccauuauuucaagc

SEQ ID NO: 2333972 - RNA, 19 nt, Artificial Sequence
  Description of Artificial Sequence: Synthetic oligonucleotide
  Sense strand starting at position 3325 of SEQ ID NO: 1885328
augauaauacugcaaguau

SEQ ID NO: 2333973 - RNA, 19 nt, Artificial Sequence
  Description of Artificial Sequence: Synthetic oligonucleotide
  Antisense strand to SEQ ID NO: 2333972
auacuugcaguauuaucau

SEQ ID NO: 2333974 - RNA, 19 nt, Artificial Sequence
  Description of Artificial Sequence: Synthetic oligonucleotide
  Sense strand starting at position 3336 of SEQ ID NO: 1885328
gcaaguaucaggcaugaau

SEQ ID NO: 2333975 - RNA, 19 nt, Artificial Sequence
  Description of Artificial Sequence: Synthetic oligonucleotide
  Antisense strand to SEQ ID NO: 2333974
auucaugccugauacuugc

SEQ ID NO: 2333976 - RNA, 19 nt, Artificial Sequence
  Description of Artificial Sequence: Synthetic oligonucleotide
  Sense strand starting at position 3338 of SEQ ID NO: 1885328
aaguaucaggcaugaauua

SEQ ID NO: 2333977 - RNA, 19 nt, Artificial Sequence
  Description of Artificial Sequence: Synthetic oligonucleotide
  Antisense strand to SEQ ID NO: 2333976
uaauucaugccugauacuu

SEQ ID NO: 2333978 - RNA, 19 nt, Artificial Sequence
  Description of Artificial Sequence: Synthetic oligonucleotide
  Sense strand starting at position 3351 of SEQ ID NO: 1885328
gaauuaauguucuuuguag

SEQ ID NO: 2333979 - RNA, 19 nt, Artificial Sequence
  Description of Artificial Sequence: Synthetic oligonucleotide
  Antisense strand to SEQ ID NO: 2333978
cuacaaagaacauuaauuc

SEQ ID NO: 2333980 - RNA, 19 nt, Artificial Sequence
  Description of Artificial Sequence: Synthetic oligonucleotide
  Sense strand starting at position 3412 of SEQ ID NO: 1885328
cuuuccuuacugugguaaa

SEQ ID NO: 2333981 - RNA, 19 nt, Artificial Sequence
  Description of Artificial Sequence: Synthetic oligonucleotide
  Antisense strand to SEQ ID NO: 2333980
uuuaccacaguaaggaaag

SEQ ID NO: 2333982 - RNA, 19 nt, Artificial Sequence
  Description of Artificial Sequence: Synthetic oligonucleotide
  Sense strand starting at position 3621 of SEQ ID NO: 1885328
gguuucugccucuaugaau

SEQ ID NO: 2333983 - RNA, 19 nt, Artificial Sequence
  Description of Artificial Sequence: Synthetic oligonucleotide
  Antisense strand to SEQ ID NO: 2333982
auucauagaggcagaaacc

SEQ ID NO: 2333984 - RNA, 19 nt, Artificial Sequence
  Description of Artificial Sequence: Synthetic oligonucleotide
  Sense strand starting at position 98 of SEQ ID NO: 1885329
guuuacaucccuuauuggu

SEQ ID NO: 2333985 - RNA, 19 nt, Artificial Sequence
  Description of Artificial Sequence: Synthetic oligonucleotide
  Antisense strand to SEQ ID NO: 2333984
accaauaagggauguaaac

SEQ ID NO: 2333986 - RNA, 19 nt, Artificial Sequence
  Description of Artificial Sequence: Synthetic oligonucleotide
  Sense strand starting at position 100 of SEQ ID NO: 1885329
uuacaucccuuauugguau

SEQ ID NO: 2333987 - RNA, 19 nt, Artificial Sequence
  Description of Artificial Sequence: Synthetic oligonucleotide
  Antisense strand to SEQ ID NO: 2333986
auaccaauaagggauguaa

SEQ ID NO: 2333988 - RNA, 19 nt, Artificial Sequence
  Description of Artificial Sequence: Synthetic oligonucleotide
  Sense strand starting at position 106 of SEQ ID NO: 1885329
cccuuauugguaugaauag

SEQ ID NO: 2333989 - RNA, 19 nt, Artificial Sequence
  Description of Artificial Sequence: Synthetic oligonucleotide
  Antisense strand to SEQ ID NO: 2333988
cuauucauaccaauaaggg

SEQ ID NO: 2333990 - RNA, 19 nt, Artificial Sequence
  Description of Artificial Sequence: Synthetic oligonucleotide
  Sense strand starting at position 179 of SEQ ID NO: 1885329
gaauaaagacuuugguggu

SEQ ID NO: 2333991 - RNA, 19 nt, Artificial Sequence
  Description of Artificial Sequence: Synthetic oligonucleotide
  Antisense strand to SEQ ID NO: 2333990
accaccaaagucuuuauuc

SEQ ID NO: 2333992 - RNA, 19 nt, Artificial Sequence
  Description of Artificial Sequence: Synthetic oligonucleotide
  Sense strand starting at position 430 of SEQ ID NO: 1885329
agauuagauuucugaggag

SEQ ID NO: 2333993 - RNA, 19 nt, Artificial Sequence
  Description of Artificial Sequence: Synthetic oligonucleotide
  Antisense strand to SEQ ID NO: 2333992
cuccucagaaaucuaaucu

SEQ ID NO: 2333994 - RNA, 19 nt, Artificial Sequence
  Description of Artificial Sequence: Synthetic oligonucleotide
  Sense strand starting at position 433 of SEQ ID NO: 1885329
uuagauuucugaggagauu

SEQ ID NO: 2333995 - RNA, 19 nt, Artificial Sequence
  Description of Artificial Sequence: Synthetic oligonucleotide
  Antisense strand to SEQ ID NO: 2333994
aaucuccucagaaaucuaa

SEQ ID NO: 2333996 - RNA, 19 nt, Artificial Sequence
  Description of Artificial Sequence: Synthetic oligonucleotide
  Sense strand starting at position 470 of SEQ ID NO: 1885329
ugcaaagagaucuggcauu

SEQ ID NO: 2333997 - RNA, 19 nt, Artificial Sequence
  Description of Artificial Sequence: Synthetic oligonucleotide
  Antisense strand to SEQ ID NO: 2333996
aaugccagaucucuuugca

SEQ ID NO: 2333998 - RNA, 19 nt, Artificial Sequence
  Description of Artificial Sequence: Synthetic oligonucleotide
  Sense strand starting at position 661 of SEQ ID NO: 1885329
ggaggcaagaucugguauu

SEQ ID NO: 2333999 - RNA, 19 nt, Artificial Sequence
  Description of Artificial Sequence: Synthetic oligonucleotide
  Antisense strand to SEQ ID NO: 2333998
aauaccagaucuugccucc

SEQ ID NO: 2334000 - RNA, 19 nt, Artificial Sequence
  Description of Artificial Sequence: Synthetic oligonucleotide
  Sense strand starting at position 888 of SEQ ID NO: 1885329
ugaggaaauuucuaccaaa

SEQ ID NO: 2334001 - RNA, 19 nt, Artificial Sequence
  Description of Artificial Sequence: Synthetic oligonucleotide
  Antisense strand to SEQ ID NO: 2334000
uuugguagaaauuuccuca

SEQ ID NO: 2334002 - RNA, 19 nt, Artificial Sequence
  Description of Artificial Sequence: Synthetic oligonucleotide
  Sense strand starting at position 949 of SEQ ID NO: 1885329
gguuuaagagacuguaucu

SEQ ID NO: 2334003 - RNA, 19 nt, Artificial Sequence
  Description of Artificial Sequence: Synthetic oligonucleotide
  Antisense strand to SEQ ID NO: 2334002
agauacagucucuuaaacc

SEQ ID NO: 2334004 - RNA, 19 nt, Artificial Sequence
  Description of Artificial Sequence: Synthetic oligonucleotide
  Sense strand starting at position 1025 of SEQ ID NO: 1885329
uucuuuaaaccuggaguaa

SEQ ID NO: 2334005 - RNA, 19 nt, Artificial Sequence
  Description of Artificial Sequence: Synthetic oligonucleotide
  Antisense strand to SEQ ID NO: 2334004
uuacuccagguuuaaagaa

SEQ ID NO: 2334006 - RNA, 19 nt, Artificial Sequence
  Description of Artificial Sequence: Synthetic oligonucleotide
  Sense strand starting at position 1229 of SEQ ID NO: 1885329
agucuauucuaacuuggga

SEQ ID NO: 2334007 - RNA, 19 nt, Artificial Sequence
  Description of Artificial Sequence: Synthetic oligonucleotide
  Antisense strand to SEQ ID NO: 2334006
ucccaaguuagaauagacu

SEQ ID NO: 2334008 - RNA, 19 nt, Artificial Sequence
  Description of Artificial Sequence: Synthetic oligonucleotide
  Sense strand starting at position 1586 of SEQ ID NO: 1885329
uucugauagcuauauguua

SEQ ID NO: 2334009 - RNA, 19 nt, Artificial Sequence
  Description of Artificial Sequence: Synthetic oligonucleotide
  Antisense strand to SEQ ID NO: 2334008
uaacauauagcuaucagaa

SEQ ID NO: 2334010 - RNA, 19 nt, Artificial Sequence
  Description of Artificial Sequence: Synthetic oligonucleotide
  Sense strand starting at position 2304 of SEQ ID NO: 1885329
gucugcacugcguuuauga

SEQ ID NO: 2334011 - RNA, 19 nt, Artificial Sequence
  Description of Artificial Sequence: Synthetic oligonucleotide
  Antisense strand to SEQ ID NO: 2334010
ucauaaacgcagugcagac

SEQ ID NO: 2334012 - RNA, 19 nt, Artificial Sequence
  Description of Artificial Sequence: Synthetic oligonucleotide
  Sense strand starting at position 2806 of SEQ ID NO: 1885329
ugaugucaugaaggugcaa

SEQ ID NO: 2334013 - RNA, 19 nt, Artificial Sequence
  Description of Artificial Sequence: Synthetic oligonucleotide
  Antisense strand to SEQ ID NO: 2334012
uugcaccuucaugacauca

SEQ ID NO: 2334014 - RNA, 19 nt, Artificial Sequence
  Description of Artificial Sequence: Synthetic oligonucleotide
  Sense strand starting at position 2850 of SEQ ID NO: 1885329
uuacaacacuguguugauu

SEQ ID NO: 2334015 - RNA, 19 nt, Artificial Sequence
  Description of Artificial Sequence: Synthetic oligonucleotide
  Antisense strand to SEQ ID NO: 2334014
aaucaacacaguguuguaa

SEQ ID NO: 2334016 - RNA, 19 nt, Artificial Sequence
  Description of Artificial Sequence: Synthetic oligonucleotide
  Sense strand starting at position 2865 of SEQ ID NO: 1885329
gauuguaguagugggagaa

SEQ ID NO: 2334017 - RNA, 19 nt, Artificial Sequence
  Description of Artificial Sequence: Synthetic oligonucleotide
  Antisense strand to SEQ ID NO: 2334016
uucucccacuacuacaauc

SEQ ID NO: 2334018 - RNA, 19 nt, Artificial Sequence
  Description of Artificial Sequence: Synthetic oligonucleotide
  Sense strand starting at position 2866 of SEQ ID NO: 1885329
auuguaguagugggagaaa

SEQ ID NO: 2334019 - RNA, 19 nt, Artificial Sequence
  Description of Artificial Sequence: Synthetic oligonucleotide
  Antisense strand to SEQ ID NO: 2334018
uuucucccacuacuacaau

SEQ ID NO: 2334020 - RNA, 19 nt, Artificial Sequence
  Description of Artificial Sequence: Synthetic oligonucleotide
  Sense strand starting at position 2893 of SEQ ID NO: 1885329
uucugauuaguuuaucaga

SEQ ID NO: 2334021 - RNA, 19 nt, Artificial Sequence
  Description of Artificial Sequence: Synthetic oligonucleotide
  Antisense strand to SEQ ID NO: 2334020
ucugauaaacuaaucagaa

SEQ ID NO: 2334022 - RNA, 19 nt, Artificial Sequence
  Description of Artificial Sequence: Synthetic oligonucleotide
  Sense strand starting at position 2895 of SEQ ID NO: 1885329
cugauuaguuuaucagaua

SEQ ID NO: 2334023 - RNA, 19 nt, Artificial Sequence
  Description of Artificial Sequence: Synthetic oligonucleotide
  Antisense strand to SEQ ID NO: 2334022
uaucugauaaacuaaucag

SEQ ID NO: 2334024 - RNA, 19 nt, Artificial Sequence
  Description of Artificial Sequence: Synthetic oligonucleotide
  Sense strand starting at position 2917 of SEQ ID NO: 1885329
cucauuauauaugugguga

SEQ ID NO: 2334025 - RNA, 19 nt, Artificial Sequence
  Description of Artificial Sequence: Synthetic oligonucleotide
  Antisense strand to SEQ ID NO: 2334024
ucaccacauauauaaugag

SEQ ID NO: 2334026 - RNA, 19 nt, Artificial Sequence
  Description of Artificial Sequence: Synthetic oligonucleotide
  Sense strand starting at position 2918 of SEQ ID NO: 1885329
ucauuauauauguggugag

SEQ ID NO: 2334027 - RNA, 19 nt, Artificial Sequence
  Description of Artificial Sequence: Synthetic oligonucleotide
  Antisense strand to SEQ ID NO: 2334026
cucaccacauauauaauga

SEQ ID NO: 2334028 - RNA, 19 nt, Artificial Sequence
  Description of Artificial Sequence: Synthetic oligonucleotide
  Sense strand starting at position 2922 of SEQ ID NO: 1885329
uauauauguggugagaggu

SEQ ID NO: 2334029 - RNA, 19 nt, Artificial Sequence
  Description of Artificial Sequence: Synthetic oligonucleotide
  Antisense strand to SEQ ID NO: 2334028
accucucaccacauauaua

SEQ ID NO: 2334030 - RNA, 19 nt, Artificial Sequence
  Description of Artificial Sequence: Synthetic oligonucleotide
  Sense strand starting at position 2928 of SEQ ID NO: 1885329
uguggugagagguaugagu

SEQ ID NO: 2334031 - RNA, 19 nt, Artificial Sequence
  Description of Artificial Sequence: Synthetic oligonucleotide
  Antisense strand to SEQ ID NO: 2334030
acucauaccucucaccaca

SEQ ID NO: 2334032 - RNA, 19 nt, Artificial Sequence
  Description of Artificial Sequence: Synthetic oligonucleotide
  Sense strand starting at position 3043 of SEQ ID NO: 1885329
auucuaugguuccuuuaag

SEQ ID NO: 2334033 - RNA, 19 nt, Artificial Sequence
  Description of Artificial Sequence: Synthetic oligonucleotide
  Antisense strand to SEQ ID NO: 2334032
cuuaaaggaaccauagaau

SEQ ID NO: 2334034 - RNA, 19 nt, Artificial Sequence
  Description of Artificial Sequence: Synthetic oligonucleotide
  Sense strand starting at position 3142 of SEQ ID NO: 1885329
auuagugucaagucguguu

SEQ ID NO: 2334035 - RNA, 19 nt, Artificial Sequence
  Description of Artificial Sequence: Synthetic oligonucleotide
  Antisense strand to SEQ ID NO: 2334034
aacacgacuugacacuaau

SEQ ID NO: 2334036 - RNA, 19 nt, Artificial Sequence
  Description of Artificial Sequence: Synthetic oligonucleotide
  Sense strand starting at position 3146 of SEQ ID NO: 1885329
gugucaagucguguuagcu

SEQ ID NO: 2334037 - RNA, 19 nt, Artificial Sequence
  Description of Artificial Sequence: Synthetic oligonucleotide
  Antisense strand to SEQ ID NO: 2334036
agcuaacacgacuugacac

SEQ ID NO: 2334038 - RNA, 19 nt, Artificial Sequence
  Description of Artificial Sequence: Synthetic oligonucleotide
  Sense strand starting at position 3147 of SEQ ID NO: 1885329
ugucaagucguguuagcua

SEQ ID NO: 2334039 - RNA, 19 nt, Artificial Sequence
  Description of Artificial Sequence: Synthetic oligonucleotide
  Antisense strand to SEQ ID NO: 2334038
uagcuaacacgacuugaca

SEQ ID NO: 2334040 - RNA, 19 nt, Artificial Sequence
  Description of Artificial Sequence: Synthetic oligonucleotide
  Sense strand starting at position 3276 of SEQ ID NO: 1885329
cugguucuuucuuuaauag

SEQ ID NO: 2334041 - RNA, 19 nt, Artificial Sequence
  Description of Artificial Sequence: Synthetic oligonucleotide
  Antisense strand to SEQ ID NO: 2334040
cuauuaaagaaagaaccag

SEQ ID NO: 2334042 - RNA, 19 nt, Artificial Sequence
  Description of Artificial Sequence: Synthetic oligonucleotide
  Sense strand starting at position 3351 of SEQ ID NO: 1885329
caagcuggguuucccaaua

SEQ ID NO: 2334043 - RNA, 19 nt, Artificial Sequence
  Description of Artificial Sequence: Synthetic oligonucleotide
  Antisense strand to SEQ ID NO: 2334042
uauugggaaacccagcuug

SEQ ID NO: 2334044 - RNA, 19 nt, Artificial Sequence
  Description of Artificial Sequence: Synthetic oligonucleotide
  Sense strand starting at position 3553 of SEQ ID NO: 1885329
guaguauaaguuuggauug

SEQ ID NO: 2334045 - RNA, 19 nt, Artificial Sequence
  Description of Artificial Sequence: Synthetic oligonucleotide
  Antisense strand to SEQ ID NO: 2334044
caauccaaacuuauacuac

SEQ ID NO: 2334046 - RNA, 19 nt, Artificial Sequence
  Description of Artificial Sequence: Synthetic oligonucleotide
  Sense strand starting at position 3558 of SEQ ID NO: 1885329
auaaguuuggauuggcuaa

SEQ ID NO: 2334047 - RNA, 19 nt, Artificial Sequence
  Description of Artificial Sequence: Synthetic oligonucleotide
  Antisense strand to SEQ ID NO: 2334046
uuagccaauccaaacuuau

SEQ ID NO: 2334048 - RNA, 19 nt, Artificial Sequence
  Description of Artificial Sequence: Synthetic oligonucleotide
  Sense strand starting at position 3623 of SEQ ID NO: 1885329
agaggaguuguaugcuuua

SEQ ID NO: 2334049 - RNA, 19 nt, Artificial Sequence
  Description of Artificial Sequence: Synthetic oligonucleotide
  Antisense strand to SEQ ID NO: 2334048
uaaagcauacaacuccucu

SEQ ID NO: 2334050 - RNA, 19 nt, Artificial Sequence
  Description of Artificial Sequence: Synthetic oligonucleotide
  Sense strand starting at position 3852 of SEQ ID NO: 1885329
uguacauagcuguacuaua

SEQ ID NO: 2334051 - RNA, 19 nt, Artificial Sequence
  Description of Artificial Sequence: Synthetic oligonucleotide
  Antisense strand to SEQ ID NO: 2334050
uauaguacagcuauguaca

SEQ ID NO: 2334052 - RNA, 19 nt, Artificial Sequence
  Description of Artificial Sequence: Synthetic oligonucleotide
  Sense strand starting at position 3937 of SEQ ID NO: 1885329
aagaacugauccguguaga

SEQ ID NO: 2334053 - RNA, 19 nt, Artificial Sequence
  Description of Artificial Sequence: Synthetic oligonucleotide
  Antisense strand to SEQ ID NO: 2334052
ucuacacggaucaguucuu

SEQ ID NO: 2334054 - RNA, 19 nt, Artificial Sequence
  Description of Artificial Sequence: Synthetic oligonucleotide
  Sense strand starting at position 3938 of SEQ ID NO: 1885329
agaacugauccguguagau

SEQ ID NO: 2334055 - RNA, 19 nt, Artificial Sequence
  Description of Artificial Sequence: Synthetic oligonucleotide
  Antisense strand to SEQ ID NO: 2334054
aucuacacggaucaguucu

SEQ ID NO: 2334056 - RNA, 19 nt, Artificial Sequence
  Description of Artificial Sequence: Synthetic oligonucleotide
  Sense strand starting at position 3940 of SEQ ID NO: 1885329
aacugauccguguagauca

SEQ ID NO: 2334057 - RNA, 19 nt, Artificial Sequence
  Description of Artificial Sequence: Synthetic oligonucleotide
  Antisense strand to SEQ ID NO: 2334056
ugaucuacacggaucaguu

SEQ ID NO: 2334058 - RNA, 19 nt, Artificial Sequence
  Description of Artificial Sequence: Synthetic oligonucleotide
  Sense strand starting at position 3942 of SEQ ID NO: 1885329
cugauccguguagaucauu

SEQ ID NO: 2334059 - RNA, 19 nt, Artificial Sequence
  Description of Artificial Sequence: Synthetic oligonucleotide
  Antisense strand to SEQ ID NO: 2334058
aaugaucuacacggaucag

SEQ ID NO: 2334060 - RNA, 19 nt, Artificial Sequence
  Description of Artificial Sequence: Synthetic oligonucleotide
  Sense strand starting at position 3947 of SEQ ID NO: 1885329
ccguguagaucauuuacau

SEQ ID NO: 2334061 - RNA, 19 nt, Artificial Sequence
  Description of Artificial Sequence: Synthetic oligonucleotide
  Antisense strand to SEQ ID NO: 2334060
auguaaaugaucuacacgg

SEQ ID NO: 2334062 - RNA, 19 nt, Artificial Sequence
  Description of Artificial Sequence: Synthetic oligonucleotide
  Sense strand starting at position 3951 of SEQ ID NO: 1885329
guagaucauuuacaugaaa

SEQ ID NO: 2334063 - RNA, 19 nt, Artificial Sequence
  Description of Artificial Sequence: Synthetic oligonucleotide
  Antisense strand to SEQ ID NO: 2334062
uuucauguaaaugaucuac

SEQ ID NO: 2334064 - RNA, 19 nt, Artificial Sequence
  Description of Artificial Sequence: Synthetic oligonucleotide
  Sense strand starting at position 444 of SEQ ID NO: 1885330
aggguaacaagauguggua

SEQ ID NO: 2334065 - RNA, 19 nt, Artificial Sequence
  Description of Artificial Sequence: Synthetic oligonucleotide
  Antisense strand to SEQ ID NO: 2334064
uaccacaucuuguuacccu

SEQ ID NO: 2334066 - RNA, 19 nt, Artificial Sequence
  Description of Artificial Sequence: Synthetic oligonucleotide
  Sense strand starting at position 483 of SEQ ID NO: 1885330
ggagguagauggagaucau

SEQ ID NO: 2334067 - RNA, 19 nt, Artificial Sequence
  Description of Artificial Sequence: Synthetic oligonucleotide
  Antisense strand to SEQ ID NO: 2334066
augaucuccaucuaccucc

SEQ ID NO: 2334068 - RNA, 19 nt, Artificial Sequence
  Description of Artificial Sequence: Synthetic oligonucleotide
  Sense strand starting at position 650 of SEQ ID NO: 1885330
ugaugacucagaggcacaa

SEQ ID NO: 2334069 - RNA, 19 nt, Artificial Sequence
  Description of Artificial Sequence: Synthetic oligonucleotide
  Antisense strand to SEQ ID NO: 2334068
uugugccucugagucauca

SEQ ID NO: 2334070 - RNA, 19 nt, Artificial Sequence
  Description of Artificial Sequence: Synthetic oligonucleotide
  Sense strand starting at position 662 of SEQ ID NO: 1885330
ggcacaauaucaucuggau

SEQ ID NO: 2334071 - RNA, 19 nt, Artificial Sequence
  Description of Artificial Sequence: Synthetic oligonucleotide
  Antisense strand to SEQ ID NO: 2334070
auccagaugauauugugcc

SEQ ID NO: 2334072 - RNA, 19 nt, Artificial Sequence
  Description of Artificial Sequence: Synthetic oligonucleotide
  Sense strand starting at position 707 of SEQ ID NO: 1885330
agacccaauugguuugaaa

SEQ ID NO: 2334073 - RNA, 19 nt, Artificial Sequence
  Description of Artificial Sequence: Synthetic oligonucleotide
  Antisense strand to SEQ ID NO: 2334072
uuucaaaccaauugggucu

SEQ ID NO: 2334074 - RNA, 19 nt, Artificial Sequence
  Description of Artificial Sequence: Synthetic oligonucleotide
  Sense strand starting at position 709 of SEQ ID NO: 1885330
acccaauugguuugaaaug

SEQ ID NO: 2334075 - RNA, 19 nt, Artificial Sequence
  Description of Artificial Sequence: Synthetic oligonucleotide
  Antisense strand to SEQ ID NO: 2334074
cauuucaaaccaauugggu

SEQ ID NO: 2334076 - RNA, 19 nt, Artificial Sequence
  Description of Artificial Sequence: Synthetic oligonucleotide
  Sense strand starting at position 739 of SEQ ID NO: 1885330
agguuaucucucuaagcuu

SEQ ID NO: 2334077 - RNA, 19 nt, Artificial Sequence
  Description of Artificial Sequence: Synthetic oligonucleotide
  Antisense strand to SEQ ID NO: 2334076
aagcuuagagagauaaccu

SEQ ID NO: 2334078 - RNA, 19 nt, Artificial Sequence
  Description of Artificial Sequence: Synthetic oligonucleotide
  Sense strand starting at position 801 of SEQ ID NO: 1885330
aggaauuccucauagauuu

SEQ ID NO: 2334079 - RNA, 19 nt, Artificial Sequence
  Description of Artificial Sequence: Synthetic oligonucleotide
  Antisense strand to SEQ ID NO: 2334078
aaaucuaugaggaauuccu

SEQ ID NO: 2334080 - RNA, 19 nt, Artificial Sequence
  Description of Artificial Sequence: Synthetic oligonucleotide
  Sense strand starting at position 834 of SEQ ID NO: 1885330
ugauauaaugcauguacag

SEQ ID NO: 2334081 - RNA, 19 nt, Artificial Sequence
  Description of Artificial Sequence: Synthetic oligonucleotide
  Antisense strand to SEQ ID NO: 2334080
cuguacaugcauuauauca

SEQ ID NO: 2334082 - RNA, 19 nt, Artificial Sequence
  Description of Artificial Sequence: Synthetic oligonucleotide
  Sense strand starting at position 1040 of SEQ ID NO: 1885330
cccugaauagcucaggguu

SEQ ID NO: 2334083 - RNA, 19 nt, Artificial Sequence
  Description of Artificial Sequence: Synthetic oligonucleotide
  Antisense strand to SEQ ID NO: 2334082
aacccugagcuauucaggg

SEQ ID NO: 2334084 - RNA, 19 nt, Artificial Sequence
  Description of Artificial Sequence: Synthetic oligonucleotide
  Sense strand starting at position 1128 of SEQ ID NO: 1885330
agagacuugagcugauacu

SEQ ID NO: 2334085 - RNA, 19 nt, Artificial Sequence
  Description of Artificial Sequence: Synthetic oligonucleotide
  Antisense strand to SEQ ID NO: 2334084
aguaucagcucaagucucu

SEQ ID NO: 2334086 - RNA, 19 nt, Artificial Sequence
  Description of Artificial Sequence: Synthetic oligonucleotide
  Sense strand starting at position 1355 of SEQ ID NO: 1885330
ggauauuguccucaguuug

SEQ ID NO: 2334087 - RNA, 19 nt, Artificial Sequence
  Description of Artificial Sequence: Synthetic oligonucleotide
  Antisense strand to SEQ ID NO: 2334086
caaacugaggacaauaucc

SEQ ID NO: 2334088 - RNA, 19 nt, Artificial Sequence
  Description of Artificial Sequence: Synthetic oligonucleotide
  Sense strand starting at position 1395 of SEQ ID NO: 1885330
ccacuuugcagaggaguaa

SEQ ID NO: 2334089 - RNA, 19 nt, Artificial Sequence
  Description of Artificial Sequence: Synthetic oligonucleotide
  Antisense strand to SEQ ID NO: 2334088
uuacuccucugcaaagugg

SEQ ID NO: 2334090 - RNA, 19 nt, Artificial Sequence
  Description of Artificial Sequence: Synthetic oligonucleotide
  Sense strand starting at position 1396 of SEQ ID NO: 1885330
cacuuugcagaggaguaau

SEQ ID NO: 2334091 - RNA, 19 nt, Artificial Sequence
  Description of Artificial Sequence: Synthetic oligonucleotide
  Antisense strand to SEQ ID NO: 2334090
auuacuccucugcaaagug

SEQ ID NO: 2334092 - RNA, 19 nt, Artificial Sequence
  Description of Artificial Sequence: Synthetic oligonucleotide
  Sense strand starting at position 1635 of SEQ ID NO: 1885330
cagacuuuagagcauaagu

SEQ ID NO: 2334093 - RNA, 19 nt, Artificial Sequence
  Description of Artificial Sequence: Synthetic oligonucleotide
  Antisense strand to SEQ ID NO: 2334092
acuuaugcucuaaagucug

SEQ ID NO: 2334094 - RNA, 19 nt, Artificial Sequence
  Description of Artificial Sequence: Synthetic oligonucleotide
  Sense strand starting at position 1637 of SEQ ID NO: 1885330
gacuuuagagcauaaguuc

SEQ ID NO: 2334095 - RNA, 19 nt, Artificial Sequence
  Description of Artificial Sequence: Synthetic oligonucleotide
  Antisense strand to SEQ ID NO: 2334094
gaacuuaugcucuaaaguc

SEQ ID NO: 2334096 - RNA, 19 nt, Artificial Sequence
  Description of Artificial Sequence: Synthetic oligonucleotide
  Sense strand starting at position 1760 of SEQ ID NO: 1885330
uguguaaugggucacaaua

SEQ ID NO: 2334097 - RNA, 19 nt, Artificial Sequence
  Description of Artificial Sequence: Synthetic oligonucleotide
  Antisense strand to SEQ ID NO: 2334096
uauugugacccauuacaca

SEQ ID NO: 2334098 - RNA, 19 nt, Artificial Sequence
  Description of Artificial Sequence: Synthetic oligonucleotide
  Sense strand starting at position 1812 of SEQ ID NO: 1885330
aguaucaacuuacuguaua

SEQ ID NO: 2334099 - RNA, 19 nt, Artificial Sequence
  Description of Artificial Sequence: Synthetic oligonucleotide
  Antisense strand to SEQ ID NO: 2334098
uauacaguaaguugauacu

SEQ ID NO: 2334100 - RNA, 19 nt, Artificial Sequence
  Description of Artificial Sequence: Synthetic oligonucleotide
  Sense strand starting at position 1817 of SEQ ID NO: 1885330
caacuuacuguauacggaa

SEQ ID NO: 2334101 - RNA, 19 nt, Artificial Sequence
  Description of Artificial Sequence: Synthetic oligonucleotide
  Antisense strand to SEQ ID NO: 2334100
uuccguauacaguaaguug

SEQ ID NO: 2334102 - RNA, 19 nt, Artificial Sequence
  Description of Artificial Sequence: Synthetic oligonucleotide
  Sense strand starting at position 2156 of SEQ ID NO: 1885330
gugauugcuacugagaaua

SEQ ID NO: 2334103 - RNA, 19 nt, Artificial Sequence
  Description of Artificial Sequence: Synthetic oligonucleotide
  Antisense strand to SEQ ID NO: 2334102
uauucucaguagcaaucac

SEQ ID NO: 2334104 - RNA, 19 nt, Artificial Sequence
  Description of Artificial Sequence: Synthetic oligonucleotide
  Sense strand starting at position 2473 of SEQ ID NO: 1885330
uuaauugugugagugacaa

SEQ ID NO: 2334105 - RNA, 19 nt, Artificial Sequence
  Description of Artificial Sequence: Synthetic oligonucleotide
  Antisense strand to SEQ ID NO: 2334104
uugucacucacacaauuaa

SEQ ID NO: 2334106 - RNA, 19 nt, Artificial Sequence
  Description of Artificial Sequence: Synthetic oligonucleotide
  Sense strand starting at position 2475 of SEQ ID NO: 1885330
aauugugugagugacaaga

SEQ ID NO: 2334107 - RNA, 19 nt, Artificial Sequence
  Description of Artificial Sequence: Synthetic oligonucleotide
  Antisense strand to SEQ ID NO: 2334106
ucuugucacucacacaauu

SEQ ID NO: 2334108 - RNA, 19 nt, Artificial Sequence
  Description of Artificial Sequence: Synthetic oligonucleotide
  Sense strand starting at position 2526 of SEQ ID NO: 1885330
acaguucaguggguggaau

SEQ ID NO: 2334109 - RNA, 19 nt, Artificial Sequence
  Description of Artificial Sequence: Synthetic oligonucleotide
  Antisense strand to SEQ ID NO: 2334108
auuccacccacugaacugu

SEQ ID NO: 2334110 - RNA, 19 nt, Artificial Sequence
  Description of Artificial Sequence: Synthetic oligonucleotide
  Sense strand starting at position 2549 of SEQ ID NO: 1885330
agugguuacccuggagaca

SEQ ID NO: 2334111 - RNA, 19 nt, Artificial Sequence
  Description of Artificial Sequence: Synthetic oligonucleotide
  Antisense strand to SEQ ID NO: 2334110
ugucuccaggguaaccacu

SEQ ID NO: 2334112 - RNA, 19 nt, Artificial Sequence
  Description of Artificial Sequence: Synthetic oligonucleotide
  Sense strand starting at position 2614 of SEQ ID NO: 1885330
ugaggauagugguuggaag

SEQ ID NO: 2334113 - RNA, 19 nt, Artificial Sequence
  Description of Artificial Sequence: Synthetic oligonucleotide
  Antisense strand to SEQ ID NO: 2334112
cuuccaaccacuauccuca

SEQ ID NO: 2334114 - RNA, 19 nt, Artificial Sequence
  Description of Artificial Sequence: Synthetic oligonucleotide
  Sense strand starting at position 2860 of SEQ ID NO: 1885330
ggaaccucuaggugaggau

SEQ ID NO: 2334115 - RNA, 19 nt, Artificial Sequence
  Description of Artificial Sequence: Synthetic oligonucleotide
  Antisense strand to SEQ ID NO: 2334114
auccucaccuagagguucc

SEQ ID NO: 2334116 - RNA, 19 nt, Artificial Sequence
  Description of Artificial Sequence: Synthetic oligonucleotide
  Sense strand starting at position 2872 of SEQ ID NO: 1885330
ugaggauauuaugcacagu

SEQ ID NO: 2334117 - RNA, 19 nt, Artificial Sequence
  Description of Artificial Sequence: Synthetic oligonucleotide
  Antisense strand to SEQ ID NO: 2334116
acugugcauaauauccuca

SEQ ID NO: 2334118 - RNA, 19 nt, Artificial Sequence
  Description of Artificial Sequence: Synthetic oligonucleotide
  Sense strand starting at position 2875 of SEQ ID NO: 1885330
ggauauuaugcacaguuaa

SEQ ID NO: 2334119 - RNA, 19 nt, Artificial Sequence
  Description of Artificial Sequence: Synthetic oligonucleotide
  Antisense strand to SEQ ID NO: 2334118
uuaacugugcauaauaucc

SEQ ID NO: 2334120 - RNA, 19 nt, Artificial Sequence
  Description of Artificial Sequence: Synthetic oligonucleotide
  Sense strand starting at position 3025 of SEQ ID NO: 1885330
uuugaaccaucucugaagu

SEQ ID NO: 2334121 - RNA, 19 nt, Artificial Sequence
  Description of Artificial Sequence: Synthetic oligonucleotide
  Antisense strand to SEQ ID NO: 2334120
acuucagagaugguucaaa

SEQ ID NO: 2334122 - RNA, 19 nt, Artificial Sequence
  Description of Artificial Sequence: Synthetic oligonucleotide
  Sense strand starting at position 3026 of SEQ ID NO: 1885330
uugaaccaucucugaagua

SEQ ID NO: 2334123 - RNA, 19 nt, Artificial Sequence
  Description of Artificial Sequence: Synthetic oligonucleotide
  Antisense strand to SEQ ID NO: 2334122
uacuucagagaugguucaa

SEQ ID NO: 2334124 - RNA, 19 nt, Artificial Sequence
  Description of Artificial Sequence: Synthetic oligonucleotide
  Sense strand starting at position 3083 of SEQ ID NO: 1885330
auagcagcucaguaaacaa

SEQ ID NO: 2334125 - RNA, 19 nt, Artificial Sequence
  Description of Artificial Sequence: Synthetic oligonucleotide
  Antisense strand to SEQ ID NO: 2334124
uuguuuacugagcugcuau

SEQ ID NO: 2334126 - RNA, 19 nt, Artificial Sequence
  Description of Artificial Sequence: Synthetic oligonucleotide
  Sense strand starting at position 3220 of SEQ ID NO: 1885330
gcaacaagguaagaauuua

SEQ ID NO: 2334127 - RNA, 19 nt, Artificial Sequence
  Description of Artificial Sequence: Synthetic oligonucleotide
  Antisense strand to SEQ ID NO: 2334126
uaaauucuuaccuuguugc

SEQ ID NO: 2334128 - RNA, 19 nt, Artificial Sequence
  Description of Artificial Sequence: Synthetic oligonucleotide
  Sense strand starting at position 3575 of SEQ ID NO: 1885330
uugcuuacucauggacaaa

SEQ ID NO: 2334129 - RNA, 19 nt, Artificial Sequence
  Description of Artificial Sequence: Synthetic oligonucleotide
  Antisense strand to SEQ ID NO: 2334128
uuuguccaugaguaagcaa

SEQ ID NO: 2334130 - RNA, 19 nt, Artificial Sequence
  Description of Artificial Sequence: Synthetic oligonucleotide
  Sense strand starting at position 3654 of SEQ ID NO: 1885330
uggagaugaccaugauguu

SEQ ID NO: 2334131 - RNA, 19 nt, Artificial Sequence
  Description of Artificial Sequence: Synthetic oligonucleotide
  Antisense strand to SEQ ID NO: 2334130
aacaucauggucaucucca

SEQ ID NO: 2334132 - RNA, 19 nt, Artificial Sequence
  Description of Artificial Sequence: Synthetic oligonucleotide
  Sense strand starting at position 3667 of SEQ ID NO: 1885330
gauguuacagcagagcauu

SEQ ID NO: 2334133 - RNA, 19 nt, Artificial Sequence
  Description of Artificial Sequence: Synthetic oligonucleotide
  Antisense strand to SEQ ID NO: 2334132
aaugcucugcuguaacauc

SEQ ID NO: 2334134 - RNA, 19 nt, Artificial Sequence
  Description of Artificial Sequence: Synthetic oligonucleotide
  Sense strand starting at position 3839 of SEQ ID NO: 1885330
ucccauuugccauggcaua

SEQ ID NO: 2334135 - RNA, 19 nt, Artificial Sequence
  Description of Artificial Sequence: Synthetic oligonucleotide
  Antisense strand to SEQ ID NO: 2334134
uaugccauggcaaauggga

SEQ ID NO: 2334136 - RNA, 19 nt, Artificial Sequence
  Description of Artificial Sequence: Synthetic oligonucleotide
  Sense strand starting at position 3840 of SEQ ID NO: 1885330
cccauuugccauggcauau

SEQ ID NO: 2334137 - RNA, 19 nt, Artificial Sequence
  Description of Artificial Sequence: Synthetic oligonucleotide
  Antisense strand to SEQ ID NO: 2334136
auaugccauggcaaauggg

SEQ ID NO: 2334138 - RNA, 19 nt, Artificial Sequence
  Description of Artificial Sequence: Synthetic oligonucleotide
  Sense strand starting at position 3895 of SEQ ID NO: 1885330
gacucaaauuagguaaguu

SEQ ID NO: 2334139 - RNA, 19 nt, Artificial Sequence
  Description of Artificial Sequence: Synthetic oligonucleotide
  Antisense strand to SEQ ID NO: 2334138
aacuuaccuaauuugaguc

SEQ ID NO: 2334140 - RNA, 19 nt, Artificial Sequence
  Description of Artificial Sequence: Synthetic oligonucleotide
  Sense strand starting at position 3899 of SEQ ID NO: 1885330
caaauuagguaaguuugau

SEQ ID NO: 2334141 - RNA, 19 nt, Artificial Sequence
  Description of Artificial Sequence: Synthetic oligonucleotide
  Antisense strand to SEQ ID NO: 2334140
aucaaacuuaccuaauuug

SEQ ID NO: 2334142 - RNA, 19 nt, Artificial Sequence
  Description of Artificial Sequence: Synthetic oligonucleotide
  Sense strand starting at position 3947 of SEQ ID NO: 1885330
caaacuuaccgguaguaug

SEQ ID NO: 2334143 - RNA, 19 nt, Artificial Sequence
  Description of Artificial Sequence: Synthetic oligonucleotide
  Antisense strand to SEQ ID NO: 2334142
cauacuaccgguaaguuug

SEQ ID NO: 2334144 - RNA, 19 nt, Artificial Sequence
  Description of Artificial Sequence: Synthetic oligonucleotide
  Sense strand starting at position 1186 of SEQ ID NO: 1885331
gcaggucauuugcagucua

SEQ ID NO: 2334145 - RNA, 19 nt, Artificial Sequence
  Description of Artificial Sequence: Synthetic oligonucleotide
  Antisense strand to SEQ ID NO: 2334144
uagacugcaaaugaccugc

SEQ ID NO: 2334146 - RNA, 19 nt, Artificial Sequence
  Description of Artificial Sequence: Synthetic oligonucleotide
  Sense strand starting at position 1611 of SEQ ID NO: 1885331
uggccuacgugucuaaaca

SEQ ID NO: 2334147 - RNA, 19 nt, Artificial Sequence
  Description of Artificial Sequence: Synthetic oligonucleotide
  Antisense strand to SEQ ID NO: 2334146
uguuuagacacguaggcca

SEQ ID NO: 2334148 - RNA, 19 nt, Artificial Sequence
  Description of Artificial Sequence: Synthetic oligonucleotide
  Sense strand starting at position 1612 of SEQ ID NO: 1885331
ggccuacgugucuaaacaa

SEQ ID NO: 2334149 - RNA, 19 nt, Artificial Sequence
  Description of Artificial Sequence: Synthetic oligonucleotide
  Antisense strand to SEQ ID NO: 2334148
uuguuuagacacguaggcc

SEQ ID NO: 2334150 - RNA, 19 nt, Artificial Sequence
  Description of Artificial Sequence: Synthetic oligonucleotide
  Sense strand starting at position 1661 of SEQ ID NO: 1885331
auguuugagggcuguggua

SEQ ID NO: 2334151 - RNA, 19 nt, Artificial Sequence
  Description of Artificial Sequence: Synthetic oligonucleotide
  Antisense strand to SEQ ID NO: 2334150
uaccacagcccucaaacau

SEQ ID NO: 2334152 - RNA, 19 nt, Artificial Sequence
  Description of Artificial Sequence: Synthetic oligonucleotide
  Sense strand starting at position 1663 of SEQ ID NO: 1885331
guuugagggcugugguauc

SEQ ID NO: 2334153 - RNA, 19 nt, Artificial Sequence
  Description of Artificial Sequence: Synthetic oligonucleotide
  Antisense strand to SEQ ID NO: 2334152
gauaccacagcccucaaac

SEQ ID NO: 2334154 - RNA, 19 nt, Artificial Sequence
  Description of Artificial Sequence: Synthetic oligonucleotide
  Sense strand starting at position 1676 of SEQ ID NO: 1885331
gguaucaacugcccugaua

SEQ ID NO: 2334155 - RNA, 19 nt, Artificial Sequence
  Description of Artificial Sequence: Synthetic oligonucleotide
  Antisense strand to SEQ ID NO: 2334154
uaucagggcaguugauacc

SEQ ID NO: 2334156 - RNA, 19 nt, Artificial Sequence
  Description of Artificial Sequence: Synthetic oligonucleotide
  Sense strand starting at position 1679 of SEQ ID NO: 1885331
aucaacugcccugauagua

SEQ ID NO: 2334157 - RNA, 19 nt, Artificial Sequence
  Description of Artificial Sequence: Synthetic oligonucleotide
  Antisense strand to SEQ ID NO: 2334156
uacuaucagggcaguugau

SEQ ID NO: 2334158 - RNA, 19 nt, Artificial Sequence
  Description of Artificial Sequence: Synthetic oligonucleotide
  Sense strand starting at position 1689 of SEQ ID NO: 1885331
cugauaguacgagaagcaa

SEQ ID NO: 2334159 - RNA, 19 nt, Artificial Sequence
  Description of Artificial Sequence: Synthetic oligonucleotide
  Antisense strand to SEQ ID NO: 2334158
uugcuucucguacuaucag

SEQ ID NO: 2334160 - RNA, 19 nt, Artificial Sequence
  Description of Artificial Sequence: Synthetic oligonucleotide
  Sense strand starting at position 1813 of SEQ ID NO: 1885331
cuaagaucuuuaggacuca

SEQ ID NO: 2334161 - RNA, 19 nt, Artificial Sequence
  Description of Artificial Sequence: Synthetic oligonucleotide
  Antisense strand to SEQ ID NO: 2334160
ugaguccuaaagaucuuag

SEQ ID NO: 2334162 - RNA, 19 nt, Artificial Sequence
  Description of Artificial Sequence: Synthetic oligonucleotide
  Sense strand starting at position 1886 of SEQ ID NO: 1885331
gcagguaccuuacuugaga

SEQ ID NO: 2334163 - RNA, 19 nt, Artificial Sequence
  Description of Artificial Sequence: Synthetic oligonucleotide
  Antisense strand to SEQ ID NO: 2334162
ucucaaguaagguaccugc

SEQ ID NO: 2334164 - RNA, 19 nt, Artificial Sequence
  Description of Artificial Sequence: Synthetic oligonucleotide
  Sense strand starting at position 1887 of SEQ ID NO: 1885331
cagguaccuuacuugagau

SEQ ID NO: 2334165 - RNA, 19 nt, Artificial Sequence
  Description of Artificial Sequence: Synthetic oligonucleotide
  Antisense strand to SEQ ID NO: 2334164
aucucaaguaagguaccug

SEQ ID NO: 2334166 - RNA, 19 nt, Artificial Sequence
  Description of Artificial Sequence: Synthetic oligonucleotide
  Sense strand starting at position 2201 of SEQ ID NO: 1885331
ugccauuguaugcguuaga

SEQ ID NO: 2334167 - RNA, 19 nt, Artificial Sequence
  Description of Artificial Sequence: Synthetic oligonucleotide
  Antisense strand to SEQ ID NO: 2334166
ucuaacgcauacaauggca

SEQ ID NO: 2334168 - RNA, 19 nt, Artificial Sequence
  Description of Artificial Sequence: Synthetic oligonucleotide
  Sense strand starting at position 2204 of SEQ ID NO: 1885331
cauuguaugcguuagagag

SEQ ID NO: 2334169 - RNA, 19 nt, Artificial Sequence
  Description of Artificial Sequence: Synthetic oligonucleotide
  Antisense strand to SEQ ID NO: 2334168
cucucuaacgcauacaaug

SEQ ID NO: 2334170 - RNA, 19 nt, Artificial Sequence
  Description of Artificial Sequence: Synthetic oligonucleotide
  Sense strand starting at position 2279 of SEQ ID NO: 1885331
uggccuacgucucugaaca

SEQ ID NO: 2334171 - RNA, 19 nt, Artificial Sequence
  Description of Artificial Sequence: Synthetic oligonucleotide
  Antisense strand to SEQ ID NO: 2334170
uguucagagacguaggcca

SEQ ID NO: 2334172 - RNA, 19 nt, Artificial Sequence
  Description of Artificial Sequence: Synthetic oligonucleotide
  Sense strand starting at position 2280 of SEQ ID NO: 1885331
ggccuacgucucugaacaa

SEQ ID NO: 2334173 - RNA, 19 nt, Artificial Sequence
  Description of Artificial Sequence: Synthetic oligonucleotide
  Antisense strand to SEQ ID NO: 2334172
uuguucagagacguaggcc

SEQ ID NO: 2334174 - RNA, 19 nt, Artificial Sequence
  Description of Artificial Sequence: Synthetic oligonucleotide
  Sense strand starting at position 2950 of SEQ ID NO: 1885331
gcagguaccuuacuuagga

SEQ ID NO: 2334175 - RNA, 19 nt, Artificial Sequence
  Description of Artificial Sequence: Synthetic oligonucleotide
  Antisense strand to SEQ ID NO: 2334174
uccuaaguaagguaccugc

SEQ ID NO: 2334176 - RNA, 19 nt, Artificial Sequence
  Description of Artificial Sequence: Synthetic oligonucleotide
  Sense strand starting at position 2954 of SEQ ID NO: 1885331
guaccuuacuuaggauuua

SEQ ID NO: 2334177 - RNA, 19 nt, Artificial Sequence
  Description of Artificial Sequence: Synthetic oligonucleotide
  Antisense strand to SEQ ID NO: 2334176
uaaauccuaaguaagguac

SEQ ID NO: 2334178 - RNA, 19 nt, Artificial Sequence
  Description of Artificial Sequence: Synthetic oligonucleotide
  Sense strand starting at position 2967 of SEQ ID NO: 1885331
gauuuacuaucugacagga

SEQ ID NO: 2334179 - RNA, 19 nt, Artificial Sequence
  Description of Artificial Sequence: Synthetic oligonucleotide
  Antisense strand to SEQ ID NO: 2334178
uccugucagauaguaaauc

SEQ ID NO: 2334180 - RNA, 19 nt, Artificial Sequence
  Description of Artificial Sequence: Synthetic oligonucleotide
  Sense strand starting at position 2969 of SEQ ID NO: 1885331
uuuacuaucugacaggagu

SEQ ID NO: 2334181 - RNA, 19 nt, Artificial Sequence
  Description of Artificial Sequence: Synthetic oligonucleotide
  Antisense strand to SEQ ID NO: 2334180
acuccugucagauaguaaa

SEQ ID NO: 2334182 - RNA, 19 nt, Artificial Sequence
  Description of Artificial Sequence: Synthetic oligonucleotide
  Sense strand starting at position 3264 of SEQ ID NO: 1885331
uuccauuguaugcguuaga

SEQ ID NO: 2334183 - RNA, 19 nt, Artificial Sequence
  Description of Artificial Sequence: Synthetic oligonucleotide
  Antisense strand to SEQ ID NO: 2334182
ucuaacgcauacaauggaa

SEQ ID NO: 2334184 - RNA, 19 nt, Artificial Sequence
  Description of Artificial Sequence: Synthetic oligonucleotide
  Sense strand starting at position 3553 of SEQ ID NO: 1885331
ccgugagagugcugggauu

SEQ ID NO: 2334185 - RNA, 19 nt, Artificial Sequence
  Description of Artificial Sequence: Synthetic oligonucleotide
  Antisense strand to SEQ ID NO: 2334184
aaucccagcacucucacgg

SEQ ID NO: 2334186 - RNA, 19 nt, Artificial Sequence
  Description of Artificial Sequence: Synthetic oligonucleotide
  Sense strand starting at position 3554 of SEQ ID NO: 1885331
cgugagagugcugggauua

SEQ ID NO: 2334187 - RNA, 19 nt, Artificial Sequence
  Description of Artificial Sequence: Synthetic oligonucleotide
  Antisense strand to SEQ ID NO: 2334186
uaaucccagcacucucacg

SEQ ID NO: 2334188 - RNA, 19 nt, Artificial Sequence
  Description of Artificial Sequence: Synthetic oligonucleotide
  Sense strand starting at position 3555 of SEQ ID NO: 1885331
gugagagugcugggauuac

SEQ ID NO: 2334189 - RNA, 19 nt, Artificial Sequence
  Description of Artificial Sequence: Synthetic oligonucleotide
  Antisense strand to SEQ ID NO: 2334188
guaaucccagcacucucac

SEQ ID NO: 2334190 - RNA, 19 nt, Artificial Sequence
  Description of Artificial Sequence: Synthetic oligonucleotide
  Sense strand starting at position 3595 of SEQ ID NO: 1885331
gccaauaaauguuagcuuu

SEQ ID NO: 2334191 - RNA, 19 nt, Artificial Sequence
  Description of Artificial Sequence: Synthetic oligonucleotide
  Antisense strand to SEQ ID NO: 2334190
aaagcuaacauuuauuggc

SEQ ID NO: 2334192 - RNA, 19 nt, Artificial Sequence
  Description of Artificial Sequence: Synthetic oligonucleotide
  Sense strand starting at position 3618 of SEQ ID NO: 1885331
uaauguaucucugguaguu

SEQ ID NO: 2334193 - RNA, 19 nt, Artificial Sequence
  Description of Artificial Sequence: Synthetic oligonucleotide
  Antisense strand to SEQ ID NO: 2334192
aacuaccagagauacauua

SEQ ID NO: 2334194 - RNA, 19 nt, Artificial Sequence
  Description of Artificial Sequence: Synthetic oligonucleotide
  Sense strand starting at position 3689 of SEQ ID NO: 1885331
uucccuggucagcauugau

SEQ ID NO: 2334195 - RNA, 19 nt, Artificial Sequence
  Description of Artificial Sequence: Synthetic oligonucleotide
  Antisense strand to SEQ ID NO: 2334194
aucaaugcugaccagggaa

SEQ ID NO: 2334196 - RNA, 19 nt, Artificial Sequence
  Description of Artificial Sequence: Synthetic oligonucleotide
  Sense strand starting at position 3698 of SEQ ID NO: 1885331
cagcauugaugacagugaa

SEQ ID NO: 2334197 - RNA, 19 nt, Artificial Sequence
  Description of Artificial Sequence: Synthetic oligonucleotide
  Antisense strand to SEQ ID NO: 2334196
uucacugucaucaaugcug

SEQ ID NO: 2334198 - RNA, 19 nt, Artificial Sequence
  Description of Artificial Sequence: Synthetic oligonucleotide
  Sense strand starting at position 3708 of SEQ ID NO: 1885331
gacagugaauaagaagaau

SEQ ID NO: 2334199 - RNA, 19 nt, Artificial Sequence
  Description of Artificial Sequence: Synthetic oligonucleotide
  Antisense strand to SEQ ID NO: 2334198
auucuucuuauucacuguc

SEQ ID NO: 2334200 - RNA, 19 nt, Artificial Sequence
  Description of Artificial Sequence: Synthetic oligonucleotide
  Sense strand starting at position 3745 of SEQ ID NO: 1885331
gaaccuuugcaguguuuga

SEQ ID NO: 2334201 - RNA, 19 nt, Artificial Sequence
  Description of Artificial Sequence: Synthetic oligonucleotide
  Antisense strand to SEQ ID NO: 2334200
ucaaacacugcaaagguuc

SEQ ID NO: 2334202 - RNA, 19 nt, Artificial Sequence
  Description of Artificial Sequence: Synthetic oligonucleotide
  Sense strand starting at position 3749 of SEQ ID NO: 1885331
cuuugcaguguuugagguu

SEQ ID NO: 2334203 - RNA, 19 nt, Artificial Sequence
  Description of Artificial Sequence: Synthetic oligonucleotide
  Antisense strand to SEQ ID NO: 2334202
aaccucaaacacugcaaag

SEQ ID NO: 2334204 - RNA, 19 nt, Artificial Sequence
  Description of Artificial Sequence: Synthetic oligonucleotide
  Sense strand starting at position 3792 of SEQ ID NO: 1885331
acagacuugugccaucaaa

SEQ ID NO: 2334205 - RNA, 19 nt, Artificial Sequence
  Description of Artificial Sequence: Synthetic oligonucleotide
  Antisense strand to SEQ ID NO: 2334204
uuugauggcacaagucugu

SEQ ID NO: 2334206 - RNA, 19 nt, Artificial Sequence
  Description of Artificial Sequence: Synthetic oligonucleotide
  Sense strand starting at position 3934 of SEQ ID NO: 1885331
ugagcaaugcagugagauc

SEQ ID NO: 2334207 - RNA, 19 nt, Artificial Sequence
  Description of Artificial Sequence: Synthetic oligonucleotide
  Antisense strand to SEQ ID NO: 2334206
gaucucacugcauugcuca

SEQ ID NO: 2334208 - RNA, 19 nt, Artificial Sequence
  Description of Artificial Sequence: Synthetic oligonucleotide
  Sense strand starting at position 935 of SEQ ID NO: 1885332
augacagcaccauaguauu

SEQ ID NO: 2334209 - RNA, 19 nt, Artificial Sequence
  Description of Artificial Sequence: Synthetic oligonucleotide
  Antisense strand to SEQ ID NO: 2334208
aauacuauggugcugucau

SEQ ID NO: 2334210 - RNA, 19 nt, Artificial Sequence
  Description of Artificial Sequence: Synthetic oligonucleotide
  Sense strand starting at position 947 of SEQ ID NO: 1885332
uaguauuggcgguaaauca

SEQ ID NO: 2334211 - RNA, 19 nt, Artificial Sequence
  Description of Artificial Sequence: Synthetic oligonucleotide
  Antisense strand to SEQ ID NO: 2334210
ugauuuaccgccaauacua

SEQ ID NO: 2334212 - RNA, 19 nt, Artificial Sequence
  Description of Artificial Sequence: Synthetic oligonucleotide
  Sense strand starting at position 958 of SEQ ID NO: 1885332
guaaaucagaguuggcaaa

SEQ ID NO: 2334213 - RNA, 19 nt, Artificial Sequence
  Description of Artificial Sequence: Synthetic oligonucleotide
  Antisense strand to SEQ ID NO: 2334212
uuugccaacucugauuuac

SEQ ID NO: 2334214 - RNA, 19 nt, Artificial Sequence
  Description of Artificial Sequence: Synthetic oligonucleotide
  Sense strand starting at position 959 of SEQ ID NO: 1885332
uaaaucagaguuggcaaau

SEQ ID NO: 2334215 - RNA, 19 nt, Artificial Sequence
  Description of Artificial Sequence: Synthetic oligonucleotide
  Antisense strand to SEQ ID NO: 2334214
auuugccaacucugauuua

SEQ ID NO: 2334216 - RNA, 19 nt, Artificial Sequence
  Description of Artificial Sequence: Synthetic oligonucleotide
  Sense strand starting at position 1002 of SEQ ID NO: 1885332
agagucauaucccucaagu

SEQ ID NO: 2334217 - RNA, 19 nt, Artificial Sequence
  Description of Artificial Sequence: Synthetic oligonucleotide
  Antisense strand to SEQ ID NO: 2334216
acuugagggauaugacucu

SEQ ID NO: 2334218 - RNA, 19 nt, Artificial Sequence
  Description of Artificial Sequence: Synthetic oligonucleotide
  Sense strand starting at position 1004 of SEQ ID NO: 1885332
agucauaucccucaaguuu

SEQ ID NO: 2334219 - RNA, 19 nt, Artificial Sequence
  Description of Artificial Sequence: Synthetic oligonucleotide
  Antisense strand to SEQ ID NO: 2334218
aaacuugagggauaugacu

SEQ ID NO: 2334220 - RNA, 19 nt, Artificial Sequence
  Description of Artificial Sequence: Synthetic oligonucleotide
  Sense strand starting at position 1037 of SEQ ID NO: 1885332
aaguauuaguacuuugaga

SEQ ID NO: 2334221 - RNA, 19 nt, Artificial Sequence
  Description of Artificial Sequence: Synthetic oligonucleotide
  Antisense strand to SEQ ID NO: 2334220
ucucaaaguacuaauacuu

SEQ ID NO: 2334222 - RNA, 19 nt, Artificial Sequence
  Description of Artificial Sequence: Synthetic oligonucleotide
  Sense strand starting at position 1039 of SEQ ID NO: 1885332
guauuaguacuuugagaaa

SEQ ID NO: 2334223 - RNA, 19 nt, Artificial Sequence
  Description of Artificial Sequence: Synthetic oligonucleotide
  Antisense strand to SEQ ID NO: 2334222
uuucucaaaguacuaauac

SEQ ID NO: 2334224 - RNA, 19 nt, Artificial Sequence
  Description of Artificial Sequence: Synthetic oligonucleotide
  Sense strand starting at position 1599 of SEQ ID NO: 1885332
gucguuguagucucaaucu

SEQ ID NO: 2334225 - RNA, 19 nt, Artificial Sequence
  Description of Artificial Sequence: Synthetic oligonucleotide
  Antisense strand to SEQ ID NO: 2334224
agauugagacuacaacgac

SEQ ID NO: 2334226 - RNA, 19 nt, Artificial Sequence
  Description of Artificial Sequence: Synthetic oligonucleotide
  Sense strand starting at position 1913 of SEQ ID NO: 1885332
acgugauccuuccugauag

SEQ ID NO: 2334227 - RNA, 19 nt, Artificial Sequence
  Description of Artificial Sequence: Synthetic oligonucleotide
  Antisense strand to SEQ ID NO: 2334226
cuaucaggaaggaucacgu

SEQ ID NO: 2334228 - RNA, 19 nt, Artificial Sequence
  Description of Artificial Sequence: Synthetic oligonucleotide
  Sense strand starting at position 1915 of SEQ ID NO: 1885332
gugauccuuccugauagug

SEQ ID NO: 2334229 - RNA, 19 nt, Artificial Sequence
  Description of Artificial Sequence: Synthetic oligonucleotide
  Antisense strand to SEQ ID NO: 2334228
cacuaucaggaaggaucac

SEQ ID NO: 2334230 - RNA, 19 nt, Artificial Sequence
  Description of Artificial Sequence: Synthetic oligonucleotide
  Sense strand starting at position 1927 of SEQ ID NO: 1885332
gauagugguaaauguggga

SEQ ID NO: 2334231 - RNA, 19 nt, Artificial Sequence
  Description of Artificial Sequence: Synthetic oligonucleotide
  Antisense strand to SEQ ID NO: 2334230
ucccacauuuaccacuauc

SEQ ID NO: 2334232 - RNA, 19 nt, Artificial Sequence
  Description of Artificial Sequence: Synthetic oligonucleotide
  Sense strand starting at position 1950 of SEQ ID NO: 1885332
gagguuuaagcagacgagu

SEQ ID NO: 2334233 - RNA, 19 nt, Artificial Sequence
  Description of Artificial Sequence: Synthetic oligonucleotide
  Antisense strand to SEQ ID NO: 2334232
acucgucugcuuaaaccuc

SEQ ID NO: 2334234 - RNA, 19 nt, Artificial Sequence
  Description of Artificial Sequence: Synthetic oligonucleotide
  Sense strand starting at position 2059 of SEQ ID NO: 1885332
gaauuuggcuuggaccaga

SEQ ID NO: 2334235 - RNA, 19 nt, Artificial Sequence
  Description of Artificial Sequence: Synthetic oligonucleotide
  Antisense strand to SEQ ID NO: 2334234
ucugguccaagccaaauuc

SEQ ID NO: 2334236 - RNA, 19 nt, Artificial Sequence
  Description of Artificial Sequence: Synthetic oligonucleotide
  Sense strand starting at position 2270 of SEQ ID NO: 1885332
ggaugagggcagugagaua

SEQ ID NO: 2334237 - RNA, 19 nt, Artificial Sequence
  Description of Artificial Sequence: Synthetic oligonucleotide
  Antisense strand to SEQ ID NO: 2334236
uaucucacugcccucaucc

SEQ ID NO: 2334238 - RNA, 19 nt, Artificial Sequence
  Description of Artificial Sequence: Synthetic oligonucleotide
  Sense strand starting at position 2681 of SEQ ID NO: 1885332
cucuuaauauuuggagaaa

SEQ ID NO: 2334239 - RNA, 19 nt, Artificial Sequence
  Description of Artificial Sequence: Synthetic oligonucleotide
  Antisense strand to SEQ ID NO: 2334238
uuucuccaaauauuaagag

SEQ ID NO: 2334240 - RNA, 19 nt, Artificial Sequence
  Description of Artificial Sequence: Synthetic oligonucleotide
  Sense strand starting at position 2723 of SEQ ID NO: 1885332
uggaaaucuccaugacuuc

SEQ ID NO: 2334241 - RNA, 19 nt, Artificial Sequence
  Description of Artificial Sequence: Synthetic oligonucleotide
  Antisense strand to SEQ ID NO: 2334240
gaagucauggagauuucca

SEQ ID NO: 2334242 - RNA, 19 nt, Artificial Sequence
  Description of Artificial Sequence: Synthetic oligonucleotide
  Sense strand starting at position 3182 of SEQ ID NO: 1885332
cuugaauucugagcuggag

SEQ ID NO: 2334243 - RNA, 19 nt, Artificial Sequence
  Description of Artificial Sequence: Synthetic oligonucleotide
  Antisense strand to SEQ ID NO: 2334242
cuccagcucagaauucaag

SEQ ID NO: 2334244 - RNA, 19 nt, Artificial Sequence
  Description of Artificial Sequence: Synthetic oligonucleotide
  Sense strand starting at position 3184 of SEQ ID NO: 1885332
ugaauucugagcuggaggu

SEQ ID NO: 2334245 - RNA, 19 nt, Artificial Sequence
  Description of Artificial Sequence: Synthetic oligonucleotide
  Antisense strand to SEQ ID NO: 2334244
accuccagcucagaauuca

SEQ ID NO: 2334246 - RNA, 19 nt, Artificial Sequence
  Description of Artificial Sequence: Synthetic oligonucleotide
  Sense strand starting at position 3191 of SEQ ID NO: 1885332
ugagcuggaggucaugauu

SEQ ID NO: 2334247 - RNA, 19 nt, Artificial Sequence
  Description of Artificial Sequence: Synthetic oligonucleotide
  Antisense strand to SEQ ID NO: 2334246
aaucaugaccuccagcuca

SEQ ID NO: 2334248 - RNA, 19 nt, Artificial Sequence
  Description of Artificial Sequence: Synthetic oligonucleotide
  Sense strand starting at position 3199 of SEQ ID NO: 1885332
aggucaugauucucucuua

SEQ ID NO: 2334249 - RNA, 19 nt, Artificial Sequence
  Description of Artificial Sequence: Synthetic oligonucleotide
  Antisense strand to SEQ ID NO: 2334248
uaagagagaaucaugaccu

SEQ ID NO: 2334250 - RNA, 19 nt, Artificial Sequence
  Description of Artificial Sequence: Synthetic oligonucleotide
  Sense strand starting at position 3200 of SEQ ID NO: 1885332
ggucaugauucucucuuau

SEQ ID NO: 2334251 - RNA, 19 nt, Artificial Sequence
  Description of Artificial Sequence: Synthetic oligonucleotide
  Antisense strand to SEQ ID NO: 2334250
auaagagagaaucaugacc

SEQ ID NO: 2334252 - RNA, 19 nt, Artificial Sequence
  Description of Artificial Sequence: Synthetic oligonucleotide
  Sense strand starting at position 3213 of SEQ ID NO: 1885332
ucuuauguacuuuaagaug

SEQ ID NO: 2334253 - RNA, 19 nt, Artificial Sequence
  Description of Artificial Sequence: Synthetic oligonucleotide
  Antisense strand to SEQ ID NO: 2334252
caucuuaaaguacauaaga

SEQ ID NO: 2334254 - RNA, 19 nt, Artificial Sequence
  Description of Artificial Sequence: Synthetic oligonucleotide
  Sense strand starting at position 3261 of SEQ ID NO: 1885332
ucuaguggcuaacugaauu

SEQ ID NO: 2334255 - RNA, 19 nt, Artificial Sequence
  Description of Artificial Sequence: Synthetic oligonucleotide
  Antisense strand to SEQ ID NO: 2334254
aauucaguuagccacuaga

SEQ ID NO: 2334256 - RNA, 19 nt, Artificial Sequence
  Description of Artificial Sequence: Synthetic oligonucleotide
  Sense strand starting at position 3380 of SEQ ID NO: 1885332
cucacaucaucagugggaa

SEQ ID NO: 2334257 - RNA, 19 nt, Artificial Sequence
  Description of Artificial Sequence: Synthetic oligonucleotide
  Antisense strand to SEQ ID NO: 2334256
uucccacugaugaugugag

SEQ ID NO: 2334258 - RNA, 19 nt, Artificial Sequence
  Description of Artificial Sequence: Synthetic oligonucleotide
  Sense strand starting at position 3381 of SEQ ID NO: 1885332
ucacaucaucagugggaaa

SEQ ID NO: 2334259 - RNA, 19 nt, Artificial Sequence
  Description of Artificial Sequence: Synthetic oligonucleotide
  Antisense strand to SEQ ID NO: 2334258
uuucccacugaugauguga

SEQ ID NO: 2334260 - RNA, 19 nt, Artificial Sequence
  Description of Artificial Sequence: Synthetic oligonucleotide
  Sense strand starting at position 3403 of SEQ ID NO: 1885332
gauagaaucuugcuaaagg

SEQ ID NO: 2334261 - RNA, 19 nt, Artificial Sequence
  Description of Artificial Sequence: Synthetic oligonucleotide
  Antisense strand to SEQ ID NO: 2334260
ccuuuagcaagauucuauc

SEQ ID NO: 2334262 - RNA, 19 nt, Artificial Sequence
  Description of Artificial Sequence: Synthetic oligonucleotide
  Sense strand starting at position 3412 of SEQ ID NO: 1885332
uugcuaaaggcugaucaua

SEQ ID NO: 2334263 - RNA, 19 nt, Artificial Sequence
  Description of Artificial Sequence: Synthetic oligonucleotide
  Antisense strand to SEQ ID NO: 2334262
uaugaucagccuuuagcaa

SEQ ID NO: 2334264 - RNA, 19 nt, Artificial Sequence
  Description of Artificial Sequence: Synthetic oligonucleotide
  Sense strand starting at position 3486 of SEQ ID NO: 1885332
cgggucuuccuuuaaagaa

SEQ ID NO: 2334265 - RNA, 19 nt, Artificial Sequence
  Description of Artificial Sequence: Synthetic oligonucleotide
  Antisense strand to SEQ ID NO: 2334264
uucuuuaaaggaagacccg

SEQ ID NO: 2334266 - RNA, 19 nt, Artificial Sequence
  Description of Artificial Sequence: Synthetic oligonucleotide
  Sense strand starting at position 3573 of SEQ ID NO: 1885332
aagagaugugugcacacaa

SEQ ID NO: 2334267 - RNA, 19 nt, Artificial Sequence
  Description of Artificial Sequence: Synthetic oligonucleotide
  Antisense strand to SEQ ID NO: 2334266
uugugugcacacaucucuu

SEQ ID NO: 2334268 - RNA, 19 nt, Artificial Sequence
  Description of Artificial Sequence: Synthetic oligonucleotide
  Sense strand starting at position 3619 of SEQ ID NO: 1885332
ugcauccaaugcuuggaaa

SEQ ID NO: 2334269 - RNA, 19 nt, Artificial Sequence
  Description of Artificial Sequence: Synthetic oligonucleotide
  Antisense strand to SEQ ID NO: 2334268
uuuccaagcauuggaugca

SEQ ID NO: 2334270 - RNA, 19 nt, Artificial Sequence
  Description of Artificial Sequence: Synthetic oligonucleotide
  Sense strand starting at position 3620 of SEQ ID NO: 1885332
gcauccaaugcuuggaaau

SEQ ID NO: 2334271 - RNA, 19 nt, Artificial Sequence
  Description of Artificial Sequence: Synthetic oligonucleotide
  Antisense strand to SEQ ID NO: 2334270
auuuccaagcauuggaugc

SEQ ID NO: 2334272 - RNA, 19 nt, Artificial Sequence
  Description of Artificial Sequence: Synthetic oligonucleotide
  Sense strand starting at position 3631 of SEQ ID NO: 1885332
uuggaaauuguccgugaag

SEQ ID NO: 2334273 - RNA, 19 nt, Artificial Sequence
  Description of Artificial Sequence: Synthetic oligonucleotide
  Antisense strand to SEQ ID NO: 2334272
cuucacggacaauuuccaa

SEQ ID NO: 2334274 - RNA, 19 nt, Artificial Sequence
  Description of Artificial Sequence: Synthetic oligonucleotide
  Sense strand starting at position 3632 of SEQ ID NO: 1885332
uggaaauuguccgugaaga

SEQ ID NO: 2334275 - RNA, 19 nt, Artificial Sequence
  Description of Artificial Sequence: Synthetic oligonucleotide
  Antisense strand to SEQ ID NO: 2334274
ucuucacggacaauuucca

SEQ ID NO: 2334276 - RNA, 19 nt, Artificial Sequence
  Description of Artificial Sequence: Synthetic oligonucleotide
  Sense strand starting at position 3633 of SEQ ID NO: 1885332
ggaaauuguccgugaagau

SEQ ID NO: 2334277 - RNA, 19 nt, Artificial Sequence
  Description of Artificial Sequence: Synthetic oligonucleotide
  Antisense strand to SEQ ID NO: 2334276
aucuucacggacaauuucc

SEQ ID NO: 2334278 - RNA, 19 nt, Artificial Sequence
  Description of Artificial Sequence: Synthetic oligonucleotide
  Sense strand starting at position 3634 of SEQ ID NO: 1885332
gaaauuguccgugaagaug

SEQ ID NO: 2334279 - RNA, 19 nt, Artificial Sequence
  Description of Artificial Sequence: Synthetic oligonucleotide
  Antisense strand to SEQ ID NO: 2334278
caucuucacggacaauuuc

SEQ ID NO: 2334280 - RNA, 19 nt, Artificial Sequence
  Description of Artificial Sequence: Synthetic oligonucleotide
  Sense strand starting at position 3645 of SEQ ID NO: 1885332
ugaagaugccuuugaguag

SEQ ID NO: 2334281 - RNA, 19 nt, Artificial Sequence
  Description of Artificial Sequence: Synthetic oligonucleotide
  Antisense strand to SEQ ID NO: 2334280
cuacucaaaggcaucuuca

SEQ ID NO: 2334282 - RNA, 19 nt, Artificial Sequence
  Description of Artificial Sequence: Synthetic oligonucleotide
  Sense strand starting at position 3697 of SEQ ID NO: 1885332
ccauuuguuuccuuagccu

SEQ ID NO: 2334283 - RNA, 19 nt, Artificial Sequence
  Description of Artificial Sequence: Synthetic oligonucleotide
  Antisense strand to SEQ ID NO: 2334282
aggcuaaggaaacaaaugg

SEQ ID NO: 2334284 - RNA, 19 nt, Artificial Sequence
  Description of Artificial Sequence: Synthetic oligonucleotide
  Sense strand starting at position 3844 of SEQ ID NO: 1885332
auaugagaacuucguaaga

SEQ ID NO: 2334285 - RNA, 19 nt, Artificial Sequence
  Description of Artificial Sequence: Synthetic oligonucleotide
  Antisense strand to SEQ ID NO: 2334284
ucuuacgaaguucucauau

SEQ ID NO: 2334286 - RNA, 19 nt, Artificial Sequence
  Description of Artificial Sequence: Synthetic oligonucleotide
  Sense strand starting at position 3915 of SEQ ID NO: 1885332
ggagcucuagaucggaauu

SEQ ID NO: 2334287 - RNA, 19 nt, Artificial Sequence
  Description of Artificial Sequence: Synthetic oligonucleotide
  Antisense strand to SEQ ID NO: 2334286
aauuccgaucuagagcucc

SEQ ID NO: 2334288 - RNA, 19 nt, Artificial Sequence
  Description of Artificial Sequence: Synthetic oligonucleotide
  Sense strand starting at position 36 of SEQ ID NO: 1885333
ggugauccaguuuauacca

SEQ ID NO: 2334289 - RNA, 19 nt, Artificial Sequence
  Description of Artificial Sequence: Synthetic oligonucleotide
  Antisense strand to SEQ ID NO: 2334288
ugguauaaacuggaucacc

SEQ ID NO: 2334290 - RNA, 19 nt, Artificial Sequence
  Description of Artificial Sequence: Synthetic oligonucleotide
  Sense strand starting at position 133 of SEQ ID NO: 1885333
guggcauaucugcaaagag

SEQ ID NO: 2334291 - RNA, 19 nt, Artificial Sequence
  Description of Artificial Sequence: Synthetic oligonucleotide
  Antisense strand to SEQ ID NO: 2334290
cucuuugcagauaugccac

SEQ ID NO: 2334292 - RNA, 19 nt, Artificial Sequence
  Description of Artificial Sequence: Synthetic oligonucleotide
  Sense strand starting at position 148 of SEQ ID NO: 1885333
agagaaccuugccuaaguu

SEQ ID NO: 2334293 - RNA, 19 nt, Artificial Sequence
  Description of Artificial Sequence: Synthetic oligonucleotide
  Antisense strand to SEQ ID NO: 2334292
aacuuaggcaagguucucu

SEQ ID NO: 2334294 - RNA, 19 nt, Artificial Sequence
  Description of Artificial Sequence: Synthetic oligonucleotide
  Sense strand starting at position 466 of SEQ ID NO: 1885333
uuauucuuugggugggaau

SEQ ID NO: 2334295 - RNA, 19 nt, Artificial Sequence
  Description of Artificial Sequence: Synthetic oligonucleotide
  Antisense strand to SEQ ID NO: 2334294
auucccacccaaagaauaa

SEQ ID NO: 2334296 - RNA, 19 nt, Artificial Sequence
  Description of Artificial Sequence: Synthetic oligonucleotide
  Sense strand starting at position 564 of SEQ ID NO: 1885333
uuaucagagccucagugua

SEQ ID NO: 2334297 - RNA, 19 nt, Artificial Sequence
  Description of Artificial Sequence: Synthetic oligonucleotide
  Antisense strand to SEQ ID NO: 2334296
uacacugaggcucugauaa

SEQ ID NO: 2334298 - RNA, 19 nt, Artificial Sequence
  Description of Artificial Sequence: Synthetic oligonucleotide
  Sense strand starting at position 590 of SEQ ID NO: 1885333
uguuaugaucccgagugga

SEQ ID NO: 2334299 - RNA, 19 nt, Artificial Sequence
  Description of Artificial Sequence: Synthetic oligonucleotide
  Antisense strand to SEQ ID NO: 2334298
uccacucgggaucauaaca

SEQ ID NO: 2334300 - RNA, 19 nt, Artificial Sequence
  Description of Artificial Sequence: Synthetic oligonucleotide
  Sense strand starting at position 593 of SEQ ID NO: 1885333
uaugaucccgaguggaaau

SEQ ID NO: 2334301 - RNA, 19 nt, Artificial Sequence
  Description of Artificial Sequence: Synthetic oligonucleotide
  Antisense strand to SEQ ID NO: 2334300
auuuccacucgggaucaua

SEQ ID NO: 2334302 - RNA, 19 nt, Artificial Sequence
  Description of Artificial Sequence: Synthetic oligonucleotide
  Sense strand starting at position 594 of SEQ ID NO: 1885333
augaucccgaguggaaauu

SEQ ID NO: 2334303 - RNA, 19 nt, Artificial Sequence
  Description of Artificial Sequence: Synthetic oligonucleotide
  Antisense strand to SEQ ID NO: 2334302
aauuuccacucgggaucau

SEQ ID NO: 2334304 - RNA, 19 nt, Artificial Sequence
  Description of Artificial Sequence: Synthetic oligonucleotide
  Sense strand starting at position 653 of SEQ ID NO: 1885333
ucaugauugucauccuagg

SEQ ID NO: 2334305 - RNA, 19 nt, Artificial Sequence
  Description of Artificial Sequence: Synthetic oligonucleotide
  Antisense strand to SEQ ID NO: 2334304
ccuaggaugacaaucauga

SEQ ID NO: 2334306 - RNA, 19 nt, Artificial Sequence
  Description of Artificial Sequence: Synthetic oligonucleotide
  Sense strand starting at position 1015 of SEQ ID NO: 1885333
guuuaaacuucugucagaa

SEQ ID NO: 2334307 - RNA, 19 nt, Artificial Sequence
  Description of Artificial Sequence: Synthetic oligonucleotide
  Antisense strand to SEQ ID NO: 2334306
uucugacagaaguuuaaac

SEQ ID NO: 2334308 - RNA, 19 nt, Artificial Sequence
  Description of Artificial Sequence: Synthetic oligonucleotide
  Sense strand starting at position 1031 of SEQ ID NO: 1885333
gaauguugacuuggacuga

SEQ ID NO: 2334309 - RNA, 19 nt, Artificial Sequence
  Description of Artificial Sequence: Synthetic oligonucleotide
  Antisense strand to SEQ ID NO: 2334308
ucaguccaagucaacauuc

SEQ ID NO: 2334310 - RNA, 19 nt, Artificial Sequence
  Description of Artificial Sequence: Synthetic oligonucleotide
  Sense strand starting at position 1035 of SEQ ID NO: 1885333
guugacuuggacugagauu

SEQ ID NO: 2334311 - RNA, 19 nt, Artificial Sequence
  Description of Artificial Sequence: Synthetic oligonucleotide
  Antisense strand to SEQ ID NO: 2334310
aaucucaguccaagucaac

SEQ ID NO: 2334312 - RNA, 19 nt, Artificial Sequence
  Description of Artificial Sequence: Synthetic oligonucleotide
  Sense strand starting at position 1122 of SEQ ID NO: 1885333
ugcaauuagcaccauagaa

SEQ ID NO: 2334313 - RNA, 19 nt, Artificial Sequence
  Description of Artificial Sequence: Synthetic oligonucleotide
  Antisense strand to SEQ ID NO: 2334312
uucuauggugcuaauugca

SEQ ID NO: 2334314 - RNA, 19 nt, Artificial Sequence
  Description of Artificial Sequence: Synthetic oligonucleotide
  Sense strand starting at position 1157 of SEQ ID NO: 1885333
ucuggaaauuuccaauaga

SEQ ID NO: 2334315 - RNA, 19 nt, Artificial Sequence
  Description of Artificial Sequence: Synthetic oligonucleotide
  Antisense strand to SEQ ID NO: 2334314
ucuauuggaaauuuccaga

SEQ ID NO: 2334316 - RNA, 19 nt, Artificial Sequence
  Description of Artificial Sequence: Synthetic oligonucleotide
  Sense strand starting at position 1345 of SEQ ID NO: 1885333
agagaaccgucagucaaau

SEQ ID NO: 2334317 - RNA, 19 nt, Artificial Sequence
  Description of Artificial Sequence: Synthetic oligonucleotide
  Antisense strand to SEQ ID NO: 2334316
auuugacugacgguucucu

SEQ ID NO: 2334318 - RNA, 19 nt, Artificial Sequence
  Description of Artificial Sequence: Synthetic oligonucleotide
  Sense strand starting at position 1899 of SEQ ID NO: 1885333
ugaagaaacuugcuuccuu

SEQ ID NO: 2334319 - RNA, 19 nt, Artificial Sequence
  Description of Artificial Sequence: Synthetic oligonucleotide
  Antisense strand to SEQ ID NO: 2334318
aaggaagcaaguuucuuca

SEQ ID NO: 2334320 - RNA, 19 nt, Artificial Sequence
  Description of Artificial Sequence: Synthetic oligonucleotide
  Sense strand starting at position 2215 of SEQ ID NO: 1885333
caguuucuuguagaaguca

SEQ ID NO: 2334321 - RNA, 19 nt, Artificial Sequence
  Description of Artificial Sequence: Synthetic oligonucleotide
  Antisense strand to SEQ ID NO: 2334320
ugacuucuacaagaaacug

SEQ ID NO: 2334322 - RNA, 19 nt, Artificial Sequence
  Description of Artificial Sequence: Synthetic oligonucleotide
  Sense strand starting at position 2300 of SEQ ID NO: 1885333
cugugugcuccuuaaagaa

SEQ ID NO: 2334323 - RNA, 19 nt, Artificial Sequence
  Description of Artificial Sequence: Synthetic oligonucleotide
  Antisense strand to SEQ ID NO: 2334322
uucuuuaaggagcacacag

SEQ ID NO: 2334324 - RNA, 19 nt, Artificial Sequence
  Description of Artificial Sequence: Synthetic oligonucleotide
  Sense strand starting at position 2414 of SEQ ID NO: 1885333
acugaauccugaguauaua

SEQ ID NO: 2334325 - RNA, 19 nt, Artificial Sequence
  Description of Artificial Sequence: Synthetic oligonucleotide
  Antisense strand to SEQ ID NO: 2334324
uauauacucaggauucagu

SEQ ID NO: 2334326 - RNA, 19 nt, Artificial Sequence
  Description of Artificial Sequence: Synthetic oligonucleotide
  Sense strand starting at position 2499 of SEQ ID NO: 1885333
ggcaaaggaagaugucuua

SEQ ID NO: 2334327 - RNA, 19 nt, Artificial Sequence
  Description of Artificial Sequence: Synthetic oligonucleotide
  Antisense strand to SEQ ID NO: 2334326
uaagacaucuuccuuugcc

SEQ ID NO: 2334328 - RNA, 19 nt, Artificial Sequence
  Description of Artificial Sequence: Synthetic oligonucleotide
  Sense strand starting at position 2602 of SEQ ID NO: 1885333
ucaucuuuggagugaauau

SEQ ID NO: 2334329 - RNA, 19 nt, Artificial Sequence
  Description of Artificial Sequence: Synthetic oligonucleotide
  Antisense strand to SEQ ID NO: 2334328
auauucacuccaaagauga

SEQ ID NO: 2334330 - RNA, 19 nt, Artificial Sequence
  Description of Artificial Sequence: Synthetic oligonucleotide
  Sense strand starting at position 2616 of SEQ ID NO: 1885333
aauauuuagugaggacaac

SEQ ID NO: 2334331 - RNA, 19 nt, Artificial Sequence
  Description of Artificial Sequence: Synthetic oligonucleotide
  Antisense strand to SEQ ID NO: 2334330
guuguccucacuaaauauu

SEQ ID NO: 2334332 - RNA, 19 nt, Artificial Sequence
  Description of Artificial Sequence: Synthetic oligonucleotide
  Sense strand starting at position 2639 of SEQ ID NO: 1885333
uccuuaacugaacgauauu

SEQ ID NO: 2334333 - RNA, 19 nt, Artificial Sequence
  Description of Artificial Sequence: Synthetic oligonucleotide
  Antisense strand to SEQ ID NO: 2334332
aauaucguucaguuaagga

SEQ ID NO: 2334334 - RNA, 19 nt, Artificial Sequence
  Description of Artificial Sequence: Synthetic oligonucleotide
  Sense strand starting at position 2650 of SEQ ID NO: 1885333
acgauauugaggugguaac

SEQ ID NO: 2334335 - RNA, 19 nt, Artificial Sequence
  Description of Artificial Sequence: Synthetic oligonucleotide
  Antisense strand to SEQ ID NO: 2334334
guuaccaccucaauaucgu

SEQ ID NO: 2334336 - RNA, 19 nt, Artificial Sequence
  Description of Artificial Sequence: Synthetic oligonucleotide
  Sense strand starting at position 2651 of SEQ ID NO: 1885333
cgauauugaggugguaaca

SEQ ID NO: 2334337 - RNA, 19 nt, Artificial Sequence
  Description of Artificial Sequence: Synthetic oligonucleotide
  Antisense strand to SEQ ID NO: 2334336
uguuaccaccucaauaucg

SEQ ID NO: 2334338 - RNA, 19 nt, Artificial Sequence
  Description of Artificial Sequence: Synthetic oligonucleotide
  Sense strand starting at position 2890 of SEQ ID NO: 1885333
aauggauuauguucugcaa

SEQ ID NO: 2334339 - RNA, 19 nt, Artificial Sequence
  Description of Artificial Sequence: Synthetic oligonucleotide
  Antisense strand to SEQ ID NO: 2334338
uugcagaacauaauccauu

SEQ ID NO: 2334340 - RNA, 19 nt, Artificial Sequence
  Description of Artificial Sequence: Synthetic oligonucleotide
  Sense strand starting at position 2893 of SEQ ID NO: 1885333
ggauuauguucugcaauaa

SEQ ID NO: 2334341 - RNA, 19 nt, Artificial Sequence
  Description of Artificial Sequence: Synthetic oligonucleotide
  Antisense strand to SEQ ID NO: 2334340
uuauugcagaacauaaucc

SEQ ID NO: 2334342 - RNA, 19 nt, Artificial Sequence
  Description of Artificial Sequence: Synthetic oligonucleotide
  Sense strand starting at position 3340 of SEQ ID NO: 1885333
agauuaaaugcauggguau

SEQ ID NO: 2334343 - RNA, 19 nt, Artificial Sequence
  Description of Artificial Sequence: Synthetic oligonucleotide
  Antisense strand to SEQ ID NO: 2334342
auacccaugcauuuaaucu

SEQ ID NO: 2334344 - RNA, 19 nt, Artificial Sequence
  Description of Artificial Sequence: Synthetic oligonucleotide
  Sense strand starting at position 3341 of SEQ ID NO: 1885333
gauuaaaugcauggguauu

SEQ ID NO: 2334345 - RNA, 19 nt, Artificial Sequence
  Description of Artificial Sequence: Synthetic oligonucleotide
  Antisense strand to SEQ ID NO: 2334344
aauacccaugcauuuaauc

SEQ ID NO: 2334346 - RNA, 19 nt, Artificial Sequence
  Description of Artificial Sequence: Synthetic oligonucleotide
  Sense strand starting at position 3431 of SEQ ID NO: 1885333
caugguaguccuuggaaug

SEQ ID NO: 2334347 - RNA, 19 nt, Artificial Sequence
  Description of Artificial Sequence: Synthetic oligonucleotide
  Antisense strand to SEQ ID NO: 2334346
cauuccaaggacuaccaug

SEQ ID NO: 2334348 - RNA, 19 nt, Artificial Sequence
  Description of Artificial Sequence: Synthetic oligonucleotide
  Sense strand starting at position 3464 of SEQ ID NO: 1885333
ugaauuucuugagauggaa

SEQ ID NO: 2334349 - RNA, 19 nt, Artificial Sequence
  Description of Artificial Sequence: Synthetic oligonucleotide
  Antisense strand to SEQ ID NO: 2334348
uuccaucucaagaaauuca

SEQ ID NO: 2334350 - RNA, 19 nt, Artificial Sequence
  Description of Artificial Sequence: Synthetic oligonucleotide
  Sense strand starting at position 3480 of SEQ ID NO: 1885333
gaacaugaauuagcgacua

SEQ ID NO: 2334351 - RNA, 19 nt, Artificial Sequence
  Description of Artificial Sequence: Synthetic oligonucleotide
  Antisense strand to SEQ ID NO: 2334350
uagucgcuaauucauguuc

SEQ ID NO: 2334352 - RNA, 19 nt, Artificial Sequence
  Description of Artificial Sequence: Synthetic oligonucleotide
  Sense strand starting at position 3485 of SEQ ID NO: 1885333
ugaauuagcgacuaucuaa

SEQ ID NO: 2334353 - RNA, 19 nt, Artificial Sequence
  Description of Artificial Sequence: Synthetic oligonucleotide
  Antisense strand to SEQ ID NO: 2334352
uuagauagucgcuaauuca

SEQ ID NO: 2334354 - RNA, 19 nt, Artificial Sequence
  Description of Artificial Sequence: Synthetic oligonucleotide
  Sense strand starting at position 3488 of SEQ ID NO: 1885333
auuagcgacuaucuaagaa

SEQ ID NO: 2334355 - RNA, 19 nt, Artificial Sequence
  Description of Artificial Sequence: Synthetic oligonucleotide
  Antisense strand to SEQ ID NO: 2334354
uucuuagauagucgcuaau

SEQ ID NO: 2334356 - RNA, 19 nt, Artificial Sequence
  Description of Artificial Sequence: Synthetic oligonucleotide
  Sense strand starting at position 3515 of SEQ ID NO: 1885333
uuagacauccugggccuua

SEQ ID NO: 2334357 - RNA, 19 nt, Artificial Sequence
  Description of Artificial Sequence: Synthetic oligonucleotide
  Antisense strand to SEQ ID NO: 2334356
uaaggcccaggaugucuaa

SEQ ID NO: 2334358 - RNA, 19 nt, Artificial Sequence
  Description of Artificial Sequence: Synthetic oligonucleotide
  Sense strand starting at position 3628 of SEQ ID NO: 1885333
acacaauuagaaggugagu

SEQ ID NO: 2334359 - RNA, 19 nt, Artificial Sequence
  Description of Artificial Sequence: Synthetic oligonucleotide
  Antisense strand to SEQ ID NO: 2334358
acucaccuucuaauugugu

SEQ ID NO: 2334360 - RNA, 19 nt, Artificial Sequence
  Description of Artificial Sequence: Synthetic oligonucleotide
  Sense strand starting at position 3747 of SEQ ID NO: 1885333
auagccacugacugugaaa

SEQ ID NO: 2334361 - RNA, 19 nt, Artificial Sequence
  Description of Artificial Sequence: Synthetic oligonucleotide
  Antisense strand to SEQ ID NO: 2334360
uuucacagucaguggcuau

SEQ ID NO: 2334362 - RNA, 19 nt, Artificial Sequence
  Description of Artificial Sequence: Synthetic oligonucleotide
  Sense strand starting at position 3857 of SEQ ID NO: 1885333
uagucuauuguuuaggaca

SEQ ID NO: 2334363 - RNA, 19 nt, Artificial Sequence
  Description of Artificial Sequence: Synthetic oligonucleotide
  Antisense strand to SEQ ID NO: 2334362
uguccuaaacaauagacua

SEQ ID NO: 2334364 - RNA, 19 nt, Artificial Sequence
  Description of Artificial Sequence: Synthetic oligonucleotide
  Sense strand starting at position 3886 of SEQ ID NO: 1885333
uuacuauuacaguguaaga

SEQ ID NO: 2334365 - RNA, 19 nt, Artificial Sequence
  Description of Artificial Sequence: Synthetic oligonucleotide
  Antisense strand to SEQ ID NO: 2334364
ucuuacacuguaauaguaa

SEQ ID NO: 2334366 - RNA, 19 nt, Artificial Sequence
  Description of Artificial Sequence: Synthetic oligonucleotide
  Sense strand starting at position 3899 of SEQ ID NO: 1885333
guaagaaugcuguacuagg

SEQ ID NO: 2334367 - RNA, 19 nt, Artificial Sequence
  Description of Artificial Sequence: Synthetic oligonucleotide
  Antisense strand to SEQ ID NO: 2334366
ccuaguacagcauucuuac

SEQ ID NO: 2334368 - RNA, 19 nt, Artificial Sequence
  Description of Artificial Sequence: Synthetic oligonucleotide
  Sense strand starting at position 221 of SEQ ID NO: 1885334
acugcuugaggucagaguu

SEQ ID NO: 2334369 - RNA, 19 nt, Artificial Sequence
  Description of Artificial Sequence: Synthetic oligonucleotide
  Antisense strand to SEQ ID NO: 2334368
aacucugaccucaagcagu

SEQ ID NO: 2334370 - RNA, 19 nt, Artificial Sequence
  Description of Artificial Sequence: Synthetic oligonucleotide
  Sense strand starting at position 1126 of SEQ ID NO: 1885334
ggcaaacaguuguuaaaua

SEQ ID NO: 2334371 - RNA, 19 nt, Artificial Sequence
  Description of Artificial Sequence: Synthetic oligonucleotide
  Antisense strand to SEQ ID NO: 2334370
uauuuaacaacuguuugcc

SEQ ID NO: 2334372 - RNA, 19 nt, Artificial Sequence
  Description of Artificial Sequence: Synthetic oligonucleotide
  Sense strand starting at position 1176 of SEQ ID NO: 1885334
gucucugcucuguaucuga

SEQ ID NO: 2334373 - RNA, 19 nt, Artificial Sequence
  Description of Artificial Sequence: Synthetic oligonucleotide
  Antisense strand to SEQ ID NO: 2334372
ucagauacagagcagagac

SEQ ID NO: 2334374 - RNA, 19 nt, Artificial Sequence
  Description of Artificial Sequence: Synthetic oligonucleotide
  Sense strand starting at position 1243 of SEQ ID NO: 1885334
uucguuucagcagaguaag

SEQ ID NO: 2334375 - RNA, 19 nt, Artificial Sequence
  Description of Artificial Sequence: Synthetic oligonucleotide
  Antisense strand to SEQ ID NO: 2334374
cuuacucugcugaaacgaa

SEQ ID NO: 2334376 - RNA, 19 nt, Artificial Sequence
  Description of Artificial Sequence: Synthetic oligonucleotide
  Sense strand starting at position 1254 of SEQ ID NO: 1885334
agaguaagaaccggucuuu

SEQ ID NO: 2334377 - RNA, 19 nt, Artificial Sequence
  Description of Artificial Sequence: Synthetic oligonucleotide
  Antisense strand to SEQ ID NO: 2334376
aaagaccgguucuuacucu

SEQ ID NO: 2334378 - RNA, 19 nt, Artificial Sequence
  Description of Artificial Sequence: Synthetic oligonucleotide
  Sense strand starting at position 1266 of SEQ ID NO: 1885334
ggucuuugucuuccgccaa

SEQ ID NO: 2334379 - RNA, 19 nt, Artificial Sequence
  Description of Artificial Sequence: Synthetic oligonucleotide
  Antisense strand to SEQ ID NO: 2334378
uuggcggaagacaaagacc

SEQ ID NO: 2334380 - RNA, 19 nt, Artificial Sequence
  Description of Artificial Sequence: Synthetic oligonucleotide
  Sense strand starting at position 1270 of SEQ ID NO: 1885334
uuugucuuccgccaaagau

SEQ ID NO: 2334381 - RNA, 19 nt, Artificial Sequence
  Description of Artificial Sequence: Synthetic oligonucleotide
  Antisense strand to SEQ ID NO: 2334380
aucuuuggcggaagacaaa

SEQ ID NO: 2334382 - RNA, 19 nt, Artificial Sequence
  Description of Artificial Sequence: Synthetic oligonucleotide
  Sense strand starting at position 1362 of SEQ ID NO: 1885334
guaggcuccuuuguggaga

SEQ ID NO: 2334383 - RNA, 19 nt, Artificial Sequence
  Description of Artificial Sequence: Synthetic oligonucleotide
  Antisense strand to SEQ ID NO: 2334382
ucuccacaaaggagccuac

SEQ ID NO: 2334384 - RNA, 19 nt, Artificial Sequence
  Description of Artificial Sequence: Synthetic oligonucleotide
  Sense strand starting at position 1928 of SEQ ID NO: 1885334
ggagguuucuuggccggga

SEQ ID NO: 2334385 - RNA, 19 nt, Artificial Sequence
  Description of Artificial Sequence: Synthetic oligonucleotide
  Antisense strand to SEQ ID NO: 2334384
ucccggccaagaaaccucc

SEQ ID NO: 2334386 - RNA, 19 nt, Artificial Sequence
  Description of Artificial Sequence: Synthetic oligonucleotide
  Sense strand starting at position 1929 of SEQ ID NO: 1885334
gagguuucuuggccgggaa

SEQ ID NO: 2334387 - RNA, 19 nt, Artificial Sequence
  Description of Artificial Sequence: Synthetic oligonucleotide
  Antisense strand to SEQ ID NO: 2334386
uucccggccaagaaaccuc

SEQ ID NO: 2334388 - RNA, 19 nt, Artificial Sequence
  Description of Artificial Sequence: Synthetic oligonucleotide
  Sense strand starting at position 1930 of SEQ ID NO: 1885334
agguuucuuggccgggaaa

SEQ ID NO: 2334389 - RNA, 19 nt, Artificial Sequence
  Description of Artificial Sequence: Synthetic oligonucleotide
  Antisense strand to SEQ ID NO: 2334388
uuucccggccaagaaaccu

SEQ ID NO: 2334390 - RNA, 19 nt, Artificial Sequence
  Description of Artificial Sequence: Synthetic oligonucleotide
  Sense strand starting at position 1931 of SEQ ID NO: 1885334
gguuucuuggccgggaaag

SEQ ID NO: 2334391 - RNA, 19 nt, Artificial Sequence
  Description of Artificial Sequence: Synthetic oligonucleotide
  Antisense strand to SEQ ID NO: 2334390
cuuucccggccaagaaacc

SEQ ID NO: 2334392 - RNA, 19 nt, Artificial Sequence
  Description of Artificial Sequence: Synthetic oligonucleotide
  Sense strand starting at position 2429 of SEQ ID NO: 1885334
ggucgcuuucaggaguuua

SEQ ID NO: 2334393 - RNA, 19 nt, Artificial Sequence
  Description of Artificial Sequence: Synthetic oligonucleotide
  Antisense strand to SEQ ID NO: 2334392
uaaacuccugaaagcgacc

SEQ ID NO: 2334394 - RNA, 19 nt, Artificial Sequence
  Description of Artificial Sequence: Synthetic oligonucleotide
  Sense strand starting at position 2457 of SEQ ID NO: 1885334
aggucuucacguucgugua

SEQ ID NO: 2334395 - RNA, 19 nt, Artificial Sequence
  Description of Artificial Sequence: Synthetic oligonucleotide
  Antisense strand to SEQ ID NO: 2334394
uacacgaacgugaagaccu

SEQ ID NO: 2334396 - RNA, 19 nt, Artificial Sequence
  Description of Artificial Sequence: Synthetic oligonucleotide
  Sense strand starting at position 2706 of SEQ ID NO: 1885334
uucgcugaggcucagagau

SEQ ID NO: 2334397 - RNA, 19 nt, Artificial Sequence
  Description of Artificial Sequence: Synthetic oligonucleotide
  Antisense strand to SEQ ID NO: 2334396
aucucugagccucagcgaa

SEQ ID NO: 2334398 - RNA, 19 nt, Artificial Sequence
  Description of Artificial Sequence: Synthetic oligonucleotide
  Sense strand starting at position 2908 of SEQ ID NO: 1885334
gcaucuuaugucccgcuua

SEQ ID NO: 2334399 - RNA, 19 nt, Artificial Sequence
  Description of Artificial Sequence: Synthetic oligonucleotide
  Antisense strand to SEQ ID NO: 2334398
uaagcgggacauaagaugc

SEQ ID NO: 2334400 - RNA, 19 nt, Artificial Sequence
  Description of Artificial Sequence: Synthetic oligonucleotide
  Sense strand starting at position 3156 of SEQ ID NO: 1885334
cugagaagccaguguauuc

SEQ ID NO: 2334401 - RNA, 19 nt, Artificial Sequence
  Description of Artificial Sequence: Synthetic oligonucleotide
  Antisense strand to SEQ ID NO: 2334400
gaauacacuggcuucucag

SEQ ID NO: 2334402 - RNA, 19 nt, Artificial Sequence
  Description of Artificial Sequence: Synthetic oligonucleotide
  Sense strand starting at position 3328 of SEQ ID NO: 1885334
ugaugagacugagauccua

SEQ ID NO: 2334403 - RNA, 19 nt, Artificial Sequence
  Description of Artificial Sequence: Synthetic oligonucleotide
  Antisense strand to SEQ ID NO: 2334402
uaggaucucagucucauca

SEQ ID NO: 2334404 - RNA, 19 nt, Artificial Sequence
  Description of Artificial Sequence: Synthetic oligonucleotide
  Sense strand starting at position 3344 of SEQ ID NO: 1885334
cuaggaucauucgcugaag

SEQ ID NO: 2334405 - RNA, 19 nt, Artificial Sequence
  Description of Artificial Sequence: Synthetic oligonucleotide
  Antisense strand to SEQ ID NO: 2334404
cuucagcgaaugauccuag

SEQ ID NO: 2334406 - RNA, 19 nt, Artificial Sequence
  Description of Artificial Sequence: Synthetic oligonucleotide
  Sense strand starting at position 3345 of SEQ ID NO: 1885334
uaggaucauucgcugaaga

SEQ ID NO: 2334407 - RNA, 19 nt, Artificial Sequence
  Description of Artificial Sequence: Synthetic oligonucleotide
  Antisense strand to SEQ ID NO: 2334406
ucuucagcgaaugauccua

SEQ ID NO: 2334408 - RNA, 19 nt, Artificial Sequence
  Description of Artificial Sequence: Synthetic oligonucleotide
  Sense strand starting at position 3346 of SEQ ID NO: 1885334
aggaucauucgcugaagag

SEQ ID NO: 2334409 - RNA, 19 nt, Artificial Sequence
  Description of Artificial Sequence: Synthetic oligonucleotide
  Antisense strand to SEQ ID NO: 2334408
cucuucagcgaaugauccu

SEQ ID NO: 2334410 - RNA, 19 nt, Artificial Sequence
  Description of Artificial Sequence: Synthetic oligonucleotide
  Sense strand starting at position 3347 of SEQ ID NO: 1885334
ggaucauucgcugaagagc

SEQ ID NO: 2334411 - RNA, 19 nt, Artificial Sequence
  Description of Artificial Sequence: Synthetic oligonucleotide
  Antisense strand to SEQ ID NO: 2334410
gcucuucagcgaaugaucc

SEQ ID NO: 2334412 - RNA, 19 nt, Artificial Sequence
  Description of Artificial Sequence: Synthetic oligonucleotide
  Sense strand starting at position 3485 of SEQ ID NO: 1885334
caggacuucuagccguuau

SEQ ID NO: 2334413 - RNA, 19 nt, Artificial Sequence
  Description of Artificial Sequence: Synthetic oligonucleotide
  Antisense strand to SEQ ID NO: 2334412
auaacggcuagaaguccug

SEQ ID NO: 2334414 - RNA, 19 nt, Artificial Sequence
  Description of Artificial Sequence: Synthetic oligonucleotide
  Sense strand starting at position 3486 of SEQ ID NO: 1885334
aggacuucuagccguuauu

SEQ ID NO: 2334415 - RNA, 19 nt, Artificial Sequence
  Description of Artificial Sequence: Synthetic oligonucleotide
  Antisense strand to SEQ ID NO: 2334414
aauaacggcuagaaguccu

SEQ ID NO: 2334416 - RNA, 19 nt, Artificial Sequence
  Description of Artificial Sequence: Synthetic oligonucleotide
  Sense strand starting at position 3489 of SEQ ID NO: 1885334
acuucuagccguuauucca

SEQ ID NO: 2334417 - RNA, 19 nt, Artificial Sequence
  Description of Artificial Sequence: Synthetic oligonucleotide
  Antisense strand to SEQ ID NO: 2334416
uggaauaacggcuagaagu

SEQ ID NO: 2334418 - RNA, 19 nt, Artificial Sequence
  Description of Artificial Sequence: Synthetic oligonucleotide
  Sense strand starting at position 3612 of SEQ ID NO: 1885334
uuaggaguuauugaugcca

SEQ ID NO: 2334419 - RNA, 19 nt, Artificial Sequence
  Description of Artificial Sequence: Synthetic oligonucleotide
  Antisense strand to SEQ ID NO: 2334418
uggcaucaauaacuccuaa

SEQ ID NO: 2334420 - RNA, 19 nt, Artificial Sequence
  Description of Artificial Sequence: Synthetic oligonucleotide
  Sense strand starting at position 3628 of SEQ ID NO: 1885334
ccacgugcugguuuaguua

SEQ ID NO: 2334421 - RNA, 19 nt, Artificial Sequence
  Description of Artificial Sequence: Synthetic oligonucleotide
  Antisense strand to SEQ ID NO: 2334420
uaacuaaaccagcacgugg

SEQ ID NO: 2334422 - RNA, 19 nt, Artificial Sequence
  Description of Artificial Sequence: Synthetic oligonucleotide
  Sense strand starting at position 3661 of SEQ ID NO: 1885334
ucgaauuaggcuuaaagau

SEQ ID NO: 2334423 - RNA, 19 nt, Artificial Sequence
  Description of Artificial Sequence: Synthetic oligonucleotide
  Antisense strand to SEQ ID NO: 2334422
aucuuuaagccuaauucga

SEQ ID NO: 2334424 - RNA, 19 nt, Artificial Sequence
  Description of Artificial Sequence: Synthetic oligonucleotide
  Sense strand starting at position 3812 of SEQ ID NO: 1885334
aggaaugugaaaugugagu

SEQ ID NO: 2334425 - RNA, 19 nt, Artificial Sequence
  Description of Artificial Sequence: Synthetic oligonucleotide
  Antisense strand to SEQ ID NO: 2334424
acucacauuucacauuccu

SEQ ID NO: 2334426 - RNA, 19 nt, Artificial Sequence
  Description of Artificial Sequence: Synthetic oligonucleotide
  Sense strand starting at position 3814 of SEQ ID NO: 1885334
gaaugugaaaugugaguag

SEQ ID NO: 2334427 - RNA, 19 nt, Artificial Sequence
  Description of Artificial Sequence: Synthetic oligonucleotide
  Antisense strand to SEQ ID NO: 2334426
cuacucacauuucacauuc

SEQ ID NO: 2334428 - RNA, 19 nt, Artificial Sequence
  Description of Artificial Sequence: Synthetic oligonucleotide
  Sense strand starting at position 3817 of SEQ ID NO: 1885334
ugugaaaugugaguagcau

SEQ ID NO: 2334429 - RNA, 19 nt, Artificial Sequence
  Description of Artificial Sequence: Synthetic oligonucleotide
  Antisense strand to SEQ ID NO: 2334428
augcuacucacauuucaca

SEQ ID NO: 2334430 - RNA, 19 nt, Artificial Sequence
  Description of Artificial Sequence: Synthetic oligonucleotide
  Sense strand starting at position 3818 of SEQ ID NO: 1885334
gugaaaugugaguagcauu

SEQ ID NO: 2334431 - RNA, 19 nt, Artificial Sequence
  Description of Artificial Sequence: Synthetic oligonucleotide
  Antisense strand to SEQ ID NO: 2334430
aaugcuacucacauuucac

SEQ ID NO: 2334432 - RNA, 19 nt, Artificial Sequence
  Description of Artificial Sequence: Synthetic oligonucleotide
  Sense strand starting at position 3830 of SEQ ID NO: 1885334
uagcauuaaccacgggaca

SEQ ID NO: 2334433 - RNA, 19 nt, Artificial Sequence
  Description of Artificial Sequence: Synthetic oligonucleotide
  Antisense strand to SEQ ID NO: 2334432
ugucccgugguuaaugcua

SEQ ID NO: 2334434 - RNA, 19 nt, Artificial Sequence
  Description of Artificial Sequence: Synthetic oligonucleotide
  Sense strand starting at position 3832 of SEQ ID NO: 1885334
gcauuaaccacgggacagu

SEQ ID NO: 2334435 - RNA, 19 nt, Artificial Sequence
  Description of Artificial Sequence: Synthetic oligonucleotide
  Antisense strand to SEQ ID NO: 2334434
acugucccgugguuaaugc

SEQ ID NO: 2334436 - RNA, 19 nt, Artificial Sequence
  Description of Artificial Sequence: Synthetic oligonucleotide
  Sense strand starting at position 3855 of SEQ ID NO: 1885334
aggucuaaggaaugagcuu

SEQ ID NO: 2334437 - RNA, 19 nt, Artificial Sequence
  Description of Artificial Sequence: Synthetic oligonucleotide
  Antisense strand to SEQ ID NO: 2334436
aagcucauuccuuagaccu

SEQ ID NO: 2334438 - RNA, 19 nt, Artificial Sequence
  Description of Artificial Sequence: Synthetic oligonucleotide
  Sense strand starting at position 3856 of SEQ ID NO: 1885334
ggucuaaggaaugagcuuu

SEQ ID NO: 2334439 - RNA, 19 nt, Artificial Sequence
  Description of Artificial Sequence: Synthetic oligonucleotide
  Antisense strand to SEQ ID NO: 2334438
aaagcucauuccuuagacc

SEQ ID NO: 2334440 - RNA, 19 nt, Artificial Sequence
  Description of Artificial Sequence: Synthetic oligonucleotide
  Sense strand starting at position 3893 of SEQ ID NO: 1885334
aaacuuugagcuggucuga

SEQ ID NO: 2334441 - RNA, 19 nt, Artificial Sequence
  Description of Artificial Sequence: Synthetic oligonucleotide
  Antisense strand to SEQ ID NO: 2334440
ucagaccagcucaaaguuu

SEQ ID NO: 2334442 - RNA, 19 nt, Artificial Sequence
  Description of Artificial Sequence: Synthetic oligonucleotide
  Sense strand starting at position 3903 of SEQ ID NO: 1885334
cuggucugaaggugacuua

SEQ ID NO: 2334443 - RNA, 19 nt, Artificial Sequence
  Description of Artificial Sequence: Synthetic oligonucleotide
  Antisense strand to SEQ ID NO: 2334442
uaagucaccuucagaccag

SEQ ID NO: 2334444 - RNA, 19 nt, Artificial Sequence
  Description of Artificial Sequence: Synthetic oligonucleotide
  Sense strand starting at position 3906 of SEQ ID NO: 1885334
gucugaaggugacuuagaa

SEQ ID NO: 2334445 - RNA, 19 nt, Artificial Sequence
  Description of Artificial Sequence: Synthetic oligonucleotide
  Antisense strand to SEQ ID NO: 2334444
uucuaagucaccuucagac

SEQ ID NO: 2334446 - RNA, 19 nt, Artificial Sequence
  Description of Artificial Sequence: Synthetic oligonucleotide
  Sense strand starting at position 3910 of SEQ ID NO: 1885334
gaaggugacuuagaaagau

SEQ ID NO: 2334447 - RNA, 19 nt, Artificial Sequence
  Description of Artificial Sequence: Synthetic oligonucleotide
  Antisense strand to SEQ ID NO: 2334446
aucuuucuaagucaccuuc

SEQ ID NO: 2334448 - RNA, 19 nt, Artificial Sequence
  Description of Artificial Sequence: Synthetic oligonucleotide
  Sense strand starting at position 117 of SEQ ID NO: 1885335
aucauuuguucugauuucu

SEQ ID NO: 2334449 - RNA, 19 nt, Artificial Sequence
  Description of Artificial Sequence: Synthetic oligonucleotide
  Antisense strand to SEQ ID NO: 2334448
agaaaucagaacaaaugau

SEQ ID NO: 2334450 - RNA, 19 nt, Artificial Sequence
  Description of Artificial Sequence: Synthetic oligonucleotide
  Sense strand starting at position 126 of SEQ ID NO: 1885335
ucugauuucuggccauugu

SEQ ID NO: 2334451 - RNA, 19 nt, Artificial Sequence
  Description of Artificial Sequence: Synthetic oligonucleotide
  Antisense strand to SEQ ID NO: 2334450
acaauggccagaaaucaga

SEQ ID NO: 2334452 - RNA, 19 nt, Artificial Sequence
  Description of Artificial Sequence: Synthetic oligonucleotide
  Sense strand starting at position 286 of SEQ ID NO: 1885335
accacagaagccuagugau

SEQ ID NO: 2334453 - RNA, 19 nt, Artificial Sequence
  Description of Artificial Sequence: Synthetic oligonucleotide
  Antisense strand to SEQ ID NO: 2334452
aucacuaggcuucuguggu

SEQ ID NO: 2334454 - RNA, 19 nt, Artificial Sequence
  Description of Artificial Sequence: Synthetic oligonucleotide
  Sense strand starting at position 314 of SEQ ID NO: 1885335
ggaacuuaccuuuguuuga

SEQ ID NO: 2334455 - RNA, 19 nt, Artificial Sequence
  Description of Artificial Sequence: Synthetic oligonucleotide
  Antisense strand to SEQ ID NO: 2334454
ucaaacaaagguaaguucc

SEQ ID NO: 2334456 - RNA, 19 nt, Artificial Sequence
  Description of Artificial Sequence: Synthetic oligonucleotide
  Sense strand starting at position 468 of SEQ ID NO: 1885335
cacgcaguucuuuaagaaa

SEQ ID NO: 2334457 - RNA, 19 nt, Artificial Sequence
  Description of Artificial Sequence: Synthetic oligonucleotide
  Antisense strand to SEQ ID NO: 2334456
uuucuuaaagaacugcgug

SEQ ID NO: 2334458 - RNA, 19 nt, Artificial Sequence
  Description of Artificial Sequence: Synthetic oligonucleotide
  Sense strand starting at position 548 of SEQ ID NO: 1885335
ccuagaguuucuguaagga

SEQ ID NO: 2334459 - RNA, 19 nt, Artificial Sequence
  Description of Artificial Sequence: Synthetic oligonucleotide
  Antisense strand to SEQ ID NO: 2334458
uccuuacagaaacucuagg

SEQ ID NO: 2334460 - RNA, 19 nt, Artificial Sequence
  Description of Artificial Sequence: Synthetic oligonucleotide
  Sense strand starting at position 563 of SEQ ID NO: 1885335
aggacuugacucugaagca

SEQ ID NO: 2334461 - RNA, 19 nt, Artificial Sequence
  Description of Artificial Sequence: Synthetic oligonucleotide
  Antisense strand to SEQ ID NO: 2334460
ugcuucagagucaaguccu

SEQ ID NO: 2334462 - RNA, 19 nt, Artificial Sequence
  Description of Artificial Sequence: Synthetic oligonucleotide
  Sense strand starting at position 757 of SEQ ID NO: 1885335
ugccaaagucuggauauaa

SEQ ID NO: 2334463 - RNA, 19 nt, Artificial Sequence
  Description of Artificial Sequence: Synthetic oligonucleotide
  Antisense strand to SEQ ID NO: 2334462
uuauauccagacuuuggca

SEQ ID NO: 2334464 - RNA, 19 nt, Artificial Sequence
  Description of Artificial Sequence: Synthetic oligonucleotide
  Sense strand starting at position 792 of SEQ ID NO: 1885335
gauuaaaggcaugagcuuu

SEQ ID NO: 2334465 - RNA, 19 nt, Artificial Sequence
  Description of Artificial Sequence: Synthetic oligonucleotide
  Antisense strand to SEQ ID NO: 2334464
aaagcucaugccuuuaauc

SEQ ID NO: 2334466 - RNA, 19 nt, Artificial Sequence
  Description of Artificial Sequence: Synthetic oligonucleotide
  Sense strand starting at position 868 of SEQ ID NO: 1885335
auaagacucuuggccauua

SEQ ID NO: 2334467 - RNA, 19 nt, Artificial Sequence
  Description of Artificial Sequence: Synthetic oligonucleotide
  Antisense strand to SEQ ID NO: 2334466
uaauggccaagagucuuau

SEQ ID NO: 2334468 - RNA, 19 nt, Artificial Sequence
  Description of Artificial Sequence: Synthetic oligonucleotide
  Sense strand starting at position 884 of SEQ ID NO: 1885335
uuagcuaucucauuuguca

SEQ ID NO: 2334469 - RNA, 19 nt, Artificial Sequence
  Description of Artificial Sequence: Synthetic oligonucleotide
  Antisense strand to SEQ ID NO: 2334468
ugacaaaugagauagcuaa

SEQ ID NO: 2334470 - RNA, 19 nt, Artificial Sequence
  Description of Artificial Sequence: Synthetic oligonucleotide
  Sense strand starting at position 1022 of SEQ ID NO: 1885335
ggaggcacuuaauauuuga

SEQ ID NO: 2334471 - RNA, 19 nt, Artificial Sequence
  Description of Artificial Sequence: Synthetic oligonucleotide
  Antisense strand to SEQ ID NO: 2334470
ucaaauauuaagugccucc

SEQ ID NO: 2334472 - RNA, 19 nt, Artificial Sequence
  Description of Artificial Sequence: Synthetic oligonucleotide
  Sense strand starting at position 1038 of SEQ ID NO: 1885335
ugaugauugacugagcugu

SEQ ID NO: 2334473 - RNA, 19 nt, Artificial Sequence
  Description of Artificial Sequence: Synthetic oligonucleotide
  Antisense strand to SEQ ID NO: 2334472
acagcucagucaaucauca

SEQ ID NO: 2334474 - RNA, 19 nt, Artificial Sequence
  Description of Artificial Sequence: Synthetic oligonucleotide
  Sense strand starting at position 1040 of SEQ ID NO: 1885335
augauugacugagcuguga

SEQ ID NO: 2334475 - RNA, 19 nt, Artificial Sequence
  Description of Artificial Sequence: Synthetic oligonucleotide
  Antisense strand to SEQ ID NO: 2334474
ucacagcucagucaaucau

SEQ ID NO: 2334476 - RNA, 19 nt, Artificial Sequence
  Description of Artificial Sequence: Synthetic oligonucleotide
  Sense strand starting at position 1044 of SEQ ID NO: 1885335
uugacugagcugugaaaug

SEQ ID NO: 2334477 - RNA, 19 nt, Artificial Sequence
  Description of Artificial Sequence: Synthetic oligonucleotide
  Antisense strand to SEQ ID NO: 2334476
cauuucacagcucagucaa

SEQ ID NO: 2334478 - RNA, 19 nt, Artificial Sequence
  Description of Artificial Sequence: Synthetic oligonucleotide
  Sense strand starting at position 1054 of SEQ ID NO: 1885335
ugugaaaugaugcaccuga

SEQ ID NO: 2334479 - RNA, 19 nt, Artificial Sequence
  Description of Artificial Sequence: Synthetic oligonucleotide
  Antisense strand to SEQ ID NO: 2334478
ucaggugcaucauuucaca

SEQ ID NO: 2334480 - RNA, 19 nt, Artificial Sequence
  Description of Artificial Sequence: Synthetic oligonucleotide
  Sense strand starting at position 1081 of SEQ ID NO: 1885335
cugccucauuaauuaggau

SEQ ID NO: 2334481 - RNA, 19 nt, Artificial Sequence
  Description of Artificial Sequence: Synthetic oligonucleotide
  Antisense strand to SEQ ID NO: 2334480
auccuaauuaaugaggcag

SEQ ID NO: 2334482 - RNA, 19 nt, Artificial Sequence
  Description of Artificial Sequence: Synthetic oligonucleotide
  Sense strand starting at position 1106 of SEQ ID NO: 1885335
uggaauccagcucaguauu

SEQ ID NO: 2334483 - RNA, 19 nt, Artificial Sequence
  Description of Artificial Sequence: Synthetic oligonucleotide
  Antisense strand to SEQ ID NO: 2334482
aauacugagcuggauucca

SEQ ID NO: 2334484 - RNA, 19 nt, Artificial Sequence
  Description of Artificial Sequence: Synthetic oligonucleotide
  Sense strand starting at position 1298 of SEQ ID NO: 1885335
gaguuugguagugauauuc

SEQ ID NO: 2334485 - RNA, 19 nt, Artificial Sequence
  Description of Artificial Sequence: Synthetic oligonucleotide
  Antisense strand to SEQ ID NO: 2334484
gaauaucacuaccaaacuc

SEQ ID NO: 2334486 - RNA, 19 nt, Artificial Sequence
  Description of Artificial Sequence: Synthetic oligonucleotide
  Sense strand starting at position 1374 of SEQ ID NO: 1885335
gaacguggcaaguaugaca

SEQ ID NO: 2334487 - RNA, 19 nt, Artificial Sequence
  Description of Artificial Sequence: Synthetic oligonucleotide
  Antisense strand to SEQ ID NO: 2334486
ugucauacuugccacguuc

SEQ ID NO: 2334488 - RNA, 19 nt, Artificial Sequence
  Description of Artificial Sequence: Synthetic oligonucleotide
  Sense strand starting at position 1381 of SEQ ID NO: 1885335
gcaaguaugacagaauagu

SEQ ID NO: 2334489 - RNA, 19 nt, Artificial Sequence
  Description of Artificial Sequence: Synthetic oligonucleotide
  Antisense strand to SEQ ID NO: 2334488
acuauucugucauacuugc

SEQ ID NO: 2334490 - RNA, 19 nt, Artificial Sequence
  Description of Artificial Sequence: Synthetic oligonucleotide
  Sense strand starting at position 1433 of SEQ ID NO: 1885335
gacugacgugauuggaaau

SEQ ID NO: 2334491 - RNA, 19 nt, Artificial Sequence
  Description of Artificial Sequence: Synthetic oligonucleotide
  Antisense strand to SEQ ID NO: 2334490
auuuccaaucacgucaguc

SEQ ID NO: 2334492 - RNA, 19 nt, Artificial Sequence
  Description of Artificial Sequence: Synthetic oligonucleotide
  Sense strand starting at position 1434 of SEQ ID NO: 1885335
acugacgugauuggaaaua

SEQ ID NO: 2334493 - RNA, 19 nt, Artificial Sequence
  Description of Artificial Sequence: Synthetic oligonucleotide
  Antisense strand to SEQ ID NO: 2334492
uauuuccaaucacgucagu

SEQ ID NO: 2334494 - RNA, 19 nt, Artificial Sequence
  Description of Artificial Sequence: Synthetic oligonucleotide
  Sense strand starting at position 1444 of SEQ ID NO: 1885335
uuggaaauagcaggucaau

SEQ ID NO: 2334495 - RNA, 19 nt, Artificial Sequence
  Description of Artificial Sequence: Synthetic oligonucleotide
  Antisense strand to SEQ ID NO: 2334494
auugaccugcuauuuccaa

SEQ ID NO: 2334496 - RNA, 19 nt, Artificial Sequence
  Description of Artificial Sequence: Synthetic oligonucleotide
  Sense strand starting at position 1643 of SEQ ID NO: 1885335
cagagcucugugggaugaa

SEQ ID NO: 2334497 - RNA, 19 nt, Artificial Sequence
  Description of Artificial Sequence: Synthetic oligonucleotide
  Antisense strand to SEQ ID NO: 2334496
uucaucccacagagcucug

SEQ ID NO: 2334498 - RNA, 19 nt, Artificial Sequence
  Description of Artificial Sequence: Synthetic oligonucleotide
  Sense strand starting at position 1807 of SEQ ID NO: 1885335
uagugauggaguggaccau

SEQ ID NO: 2334499 - RNA, 19 nt, Artificial Sequence
  Description of Artificial Sequence: Synthetic oligonucleotide
  Antisense strand to SEQ ID NO: 2334498
augguccacuccaucacua

SEQ ID NO: 2334500 - RNA, 19 nt, Artificial Sequence
  Description of Artificial Sequence: Synthetic oligonucleotide
  Sense strand starting at position 1925 of SEQ ID NO: 1885335
cuagcuuugccaguugcua

SEQ ID NO: 2334501 - RNA, 19 nt, Artificial Sequence
  Description of Artificial Sequence: Synthetic oligonucleotide
  Antisense strand to SEQ ID NO: 2334500
uagcaacuggcaaagcuag

SEQ ID NO: 2334502 - RNA, 19 nt, Artificial Sequence
  Description of Artificial Sequence: Synthetic oligonucleotide
  Sense strand starting at position 2063 of SEQ ID NO: 1885335
cagugucuuccacacagua

SEQ ID NO: 2334503 - RNA, 19 nt, Artificial Sequence
  Description of Artificial Sequence: Synthetic oligonucleotide
  Antisense strand to SEQ ID NO: 2334502
uacuguguggaagacacug

SEQ ID NO: 2334504 - RNA, 19 nt, Artificial Sequence
  Description of Artificial Sequence: Synthetic oligonucleotide
  Sense strand starting at position 2248 of SEQ ID NO: 1885335
guuauuuacccucguguga

SEQ ID NO: 2334505 - RNA, 19 nt, Artificial Sequence
  Description of Artificial Sequence: Synthetic oligonucleotide
  Antisense strand to SEQ ID NO: 2334504
ucacacgaggguaaauaac

SEQ ID NO: 2334506 - RNA, 19 nt, Artificial Sequence
  Description of Artificial Sequence: Synthetic oligonucleotide
  Sense strand starting at position 2483 of SEQ ID NO: 1885335
agagauccgagguaaguuu

SEQ ID NO: 2334507 - RNA, 19 nt, Artificial Sequence
  Description of Artificial Sequence: Synthetic oligonucleotide
  Antisense strand to SEQ ID NO: 2334506
aaacuuaccucggaucucu

SEQ ID NO: 2334508 - RNA, 19 nt, Artificial Sequence
  Description of Artificial Sequence: Synthetic oligonucleotide
  Sense strand starting at position 2617 of SEQ ID NO: 1885335
ccuggagccaggcauaaau

SEQ ID NO: 2334509 - RNA, 19 nt, Artificial Sequence
  Description of Artificial Sequence: Synthetic oligonucleotide
  Antisense strand to SEQ ID NO: 2334508
auuuaugccuggcuccagg

SEQ ID NO: 2334510 - RNA, 19 nt, Artificial Sequence
  Description of Artificial Sequence: Synthetic oligonucleotide
  Sense strand starting at position 2669 of SEQ ID NO: 1885335
ggugcuuaugaucagagag

SEQ ID NO: 2334511 - RNA, 19 nt, Artificial Sequence
  Description of Artificial Sequence: Synthetic oligonucleotide
  Antisense strand to SEQ ID NO: 2334510
cucucugaucauaagcacc

SEQ ID NO: 2334512 - RNA, 19 nt, Artificial Sequence
  Description of Artificial Sequence: Synthetic oligonucleotide
  Sense strand starting at position 2839 of SEQ ID NO: 1885335
augguuugcagccagauga

SEQ ID NO: 2334513 - RNA, 19 nt, Artificial Sequence
  Description of Artificial Sequence: Synthetic oligonucleotide
  Antisense strand to SEQ ID NO: 2334512
ucaucuggcugcaaaccau

SEQ ID NO: 2334514 - RNA, 19 nt, Artificial Sequence
  Description of Artificial Sequence: Synthetic oligonucleotide
  Sense strand starting at position 2849 of SEQ ID NO: 1885335
gccagaugaacugguuuga

SEQ ID NO: 2334515 - RNA, 19 nt, Artificial Sequence
  Description of Artificial Sequence: Synthetic oligonucleotide
  Antisense strand to SEQ ID NO: 2334514
ucaaaccaguucaucuggc

SEQ ID NO: 2334516 - RNA, 19 nt, Artificial Sequence
  Description of Artificial Sequence: Synthetic oligonucleotide
  Sense strand starting at position 2930 of SEQ ID NO: 1885335
ucaucuuuaguuugagaac

SEQ ID NO: 2334517 - RNA, 19 nt, Artificial Sequence
  Description of Artificial Sequence: Synthetic oligonucleotide
  Antisense strand to SEQ ID NO: 2334516
guucucaaacuaaagauga

SEQ ID NO: 2334518 - RNA, 19 nt, Artificial Sequence
  Description of Artificial Sequence: Synthetic oligonucleotide
  Sense strand starting at position 3087 of SEQ ID NO: 1885335
ugcaauauacaguggauau

SEQ ID NO: 2334519 - RNA, 19 nt, Artificial Sequence
  Description of Artificial Sequence: Synthetic oligonucleotide
  Antisense strand to SEQ ID NO: 2334518
auauccacuguauauugca

SEQ ID NO: 2334520 - RNA, 19 nt, Artificial Sequence
  Description of Artificial Sequence: Synthetic oligonucleotide
  Sense strand starting at position 3410 of SEQ ID NO: 1885335
uugguugguagacaagauu

SEQ ID NO: 2334521 - RNA, 19 nt, Artificial Sequence
  Description of Artificial Sequence: Synthetic oligonucleotide
  Antisense strand to SEQ ID NO: 2334520
aaucuugucuaccaaccaa

SEQ ID NO: 2334522 - RNA, 19 nt, Artificial Sequence
  Description of Artificial Sequence: Synthetic oligonucleotide
  Sense strand starting at position 3469 of SEQ ID NO: 1885335
guaaauugcccuuaguaaa

SEQ ID NO: 2334523 - RNA, 19 nt, Artificial Sequence
  Description of Artificial Sequence: Synthetic oligonucleotide
  Antisense strand to SEQ ID NO: 2334522
uuuacuaagggcaauuuac

SEQ ID NO: 2334524 - RNA, 19 nt, Artificial Sequence
  Description of Artificial Sequence: Synthetic oligonucleotide
  Sense strand starting at position 3642 of SEQ ID NO: 1885335
gcaagagaggguuggugau

SEQ ID NO: 2334525 - RNA, 19 nt, Artificial Sequence
  Description of Artificial Sequence: Synthetic oligonucleotide
  Antisense strand to SEQ ID NO: 2334524
aucaccaacccucucuugc

SEQ ID NO: 2334526 - RNA, 19 nt, Artificial Sequence
  Description of Artificial Sequence: Synthetic oligonucleotide
  Sense strand starting at position 3922 of SEQ ID NO: 1885335
cagcgagaucauuaaagua

SEQ ID NO: 2334527 - RNA, 19 nt, Artificial Sequence
  Description of Artificial Sequence: Synthetic oligonucleotide
  Antisense strand to SEQ ID NO: 2334526
uacuuuaaugaucucgcug

SEQ ID NO: 2334528 - RNA, 19 nt, Artificial Sequence
  Description of Artificial Sequence: Synthetic oligonucleotide
  Sense strand starting at position 23 of SEQ ID NO: 1885336
gccucauguacagauguga

SEQ ID NO: 2334529 - RNA, 19 nt, Artificial Sequence
  Description of Artificial Sequence: Synthetic oligonucleotide
  Antisense strand to SEQ ID NO: 2334528
ucacaucuguacaugaggc

SEQ ID NO: 2334530 - RNA, 19 nt, Artificial Sequence
  Description of Artificial Sequence: Synthetic oligonucleotide
  Sense strand starting at position 92 of SEQ ID NO: 1885336
auaacucaugcccgaacaa

SEQ ID NO: 2334531 - RNA, 19 nt, Artificial Sequence
  Description of Artificial Sequence: Synthetic oligonucleotide
  Antisense strand to SEQ ID NO: 2334530
uuguucgggcaugaguuau

SEQ ID NO: 2334532 - RNA, 19 nt, Artificial Sequence
  Description of Artificial Sequence: Synthetic oligonucleotide
  Sense strand starting at position 103 of SEQ ID NO: 1885336
ccgaacaaagcuuaucuaa

SEQ ID NO: 2334533 - RNA, 19 nt, Artificial Sequence
  Description of Artificial Sequence: Synthetic oligonucleotide
  Antisense strand to SEQ ID NO: 2334532
uuagauaagcuuuguucgg

SEQ ID NO: 2334534 - RNA, 19 nt, Artificial Sequence
  Description of Artificial Sequence: Synthetic oligonucleotide
  Sense strand starting at position 154 of SEQ ID NO: 1885336
gccuucuugcgcuuaggga

SEQ ID NO: 2334535 - RNA, 19 nt, Artificial Sequence
  Description of Artificial Sequence: Synthetic oligonucleotide
  Antisense strand to SEQ ID NO: 2334534
ucccuaagcgcaagaaggc

SEQ ID NO: 2334536 - RNA, 19 nt, Artificial Sequence
  Description of Artificial Sequence: Synthetic oligonucleotide
  Sense strand starting at position 161 of SEQ ID NO: 1885336
ugcgcuuagggacauuaga

SEQ ID NO: 2334537 - RNA, 19 nt, Artificial Sequence
  Description of Artificial Sequence: Synthetic oligonucleotide
  Antisense strand to SEQ ID NO: 2334536
ucuaaugucccuaagcgca

SEQ ID NO: 2334538 - RNA, 19 nt, Artificial Sequence
  Description of Artificial Sequence: Synthetic oligonucleotide
  Sense strand starting at position 392 of SEQ ID NO: 1885336
uccauauaugacugagagu

SEQ ID NO: 2334539 - RNA, 19 nt, Artificial Sequence
  Description of Artificial Sequence: Synthetic oligonucleotide
  Antisense strand to SEQ ID NO: 2334538
acucucagucauauaugga

SEQ ID NO: 2334540 - RNA, 19 nt, Artificial Sequence
  Description of Artificial Sequence: Synthetic oligonucleotide
  Sense strand starting at position 484 of SEQ ID NO: 1885336
aaugaugauugacuguauu

SEQ ID NO: 2334541 - RNA, 19 nt, Artificial Sequence
  Description of Artificial Sequence: Synthetic oligonucleotide
  Antisense strand to SEQ ID NO: 2334540
aauacagucaaucaucauu

SEQ ID NO: 2334542 - RNA, 19 nt, Artificial Sequence
  Description of Artificial Sequence: Synthetic oligonucleotide
  Sense strand starting at position 497 of SEQ ID NO: 1885336
uguauuuguagagguuacu

SEQ ID NO: 2334543 - RNA, 19 nt, Artificial Sequence
  Description of Artificial Sequence: Synthetic oligonucleotide
  Antisense strand to SEQ ID NO: 2334542
aguaaccucuacaaauaca

SEQ ID NO: 2334544 - RNA, 19 nt, Artificial Sequence
  Description of Artificial Sequence: Synthetic oligonucleotide
  Sense strand starting at position 575 of SEQ ID NO: 1885336
ggugaaguggaaugaauua

SEQ ID NO: 2334545 - RNA, 19 nt, Artificial Sequence
  Description of Artificial Sequence: Synthetic oligonucleotide
  Antisense strand to SEQ ID NO: 2334544
uaauucauuccacuucacc

SEQ ID NO: 2334546 - RNA, 19 nt, Artificial Sequence
  Description of Artificial Sequence: Synthetic oligonucleotide
  Sense strand starting at position 602 of SEQ ID NO: 1885336
agaauuaaugucugacuug

SEQ ID NO: 2334547 - RNA, 19 nt, Artificial Sequence
  Description of Artificial Sequence: Synthetic oligonucleotide
  Antisense strand to SEQ ID NO: 2334546
caagucagacauuaauucu

SEQ ID NO: 2334548 - RNA, 19 nt, Artificial Sequence
  Description of Artificial Sequence: Synthetic oligonucleotide
  Sense strand starting at position 722 of SEQ ID NO: 1885336
augucaucagaaugucaga

SEQ ID NO: 2334549 - RNA, 19 nt, Artificial Sequence
  Description of Artificial Sequence: Synthetic oligonucleotide
  Antisense strand to SEQ ID NO: 2334548
ucugacauucugaugacau

SEQ ID NO: 2334550 - RNA, 19 nt, Artificial Sequence
  Description of Artificial Sequence: Synthetic oligonucleotide
  Sense strand starting at position 785 of SEQ ID NO: 1885336
agguauuaccuagauaugu

SEQ ID NO: 2334551 - RNA, 19 nt, Artificial Sequence
  Description of Artificial Sequence: Synthetic oligonucleotide
  Antisense strand to SEQ ID NO: 2334550
acauaucuagguaauaccu

SEQ ID NO: 2334552 - RNA, 19 nt, Artificial Sequence
  Description of Artificial Sequence: Synthetic oligonucleotide
  Sense strand starting at position 790 of SEQ ID NO: 1885336
uuaccuagauaugugauaa

SEQ ID NO: 2334553 - RNA, 19 nt, Artificial Sequence
  Description of Artificial Sequence: Synthetic oligonucleotide
  Antisense strand to SEQ ID NO: 2334552
uuaucacauaucuagguaa

SEQ ID NO: 2334554 - RNA, 19 nt, Artificial Sequence
  Description of Artificial Sequence: Synthetic oligonucleotide
  Sense strand starting at position 882 of SEQ ID NO: 1885336
uacaguuucgauggaaaca

SEQ ID NO: 2334555 - RNA, 19 nt, Artificial Sequence
  Description of Artificial Sequence: Synthetic oligonucleotide
  Antisense strand to SEQ ID NO: 2334554
uguuuccaucgaaacugua

SEQ ID NO: 2334556 - RNA, 19 nt, Artificial Sequence
  Description of Artificial Sequence: Synthetic oligonucleotide
  Sense strand starting at position 904 of SEQ ID NO: 1885336
cagcacuugcuugaaggaa

SEQ ID NO: 2334557 - RNA, 19 nt, Artificial Sequence
  Description of Artificial Sequence: Synthetic oligonucleotide
  Antisense strand to SEQ ID NO: 2334556
uuccuucaagcaagugcug

SEQ ID NO: 2334558 - RNA, 19 nt, Artificial Sequence
  Description of Artificial Sequence: Synthetic oligonucleotide
  Sense strand starting at position 1028 of SEQ ID NO: 1885336
accacaguauuccugagua

SEQ ID NO: 2334559 - RNA, 19 nt, Artificial Sequence
  Description of Artificial Sequence: Synthetic oligonucleotide
  Antisense strand to SEQ ID NO: 2334558
uacucaggaauacuguggu

SEQ ID NO: 2334560 - RNA, 19 nt, Artificial Sequence
  Description of Artificial Sequence: Synthetic oligonucleotide
  Sense strand starting at position 1107 of SEQ ID NO: 1885336
ccucaaaugcuagaguucu

SEQ ID NO: 2334561 - RNA, 19 nt, Artificial Sequence
  Description of Artificial Sequence: Synthetic oligonucleotide
  Antisense strand to SEQ ID NO: 2334560
agaacucuagcauuugagg

SEQ ID NO: 2334562 - RNA, 19 nt, Artificial Sequence
  Description of Artificial Sequence: Synthetic oligonucleotide
  Sense strand starting at position 1115 of SEQ ID NO: 1885336
gcuagaguucuagaugacg

SEQ ID NO: 2334563 - RNA, 19 nt, Artificial Sequence
  Description of Artificial Sequence: Synthetic oligonucleotide
  Antisense strand to SEQ ID NO: 2334562
cgucaucuagaacucuagc

SEQ ID NO: 2334564 - RNA, 19 nt, Artificial Sequence
  Description of Artificial Sequence: Synthetic oligonucleotide
  Sense strand starting at position 1118 of SEQ ID NO: 1885336
agaguucuagaugacgcau

SEQ ID NO: 2334565 - RNA, 19 nt, Artificial Sequence
  Description of Artificial Sequence: Synthetic oligonucleotide
  Antisense strand to SEQ ID NO: 2334564
augcgucaucuagaacucu

SEQ ID NO: 2334566 - RNA, 19 nt, Artificial Sequence
  Description of Artificial Sequence: Synthetic oligonucleotide
  Sense strand starting at position 1127 of SEQ ID NO: 1885336
gaugacgcauuaguuuaaa

SEQ ID NO: 2334567 - RNA, 19 nt, Artificial Sequence
  Description of Artificial Sequence: Synthetic oligonucleotide
  Antisense strand to SEQ ID NO: 2334566
uuuaaacuaaugcgucauc

SEQ ID NO: 2334568 - RNA, 19 nt, Artificial Sequence
  Description of Artificial Sequence: Synthetic oligonucleotide
  Sense strand starting at position 1130 of SEQ ID NO: 1885336
gacgcauuaguuuaaaugu

SEQ ID NO: 2334569 - RNA, 19 nt, Artificial Sequence
  Description of Artificial Sequence: Synthetic oligonucleotide
  Antisense strand to SEQ ID NO: 2334568
acauuuaaacuaaugcguc

SEQ ID NO: 2334570 - RNA, 19 nt, Artificial Sequence
  Description of Artificial Sequence: Synthetic oligonucleotide
  Sense strand starting at position 1166 of SEQ ID NO: 1885336
acauguaauuuggaacaua

SEQ ID NO: 2334571 - RNA, 19 nt, Artificial Sequence
  Description of Artificial Sequence: Synthetic oligonucleotide
  Antisense strand to SEQ ID NO: 2334570
uauguuccaaauuacaugu

SEQ ID NO: 2334572 - RNA, 19 nt, Artificial Sequence
  Description of Artificial Sequence: Synthetic oligonucleotide
  Sense strand starting at position 1294 of SEQ ID NO: 1885336
uaguuucuugccgugggua

SEQ ID NO: 2334573 - RNA, 19 nt, Artificial Sequence
  Description of Artificial Sequence: Synthetic oligonucleotide
  Antisense strand to SEQ ID NO: 2334572
uacccacggcaagaaacua

SEQ ID NO: 2334574 - RNA, 19 nt, Artificial Sequence
  Description of Artificial Sequence: Synthetic oligonucleotide
  Sense strand starting at position 1454 of SEQ ID NO: 1885336
cauguuaacuauuucgguu

SEQ ID NO: 2334575 - RNA, 19 nt, Artificial Sequence
  Description of Artificial Sequence: Synthetic oligonucleotide
  Antisense strand to SEQ ID NO: 2334574
aaccgaaauaguuaacaug

SEQ ID NO: 2334576 - RNA, 19 nt, Artificial Sequence
  Description of Artificial Sequence: Synthetic oligonucleotide
  Sense strand starting at position 1531 of SEQ ID NO: 1885336
ugcauaauuuauguugcuu

SEQ ID NO: 2334577 - RNA, 19 nt, Artificial Sequence
  Description of Artificial Sequence: Synthetic oligonucleotide
  Antisense strand to SEQ ID NO: 2334576
aagcaacauaaauuaugca

SEQ ID NO: 2334578 - RNA, 19 nt, Artificial Sequence
  Description of Artificial Sequence: Synthetic oligonucleotide
  Sense strand starting at position 1564 of SEQ ID NO: 1885336
auugcauuagaauaguaac

SEQ ID NO: 2334579 - RNA, 19 nt, Artificial Sequence
  Description of Artificial Sequence: Synthetic oligonucleotide
  Antisense strand to SEQ ID NO: 2334578
guuacuauucuaaugcaau

SEQ ID NO: 2334580 - RNA, 19 nt, Artificial Sequence
  Description of Artificial Sequence: Synthetic oligonucleotide
  Sense strand starting at position 2782 of SEQ ID NO: 1885336
uagagauugucaucuaagg

SEQ ID NO: 2334581 - RNA, 19 nt, Artificial Sequence
  Description of Artificial Sequence: Synthetic oligonucleotide
  Antisense strand to SEQ ID NO: 2334580
ccuuagaugacaaucucua

SEQ ID NO: 2334582 - RNA, 19 nt, Artificial Sequence
  Description of Artificial Sequence: Synthetic oligonucleotide
  Sense strand starting at position 2852 of SEQ ID NO: 1885336
caaagucgugcagaaauaa

SEQ ID NO: 2334583 - RNA, 19 nt, Artificial Sequence
  Description of Artificial Sequence: Synthetic oligonucleotide
  Antisense strand to SEQ ID NO: 2334582
uuauuucugcacgacuuug

SEQ ID NO: 2334584 - RNA, 19 nt, Artificial Sequence
  Description of Artificial Sequence: Synthetic oligonucleotide
  Sense strand starting at position 3070 of SEQ ID NO: 1885336
ugugucacuuuacuaaaca

SEQ ID NO: 2334585 - RNA, 19 nt, Artificial Sequence
  Description of Artificial Sequence: Synthetic oligonucleotide
  Antisense strand to SEQ ID NO: 2334584
uguuuaguaaagugacaca

SEQ ID NO: 2334586 - RNA, 19 nt, Artificial Sequence
  Description of Artificial Sequence: Synthetic oligonucleotide
  Sense strand starting at position 3521 of SEQ ID NO: 1885336
uaauguuuacgggacuaug

SEQ ID NO: 2334587 - RNA, 19 nt, Artificial Sequence
  Description of Artificial Sequence: Synthetic oligonucleotide
  Antisense strand to SEQ ID NO: 2334586
cauagucccguaaacauua

SEQ ID NO: 2334588 - RNA, 19 nt, Artificial Sequence
  Description of Artificial Sequence: Synthetic oligonucleotide
  Sense strand starting at position 3633 of SEQ ID NO: 1885336
augaaagcaucuuuguaga

SEQ ID NO: 2334589 - RNA, 19 nt, Artificial Sequence
  Description of Artificial Sequence: Synthetic oligonucleotide
  Antisense strand to SEQ ID NO: 2334588
ucuacaaagaugcuuucau

SEQ ID NO: 2334590 - RNA, 19 nt, Artificial Sequence
  Description of Artificial Sequence: Synthetic oligonucleotide
  Sense strand starting at position 3635 of SEQ ID NO: 1885336
gaaagcaucuuuguagaac

SEQ ID NO: 2334591 - RNA, 19 nt, Artificial Sequence
  Description of Artificial Sequence: Synthetic oligonucleotide
  Antisense strand to SEQ ID NO: 2334590
guucuacaaagaugcuuuc

SEQ ID NO: 2334592 - RNA, 19 nt, Artificial Sequence
  Description of Artificial Sequence: Synthetic oligonucleotide
  Sense strand starting at position 3652 of SEQ ID NO: 1885336
accuguuauguaggauaac

SEQ ID NO: 2334593 - RNA, 19 nt, Artificial Sequence
  Description of Artificial Sequence: Synthetic oligonucleotide
  Antisense strand to SEQ ID NO: 2334592
guuauccuacauaacaggu

SEQ ID NO: 2334594 - RNA, 19 nt, Artificial Sequence
  Description of Artificial Sequence: Synthetic oligonucleotide
  Sense strand starting at position 3678 of SEQ ID NO: 1885336
agguuucccuucccgaaga

SEQ ID NO: 2334595 - RNA, 19 nt, Artificial Sequence
  Description of Artificial Sequence: Synthetic oligonucleotide
  Antisense strand to SEQ ID NO: 2334594
ucuucgggaagggaaaccu

SEQ ID NO: 2334596 - RNA, 19 nt, Artificial Sequence
  Description of Artificial Sequence: Synthetic oligonucleotide
  Sense strand starting at position 3680 of SEQ ID NO: 1885336
guuucccuucccgaagaau

SEQ ID NO: 2334597 - RNA, 19 nt, Artificial Sequence
  Description of Artificial Sequence: Synthetic oligonucleotide
  Antisense strand to SEQ ID NO: 2334596
auucuucgggaagggaaac

SEQ ID NO: 2334598 - RNA, 19 nt, Artificial Sequence
  Description of Artificial Sequence: Synthetic oligonucleotide
  Sense strand starting at position 3747 of SEQ ID NO: 1885336
gcagguuacauggaaaguu

SEQ ID NO: 2334599 - RNA, 19 nt, Artificial Sequence
  Description of Artificial Sequence: Synthetic oligonucleotide
  Antisense strand to SEQ ID NO: 2334598
aacuuuccauguaaccugc

SEQ ID NO: 2334600 - RNA, 19 nt, Artificial Sequence
  Description of Artificial Sequence: Synthetic oligonucleotide
  Sense strand starting at position 3806 of SEQ ID NO: 1885336
guauuacuggcguuguuua

SEQ ID NO: 2334601 - RNA, 19 nt, Artificial Sequence
  Description of Artificial Sequence: Synthetic oligonucleotide
  Antisense strand to SEQ ID NO: 2334600
uaaacaacgccaguaauac

SEQ ID NO: 2334602 - RNA, 19 nt, Artificial Sequence
  Description of Artificial Sequence: Synthetic oligonucleotide
  Sense strand starting at position 3863 of SEQ ID NO: 1885336
ucauguuggcaaggaaauu

SEQ ID NO: 2334603 - RNA, 19 nt, Artificial Sequence
  Description of Artificial Sequence: Synthetic oligonucleotide
  Antisense strand to SEQ ID NO: 2334602
aauuuccuugccaacauga

SEQ ID NO: 2334604 - RNA, 19 nt, Artificial Sequence
  Description of Artificial Sequence: Synthetic oligonucleotide
  Sense strand starting at position 3982 of SEQ ID NO: 1885336
ugucguaucagcuuuguca

SEQ ID NO: 2334605 - RNA, 19 nt, Artificial Sequence
  Description of Artificial Sequence: Synthetic oligonucleotide
  Antisense strand to SEQ ID NO: 2334604
ugacaaagcugauacgaca

SEQ ID NO: 2334606 - RNA, 19 nt, Artificial Sequence
  Description of Artificial Sequence: Synthetic oligonucleotide
  Sense strand starting at position 3983 of SEQ ID NO: 1885336
gucguaucagcuuugucau

SEQ ID NO: 2334607 - RNA, 19 nt, Artificial Sequence
  Description of Artificial Sequence: Synthetic oligonucleotide
  Antisense strand to SEQ ID NO: 2334606
augacaaagcugauacgac

SEQ ID NO: 2334608 - RNA, 19 nt, Artificial Sequence
  Description of Artificial Sequence: Synthetic oligonucleotide
  Sense strand starting at position 3 of SEQ ID NO: 1885337
gcaucauauuuaucucugu

SEQ ID NO: 2334609 - RNA, 19 nt, Artificial Sequence
  Description of Artificial Sequence: Synthetic oligonucleotide
  Antisense strand to SEQ ID NO: 2334608
acagagauaaauaugaugc

SEQ ID NO: 2334610 - RNA, 19 nt, Artificial Sequence
  Description of Artificial Sequence: Synthetic oligonucleotide
  Sense strand starting at position 103 of SEQ ID NO: 1885337
uguaauauucccuagguuu

SEQ ID NO: 2334611 - RNA, 19 nt, Artificial Sequence
  Description of Artificial Sequence: Synthetic oligonucleotide
  Antisense strand to SEQ ID NO: 2334610
aaaccuagggaauauuaca

SEQ ID NO: 2334612 - RNA, 19 nt, Artificial Sequence
  Description of Artificial Sequence: Synthetic oligonucleotide
  Sense strand starting at position 233 of SEQ ID NO: 1885337
uggcuacuucuuuacauga

SEQ ID NO: 2334613 - RNA, 19 nt, Artificial Sequence
  Description of Artificial Sequence: Synthetic oligonucleotide
  Antisense strand to SEQ ID NO: 2334612
ucauguaaagaaguagcca

SEQ ID NO: 2334614 - RNA, 19 nt, Artificial Sequence
  Description of Artificial Sequence: Synthetic oligonucleotide
  Sense strand starting at position 243 of SEQ ID NO: 1885337
uuuacaugaggguguuaaa

SEQ ID NO: 2334615 - RNA, 19 nt, Artificial Sequence
  Description of Artificial Sequence: Synthetic oligonucleotide
  Antisense strand to SEQ ID NO: 2334614
uuuaacacccucauguaaa

SEQ ID NO: 2334616 - RNA, 19 nt, Artificial Sequence
  Description of Artificial Sequence: Synthetic oligonucleotide
  Sense strand starting at position 360 of SEQ ID NO: 1885337
aggaauauaccaugguuac

SEQ ID NO: 2334617 - RNA, 19 nt, Artificial Sequence
  Description of Artificial Sequence: Synthetic oligonucleotide
  Antisense strand to SEQ ID NO: 2334616
guaaccaugguauauuccu

SEQ ID NO: 2334618 - RNA, 19 nt, Artificial Sequence
  Description of Artificial Sequence: Synthetic oligonucleotide
  Sense strand starting at position 361 of SEQ ID NO: 1885337
ggaauauaccaugguuaca

SEQ ID NO: 2334619 - RNA, 19 nt, Artificial Sequence
  Description of Artificial Sequence: Synthetic oligonucleotide
  Antisense strand to SEQ ID NO: 2334618
uguaaccaugguauauucc

SEQ ID NO: 2334620 - RNA, 19 nt, Artificial Sequence
  Description of Artificial Sequence: Synthetic oligonucleotide
  Sense strand starting at position 478 of SEQ ID NO: 1885337
auguuagagucauuuguuu

SEQ ID NO: 2334621 - RNA, 19 nt, Artificial Sequence
  Description of Artificial Sequence: Synthetic oligonucleotide
  Antisense strand to SEQ ID NO: 2334620
aaacaaaugacucuaacau

SEQ ID NO: 2334622 - RNA, 19 nt, Artificial Sequence
  Description of Artificial Sequence: Synthetic oligonucleotide
  Sense strand starting at position 674 of SEQ ID NO: 1885337
guauauuaagaucauugca

SEQ ID NO: 2334623 - RNA, 19 nt, Artificial Sequence
  Description of Artificial Sequence: Synthetic oligonucleotide
  Antisense strand to SEQ ID NO: 2334622
ugcaaugaucuuaauauac

SEQ ID NO: 2334624 - RNA, 19 nt, Artificial Sequence
  Description of Artificial Sequence: Synthetic oligonucleotide
  Sense strand starting at position 676 of SEQ ID NO: 1885337
auauuaagaucauugcaug

SEQ ID NO: 2334625 - RNA, 19 nt, Artificial Sequence
  Description of Artificial Sequence: Synthetic oligonucleotide
  Antisense strand to SEQ ID NO: 2334624
caugcaaugaucuuaauau

SEQ ID NO: 2334626 - RNA, 19 nt, Artificial Sequence
  Description of Artificial Sequence: Synthetic oligonucleotide
  Sense strand starting at position 912 of SEQ ID NO: 1885337
aauguagcaguuuagaauu

SEQ ID NO: 2334627 - RNA, 19 nt, Artificial Sequence
  Description of Artificial Sequence: Synthetic oligonucleotide
  Antisense strand to SEQ ID NO: 2334626
aauucuaaacugcuacauu

SEQ ID NO: 2334628 - RNA, 19 nt, Artificial Sequence
  Description of Artificial Sequence: Synthetic oligonucleotide
  Sense strand starting at position 973 of SEQ ID NO: 1885337
uuuauaacaguguaagcaa

SEQ ID NO: 2334629 - RNA, 19 nt, Artificial Sequence
  Description of Artificial Sequence: Synthetic oligonucleotide
  Antisense strand to SEQ ID NO: 2334628
uugcuuacacuguuauaaa

SEQ ID NO: 2334630 - RNA, 19 nt, Artificial Sequence
  Description of Artificial Sequence: Synthetic oligonucleotide
  Sense strand starting at position 1036 of SEQ ID NO: 1885337
ucuauucugcuauguauuu

SEQ ID NO: 2334631 - RNA, 19 nt, Artificial Sequence
  Description of Artificial Sequence: Synthetic oligonucleotide
  Antisense strand to SEQ ID NO: 2334630
aaauacauagcagaauaga

SEQ ID NO: 2334632 - RNA, 19 nt, Artificial Sequence
  Description of Artificial Sequence: Synthetic oligonucleotide
  Sense strand starting at position 1174 of SEQ ID NO: 1885337
aaggcacaugcaugagaaa

SEQ ID NO: 2334633 - RNA, 19 nt, Artificial Sequence
  Description of Artificial Sequence: Synthetic oligonucleotide
  Antisense strand to SEQ ID NO: 2334632
uuucucaugcaugugccuu

SEQ ID NO: 2334634 - RNA, 19 nt, Artificial Sequence
  Description of Artificial Sequence: Synthetic oligonucleotide
  Sense strand starting at position 1201 of SEQ ID NO: 1885337
gcuaaauaugcaugauuaa

SEQ ID NO: 2334635 - RNA, 19 nt, Artificial Sequence
  Description of Artificial Sequence: Synthetic oligonucleotide
  Antisense strand to SEQ ID NO: 2334634
uuaaucaugcauauuuagc

SEQ ID NO: 2334636 - RNA, 19 nt, Artificial Sequence
  Description of Artificial Sequence: Synthetic oligonucleotide
  Sense strand starting at position 1295 of SEQ ID NO: 1885337
aaugaaugguaacuaugua

SEQ ID NO: 2334637 - RNA, 19 nt, Artificial Sequence
  Description of Artificial Sequence: Synthetic oligonucleotide
  Antisense strand to SEQ ID NO: 2334636
uacauaguuaccauucauu

SEQ ID NO: 2334638 - RNA, 19 nt, Artificial Sequence
  Description of Artificial Sequence: Synthetic oligonucleotide
  Sense strand starting at position 1309 of SEQ ID NO: 1885337
auguauuugcuacgaaauu

SEQ ID NO: 2334639 - RNA, 19 nt, Artificial Sequence
  Description of Artificial Sequence: Synthetic oligonucleotide
  Antisense strand to SEQ ID NO: 2334638
aauuucguagcaaauacau

SEQ ID NO: 2334640 - RNA, 19 nt, Artificial Sequence
  Description of Artificial Sequence: Synthetic oligonucleotide
  Sense strand starting at position 1310 of SEQ ID NO: 1885337
uguauuugcuacgaaauuu

SEQ ID NO: 2334641 - RNA, 19 nt, Artificial Sequence
  Description of Artificial Sequence: Synthetic oligonucleotide
  Antisense strand to SEQ ID NO: 2334640
aaauuucguagcaaauaca

SEQ ID NO: 2334642 - RNA, 19 nt, Artificial Sequence
  Description of Artificial Sequence: Synthetic oligonucleotide
  Sense strand starting at position 1452 of SEQ ID NO: 1885337
aggacauuguaccuugaau

SEQ ID NO: 2334643 - RNA, 19 nt, Artificial Sequence
  Description of Artificial Sequence: Synthetic oligonucleotide
  Antisense strand to SEQ ID NO: 2334642
auucaagguacaauguccu

SEQ ID NO: 2334644 - RNA, 19 nt, Artificial Sequence
  Description of Artificial Sequence: Synthetic oligonucleotide
  Sense strand starting at position 1483 of SEQ ID NO: 1885337
acagcugaauagucacaga

SEQ ID NO: 2334645 - RNA, 19 nt, Artificial Sequence
  Description of Artificial Sequence: Synthetic oligonucleotide
  Antisense strand to SEQ ID NO: 2334644
ucugugacuauucagcugu

SEQ ID NO: 2334646 - RNA, 19 nt, Artificial Sequence
  Description of Artificial Sequence: Synthetic oligonucleotide
  Sense strand starting at position 1524 of SEQ ID NO: 1885337
gcuagagaauaauugacuu

SEQ ID NO: 2334647 - RNA, 19 nt, Artificial Sequence
  Description of Artificial Sequence: Synthetic oligonucleotide
  Antisense strand to SEQ ID NO: 2334646
aagucaauuauucucuagc

SEQ ID NO: 2334648 - RNA, 19 nt, Artificial Sequence
  Description of Artificial Sequence: Synthetic oligonucleotide
  Sense strand starting at position 1535 of SEQ ID NO: 1885337
auugacuuugccuaugaaa

SEQ ID NO: 2334649 - RNA, 19 nt, Artificial Sequence
  Description of Artificial Sequence: Synthetic oligonucleotide
  Antisense strand to SEQ ID NO: 2334648
uuucauaggcaaagucaau

SEQ ID NO: 2334650 - RNA, 19 nt, Artificial Sequence
  Description of Artificial Sequence: Synthetic oligonucleotide
  Sense strand starting at position 1575 of SEQ ID NO: 1885337
agaugcuacuucuuaagag

SEQ ID NO: 2334651 - RNA, 19 nt, Artificial Sequence
  Description of Artificial Sequence: Synthetic oligonucleotide
  Antisense strand to SEQ ID NO: 2334650
cucuuaagaaguagcaucu

SEQ ID NO: 2334652 - RNA, 19 nt, Artificial Sequence
  Description of Artificial Sequence: Synthetic oligonucleotide
  Sense strand starting at position 1719 of SEQ ID NO: 1885337
acuguaaccugauuaaaug

SEQ ID NO: 2334653 - RNA, 19 nt, Artificial Sequence
  Description of Artificial Sequence: Synthetic oligonucleotide
  Antisense strand to SEQ ID NO: 2334652
cauuuaaucagguuacagu

SEQ ID NO: 2334654 - RNA, 19 nt, Artificial Sequence
  Description of Artificial Sequence: Synthetic oligonucleotide
  Sense strand starting at position 2079 of SEQ ID NO: 1885337
aaauacuguaguugggaga

SEQ ID NO: 2334655 - RNA, 19 nt, Artificial Sequence
  Description of Artificial Sequence: Synthetic oligonucleotide
  Antisense strand to SEQ ID NO: 2334654
ucucccaacuacaguauuu

SEQ ID NO: 2334656 - RNA, 19 nt, Artificial Sequence
  Description of Artificial Sequence: Synthetic oligonucleotide
  Sense strand starting at position 2140 of SEQ ID NO: 1885337
uggaaaugcaauugaagua

SEQ ID NO: 2334657 - RNA, 19 nt, Artificial Sequence
  Description of Artificial Sequence: Synthetic oligonucleotide
  Antisense strand to SEQ ID NO: 2334656
uacuucaauugcauuucca

SEQ ID NO: 2334658 - RNA, 19 nt, Artificial Sequence
  Description of Artificial Sequence: Synthetic oligonucleotide
  Sense strand starting at position 2201 of SEQ ID NO: 1885337
agucaaauguaccuacuua

SEQ ID NO: 2334659 - RNA, 19 nt, Artificial Sequence
  Description of Artificial Sequence: Synthetic oligonucleotide
  Antisense strand to SEQ ID NO: 2334658
uaaguagguacauuugacu

SEQ ID NO: 2334660 - RNA, 19 nt, Artificial Sequence
  Description of Artificial Sequence: Synthetic oligonucleotide
  Sense strand starting at position 2753 of SEQ ID NO: 1885337
gugaguacucauuggauga

SEQ ID NO: 2334661 - RNA, 19 nt, Artificial Sequence
  Description of Artificial Sequence: Synthetic oligonucleotide
  Antisense strand to SEQ ID NO: 2334660
ucauccaaugaguacucac

SEQ ID NO: 2334662 - RNA, 19 nt, Artificial Sequence
  Description of Artificial Sequence: Synthetic oligonucleotide
  Sense strand starting at position 2754 of SEQ ID NO: 1885337
ugaguacucauuggaugag

SEQ ID NO: 2334663 - RNA, 19 nt, Artificial Sequence
  Description of Artificial Sequence: Synthetic oligonucleotide
  Antisense strand to SEQ ID NO: 2334662
cucauccaaugaguacuca

SEQ ID NO: 2334664 - RNA, 19 nt, Artificial Sequence
  Description of Artificial Sequence: Synthetic oligonucleotide
  Sense strand starting at position 2757 of SEQ ID NO: 1885337
guacucauuggaugaguau

SEQ ID NO: 2334665 - RNA, 19 nt, Artificial Sequence
  Description of Artificial Sequence: Synthetic oligonucleotide
  Antisense strand to SEQ ID NO: 2334664
auacucauccaaugaguac

SEQ ID NO: 2334666 - RNA, 19 nt, Artificial Sequence
  Description of Artificial Sequence: Synthetic oligonucleotide
  Sense strand starting at position 2825 of SEQ ID NO: 1885337
gagguaucacucugggagu

SEQ ID NO: 2334667 - RNA, 19 nt, Artificial Sequence
  Description of Artificial Sequence: Synthetic oligonucleotide
  Antisense strand to SEQ ID NO: 2334666
acucccagagugauaccuc

SEQ ID NO: 2334668 - RNA, 19 nt, Artificial Sequence
  Description of Artificial Sequence: Synthetic oligonucleotide
  Sense strand starting at position 2859 of SEQ ID NO: 1885337
uuauacugcucauugagau

SEQ ID NO: 2334669 - RNA, 19 nt, Artificial Sequence
  Description of Artificial Sequence: Synthetic oligonucleotide
  Antisense strand to SEQ ID NO: 2334668
aucucaaugagcaguauaa

SEQ ID NO: 2334670 - RNA, 19 nt, Artificial Sequence
  Description of Artificial Sequence: Synthetic oligonucleotide
  Sense strand starting at position 2968 of SEQ ID NO: 1885337
auuguauuccucuauggug

SEQ ID NO: 2334671 - RNA, 19 nt, Artificial Sequence
  Description of Artificial Sequence: Synthetic oligonucleotide
  Antisense strand to SEQ ID NO: 2334670
caccauagaggaauacaau

SEQ ID NO: 2334672 - RNA, 19 nt, Artificial Sequence
  Description of Artificial Sequence: Synthetic oligonucleotide
  Sense strand starting at position 2982 of SEQ ID NO: 1885337
ugguguuuaggguauugau

SEQ ID NO: 2334673 - RNA, 19 nt, Artificial Sequence
  Description of Artificial Sequence: Synthetic oligonucleotide
  Antisense strand to SEQ ID NO: 2334672
aucaauacccuaaacacca

SEQ ID NO: 2334674 - RNA, 19 nt, Artificial Sequence
  Description of Artificial Sequence: Synthetic oligonucleotide
  Sense strand starting at position 2991 of SEQ ID NO: 1885337
ggguauugaugagcacauc

SEQ ID NO: 2334675 - RNA, 19 nt, Artificial Sequence
  Description of Artificial Sequence: Synthetic oligonucleotide
  Antisense strand to SEQ ID NO: 2334674
gaugugcucaucaauaccc

SEQ ID NO: 2334676 - RNA, 19 nt, Artificial Sequence
  Description of Artificial Sequence: Synthetic oligonucleotide
  Sense strand starting at position 2992 of SEQ ID NO: 1885337
gguauugaugagcacauca

SEQ ID NO: 2334677 - RNA, 19 nt, Artificial Sequence
  Description of Artificial Sequence: Synthetic oligonucleotide
  Antisense strand to SEQ ID NO: 2334676
ugaugugcucaucaauacc

SEQ ID NO: 2334678 - RNA, 19 nt, Artificial Sequence
  Description of Artificial Sequence: Synthetic oligonucleotide
  Sense strand starting at position 3104 of SEQ ID NO: 1885337
uagugcauuuggucugagu

SEQ ID NO: 2334679 - RNA, 19 nt, Artificial Sequence
  Description of Artificial Sequence: Synthetic oligonucleotide
  Antisense strand to SEQ ID NO: 2334678
acucagaccaaaugcacua

SEQ ID NO: 2334680 - RNA, 19 nt, Artificial Sequence
  Description of Artificial Sequence: Synthetic oligonucleotide
  Sense strand starting at position 3307 of SEQ ID NO: 1885337
accuguuuaccagaagcuu

SEQ ID NO: 2334681 - RNA, 19 nt, Artificial Sequence
  Description of Artificial Sequence: Synthetic oligonucleotide
  Antisense strand to SEQ ID NO: 2334680
aagcuucugguaaacaggu

SEQ ID NO: 2334682 - RNA, 19 nt, Artificial Sequence
  Description of Artificial Sequence: Synthetic oligonucleotide
  Sense strand starting at position 3703 of SEQ ID NO: 1885337
cguauuaccuugucuauuu

SEQ ID NO: 2334683 - RNA, 19 nt, Artificial Sequence
  Description of Artificial Sequence: Synthetic oligonucleotide
  Antisense strand to SEQ ID NO: 2334682
aaauagacaagguaauacg

SEQ ID NO: 2334684 - RNA, 19 nt, Artificial Sequence
  Description of Artificial Sequence: Synthetic oligonucleotide
  Sense strand starting at position 3926 of SEQ ID NO: 1885337
uguaaugaucuaugacauc

SEQ ID NO: 2334685 - RNA, 19 nt, Artificial Sequence
  Description of Artificial Sequence: Synthetic oligonucleotide
  Antisense strand to SEQ ID NO: 2334684
gaugucauagaucauuaca

SEQ ID NO: 2334686 - RNA, 19 nt, Artificial Sequence
  Description of Artificial Sequence: Synthetic oligonucleotide
  Sense strand starting at position 3945 of SEQ ID NO: 1885337
uucucacauguguaaauau

SEQ ID NO: 2334687 - RNA, 19 nt, Artificial Sequence
  Description of Artificial Sequence: Synthetic oligonucleotide
  Antisense strand to SEQ ID NO: 2334686
auauuuacacaugugagaa

SEQ ID NO: 2334688 - RNA, 19 nt, Artificial Sequence
  Description of Artificial Sequence: Synthetic oligonucleotide
  Sense strand starting at position 208 of SEQ ID NO: 1885338
cugccuuguagaucgcauu

SEQ ID NO: 2334689 - RNA, 19 nt, Artificial Sequence
  Description of Artificial Sequence: Synthetic oligonucleotide
  Antisense strand to SEQ ID NO: 2334688
aaugcgaucuacaaggcag

SEQ ID NO: 2334690 - RNA, 19 nt, Artificial Sequence
  Description of Artificial Sequence: Synthetic oligonucleotide
  Sense strand starting at position 231 of SEQ ID NO: 1885338
ugcuaaucuagcguguuaa

SEQ ID NO: 2334691 - RNA, 19 nt, Artificial Sequence
  Description of Artificial Sequence: Synthetic oligonucleotide
  Antisense strand to SEQ ID NO: 2334690
uuaacacgcuagauuagca

SEQ ID NO: 2334692 - RNA, 19 nt, Artificial Sequence
  Description of Artificial Sequence: Synthetic oligonucleotide
  Sense strand starting at position 797 of SEQ ID NO: 1885338
uugucagugcauuaauaau

SEQ ID NO: 2334693 - RNA, 19 nt, Artificial Sequence
  Description of Artificial Sequence: Synthetic oligonucleotide
  Antisense strand to SEQ ID NO: 2334692
auuauuaaugcacugacaa

SEQ ID NO: 2334694 - RNA, 19 nt, Artificial Sequence
  Description of Artificial Sequence: Synthetic oligonucleotide
  Sense strand starting at position 835 of SEQ ID NO: 1885338
agggcugaccuuugagaug

SEQ ID NO: 2334695 - RNA, 19 nt, Artificial Sequence
  Description of Artificial Sequence: Synthetic oligonucleotide
  Antisense strand to SEQ ID NO: 2334694
caucucaaaggucagcccu

SEQ ID NO: 2334696 - RNA, 19 nt, Artificial Sequence
  Description of Artificial Sequence: Synthetic oligonucleotide
  Sense strand starting at position 1077 of SEQ ID NO: 1885338
aguggaaucuucucuccau

SEQ ID NO: 2334697 - RNA, 19 nt, Artificial Sequence
  Description of Artificial Sequence: Synthetic oligonucleotide
  Antisense strand to SEQ ID NO: 2334696
auggagagaagauuccacu

SEQ ID NO: 2334698 - RNA, 19 nt, Artificial Sequence
  Description of Artificial Sequence: Synthetic oligonucleotide
  Sense strand starting at position 1123 of SEQ ID NO: 1885338
gggagauccgcggugcuuu

SEQ ID NO: 2334699 - RNA, 19 nt, Artificial Sequence
  Description of Artificial Sequence: Synthetic oligonucleotide
  Antisense strand to SEQ ID NO: 2334698
aaagcaccgcggaucuccc

SEQ ID NO: 2334700 - RNA, 19 nt, Artificial Sequence
  Description of Artificial Sequence: Synthetic oligonucleotide
  Sense strand starting at position 1133 of SEQ ID NO: 1885338
cggugcuuucuccuaucuu

SEQ ID NO: 2334701 - RNA, 19 nt, Artificial Sequence
  Description of Artificial Sequence: Synthetic oligonucleotide
  Antisense strand to SEQ ID NO: 2334700
aagauaggagaaagcaccg

SEQ ID NO: 2334702 - RNA, 19 nt, Artificial Sequence
  Description of Artificial Sequence: Synthetic oligonucleotide
  Sense strand starting at position 1170 of SEQ ID NO: 1885338
ggaaauugucaagggaagu

SEQ ID NO: 2334703 - RNA, 19 nt, Artificial Sequence
  Description of Artificial Sequence: Synthetic oligonucleotide
  Antisense strand to SEQ ID NO: 2334702
acuucccuugacaauuucc

SEQ ID NO: 2334704 - RNA, 19 nt, Artificial Sequence
  Description of Artificial Sequence: Synthetic oligonucleotide
  Sense strand starting at position 1670 of SEQ ID NO: 1885338
cuuacuucugcacagucua

SEQ ID NO: 2334705 - RNA, 19 nt, Artificial Sequence
  Description of Artificial Sequence: Synthetic oligonucleotide
  Antisense strand to SEQ ID NO: 2334704
uagacugugcagaaguaag

SEQ ID NO: 2334706 - RNA, 19 nt, Artificial Sequence
  Description of Artificial Sequence: Synthetic oligonucleotide
  Sense strand starting at position 1727 of SEQ ID NO: 1885338
acuuguuagcaagaccauu

SEQ ID NO: 2334707 - RNA, 19 nt, Artificial Sequence
  Description of Artificial Sequence: Synthetic oligonucleotide
  Antisense strand to SEQ ID NO: 2334706
aauggucuugcuaacaagu

SEQ ID NO: 2334708 - RNA, 19 nt, Artificial Sequence
  Description of Artificial Sequence: Synthetic oligonucleotide
  Sense strand starting at position 1746 of SEQ ID NO: 1885338
ggagucagaaugggugaua

SEQ ID NO: 2334709 - RNA, 19 nt, Artificial Sequence
  Description of Artificial Sequence: Synthetic oligonucleotide
  Antisense strand to SEQ ID NO: 2334708
uaucacccauucugacucc

SEQ ID NO: 2334710 - RNA, 19 nt, Artificial Sequence
  Description of Artificial Sequence: Synthetic oligonucleotide
  Sense strand starting at position 1806 of SEQ ID NO: 1885338
caaucuguuggcgauauga

SEQ ID NO: 2334711 - RNA, 19 nt, Artificial Sequence
  Description of Artificial Sequence: Synthetic oligonucleotide
  Antisense strand to SEQ ID NO: 2334710
ucauaucgccaacagauug

SEQ ID NO: 2334712 - RNA, 19 nt, Artificial Sequence
  Description of Artificial Sequence: Synthetic oligonucleotide
  Sense strand starting at position 1920 of SEQ ID NO: 1885338
aaacgcugaucuuugggaa

SEQ ID NO: 2334713 - RNA, 19 nt, Artificial Sequence
  Description of Artificial Sequence: Synthetic oligonucleotide
  Antisense strand to SEQ ID NO: 2334712
uucccaaagaucagcguuu

SEQ ID NO: 2334714 - RNA, 19 nt, Artificial Sequence
  Description of Artificial Sequence: Synthetic oligonucleotide
  Sense strand starting at position 1921 of SEQ ID NO: 1885338
aacgcugaucuuugggaaa

SEQ ID NO: 2334715 - RNA, 19 nt, Artificial Sequence
  Description of Artificial Sequence: Synthetic oligonucleotide
  Antisense strand to SEQ ID NO: 2334714
uuucccaaagaucagcguu

SEQ ID NO: 2334716 - RNA, 19 nt, Artificial Sequence
  Description of Artificial Sequence: Synthetic oligonucleotide
  Sense strand starting at position 2006 of SEQ ID NO: 1885338
ggugguaacuaagauuuag

SEQ ID NO: 2334717 - RNA, 19 nt, Artificial Sequence
  Description of Artificial Sequence: Synthetic oligonucleotide
  Antisense strand to SEQ ID NO: 2334716
cuaaaucuuaguuaccacc

SEQ ID NO: 2334718 - RNA, 19 nt, Artificial Sequence
  Description of Artificial Sequence: Synthetic oligonucleotide
  Sense strand starting at position 2123 of SEQ ID NO: 1885338
ccgugucagggauaauuac

SEQ ID NO: 2334719 - RNA, 19 nt, Artificial Sequence
  Description of Artificial Sequence: Synthetic oligonucleotide
  Antisense strand to SEQ ID NO: 2334718
guaauuaucccugacacgg

SEQ ID NO: 2334720 - RNA, 19 nt, Artificial Sequence
  Description of Artificial Sequence: Synthetic oligonucleotide
  Sense strand starting at position 2173 of SEQ ID NO: 1885338
cgcucagaaccauaugaau

SEQ ID NO: 2334721 - RNA, 19 nt, Artificial Sequence
  Description of Artificial Sequence: Synthetic oligonucleotide
  Antisense strand to SEQ ID NO: 2334720
auucauaugguucugagcg

SEQ ID NO: 2334722 - RNA, 19 nt, Artificial Sequence
  Description of Artificial Sequence: Synthetic oligonucleotide
  Sense strand starting at position 2416 of SEQ ID NO: 1885338
uguauauaguaucuugaga

SEQ ID NO: 2334723 - RNA, 19 nt, Artificial Sequence
  Description of Artificial Sequence: Synthetic oligonucleotide
  Antisense strand to SEQ ID NO: 2334722
ucucaagauacuauauaca

SEQ ID NO: 2334724 - RNA, 19 nt, Artificial Sequence
  Description of Artificial Sequence: Synthetic oligonucleotide
  Sense strand starting at position 2421 of SEQ ID NO: 1885338
auaguaucuugagaauuuc

SEQ ID NO: 2334725 - RNA, 19 nt, Artificial Sequence
  Description of Artificial Sequence: Synthetic oligonucleotide
  Antisense strand to SEQ ID NO: 2334724
gaaauucucaagauacuau

SEQ ID NO: 2334726 - RNA, 19 nt, Artificial Sequence
  Description of Artificial Sequence: Synthetic oligonucleotide
  Sense strand starting at position 2489 of SEQ ID NO: 1885338
gucuucuauuucuugucua

SEQ ID NO: 2334727 - RNA, 19 nt, Artificial Sequence
  Description of Artificial Sequence: Synthetic oligonucleotide
  Antisense strand to SEQ ID NO: 2334726
uagacaagaaauagaagac

SEQ ID NO: 2334728 - RNA, 19 nt, Artificial Sequence
  Description of Artificial Sequence: Synthetic oligonucleotide
  Sense strand starting at position 2548 of SEQ ID NO: 1885338
uuugucuagcccuagaaau

SEQ ID NO: 2334729 - RNA, 19 nt, Artificial Sequence
  Description of Artificial Sequence: Synthetic oligonucleotide
  Antisense strand to SEQ ID NO: 2334728
auuucuagggcuagacaaa

SEQ ID NO: 2334730 - RNA, 19 nt, Artificial Sequence
  Description of Artificial Sequence: Synthetic oligonucleotide
  Sense strand starting at position 2604 of SEQ ID NO: 1885338
augcgauuagcauaacaaa

SEQ ID NO: 2334731 - RNA, 19 nt, Artificial Sequence
  Description of Artificial Sequence: Synthetic oligonucleotide
  Antisense strand to SEQ ID NO: 2334730
uuuguuaugcuaaucgcau

SEQ ID NO: 2334732 - RNA, 19 nt, Artificial Sequence
  Description of Artificial Sequence: Synthetic oligonucleotide
  Sense strand starting at position 2647 of SEQ ID NO: 1885338
uuguacuuugucguuagua

SEQ ID NO: 2334733 - RNA, 19 nt, Artificial Sequence
  Description of Artificial Sequence: Synthetic oligonucleotide
  Antisense strand to SEQ ID NO: 2334732
uacuaacgacaaaguacaa

SEQ ID NO: 2334734 - RNA, 19 nt, Artificial Sequence
  Description of Artificial Sequence: Synthetic oligonucleotide
  Sense strand starting at position 2659 of SEQ ID NO: 1885338
guuaguagugauuauccuu

SEQ ID NO: 2334735 - RNA, 19 nt, Artificial Sequence
  Description of Artificial Sequence: Synthetic oligonucleotide
  Antisense strand to SEQ ID NO: 2334734
aaggauaaucacuacuaac

SEQ ID NO: 2334736 - RNA, 19 nt, Artificial Sequence
  Description of Artificial Sequence: Synthetic oligonucleotide
  Sense strand starting at position 2662 of SEQ ID NO: 1885338
aguagugauuauccuucca

SEQ ID NO: 2334737 - RNA, 19 nt, Artificial Sequence
  Description of Artificial Sequence: Synthetic oligonucleotide
  Antisense strand to SEQ ID NO: 2334736
uggaaggauaaucacuacu

SEQ ID NO: 2334738 - RNA, 19 nt, Artificial Sequence
  Description of Artificial Sequence: Synthetic oligonucleotide
  Sense strand starting at position 2768 of SEQ ID NO: 1885338
aagauaaaguggucaagca

SEQ ID NO: 2334739 - RNA, 19 nt, Artificial Sequence
  Description of Artificial Sequence: Synthetic oligonucleotide
  Antisense strand to SEQ ID NO: 2334738
ugcuugaccacuuuaucuu

SEQ ID NO: 2334740 - RNA, 19 nt, Artificial Sequence
  Description of Artificial Sequence: Synthetic oligonucleotide
  Sense strand starting at position 2805 of SEQ ID NO: 1885338
guuacuagaaacuggugaa

SEQ ID NO: 2334741 - RNA, 19 nt, Artificial Sequence
  Description of Artificial Sequence: Synthetic oligonucleotide
  Antisense strand to SEQ ID NO: 2334740
uucaccaguuucuaguaac

SEQ ID NO: 2334742 - RNA, 19 nt, Artificial Sequence
  Description of Artificial Sequence: Synthetic oligonucleotide
  Sense strand starting at position 2818 of SEQ ID NO: 1885338
ggugaaaugcuuugaaagg

SEQ ID NO: 2334743 - RNA, 19 nt, Artificial Sequence
  Description of Artificial Sequence: Synthetic oligonucleotide
  Antisense strand to SEQ ID NO: 2334742
ccuuucaaagcauuucacc

SEQ ID NO: 2334744 - RNA, 19 nt, Artificial Sequence
  Description of Artificial Sequence: Synthetic oligonucleotide
  Sense strand starting at position 2827 of SEQ ID NO: 1885338
cuuugaaaggucuggaugu

SEQ ID NO: 2334745 - RNA, 19 nt, Artificial Sequence
  Description of Artificial Sequence: Synthetic oligonucleotide
  Antisense strand to SEQ ID NO: 2334744
acauccagaccuuucaaag

SEQ ID NO: 2334746 - RNA, 19 nt, Artificial Sequence
  Description of Artificial Sequence: Synthetic oligonucleotide
  Sense strand starting at position 2829 of SEQ ID NO: 1885338
uugaaaggucuggauguuu

SEQ ID NO: 2334747 - RNA, 19 nt, Artificial Sequence
  Description of Artificial Sequence: Synthetic oligonucleotide
  Antisense strand to SEQ ID NO: 2334746
aaacauccagaccuuucaa

SEQ ID NO: 2334748 - RNA, 19 nt, Artificial Sequence
  Description of Artificial Sequence: Synthetic oligonucleotide
  Sense strand starting at position 2974 of SEQ ID NO: 1885338
uuuggcucugaauaacaau

SEQ ID NO: 2334749 - RNA, 19 nt, Artificial Sequence
  Description of Artificial Sequence: Synthetic oligonucleotide
  Antisense strand to SEQ ID NO: 2334748
auuguuauucagagccaaa

SEQ ID NO: 2334750 - RNA, 19 nt, Artificial Sequence
  Description of Artificial Sequence: Synthetic oligonucleotide
  Sense strand starting at position 3043 of SEQ ID NO: 1885338
gccuuuggaggauaccuua

SEQ ID NO: 2334751 - RNA, 19 nt, Artificial Sequence
  Description of Artificial Sequence: Synthetic oligonucleotide
  Antisense strand to SEQ ID NO: 2334750
uaagguauccuccaaaggc

SEQ ID NO: 2334752 - RNA, 19 nt, Artificial Sequence
  Description of Artificial Sequence: Synthetic oligonucleotide
  Sense strand starting at position 3216 of SEQ ID NO: 1885338
acagauauaccuuagacgu

SEQ ID NO: 2334753 - RNA, 19 nt, Artificial Sequence
  Description of Artificial Sequence: Synthetic oligonucleotide
  Antisense strand to SEQ ID NO: 2334752
acgucuaagguauaucugu

SEQ ID NO: 2334754 - RNA, 19 nt, Artificial Sequence
  Description of Artificial Sequence: Synthetic oligonucleotide
  Sense strand starting at position 3224 of SEQ ID NO: 1885338
accuuagacgucuaauauu

SEQ ID NO: 2334755 - RNA, 19 nt, Artificial Sequence
  Description of Artificial Sequence: Synthetic oligonucleotide
  Antisense strand to SEQ ID NO: 2334754
aauauuagacgucuaaggu

SEQ ID NO: 2334756 - RNA, 19 nt, Artificial Sequence
  Description of Artificial Sequence: Synthetic oligonucleotide
  Sense strand starting at position 3458 of SEQ ID NO: 1885338
aaaugaauugcaggugauc

SEQ ID NO: 2334757 - RNA, 19 nt, Artificial Sequence
  Description of Artificial Sequence: Synthetic oligonucleotide
  Antisense strand to SEQ ID NO: 2334756
gaucaccugcaauucauuu

SEQ ID NO: 2334758 - RNA, 19 nt, Artificial Sequence
  Description of Artificial Sequence: Synthetic oligonucleotide
  Sense strand starting at position 3460 of SEQ ID NO: 1885338
augaauugcaggugaucua

SEQ ID NO: 2334759 - RNA, 19 nt, Artificial Sequence
  Description of Artificial Sequence: Synthetic oligonucleotide
  Antisense strand to SEQ ID NO: 2334758
uagaucaccugcaauucau

SEQ ID NO: 2334760 - RNA, 19 nt, Artificial Sequence
  Description of Artificial Sequence: Synthetic oligonucleotide
  Sense strand starting at position 3461 of SEQ ID NO: 1885338
ugaauugcaggugaucuaa

SEQ ID NO: 2334761 - RNA, 19 nt, Artificial Sequence
  Description of Artificial Sequence: Synthetic oligonucleotide
  Antisense strand to SEQ ID NO: 2334760
uuagaucaccugcaauuca

SEQ ID NO: 2334762 - RNA, 19 nt, Artificial Sequence
  Description of Artificial Sequence: Synthetic oligonucleotide
  Sense strand starting at position 3663 of SEQ ID NO: 1885338
gcgauucugaaauaguuuc

SEQ ID NO: 2334763 - RNA, 19 nt, Artificial Sequence
  Description of Artificial Sequence: Synthetic oligonucleotide
  Antisense strand to SEQ ID NO: 2334762
gaaacuauuucagaaucgc

SEQ ID NO: 2334764 - RNA, 19 nt, Artificial Sequence
  Description of Artificial Sequence: Synthetic oligonucleotide
  Sense strand starting at position 3726 of SEQ ID NO: 1885338
gagucuaaagucgacucaa

SEQ ID NO: 2334765 - RNA, 19 nt, Artificial Sequence
  Description of Artificial Sequence: Synthetic oligonucleotide
  Antisense strand to SEQ ID NO: 2334764
uugagucgacuuuagacuc

SEQ ID NO: 2334766 - RNA, 19 nt, Artificial Sequence
  Description of Artificial Sequence: Synthetic oligonucleotide
  Sense strand starting at position 3974 of SEQ ID NO: 1885338
aaauauuucuuguuugcgu

SEQ ID NO: 2334767 - RNA, 19 nt, Artificial Sequence
  Description of Artificial Sequence: Synthetic oligonucleotide
  Antisense strand to SEQ ID NO: 2334766
acgcaaacaagaaauauuu

SEQ ID NO: 2334768 - RNA, 19 nt, Artificial Sequence
  Description of Artificial Sequence: Synthetic oligonucleotide
  Sense strand starting at position 30 of SEQ ID NO: 1885339
uggcacuucgcugcucaau

SEQ ID NO: 2334769 - RNA, 19 nt, Artificial Sequence
  Description of Artificial Sequence: Synthetic oligonucleotide
  Antisense strand to SEQ ID NO: 2334768
auugagcagcgaagugcca

SEQ ID NO: 2334770 - RNA, 19 nt, Artificial Sequence
  Description of Artificial Sequence: Synthetic oligonucleotide
  Sense strand starting at position 52 of SEQ ID NO: 1885339
guaucaagagucuguaaau

SEQ ID NO: 2334771 - RNA, 19 nt, Artificial Sequence
  Description of Artificial Sequence: Synthetic oligonucleotide
  Antisense strand to SEQ ID NO: 2334770
auuuacagacucuugauac

SEQ ID NO: 2334772 - RNA, 19 nt, Artificial Sequence
  Description of Artificial Sequence: Synthetic oligonucleotide
  Sense strand starting at position 265 of SEQ ID NO: 1885339
agcugcuaugauuagauaa

SEQ ID NO: 2334773 - RNA, 19 nt, Artificial Sequence
  Description of Artificial Sequence: Synthetic oligonucleotide
  Antisense strand to SEQ ID NO: 2334772
uuaucuaaucauagcagcu

SEQ ID NO: 2334774 - RNA, 19 nt, Artificial Sequence
  Description of Artificial Sequence: Synthetic oligonucleotide
  Sense strand starting at position 282 of SEQ ID NO: 1885339
aauaucucugaaggguuau

SEQ ID NO: 2334775 - RNA, 19 nt, Artificial Sequence
  Description of Artificial Sequence: Synthetic oligonucleotide
  Antisense strand to SEQ ID NO: 2334774
auaacccuucagagauauu

SEQ ID NO: 2334776 - RNA, 19 nt, Artificial Sequence
  Description of Artificial Sequence: Synthetic oligonucleotide
  Sense strand starting at position 359 of SEQ ID NO: 1885339
aguaguggugcugaagaua

SEQ ID NO: 2334777 - RNA, 19 nt, Artificial Sequence
  Description of Artificial Sequence: Synthetic oligonucleotide
  Antisense strand to SEQ ID NO: 2334776
uaucuucagcaccacuacu

SEQ ID NO: 2334778 - RNA, 19 nt, Artificial Sequence
  Description of Artificial Sequence: Synthetic oligonucleotide
  Sense strand starting at position 362 of SEQ ID NO: 1885339
aguggugcugaagauauua

SEQ ID NO: 2334779 - RNA, 19 nt, Artificial Sequence
  Description of Artificial Sequence: Synthetic oligonucleotide
  Antisense strand to SEQ ID NO: 2334778
uaauaucuucagcaccacu

SEQ ID NO: 2334780 - RNA, 19 nt, Artificial Sequence
  Description of Artificial Sequence: Synthetic oligonucleotide
  Sense strand starting at position 364 of SEQ ID NO: 1885339
uggugcugaagauauuaau

SEQ ID NO: 2334781 - RNA, 19 nt, Artificial Sequence
  Description of Artificial Sequence: Synthetic oligonucleotide
  Antisense strand to SEQ ID NO: 2334780
auuaauaucuucagcacca

SEQ ID NO: 2334782 - RNA, 19 nt, Artificial Sequence
  Description of Artificial Sequence: Synthetic oligonucleotide
  Sense strand starting at position 388 of SEQ ID NO: 1885339
uuacaacuggcaugagaua

SEQ ID NO: 2334783 - RNA, 19 nt, Artificial Sequence
  Description of Artificial Sequence: Synthetic oligonucleotide
  Antisense strand to SEQ ID NO: 2334782
uaucucaugccaguuguaa

SEQ ID NO: 2334784 - RNA, 19 nt, Artificial Sequence
  Description of Artificial Sequence: Synthetic oligonucleotide
  Sense strand starting at position 493 of SEQ ID NO: 1885339
aagaguuuagugggugauu

SEQ ID NO: 2334785 - RNA, 19 nt, Artificial Sequence
  Description of Artificial Sequence: Synthetic oligonucleotide
  Antisense strand to SEQ ID NO: 2334784
aaucacccacuaaacucuu

SEQ ID NO: 2334786 - RNA, 19 nt, Artificial Sequence
  Description of Artificial Sequence: Synthetic oligonucleotide
  Sense strand starting at position 496 of SEQ ID NO: 1885339
aguuuagugggugauucau

SEQ ID NO: 2334787 - RNA, 19 nt, Artificial Sequence
  Description of Artificial Sequence: Synthetic oligonucleotide
  Antisense strand to SEQ ID NO: 2334786
augaaucacccacuaaacu

SEQ ID NO: 2334788 - RNA, 19 nt, Artificial Sequence
  Description of Artificial Sequence: Synthetic oligonucleotide
  Sense strand starting at position 808 of SEQ ID NO: 1885339
cgaccucaucucuacugaa

SEQ ID NO: 2334789 - RNA, 19 nt, Artificial Sequence
  Description of Artificial Sequence: Synthetic oligonucleotide
  Antisense strand to SEQ ID NO: 2334788
uucaguagagaugaggucg

SEQ ID NO: 2334790 - RNA, 19 nt, Artificial Sequence
  Description of Artificial Sequence: Synthetic oligonucleotide
  Sense strand starting at position 1049 of SEQ ID NO: 1885339
uaaaguguacaguauagua

SEQ ID NO: 2334791 - RNA, 19 nt, Artificial Sequence
  Description of Artificial Sequence: Synthetic oligonucleotide
  Antisense strand to SEQ ID NO: 2334790
uacuauacuguacacuuua

SEQ ID NO: 2334792 - RNA, 19 nt, Artificial Sequence
  Description of Artificial Sequence: Synthetic oligonucleotide
  Sense strand starting at position 1206 of SEQ ID NO: 1885339
ucuuuaacuugguuugacu

SEQ ID NO: 2334793 - RNA, 19 nt, Artificial Sequence
  Description of Artificial Sequence: Synthetic oligonucleotide
  Antisense strand to SEQ ID NO: 2334792
agucaaaccaaguuaaaga

SEQ ID NO: 2334794 - RNA, 19 nt, Artificial Sequence
  Description of Artificial Sequence: Synthetic oligonucleotide
  Sense strand starting at position 1286 of SEQ ID NO: 1885339
acacauuccucuguuggaa

SEQ ID NO: 2334795 - RNA, 19 nt, Artificial Sequence
  Description of Artificial Sequence: Synthetic oligonucleotide
  Antisense strand to SEQ ID NO: 2334794
uuccaacagaggaaugugu

SEQ ID NO: 2334796 - RNA, 19 nt, Artificial Sequence
  Description of Artificial Sequence: Synthetic oligonucleotide
  Sense strand starting at position 1308 of SEQ ID NO: 1885339
cuugguuauggagaugugu

SEQ ID NO: 2334797 - RNA, 19 nt, Artificial Sequence
  Description of Artificial Sequence: Synthetic oligonucleotide
  Antisense strand to SEQ ID NO: 2334796
acacaucuccauaaccaag

SEQ ID NO: 2334798 - RNA, 19 nt, Artificial Sequence
  Description of Artificial Sequence: Synthetic oligonucleotide
  Sense strand starting at position 1390 of SEQ ID NO: 1885339
gcucuaagagcucagaaug

SEQ ID NO: 2334799 - RNA, 19 nt, Artificial Sequence
  Description of Artificial Sequence: Synthetic oligonucleotide
  Antisense strand to SEQ ID NO: 2334798
cauucugagcucuuagagc

SEQ ID NO: 2334800 - RNA, 19 nt, Artificial Sequence
  Description of Artificial Sequence: Synthetic oligonucleotide
  Sense strand starting at position 1520 of SEQ ID NO: 1885339
guggaaugccagggaggau

SEQ ID NO: 2334801 - RNA, 19 nt, Artificial Sequence
  Description of Artificial Sequence: Synthetic oligonucleotide
  Antisense strand to SEQ ID NO: 2334800
auccucccuggcauuccac

SEQ ID NO: 2334802 - RNA, 19 nt, Artificial Sequence
  Description of Artificial Sequence: Synthetic oligonucleotide
  Sense strand starting at position 1585 of SEQ ID NO: 1885339
aaugaugguuuggcaugau

SEQ ID NO: 2334803 - RNA, 19 nt, Artificial Sequence
  Description of Artificial Sequence: Synthetic oligonucleotide
  Antisense strand to SEQ ID NO: 2334802
aucaugccaaaccaucauu

SEQ ID NO: 2334804 - RNA, 19 nt, Artificial Sequence
  Description of Artificial Sequence: Synthetic oligonucleotide
  Sense strand starting at position 1588 of SEQ ID NO: 1885339
gaugguuuggcaugaucca

SEQ ID NO: 2334805 - RNA, 19 nt, Artificial Sequence
  Description of Artificial Sequence: Synthetic oligonucleotide
  Antisense strand to SEQ ID NO: 2334804
uggaucaugccaaaccauc

SEQ ID NO: 2334806 - RNA, 19 nt, Artificial Sequence
  Description of Artificial Sequence: Synthetic oligonucleotide
  Sense strand starting at position 1589 of SEQ ID NO: 1885339
augguuuggcaugauccaa

SEQ ID NO: 2334807 - RNA, 19 nt, Artificial Sequence
  Description of Artificial Sequence: Synthetic oligonucleotide
  Antisense strand to SEQ ID NO: 2334806
uuggaucaugccaaaccau

SEQ ID NO: 2334808 - RNA, 19 nt, Artificial Sequence
  Description of Artificial Sequence: Synthetic oligonucleotide
  Sense strand starting at position 1628 of SEQ ID NO: 1885339
auaaauguuuccuuagaag

SEQ ID NO: 2334809 - RNA, 19 nt, Artificial Sequence
  Description of Artificial Sequence: Synthetic oligonucleotide
  Antisense strand to SEQ ID NO: 2334808
cuucuaaggaaacauuuau

SEQ ID NO: 2334810 - RNA, 19 nt, Artificial Sequence
  Description of Artificial Sequence: Synthetic oligonucleotide
  Sense strand starting at position 2195 of SEQ ID NO: 1885339
augcauauugggcauauua

SEQ ID NO: 2334811 - RNA, 19 nt, Artificial Sequence
  Description of Artificial Sequence: Synthetic oligonucleotide
  Antisense strand to SEQ ID NO: 2334810
uaauaugcccaauaugcau

SEQ ID NO: 2334812 - RNA, 19 nt, Artificial Sequence
  Description of Artificial Sequence: Synthetic oligonucleotide
  Sense strand starting at position 2197 of SEQ ID NO: 1885339
gcauauugggcauauuaag

SEQ ID NO: 2334813 - RNA, 19 nt, Artificial Sequence
  Description of Artificial Sequence: Synthetic oligonucleotide
  Antisense strand to SEQ ID NO: 2334812
cuuaauaugcccaauaugc

SEQ ID NO: 2334814 - RNA, 19 nt, Artificial Sequence
  Description of Artificial Sequence: Synthetic oligonucleotide
  Sense strand starting at position 2239 of SEQ ID NO: 1885339
ccugaaagugugugaagga

SEQ ID NO: 2334815 - RNA, 19 nt, Artificial Sequence
  Description of Artificial Sequence: Synthetic oligonucleotide
  Antisense strand to SEQ ID NO: 2334814
uccuucacacacuuucagg

SEQ ID NO: 2334816 - RNA, 19 nt, Artificial Sequence
  Description of Artificial Sequence: Synthetic oligonucleotide
  Sense strand starting at position 2320 of SEQ ID NO: 1885339
agaagcacacuuuguaaga

SEQ ID NO: 2334817 - RNA, 19 nt, Artificial Sequence
  Description of Artificial Sequence: Synthetic oligonucleotide
  Antisense strand to SEQ ID NO: 2334816
ucuuacaaagugugcuucu

SEQ ID NO: 2334818 - RNA, 19 nt, Artificial Sequence
  Description of Artificial Sequence: Synthetic oligonucleotide
  Sense strand starting at position 2365 of SEQ ID NO: 1885339
ggagucuauuaacugaauu

SEQ ID NO: 2334819 - RNA, 19 nt, Artificial Sequence
  Description of Artificial Sequence: Synthetic oligonucleotide
  Antisense strand to SEQ ID NO: 2334818
aauucaguuaauagacucc

SEQ ID NO: 2334820 - RNA, 19 nt, Artificial Sequence
  Description of Artificial Sequence: Synthetic oligonucleotide
  Sense strand starting at position 2419 of SEQ ID NO: 1885339
agacuucuggauuguaaag

SEQ ID NO: 2334821 - RNA, 19 nt, Artificial Sequence
  Description of Artificial Sequence: Synthetic oligonucleotide
  Antisense strand to SEQ ID NO: 2334820
cuuuacaauccagaagucu

SEQ ID NO: 2334822 - RNA, 19 nt, Artificial Sequence
  Description of Artificial Sequence: Synthetic oligonucleotide
  Sense strand starting at position 2486 of SEQ ID NO: 1885339
uuugaaagcucuuugaaac

SEQ ID NO: 2334823 - RNA, 19 nt, Artificial Sequence
  Description of Artificial Sequence: Synthetic oligonucleotide
  Antisense strand to SEQ ID NO: 2334822
guuucaaagagcuuucaaa

SEQ ID NO: 2334824 - RNA, 19 nt, Artificial Sequence
  Description of Artificial Sequence: Synthetic oligonucleotide
  Sense strand starting at position 2487 of SEQ ID NO: 1885339
uugaaagcucuuugaaacc

SEQ ID NO: 2334825 - RNA, 19 nt, Artificial Sequence
  Description of Artificial Sequence: Synthetic oligonucleotide
  Antisense strand to SEQ ID NO: 2334824
gguuucaaagagcuuucaa

SEQ ID NO: 2334826 - RNA, 19 nt, Artificial Sequence
  Description of Artificial Sequence: Synthetic oligonucleotide
  Sense strand starting at position 2536 of SEQ ID NO: 1885339
aagagaguacacuguaaau

SEQ ID NO: 2334827 - RNA, 19 nt, Artificial Sequence
  Description of Artificial Sequence: Synthetic oligonucleotide
  Antisense strand to SEQ ID NO: 2334826
auuuacaguguacucucuu

SEQ ID NO: 2334828 - RNA, 19 nt, Artificial Sequence
  Description of Artificial Sequence: Synthetic oligonucleotide
  Sense strand starting at position 2598 of SEQ ID NO: 1885339
uagagauaagucuguagaa

SEQ ID NO: 2334829 - RNA, 19 nt, Artificial Sequence
  Description of Artificial Sequence: Synthetic oligonucleotide
  Antisense strand to SEQ ID NO: 2334828
uucuacagacuuaucucua

SEQ ID NO: 2334830 - RNA, 19 nt, Artificial Sequence
  Description of Artificial Sequence: Synthetic oligonucleotide
  Sense strand starting at position 2599 of SEQ ID NO: 1885339
agagauaagucuguagaac

SEQ ID NO: 2334831 - RNA, 19 nt, Artificial Sequence
  Description of Artificial Sequence: Synthetic oligonucleotide
  Antisense strand to SEQ ID NO: 2334830
guucuacagacuuaucucu

SEQ ID NO: 2334832 - RNA, 19 nt, Artificial Sequence
  Description of Artificial Sequence: Synthetic oligonucleotide
  Sense strand starting at position 2651 of SEQ ID NO: 1885339
aaaugaaugcaauguaguu

SEQ ID NO: 2334833 - RNA, 19 nt, Artificial Sequence
  Description of Artificial Sequence: Synthetic oligonucleotide
  Antisense strand to SEQ ID NO: 2334832
aacuacauugcauucauuu

SEQ ID NO: 2334834 - RNA, 19 nt, Artificial Sequence
  Description of Artificial Sequence: Synthetic oligonucleotide
  Sense strand starting at position 2766 of SEQ ID NO: 1885339
gcauuauauuaacuaggau

SEQ ID NO: 2334835 - RNA, 19 nt, Artificial Sequence
  Description of Artificial Sequence: Synthetic oligonucleotide
  Antisense strand to SEQ ID NO: 2334834
auccuaguuaauauaaugc

SEQ ID NO: 2334836 - RNA, 19 nt, Artificial Sequence
  Description of Artificial Sequence: Synthetic oligonucleotide
  Sense strand starting at position 2817 of SEQ ID NO: 1885339
ggucuccaucuaugacaaa

SEQ ID NO: 2334837 - RNA, 19 nt, Artificial Sequence
  Description of Artificial Sequence: Synthetic oligonucleotide
  Antisense strand to SEQ ID NO: 2334836
uuugucauagauggagacc

SEQ ID NO: 2334838 - RNA, 19 nt, Artificial Sequence
  Description of Artificial Sequence: Synthetic oligonucleotide
  Sense strand starting at position 3004 of SEQ ID NO: 1885339
gagugaguugaaugaucuc

SEQ ID NO: 2334839 - RNA, 19 nt, Artificial Sequence
  Description of Artificial Sequence: Synthetic oligonucleotide
  Antisense strand to SEQ ID NO: 2334838
gagaucauucaacucacuc

SEQ ID NO: 2334840 - RNA, 19 nt, Artificial Sequence
  Description of Artificial Sequence: Synthetic oligonucleotide
  Sense strand starting at position 3007 of SEQ ID NO: 1885339
ugaguugaaugaucucucu

SEQ ID NO: 2334841 - RNA, 19 nt, Artificial Sequence
  Description of Artificial Sequence: Synthetic oligonucleotide
  Antisense strand to SEQ ID NO: 2334840
agagagaucauucaacuca

SEQ ID NO: 2334842 - RNA, 19 nt, Artificial Sequence
  Description of Artificial Sequence: Synthetic oligonucleotide
  Sense strand starting at position 3130 of SEQ ID NO: 1885339
gcacaauaaucaguaguau

SEQ ID NO: 2334843 - RNA, 19 nt, Artificial Sequence
  Description of Artificial Sequence: Synthetic oligonucleotide
  Antisense strand to SEQ ID NO: 2334842
auacuacugauuauugugc

SEQ ID NO: 2334844 - RNA, 19 nt, Artificial Sequence
  Description of Artificial Sequence: Synthetic oligonucleotide
  Sense strand starting at position 3197 of SEQ ID NO: 1885339
uucuaugcugcagaaggau

SEQ ID NO: 2334845 - RNA, 19 nt, Artificial Sequence
  Description of Artificial Sequence: Synthetic oligonucleotide
  Antisense strand to SEQ ID NO: 2334844
auccuucugcagcauagaa

SEQ ID NO: 2334846 - RNA, 19 nt, Artificial Sequence
  Description of Artificial Sequence: Synthetic oligonucleotide
  Sense strand starting at position 3302 of SEQ ID NO: 1885339
ggugaacaaucucuccaac

SEQ ID NO: 2334847 - RNA, 19 nt, Artificial Sequence
  Description of Artificial Sequence: Synthetic oligonucleotide
  Antisense strand to SEQ ID NO: 2334846
guuggagagauuguucacc

SEQ ID NO: 2334848 - RNA, 19 nt, Artificial Sequence
  Description of Artificial Sequence: Synthetic oligonucleotide
  Sense strand starting at position 301 of SEQ ID NO: 1885340
cugauucgaucuguacuga

SEQ ID NO: 2334849 - RNA, 19 nt, Artificial Sequence
  Description of Artificial Sequence: Synthetic oligonucleotide
  Antisense strand to SEQ ID NO: 2334848
ucaguacagaucgaaucag

SEQ ID NO: 2334850 - RNA, 19 nt, Artificial Sequence
  Description of Artificial Sequence: Synthetic oligonucleotide
  Sense strand starting at position 302 of SEQ ID NO: 1885340
ugauucgaucuguacugaa

SEQ ID NO: 2334851 - RNA, 19 nt, Artificial Sequence
  Description of Artificial Sequence: Synthetic oligonucleotide
  Antisense strand to SEQ ID NO: 2334850
uucaguacagaucgaauca

SEQ ID NO: 2334852 - RNA, 19 nt, Artificial Sequence
  Description of Artificial Sequence: Synthetic oligonucleotide
  Sense strand starting at position 497 of SEQ ID NO: 1885340
gccacuguuucuucuggaa

SEQ ID NO: 2334853 - RNA, 19 nt, Artificial Sequence
  Description of Artificial Sequence: Synthetic oligonucleotide
  Antisense strand to SEQ ID NO: 2334852
uuccagaagaaacaguggc

SEQ ID NO: 2334854 - RNA, 19 nt, Artificial Sequence
  Description of Artificial Sequence: Synthetic oligonucleotide
  Sense strand starting at position 765 of SEQ ID NO: 1885340
ccgcaacuccuuggaugua

SEQ ID NO: 2334855 - RNA, 19 nt, Artificial Sequence
  Description of Artificial Sequence: Synthetic oligonucleotide
  Antisense strand to SEQ ID NO: 2334854
uacauccaaggaguugcgg

SEQ ID NO: 2334856 - RNA, 19 nt, Artificial Sequence
  Description of Artificial Sequence: Synthetic oligonucleotide
  Sense strand starting at position 774 of SEQ ID NO: 1885340
cuuggauguaaacgagauu

SEQ ID NO: 2334857 - RNA, 19 nt, Artificial Sequence
  Description of Artificial Sequence: Synthetic oligonucleotide
  Antisense strand to SEQ ID NO: 2334856
aaucucguuuacauccaag

SEQ ID NO: 2334858 - RNA, 19 nt, Artificial Sequence
  Description of Artificial Sequence: Synthetic oligonucleotide
  Sense strand starting at position 816 of SEQ ID NO: 1885340
gaaagaugauuacacucga

SEQ ID NO: 2334859 - RNA, 19 nt, Artificial Sequence
  Description of Artificial Sequence: Synthetic oligonucleotide
  Antisense strand to SEQ ID NO: 2334858
ucgaguguaaucaucuuuc

SEQ ID NO: 2334860 - RNA, 19 nt, Artificial Sequence
  Description of Artificial Sequence: Synthetic oligonucleotide
  Sense strand starting at position 1085 of SEQ ID NO: 1885340
agcugaaauggaugugauu

SEQ ID NO: 2334861 - RNA, 19 nt, Artificial Sequence
  Description of Artificial Sequence: Synthetic oligonucleotide
  Antisense strand to SEQ ID NO: 2334860
aaucacauccauuucagcu

SEQ ID NO: 2334862 - RNA, 19 nt, Artificial Sequence
  Description of Artificial Sequence: Synthetic oligonucleotide
  Sense strand starting at position 1360 of SEQ ID NO: 1885340
ccuauuccucccgggagga

SEQ ID NO: 2334863 - RNA, 19 nt, Artificial Sequence
  Description of Artificial Sequence: Synthetic oligonucleotide
  Antisense strand to SEQ ID NO: 2334862
uccucccgggaggaauagg

SEQ ID NO: 2334864 - RNA, 19 nt, Artificial Sequence
  Description of Artificial Sequence: Synthetic oligonucleotide
  Sense strand starting at position 1496 of SEQ ID NO: 1885340
acuagauugagacguaaag

SEQ ID NO: 2334865 - RNA, 19 nt, Artificial Sequence
  Description of Artificial Sequence: Synthetic oligonucleotide
  Antisense strand to SEQ ID NO: 2334864
cuuuacgucucaaucuagu

SEQ ID NO: 2334866 - RNA, 19 nt, Artificial Sequence
  Description of Artificial Sequence: Synthetic oligonucleotide
  Sense strand starting at position 1511 of SEQ ID NO: 1885340
aaagauuacccgggccgaa

SEQ ID NO: 2334867 - RNA, 19 nt, Artificial Sequence
  Description of Artificial Sequence: Synthetic oligonucleotide
  Antisense strand to SEQ ID NO: 2334866
uucggcccggguaaucuuu

SEQ ID NO: 2334868 - RNA, 19 nt, Artificial Sequence
  Description of Artificial Sequence: Synthetic oligonucleotide
  Sense strand starting at position 1526 of SEQ ID NO: 1885340
cgaauaaugccgggaguca

SEQ ID NO: 2334869 - RNA, 19 nt, Artificial Sequence
  Description of Artificial Sequence: Synthetic oligonucleotide
  Antisense strand to SEQ ID NO: 2334868
ugacucccggcauuauucg

SEQ ID NO: 2334870 - RNA, 19 nt, Artificial Sequence
  Description of Artificial Sequence: Synthetic oligonucleotide
  Sense strand starting at position 1527 of SEQ ID NO: 1885340
gaauaaugccgggagucaa

SEQ ID NO: 2334871 - RNA, 19 nt, Artificial Sequence
  Description of Artificial Sequence: Synthetic oligonucleotide
  Antisense strand to SEQ ID NO: 2334870
uugacucccggcauuauuc

SEQ ID NO: 2334872 - RNA, 19 nt, Artificial Sequence
  Description of Artificial Sequence: Synthetic oligonucleotide
  Sense strand starting at position 1538 of SEQ ID NO: 1885340
ggagucaacacucgagcaa

SEQ ID NO: 2334873 - RNA, 19 nt, Artificial Sequence
  Description of Artificial Sequence: Synthetic oligonucleotide
  Antisense strand to SEQ ID NO: 2334872
uugcucgaguguugacucc

SEQ ID NO: 2334874 - RNA, 19 nt, Artificial Sequence
  Description of Artificial Sequence: Synthetic oligonucleotide
  Sense strand starting at position 1539 of SEQ ID NO: 1885340
gagucaacacucgagcaaa

SEQ ID NO: 2334875 - RNA, 19 nt, Artificial Sequence
  Description of Artificial Sequence: Synthetic oligonucleotide
  Antisense strand to SEQ ID NO: 2334874
uuugcucgaguguugacuc

SEQ ID NO: 2334876 - RNA, 19 nt, Artificial Sequence
  Description of Artificial Sequence: Synthetic oligonucleotide
  Sense strand starting at position 1622 of SEQ ID NO: 1885340
cgcuccucgcugcuaauua

SEQ ID NO: 2334877 - RNA, 19 nt, Artificial Sequence
  Description of Artificial Sequence: Synthetic oligonucleotide
  Antisense strand to SEQ ID NO: 2334876
uaauuagcagcgaggagcg

SEQ ID NO: 2334878 - RNA, 19 nt, Artificial Sequence
  Description of Artificial Sequence: Synthetic oligonucleotide
  Sense strand starting at position 1626 of SEQ ID NO: 1885340
ccucgcugcuaauuacaaa

SEQ ID NO: 2334879 - RNA, 19 nt, Artificial Sequence
  Description of Artificial Sequence: Synthetic oligonucleotide
  Antisense strand to SEQ ID NO: 2334878
uuuguaauuagcagcgagg

SEQ ID NO: 2334880 - RNA, 19 nt, Artificial Sequence
  Description of Artificial Sequence: Synthetic oligonucleotide
  Sense strand starting at position 1646 of SEQ ID NO: 1885340
aaaugaugaugugcucacu

SEQ ID NO: 2334881 - RNA, 19 nt, Artificial Sequence
  Description of Artificial Sequence: Synthetic oligonucleotide
  Antisense strand to SEQ ID NO: 2334880
agugagcacaucaucauuu

SEQ ID NO: 2334882 - RNA, 19 nt, Artificial Sequence
  Description of Artificial Sequence: Synthetic oligonucleotide
  Sense strand starting at position 1649 of SEQ ID NO: 1885340
ugaugaugugcucacuaag

SEQ ID NO: 2334883 - RNA, 19 nt, Artificial Sequence
  Description of Artificial Sequence: Synthetic oligonucleotide
  Antisense strand to SEQ ID NO: 2334882
cuuagugagcacaucauca

SEQ ID NO: 2334884 - RNA, 19 nt, Artificial Sequence
  Description of Artificial Sequence: Synthetic oligonucleotide
  Sense strand starting at position 1652 of SEQ ID NO: 1885340
ugaugugcucacuaaguaa

SEQ ID NO: 2334885 - RNA, 19 nt, Artificial Sequence
  Description of Artificial Sequence: Synthetic oligonucleotide
  Antisense strand to SEQ ID NO: 2334884
uuacuuagugagcacauca

SEQ ID NO: 2334886 - RNA, 19 nt, Artificial Sequence
  Description of Artificial Sequence: Synthetic oligonucleotide
  Sense strand starting at position 1787 of SEQ ID NO: 1885340
gggcuaauaggugaaguca

SEQ ID NO: 2334887 - RNA, 19 nt, Artificial Sequence
  Description of Artificial Sequence: Synthetic oligonucleotide
  Antisense strand to SEQ ID NO: 2334886
ugacuucaccuauuagccc

SEQ ID NO: 2334888 - RNA, 19 nt, Artificial Sequence
  Description of Artificial Sequence: Synthetic oligonucleotide
  Sense strand starting at position 1991 of SEQ ID NO: 1885340
gaaguugagcacugaacuu

SEQ ID NO: 2334889 - RNA, 19 nt, Artificial Sequence
  Description of Artificial Sequence: Synthetic oligonucleotide
  Antisense strand to SEQ ID NO: 2334888
aaguucagugcucaacuuc

SEQ ID NO: 2334890 - RNA, 19 nt, Artificial Sequence
  Description of Artificial Sequence: Synthetic oligonucleotide
  Sense strand starting at position 2641 of SEQ ID NO: 1885340
gggacuaguucuccugcaa

SEQ ID NO: 2334891 - RNA, 19 nt, Artificial Sequence
  Description of Artificial Sequence: Synthetic oligonucleotide
  Antisense strand to SEQ ID NO: 2334890
uugcaggagaacuaguccc

SEQ ID NO: 2334892 - RNA, 19 nt, Artificial Sequence
  Description of Artificial Sequence: Synthetic oligonucleotide
  Sense strand starting at position 2645 of SEQ ID NO: 1885340
cuaguucuccugcaacaug

SEQ ID NO: 2334893 - RNA, 19 nt, Artificial Sequence
  Description of Artificial Sequence: Synthetic oligonucleotide
  Antisense strand to SEQ ID NO: 2334892
cauguugcaggagaacuag

SEQ ID NO: 2334894 - RNA, 19 nt, Artificial Sequence
  Description of Artificial Sequence: Synthetic oligonucleotide
  Sense strand starting at position 2662 of SEQ ID NO: 1885340
uggcucuugguggaaacau

SEQ ID NO: 2334895 - RNA, 19 nt, Artificial Sequence
  Description of Artificial Sequence: Synthetic oligonucleotide
  Antisense strand to SEQ ID NO: 2334894
auguuuccaccaagagcca

SEQ ID NO: 2334896 - RNA, 19 nt, Artificial Sequence
  Description of Artificial Sequence: Synthetic oligonucleotide
  Sense strand starting at position 2898 of SEQ ID NO: 1885340
ggcccacauccaggugaaa

SEQ ID NO: 2334897 - RNA, 19 nt, Artificial Sequence
  Description of Artificial Sequence: Synthetic oligonucleotide
  Antisense strand to SEQ ID NO: 2334896
uuucaccuggaugugggcc

SEQ ID NO: 2334898 - RNA, 19 nt, Artificial Sequence
  Description of Artificial Sequence: Synthetic oligonucleotide
  Sense strand starting at position 2947 of SEQ ID NO: 1885340
ggcuucuggcugcagaaau

SEQ ID NO: 2334899 - RNA, 19 nt, Artificial Sequence
  Description of Artificial Sequence: Synthetic oligonucleotide
  Antisense strand to SEQ ID NO: 2334898
auuucugcagccagaagcc

SEQ ID NO: 2334900 - RNA, 19 nt, Artificial Sequence
  Description of Artificial Sequence: Synthetic oligonucleotide
  Sense strand starting at position 3235 of SEQ ID NO: 1885340
ccuggaucuuuggucucaa

SEQ ID NO: 2334901 - RNA, 19 nt, Artificial Sequence
  Description of Artificial Sequence: Synthetic oligonucleotide
  Antisense strand to SEQ ID NO: 2334900
uugagaccaaagauccagg

SEQ ID NO: 2334902 - RNA, 19 nt, Artificial Sequence
  Description of Artificial Sequence: Synthetic oligonucleotide
  Sense strand starting at position 3236 of SEQ ID NO: 1885340
cuggaucuuuggucucaaa

SEQ ID NO: 2334903 - RNA, 19 nt, Artificial Sequence
  Description of Artificial Sequence: Synthetic oligonucleotide
  Antisense strand to SEQ ID NO: 2334902
uuugagaccaaagauccag

SEQ ID NO: 2334904 - RNA, 19 nt, Artificial Sequence
  Description of Artificial Sequence: Synthetic oligonucleotide
  Sense strand starting at position 3345 of SEQ ID NO: 1885340
ucuggagauccuuggcuga

SEQ ID NO: 2334905 - RNA, 19 nt, Artificial Sequence
  Description of Artificial Sequence: Synthetic oligonucleotide
  Antisense strand to SEQ ID NO: 2334904
ucagccaaggaucuccaga

SEQ ID NO: 2334906 - RNA, 19 nt, Artificial Sequence
  Description of Artificial Sequence: Synthetic oligonucleotide
  Sense strand starting at position 3372 of SEQ ID NO: 1885340
gggcuuuauuuguuuguga

SEQ ID NO: 2334907 - RNA, 19 nt, Artificial Sequence
  Description of Artificial Sequence: Synthetic oligonucleotide
  Antisense strand to SEQ ID NO: 2334906
ucacaaacaaauaaagccc

SEQ ID NO: 2334908 - RNA, 19 nt, Artificial Sequence
  Description of Artificial Sequence: Synthetic oligonucleotide
  Sense strand starting at position 3373 of SEQ ID NO: 1885340
ggcuuuauuuguuugugau

SEQ ID NO: 2334909 - RNA, 19 nt, Artificial Sequence
  Description of Artificial Sequence: Synthetic oligonucleotide
  Antisense strand to SEQ ID NO: 2334908
aucacaaacaaauaaagcc

SEQ ID NO: 2334910 - RNA, 19 nt, Artificial Sequence
  Description of Artificial Sequence: Synthetic oligonucleotide
  Sense strand starting at position 3374 of SEQ ID NO: 1885340
gcuuuauuuguuugugauc

SEQ ID NO: 2334911 - RNA, 19 nt, Artificial Sequence
  Description of Artificial Sequence: Synthetic oligonucleotide
  Antisense strand to SEQ ID NO: 2334910
gaucacaaacaaauaaagc

SEQ ID NO: 2334912 - RNA, 19 nt, Artificial Sequence
  Description of Artificial Sequence: Synthetic oligonucleotide
  Sense strand starting at position 3375 of SEQ ID NO: 1885340
cuuuauuuguuugugaucu

SEQ ID NO: 2334913 - RNA, 19 nt, Artificial Sequence
  Description of Artificial Sequence: Synthetic oligonucleotide
  Antisense strand to SEQ ID NO: 2334912
agaucacaaacaaauaaag

SEQ ID NO: 2334914 - RNA, 19 nt, Artificial Sequence
  Description of Artificial Sequence: Synthetic oligonucleotide
  Sense strand starting at position 3379 of SEQ ID NO: 1885340
auuuguuugugaucuguga

SEQ ID NO: 2334915 - RNA, 19 nt, Artificial Sequence
  Description of Artificial Sequence: Synthetic oligonucleotide
  Antisense strand to SEQ ID NO: 2334914
ucacagaucacaaacaaau

SEQ ID NO: 2334916 - RNA, 19 nt, Artificial Sequence
  Description of Artificial Sequence: Synthetic oligonucleotide
  Sense strand starting at position 3381 of SEQ ID NO: 1885340
uuguuugugaucugugaag

SEQ ID NO: 2334917 - RNA, 19 nt, Artificial Sequence
  Description of Artificial Sequence: Synthetic oligonucleotide
  Antisense strand to SEQ ID NO: 2334916
cuucacagaucacaaacaa

SEQ ID NO: 2334918 - RNA, 19 nt, Artificial Sequence
  Description of Artificial Sequence: Synthetic oligonucleotide
  Sense strand starting at position 3383 of SEQ ID NO: 1885340
guuugugaucugugaaggg

SEQ ID NO: 2334919 - RNA, 19 nt, Artificial Sequence
  Description of Artificial Sequence: Synthetic oligonucleotide
  Antisense strand to SEQ ID NO: 2334918
cccuucacagaucacaaac

SEQ ID NO: 2334920 - RNA, 19 nt, Artificial Sequence
  Description of Artificial Sequence: Synthetic oligonucleotide
  Sense strand starting at position 3452 of SEQ ID NO: 1885340
uuugucuuucuuuguagaa

SEQ ID NO: 2334921 - RNA, 19 nt, Artificial Sequence
  Description of Artificial Sequence: Synthetic oligonucleotide
  Antisense strand to SEQ ID NO: 2334920
uucuacaaagaaagacaaa

SEQ ID NO: 2334922 - RNA, 19 nt, Artificial Sequence
  Description of Artificial Sequence: Synthetic oligonucleotide
  Sense strand starting at position 3453 of SEQ ID NO: 1885340
uugucuuucuuuguagaag

SEQ ID NO: 2334923 - RNA, 19 nt, Artificial Sequence
  Description of Artificial Sequence: Synthetic oligonucleotide
  Antisense strand to SEQ ID NO: 2334922
cuucuacaaagaaagacaa

SEQ ID NO: 2334924 - RNA, 19 nt, Artificial Sequence
  Description of Artificial Sequence: Synthetic oligonucleotide
  Sense strand starting at position 3467 of SEQ ID NO: 1885340
agaagcgagucccuuugua

SEQ ID NO: 2334925 - RNA, 19 nt, Artificial Sequence
  Description of Artificial Sequence: Synthetic oligonucleotide
  Antisense strand to SEQ ID NO: 2334924
uacaaagggacucgcuucu

SEQ ID NO: 2334926 - RNA, 19 nt, Artificial Sequence
  Description of Artificial Sequence: Synthetic oligonucleotide
  Sense strand starting at position 3756 of SEQ ID NO: 1885340
cccugcugcccuuaaugua

SEQ ID NO: 2334927 - RNA, 19 nt, Artificial Sequence
  Description of Artificial Sequence: Synthetic oligonucleotide
  Antisense strand to SEQ ID NO: 2334926
uacauuaagggcagcaggg

SEQ ID NO: 2334928 - RNA, 19 nt, Artificial Sequence
  Description of Artificial Sequence: Synthetic oligonucleotide
  Sense strand starting at position 212 of SEQ ID NO: 1885341
cugaauauacacuguuaag

SEQ ID NO: 2334929 - RNA, 19 nt, Artificial Sequence
  Description of Artificial Sequence: Synthetic oligonucleotide
  Antisense strand to SEQ ID NO: 2334928
cuuaacaguguauauucag

SEQ ID NO: 2334930 - RNA, 19 nt, Artificial Sequence
  Description of Artificial Sequence: Synthetic oligonucleotide
  Sense strand starting at position 223 of SEQ ID NO: 1885341
cuguuaagaugaucuuuag

SEQ ID NO: 2334931 - RNA, 19 nt, Artificial Sequence
  Description of Artificial Sequence: Synthetic oligonucleotide
  Antisense strand to SEQ ID NO: 2334930
cuaaagaucaucuuaacag

SEQ ID NO: 2334932 - RNA, 19 nt, Artificial Sequence
  Description of Artificial Sequence: Synthetic oligonucleotide
  Sense strand starting at position 229 of SEQ ID NO: 1885341
agaugaucuuuagaaaugg

SEQ ID NO: 2334933 - RNA, 19 nt, Artificial Sequence
  Description of Artificial Sequence: Synthetic oligonucleotide
  Antisense strand to SEQ ID NO: 2334932
ccauuucuaaagaucaucu

SEQ ID NO: 2334934 - RNA, 19 nt, Artificial Sequence
  Description of Artificial Sequence: Synthetic oligonucleotide
  Sense strand starting at position 250 of SEQ ID NO: 1885341
gaaucaaacugggaagaau

SEQ ID NO: 2334935 - RNA, 19 nt, Artificial Sequence
  Description of Artificial Sequence: Synthetic oligonucleotide
  Antisense strand to SEQ ID NO: 2334934
auucuucccaguuugauuc

SEQ ID NO: 2334936 - RNA, 19 nt, Artificial Sequence
  Description of Artificial Sequence: Synthetic oligonucleotide
  Sense strand starting at position 261 of SEQ ID NO: 1885341
ggaagaauuacacgccugu

SEQ ID NO: 2334937 - RNA, 19 nt, Artificial Sequence
  Description of Artificial Sequence: Synthetic oligonucleotide
  Antisense strand to SEQ ID NO: 2334936
acaggcguguaauucuucc

SEQ ID NO: 2334938 - RNA, 19 nt, Artificial Sequence
  Description of Artificial Sequence: Synthetic oligonucleotide
  Sense strand starting at position 401 of SEQ ID NO: 1885341
auaagaaucaggugacugu

SEQ ID NO: 2334939 - RNA, 19 nt, Artificial Sequence
  Description of Artificial Sequence: Synthetic oligonucleotide
  Antisense strand to SEQ ID NO: 2334938
acagucaccugauucuuau

SEQ ID NO: 2334940 - RNA, 19 nt, Artificial Sequence
  Description of Artificial Sequence: Synthetic oligonucleotide
  Sense strand starting at position 552 of SEQ ID NO: 1885341
agcacuuugaguuaugcga

SEQ ID NO: 2334941 - RNA, 19 nt, Artificial Sequence
  Description of Artificial Sequence: Synthetic oligonucleotide
  Antisense strand to SEQ ID NO: 2334940
ucgcauaacucaaagugcu

SEQ ID NO: 2334942 - RNA, 19 nt, Artificial Sequence
  Description of Artificial Sequence: Synthetic oligonucleotide
  Sense strand starting at position 556 of SEQ ID NO: 1885341
cuuugaguuaugcgaggug

SEQ ID NO: 2334943 - RNA, 19 nt, Artificial Sequence
  Description of Artificial Sequence: Synthetic oligonucleotide
  Antisense strand to SEQ ID NO: 2334942
caccucgcauaacucaaag

SEQ ID NO: 2334944 - RNA, 19 nt, Artificial Sequence
  Description of Artificial Sequence: Synthetic oligonucleotide
  Sense strand starting at position 558 of SEQ ID NO: 1885341
uugaguuaugcgaggugug

SEQ ID NO: 2334945 - RNA, 19 nt, Artificial Sequence
  Description of Artificial Sequence: Synthetic oligonucleotide
  Antisense strand to SEQ ID NO: 2334944
cacaccucgcauaacucaa

SEQ ID NO: 2334946 - RNA, 19 nt, Artificial Sequence
  Description of Artificial Sequence: Synthetic oligonucleotide
  Sense strand starting at position 560 of SEQ ID NO: 1885341
gaguuaugcgaggugugca

SEQ ID NO: 2334947 - RNA, 19 nt, Artificial Sequence
  Description of Artificial Sequence: Synthetic oligonucleotide
  Antisense strand to SEQ ID NO: 2334946
ugcacaccucgcauaacuc

SEQ ID NO: 2334948 - RNA, 19 nt, Artificial Sequence
  Description of Artificial Sequence: Synthetic oligonucleotide
  Sense strand starting at position 567 of SEQ ID NO: 1885341
gcgaggugugcagaaugua

SEQ ID NO: 2334949 - RNA, 19 nt, Artificial Sequence
  Description of Artificial Sequence: Synthetic oligonucleotide
  Antisense strand to SEQ ID NO: 2334948
uacauucugcacaccucgc

SEQ ID NO: 2334950 - RNA, 19 nt, Artificial Sequence
  Description of Artificial Sequence: Synthetic oligonucleotide
  Sense strand starting at position 680 of SEQ ID NO: 1885341
uuaucuuccuguuacuaga

SEQ ID NO: 2334951 - RNA, 19 nt, Artificial Sequence
  Description of Artificial Sequence: Synthetic oligonucleotide
  Antisense strand to SEQ ID NO: 2334950
ucuaguaacaggaagauaa

SEQ ID NO: 2334952 - RNA, 19 nt, Artificial Sequence
  Description of Artificial Sequence: Synthetic oligonucleotide
  Sense strand starting at position 693 of SEQ ID NO: 1885341
acuagaauuugugauacaa

SEQ ID NO: 2334953 - RNA, 19 nt, Artificial Sequence
  Description of Artificial Sequence: Synthetic oligonucleotide
  Antisense strand to SEQ ID NO: 2334952
uuguaucacaaauucuagu

SEQ ID NO: 2334954 - RNA, 19 nt, Artificial Sequence
  Description of Artificial Sequence: Synthetic oligonucleotide
  Sense strand starting at position 967 of SEQ ID NO: 1885341
ucgcaaacuuggcccaaau

SEQ ID NO: 2334955 - RNA, 19 nt, Artificial Sequence
  Description of Artificial Sequence: Synthetic oligonucleotide
  Antisense strand to SEQ ID NO: 2334954
auuugggccaaguuugcga

SEQ ID NO: 2334956 - RNA, 19 nt, Artificial Sequence
  Description of Artificial Sequence: Synthetic oligonucleotide
  Sense strand starting at position 969 of SEQ ID NO: 1885341
gcaaacuuggcccaaauaa

SEQ ID NO: 2334957 - RNA, 19 nt, Artificial Sequence
  Description of Artificial Sequence: Synthetic oligonucleotide
  Antisense strand to SEQ ID NO: 2334956
uuauuugggccaaguuugc

SEQ ID NO: 2334958 - RNA, 19 nt, Artificial Sequence
  Description of Artificial Sequence: Synthetic oligonucleotide
  Sense strand starting at position 1605 of SEQ ID NO: 1885341
cuccgaagugaugggauua

SEQ ID NO: 2334959 - RNA, 19 nt, Artificial Sequence
  Description of Artificial Sequence: Synthetic oligonucleotide
  Antisense strand to SEQ ID NO: 2334958
uaaucccaucacuucggag

SEQ ID NO: 2334960 - RNA, 19 nt, Artificial Sequence
  Description of Artificial Sequence: Synthetic oligonucleotide
  Sense strand starting at position 1717 of SEQ ID NO: 1885341
gggugauugcugugcugcu

SEQ ID NO: 2334961 - RNA, 19 nt, Artificial Sequence
  Description of Artificial Sequence: Synthetic oligonucleotide
  Antisense strand to SEQ ID NO: 2334960
agcagcacagcaaucaccc

SEQ ID NO: 2334962 - RNA, 19 nt, Artificial Sequence
  Description of Artificial Sequence: Synthetic oligonucleotide
  Sense strand starting at position 1771 of SEQ ID NO: 1885341
gcggccauguuugcaaaga

SEQ ID NO: 2334963 - RNA, 19 nt, Artificial Sequence
  Description of Artificial Sequence: Synthetic oligonucleotide
  Antisense strand to SEQ ID NO: 2334962
ucuuugcaaacauggccgc

SEQ ID NO: 2334964 - RNA, 19 nt, Artificial Sequence
  Description of Artificial Sequence: Synthetic oligonucleotide
  Sense strand starting at position 1781 of SEQ ID NO: 1885341
uugcaaagaucugaauaag

SEQ ID NO: 2334965 - RNA, 19 nt, Artificial Sequence
  Description of Artificial Sequence: Synthetic oligonucleotide
  Antisense strand to SEQ ID NO: 2334964
cuuauucagaucuuugcaa

SEQ ID NO: 2334966 - RNA, 19 nt, Artificial Sequence
  Description of Artificial Sequence: Synthetic oligonucleotide
  Sense strand starting at position 1846 of SEQ ID NO: 1885341
gcacaaguucguggucaag

SEQ ID NO: 2334967 - RNA, 19 nt, Artificial Sequence
  Description of Artificial Sequence: Synthetic oligonucleotide
  Antisense strand to SEQ ID NO: 2334966
cuugaccacgaacuugugc

SEQ ID NO: 2334968 - RNA, 19 nt, Artificial Sequence
  Description of Artificial Sequence: Synthetic oligonucleotide
  Sense strand starting at position 1879 of SEQ ID NO: 1885341
ggagcuuacuuacaaagca

SEQ ID NO: 2334969 - RNA, 19 nt, Artificial Sequence
  Description of Artificial Sequence: Synthetic oligonucleotide
  Antisense strand to SEQ ID NO: 2334968
ugcuuuguaaguaagcucc

SEQ ID NO: 2334970 - RNA, 19 nt, Artificial Sequence
  Description of Artificial Sequence: Synthetic oligonucleotide
  Sense strand starting at position 2236 of SEQ ID NO: 1885341
gcgguugaggucaaguagu

SEQ ID NO: 2334971 - RNA, 19 nt, Artificial Sequence
  Description of Artificial Sequence: Synthetic oligonucleotide
  Antisense strand to SEQ ID NO: 2334970
acuacuugaccucaaccgc

SEQ ID NO: 2334972 - RNA, 19 nt, Artificial Sequence
  Description of Artificial Sequence: Synthetic oligonucleotide
  Sense strand starting at position 2620 of SEQ ID NO: 1885341
uccaaaugucucuguccua

SEQ ID NO: 2334973 - RNA, 19 nt, Artificial Sequence
  Description of Artificial Sequence: Synthetic oligonucleotide
  Antisense strand to SEQ ID NO: 2334972
uaggacagagacauuugga

SEQ ID NO: 2334974 - RNA, 19 nt, Artificial Sequence
  Description of Artificial Sequence: Synthetic oligonucleotide
  Sense strand starting at position 2621 of SEQ ID NO: 1885341
ccaaaugucucuguccuau

SEQ ID NO: 2334975 - RNA, 19 nt, Artificial Sequence
  Description of Artificial Sequence: Synthetic oligonucleotide
  Antisense strand to SEQ ID NO: 2334974
auaggacagagacauuugg

SEQ ID NO: 2334976 - RNA, 19 nt, Artificial Sequence
  Description of Artificial Sequence: Synthetic oligonucleotide
  Sense strand starting at position 2625 of SEQ ID NO: 1885341
augucucuguccuauugga

SEQ ID NO: 2334977 - RNA, 19 nt, Artificial Sequence
  Description of Artificial Sequence: Synthetic oligonucleotide
  Antisense strand to SEQ ID NO: 2334976
uccaauaggacagagacau

SEQ ID NO: 2334978 - RNA, 19 nt, Artificial Sequence
  Description of Artificial Sequence: Synthetic oligonucleotide
  Sense strand starting at position 2688 of SEQ ID NO: 1885341
uguggacauuggucagauc

SEQ ID NO: 2334979 - RNA, 19 nt, Artificial Sequence
  Description of Artificial Sequence: Synthetic oligonucleotide
  Antisense strand to SEQ ID NO: 2334978
gaucugaccaauguccaca

SEQ ID NO: 2334980 - RNA, 19 nt, Artificial Sequence
  Description of Artificial Sequence: Synthetic oligonucleotide
  Sense strand starting at position 2689 of SEQ ID NO: 1885341
guggacauuggucagauca

SEQ ID NO: 2334981 - RNA, 19 nt, Artificial Sequence
  Description of Artificial Sequence: Synthetic oligonucleotide
  Antisense strand to SEQ ID NO: 2334980
ugaucugaccaauguccac

SEQ ID NO: 2334982 - RNA, 19 nt, Artificial Sequence
  Description of Artificial Sequence: Synthetic oligonucleotide
  Sense strand starting at position 2696 of SEQ ID NO: 1885341
uuggucagaucaggaauua

SEQ ID NO: 2334983 - RNA, 19 nt, Artificial Sequence
  Description of Artificial Sequence: Synthetic oligonucleotide
  Antisense strand to SEQ ID NO: 2334982
uaauuccugaucugaccaa

SEQ ID NO: 2334984 - RNA, 19 nt, Artificial Sequence
  Description of Artificial Sequence: Synthetic oligonucleotide
  Sense strand starting at position 3035 of SEQ ID NO: 1885341
ggccgugguuugucaagua

SEQ ID NO: 2334985 - RNA, 19 nt, Artificial Sequence
  Description of Artificial Sequence: Synthetic oligonucleotide
  Antisense strand to SEQ ID NO: 2334984
uacuugacaaaccacggcc

SEQ ID NO: 2334986 - RNA, 19 nt, Artificial Sequence
  Description of Artificial Sequence: Synthetic oligonucleotide
  Sense strand starting at position 3040 of SEQ ID NO: 1885341
ugguuugucaaguaucuuu

SEQ ID NO: 2334987 - RNA, 19 nt, Artificial Sequence
  Description of Artificial Sequence: Synthetic oligonucleotide
  Antisense strand to SEQ ID NO: 2334986
aaagauacuugacaaacca

SEQ ID NO: 2334988 - RNA, 19 nt, Artificial Sequence
  Description of Artificial Sequence: Synthetic oligonucleotide
  Sense strand starting at position 3217 of SEQ ID NO: 1885341
gcuggcuaauguuuaaauu

SEQ ID NO: 2334989 - RNA, 19 nt, Artificial Sequence
  Description of Artificial Sequence: Synthetic oligonucleotide
  Antisense strand to SEQ ID NO: 2334988
aauuuaaacauuagccagc

SEQ ID NO: 2334990 - RNA, 19 nt, Artificial Sequence
  Description of Artificial Sequence: Synthetic oligonucleotide
  Sense strand starting at position 3624 of SEQ ID NO: 1885341
ccggcuugucagggcuuaa

SEQ ID NO: 2334991 - RNA, 19 nt, Artificial Sequence
  Description of Artificial Sequence: Synthetic oligonucleotide
  Antisense strand to SEQ ID NO: 2334990
uuaagcccugacaagccgg

SEQ ID NO: 2334992 - RNA, 19 nt, Artificial Sequence
  Description of Artificial Sequence: Synthetic oligonucleotide
  Sense strand starting at position 3628 of SEQ ID NO: 1885341
cuugucagggcuuaaagaa

SEQ ID NO: 2334993 - RNA, 19 nt, Artificial Sequence
  Description of Artificial Sequence: Synthetic oligonucleotide
  Antisense strand to SEQ ID NO: 2334992
uucuuuaagcccugacaag

SEQ ID NO: 2334994 - RNA, 19 nt, Artificial Sequence
  Description of Artificial Sequence: Synthetic oligonucleotide
  Sense strand starting at position 3678 of SEQ ID NO: 1885341
gaugacaucugggagccau

SEQ ID NO: 2334995 - RNA, 19 nt, Artificial Sequence
  Description of Artificial Sequence: Synthetic oligonucleotide
  Antisense strand to SEQ ID NO: 2334994
auggcucccagaugucauc

SEQ ID NO: 2334996 - RNA, 19 nt, Artificial Sequence
  Description of Artificial Sequence: Synthetic oligonucleotide
  Sense strand starting at position 3724 of SEQ ID NO: 1885341
gggagggagugcuuacgaa

SEQ ID NO: 2334997 - RNA, 19 nt, Artificial Sequence
  Description of Artificial Sequence: Synthetic oligonucleotide
  Antisense strand to SEQ ID NO: 2334996
uucguaagcacucccuccc

SEQ ID NO: 2334998 - RNA, 19 nt, Artificial Sequence
  Description of Artificial Sequence: Synthetic oligonucleotide
  Sense strand starting at position 3751 of SEQ ID NO: 1885341
aggguaacuuuaugaagag

SEQ ID NO: 2334999 - RNA, 19 nt, Artificial Sequence
  Description of Artificial Sequence: Synthetic oligonucleotide
  Antisense strand to SEQ ID NO: 2334998
cucuucauaaaguuacccu

SEQ ID NO: 2335000 - RNA, 19 nt, Artificial Sequence
  Description of Artificial Sequence: Synthetic oligonucleotide
  Sense strand starting at position 3800 of SEQ ID NO: 1885341
agggauuuguaucgcccau

SEQ ID NO: 2335001 - RNA, 19 nt, Artificial Sequence
  Description of Artificial Sequence: Synthetic oligonucleotide
  Antisense strand to SEQ ID NO: 2335000
augggcgauacaaaucccu

SEQ ID NO: 2335002 - RNA, 19 nt, Artificial Sequence
  Description of Artificial Sequence: Synthetic oligonucleotide
  Sense strand starting at position 3802 of SEQ ID NO: 1885341
ggauuuguaucgcccauga

SEQ ID NO: 2335003 - RNA, 19 nt, Artificial Sequence
  Description of Artificial Sequence: Synthetic oligonucleotide
  Antisense strand to SEQ ID NO: 2335002
ucaugggcgauacaaaucc

SEQ ID NO: 2335004 - RNA, 19 nt, Artificial Sequence
  Description of Artificial Sequence: Synthetic oligonucleotide
  Sense strand starting at position 3891 of SEQ ID NO: 1885341
ggcugccugucauugaaca

SEQ ID NO: 2335005 - RNA, 19 nt, Artificial Sequence
  Description of Artificial Sequence: Synthetic oligonucleotide
  Antisense strand to SEQ ID NO: 2335004
uguucaaugacaggcagcc

SEQ ID NO: 2335006 - RNA, 19 nt, Artificial Sequence
  Description of Artificial Sequence: Synthetic oligonucleotide
  Sense strand starting at position 3892 of SEQ ID NO: 1885341
gcugccugucauugaacaa

SEQ ID NO: 2335007 - RNA, 19 nt, Artificial Sequence
  Description of Artificial Sequence: Synthetic oligonucleotide
  Antisense strand to SEQ ID NO: 2335006
uuguucaaugacaggcagc

SEQ ID NO: 2335008 - RNA, 19 nt, Artificial Sequence
  Description of Artificial Sequence: Synthetic oligonucleotide
  Sense strand starting at position 15 of SEQ ID NO: 1885342
uggagaaucucuucucuuc

SEQ ID NO: 2335009 - RNA, 19 nt, Artificial Sequence
  Description of Artificial Sequence: Synthetic oligonucleotide
  Antisense strand to SEQ ID NO: 2335008
gaagagaagagauucucca

SEQ ID NO: 2335010 - RNA, 19 nt, Artificial Sequence
  Description of Artificial Sequence: Synthetic oligonucleotide
  Sense strand starting at position 55 of SEQ ID NO: 1885342
ugaguuaaacacugaugua

SEQ ID NO: 2335011 - RNA, 19 nt, Artificial Sequence
  Description of Artificial Sequence: Synthetic oligonucleotide
  Antisense strand to SEQ ID NO: 2335010
uacaucaguguuuaacuca

SEQ ID NO: 2335012 - RNA, 19 nt, Artificial Sequence
  Description of Artificial Sequence: Synthetic oligonucleotide
  Sense strand starting at position 100 of SEQ ID NO: 1885342
gacucuaccguuugagaac

SEQ ID NO: 2335013 - RNA, 19 nt, Artificial Sequence
  Description of Artificial Sequence: Synthetic oligonucleotide
  Antisense strand to SEQ ID NO: 2335012
guucucaaacgguagaguc

SEQ ID NO: 2335014 - RNA, 19 nt, Artificial Sequence
  Description of Artificial Sequence: Synthetic oligonucleotide
  Sense strand starting at position 106 of SEQ ID NO: 1885342
accguuugagaacaguagu

SEQ ID NO: 2335015 - RNA, 19 nt, Artificial Sequence
  Description of Artificial Sequence: Synthetic oligonucleotide
  Antisense strand to SEQ ID NO: 2335014
acuacuguucucaaacggu

SEQ ID NO: 2335016 - RNA, 19 nt, Artificial Sequence
  Description of Artificial Sequence: Synthetic oligonucleotide
  Sense strand starting at position 170 of SEQ ID NO: 1885342
agucgaccaugaucugaaa

SEQ ID NO: 2335017 - RNA, 19 nt, Artificial Sequence
  Description of Artificial Sequence: Synthetic oligonucleotide
  Antisense strand to SEQ ID NO: 2335016
uuucagaucauggucgacu

SEQ ID NO: 2335018 - RNA, 19 nt, Artificial Sequence
  Description of Artificial Sequence: Synthetic oligonucleotide
  Sense strand starting at position 618 of SEQ ID NO: 1885342
ggaggaagauaacauuaua

SEQ ID NO: 2335019 - RNA, 19 nt, Artificial Sequence
  Description of Artificial Sequence: Synthetic oligonucleotide
  Antisense strand to SEQ ID NO: 2335018
uauaauguuaucuuccucc

SEQ ID NO: 2335020 - RNA, 19 nt, Artificial Sequence
  Description of Artificial Sequence: Synthetic oligonucleotide
  Sense strand starting at position 641 of SEQ ID NO: 1885342
gccucaaaguauuucugca

SEQ ID NO: 2335021 - RNA, 19 nt, Artificial Sequence
  Description of Artificial Sequence: Synthetic oligonucleotide
  Antisense strand to SEQ ID NO: 2335020
ugcagaaauacuuugaggc

SEQ ID NO: 2335022 - RNA, 19 nt, Artificial Sequence
  Description of Artificial Sequence: Synthetic oligonucleotide
  Sense strand starting at position 846 of SEQ ID NO: 1885342
agauuagugucaccuaaac

SEQ ID NO: 2335023 - RNA, 19 nt, Artificial Sequence
  Description of Artificial Sequence: Synthetic oligonucleotide
  Antisense strand to SEQ ID NO: 2335022
guuuaggugacacuaaucu

SEQ ID NO: 2335024 - RNA, 19 nt, Artificial Sequence
  Description of Artificial Sequence: Synthetic oligonucleotide
  Sense strand starting at position 1038 of SEQ ID NO: 1885342
gcucccuguaaugauggaa

SEQ ID NO: 2335025 - RNA, 19 nt, Artificial Sequence
  Description of Artificial Sequence: Synthetic oligonucleotide
  Antisense strand to SEQ ID NO: 2335024
uuccaucauuacagggagc

SEQ ID NO: 2335026 - RNA, 19 nt, Artificial Sequence
  Description of Artificial Sequence: Synthetic oligonucleotide
  Sense strand starting at position 1042 of SEQ ID NO: 1885342
ccuguaaugauggaauggu

SEQ ID NO: 2335027 - RNA, 19 nt, Artificial Sequence
  Description of Artificial Sequence: Synthetic oligonucleotide
  Antisense strand to SEQ ID NO: 2335026
accauuccaucauuacagg

SEQ ID NO: 2335028 - RNA, 19 nt, Artificial Sequence
  Description of Artificial Sequence: Synthetic oligonucleotide
  Sense strand starting at position 1052 of SEQ ID NO: 1885342
uggaaugguccagggugua

SEQ ID NO: 2335029 - RNA, 19 nt, Artificial Sequence
  Description of Artificial Sequence: Synthetic oligonucleotide
  Antisense strand to SEQ ID NO: 2335028
uacacccuggaccauucca

SEQ ID NO: 2335030 - RNA, 19 nt, Artificial Sequence
  Description of Artificial Sequence: Synthetic oligonucleotide
  Sense strand starting at position 1131 of SEQ ID NO: 1885342
aaugcaauccugugaccag

SEQ ID NO: 2335031 - RNA, 19 nt, Artificial Sequence
  Description of Artificial Sequence: Synthetic oligonucleotide
  Antisense strand to SEQ ID NO: 2335030
cuggucacaggauugcauu

SEQ ID NO: 2335032 - RNA, 19 nt, Artificial Sequence
  Description of Artificial Sequence: Synthetic oligonucleotide
  Sense strand starting at position 1134 of SEQ ID NO: 1885342
gcaauccugugaccagaaa

SEQ ID NO: 2335033 - RNA, 19 nt, Artificial Sequence
  Description of Artificial Sequence: Synthetic oligonucleotide
  Antisense strand to SEQ ID NO: 2335032
uuucuggucacaggauugc

SEQ ID NO: 2335034 - RNA, 19 nt, Artificial Sequence
  Description of Artificial Sequence: Synthetic oligonucleotide
  Sense strand starting at position 1155 of SEQ ID NO: 1885342
gugcacucuaucugggaaa

SEQ ID NO: 2335035 - RNA, 19 nt, Artificial Sequence
  Description of Artificial Sequence: Synthetic oligonucleotide
  Antisense strand to SEQ ID NO: 2335034
uuucccagauagagugcac

SEQ ID NO: 2335036 - RNA, 19 nt, Artificial Sequence
  Description of Artificial Sequence: Synthetic oligonucleotide
  Sense strand starting at position 1157 of SEQ ID NO: 1885342
gcacucuaucugggaaaga

SEQ ID NO: 2335037 - RNA, 19 nt, Artificial Sequence
  Description of Artificial Sequence: Synthetic oligonucleotide
  Antisense strand to SEQ ID NO: 2335036
ucuuucccagauagagugc

SEQ ID NO: 2335038 - RNA, 19 nt, Artificial Sequence
  Description of Artificial Sequence: Synthetic oligonucleotide
  Sense strand starting at position 1167 of SEQ ID NO: 1885342
ugggaaagacgcuaaguuu

SEQ ID NO: 2335039 - RNA, 19 nt, Artificial Sequence
  Description of Artificial Sequence: Synthetic oligonucleotide
  Antisense strand to SEQ ID NO: 2335038
aaacuuagcgucuuuccca

SEQ ID NO: 2335040 - RNA, 19 nt, Artificial Sequence
  Description of Artificial Sequence: Synthetic oligonucleotide
  Sense strand starting at position 1170 of SEQ ID NO: 1885342
gaaagacgcuaaguuuaaa

SEQ ID NO: 2335041 - RNA, 19 nt, Artificial Sequence
  Description of Artificial Sequence: Synthetic oligonucleotide
  Antisense strand to SEQ ID NO: 2335040
uuuaaacuuagcgucuuuc

SEQ ID NO: 2335042 - RNA, 19 nt, Artificial Sequence
  Description of Artificial Sequence: Synthetic oligonucleotide
  Sense strand starting at position 1208 of SEQ ID NO: 1885342
aagaucugauuguuaugau

SEQ ID NO: 2335043 - RNA, 19 nt, Artificial Sequence
  Description of Artificial Sequence: Synthetic oligonucleotide
  Antisense strand to SEQ ID NO: 2335042
aucauaacaaucagaucuu

SEQ ID NO: 2335044 - RNA, 19 nt, Artificial Sequence
  Description of Artificial Sequence: Synthetic oligonucleotide
  Sense strand starting at position 1217 of SEQ ID NO: 1885342
uuguuaugauaagcauaug

SEQ ID NO: 2335045 - RNA, 19 nt, Artificial Sequence
  Description of Artificial Sequence: Synthetic oligonucleotide
  Antisense strand to SEQ ID NO: 2335044
cauaugcuuaucauaacaa

SEQ ID NO: 2335046 - RNA, 19 nt, Artificial Sequence
  Description of Artificial Sequence: Synthetic oligonucleotide
  Sense strand starting at position 1441 of SEQ ID NO: 1885342
caggaaguugauugugagu

SEQ ID NO: 2335047 - RNA, 19 nt, Artificial Sequence
  Description of Artificial Sequence: Synthetic oligonucleotide
  Antisense strand to SEQ ID NO: 2335046
acucacaaucaacuuccug

SEQ ID NO: 2335048 - RNA, 19 nt, Artificial Sequence
  Description of Artificial Sequence: Synthetic oligonucleotide
  Sense strand starting at position 1596 of SEQ ID NO: 1885342
gcuugugucauggcagcaa

SEQ ID NO: 2335049 - RNA, 19 nt, Artificial Sequence
  Description of Artificial Sequence: Synthetic oligonucleotide
  Antisense strand to SEQ ID NO: 2335048
uugcugccaugacacaagc

SEQ ID NO: 2335050 - RNA, 19 nt, Artificial Sequence
  Description of Artificial Sequence: Synthetic oligonucleotide
  Sense strand starting at position 1631 of SEQ ID NO: 1885342
ugaacaggagucugucauu

SEQ ID NO: 2335051 - RNA, 19 nt, Artificial Sequence
  Description of Artificial Sequence: Synthetic oligonucleotide
  Antisense strand to SEQ ID NO: 2335050
aaugacagacuccuguuca

SEQ ID NO: 2335052 - RNA, 19 nt, Artificial Sequence
  Description of Artificial Sequence: Synthetic oligonucleotide
  Sense strand starting at position 1695 of SEQ ID NO: 1885342
aaggaaucuucugugagcu

SEQ ID NO: 2335053 - RNA, 19 nt, Artificial Sequence
  Description of Artificial Sequence: Synthetic oligonucleotide
  Antisense strand to SEQ ID NO: 2335052
agcucacagaagauuccuu

SEQ ID NO: 2335054 - RNA, 19 nt, Artificial Sequence
  Description of Artificial Sequence: Synthetic oligonucleotide
  Sense strand starting at position 2147 of SEQ ID NO: 1885342
cacugauggugguuaauau

SEQ ID NO: 2335055 - RNA, 19 nt, Artificial Sequence
  Description of Artificial Sequence: Synthetic oligonucleotide
  Antisense strand to SEQ ID NO: 2335054
auauuaaccaccaucagug

SEQ ID NO: 2335056 - RNA, 19 nt, Artificial Sequence
  Description of Artificial Sequence: Synthetic oligonucleotide
  Sense strand starting at position 2186 of SEQ ID NO: 1885342
gagguuugcgguagguaaa

SEQ ID NO: 2335057 - RNA, 19 nt, Artificial Sequence
  Description of Artificial Sequence: Synthetic oligonucleotide
  Antisense strand to SEQ ID NO: 2335056
uuuaccuaccgcaaaccuc

SEQ ID NO: 2335058 - RNA, 19 nt, Artificial Sequence
  Description of Artificial Sequence: Synthetic oligonucleotide
  Sense strand starting at position 2227 of SEQ ID NO: 1885342
agguuauuauugucaauac

SEQ ID NO: 2335059 - RNA, 19 nt, Artificial Sequence
  Description of Artificial Sequence: Synthetic oligonucleotide
  Antisense strand to SEQ ID NO: 2335058
guauugacaauaauaaccu

SEQ ID NO: 2335060 - RNA, 19 nt, Artificial Sequence
  Description of Artificial Sequence: Synthetic oligonucleotide
  Sense strand starting at position 2282 of SEQ ID NO: 1885342
aagucaguggucugaauga

SEQ ID NO: 2335061 - RNA, 19 nt, Artificial Sequence
  Description of Artificial Sequence: Synthetic oligonucleotide
  Antisense strand to SEQ ID NO: 2335060
ucauucagaccacugacuu

SEQ ID NO: 2335062 - RNA, 19 nt, Artificial Sequence
  Description of Artificial Sequence: Synthetic oligonucleotide
  Sense strand starting at position 2289 of SEQ ID NO: 1885342
uggucugaaugagugguaa

SEQ ID NO: 2335063 - RNA, 19 nt, Artificial Sequence
  Description of Artificial Sequence: Synthetic oligonucleotide
  Antisense strand to SEQ ID NO: 2335062
uuaccacucauucagacca

SEQ ID NO: 2335064 - RNA, 19 nt, Artificial Sequence
  Description of Artificial Sequence: Synthetic oligonucleotide
  Sense strand starting at position 2463 of SEQ ID NO: 1885342
uacugaaauugauuguugu

SEQ ID NO: 2335065 - RNA, 19 nt, Artificial Sequence
  Description of Artificial Sequence: Synthetic oligonucleotide
  Antisense strand to SEQ ID NO: 2335064
acaacaaucaauuucagua

SEQ ID NO: 2335066 - RNA, 19 nt, Artificial Sequence
  Description of Artificial Sequence: Synthetic oligonucleotide
  Sense strand starting at position 2464 of SEQ ID NO: 1885342
acugaaauugauuguuguu

SEQ ID NO: 2335067 - RNA, 19 nt, Artificial Sequence
  Description of Artificial Sequence: Synthetic oligonucleotide
  Antisense strand to SEQ ID NO: 2335066
aacaacaaucaauuucagu

SEQ ID NO: 2335068 - RNA, 19 nt, Artificial Sequence
  Description of Artificial Sequence: Synthetic oligonucleotide
  Sense strand starting at position 2635 of SEQ ID NO: 1885342
ugucauggucccuaaauau

SEQ ID NO: 2335069 - RNA, 19 nt, Artificial Sequence
  Description of Artificial Sequence: Synthetic oligonucleotide
  Antisense strand to SEQ ID NO: 2335068
auauuuagggaccaugaca

SEQ ID NO: 2335070 - RNA, 19 nt, Artificial Sequence
  Description of Artificial Sequence: Synthetic oligonucleotide
  Sense strand starting at position 2871 of SEQ ID NO: 1885342
caucuuguucucgaugaga

SEQ ID NO: 2335071 - RNA, 19 nt, Artificial Sequence
  Description of Artificial Sequence: Synthetic oligonucleotide
  Antisense strand to SEQ ID NO: 2335070
ucucaucgagaacaagaug

SEQ ID NO: 2335072 - RNA, 19 nt, Artificial Sequence
  Description of Artificial Sequence: Synthetic oligonucleotide
  Sense strand starting at position 2873 of SEQ ID NO: 1885342
ucuuguucucgaugagaaa

SEQ ID NO: 2335073 - RNA, 19 nt, Artificial Sequence
  Description of Artificial Sequence: Synthetic oligonucleotide
  Antisense strand to SEQ ID NO: 2335072
uuucucaucgagaacaaga

SEQ ID NO: 2335074 - RNA, 19 nt, Artificial Sequence
  Description of Artificial Sequence: Synthetic oligonucleotide
  Sense strand starting at position 2927 of SEQ ID NO: 1885342
gcugaaauauaguugaagu

SEQ ID NO: 2335075 - RNA, 19 nt, Artificial Sequence
  Description of Artificial Sequence: Synthetic oligonucleotide
  Antisense strand to SEQ ID NO: 2335074
acuucaacuauauuucagc

SEQ ID NO: 2335076 - RNA, 19 nt, Artificial Sequence
  Description of Artificial Sequence: Synthetic oligonucleotide
  Sense strand starting at position 2945 of SEQ ID NO: 1885342
uuaguuuauucucuacuga

SEQ ID NO: 2335077 - RNA, 19 nt, Artificial Sequence
  Description of Artificial Sequence: Synthetic oligonucleotide
  Antisense strand to SEQ ID NO: 2335076
ucaguagagaauaaacuaa

SEQ ID NO: 2335078 - RNA, 19 nt, Artificial Sequence
  Description of Artificial Sequence: Synthetic oligonucleotide
  Sense strand starting at position 3141 of SEQ ID NO: 1885342
uuuaaugacuuagucaagu

SEQ ID NO: 2335079 - RNA, 19 nt, Artificial Sequence
  Description of Artificial Sequence: Synthetic oligonucleotide
  Antisense strand to SEQ ID NO: 2335078
acuugacuaagucauuaaa

SEQ ID NO: 2335080 - RNA, 19 nt, Artificial Sequence
  Description of Artificial Sequence: Synthetic oligonucleotide
  Sense strand starting at position 3289 of SEQ ID NO: 1885342
ggcuguugccaggagauga

SEQ ID NO: 2335081 - RNA, 19 nt, Artificial Sequence
  Description of Artificial Sequence: Synthetic oligonucleotide
  Antisense strand to SEQ ID NO: 2335080
ucaucuccuggcaacagcc

SEQ ID NO: 2335082 - RNA, 19 nt, Artificial Sequence
  Description of Artificial Sequence: Synthetic oligonucleotide
  Sense strand starting at position 3685 of SEQ ID NO: 1885342
gucuccaggugacuaauua

SEQ ID NO: 2335083 - RNA, 19 nt, Artificial Sequence
  Description of Artificial Sequence: Synthetic oligonucleotide
  Antisense strand to SEQ ID NO: 2335082
uaauuagucaccuggagac

SEQ ID NO: 2335084 - RNA, 19 nt, Artificial Sequence
  Description of Artificial Sequence: Synthetic oligonucleotide
  Sense strand starting at position 3689 of SEQ ID NO: 1885342
ccaggugacuaauuacuga

SEQ ID NO: 2335085 - RNA, 19 nt, Artificial Sequence
  Description of Artificial Sequence: Synthetic oligonucleotide
  Antisense strand to SEQ ID NO: 2335084
ucaguaauuagucaccugg

SEQ ID NO: 2335086 - RNA, 19 nt, Artificial Sequence
  Description of Artificial Sequence: Synthetic oligonucleotide
  Sense strand starting at position 3833 of SEQ ID NO: 1885342
agguuauaagauuguauuc

SEQ ID NO: 2335087 - RNA, 19 nt, Artificial Sequence
  Description of Artificial Sequence: Synthetic oligonucleotide
  Antisense strand to SEQ ID NO: 2335086
gaauacaaucuuauaaccu

SEQ ID NO: 2335088 - RNA, 19 nt, Artificial Sequence
  Description of Artificial Sequence: Synthetic oligonucleotide
  Sense strand starting at position 451 of SEQ ID NO: 1885343
acuccucaguugucauaaa

SEQ ID NO: 2335089 - RNA, 19 nt, Artificial Sequence
  Description of Artificial Sequence: Synthetic oligonucleotide
  Antisense strand to SEQ ID NO: 2335088
uuuaugacaacugaggagu

SEQ ID NO: 2335090 - RNA, 19 nt, Artificial Sequence
  Description of Artificial Sequence: Synthetic oligonucleotide
  Sense strand starting at position 519 of SEQ ID NO: 1885343
acuggcugucucuauaaau

SEQ ID NO: 2335091 - RNA, 19 nt, Artificial Sequence
  Description of Artificial Sequence: Synthetic oligonucleotide
  Antisense strand to SEQ ID NO: 2335090
auuuauagagacagccagu

SEQ ID NO: 2335092 - RNA, 19 nt, Artificial Sequence
  Description of Artificial Sequence: Synthetic oligonucleotide
  Sense strand starting at position 571 of SEQ ID NO: 1885343
uugggugagugcuuaagaa

SEQ ID NO: 2335093 - RNA, 19 nt, Artificial Sequence
  Description of Artificial Sequence: Synthetic oligonucleotide
  Antisense strand to SEQ ID NO: 2335092
uucuuaagcacucacccaa

SEQ ID NO: 2335094 - RNA, 19 nt, Artificial Sequence
  Description of Artificial Sequence: Synthetic oligonucleotide
  Sense strand starting at position 607 of SEQ ID NO: 1885343
uguuaacuuaaguggagau

SEQ ID NO: 2335095 - RNA, 19 nt, Artificial Sequence
  Description of Artificial Sequence: Synthetic oligonucleotide
  Antisense strand to SEQ ID NO: 2335094
aucuccacuuaaguuaaca

SEQ ID NO: 2335096 - RNA, 19 nt, Artificial Sequence
  Description of Artificial Sequence: Synthetic oligonucleotide
  Sense strand starting at position 608 of SEQ ID NO: 1885343
guuaacuuaaguggagauu

SEQ ID NO: 2335097 - RNA, 19 nt, Artificial Sequence
  Description of Artificial Sequence: Synthetic oligonucleotide
  Antisense strand to SEQ ID NO: 2335096
aaucuccacuuaaguuaac

SEQ ID NO: 2335098 - RNA, 19 nt, Artificial Sequence
  Description of Artificial Sequence: Synthetic oligonucleotide
  Sense strand starting at position 714 of SEQ ID NO: 1885343
aggugauaucaaggucucu

SEQ ID NO: 2335099 - RNA, 19 nt, Artificial Sequence
  Description of Artificial Sequence: Synthetic oligonucleotide
  Antisense strand to SEQ ID NO: 2335098
agagaccuugauaucaccu

SEQ ID NO: 2335100 - RNA, 19 nt, Artificial Sequence
  Description of Artificial Sequence: Synthetic oligonucleotide
  Sense strand starting at position 736 of SEQ ID NO: 1885343
aggaguucuggugauguca

SEQ ID NO: 2335101 - RNA, 19 nt, Artificial Sequence
  Description of Artificial Sequence: Synthetic oligonucleotide
  Antisense strand to SEQ ID NO: 2335100
ugacaucaccagaacuccu

SEQ ID NO: 2335102 - RNA, 19 nt, Artificial Sequence
  Description of Artificial Sequence: Synthetic oligonucleotide
  Sense strand starting at position 760 of SEQ ID NO: 1885343
aggaaaugugaaugacugu

SEQ ID NO: 2335103 - RNA, 19 nt, Artificial Sequence
  Description of Artificial Sequence: Synthetic oligonucleotide
  Antisense strand to SEQ ID NO: 2335102
acagucauucacauuuccu

SEQ ID NO: 2335104 - RNA, 19 nt, Artificial Sequence
  Description of Artificial Sequence: Synthetic oligonucleotide
  Sense strand starting at position 822 of SEQ ID NO: 1885343
gaagaagaguggcuugauu

SEQ ID NO: 2335105 - RNA, 19 nt, Artificial Sequence
  Description of Artificial Sequence: Synthetic oligonucleotide
  Antisense strand to SEQ ID NO: 2335104
aaucaagccacucuucuuc

SEQ ID NO: 2335106 - RNA, 19 nt, Artificial Sequence
  Description of Artificial Sequence: Synthetic oligonucleotide
  Sense strand starting at position 911 of SEQ ID NO: 1885343
cggaaacguguuagguguu

SEQ ID NO: 2335107 - RNA, 19 nt, Artificial Sequence
  Description of Artificial Sequence: Synthetic oligonucleotide
  Antisense strand to SEQ ID NO: 2335106
aacaccuaacacguuuccg

SEQ ID NO: 2335108 - RNA, 19 nt, Artificial Sequence
  Description of Artificial Sequence: Synthetic oligonucleotide
  Sense strand starting at position 962 of SEQ ID NO: 1885343
guaaguaaagguugaguga

SEQ ID NO: 2335109 - RNA, 19 nt, Artificial Sequence
  Description of Artificial Sequence: Synthetic oligonucleotide
  Antisense strand to SEQ ID NO: 2335108
ucacucaaccuuuacuuac

SEQ ID NO: 2335110 - RNA, 19 nt, Artificial Sequence
  Description of Artificial Sequence: Synthetic oligonucleotide
  Sense strand starting at position 988 of SEQ ID NO: 1885343
gaaauaaagucagcucuga

SEQ ID NO: 2335111 - RNA, 19 nt, Artificial Sequence
  Description of Artificial Sequence: Synthetic oligonucleotide
  Antisense strand to SEQ ID NO: 2335110
ucagagcugacuuuauuuc

SEQ ID NO: 2335112 - RNA, 19 nt, Artificial Sequence
  Description of Artificial Sequence: Synthetic oligonucleotide
  Sense strand starting at position 992 of SEQ ID NO: 1885343
uaaagucagcucugaugga

SEQ ID NO: 2335113 - RNA, 19 nt, Artificial Sequence
  Description of Artificial Sequence: Synthetic oligonucleotide
  Antisense strand to SEQ ID NO: 2335112
uccaucagagcugacuuua

SEQ ID NO: 2335114 - RNA, 19 nt, Artificial Sequence
  Description of Artificial Sequence: Synthetic oligonucleotide
  Sense strand starting at position 1034 of SEQ ID NO: 1885343
ggagaaaugcuugagccac

SEQ ID NO: 2335115 - RNA, 19 nt, Artificial Sequence
  Description of Artificial Sequence: Synthetic oligonucleotide
  Antisense strand to SEQ ID NO: 2335114
guggcucaagcauuucucc

SEQ ID NO: 2335116 - RNA, 19 nt, Artificial Sequence
  Description of Artificial Sequence: Synthetic oligonucleotide
  Sense strand starting at position 1291 of SEQ ID NO: 1885343
aggacaggcaauugugaaa

SEQ ID NO: 2335117 - RNA, 19 nt, Artificial Sequence
  Description of Artificial Sequence: Synthetic oligonucleotide
  Antisense strand to SEQ ID NO: 2335116
uuucacaauugccuguccu

SEQ ID NO: 2335118 - RNA, 19 nt, Artificial Sequence
  Description of Artificial Sequence: Synthetic oligonucleotide
  Sense strand starting at position 1578 of SEQ ID NO: 1885343
gggaucucugcuggaacuu

SEQ ID NO: 2335119 - RNA, 19 nt, Artificial Sequence
  Description of Artificial Sequence: Synthetic oligonucleotide
  Antisense strand to SEQ ID NO: 2335118
aaguuccagcagagauccc

SEQ ID NO: 2335120 - RNA, 19 nt, Artificial Sequence
  Description of Artificial Sequence: Synthetic oligonucleotide
  Sense strand starting at position 1722 of SEQ ID NO: 1885343
agaacugaguaauuauucu

SEQ ID NO: 2335121 - RNA, 19 nt, Artificial Sequence
  Description of Artificial Sequence: Synthetic oligonucleotide
  Antisense strand to SEQ ID NO: 2335120
agaauaauuacucaguucu

SEQ ID NO: 2335122 - RNA, 19 nt, Artificial Sequence
  Description of Artificial Sequence: Synthetic oligonucleotide
  Sense strand starting at position 1984 of SEQ ID NO: 1885343
gaaggaucgcgauauuaca

SEQ ID NO: 2335123 - RNA, 19 nt, Artificial Sequence
  Description of Artificial Sequence: Synthetic oligonucleotide
  Antisense strand to SEQ ID NO: 2335122
uguaauaucgcgauccuuc

SEQ ID NO: 2335124 - RNA, 19 nt, Artificial Sequence
  Description of Artificial Sequence: Synthetic oligonucleotide
  Sense strand starting at position 2326 of SEQ ID NO: 1885343
gcuaucuuagcgucagcga

SEQ ID NO: 2335125 - RNA, 19 nt, Artificial Sequence
  Description of Artificial Sequence: Synthetic oligonucleotide
  Antisense strand to SEQ ID NO: 2335124
ucgcugacgcuaagauagc

SEQ ID NO: 2335126 - RNA, 19 nt, Artificial Sequence
  Description of Artificial Sequence: Synthetic oligonucleotide
  Sense strand starting at position 2603 of SEQ ID NO: 1885343
gugugaugugaccaucgag

SEQ ID NO: 2335127 - RNA, 19 nt, Artificial Sequence
  Description of Artificial Sequence: Synthetic oligonucleotide
  Antisense strand to SEQ ID NO: 2335126
cucgauggucacaucacac

SEQ ID NO: 2335128 - RNA, 19 nt, Artificial Sequence
  Description of Artificial Sequence: Synthetic oligonucleotide
  Sense strand starting at position 2810 of SEQ ID NO: 1885343
gggucgugugucucucagu

SEQ ID NO: 2335129 - RNA, 19 nt, Artificial Sequence
  Description of Artificial Sequence: Synthetic oligonucleotide
  Antisense strand to SEQ ID NO: 2335128
acugagagacacacgaccc

SEQ ID NO: 2335130 - RNA, 19 nt, Artificial Sequence
  Description of Artificial Sequence: Synthetic oligonucleotide
  Sense strand starting at position 2995 of SEQ ID NO: 1885343
aguccuauauagcucagaa

SEQ ID NO: 2335131 - RNA, 19 nt, Artificial Sequence
  Description of Artificial Sequence: Synthetic oligonucleotide
  Antisense strand to SEQ ID NO: 2335130
uucugagcuauauaggacu

SEQ ID NO: 2335132 - RNA, 19 nt, Artificial Sequence
  Description of Artificial Sequence: Synthetic oligonucleotide
  Sense strand starting at position 3087 of SEQ ID NO: 1885343
gcuguccugcgcuuggaua

SEQ ID NO: 2335133 - RNA, 19 nt, Artificial Sequence
  Description of Artificial Sequence: Synthetic oligonucleotide
  Antisense strand to SEQ ID NO: 2335132
uauccaagcgcaggacagc

SEQ ID NO: 2335134 - RNA, 19 nt, Artificial Sequence
  Description of Artificial Sequence: Synthetic oligonucleotide
  Sense strand starting at position 3287 of SEQ ID NO: 1885343
cugccuggacguuauugaa

SEQ ID NO: 2335135 - RNA, 19 nt, Artificial Sequence
  Description of Artificial Sequence: Synthetic oligonucleotide
  Antisense strand to SEQ ID NO: 2335134
uucaauaacguccaggcag

SEQ ID NO: 2335136 - RNA, 19 nt, Artificial Sequence
  Description of Artificial Sequence: Synthetic oligonucleotide
  Sense strand starting at position 3445 of SEQ ID NO: 1885343
aggagauggugaucuucuu

SEQ ID NO: 2335137 - RNA, 19 nt, Artificial Sequence
  Description of Artificial Sequence: Synthetic oligonucleotide
  Antisense strand to SEQ ID NO: 2335136
aagaagaucaccaucuccu

SEQ ID NO: 2335138 - RNA, 19 nt, Artificial Sequence
  Description of Artificial Sequence: Synthetic oligonucleotide
  Sense strand starting at position 3451 of SEQ ID NO: 1885343
uggugaucuucuuuggaca

SEQ ID NO: 2335139 - RNA, 19 nt, Artificial Sequence
  Description of Artificial Sequence: Synthetic oligonucleotide
  Antisense strand to SEQ ID NO: 2335138
uguccaaagaagaucacca

SEQ ID NO: 2335140 - RNA, 19 nt, Artificial Sequence
  Description of Artificial Sequence: Synthetic oligonucleotide
  Sense strand starting at position 3452 of SEQ ID NO: 1885343
ggugaucuucuuuggacac

SEQ ID NO: 2335141 - RNA, 19 nt, Artificial Sequence
  Description of Artificial Sequence: Synthetic oligonucleotide
  Antisense strand to SEQ ID NO: 2335140
guguccaaagaagaucacc

SEQ ID NO: 2335142 - RNA, 19 nt, Artificial Sequence
  Description of Artificial Sequence: Synthetic oligonucleotide
  Sense strand starting at position 3553 of SEQ ID NO: 1885343
cuaggacugucaccacuuu

SEQ ID NO: 2335143 - RNA, 19 nt, Artificial Sequence
  Description of Artificial Sequence: Synthetic oligonucleotide
  Antisense strand to SEQ ID NO: 2335142
aaaguggugacaguccuag

SEQ ID NO: 2335144 - RNA, 19 nt, Artificial Sequence
  Description of Artificial Sequence: Synthetic oligonucleotide
  Sense strand starting at position 3623 of SEQ ID NO: 1885343
gacagaccucuggguguau

SEQ ID NO: 2335145 - RNA, 19 nt, Artificial Sequence
  Description of Artificial Sequence: Synthetic oligonucleotide
  Antisense strand to SEQ ID NO: 2335144
auacacccagaggucuguc

SEQ ID NO: 2335146 - RNA, 19 nt, Artificial Sequence
  Description of Artificial Sequence: Synthetic oligonucleotide
  Sense strand starting at position 3624 of SEQ ID NO: 1885343
acagaccucuggguguaua

SEQ ID NO: 2335147 - RNA, 19 nt, Artificial Sequence
  Description of Artificial Sequence: Synthetic oligonucleotide
  Antisense strand to SEQ ID NO: 2335146
uauacacccagaggucugu

SEQ ID NO: 2335148 - RNA, 19 nt, Artificial Sequence
  Description of Artificial Sequence: Synthetic oligonucleotide
  Sense strand starting at position 3625 of SEQ ID NO: 1885343
cagaccucuggguguauaa

SEQ ID NO: 2335149 - RNA, 19 nt, Artificial Sequence
  Description of Artificial Sequence: Synthetic oligonucleotide
  Antisense strand to SEQ ID NO: 2335148
uuauacacccagaggucug

SEQ ID NO: 2335150 - RNA, 19 nt, Artificial Sequence
  Description of Artificial Sequence: Synthetic oligonucleotide
  Sense strand starting at position 3650 of SEQ ID NO: 1885343
ucagaauaguuggcagcaa

SEQ ID NO: 2335151 - RNA, 19 nt, Artificial Sequence
  Description of Artificial Sequence: Synthetic oligonucleotide
  Antisense strand to SEQ ID NO: 2335150
uugcugccaacuauucuga

SEQ ID NO: 2335152 - RNA, 19 nt, Artificial Sequence
  Description of Artificial Sequence: Synthetic oligonucleotide
  Sense strand starting at position 3759 of SEQ ID NO: 1885343
ggaguuaaguugaaggaag

SEQ ID NO: 2335153 - RNA, 19 nt, Artificial Sequence
  Description of Artificial Sequence: Synthetic oligonucleotide
  Antisense strand to SEQ ID NO: 2335152
cuuccuucaacuuaacucc

SEQ ID NO: 2335154 - RNA, 19 nt, Artificial Sequence
  Description of Artificial Sequence: Synthetic oligonucleotide
  Sense strand starting at position 3776 of SEQ ID NO: 1885343
aguggaaugcuacaauguu

SEQ ID NO: 2335155 - RNA, 19 nt, Artificial Sequence
  Description of Artificial Sequence: Synthetic oligonucleotide
  Antisense strand to SEQ ID NO: 2335154
aacauuguagcauuccacu

SEQ ID NO: 2335156 - RNA, 19 nt, Artificial Sequence
  Description of Artificial Sequence: Synthetic oligonucleotide
  Sense strand starting at position 3796 of SEQ ID NO: 1885343
agagaaaccagugggcauu

SEQ ID NO: 2335157 - RNA, 19 nt, Artificial Sequence
  Description of Artificial Sequence: Synthetic oligonucleotide
  Antisense strand to SEQ ID NO: 2335156
aaugcccacugguuucucu

SEQ ID NO: 2335158 - RNA, 19 nt, Artificial Sequence
  Description of Artificial Sequence: Synthetic oligonucleotide
  Sense strand starting at position 3850 of SEQ ID NO: 1885343
accuaaugguaauucgaga

SEQ ID NO: 2335159 - RNA, 19 nt, Artificial Sequence
  Description of Artificial Sequence: Synthetic oligonucleotide
  Antisense strand to SEQ ID NO: 2335158
ucucgaauuaccauuaggu

SEQ ID NO: 2335160 - RNA, 19 nt, Artificial Sequence
  Description of Artificial Sequence: Synthetic oligonucleotide
  Sense strand starting at position 3855 of SEQ ID NO: 1885343
augguaauucgagacuauc

SEQ ID NO: 2335161 - RNA, 19 nt, Artificial Sequence
  Description of Artificial Sequence: Synthetic oligonucleotide
  Antisense strand to SEQ ID NO: 2335160
gauagucucgaauuaccau

SEQ ID NO: 2335162 - RNA, 19 nt, Artificial Sequence
  Description of Artificial Sequence: Synthetic oligonucleotide
  Sense strand starting at position 3858 of SEQ ID NO: 1885343
guaauucgagacuaucucu

SEQ ID NO: 2335163 - RNA, 19 nt, Artificial Sequence
  Description of Artificial Sequence: Synthetic oligonucleotide
  Antisense strand to SEQ ID NO: 2335162
agagauagucucgaauuac

SEQ ID NO: 2335164 - RNA, 19 nt, Artificial Sequence
  Description of Artificial Sequence: Synthetic oligonucleotide
  Sense strand starting at position 3893 of SEQ ID NO: 1885343
gcgcauguucuguuaugau

SEQ ID NO: 2335165 - RNA, 19 nt, Artificial Sequence
  Description of Artificial Sequence: Synthetic oligonucleotide
  Antisense strand to SEQ ID NO: 2335164
aucauaacagaacaugcgc

SEQ ID NO: 2335166 - RNA, 19 nt, Artificial Sequence
  Description of Artificial Sequence: Synthetic oligonucleotide
  Sense strand starting at position 3928 of SEQ ID NO: 1885343
ggcugaagugcguuucucu

SEQ ID NO: 2335167 - RNA, 19 nt, Artificial Sequence
  Description of Artificial Sequence: Synthetic oligonucleotide
  Antisense strand to SEQ ID NO: 2335166
agagaaacgcacuucagcc

SEQ ID NO: 2335168 - RNA, 19 nt, Artificial Sequence
  Description of Artificial Sequence: Synthetic oligonucleotide
  Sense strand starting at position 79 of SEQ ID NO: 1885344
ucacccuggcuggaauaua

SEQ ID NO: 2335169 - RNA, 19 nt, Artificial Sequence
  Description of Artificial Sequence: Synthetic oligonucleotide
  Antisense strand to SEQ ID NO: 2335168
uauauuccagccaggguga

SEQ ID NO: 2335170 - RNA, 19 nt, Artificial Sequence
  Description of Artificial Sequence: Synthetic oligonucleotide
  Sense strand starting at position 90 of SEQ ID NO: 1885344
ggaauauaguggcccaauc

SEQ ID NO: 2335171 - RNA, 19 nt, Artificial Sequence
  Description of Artificial Sequence: Synthetic oligonucleotide
  Antisense strand to SEQ ID NO: 2335170
gauugggccacuauauucc

SEQ ID NO: 2335172 - RNA, 19 nt, Artificial Sequence
  Description of Artificial Sequence: Synthetic oligonucleotide
  Sense strand starting at position 177 of SEQ ID NO: 1885344
gcugcuugagugucaguau

SEQ ID NO: 2335173 - RNA, 19 nt, Artificial Sequence
  Description of Artificial Sequence: Synthetic oligonucleotide
  Antisense strand to SEQ ID NO: 2335172
auacugacacucaagcagc

SEQ ID NO: 2335174 - RNA, 19 nt, Artificial Sequence
  Description of Artificial Sequence: Synthetic oligonucleotide
  Sense strand starting at position 189 of SEQ ID NO: 1885344
ucaguaugguggucagaag

SEQ ID NO: 2335175 - RNA, 19 nt, Artificial Sequence
  Description of Artificial Sequence: Synthetic oligonucleotide
  Antisense strand to SEQ ID NO: 2335174
cuucugaccaccauacuga

SEQ ID NO: 2335176 - RNA, 19 nt, Artificial Sequence
  Description of Artificial Sequence: Synthetic oligonucleotide
  Sense strand starting at position 190 of SEQ ID NO: 1885344
caguaugguggucagaaga

SEQ ID NO: 2335177 - RNA, 19 nt, Artificial Sequence
  Description of Artificial Sequence: Synthetic oligonucleotide
  Antisense strand to SEQ ID NO: 2335176
ucuucugaccaccauacug

SEQ ID NO: 2335178 - RNA, 19 nt, Artificial Sequence
  Description of Artificial Sequence: Synthetic oligonucleotide
  Sense strand starting at position 580 of SEQ ID NO: 1885344
ccagccugacuuugguaua

SEQ ID NO: 2335179 - RNA, 19 nt, Artificial Sequence
  Description of Artificial Sequence: Synthetic oligonucleotide
  Antisense strand to SEQ ID NO: 2335178
uauaccaaagucaggcugg

SEQ ID NO: 2335180 - RNA, 19 nt, Artificial Sequence
  Description of Artificial Sequence: Synthetic oligonucleotide
  Sense strand starting at position 797 of SEQ ID NO: 1885344
uuaagagucgggcaccuuu

SEQ ID NO: 2335181 - RNA, 19 nt, Artificial Sequence
  Description of Artificial Sequence: Synthetic oligonucleotide
  Antisense strand to SEQ ID NO: 2335180
aaaggugcccgacucuuaa

SEQ ID NO: 2335182 - RNA, 19 nt, Artificial Sequence
  Description of Artificial Sequence: Synthetic oligonucleotide
  Sense strand starting at position 1221 of SEQ ID NO: 1885344
gagaaauucuaggcggaca

SEQ ID NO: 2335183 - RNA, 19 nt, Artificial Sequence
  Description of Artificial Sequence: Synthetic oligonucleotide
  Antisense strand to SEQ ID NO: 2335182
uguccgccuagaauuucuc

SEQ ID NO: 2335184 - RNA, 19 nt, Artificial Sequence
  Description of Artificial Sequence: Synthetic oligonucleotide
  Sense strand starting at position 1278 of SEQ ID NO: 1885344
gccugaaaccugcauccaa

SEQ ID NO: 2335185 - RNA, 19 nt, Artificial Sequence
  Description of Artificial Sequence: Synthetic oligonucleotide
  Antisense strand to SEQ ID NO: 2335184
uuggaugcagguuucaggc

SEQ ID NO: 2335186 - RNA, 19 nt, Artificial Sequence
  Description of Artificial Sequence: Synthetic oligonucleotide
  Sense strand starting at position 1332 of SEQ ID NO: 1885344
ccgaucgguucuuucugaa

SEQ ID NO: 2335187 - RNA, 19 nt, Artificial Sequence
  Description of Artificial Sequence: Synthetic oligonucleotide
  Antisense strand to SEQ ID NO: 2335186
uucagaaagaaccgaucgg

SEQ ID NO: 2335188 - RNA, 19 nt, Artificial Sequence
  Description of Artificial Sequence: Synthetic oligonucleotide
  Sense strand starting at position 1482 of SEQ ID NO: 1885344
gugacuugccuucagagag

SEQ ID NO: 2335189 - RNA, 19 nt, Artificial Sequence
  Description of Artificial Sequence: Synthetic oligonucleotide
  Antisense strand to SEQ ID NO: 2335188
cucucugaaggcaagucac

SEQ ID NO: 2335190 - RNA, 19 nt, Artificial Sequence
  Description of Artificial Sequence: Synthetic oligonucleotide
  Sense strand starting at position 1579 of SEQ ID NO: 1885344
cggauuucaugggaagauu

SEQ ID NO: 2335191 - RNA, 19 nt, Artificial Sequence
  Description of Artificial Sequence: Synthetic oligonucleotide
  Antisense strand to SEQ ID NO: 2335190
aaucuucccaugaaauccg

SEQ ID NO: 2335192 - RNA, 19 nt, Artificial Sequence
  Description of Artificial Sequence: Synthetic oligonucleotide
  Sense strand starting at position 1642 of SEQ ID NO: 1885344
ggcauuucccauugccuaa

SEQ ID NO: 2335193 - RNA, 19 nt, Artificial Sequence
  Description of Artificial Sequence: Synthetic oligonucleotide
  Antisense strand to SEQ ID NO: 2335192
uuaggcaaugggaaaugcc

SEQ ID NO: 2335194 - RNA, 19 nt, Artificial Sequence
  Description of Artificial Sequence: Synthetic oligonucleotide
  Sense strand starting at position 1828 of SEQ ID NO: 1885344
ggcucacugagcugauaac

SEQ ID NO: 2335195 - RNA, 19 nt, Artificial Sequence
  Description of Artificial Sequence: Synthetic oligonucleotide
  Antisense strand to SEQ ID NO: 2335194
guuaucagcucagugagcc

SEQ ID NO: 2335196 - RNA, 19 nt, Artificial Sequence
  Description of Artificial Sequence: Synthetic oligonucleotide
  Sense strand starting at position 1829 of SEQ ID NO: 1885344
gcucacugagcugauaaca

SEQ ID NO: 2335197 - RNA, 19 nt, Artificial Sequence
  Description of Artificial Sequence: Synthetic oligonucleotide
  Antisense strand to SEQ ID NO: 2335196
uguuaucagcucagugagc

SEQ ID NO: 2335198 - RNA, 19 nt, Artificial Sequence
  Description of Artificial Sequence: Synthetic oligonucleotide
  Sense strand starting at position 2037 of SEQ ID NO: 1885344
cguggcaggcugaguaaau

SEQ ID NO: 2335199 - RNA, 19 nt, Artificial Sequence
  Description of Artificial Sequence: Synthetic oligonucleotide
  Antisense strand to SEQ ID NO: 2335198
auuuacucagccugccacg

SEQ ID NO: 2335200 - RNA, 19 nt, Artificial Sequence
  Description of Artificial Sequence: Synthetic oligonucleotide
  Sense strand starting at position 2065 of SEQ ID NO: 1885344
ccgucacaagucugacaaa

SEQ ID NO: 2335201 - RNA, 19 nt, Artificial Sequence
  Description of Artificial Sequence: Synthetic oligonucleotide
  Antisense strand to SEQ ID NO: 2335200
uuugucagacuugugacgg

SEQ ID NO: 2335202 - RNA, 19 nt, Artificial Sequence
  Description of Artificial Sequence: Synthetic oligonucleotide
  Sense strand starting at position 2153 of SEQ ID NO: 1885344
auacucauuugugaugcaa

SEQ ID NO: 2335203 - RNA, 19 nt, Artificial Sequence
  Description of Artificial Sequence: Synthetic oligonucleotide
  Antisense strand to SEQ ID NO: 2335202
uugcaucacaaaugaguau

SEQ ID NO: 2335204 - RNA, 19 nt, Artificial Sequence
  Description of Artificial Sequence: Synthetic oligonucleotide
  Sense strand starting at position 2168 of SEQ ID NO: 1885344
gcaauaagggcugauugua

SEQ ID NO: 2335205 - RNA, 19 nt, Artificial Sequence
  Description of Artificial Sequence: Synthetic oligonucleotide
  Antisense strand to SEQ ID NO: 2335204
uacaaucagcccuuauugc

SEQ ID NO: 2335206 - RNA, 19 nt, Artificial Sequence
  Description of Artificial Sequence: Synthetic oligonucleotide
  Sense strand starting at position 2241 of SEQ ID NO: 1885344
gguaaagccaguuguauau

SEQ ID NO: 2335207 - RNA, 19 nt, Artificial Sequence
  Description of Artificial Sequence: Synthetic oligonucleotide
  Antisense strand to SEQ ID NO: 2335206
auauacaacuggcuuuacc

SEQ ID NO: 2335208 - RNA, 19 nt, Artificial Sequence
  Description of Artificial Sequence: Synthetic oligonucleotide
  Sense strand starting at position 2272 of SEQ ID NO: 1885344
uaggaauacuuaugagaag

SEQ ID NO: 2335209 - RNA, 19 nt, Artificial Sequence
  Description of Artificial Sequence: Synthetic oligonucleotide
  Antisense strand to SEQ ID NO: 2335208
cuucucauaaguauuccua

SEQ ID NO: 2335210 - RNA, 19 nt, Artificial Sequence
  Description of Artificial Sequence: Synthetic oligonucleotide
  Sense strand starting at position 2273 of SEQ ID NO: 1885344
aggaauacuuaugagaagu

SEQ ID NO: 2335211 - RNA, 19 nt, Artificial Sequence
  Description of Artificial Sequence: Synthetic oligonucleotide
  Antisense strand to SEQ ID NO: 2335210
acuucucauaaguauuccu

SEQ ID NO: 2335212 - RNA, 19 nt, Artificial Sequence
  Description of Artificial Sequence: Synthetic oligonucleotide
  Sense strand starting at position 2281 of SEQ ID NO: 1885344
uuaugagaaguuugagcua

SEQ ID NO: 2335213 - RNA, 19 nt, Artificial Sequence
  Description of Artificial Sequence: Synthetic oligonucleotide
  Antisense strand to SEQ ID NO: 2335212
uagcucaaacuucucauaa

SEQ ID NO: 2335214 - RNA, 19 nt, Artificial Sequence
  Description of Artificial Sequence: Synthetic oligonucleotide
  Sense strand starting at position 2621 of SEQ ID NO: 1885344
guuugaaaugugugauuag

SEQ ID NO: 2335215 - RNA, 19 nt, Artificial Sequence
  Description of Artificial Sequence: Synthetic oligonucleotide
  Antisense strand to SEQ ID NO: 2335214
cuaaucacacauuucaaac

SEQ ID NO: 2335216 - RNA, 19 nt, Artificial Sequence
  Description of Artificial Sequence: Synthetic oligonucleotide
  Sense strand starting at position 2624 of SEQ ID NO: 1885344
ugaaaugugugauuagaac

SEQ ID NO: 2335217 - RNA, 19 nt, Artificial Sequence
  Description of Artificial Sequence: Synthetic oligonucleotide
  Antisense strand to SEQ ID NO: 2335216
guucuaaucacacauuuca

SEQ ID NO: 2335218 - RNA, 19 nt, Artificial Sequence
  Description of Artificial Sequence: Synthetic oligonucleotide
  Sense strand starting at position 2633 of SEQ ID NO: 1885344
ugauuagaaccuugcuauu

SEQ ID NO: 2335219 - RNA, 19 nt, Artificial Sequence
  Description of Artificial Sequence: Synthetic oligonucleotide
  Antisense strand to SEQ ID NO: 2335218
aauagcaagguucuaauca

SEQ ID NO: 2335220 - RNA, 19 nt, Artificial Sequence
  Description of Artificial Sequence: Synthetic oligonucleotide
  Sense strand starting at position 2685 of SEQ ID NO: 1885344
ucacaucuguaaucugaga

SEQ ID NO: 2335221 - RNA, 19 nt, Artificial Sequence
  Description of Artificial Sequence: Synthetic oligonucleotide
  Antisense strand to SEQ ID NO: 2335220
ucucagauuacagauguga

SEQ ID NO: 2335222 - RNA, 19 nt, Artificial Sequence
  Description of Artificial Sequence: Synthetic oligonucleotide
  Sense strand starting at position 2886 of SEQ ID NO: 1885344
gcuguagugagccaugaag

SEQ ID NO: 2335223 - RNA, 19 nt, Artificial Sequence
  Description of Artificial Sequence: Synthetic oligonucleotide
  Antisense strand to SEQ ID NO: 2335222
cuucauggcucacuacagc

SEQ ID NO: 2335224 - RNA, 19 nt, Artificial Sequence
  Description of Artificial Sequence: Synthetic oligonucleotide
  Sense strand starting at position 2970 of SEQ ID NO: 1885344
aguguagucccaggacuaa

SEQ ID NO: 2335225 - RNA, 19 nt, Artificial Sequence
  Description of Artificial Sequence: Synthetic oligonucleotide
  Antisense strand to SEQ ID NO: 2335224
uuaguccugggacuacacu

SEQ ID NO: 2335226 - RNA, 19 nt, Artificial Sequence
  Description of Artificial Sequence: Synthetic oligonucleotide
  Sense strand starting at position 2998 of SEQ ID NO: 1885344
guuaucucagcgcuuuauu

SEQ ID NO: 2335227 - RNA, 19 nt, Artificial Sequence
  Description of Artificial Sequence: Synthetic oligonucleotide
  Antisense strand to SEQ ID NO: 2335226
aauaaagcgcugagauaac

SEQ ID NO: 2335228 - RNA, 19 nt, Artificial Sequence
  Description of Artificial Sequence: Synthetic oligonucleotide
  Sense strand starting at position 3001 of SEQ ID NO: 1885344
aucucagcgcuuuauuaga

SEQ ID NO: 2335229 - RNA, 19 nt, Artificial Sequence
  Description of Artificial Sequence: Synthetic oligonucleotide
  Antisense strand to SEQ ID NO: 2335228
ucuaauaaagcgcugagau

SEQ ID NO: 2335230 - RNA, 19 nt, Artificial Sequence
  Description of Artificial Sequence: Synthetic oligonucleotide
  Sense strand starting at position 3003 of SEQ ID NO: 1885344
cucagcgcuuuauuagaaa

SEQ ID NO: 2335231 - RNA, 19 nt, Artificial Sequence
  Description of Artificial Sequence: Synthetic oligonucleotide
  Antisense strand to SEQ ID NO: 2335230
uuucuaauaaagcgcugag

SEQ ID NO: 2335232 - RNA, 19 nt, Artificial Sequence
  Description of Artificial Sequence: Synthetic oligonucleotide
  Sense strand starting at position 3396 of SEQ ID NO: 1885344
gugauugcugugcauguga

SEQ ID NO: 2335233 - RNA, 19 nt, Artificial Sequence
  Description of Artificial Sequence: Synthetic oligonucleotide
  Antisense strand to SEQ ID NO: 2335232
ucacaugcacagcaaucac

SEQ ID NO: 2335234 - RNA, 19 nt, Artificial Sequence
  Description of Artificial Sequence: Synthetic oligonucleotide
  Sense strand starting at position 3398 of SEQ ID NO: 1885344
gauugcugugcaugugaaa

SEQ ID NO: 2335235 - RNA, 19 nt, Artificial Sequence
  Description of Artificial Sequence: Synthetic oligonucleotide
  Antisense strand to SEQ ID NO: 2335234
uuucacaugcacagcaauc

SEQ ID NO: 2335236 - RNA, 19 nt, Artificial Sequence
  Description of Artificial Sequence: Synthetic oligonucleotide
  Sense strand starting at position 3417 of SEQ ID NO: 1885344
gucugagaagccuaguuua

SEQ ID NO: 2335237 - RNA, 19 nt, Artificial Sequence
  Description of Artificial Sequence: Synthetic oligonucleotide
  Antisense strand to SEQ ID NO: 2335236
uaaacuaggcuucucagac

SEQ ID NO: 2335238 - RNA, 19 nt, Artificial Sequence
  Description of Artificial Sequence: Synthetic oligonucleotide
  Sense strand starting at position 3420 of SEQ ID NO: 1885344
ugagaagccuaguuuagaa

SEQ ID NO: 2335239 - RNA, 19 nt, Artificial Sequence
  Description of Artificial Sequence: Synthetic oligonucleotide
  Antisense strand to SEQ ID NO: 2335238
uucuaaacuaggcuucuca

SEQ ID NO: 2335240 - RNA, 19 nt, Artificial Sequence
  Description of Artificial Sequence: Synthetic oligonucleotide
  Sense strand starting at position 3422 of SEQ ID NO: 1885344
agaagccuaguuuagaauu

SEQ ID NO: 2335241 - RNA, 19 nt, Artificial Sequence
  Description of Artificial Sequence: Synthetic oligonucleotide
  Antisense strand to SEQ ID NO: 2335240
aauucuaaacuaggcuucu

SEQ ID NO: 2335242 - RNA, 19 nt, Artificial Sequence
  Description of Artificial Sequence: Synthetic oligonucleotide
  Sense strand starting at position 3541 of SEQ ID NO: 1885344
guacacauucgauaauuac

SEQ ID NO: 2335243 - RNA, 19 nt, Artificial Sequence
  Description of Artificial Sequence: Synthetic oligonucleotide
  Antisense strand to SEQ ID NO: 2335242
guaauuaucgaauguguac

SEQ ID NO: 2335244 - RNA, 19 nt, Artificial Sequence
  Description of Artificial Sequence: Synthetic oligonucleotide
  Sense strand starting at position 3706 of SEQ ID NO: 1885344
ucccgaucucaugagagua

SEQ ID NO: 2335245 - RNA, 19 nt, Artificial Sequence
  Description of Artificial Sequence: Synthetic oligonucleotide
  Antisense strand to SEQ ID NO: 2335244
uacucucaugagaucggga

SEQ ID NO: 2335246 - RNA, 19 nt, Artificial Sequence
  Description of Artificial Sequence: Synthetic oligonucleotide
  Sense strand starting at position 3891 of SEQ ID NO: 1885344
gucuaagauucccugacuu

SEQ ID NO: 2335247 - RNA, 19 nt, Artificial Sequence
  Description of Artificial Sequence: Synthetic oligonucleotide
  Antisense strand to SEQ ID NO: 2335246
aagucagggaaucuuagac

SEQ ID NO: 2335248 - RNA, 19 nt, Artificial Sequence
  Description of Artificial Sequence: Synthetic oligonucleotide
  Sense strand starting at position 2389 of SEQ ID NO: 1885345
uguauuaugcccuaacugu

SEQ ID NO: 2335249 - RNA, 19 nt, Artificial Sequence
  Description of Artificial Sequence: Synthetic oligonucleotide
  Antisense strand to SEQ ID NO: 2335248
acaguuagggcauaauaca

SEQ ID NO: 2335250 - RNA, 19 nt, Artificial Sequence
  Description of Artificial Sequence: Synthetic oligonucleotide
  Sense strand starting at position 2545 of SEQ ID NO: 1885345
gcagcaaaugcagauuguu

SEQ ID NO: 2335251 - RNA, 19 nt, Artificial Sequence
  Description of Artificial Sequence: Synthetic oligonucleotide
  Antisense strand to SEQ ID NO: 2335250
aacaaucugcauuugcugc

SEQ ID NO: 2335252 - RNA, 19 nt, Artificial Sequence
  Description of Artificial Sequence: Synthetic oligonucleotide
  Sense strand starting at position 2620 of SEQ ID NO: 1885345
ugaacaauucuugguaaac

SEQ ID NO: 2335253 - RNA, 19 nt, Artificial Sequence
  Description of Artificial Sequence: Synthetic oligonucleotide
  Antisense strand to SEQ ID NO: 2335252
guuuaccaagaauuguuca

SEQ ID NO: 2335254 - RNA, 19 nt, Artificial Sequence
  Description of Artificial Sequence: Synthetic oligonucleotide
  Sense strand starting at position 2675 of SEQ ID NO: 1885345
guaguugcauuccucgaaa

SEQ ID NO: 2335255 - RNA, 19 nt, Artificial Sequence
  Description of Artificial Sequence: Synthetic oligonucleotide
  Antisense strand to SEQ ID NO: 2335254
uuucgaggaaugcaacuac

SEQ ID NO: 2335256 - RNA, 19 nt, Artificial Sequence
  Description of Artificial Sequence: Synthetic oligonucleotide
  Sense strand starting at position 2726 of SEQ ID NO: 1885345
uacuuagcauuucgaugua

SEQ ID NO: 2335257 - RNA, 19 nt, Artificial Sequence
  Description of Artificial Sequence: Synthetic oligonucleotide
  Antisense strand to SEQ ID NO: 2335256
uacaucgaaaugcuaagua

SEQ ID NO: 2335258 - RNA, 19 nt, Artificial Sequence
  Description of Artificial Sequence: Synthetic oligonucleotide
  Sense strand starting at position 2845 of SEQ ID NO: 1885345
gcgggacugucucucgaau

SEQ ID NO: 2335259 - RNA, 19 nt, Artificial Sequence
  Description of Artificial Sequence: Synthetic oligonucleotide
  Antisense strand to SEQ ID NO: 2335258
auucgagagacagucccgc

SEQ ID NO: 2335260 - RNA, 19 nt, Artificial Sequence
  Description of Artificial Sequence: Synthetic oligonucleotide
  Sense strand starting at position 2856 of SEQ ID NO: 1885345
ucucgaaucgcagaauccu

SEQ ID NO: 2335261 - RNA, 19 nt, Artificial Sequence
  Description of Artificial Sequence: Synthetic oligonucleotide
  Antisense strand to SEQ ID NO: 2335260
aggauucugcgauucgaga

SEQ ID NO: 2335262 - RNA, 19 nt, Artificial Sequence
  Description of Artificial Sequence: Synthetic oligonucleotide
  Sense strand starting at position 3023 of SEQ ID NO: 1885345
ggacauuccugcuuuauaa

SEQ ID NO: 2335263 - RNA, 19 nt, Artificial Sequence
  Description of Artificial Sequence: Synthetic oligonucleotide
  Antisense strand to SEQ ID NO: 2335262
uuauaaagcaggaaugucc

SEQ ID NO: 2335264 - RNA, 19 nt, Artificial Sequence
  Description of Artificial Sequence: Synthetic oligonucleotide
  Sense strand starting at position 3031 of SEQ ID NO: 1885345
cugcuuuauaaaggugcga

SEQ ID NO: 2335265 - RNA, 19 nt, Artificial Sequence
  Description of Artificial Sequence: Synthetic oligonucleotide
  Antisense strand to SEQ ID NO: 2335264
ucgcaccuuuauaaagcag

SEQ ID NO: 2335266 - RNA, 19 nt, Artificial Sequence
  Description of Artificial Sequence: Synthetic oligonucleotide
  Sense strand starting at position 3033 of SEQ ID NO: 1885345
gcuuuauaaaggugcgaaa

SEQ ID NO: 2335267 - RNA, 19 nt, Artificial Sequence
  Description of Artificial Sequence: Synthetic oligonucleotide
  Antisense strand to SEQ ID NO: 2335266
uuucgcaccuuuauaaagc

SEQ ID NO: 2335268 - RNA, 19 nt, Artificial Sequence
  Description of Artificial Sequence: Synthetic oligonucleotide
  Sense strand starting at position 3035 of SEQ ID NO: 1885345
uuuauaaaggugcgaaaca

SEQ ID NO: 2335269 - RNA, 19 nt, Artificial Sequence
  Description of Artificial Sequence: Synthetic oligonucleotide
  Antisense strand to SEQ ID NO: 2335268
uguuucgcaccuuuauaaa

SEQ ID NO: 2335270 - RNA, 19 nt, Artificial Sequence
  Description of Artificial Sequence: Synthetic oligonucleotide
  Sense strand starting at position 3044 of SEQ ID NO: 1885345
gugcgaaacaccggauaua

SEQ ID NO: 2335271 - RNA, 19 nt, Artificial Sequence
  Description of Artificial Sequence: Synthetic oligonucleotide
  Antisense strand to SEQ ID NO: 2335270
uauauccgguguuucgcac

SEQ ID NO: 2335272 - RNA, 19 nt, Artificial Sequence
  Description of Artificial Sequence: Synthetic oligonucleotide
  Sense strand starting at position 3047 of SEQ ID NO: 1885345
cgaaacaccggauauagua

SEQ ID NO: 2335273 - RNA, 19 nt, Artificial Sequence
  Description of Artificial Sequence: Synthetic oligonucleotide
  Antisense strand to SEQ ID NO: 2335272
uacuauauccgguguuucg

SEQ ID NO: 2335274 - RNA, 19 nt, Artificial Sequence
  Description of Artificial Sequence: Synthetic oligonucleotide
  Sense strand starting at position 3145 of SEQ ID NO: 1885345
uuaagugacuuacccgaga

SEQ ID NO: 2335275 - RNA, 19 nt, Artificial Sequence
  Description of Artificial Sequence: Synthetic oligonucleotide
  Antisense strand to SEQ ID NO: 2335274
ucucggguaagucacuuaa

SEQ ID NO: 2335276 - RNA, 19 nt, Artificial Sequence
  Description of Artificial Sequence: Synthetic oligonucleotide
  Sense strand starting at position 3177 of SEQ ID NO: 1885345
guguaucaaagcugagcua

SEQ ID NO: 2335277 - RNA, 19 nt, Artificial Sequence
  Description of Artificial Sequence: Synthetic oligonucleotide
  Antisense strand to SEQ ID NO: 2335276
uagcucagcuuugauacac

SEQ ID NO: 2335278 - RNA, 19 nt, Artificial Sequence
  Description of Artificial Sequence: Synthetic oligonucleotide
  Sense strand starting at position 3191 of SEQ ID NO: 1885345
agcuaugacccgugucuga

SEQ ID NO: 2335279 - RNA, 19 nt, Artificial Sequence
  Description of Artificial Sequence: Synthetic oligonucleotide
  Antisense strand to SEQ ID NO: 2335278
ucagacacgggucauagcu

SEQ ID NO: 2335280 - RNA, 19 nt, Artificial Sequence
  Description of Artificial Sequence: Synthetic oligonucleotide
  Sense strand starting at position 3198 of SEQ ID NO: 1885345
acccgugucugaccaagaa

SEQ ID NO: 2335281 - RNA, 19 nt, Artificial Sequence
  Description of Artificial Sequence: Synthetic oligonucleotide
  Antisense strand to SEQ ID NO: 2335280
uucuuggucagacacgggu

SEQ ID NO: 2335282 - RNA, 19 nt, Artificial Sequence
  Description of Artificial Sequence: Synthetic oligonucleotide
  Sense strand starting at position 3232 of SEQ ID NO: 1885345
aguuaucuguggccacaaa

SEQ ID NO: 2335283 - RNA, 19 nt, Artificial Sequence
  Description of Artificial Sequence: Synthetic oligonucleotide
  Antisense strand to SEQ ID NO: 2335282
uuuguggccacagauaacu

SEQ ID NO: 2335284 - RNA, 19 nt, Artificial Sequence
  Description of Artificial Sequence: Synthetic oligonucleotide
  Sense strand starting at position 3251 of SEQ ID NO: 1885345
gaaaguuauuugucucugu

SEQ ID NO: 2335285 - RNA, 19 nt, Artificial Sequence
  Description of Artificial Sequence: Synthetic oligonucleotide
  Antisense strand to SEQ ID NO: 2335284
acagagacaaauaacuuuc

SEQ ID NO: 2335286 - RNA, 19 nt, Artificial Sequence
  Description of Artificial Sequence: Synthetic oligonucleotide
  Sense strand starting at position 3254 of SEQ ID NO: 1885345
aguuauuugucucugucuu

SEQ ID NO: 2335287 - RNA, 19 nt, Artificial Sequence
  Description of Artificial Sequence: Synthetic oligonucleotide
  Antisense strand to SEQ ID NO: 2335286
aagacagagacaaauaacu

SEQ ID NO: 2335288 - RNA, 19 nt, Artificial Sequence
  Description of Artificial Sequence: Synthetic oligonucleotide
  Sense strand starting at position 3255 of SEQ ID NO: 1885345
guuauuugucucugucuug

SEQ ID NO: 2335289 - RNA, 19 nt, Artificial Sequence
  Description of Artificial Sequence: Synthetic oligonucleotide
  Antisense strand to SEQ ID NO: 2335288
caagacagagacaaauaac

SEQ ID NO: 2335290 - RNA, 19 nt, Artificial Sequence
  Description of Artificial Sequence: Synthetic oligonucleotide
  Sense strand starting at position 3314 of SEQ ID NO: 1885345
acacuuuagucaucaguuu

SEQ ID NO: 2335291 - RNA, 19 nt, Artificial Sequence
  Description of Artificial Sequence: Synthetic oligonucleotide
  Antisense strand to SEQ ID NO: 2335290
aaacugaugacuaaagugu

SEQ ID NO: 2335292 - RNA, 19 nt, Artificial Sequence
  Description of Artificial Sequence: Synthetic oligonucleotide
  Sense strand starting at position 3334 of SEQ ID NO: 1885345
cugacuuuguuagucuuua

SEQ ID NO: 2335293 - RNA, 19 nt, Artificial Sequence
  Description of Artificial Sequence: Synthetic oligonucleotide
  Antisense strand to SEQ ID NO: 2335292
uaaagacuaacaaagucag

SEQ ID NO: 2335294 - RNA, 19 nt, Artificial Sequence
  Description of Artificial Sequence: Synthetic oligonucleotide
  Sense strand starting at position 3335 of SEQ ID NO: 1885345
ugacuuuguuagucuuuau

SEQ ID NO: 2335295 - RNA, 19 nt, Artificial Sequence
  Description of Artificial Sequence: Synthetic oligonucleotide
  Antisense strand to SEQ ID NO: 2335294
auaaagacuaacaaaguca

SEQ ID NO: 2335296 - RNA, 19 nt, Artificial Sequence
  Description of Artificial Sequence: Synthetic oligonucleotide
  Sense strand starting at position 3338 of SEQ ID NO: 1885345
cuuuguuagucuuuaugag

SEQ ID NO: 2335297 - RNA, 19 nt, Artificial Sequence
  Description of Artificial Sequence: Synthetic oligonucleotide
  Antisense strand to SEQ ID NO: 2335296
cucauaaagacuaacaaag

SEQ ID NO: 2335298 - RNA, 19 nt, Artificial Sequence
  Description of Artificial Sequence: Synthetic oligonucleotide
  Sense strand starting at position 3339 of SEQ ID NO: 1885345
uuuguuagucuuuaugaga

SEQ ID NO: 2335299 - RNA, 19 nt, Artificial Sequence
  Description of Artificial Sequence: Synthetic oligonucleotide
  Antisense strand to SEQ ID NO: 2335298
ucucauaaagacuaacaaa

SEQ ID NO: 2335300 - RNA, 19 nt, Artificial Sequence
  Description of Artificial Sequence: Synthetic oligonucleotide
  Sense strand starting at position 3346 of SEQ ID NO: 1885345
gucuuuaugagacgugugu

SEQ ID NO: 2335301 - RNA, 19 nt, Artificial Sequence
  Description of Artificial Sequence: Synthetic oligonucleotide
  Antisense strand to SEQ ID NO: 2335300
acacacgucucauaaagac

SEQ ID NO: 2335302 - RNA, 19 nt, Artificial Sequence
  Description of Artificial Sequence: Synthetic oligonucleotide
  Sense strand starting at position 3348 of SEQ ID NO: 1885345
cuuuaugagacguguguga

SEQ ID NO: 2335303 - RNA, 19 nt, Artificial Sequence
  Description of Artificial Sequence: Synthetic oligonucleotide
  Antisense strand to SEQ ID NO: 2335302
ucacacacgucucauaaag

SEQ ID NO: 2335304 - RNA, 19 nt, Artificial Sequence
  Description of Artificial Sequence: Synthetic oligonucleotide
  Sense strand starting at position 3350 of SEQ ID NO: 1885345
uuaugagacgugugugaua

SEQ ID NO: 2335305 - RNA, 19 nt, Artificial Sequence
  Description of Artificial Sequence: Synthetic oligonucleotide
  Antisense strand to SEQ ID NO: 2335304
uaucacacacgucucauaa

SEQ ID NO: 2335306 - RNA, 19 nt, Artificial Sequence
  Description of Artificial Sequence: Synthetic oligonucleotide
  Sense strand starting at position 3352 of SEQ ID NO: 1885345
augagacgugugugauaaa

SEQ ID NO: 2335307 - RNA, 19 nt, Artificial Sequence
  Description of Artificial Sequence: Synthetic oligonucleotide
  Antisense strand to SEQ ID NO: 2335306
uuuaucacacacgucucau

SEQ ID NO: 2335308 - RNA, 19 nt, Artificial Sequence
  Description of Artificial Sequence: Synthetic oligonucleotide
  Sense strand starting at position 3355 of SEQ ID NO: 1885345
agacgugugugauaaauuu

SEQ ID NO: 2335309 - RNA, 19 nt, Artificial Sequence
  Description of Artificial Sequence: Synthetic oligonucleotide
  Antisense strand to SEQ ID NO: 2335308
aaauuuaucacacacgucu

SEQ ID NO: 2335310 - RNA, 19 nt, Artificial Sequence
  Description of Artificial Sequence: Synthetic oligonucleotide
  Sense strand starting at position 3388 of SEQ ID NO: 1885345
ccaggaaacucagcccauu

SEQ ID NO: 2335311 - RNA, 19 nt, Artificial Sequence
  Description of Artificial Sequence: Synthetic oligonucleotide
  Antisense strand to SEQ ID NO: 2335310
aaugggcugaguuuccugg

SEQ ID NO: 2335312 - RNA, 19 nt, Artificial Sequence
  Description of Artificial Sequence: Synthetic oligonucleotide
  Sense strand starting at position 3414 of SEQ ID NO: 1885345
auggauaaguacgauguga

SEQ ID NO: 2335313 - RNA, 19 nt, Artificial Sequence
  Description of Artificial Sequence: Synthetic oligonucleotide
  Antisense strand to SEQ ID NO: 2335312
ucacaucguacuuauccau

SEQ ID NO: 2335314 - RNA, 19 nt, Artificial Sequence
  Description of Artificial Sequence: Synthetic oligonucleotide
  Sense strand starting at position 3416 of SEQ ID NO: 1885345
ggauaaguacgaugugauu

SEQ ID NO: 2335315 - RNA, 19 nt, Artificial Sequence
  Description of Artificial Sequence: Synthetic oligonucleotide
  Antisense strand to SEQ ID NO: 2335314
aaucacaucguacuuaucc

SEQ ID NO: 2335316 - RNA, 19 nt, Artificial Sequence
  Description of Artificial Sequence: Synthetic oligonucleotide
  Sense strand starting at position 3418 of SEQ ID NO: 1885345
auaaguacgaugugauuaa

SEQ ID NO: 2335317 - RNA, 19 nt, Artificial Sequence
  Description of Artificial Sequence: Synthetic oligonucleotide
  Antisense strand to SEQ ID NO: 2335316
uuaaucacaucguacuuau

SEQ ID NO: 2335318 - RNA, 19 nt, Artificial Sequence
  Description of Artificial Sequence: Synthetic oligonucleotide
  Sense strand starting at position 3459 of SEQ ID NO: 1885345
gggaaagcauacuuagcua

SEQ ID NO: 2335319 - RNA, 19 nt, Artificial Sequence
  Description of Artificial Sequence: Synthetic oligonucleotide
  Antisense strand to SEQ ID NO: 2335318
uagcuaaguaugcuuuccc

SEQ ID NO: 2335320 - RNA, 19 nt, Artificial Sequence
  Description of Artificial Sequence: Synthetic oligonucleotide
  Sense strand starting at position 3491 of SEQ ID NO: 1885345
uagcaagcacugugucaua

SEQ ID NO: 2335321 - RNA, 19 nt, Artificial Sequence
  Description of Artificial Sequence: Synthetic oligonucleotide
  Antisense strand to SEQ ID NO: 2335320
uaugacacagugcuugcua

SEQ ID NO: 2335322 - RNA, 19 nt, Artificial Sequence
  Description of Artificial Sequence: Synthetic oligonucleotide
  Sense strand starting at position 3564 of SEQ ID NO: 1885345
gugggauauucagcuggcu

SEQ ID NO: 2335323 - RNA, 19 nt, Artificial Sequence
  Description of Artificial Sequence: Synthetic oligonucleotide
  Antisense strand to SEQ ID NO: 2335322
agccagcugaauaucccac

SEQ ID NO: 2335324 - RNA, 19 nt, Artificial Sequence
  Description of Artificial Sequence: Synthetic oligonucleotide
  Sense strand starting at position 3663 of SEQ ID NO: 1885345
uccuaaguccauuguccaa

SEQ ID NO: 2335325 - RNA, 19 nt, Artificial Sequence
  Description of Artificial Sequence: Synthetic oligonucleotide
  Antisense strand to SEQ ID NO: 2335324
uuggacaauggacuuagga

SEQ ID NO: 2335326 - RNA, 19 nt, Artificial Sequence
  Description of Artificial Sequence: Synthetic oligonucleotide
  Sense strand starting at position 3780 of SEQ ID NO: 1885345
aagccaggaguucgagaua

SEQ ID NO: 2335327 - RNA, 19 nt, Artificial Sequence
  Description of Artificial Sequence: Synthetic oligonucleotide
  Antisense strand to SEQ ID NO: 2335326
uaucucgaacuccuggcuu

SEQ ID NO: 2335328 - RNA, 19 nt, Artificial Sequence
  Description of Artificial Sequence: Synthetic oligonucleotide
  Sense strand starting at position 111 of SEQ ID NO: 1885346
guaggaguuguauaauauu

SEQ ID NO: 2335329 - RNA, 19 nt, Artificial Sequence
  Description of Artificial Sequence: Synthetic oligonucleotide
  Antisense strand to SEQ ID NO: 2335328
aauauuauacaacuccuac

SEQ ID NO: 2335330 - RNA, 19 nt, Artificial Sequence
  Description of Artificial Sequence: Synthetic oligonucleotide
  Sense strand starting at position 234 of SEQ ID NO: 1885346
gugaauaguaaaggguuga

SEQ ID NO: 2335331 - RNA, 19 nt, Artificial Sequence
  Description of Artificial Sequence: Synthetic oligonucleotide
  Antisense strand to SEQ ID NO: 2335330
ucaacccuuuacuauucac

SEQ ID NO: 2335332 - RNA, 19 nt, Artificial Sequence
  Description of Artificial Sequence: Synthetic oligonucleotide
  Sense strand starting at position 238 of SEQ ID NO: 1885346
auaguaaaggguugacuca

SEQ ID NO: 2335333 - RNA, 19 nt, Artificial Sequence
  Description of Artificial Sequence: Synthetic oligonucleotide
  Antisense strand to SEQ ID NO: 2335332
ugagucaacccuuuacuau

SEQ ID NO: 2335334 - RNA, 19 nt, Artificial Sequence
  Description of Artificial Sequence: Synthetic oligonucleotide
  Sense strand starting at position 472 of SEQ ID NO: 1885346
guuggacacugcguauuua

SEQ ID NO: 2335335 - RNA, 19 nt, Artificial Sequence
  Description of Artificial Sequence: Synthetic oligonucleotide
  Antisense strand to SEQ ID NO: 2335334
uaaauacgcaguguccaac

SEQ ID NO: 2335336 - RNA, 19 nt, Artificial Sequence
  Description of Artificial Sequence: Synthetic oligonucleotide
  Sense strand starting at position 553 of SEQ ID NO: 1885346
gcaucccugguugacaauu

SEQ ID NO: 2335337 - RNA, 19 nt, Artificial Sequence
  Description of Artificial Sequence: Synthetic oligonucleotide
  Antisense strand to SEQ ID NO: 2335336
aauugucaaccagggaugc

SEQ ID NO: 2335338 - RNA, 19 nt, Artificial Sequence
  Description of Artificial Sequence: Synthetic oligonucleotide
  Sense strand starting at position 724 of SEQ ID NO: 1885346
cguaauaaaccauaacggu

SEQ ID NO: 2335339 - RNA, 19 nt, Artificial Sequence
  Description of Artificial Sequence: Synthetic oligonucleotide
  Antisense strand to SEQ ID NO: 2335338
accguuaugguuuauuacg

SEQ ID NO: 2335340 - RNA, 19 nt, Artificial Sequence
  Description of Artificial Sequence: Synthetic oligonucleotide
  Sense strand starting at position 730 of SEQ ID NO: 1885346
aaaccauaacggugaauag

SEQ ID NO: 2335341 - RNA, 19 nt, Artificial Sequence
  Description of Artificial Sequence: Synthetic oligonucleotide
  Antisense strand to SEQ ID NO: 2335340
cuauucaccguuaugguuu

SEQ ID NO: 2335342 - RNA, 19 nt, Artificial Sequence
  Description of Artificial Sequence: Synthetic oligonucleotide
  Sense strand starting at position 887 of SEQ ID NO: 1885346
acuacuuauugaguuaagu

SEQ ID NO: 2335343 - RNA, 19 nt, Artificial Sequence
  Description of Artificial Sequence: Synthetic oligonucleotide
  Antisense strand to SEQ ID NO: 2335342
acuuaacucaauaaguagu

SEQ ID NO: 2335344 - RNA, 19 nt, Artificial Sequence
  Description of Artificial Sequence: Synthetic oligonucleotide
  Sense strand starting at position 988 of SEQ ID NO: 1885346
gccucucuuggacaaucua

SEQ ID NO: 2335345 - RNA, 19 nt, Artificial Sequence
  Description of Artificial Sequence: Synthetic oligonucleotide
  Antisense strand to SEQ ID NO: 2335344
uagauuguccaagagaggc

SEQ ID NO: 2335346 - RNA, 19 nt, Artificial Sequence
  Description of Artificial Sequence: Synthetic oligonucleotide
  Sense strand starting at position 1267 of SEQ ID NO: 1885346
ugaggaagagccuauguuu

SEQ ID NO: 2335347 - RNA, 19 nt, Artificial Sequence
  Description of Artificial Sequence: Synthetic oligonucleotide
  Antisense strand to SEQ ID NO: 2335346
aaacauaggcucuuccuca

SEQ ID NO: 2335348 - RNA, 19 nt, Artificial Sequence
  Description of Artificial Sequence: Synthetic oligonucleotide
  Sense strand starting at position 1270 of SEQ ID NO: 1885346
ggaagagccuauguuuaaa

SEQ ID NO: 2335349 - RNA, 19 nt, Artificial Sequence
  Description of Artificial Sequence: Synthetic oligonucleotide
  Antisense strand to SEQ ID NO: 2335348
uuuaaacauaggcucuucc

SEQ ID NO: 2335350 - RNA, 19 nt, Artificial Sequence
  Description of Artificial Sequence: Synthetic oligonucleotide
  Sense strand starting at position 1306 of SEQ ID NO: 1885346
ggagacuuguucucccaga

SEQ ID NO: 2335351 - RNA, 19 nt, Artificial Sequence
  Description of Artificial Sequence: Synthetic oligonucleotide
  Antisense strand to SEQ ID NO: 2335350
ucugggagaacaagucucc

SEQ ID NO: 2335352 - RNA, 19 nt, Artificial Sequence
  Description of Artificial Sequence: Synthetic oligonucleotide
  Sense strand starting at position 1307 of SEQ ID NO: 1885346
gagacuuguucucccagau

SEQ ID NO: 2335353 - RNA, 19 nt, Artificial Sequence
  Description of Artificial Sequence: Synthetic oligonucleotide
  Antisense strand to SEQ ID NO: 2335352
aucugggagaacaagucuc

SEQ ID NO: 2335354 - RNA, 19 nt, Artificial Sequence
  Description of Artificial Sequence: Synthetic oligonucleotide
  Sense strand starting at position 1343 of SEQ ID NO: 1885346
aguuaaguuaaacagugua

SEQ ID NO: 2335355 - RNA, 19 nt, Artificial Sequence
  Description of Artificial Sequence: Synthetic oligonucleotide
  Antisense strand to SEQ ID NO: 2335354
uacacuguuuaacuuaacu

SEQ ID NO: 2335356 - RNA, 19 nt, Artificial Sequence
  Description of Artificial Sequence: Synthetic oligonucleotide
  Sense strand starting at position 1348 of SEQ ID NO: 1885346
aguuaaacaguguaguauu

SEQ ID NO: 2335357 - RNA, 19 nt, Artificial Sequence
  Description of Artificial Sequence: Synthetic oligonucleotide
  Antisense strand to SEQ ID NO: 2335356
aauacuacacuguuuaacu

SEQ ID NO: 2335358 - RNA, 19 nt, Artificial Sequence
  Description of Artificial Sequence: Synthetic oligonucleotide
  Sense strand starting at position 1361 of SEQ ID NO: 1885346
aguauuggugcagagauag

SEQ ID NO: 2335359 - RNA, 19 nt, Artificial Sequence
  Description of Artificial Sequence: Synthetic oligonucleotide
  Antisense strand to SEQ ID NO: 2335358
cuaucucugcaccaauacu

SEQ ID NO: 2335360 - RNA, 19 nt, Artificial Sequence
  Description of Artificial Sequence: Synthetic oligonucleotide
  Sense strand starting at position 1367 of SEQ ID NO: 1885346
ggugcagagauagauguau

SEQ ID NO: 2335361 - RNA, 19 nt, Artificial Sequence
  Description of Artificial Sequence: Synthetic oligonucleotide
  Antisense strand to SEQ ID NO: 2335360
auacaucuaucucugcacc

SEQ ID NO: 2335362 - RNA, 19 nt, Artificial Sequence
  Description of Artificial Sequence: Synthetic oligonucleotide
  Sense strand starting at position 1369 of SEQ ID NO: 1885346
ugcagagauagauguauaa

SEQ ID NO: 2335363 - RNA, 19 nt, Artificial Sequence
  Description of Artificial Sequence: Synthetic oligonucleotide
  Antisense strand to SEQ ID NO: 2335362
uuauacaucuaucucugca

SEQ ID NO: 2335364 - RNA, 19 nt, Artificial Sequence
  Description of Artificial Sequence: Synthetic oligonucleotide
  Sense strand starting at position 1457 of SEQ ID NO: 1885346
aucagaacucagugguaaa

SEQ ID NO: 2335365 - RNA, 19 nt, Artificial Sequence
  Description of Artificial Sequence: Synthetic oligonucleotide
  Antisense strand to SEQ ID NO: 2335364
uuuaccacugaguucugau

SEQ ID NO: 2335366 - RNA, 19 nt, Artificial Sequence
  Description of Artificial Sequence: Synthetic oligonucleotide
  Sense strand starting at position 1604 of SEQ ID NO: 1885346
uccugaaguccuuggaauc

SEQ ID NO: 2335367 - RNA, 19 nt, Artificial Sequence
  Description of Artificial Sequence: Synthetic oligonucleotide
  Antisense strand to SEQ ID NO: 2335366
gauuccaaggacuucagga

SEQ ID NO: 2335368 - RNA, 19 nt, Artificial Sequence
  Description of Artificial Sequence: Synthetic oligonucleotide
  Sense strand starting at position 1605 of SEQ ID NO: 1885346
ccugaaguccuuggaaucu

SEQ ID NO: 2335369 - RNA, 19 nt, Artificial Sequence
  Description of Artificial Sequence: Synthetic oligonucleotide
  Antisense strand to SEQ ID NO: 2335368
agauuccaaggacuucagg

SEQ ID NO: 2335370 - RNA, 19 nt, Artificial Sequence
  Description of Artificial Sequence: Synthetic oligonucleotide
  Sense strand starting at position 1625 of SEQ ID NO: 1885346
cagagugaugacugaguua

SEQ ID NO: 2335371 - RNA, 19 nt, Artificial Sequence
  Description of Artificial Sequence: Synthetic oligonucleotide
  Antisense strand to SEQ ID NO: 2335370
uaacucagucaucacucug

SEQ ID NO: 2335372 - RNA, 19 nt, Artificial Sequence
  Description of Artificial Sequence: Synthetic oligonucleotide
  Sense strand starting at position 1628 of SEQ ID NO: 1885346
agugaugacugaguuaauc

SEQ ID NO: 2335373 - RNA, 19 nt, Artificial Sequence
  Description of Artificial Sequence: Synthetic oligonucleotide
  Antisense strand to SEQ ID NO: 2335372
gauuaacucagucaucacu

SEQ ID NO: 2335374 - RNA, 19 nt, Artificial Sequence
  Description of Artificial Sequence: Synthetic oligonucleotide
  Sense strand starting at position 1640 of SEQ ID NO: 1885346
guuaaucaccaauggugaa

SEQ ID NO: 2335375 - RNA, 19 nt, Artificial Sequence
  Description of Artificial Sequence: Synthetic oligonucleotide
  Antisense strand to SEQ ID NO: 2335374
uucaccauuggugauuaac

SEQ ID NO: 2335376 - RNA, 19 nt, Artificial Sequence
  Description of Artificial Sequence: Synthetic oligonucleotide
  Sense strand starting at position 1653 of SEQ ID NO: 1885346
ggugaauggcaaugauuau

SEQ ID NO: 2335377 - RNA, 19 nt, Artificial Sequence
  Description of Artificial Sequence: Synthetic oligonucleotide
  Antisense strand to SEQ ID NO: 2335376
auaaucauugccauucacc

SEQ ID NO: 2335378 - RNA, 19 nt, Artificial Sequence
  Description of Artificial Sequence: Synthetic oligonucleotide
  Sense strand starting at position 1654 of SEQ ID NO: 1885346
gugaauggcaaugauuauc

SEQ ID NO: 2335379 - RNA, 19 nt, Artificial Sequence
  Description of Artificial Sequence: Synthetic oligonucleotide
  Antisense strand to SEQ ID NO: 2335378
gauaaucauugccauucac

SEQ ID NO: 2335380 - RNA, 19 nt, Artificial Sequence
  Description of Artificial Sequence: Synthetic oligonucleotide
  Sense strand starting at position 1662 of SEQ ID NO: 1885346
caaugauuaucugugagga

SEQ ID NO: 2335381 - RNA, 19 nt, Artificial Sequence
  Description of Artificial Sequence: Synthetic oligonucleotide
  Antisense strand to SEQ ID NO: 2335380
uccucacagauaaucauug

SEQ ID NO: 2335382 - RNA, 19 nt, Artificial Sequence
  Description of Artificial Sequence: Synthetic oligonucleotide
  Sense strand starting at position 1663 of SEQ ID NO: 1885346
aaugauuaucugugaggac

SEQ ID NO: 2335383 - RNA, 19 nt, Artificial Sequence
  Description of Artificial Sequence: Synthetic oligonucleotide
  Antisense strand to SEQ ID NO: 2335382
guccucacagauaaucauu

SEQ ID NO: 2335384 - RNA, 19 nt, Artificial Sequence
  Description of Artificial Sequence: Synthetic oligonucleotide
  Sense strand starting at position 1783 of SEQ ID NO: 1885346
ccuaaaugggccuaucagu

SEQ ID NO: 2335385 - RNA, 19 nt, Artificial Sequence
  Description of Artificial Sequence: Synthetic oligonucleotide
  Antisense strand to SEQ ID NO: 2335384
acugauaggcccauuuagg

SEQ ID NO: 2335386 - RNA, 19 nt, Artificial Sequence
  Description of Artificial Sequence: Synthetic oligonucleotide
  Sense strand starting at position 1814 of SEQ ID NO: 1885346
uaagaacaaguuugaguau

SEQ ID NO: 2335387 - RNA, 19 nt, Artificial Sequence
  Description of Artificial Sequence: Synthetic oligonucleotide
  Antisense strand to SEQ ID NO: 2335386
auacucaaacuuguucuua

SEQ ID NO: 2335388 - RNA, 19 nt, Artificial Sequence
  Description of Artificial Sequence: Synthetic oligonucleotide
  Sense strand starting at position 2357 of SEQ ID NO: 1885346
cacggagagacugguaaua

SEQ ID NO: 2335389 - RNA, 19 nt, Artificial Sequence
  Description of Artificial Sequence: Synthetic oligonucleotide
  Antisense strand to SEQ ID NO: 2335388
uauuaccagucucuccgug

SEQ ID NO: 2335390 - RNA, 19 nt, Artificial Sequence
  Description of Artificial Sequence: Synthetic oligonucleotide
  Sense strand starting at position 2390 of SEQ ID NO: 1885346
ccgacuacuguuuauugaa

SEQ ID NO: 2335391 - RNA, 19 nt, Artificial Sequence
  Description of Artificial Sequence: Synthetic oligonucleotide
  Antisense strand to SEQ ID NO: 2335390
uucaauaaacaguagucgg

SEQ ID NO: 2335392 - RNA, 19 nt, Artificial Sequence
  Description of Artificial Sequence: Synthetic oligonucleotide
  Sense strand starting at position 2469 of SEQ ID NO: 1885346
ccucuauuauagccaugga

SEQ ID NO: 2335393 - RNA, 19 nt, Artificial Sequence
  Description of Artificial Sequence: Synthetic oligonucleotide
  Antisense strand to SEQ ID NO: 2335392
uccauggcuauaauagagg

SEQ ID NO: 2335394 - RNA, 19 nt, Artificial Sequence
  Description of Artificial Sequence: Synthetic oligonucleotide
  Sense strand starting at position 2472 of SEQ ID NO: 1885346
cuauuauagccauggagag

SEQ ID NO: 2335395 - RNA, 19 nt, Artificial Sequence
  Description of Artificial Sequence: Synthetic oligonucleotide
  Antisense strand to SEQ ID NO: 2335394
cucuccauggcuauaauag

SEQ ID NO: 2335396 - RNA, 19 nt, Artificial Sequence
  Description of Artificial Sequence: Synthetic oligonucleotide
  Sense strand starting at position 2509 of SEQ ID NO: 1885346
uagaguuguggugagacau

SEQ ID NO: 2335397 - RNA, 19 nt, Artificial Sequence
  Description of Artificial Sequence: Synthetic oligonucleotide
  Antisense strand to SEQ ID NO: 2335396
augucucaccacaacucua

SEQ ID NO: 2335398 - RNA, 19 nt, Artificial Sequence
  Description of Artificial Sequence: Synthetic oligonucleotide
  Sense strand starting at position 2515 of SEQ ID NO: 1885346
uguggugagacauggaaug

SEQ ID NO: 2335399 - RNA, 19 nt, Artificial Sequence
  Description of Artificial Sequence: Synthetic oligonucleotide
  Antisense strand to SEQ ID NO: 2335398
cauuccaugucucaccaca

SEQ ID NO: 2335400 - RNA, 19 nt, Artificial Sequence
  Description of Artificial Sequence: Synthetic oligonucleotide
  Sense strand starting at position 3205 of SEQ ID NO: 1885346
gcaggaaaggcucaaguga

SEQ ID NO: 2335401 - RNA, 19 nt, Artificial Sequence
  Description of Artificial Sequence: Synthetic oligonucleotide
  Antisense strand to SEQ ID NO: 2335400
ucacuugagccuuuccugc

SEQ ID NO: 2335402 - RNA, 19 nt, Artificial Sequence
  Description of Artificial Sequence: Synthetic oligonucleotide
  Sense strand starting at position 3286 of SEQ ID NO: 1885346
ugccuaauuucuuuguaga

SEQ ID NO: 2335403 - RNA, 19 nt, Artificial Sequence
  Description of Artificial Sequence: Synthetic oligonucleotide
  Antisense strand to SEQ ID NO: 2335402
ucuacaaagaaauuaggca

SEQ ID NO: 2335404 - RNA, 19 nt, Artificial Sequence
  Description of Artificial Sequence: Synthetic oligonucleotide
  Sense strand starting at position 3481 of SEQ ID NO: 1885346
ugucuuaaugcugaauaau

SEQ ID NO: 2335405 - RNA, 19 nt, Artificial Sequence
  Description of Artificial Sequence: Synthetic oligonucleotide
  Antisense strand to SEQ ID NO: 2335404
auuauucagcauuaagaca

SEQ ID NO: 2335406 - RNA, 19 nt, Artificial Sequence
  Description of Artificial Sequence: Synthetic oligonucleotide
  Sense strand starting at position 3666 of SEQ ID NO: 1885346
aguauuugucauugccaua

SEQ ID NO: 2335407 - RNA, 19 nt, Artificial Sequence
  Description of Artificial Sequence: Synthetic oligonucleotide
  Antisense strand to SEQ ID NO: 2335406
uauggcaaugacaaauacu

SEQ ID NO: 2335408 - RNA, 19 nt, Artificial Sequence
  Description of Artificial Sequence: Synthetic oligonucleotide
  Sense strand starting at position 488 of SEQ ID NO: 1885347
ggacccuucugccugauga

SEQ ID NO: 2335409 - RNA, 19 nt, Artificial Sequence
  Description of Artificial Sequence: Synthetic oligonucleotide
  Antisense strand to SEQ ID NO: 2335408
ucaucaggcagaagggucc

SEQ ID NO: 2335410 - RNA, 19 nt, Artificial Sequence
  Description of Artificial Sequence: Synthetic oligonucleotide
  Sense strand starting at position 490 of SEQ ID NO: 1885347
acccuucugccugaugaca

SEQ ID NO: 2335411 - RNA, 19 nt, Artificial Sequence
  Description of Artificial Sequence: Synthetic oligonucleotide
  Antisense strand to SEQ ID NO: 2335410
ugucaucaggcagaagggu

SEQ ID NO: 2335412 - RNA, 19 nt, Artificial Sequence
  Description of Artificial Sequence: Synthetic oligonucleotide
  Sense strand starting at position 568 of SEQ ID NO: 1885347
uggugaagguucccugaac

SEQ ID NO: 2335413 - RNA, 19 nt, Artificial Sequence
  Description of Artificial Sequence: Synthetic oligonucleotide
  Antisense strand to SEQ ID NO: 2335412
guucagggaaccuucacca

SEQ ID NO: 2335414 - RNA, 19 nt, Artificial Sequence
  Description of Artificial Sequence: Synthetic oligonucleotide
  Sense strand starting at position 569 of SEQ ID NO: 1885347
ggugaagguucccugaacu

SEQ ID NO: 2335415 - RNA, 19 nt, Artificial Sequence
  Description of Artificial Sequence: Synthetic oligonucleotide
  Antisense strand to SEQ ID NO: 2335414
aguucagggaaccuucacc

SEQ ID NO: 2335416 - RNA, 19 nt, Artificial Sequence
  Description of Artificial Sequence: Synthetic oligonucleotide
  Sense strand starting at position 731 of SEQ ID NO: 1885347
gaggccuuuccagaguucu

SEQ ID NO: 2335417 - RNA, 19 nt, Artificial Sequence
  Description of Artificial Sequence: Synthetic oligonucleotide
  Antisense strand to SEQ ID NO: 2335416
agaacucuggaaaggccuc

SEQ ID NO: 2335418 - RNA, 19 nt, Artificial Sequence
  Description of Artificial Sequence: Synthetic oligonucleotide
  Sense strand starting at position 871 of SEQ ID NO: 1885347
uuucuaucugguuauuaug

SEQ ID NO: 2335419 - RNA, 19 nt, Artificial Sequence
  Description of Artificial Sequence: Synthetic oligonucleotide
  Antisense strand to SEQ ID NO: 2335418
cauaauaaccagauagaaa

SEQ ID NO: 2335420 - RNA, 19 nt, Artificial Sequence
  Description of Artificial Sequence: Synthetic oligonucleotide
  Sense strand starting at position 934 of SEQ ID NO: 1885347
agaucugucuggccuauaa

SEQ ID NO: 2335421 - RNA, 19 nt, Artificial Sequence
  Description of Artificial Sequence: Synthetic oligonucleotide
  Antisense strand to SEQ ID NO: 2335420
uuauaggccagacagaucu

SEQ ID NO: 2335422 - RNA, 19 nt, Artificial Sequence
  Description of Artificial Sequence: Synthetic oligonucleotide
  Sense strand starting at position 1011 of SEQ ID NO: 1885347
ccuugcuccgugccugaaa

SEQ ID NO: 2335423 - RNA, 19 nt, Artificial Sequence
  Description of Artificial Sequence: Synthetic oligonucleotide
  Antisense strand to SEQ ID NO: 2335422
uuucaggcacggagcaagg

SEQ ID NO: 2335424 - RNA, 19 nt, Artificial Sequence
  Description of Artificial Sequence: Synthetic oligonucleotide
  Sense strand starting at position 1419 of SEQ ID NO: 1885347
cccaaaccauucguggaaa

SEQ ID NO: 2335425 - RNA, 19 nt, Artificial Sequence
  Description of Artificial Sequence: Synthetic oligonucleotide
  Antisense strand to SEQ ID NO: 2335424
uuuccacgaaugguuuggg

SEQ ID NO: 2335426 - RNA, 19 nt, Artificial Sequence
  Description of Artificial Sequence: Synthetic oligonucleotide
  Sense strand starting at position 1638 of SEQ ID NO: 1885347
aagggcauguuaccuauaa

SEQ ID NO: 2335427 - RNA, 19 nt, Artificial Sequence
  Description of Artificial Sequence: Synthetic oligonucleotide
  Antisense strand to SEQ ID NO: 2335426
uuauagguaacaugcccuu

SEQ ID NO: 2335428 - RNA, 19 nt, Artificial Sequence
  Description of Artificial Sequence: Synthetic oligonucleotide
  Sense strand starting at position 1639 of SEQ ID NO: 1885347
agggcauguuaccuauaau

SEQ ID NO: 2335429 - RNA, 19 nt, Artificial Sequence
  Description of Artificial Sequence: Synthetic oligonucleotide
  Antisense strand to SEQ ID NO: 2335428
auuauagguaacaugcccu

SEQ ID NO: 2335430 - RNA, 19 nt, Artificial Sequence
  Description of Artificial Sequence: Synthetic oligonucleotide
  Sense strand starting at position 2290 of SEQ ID NO: 1885347
aggugaccugugugauaca

SEQ ID NO: 2335431 - RNA, 19 nt, Artificial Sequence
  Description of Artificial Sequence: Synthetic oligonucleotide
  Antisense strand to SEQ ID NO: 2335430
uguaucacacaggucaccu

SEQ ID NO: 2335432 - RNA, 19 nt, Artificial Sequence
  Description of Artificial Sequence: Synthetic oligonucleotide
  Sense strand starting at position 2861 of SEQ ID NO: 1885347
uugacaucaugggcugaaa

SEQ ID NO: 2335433 - RNA, 19 nt, Artificial Sequence
  Description of Artificial Sequence: Synthetic oligonucleotide
  Antisense strand to SEQ ID NO: 2335432
uuucagcccaugaugucaa

SEQ ID NO: 2335434 - RNA, 19 nt, Artificial Sequence
  Description of Artificial Sequence: Synthetic oligonucleotide
  Sense strand starting at position 2863 of SEQ ID NO: 1885347
gacaucaugggcugaaaug

SEQ ID NO: 2335435 - RNA, 19 nt, Artificial Sequence
  Description of Artificial Sequence: Synthetic oligonucleotide
  Antisense strand to SEQ ID NO: 2335434
cauuucagcccaugauguc

SEQ ID NO: 2335436 - RNA, 19 nt, Artificial Sequence
  Description of Artificial Sequence: Synthetic oligonucleotide
  Sense strand starting at position 2864 of SEQ ID NO: 1885347
acaucaugggcugaaaugu

SEQ ID NO: 2335437 - RNA, 19 nt, Artificial Sequence
  Description of Artificial Sequence: Synthetic oligonucleotide
  Antisense strand to SEQ ID NO: 2335436
acauuucagcccaugaugu

SEQ ID NO: 2335438 - RNA, 19 nt, Artificial Sequence
  Description of Artificial Sequence: Synthetic oligonucleotide
  Sense strand starting at position 3074 of SEQ ID NO: 1885347
gagccauuugugugucuga

SEQ ID NO: 2335439 - RNA, 19 nt, Artificial Sequence
  Description of Artificial Sequence: Synthetic oligonucleotide
  Antisense strand to SEQ ID NO: 2335438
ucagacacacaaauggcuc

SEQ ID NO: 2335440 - RNA, 19 nt, Artificial Sequence
  Description of Artificial Sequence: Synthetic oligonucleotide
  Sense strand starting at position 3075 of SEQ ID NO: 1885347
agccauuugugugucugaa

SEQ ID NO: 2335441 - RNA, 19 nt, Artificial Sequence
  Description of Artificial Sequence: Synthetic oligonucleotide
  Antisense strand to SEQ ID NO: 2335440
uucagacacacaaauggcu

SEQ ID NO: 2335442 - RNA, 19 nt, Artificial Sequence
  Description of Artificial Sequence: Synthetic oligonucleotide
  Sense strand starting at position 3077 of SEQ ID NO: 1885347
ccauuugugugucugaagu

SEQ ID NO: 2335443 - RNA, 19 nt, Artificial Sequence
  Description of Artificial Sequence: Synthetic oligonucleotide
  Antisense strand to SEQ ID NO: 2335442
acuucagacacacaaaugg

SEQ ID NO: 2335444 - RNA, 19 nt, Artificial Sequence
  Description of Artificial Sequence: Synthetic oligonucleotide
  Sense strand starting at position 3137 of SEQ ID NO: 1885347
augcauugcgaauggagaa

SEQ ID NO: 2335445 - RNA, 19 nt, Artificial Sequence
  Description of Artificial Sequence: Synthetic oligonucleotide
  Antisense strand to SEQ ID NO: 2335444
uucuccauucgcaaugcau

SEQ ID NO: 2335446 - RNA, 19 nt, Artificial Sequence
  Description of Artificial Sequence: Synthetic oligonucleotide
  Sense strand starting at position 3149 of SEQ ID NO: 1885347
uggagaaugaucugagcca

SEQ ID NO: 2335447 - RNA, 19 nt, Artificial Sequence
  Description of Artificial Sequence: Synthetic oligonucleotide
  Antisense strand to SEQ ID NO: 2335446
uggcucagaucauucucca

SEQ ID NO: 2335448 - RNA, 19 nt, Artificial Sequence
  Description of Artificial Sequence: Synthetic oligonucleotide
  Sense strand starting at position 3252 of SEQ ID NO: 1885347
ggacuaaucaggugguucu

SEQ ID NO: 2335449 - RNA, 19 nt, Artificial Sequence
  Description of Artificial Sequence: Synthetic oligonucleotide
  Antisense strand to SEQ ID NO: 2335448
agaaccaccugauuagucc

SEQ ID NO: 2335450 - RNA, 19 nt, Artificial Sequence
  Description of Artificial Sequence: Synthetic oligonucleotide
  Sense strand starting at position 3253 of SEQ ID NO: 1885347
gacuaaucaggugguucuu

SEQ ID NO: 2335451 - RNA, 19 nt, Artificial Sequence
  Description of Artificial Sequence: Synthetic oligonucleotide
  Antisense strand to SEQ ID NO: 2335450
aagaaccaccugauuaguc

SEQ ID NO: 2335452 - RNA, 19 nt, Artificial Sequence
  Description of Artificial Sequence: Synthetic oligonucleotide
  Sense strand starting at position 3303 of SEQ ID NO: 1885347
agauguuugagacgguaug

SEQ ID NO: 2335453 - RNA, 19 nt, Artificial Sequence
  Description of Artificial Sequence: Synthetic oligonucleotide
  Antisense strand to SEQ ID NO: 2335452
cauaccgucucaaacaucu

SEQ ID NO: 2335454 - RNA, 19 nt, Artificial Sequence
  Description of Artificial Sequence: Synthetic oligonucleotide
  Sense strand starting at position 3372 of SEQ ID NO: 1885347
ucaaauaagcuuugaagag

SEQ ID NO: 2335455 - RNA, 19 nt, Artificial Sequence
  Description of Artificial Sequence: Synthetic oligonucleotide
  Antisense strand to SEQ ID NO: 2335454
cucuucaaagcuuauuuga

SEQ ID NO: 2335456 - RNA, 19 nt, Artificial Sequence
  Description of Artificial Sequence: Synthetic oligonucleotide
  Sense strand starting at position 3376 of SEQ ID NO: 1885347
auaagcuuugaagaguagu

SEQ ID NO: 2335457 - RNA, 19 nt, Artificial Sequence
  Description of Artificial Sequence: Synthetic oligonucleotide
  Antisense strand to SEQ ID NO: 2335456
acuacucuucaaagcuuau

SEQ ID NO: 2335458 - RNA, 19 nt, Artificial Sequence
  Description of Artificial Sequence: Synthetic oligonucleotide
  Sense strand starting at position 3485 of SEQ ID NO: 1885347
cuguguuaugcagaaggga

SEQ ID NO: 2335459 - RNA, 19 nt, Artificial Sequence
  Description of Artificial Sequence: Synthetic oligonucleotide
  Antisense strand to SEQ ID NO: 2335458
ucccuucugcauaacacag

SEQ ID NO: 2335460 - RNA, 19 nt, Artificial Sequence
  Description of Artificial Sequence: Synthetic oligonucleotide
  Sense strand starting at position 3616 of SEQ ID NO: 1885347
auuacuaguugucuaacua

SEQ ID NO: 2335461 - RNA, 19 nt, Artificial Sequence
  Description of Artificial Sequence: Synthetic oligonucleotide
  Antisense strand to SEQ ID NO: 2335460
uaguuagacaacuaguaau

SEQ ID NO: 2335462 - RNA, 19 nt, Artificial Sequence
  Description of Artificial Sequence: Synthetic oligonucleotide
  Sense strand starting at position 3617 of SEQ ID NO: 1885347
uuacuaguugucuaacuag

SEQ ID NO: 2335463 - RNA, 19 nt, Artificial Sequence
  Description of Artificial Sequence: Synthetic oligonucleotide
  Antisense strand to SEQ ID NO: 2335462
cuaguuagacaacuaguaa

SEQ ID NO: 2335464 - RNA, 19 nt, Artificial Sequence
  Description of Artificial Sequence: Synthetic oligonucleotide
  Sense strand starting at position 3632 of SEQ ID NO: 1885347
cuaguacuugccugggaga

SEQ ID NO: 2335465 - RNA, 19 nt, Artificial Sequence
  Description of Artificial Sequence: Synthetic oligonucleotide
  Antisense strand to SEQ ID NO: 2335464
ucucccaggcaaguacuag

SEQ ID NO: 2335466 - RNA, 19 nt, Artificial Sequence
  Description of Artificial Sequence: Synthetic oligonucleotide
  Sense strand starting at position 3633 of SEQ ID NO: 1885347
uaguacuugccugggagau

SEQ ID NO: 2335467 - RNA, 19 nt, Artificial Sequence
  Description of Artificial Sequence: Synthetic oligonucleotide
  Antisense strand to SEQ ID NO: 2335466
aucucccaggcaaguacua

SEQ ID NO: 2335468 - RNA, 19 nt, Artificial Sequence
  Description of Artificial Sequence: Synthetic oligonucleotide
  Sense strand starting at position 3634 of SEQ ID NO: 1885347
aguacuugccugggagauu

SEQ ID NO: 2335469 - RNA, 19 nt, Artificial Sequence
  Description of Artificial Sequence: Synthetic oligonucleotide
  Antisense strand to SEQ ID NO: 2335468
aaucucccaggcaaguacu

SEQ ID NO: 2335470 - RNA, 19 nt, Artificial Sequence
  Description of Artificial Sequence: Synthetic oligonucleotide
  Sense strand starting at position 3717 of SEQ ID NO: 1885347
gugaaccagugauuaaauc

SEQ ID NO: 2335471 - RNA, 19 nt, Artificial Sequence
  Description of Artificial Sequence: Synthetic oligonucleotide
  Antisense strand to SEQ ID NO: 2335470
gauuuaaucacugguucac

SEQ ID NO: 2335472 - RNA, 19 nt, Artificial Sequence
  Description of Artificial Sequence: Synthetic oligonucleotide
  Sense strand starting at position 3725 of SEQ ID NO: 1885347
gugauuaaaucagcauaag

SEQ ID NO: 2335473 - RNA, 19 nt, Artificial Sequence
  Description of Artificial Sequence: Synthetic oligonucleotide
  Antisense strand to SEQ ID NO: 2335472
cuuaugcugauuuaaucac

SEQ ID NO: 2335474 - RNA, 19 nt, Artificial Sequence
  Description of Artificial Sequence: Synthetic oligonucleotide
  Sense strand starting at position 3748 of SEQ ID NO: 1885347
aucguaugggauggucuaa

SEQ ID NO: 2335475 - RNA, 19 nt, Artificial Sequence
  Description of Artificial Sequence: Synthetic oligonucleotide
  Antisense strand to SEQ ID NO: 2335474
uuagaccaucccauacgau

SEQ ID NO: 2335476 - RNA, 19 nt, Artificial Sequence
  Description of Artificial Sequence: Synthetic oligonucleotide
  Sense strand starting at position 3759 of SEQ ID NO: 1885347
uggucuaaucaagauguuu

SEQ ID NO: 2335477 - RNA, 19 nt, Artificial Sequence
  Description of Artificial Sequence: Synthetic oligonucleotide
  Antisense strand to SEQ ID NO: 2335476
aaacaucuugauuagacca

SEQ ID NO: 2335478 - RNA, 19 nt, Artificial Sequence
  Description of Artificial Sequence: Synthetic oligonucleotide
  Sense strand starting at position 3817 of SEQ ID NO: 1885347
guaugugggucgaaagaaa

SEQ ID NO: 2335479 - RNA, 19 nt, Artificial Sequence
  Description of Artificial Sequence: Synthetic oligonucleotide
  Antisense strand to SEQ ID NO: 2335478
uuucuuucgacccacauac

SEQ ID NO: 2335480 - RNA, 19 nt, Artificial Sequence
  Description of Artificial Sequence: Synthetic oligonucleotide
  Sense strand starting at position 3851 of SEQ ID NO: 1885347
ugccgucugcucccugauu

SEQ ID NO: 2335481 - RNA, 19 nt, Artificial Sequence
  Description of Artificial Sequence: Synthetic oligonucleotide
  Antisense strand to SEQ ID NO: 2335480
aaucagggagcagacggca

SEQ ID NO: 2335482 - RNA, 19 nt, Artificial Sequence
  Description of Artificial Sequence: Synthetic oligonucleotide
  Sense strand starting at position 3859 of SEQ ID NO: 1885347
gcucccugauucuuagaga

SEQ ID NO: 2335483 - RNA, 19 nt, Artificial Sequence
  Description of Artificial Sequence: Synthetic oligonucleotide
  Antisense strand to SEQ ID NO: 2335482
ucucuaagaaucagggagc

SEQ ID NO: 2335484 - RNA, 19 nt, Artificial Sequence
  Description of Artificial Sequence: Synthetic oligonucleotide
  Sense strand starting at position 3870 of SEQ ID NO: 1885347
cuuagagaaucagcucuuu

SEQ ID NO: 2335485 - RNA, 19 nt, Artificial Sequence
  Description of Artificial Sequence: Synthetic oligonucleotide
  Antisense strand to SEQ ID NO: 2335484
aaagagcugauucucuaag

SEQ ID NO: 2335486 - RNA, 19 nt, Artificial Sequence
  Description of Artificial Sequence: Synthetic oligonucleotide
  Sense strand starting at position 3928 of SEQ ID NO: 1885347
aggguuugaguauggugaa

SEQ ID NO: 2335487 - RNA, 19 nt, Artificial Sequence
  Description of Artificial Sequence: Synthetic oligonucleotide
  Antisense strand to SEQ ID NO: 2335486
uucaccauacucaaacccu

SEQ ID NO: 2335488 - RNA, 19 nt, Artificial Sequence
  Description of Artificial Sequence: Synthetic oligonucleotide
  Sense strand starting at position 121 of SEQ ID NO: 1885348
uuugaugugguagaacauu

SEQ ID NO: 2335489 - RNA, 19 nt, Artificial Sequence
  Description of Artificial Sequence: Synthetic oligonucleotide
  Antisense strand to SEQ ID NO: 2335488
aauguucuaccacaucaaa

SEQ ID NO: 2335490 - RNA, 19 nt, Artificial Sequence
  Description of Artificial Sequence: Synthetic oligonucleotide
  Sense strand starting at position 333 of SEQ ID NO: 1885348
ggaacucaacugugauauc

SEQ ID NO: 2335491 - RNA, 19 nt, Artificial Sequence
  Description of Artificial Sequence: Synthetic oligonucleotide
  Antisense strand to SEQ ID NO: 2335490
gauaucacaguugaguucc

SEQ ID NO: 2335492 - RNA, 19 nt, Artificial Sequence
  Description of Artificial Sequence: Synthetic oligonucleotide
  Sense strand starting at position 342 of SEQ ID NO: 1885348
cugugauauccuuggauau

SEQ ID NO: 2335493 - RNA, 19 nt, Artificial Sequence
  Description of Artificial Sequence: Synthetic oligonucleotide
  Antisense strand to SEQ ID NO: 2335492
auauccaaggauaucacag

SEQ ID NO: 2335494 - RNA, 19 nt, Artificial Sequence
  Description of Artificial Sequence: Synthetic oligonucleotide
  Sense strand starting at position 343 of SEQ ID NO: 1885348
ugugauauccuuggauauc

SEQ ID NO: 2335495 - RNA, 19 nt, Artificial Sequence
  Description of Artificial Sequence: Synthetic oligonucleotide
  Antisense strand to SEQ ID NO: 2335494
gauauccaaggauaucaca

SEQ ID NO: 2335496 - RNA, 19 nt, Artificial Sequence
  Description of Artificial Sequence: Synthetic oligonucleotide
  Sense strand starting at position 537 of SEQ ID NO: 1885348
cuccauggcagagaaguua

SEQ ID NO: 2335497 - RNA, 19 nt, Artificial Sequence
  Description of Artificial Sequence: Synthetic oligonucleotide
  Antisense strand to SEQ ID NO: 2335496
uaacuucucugccauggag

SEQ ID NO: 2335498 - RNA, 19 nt, Artificial Sequence
  Description of Artificial Sequence: Synthetic oligonucleotide
  Sense strand starting at position 729 of SEQ ID NO: 1885348
caggcaucacagcaguaaa

SEQ ID NO: 2335499 - RNA, 19 nt, Artificial Sequence
  Description of Artificial Sequence: Synthetic oligonucleotide
  Antisense strand to SEQ ID NO: 2335498
uuuacugcugugaugccug

SEQ ID NO: 2335500 - RNA, 19 nt, Artificial Sequence
  Description of Artificial Sequence: Synthetic oligonucleotide
  Sense strand starting at position 772 of SEQ ID NO: 1885348
aagugaaacuuguuugcua

SEQ ID NO: 2335501 - RNA, 19 nt, Artificial Sequence
  Description of Artificial Sequence: Synthetic oligonucleotide
  Antisense strand to SEQ ID NO: 2335500
uagcaaacaaguuucacuu

SEQ ID NO: 2335502 - RNA, 19 nt, Artificial Sequence
  Description of Artificial Sequence: Synthetic oligonucleotide
  Sense strand starting at position 947 of SEQ ID NO: 1885348
cugccuucuuuauuugagu

SEQ ID NO: 2335503 - RNA, 19 nt, Artificial Sequence
  Description of Artificial Sequence: Synthetic oligonucleotide
  Antisense strand to SEQ ID NO: 2335502
acucaaauaaagaaggcag

SEQ ID NO: 2335504 - RNA, 19 nt, Artificial Sequence
  Description of Artificial Sequence: Synthetic oligonucleotide
  Sense strand starting at position 1084 of SEQ ID NO: 1885348
ugaugagagucacuuacaa

SEQ ID NO: 2335505 - RNA, 19 nt, Artificial Sequence
  Description of Artificial Sequence: Synthetic oligonucleotide
  Antisense strand to SEQ ID NO: 2335504
uuguaagugacucucauca

SEQ ID NO: 2335506 - RNA, 19 nt, Artificial Sequence
  Description of Artificial Sequence: Synthetic oligonucleotide
  Sense strand starting at position 1150 of SEQ ID NO: 1885348
aguaccuauuacuuguuua

SEQ ID NO: 2335507 - RNA, 19 nt, Artificial Sequence
  Description of Artificial Sequence: Synthetic oligonucleotide
  Antisense strand to SEQ ID NO: 2335506
uaaacaaguaauagguacu

SEQ ID NO: 2335508 - RNA, 19 nt, Artificial Sequence
  Description of Artificial Sequence: Synthetic oligonucleotide
  Sense strand starting at position 1306 of SEQ ID NO: 1885348
uuucuuacagaguaguaug

SEQ ID NO: 2335509 - RNA, 19 nt, Artificial Sequence
  Description of Artificial Sequence: Synthetic oligonucleotide
  Antisense strand to SEQ ID NO: 2335508
cauacuacucuguaagaaa

SEQ ID NO: 2335510 - RNA, 19 nt, Artificial Sequence
  Description of Artificial Sequence: Synthetic oligonucleotide
  Sense strand starting at position 1576 of SEQ ID NO: 1885348
ggcacauaccuguaaccca

SEQ ID NO: 2335511 - RNA, 19 nt, Artificial Sequence
  Description of Artificial Sequence: Synthetic oligonucleotide
  Antisense strand to SEQ ID NO: 2335510
uggguuacagguaugugcc

SEQ ID NO: 2335512 - RNA, 19 nt, Artificial Sequence
  Description of Artificial Sequence: Synthetic oligonucleotide
  Sense strand starting at position 2051 of SEQ ID NO: 1885348
uuaacaguagcagggaaau

SEQ ID NO: 2335513 - RNA, 19 nt, Artificial Sequence
  Description of Artificial Sequence: Synthetic oligonucleotide
  Antisense strand to SEQ ID NO: 2335512
auuucccugcuacuguuaa

SEQ ID NO: 2335514 - RNA, 19 nt, Artificial Sequence
  Description of Artificial Sequence: Synthetic oligonucleotide
  Sense strand starting at position 2114 of SEQ ID NO: 1885348
gguagaauugugcagucau

SEQ ID NO: 2335515 - RNA, 19 nt, Artificial Sequence
  Description of Artificial Sequence: Synthetic oligonucleotide
  Antisense strand to SEQ ID NO: 2335514
augacugcacaauucuacc

SEQ ID NO: 2335516 - RNA, 19 nt, Artificial Sequence
  Description of Artificial Sequence: Synthetic oligonucleotide
  Sense strand starting at position 2345 of SEQ ID NO: 1885348
cuaauaggcuucuuggaau

SEQ ID NO: 2335517 - RNA, 19 nt, Artificial Sequence
  Description of Artificial Sequence: Synthetic oligonucleotide
  Antisense strand to SEQ ID NO: 2335516
auuccaagaagccuauuag

SEQ ID NO: 2335518 - RNA, 19 nt, Artificial Sequence
  Description of Artificial Sequence: Synthetic oligonucleotide
  Sense strand starting at position 2388 of SEQ ID NO: 1885348
ggcaguggaugacugaaua

SEQ ID NO: 2335519 - RNA, 19 nt, Artificial Sequence
  Description of Artificial Sequence: Synthetic oligonucleotide
  Antisense strand to SEQ ID NO: 2335518
uauucagucauccacugcc

SEQ ID NO: 2335520 - RNA, 19 nt, Artificial Sequence
  Description of Artificial Sequence: Synthetic oligonucleotide
  Sense strand starting at position 2482 of SEQ ID NO: 1885348
guuggaggcaugggaaauu

SEQ ID NO: 2335521 - RNA, 19 nt, Artificial Sequence
  Description of Artificial Sequence: Synthetic oligonucleotide
  Antisense strand to SEQ ID NO: 2335520
aauuucccaugccuccaac

SEQ ID NO: 2335522 - RNA, 19 nt, Artificial Sequence
  Description of Artificial Sequence: Synthetic oligonucleotide
  Sense strand starting at position 2491 of SEQ ID NO: 1885348
augggaaauugucucaauu

SEQ ID NO: 2335523 - RNA, 19 nt, Artificial Sequence
  Description of Artificial Sequence: Synthetic oligonucleotide
  Antisense strand to SEQ ID NO: 2335522
aauugagacaauuucccau

SEQ ID NO: 2335524 - RNA, 19 nt, Artificial Sequence
  Description of Artificial Sequence: Synthetic oligonucleotide
  Sense strand starting at position 2493 of SEQ ID NO: 1885348
gggaaauugucucaauuug

SEQ ID NO: 2335525 - RNA, 19 nt, Artificial Sequence
  Description of Artificial Sequence: Synthetic oligonucleotide
  Antisense strand to SEQ ID NO: 2335524
caaauugagacaauuuccc

SEQ ID NO: 2335526 - RNA, 19 nt, Artificial Sequence
  Description of Artificial Sequence: Synthetic oligonucleotide
  Sense strand starting at position 2639 of SEQ ID NO: 1885348
uugagugacuaacugaauu

SEQ ID NO: 2335527 - RNA, 19 nt, Artificial Sequence
  Description of Artificial Sequence: Synthetic oligonucleotide
  Antisense strand to SEQ ID NO: 2335526
aauucaguuagucacucaa

SEQ ID NO: 2335528 - RNA, 19 nt, Artificial Sequence
  Description of Artificial Sequence: Synthetic oligonucleotide
  Sense strand starting at position 2758 of SEQ ID NO: 1885348
uuaagaauagauuguguga

SEQ ID NO: 2335529 - RNA, 19 nt, Artificial Sequence
  Description of Artificial Sequence: Synthetic oligonucleotide
  Antisense strand to SEQ ID NO: 2335528
ucacacaaucuauucuuaa

SEQ ID NO: 2335530 - RNA, 19 nt, Artificial Sequence
  Description of Artificial Sequence: Synthetic oligonucleotide
  Sense strand starting at position 2872 of SEQ ID NO: 1885348
aaccucuguguuuagguaa

SEQ ID NO: 2335531 - RNA, 19 nt, Artificial Sequence
  Description of Artificial Sequence: Synthetic oligonucleotide
  Antisense strand to SEQ ID NO: 2335530
uuaccuaaacacagagguu

SEQ ID NO: 2335532 - RNA, 19 nt, Artificial Sequence
  Description of Artificial Sequence: Synthetic oligonucleotide
  Sense strand starting at position 2885 of SEQ ID NO: 1885348
agguaauaugcuuauacaa

SEQ ID NO: 2335533 - RNA, 19 nt, Artificial Sequence
  Description of Artificial Sequence: Synthetic oligonucleotide
  Antisense strand to SEQ ID NO: 2335532
uuguauaagcauauuaccu

SEQ ID NO: 2335534 - RNA, 19 nt, Artificial Sequence
  Description of Artificial Sequence: Synthetic oligonucleotide
  Sense strand starting at position 2971 of SEQ ID NO: 1885348
ugaaacauuuagugaauac

SEQ ID NO: 2335535 - RNA, 19 nt, Artificial Sequence
  Description of Artificial Sequence: Synthetic oligonucleotide
  Antisense strand to SEQ ID NO: 2335534
guauucacuaaauguuuca

SEQ ID NO: 2335536 - RNA, 19 nt, Artificial Sequence
  Description of Artificial Sequence: Synthetic oligonucleotide
  Sense strand starting at position 3012 of SEQ ID NO: 1885348
uuagcauucuacccagaga

SEQ ID NO: 2335537 - RNA, 19 nt, Artificial Sequence
  Description of Artificial Sequence: Synthetic oligonucleotide
  Antisense strand to SEQ ID NO: 2335536
ucucuggguagaaugcuaa

SEQ ID NO: 2335538 - RNA, 19 nt, Artificial Sequence
  Description of Artificial Sequence: Synthetic oligonucleotide
  Sense strand starting at position 3103 of SEQ ID NO: 1885348
uuuauuuccugagauacug

SEQ ID NO: 2335539 - RNA, 19 nt, Artificial Sequence
  Description of Artificial Sequence: Synthetic oligonucleotide
  Antisense strand to SEQ ID NO: 2335538
caguaucucaggaaauaaa

SEQ ID NO: 2335540 - RNA, 19 nt, Artificial Sequence
  Description of Artificial Sequence: Synthetic oligonucleotide
  Sense strand starting at position 3267 of SEQ ID NO: 1885348
gacauacaauguuugaaug

SEQ ID NO: 2335541 - RNA, 19 nt, Artificial Sequence
  Description of Artificial Sequence: Synthetic oligonucleotide
  Antisense strand to SEQ ID NO: 2335540
cauucaaacauuguauguc

SEQ ID NO: 2335542 - RNA, 19 nt, Artificial Sequence
  Description of Artificial Sequence: Synthetic oligonucleotide
  Sense strand starting at position 3268 of SEQ ID NO: 1885348
acauacaauguuugaaugu

SEQ ID NO: 2335543 - RNA, 19 nt, Artificial Sequence
  Description of Artificial Sequence: Synthetic oligonucleotide
  Antisense strand to SEQ ID NO: 2335542
acauucaaacauuguaugu

SEQ ID NO: 2335544 - RNA, 19 nt, Artificial Sequence
  Description of Artificial Sequence: Synthetic oligonucleotide
  Sense strand starting at position 3349 of SEQ ID NO: 1885348
guccguauacuaggaauau

SEQ ID NO: 2335545 - RNA, 19 nt, Artificial Sequence
  Description of Artificial Sequence: Synthetic oligonucleotide
  Antisense strand to SEQ ID NO: 2335544
auauuccuaguauacggac

SEQ ID NO: 2335546 - RNA, 19 nt, Artificial Sequence
  Description of Artificial Sequence: Synthetic oligonucleotide
  Sense strand starting at position 3359 of SEQ ID NO: 1885348
uaggaauauugauccaugu

SEQ ID NO: 2335547 - RNA, 19 nt, Artificial Sequence
  Description of Artificial Sequence: Synthetic oligonucleotide
  Antisense strand to SEQ ID NO: 2335546
acauggaucaauauuccua

SEQ ID NO: 2335548 - RNA, 19 nt, Artificial Sequence
  Description of Artificial Sequence: Synthetic oligonucleotide
  Sense strand starting at position 3361 of SEQ ID NO: 1885348
ggaauauugauccaugugu

SEQ ID NO: 2335549 - RNA, 19 nt, Artificial Sequence
  Description of Artificial Sequence: Synthetic oligonucleotide
  Antisense strand to SEQ ID NO: 2335548
acacauggaucaauauucc

SEQ ID NO: 2335550 - RNA, 19 nt, Artificial Sequence
  Description of Artificial Sequence: Synthetic oligonucleotide
  Sense strand starting at position 3366 of SEQ ID NO: 1885348
auugauccauguguauaca

SEQ ID NO: 2335551 - RNA, 19 nt, Artificial Sequence
  Description of Artificial Sequence: Synthetic oligonucleotide
  Antisense strand to SEQ ID NO: 2335550
uguauacacauggaucaau

SEQ ID NO: 2335552 - RNA, 19 nt, Artificial Sequence
  Description of Artificial Sequence: Synthetic oligonucleotide
  Sense strand starting at position 3367 of SEQ ID NO: 1885348
uugauccauguguauacau

SEQ ID NO: 2335553 - RNA, 19 nt, Artificial Sequence
  Description of Artificial Sequence: Synthetic oligonucleotide
  Antisense strand to SEQ ID NO: 2335552
auguauacacauggaucaa

SEQ ID NO: 2335554 - RNA, 19 nt, Artificial Sequence
  Description of Artificial Sequence: Synthetic oligonucleotide
  Sense strand starting at position 3376 of SEQ ID NO: 1885348
guguauacauucuugaaag

SEQ ID NO: 2335555 - RNA, 19 nt, Artificial Sequence
  Description of Artificial Sequence: Synthetic oligonucleotide
  Antisense strand to SEQ ID NO: 2335554
cuuucaagaauguauacac

SEQ ID NO: 2335556 - RNA, 19 nt, Artificial Sequence
  Description of Artificial Sequence: Synthetic oligonucleotide
  Sense strand starting at position 3423 of SEQ ID NO: 1885348
ugguaugugccauaaugua

SEQ ID NO: 2335557 - RNA, 19 nt, Artificial Sequence
  Description of Artificial Sequence: Synthetic oligonucleotide
  Antisense strand to SEQ ID NO: 2335556
uacauuauggcacauacca

SEQ ID NO: 2335558 - RNA, 19 nt, Artificial Sequence
  Description of Artificial Sequence: Synthetic oligonucleotide
  Sense strand starting at position 3523 of SEQ ID NO: 1885348
ucaguugcugccguaacaa

SEQ ID NO: 2335559 - RNA, 19 nt, Artificial Sequence
  Description of Artificial Sequence: Synthetic oligonucleotide
  Antisense strand to SEQ ID NO: 2335558
uuguuacggcagcaacuga

SEQ ID NO: 2335560 - RNA, 19 nt, Artificial Sequence
  Description of Artificial Sequence: Synthetic oligonucleotide
  Sense strand starting at position 3804 of SEQ ID NO: 1885348
ugaucauucugagcccacu

SEQ ID NO: 2335561 - RNA, 19 nt, Artificial Sequence
  Description of Artificial Sequence: Synthetic oligonucleotide
  Antisense strand to SEQ ID NO: 2335560
agugggcucagaaugauca

SEQ ID NO: 2335562 - RNA, 19 nt, Artificial Sequence
  Description of Artificial Sequence: Synthetic oligonucleotide
  Sense strand starting at position 3810 of SEQ ID NO: 1885348
uucugagcccacuggauaa

SEQ ID NO: 2335563 - RNA, 19 nt, Artificial Sequence
  Description of Artificial Sequence: Synthetic oligonucleotide
  Antisense strand to SEQ ID NO: 2335562
uuauccagugggcucagaa

SEQ ID NO: 2335564 - RNA, 19 nt, Artificial Sequence
  Description of Artificial Sequence: Synthetic oligonucleotide
  Sense strand starting at position 3853 of SEQ ID NO: 1885348
gugagaugauuagcaaccu

SEQ ID NO: 2335565 - RNA, 19 nt, Artificial Sequence
  Description of Artificial Sequence: Synthetic oligonucleotide
  Antisense strand to SEQ ID NO: 2335564
agguugcuaaucaucucac

SEQ ID NO: 2335566 - RNA, 19 nt, Artificial Sequence
  Description of Artificial Sequence: Synthetic oligonucleotide
  Sense strand starting at position 3927 of SEQ ID NO: 1885348
gguucuguagauugggauu

SEQ ID NO: 2335567 - RNA, 19 nt, Artificial Sequence
  Description of Artificial Sequence: Synthetic oligonucleotide
  Antisense strand to SEQ ID NO: 2335566
aaucccaaucuacagaacc

SEQ ID NO: 2335568 - RNA, 19 nt, Artificial Sequence
  Description of Artificial Sequence: Synthetic oligonucleotide
  Sense strand starting at position 315 of SEQ ID NO: 1885349
aaagucacgcuugauacuu

SEQ ID NO: 2335569 - RNA, 19 nt, Artificial Sequence
  Description of Artificial Sequence: Synthetic oligonucleotide
  Antisense strand to SEQ ID NO: 2335568
aaguaucaagcgugacuuu

SEQ ID NO: 2335570 - RNA, 19 nt, Artificial Sequence
  Description of Artificial Sequence: Synthetic oligonucleotide
  Sense strand starting at position 400 of SEQ ID NO: 1885349
ucuuuacauccagagguca

SEQ ID NO: 2335571 - RNA, 19 nt, Artificial Sequence
  Description of Artificial Sequence: Synthetic oligonucleotide
  Antisense strand to SEQ ID NO: 2335570
ugaccucuggauguaaaga

SEQ ID NO: 2335572 - RNA, 19 nt, Artificial Sequence
  Description of Artificial Sequence: Synthetic oligonucleotide
  Sense strand starting at position 896 of SEQ ID NO: 1885349
uagaauugguaagcuacau

SEQ ID NO: 2335573 - RNA, 19 nt, Artificial Sequence
  Description of Artificial Sequence: Synthetic oligonucleotide
  Antisense strand to SEQ ID NO: 2335572
auguagcuuaccaauucua

SEQ ID NO: 2335574 - RNA, 19 nt, Artificial Sequence
  Description of Artificial Sequence: Synthetic oligonucleotide
  Sense strand starting at position 1143 of SEQ ID NO: 1885349
cgaagcgugacuuaagaaa

SEQ ID NO: 2335575 - RNA, 19 nt, Artificial Sequence
  Description of Artificial Sequence: Synthetic oligonucleotide
  Antisense strand to SEQ ID NO: 2335574
uuucuuaagucacgcuucg

SEQ ID NO: 2335576 - RNA, 19 nt, Artificial Sequence
  Description of Artificial Sequence: Synthetic oligonucleotide
  Sense strand starting at position 1263 of SEQ ID NO: 1885349
gagacuaccucaguuguaa

SEQ ID NO: 2335577 - RNA, 19 nt, Artificial Sequence
  Description of Artificial Sequence: Synthetic oligonucleotide
  Antisense strand to SEQ ID NO: 2335576
uuacaacugagguagucuc

SEQ ID NO: 2335578 - RNA, 19 nt, Artificial Sequence
  Description of Artificial Sequence: Synthetic oligonucleotide
  Sense strand starting at position 1408 of SEQ ID NO: 1885349
gccucauugccagauaauc

SEQ ID NO: 2335579 - RNA, 19 nt, Artificial Sequence
  Description of Artificial Sequence: Synthetic oligonucleotide
  Antisense strand to SEQ ID NO: 2335578
gauuaucuggcaaugaggc

SEQ ID NO: 2335580 - RNA, 19 nt, Artificial Sequence
  Description of Artificial Sequence: Synthetic oligonucleotide
  Sense strand starting at position 1458 of SEQ ID NO: 1885349
accaucacagccgauauau

SEQ ID NO: 2335581 - RNA, 19 nt, Artificial Sequence
  Description of Artificial Sequence: Synthetic oligonucleotide
  Antisense strand to SEQ ID NO: 2335580
auauaucggcugugauggu

SEQ ID NO: 2335582 - RNA, 19 nt, Artificial Sequence
  Description of Artificial Sequence: Synthetic oligonucleotide
  Sense strand starting at position 1602 of SEQ ID NO: 1885349
auugcaguaccaugaauua

SEQ ID NO: 2335583 - RNA, 19 nt, Artificial Sequence
  Description of Artificial Sequence: Synthetic oligonucleotide
  Antisense strand to SEQ ID NO: 2335582
uaauucaugguacugcaau

SEQ ID NO: 2335584 - RNA, 19 nt, Artificial Sequence
  Description of Artificial Sequence: Synthetic oligonucleotide
  Sense strand starting at position 1751 of SEQ ID NO: 1885349
aaauuaugucauugaggcu

SEQ ID NO: 2335585 - RNA, 19 nt, Artificial Sequence
  Description of Artificial Sequence: Synthetic oligonucleotide
  Antisense strand to SEQ ID NO: 2335584
agccucaaugacauaauuu

SEQ ID NO: 2335586 - RNA, 19 nt, Artificial Sequence
  Description of Artificial Sequence: Synthetic oligonucleotide
  Sense strand starting at position 2122 of SEQ ID NO: 1885349
ggcagaaggcuaggaauau

SEQ ID NO: 2335587 - RNA, 19 nt, Artificial Sequence
  Description of Artificial Sequence: Synthetic oligonucleotide
  Antisense strand to SEQ ID NO: 2335586
auauuccuagccuucugcc

SEQ ID NO: 2335588 - RNA, 19 nt, Artificial Sequence
  Description of Artificial Sequence: Synthetic oligonucleotide
  Sense strand starting at position 2134 of SEQ ID NO: 1885349
ggaauaucccacgaguguc

SEQ ID NO: 2335589 - RNA, 19 nt, Artificial Sequence
  Description of Artificial Sequence: Synthetic oligonucleotide
  Antisense strand to SEQ ID NO: 2335588
gacacucgugggauauucc

SEQ ID NO: 2335590 - RNA, 19 nt, Artificial Sequence
  Description of Artificial Sequence: Synthetic oligonucleotide
  Sense strand starting at position 2199 of SEQ ID NO: 1885349
ugaagacuauuuggaggaa

SEQ ID NO: 2335591 - RNA, 19 nt, Artificial Sequence
  Description of Artificial Sequence: Synthetic oligonucleotide
  Antisense strand to SEQ ID NO: 2335590
uuccuccaaauagucuuca

SEQ ID NO: 2335592 - RNA, 19 nt, Artificial Sequence
  Description of Artificial Sequence: Synthetic oligonucleotide
  Sense strand starting at position 2234 of SEQ ID NO: 1885349
cuuggaugccaagaguuau

SEQ ID NO: 2335593 - RNA, 19 nt, Artificial Sequence
  Description of Artificial Sequence: Synthetic oligonucleotide
  Antisense strand to SEQ ID NO: 2335592
auaacucuuggcauccaag

SEQ ID NO: 2335594 - RNA, 19 nt, Artificial Sequence
  Description of Artificial Sequence: Synthetic oligonucleotide
  Sense strand starting at position 2240 of SEQ ID NO: 1885349
ugccaagaguuauucuaag

SEQ ID NO: 2335595 - RNA, 19 nt, Artificial Sequence
  Description of Artificial Sequence: Synthetic oligonucleotide
  Antisense strand to SEQ ID NO: 2335594
cuuagaauaacucuuggca

SEQ ID NO: 2335596 - RNA, 19 nt, Artificial Sequence
  Description of Artificial Sequence: Synthetic oligonucleotide
  Sense strand starting at position 2310 of SEQ ID NO: 1885349
accuaucugcaugggaaca

SEQ ID NO: 2335597 - RNA, 19 nt, Artificial Sequence
  Description of Artificial Sequence: Synthetic oligonucleotide
  Antisense strand to SEQ ID NO: 2335596
uguucccaugcagauaggu

SEQ ID NO: 2335598 - RNA, 19 nt, Artificial Sequence
  Description of Artificial Sequence: Synthetic oligonucleotide
  Sense strand starting at position 2321 of SEQ ID NO: 1885349
ugggaacacugucuuuaga

SEQ ID NO: 2335599 - RNA, 19 nt, Artificial Sequence
  Description of Artificial Sequence: Synthetic oligonucleotide
  Antisense strand to SEQ ID NO: 2335598
ucuaaagacaguguuccca

SEQ ID NO: 2335600 - RNA, 19 nt, Artificial Sequence
  Description of Artificial Sequence: Synthetic oligonucleotide
  Sense strand starting at position 2323 of SEQ ID NO: 1885349
ggaacacugucuuuagacu

SEQ ID NO: 2335601 - RNA, 19 nt, Artificial Sequence
  Description of Artificial Sequence: Synthetic oligonucleotide
  Antisense strand to SEQ ID NO: 2335600
agucuaaagacaguguucc

SEQ ID NO: 2335602 - RNA, 19 nt, Artificial Sequence
  Description of Artificial Sequence: Synthetic oligonucleotide
  Sense strand starting at position 2427 of SEQ ID NO: 1885349
gcaggcuccgaacauagau

SEQ ID NO: 2335603 - RNA, 19 nt, Artificial Sequence
  Description of Artificial Sequence: Synthetic oligonucleotide
  Antisense strand to SEQ ID NO: 2335602
aucuauguucggagccugc

SEQ ID NO: 2335604 - RNA, 19 nt, Artificial Sequence
  Description of Artificial Sequence: Synthetic oligonucleotide
  Sense strand starting at position 2569 of SEQ ID NO: 1885349
uaaacuuaggagugugacu

SEQ ID NO: 2335605 - RNA, 19 nt, Artificial Sequence
  Description of Artificial Sequence: Synthetic oligonucleotide
  Antisense strand to SEQ ID NO: 2335604
agucacacuccuaaguuua

SEQ ID NO: 2335606 - RNA, 19 nt, Artificial Sequence
  Description of Artificial Sequence: Synthetic oligonucleotide
  Sense strand starting at position 2585 of SEQ ID NO: 1885349
acuacagguccauaaugua

SEQ ID NO: 2335607 - RNA, 19 nt, Artificial Sequence
  Description of Artificial Sequence: Synthetic oligonucleotide
  Antisense strand to SEQ ID NO: 2335606
uacauuauggaccuguagu

SEQ ID NO: 2335608 - RNA, 19 nt, Artificial Sequence
  Description of Artificial Sequence: Synthetic oligonucleotide
  Sense strand starting at position 2611 of SEQ ID NO: 1885349
augaaucgaggucacuuua

SEQ ID NO: 2335609 - RNA, 19 nt, Artificial Sequence
  Description of Artificial Sequence: Synthetic oligonucleotide
  Antisense strand to SEQ ID NO: 2335608
uaaagugaccucgauucau

SEQ ID NO: 2335610 - RNA, 19 nt, Artificial Sequence
  Description of Artificial Sequence: Synthetic oligonucleotide
  Sense strand starting at position 2704 of SEQ ID NO: 1885349
gccauuuacuuaguauguu

SEQ ID NO: 2335611 - RNA, 19 nt, Artificial Sequence
  Description of Artificial Sequence: Synthetic oligonucleotide
  Antisense strand to SEQ ID NO: 2335610
aacauacuaaguaaauggc

SEQ ID NO: 2335612 - RNA, 19 nt, Artificial Sequence
  Description of Artificial Sequence: Synthetic oligonucleotide
  Sense strand starting at position 3027 of SEQ ID NO: 1885349
agaggauacucuuucuuug

SEQ ID NO: 2335613 - RNA, 19 nt, Artificial Sequence
  Description of Artificial Sequence: Synthetic oligonucleotide
  Antisense strand to SEQ ID NO: 2335612
caaagaaagaguauccucu

SEQ ID NO: 2335614 - RNA, 19 nt, Artificial Sequence
  Description of Artificial Sequence: Synthetic oligonucleotide
  Sense strand starting at position 3128 of SEQ ID NO: 1885349
acuguuagaucucuuaaga

SEQ ID NO: 2335615 - RNA, 19 nt, Artificial Sequence
  Description of Artificial Sequence: Synthetic oligonucleotide
  Antisense strand to SEQ ID NO: 2335614
ucuuaagagaucuaacagu

SEQ ID NO: 2335616 - RNA, 19 nt, Artificial Sequence
  Description of Artificial Sequence: Synthetic oligonucleotide
  Sense strand starting at position 3332 of SEQ ID NO: 1885349
ugucaaggcagccaagaau

SEQ ID NO: 2335617 - RNA, 19 nt, Artificial Sequence
  Description of Artificial Sequence: Synthetic oligonucleotide
  Antisense strand to SEQ ID NO: 2335616
auucuuggcugccuugaca

SEQ ID NO: 2335618 - RNA, 19 nt, Artificial Sequence
  Description of Artificial Sequence: Synthetic oligonucleotide
  Sense strand starting at position 3343 of SEQ ID NO: 1885349
ccaagaauuccaggcauug

SEQ ID NO: 2335619 - RNA, 19 nt, Artificial Sequence
  Description of Artificial Sequence: Synthetic oligonucleotide
  Antisense strand to SEQ ID NO: 2335618
caaugccuggaauucuugg

SEQ ID NO: 2335620 - RNA, 19 nt, Artificial Sequence
  Description of Artificial Sequence: Synthetic oligonucleotide
  Sense strand starting at position 3470 of SEQ ID NO: 1885349
gucagauuugugggcccaa

SEQ ID NO: 2335621 - RNA, 19 nt, Artificial Sequence
  Description of Artificial Sequence: Synthetic oligonucleotide
  Antisense strand to SEQ ID NO: 2335620
uugggcccacaaaucugac

SEQ ID NO: 2335622 - RNA, 19 nt, Artificial Sequence
  Description of Artificial Sequence: Synthetic oligonucleotide
  Sense strand starting at position 3545 of SEQ ID NO: 1885349
agaauugacugauuaagcu

SEQ ID NO: 2335623 - RNA, 19 nt, Artificial Sequence
  Description of Artificial Sequence: Synthetic oligonucleotide
  Antisense strand to SEQ ID NO: 2335622
agcuuaaucagucaauucu

SEQ ID NO: 2335624 - RNA, 19 nt, Artificial Sequence
  Description of Artificial Sequence: Synthetic oligonucleotide
  Sense strand starting at position 3635 of SEQ ID NO: 1885349
cagggcacuccuggaaagu

SEQ ID NO: 2335625 - RNA, 19 nt, Artificial Sequence
  Description of Artificial Sequence: Synthetic oligonucleotide
  Antisense strand to SEQ ID NO: 2335624
acuuuccaggagugcccug

SEQ ID NO: 2335626 - RNA, 19 nt, Artificial Sequence
  Description of Artificial Sequence: Synthetic oligonucleotide
  Sense strand starting at position 3648 of SEQ ID NO: 1885349
gaaagugacuuuccuggaa

SEQ ID NO: 2335627 - RNA, 19 nt, Artificial Sequence
  Description of Artificial Sequence: Synthetic oligonucleotide
  Antisense strand to SEQ ID NO: 2335626
uuccaggaaagucacuuuc

SEQ ID NO: 2335628 - RNA, 19 nt, Artificial Sequence
  Description of Artificial Sequence: Synthetic oligonucleotide
  Sense strand starting at position 3651 of SEQ ID NO: 1885349
agugacuuuccuggaauac

SEQ ID NO: 2335629 - RNA, 19 nt, Artificial Sequence
  Description of Artificial Sequence: Synthetic oligonucleotide
  Antisense strand to SEQ ID NO: 2335628
guauuccaggaaagucacu

SEQ ID NO: 2335630 - RNA, 19 nt, Artificial Sequence
  Description of Artificial Sequence: Synthetic oligonucleotide
  Sense strand starting at position 3652 of SEQ ID NO: 1885349
gugacuuuccuggaauacg

SEQ ID NO: 2335631 - RNA, 19 nt, Artificial Sequence
  Description of Artificial Sequence: Synthetic oligonucleotide
  Antisense strand to SEQ ID NO: 2335630
cguauuccaggaaagucac

SEQ ID NO: 2335632 - RNA, 19 nt, Artificial Sequence
  Description of Artificial Sequence: Synthetic oligonucleotide
  Sense strand starting at position 3661 of SEQ ID NO: 1885349
cuggaauacgggugaaacu

SEQ ID NO: 2335633 - RNA, 19 nt, Artificial Sequence
  Description of Artificial Sequence: Synthetic oligonucleotide
  Antisense strand to SEQ ID NO: 2335632
aguuucacccguauuccag

SEQ ID NO: 2335634 - RNA, 19 nt, Artificial Sequence
  Description of Artificial Sequence: Synthetic oligonucleotide
  Sense strand starting at position 3808 of SEQ ID NO: 1885349
gguacaggguaccuauaau

SEQ ID NO: 2335635 - RNA, 19 nt, Artificial Sequence
  Description of Artificial Sequence: Synthetic oligonucleotide
  Antisense strand to SEQ ID NO: 2335634
auuauagguacccuguacc

SEQ ID NO: 2335636 - RNA, 19 nt, Artificial Sequence
  Description of Artificial Sequence: Synthetic oligonucleotide
  Sense strand starting at position 3898 of SEQ ID NO: 1885349
acucauaggugacuuagau

SEQ ID NO: 2335637 - RNA, 19 nt, Artificial Sequence
  Description of Artificial Sequence: Synthetic oligonucleotide
  Antisense strand to SEQ ID NO: 2335636
aucuaagucaccuaugagu

SEQ ID NO: 2335638 - RNA, 19 nt, Artificial Sequence
  Description of Artificial Sequence: Synthetic oligonucleotide
  Sense strand starting at position 3917 of SEQ ID NO: 1885349
auuggaguuauucgacaga

SEQ ID NO: 2335639 - RNA, 19 nt, Artificial Sequence
  Description of Artificial Sequence: Synthetic oligonucleotide
  Antisense strand to SEQ ID NO: 2335638
ucugucgaauaacuccaau

SEQ ID NO: 2335640 - RNA, 19 nt, Artificial Sequence
  Description of Artificial Sequence: Synthetic oligonucleotide
  Sense strand starting at position 3920 of SEQ ID NO: 1885349
ggaguuauucgacagacuu

SEQ ID NO: 2335641 - RNA, 19 nt, Artificial Sequence
  Description of Artificial Sequence: Synthetic oligonucleotide
  Antisense strand to SEQ ID NO: 2335640
aagucugucgaauaacucc

SEQ ID NO: 2335642 - RNA, 19 nt, Artificial Sequence
  Description of Artificial Sequence: Synthetic oligonucleotide
  Sense strand starting at position 3927 of SEQ ID NO: 1885349
uucgacagacuuuaaagua

SEQ ID NO: 2335643 - RNA, 19 nt, Artificial Sequence
  Description of Artificial Sequence: Synthetic oligonucleotide
  Antisense strand to SEQ ID NO: 2335642
uacuuuaaagucugucgaa

SEQ ID NO: 2335644 - RNA, 19 nt, Artificial Sequence
  Description of Artificial Sequence: Synthetic oligonucleotide
  Sense strand starting at position 3935 of SEQ ID NO: 1885349
acuuuaaaguaacugugau

SEQ ID NO: 2335645 - RNA, 19 nt, Artificial Sequence
  Description of Artificial Sequence: Synthetic oligonucleotide
  Antisense strand to SEQ ID NO: 2335644
aucacaguuacuuuaaagu

SEQ ID NO: 2335646 - RNA, 19 nt, Artificial Sequence
  Description of Artificial Sequence: Synthetic oligonucleotide
  Sense strand starting at position 3941 of SEQ ID NO: 1885349
aaguaacugugauuaagau

SEQ ID NO: 2335647 - RNA, 19 nt, Artificial Sequence
  Description of Artificial Sequence: Synthetic oligonucleotide
  Antisense strand to SEQ ID NO: 2335646
aucuuaaucacaguuacuu

SEQ ID NO: 2335648 - RNA, 19 nt, Artificial Sequence
  Description of Artificial Sequence: Synthetic oligonucleotide
  Sense strand starting at position 130 of SEQ ID NO: 1885350
ugcugacugcuggaauaag

SEQ ID NO: 2335649 - RNA, 19 nt, Artificial Sequence
  Description of Artificial Sequence: Synthetic oligonucleotide
  Antisense strand to SEQ ID NO: 2335648
cuuauuccagcagucagca

SEQ ID NO: 2335650 - RNA, 19 nt, Artificial Sequence
  Description of Artificial Sequence: Synthetic oligonucleotide
  Sense strand starting at position 152 of SEQ ID NO: 1885350
uuccuaaugccaugccaga

SEQ ID NO: 2335651 - RNA, 19 nt, Artificial Sequence
  Description of Artificial Sequence: Synthetic oligonucleotide
  Antisense strand to SEQ ID NO: 2335650
ucuggcauggcauuaggaa

SEQ ID NO: 2335652 - RNA, 19 nt, Artificial Sequence
  Description of Artificial Sequence: Synthetic oligonucleotide
  Sense strand starting at position 418 of SEQ ID NO: 1885350
cuaacaauauggguucuga

SEQ ID NO: 2335653 - RNA, 19 nt, Artificial Sequence
  Description of Artificial Sequence: Synthetic oligonucleotide
  Antisense strand to SEQ ID NO: 2335652
ucagaacccauauuguuag

SEQ ID NO: 2335654 - RNA, 19 nt, Artificial Sequence
  Description of Artificial Sequence: Synthetic oligonucleotide
  Sense strand starting at position 428 of SEQ ID NO: 1885350
ggguucugaccugauagca

SEQ ID NO: 2335655 - RNA, 19 nt, Artificial Sequence
  Description of Artificial Sequence: Synthetic oligonucleotide
  Antisense strand to SEQ ID NO: 2335654
ugcuaucaggucagaaccc

SEQ ID NO: 2335656 - RNA, 19 nt, Artificial Sequence
  Description of Artificial Sequence: Synthetic oligonucleotide
  Sense strand starting at position 509 of SEQ ID NO: 1885350
guggaaguggugugagaug

SEQ ID NO: 2335657 - RNA, 19 nt, Artificial Sequence
  Description of Artificial Sequence: Synthetic oligonucleotide
  Antisense strand to SEQ ID NO: 2335656
caucucacaccacuuccac

SEQ ID NO: 2335658 - RNA, 19 nt, Artificial Sequence
  Description of Artificial Sequence: Synthetic oligonucleotide
  Sense strand starting at position 543 of SEQ ID NO: 1885350
gugaacuccugcuucucaa

SEQ ID NO: 2335659 - RNA, 19 nt, Artificial Sequence
  Description of Artificial Sequence: Synthetic oligonucleotide
  Antisense strand to SEQ ID NO: 2335658
uugagaagcaggaguucac

SEQ ID NO: 2335660 - RNA, 19 nt, Artificial Sequence
  Description of Artificial Sequence: Synthetic oligonucleotide
  Sense strand starting at position 811 of SEQ ID NO: 1885350
auguacuaacugcauagaa

SEQ ID NO: 2335661 - RNA, 19 nt, Artificial Sequence
  Description of Artificial Sequence: Synthetic oligonucleotide
  Antisense strand to SEQ ID NO: 2335660
uucuaugcaguuaguacau

SEQ ID NO: 2335662 - RNA, 19 nt, Artificial Sequence
  Description of Artificial Sequence: Synthetic oligonucleotide
  Sense strand starting at position 930 of SEQ ID NO: 1885350
gcugaaaugauccagcuga

SEQ ID NO: 2335663 - RNA, 19 nt, Artificial Sequence
  Description of Artificial Sequence: Synthetic oligonucleotide
  Antisense strand to SEQ ID NO: 2335662
ucagcuggaucauuucagc

SEQ ID NO: 2335664 - RNA, 19 nt, Artificial Sequence
  Description of Artificial Sequence: Synthetic oligonucleotide
  Sense strand starting at position 943 of SEQ ID NO: 1885350
agcugauucucugucacau

SEQ ID NO: 2335665 - RNA, 19 nt, Artificial Sequence
  Description of Artificial Sequence: Synthetic oligonucleotide
  Antisense strand to SEQ ID NO: 2335664
augugacagagaaucagcu

SEQ ID NO: 2335666 - RNA, 19 nt, Artificial Sequence
  Description of Artificial Sequence: Synthetic oligonucleotide
  Sense strand starting at position 952 of SEQ ID NO: 1885350
ucugucacaugaucuggaa

SEQ ID NO: 2335667 - RNA, 19 nt, Artificial Sequence
  Description of Artificial Sequence: Synthetic oligonucleotide
  Antisense strand to SEQ ID NO: 2335666
uuccagaucaugugacaga

SEQ ID NO: 2335668 - RNA, 19 nt, Artificial Sequence
  Description of Artificial Sequence: Synthetic oligonucleotide
  Sense strand starting at position 1001 of SEQ ID NO: 1885350
ugagacaugcuccauucca

SEQ ID NO: 2335669 - RNA, 19 nt, Artificial Sequence
  Description of Artificial Sequence: Synthetic oligonucleotide
  Antisense strand to SEQ ID NO: 2335668
uggaauggagcaugucuca

SEQ ID NO: 2335670 - RNA, 19 nt, Artificial Sequence
  Description of Artificial Sequence: Synthetic oligonucleotide
  Sense strand starting at position 1142 of SEQ ID NO: 1885350
agcagagugcuggaggaaa

SEQ ID NO: 2335671 - RNA, 19 nt, Artificial Sequence
  Description of Artificial Sequence: Synthetic oligonucleotide
  Antisense strand to SEQ ID NO: 2335670
uuuccuccagcacucugcu

SEQ ID NO: 2335672 - RNA, 19 nt, Artificial Sequence
  Description of Artificial Sequence: Synthetic oligonucleotide
  Sense strand starting at position 1192 of SEQ ID NO: 1885350
auaugccucucaguagaau

SEQ ID NO: 2335673 - RNA, 19 nt, Artificial Sequence
  Description of Artificial Sequence: Synthetic oligonucleotide
  Antisense strand to SEQ ID NO: 2335672
auucuacugagaggcauau

SEQ ID NO: 2335674 - RNA, 19 nt, Artificial Sequence
  Description of Artificial Sequence: Synthetic oligonucleotide
  Sense strand starting at position 1224 of SEQ ID NO: 1885350
auauuauggcuuugccaca

SEQ ID NO: 2335675 - RNA, 19 nt, Artificial Sequence
  Description of Artificial Sequence: Synthetic oligonucleotide
  Antisense strand to SEQ ID NO: 2335674
uguggcaaagccauaauau

SEQ ID NO: 2335676 - RNA, 19 nt, Artificial Sequence
  Description of Artificial Sequence: Synthetic oligonucleotide
  Sense strand starting at position 1321 of SEQ ID NO: 1885350
auacaauguccacagaugu

SEQ ID NO: 2335677 - RNA, 19 nt, Artificial Sequence
  Description of Artificial Sequence: Synthetic oligonucleotide
  Antisense strand to SEQ ID NO: 2335676
acaucuguggacauuguau

SEQ ID NO: 2335678 - RNA, 19 nt, Artificial Sequence
  Description of Artificial Sequence: Synthetic oligonucleotide
  Sense strand starting at position 1404 of SEQ ID NO: 1885350
gaugccaguccaugaaguu

SEQ ID NO: 2335679 - RNA, 19 nt, Artificial Sequence
  Description of Artificial Sequence: Synthetic oligonucleotide
  Antisense strand to SEQ ID NO: 2335678
aacuucauggacuggcauc

SEQ ID NO: 2335680 - RNA, 19 nt, Artificial Sequence
  Description of Artificial Sequence: Synthetic oligonucleotide
  Sense strand starting at position 1405 of SEQ ID NO: 1885350
augccaguccaugaaguuu

SEQ ID NO: 2335681 - RNA, 19 nt, Artificial Sequence
  Description of Artificial Sequence: Synthetic oligonucleotide
  Antisense strand to SEQ ID NO: 2335680
aaacuucauggacuggcau

SEQ ID NO: 2335682 - RNA, 19 nt, Artificial Sequence
  Description of Artificial Sequence: Synthetic oligonucleotide
  Sense strand starting at position 1413 of SEQ ID NO: 1885350
ccaugaaguuugcuacuga

SEQ ID NO: 2335683 - RNA, 19 nt, Artificial Sequence
  Description of Artificial Sequence: Synthetic oligonucleotide
  Antisense strand to SEQ ID NO: 2335682
ucaguagcaaacuucaugg

SEQ ID NO: 2335684 - RNA, 19 nt, Artificial Sequence
  Description of Artificial Sequence: Synthetic oligonucleotide
  Sense strand starting at position 1420 of SEQ ID NO: 1885350
guuugcuacugauccacaa

SEQ ID NO: 2335685 - RNA, 19 nt, Artificial Sequence
  Description of Artificial Sequence: Synthetic oligonucleotide
  Antisense strand to SEQ ID NO: 2335684
uuguggaucaguagcaaac

SEQ ID NO: 2335686 - RNA, 19 nt, Artificial Sequence
  Description of Artificial Sequence: Synthetic oligonucleotide
  Sense strand starting at position 1624 of SEQ ID NO: 1885350
gcuagaauauaggcauaug

SEQ ID NO: 2335687 - RNA, 19 nt, Artificial Sequence
  Description of Artificial Sequence: Synthetic oligonucleotide
  Antisense strand to SEQ ID NO: 2335686
cauaugccuauauucuagc

SEQ ID NO: 2335688 - RNA, 19 nt, Artificial Sequence
  Description of Artificial Sequence: Synthetic oligonucleotide
  Sense strand starting at position 1716 of SEQ ID NO: 1885350
acuccuggucccuguaauu

SEQ ID NO: 2335689 - RNA, 19 nt, Artificial Sequence
  Description of Artificial Sequence: Synthetic oligonucleotide
  Antisense strand to SEQ ID NO: 2335688
aauuacagggaccaggagu

SEQ ID NO: 2335690 - RNA, 19 nt, Artificial Sequence
  Description of Artificial Sequence: Synthetic oligonucleotide
  Sense strand starting at position 1941 of SEQ ID NO: 1885350
guguccuggguucaaauga

SEQ ID NO: 2335691 - RNA, 19 nt, Artificial Sequence
  Description of Artificial Sequence: Synthetic oligonucleotide
  Antisense strand to SEQ ID NO: 2335690
ucauuugaacccaggacac

SEQ ID NO: 2335692 - RNA, 19 nt, Artificial Sequence
  Description of Artificial Sequence: Synthetic oligonucleotide
  Sense strand starting at position 2532 of SEQ ID NO: 1885350
aaagaaauauuguugcaug

SEQ ID NO: 2335693 - RNA, 19 nt, Artificial Sequence
  Description of Artificial Sequence: Synthetic oligonucleotide
  Antisense strand to SEQ ID NO: 2335692
caugcaacaauauuucuuu

SEQ ID NO: 2335694 - RNA, 19 nt, Artificial Sequence
  Description of Artificial Sequence: Synthetic oligonucleotide
  Sense strand starting at position 2635 of SEQ ID NO: 1885350
ucuugcuaagucugacuua

SEQ ID NO: 2335695 - RNA, 19 nt, Artificial Sequence
  Description of Artificial Sequence: Synthetic oligonucleotide
  Antisense strand to SEQ ID NO: 2335694
uaagucagacuuagcaaga

SEQ ID NO: 2335696 - RNA, 19 nt, Artificial Sequence
  Description of Artificial Sequence: Synthetic oligonucleotide
  Sense strand starting at position 2638 of SEQ ID NO: 1885350
ugcuaagucugacuuaaac

SEQ ID NO: 2335697 - RNA, 19 nt, Artificial Sequence
  Description of Artificial Sequence: Synthetic oligonucleotide
  Antisense strand to SEQ ID NO: 2335696
guuuaagucagacuuagca

SEQ ID NO: 2335698 - RNA, 19 nt, Artificial Sequence
  Description of Artificial Sequence: Synthetic oligonucleotide
  Sense strand starting at position 2732 of SEQ ID NO: 1885350
caauuaacugaacggugaa

SEQ ID NO: 2335699 - RNA, 19 nt, Artificial Sequence
  Description of Artificial Sequence: Synthetic oligonucleotide
  Antisense strand to SEQ ID NO: 2335698
uucaccguucaguuaauug

SEQ ID NO: 2335700 - RNA, 19 nt, Artificial Sequence
  Description of Artificial Sequence: Synthetic oligonucleotide
  Sense strand starting at position 2973 of SEQ ID NO: 1885350
cuauauacauugguaaagu

SEQ ID NO: 2335701 - RNA, 19 nt, Artificial Sequence
  Description of Artificial Sequence: Synthetic oligonucleotide
  Antisense strand to SEQ ID NO: 2335700
acuuuaccaauguauauag

SEQ ID NO: 2335702 - RNA, 19 nt, Artificial Sequence
  Description of Artificial Sequence: Synthetic oligonucleotide
  Sense strand starting at position 2983 of SEQ ID NO: 1885350
ugguaaagucaaugcagca

SEQ ID NO: 2335703 - RNA, 19 nt, Artificial Sequence
  Description of Artificial Sequence: Synthetic oligonucleotide
  Antisense strand to SEQ ID NO: 2335702
ugcugcauugacuuuacca

SEQ ID NO: 2335704 - RNA, 19 nt, Artificial Sequence
  Description of Artificial Sequence: Synthetic oligonucleotide
  Sense strand starting at position 3155 of SEQ ID NO: 1885350
ugcucuauaccuuggcuaa

SEQ ID NO: 2335705 - RNA, 19 nt, Artificial Sequence
  Description of Artificial Sequence: Synthetic oligonucleotide
  Antisense strand to SEQ ID NO: 2335704
uuagccaagguauagagca

SEQ ID NO: 2335706 - RNA, 19 nt, Artificial Sequence
  Description of Artificial Sequence: Synthetic oligonucleotide
  Sense strand starting at position 3156 of SEQ ID NO: 1885350
gcucuauaccuuggcuaag

SEQ ID NO: 2335707 - RNA, 19 nt, Artificial Sequence
  Description of Artificial Sequence: Synthetic oligonucleotide
  Antisense strand to SEQ ID NO: 2335706
cuuagccaagguauagagc

SEQ ID NO: 2335708 - RNA, 19 nt, Artificial Sequence
  Description of Artificial Sequence: Synthetic oligonucleotide
  Sense strand starting at position 3308 of SEQ ID NO: 1885350
ggaagcuuauaguccaauu

SEQ ID NO: 2335709 - RNA, 19 nt, Artificial Sequence
  Description of Artificial Sequence: Synthetic oligonucleotide
  Antisense strand to SEQ ID NO: 2335708
aauuggacuauaagcuucc

SEQ ID NO: 2335710 - RNA, 19 nt, Artificial Sequence
  Description of Artificial Sequence: Synthetic oligonucleotide
  Sense strand starting at position 3318 of SEQ ID NO: 1885350
aguccaauucuguaccuuu

SEQ ID NO: 2335711 - RNA, 19 nt, Artificial Sequence
  Description of Artificial Sequence: Synthetic oligonucleotide
  Antisense strand to SEQ ID NO: 2335710
aaagguacagaauuggacu

SEQ ID NO: 2335712 - RNA, 19 nt, Artificial Sequence
  Description of Artificial Sequence: Synthetic oligonucleotide
  Sense strand starting at position 3414 of SEQ ID NO: 1885350
auggcaaugcucuagaauc

SEQ ID NO: 2335713 - RNA, 19 nt, Artificial Sequence
  Description of Artificial Sequence: Synthetic oligonucleotide
  Antisense strand to SEQ ID NO: 2335712
gauucuagagcauugccau

SEQ ID NO: 2335714 - RNA, 19 nt, Artificial Sequence
  Description of Artificial Sequence: Synthetic oligonucleotide
  Sense strand starting at position 3416 of SEQ ID NO: 1885350
ggcaaugcucuagaaucau

SEQ ID NO: 2335715 - RNA, 19 nt, Artificial Sequence
  Description of Artificial Sequence: Synthetic oligonucleotide
  Antisense strand to SEQ ID NO: 2335714
augauucuagagcauugcc

SEQ ID NO: 2335716 - RNA, 19 nt, Artificial Sequence
  Description of Artificial Sequence: Synthetic oligonucleotide
  Sense strand starting at position 3467 of SEQ ID NO: 1885350
uuuaguucuuggcuacuga

SEQ ID NO: 2335717 - RNA, 19 nt, Artificial Sequence
  Description of Artificial Sequence: Synthetic oligonucleotide
  Antisense strand to SEQ ID NO: 2335716
ucaguagccaagaacuaaa

SEQ ID NO: 2335718 - RNA, 19 nt, Artificial Sequence
  Description of Artificial Sequence: Synthetic oligonucleotide
  Sense strand starting at position 3508 of SEQ ID NO: 1885350
ugucuaauauuugcugacu

SEQ ID NO: 2335719 - RNA, 19 nt, Artificial Sequence
  Description of Artificial Sequence: Synthetic oligonucleotide
  Antisense strand to SEQ ID NO: 2335718
agucagcaaauauuagaca

SEQ ID NO: 2335720 - RNA, 19 nt, Artificial Sequence
  Description of Artificial Sequence: Synthetic oligonucleotide
  Sense strand starting at position 3613 of SEQ ID NO: 1885350
ggguaugaugcccaccuga

SEQ ID NO: 2335721 - RNA, 19 nt, Artificial Sequence
  Description of Artificial Sequence: Synthetic oligonucleotide
  Antisense strand to SEQ ID NO: 2335720
ucaggugggcaucauaccc

SEQ ID NO: 2335722 - RNA, 19 nt, Artificial Sequence
  Description of Artificial Sequence: Synthetic oligonucleotide
  Sense strand starting at position 3673 of SEQ ID NO: 1885350
ggucuaccuugcucccaaa

SEQ ID NO: 2335723 - RNA, 19 nt, Artificial Sequence
  Description of Artificial Sequence: Synthetic oligonucleotide
  Antisense strand to SEQ ID NO: 2335722
uuugggagcaagguagacc

SEQ ID NO: 2335724 - RNA, 19 nt, Artificial Sequence
  Description of Artificial Sequence: Synthetic oligonucleotide
  Sense strand starting at position 3709 of SEQ ID NO: 1885350
acacauuucuuggaaguuc

SEQ ID NO: 2335725 - RNA, 19 nt, Artificial Sequence
  Description of Artificial Sequence: Synthetic oligonucleotide
  Antisense strand to SEQ ID NO: 2335724
gaacuuccaagaaaugugu

SEQ ID NO: 2335726 - RNA, 19 nt, Artificial Sequence
  Description of Artificial Sequence: Synthetic oligonucleotide
  Sense strand starting at position 3718 of SEQ ID NO: 1885350
uuggaaguuccacaucagu

SEQ ID NO: 2335727 - RNA, 19 nt, Artificial Sequence
  Description of Artificial Sequence: Synthetic oligonucleotide
  Antisense strand to SEQ ID NO: 2335726
acugauguggaacuuccaa

SEQ ID NO: 2335728 - RNA, 19 nt, Artificial Sequence
  Description of Artificial Sequence: Synthetic oligonucleotide
  Sense strand starting at position 188 of SEQ ID NO: 1885351
uuuguaggugcuuaacaca

SEQ ID NO: 2335729 - RNA, 19 nt, Artificial Sequence
  Description of Artificial Sequence: Synthetic oligonucleotide
  Antisense strand to SEQ ID NO: 2335728
uguguuaagcaccuacaaa

SEQ ID NO: 2335730 - RNA, 19 nt, Artificial Sequence
  Description of Artificial Sequence: Synthetic oligonucleotide
  Sense strand starting at position 445 of SEQ ID NO: 1885351
cccauauuguucucaggaa

SEQ ID NO: 2335731 - RNA, 19 nt, Artificial Sequence
  Description of Artificial Sequence: Synthetic oligonucleotide
  Antisense strand to SEQ ID NO: 2335730
uuccugagaacaauauggg

SEQ ID NO: 2335732 - RNA, 19 nt, Artificial Sequence
  Description of Artificial Sequence: Synthetic oligonucleotide
  Sense strand starting at position 463 of SEQ ID NO: 1885351
auucuaacucucggauuac

SEQ ID NO: 2335733 - RNA, 19 nt, Artificial Sequence
  Description of Artificial Sequence: Synthetic oligonucleotide
  Antisense strand to SEQ ID NO: 2335732
guaauccgagaguuagaau

SEQ ID NO: 2335734 - RNA, 19 nt, Artificial Sequence
  Description of Artificial Sequence: Synthetic oligonucleotide
  Sense strand starting at position 474 of SEQ ID NO: 1885351
cggauuaccagugaccgua

SEQ ID NO: 2335735 - RNA, 19 nt, Artificial Sequence
  Description of Artificial Sequence: Synthetic oligonucleotide
  Antisense strand to SEQ ID NO: 2335734
uacggucacugguaauccg

SEQ ID NO: 2335736 - RNA, 19 nt, Artificial Sequence
  Description of Artificial Sequence: Synthetic oligonucleotide
  Sense strand starting at position 476 of SEQ ID NO: 1885351
gauuaccagugaccguaau

SEQ ID NO: 2335737 - RNA, 19 nt, Artificial Sequence
  Description of Artificial Sequence: Synthetic oligonucleotide
  Antisense strand to SEQ ID NO: 2335736
auuacggucacugguaauc

SEQ ID NO: 2335738 - RNA, 19 nt, Artificial Sequence
  Description of Artificial Sequence: Synthetic oligonucleotide
  Sense strand starting at position 567 of SEQ ID NO: 1885351
gccgaauaucaugauacaa

SEQ ID NO: 2335739 - RNA, 19 nt, Artificial Sequence
  Description of Artificial Sequence: Synthetic oligonucleotide
  Antisense strand to SEQ ID NO: 2335738
uuguaucaugauauucggc

SEQ ID NO: 2335740 - RNA, 19 nt, Artificial Sequence
  Description of Artificial Sequence: Synthetic oligonucleotide
  Sense strand starting at position 935 of SEQ ID NO: 1885351
ucagguaaguccuuuccaa

SEQ ID NO: 2335741 - RNA, 19 nt, Artificial Sequence
  Description of Artificial Sequence: Synthetic oligonucleotide
  Antisense strand to SEQ ID NO: 2335740
uuggaaaggacuuaccuga

SEQ ID NO: 2335742 - RNA, 19 nt, Artificial Sequence
  Description of Artificial Sequence: Synthetic oligonucleotide
  Sense strand starting at position 974 of SEQ ID NO: 1885351
ucauucgcucacugaacaa

SEQ ID NO: 2335743 - RNA, 19 nt, Artificial Sequence
  Description of Artificial Sequence: Synthetic oligonucleotide
  Antisense strand to SEQ ID NO: 2335742
uuguucagugagcgaauga

SEQ ID NO: 2335744 - RNA, 19 nt, Artificial Sequence
  Description of Artificial Sequence: Synthetic oligonucleotide
  Sense strand starting at position 1026 of SEQ ID NO: 1885351
cuaggcaugguacauauaa

SEQ ID NO: 2335745 - RNA, 19 nt, Artificial Sequence
  Description of Artificial Sequence: Synthetic oligonucleotide
  Antisense strand to SEQ ID NO: 2335744
uuauauguaccaugccuag

SEQ ID NO: 2335746 - RNA, 19 nt, Artificial Sequence
  Description of Artificial Sequence: Synthetic oligonucleotide
  Sense strand starting at position 1097 of SEQ ID NO: 1885351
ggccaauuccauggcacua

SEQ ID NO: 2335747 - RNA, 19 nt, Artificial Sequence
  Description of Artificial Sequence: Synthetic oligonucleotide
  Antisense strand to SEQ ID NO: 2335746
uagugccauggaauuggcc

SEQ ID NO: 2335748 - RNA, 19 nt, Artificial Sequence
  Description of Artificial Sequence: Synthetic oligonucleotide
  Sense strand starting at position 1102 of SEQ ID NO: 1885351
auuccauggcacuauauga

SEQ ID NO: 2335749 - RNA, 19 nt, Artificial Sequence
  Description of Artificial Sequence: Synthetic oligonucleotide
  Antisense strand to SEQ ID NO: 2335748
ucauauagugccauggaau

SEQ ID NO: 2335750 - RNA, 19 nt, Artificial Sequence
  Description of Artificial Sequence: Synthetic oligonucleotide
  Sense strand starting at position 1118 of SEQ ID NO: 1885351
ugaagucagacucgucuca

SEQ ID NO: 2335751 - RNA, 19 nt, Artificial Sequence
  Description of Artificial Sequence: Synthetic oligonucleotide
  Antisense strand to SEQ ID NO: 2335750
ugagacgagucugacuuca

SEQ ID NO: 2335752 - RNA, 19 nt, Artificial Sequence
  Description of Artificial Sequence: Synthetic oligonucleotide
  Sense strand starting at position 1120 of SEQ ID NO: 1885351
aagucagacucgucucaac

SEQ ID NO: 2335753 - RNA, 19 nt, Artificial Sequence
  Description of Artificial Sequence: Synthetic oligonucleotide
  Antisense strand to SEQ ID NO: 2335752
guugagacgagucugacuu

SEQ ID NO: 2335754 - RNA, 19 nt, Artificial Sequence
  Description of Artificial Sequence: Synthetic oligonucleotide
  Sense strand starting at position 1164 of SEQ ID NO: 1885351
agcccaaagcuuugaaaua

SEQ ID NO: 2335755 - RNA, 19 nt, Artificial Sequence
  Description of Artificial Sequence: Synthetic oligonucleotide
  Antisense strand to SEQ ID NO: 2335754
uauuucaaagcuuugggcu

SEQ ID NO: 2335756 - RNA, 19 nt, Artificial Sequence
  Description of Artificial Sequence: Synthetic oligonucleotide
  Sense strand starting at position 1277 of SEQ ID NO: 1885351
ugugaaggcacagguauaa

SEQ ID NO: 2335757 - RNA, 19 nt, Artificial Sequence
  Description of Artificial Sequence: Synthetic oligonucleotide
  Antisense strand to SEQ ID NO: 2335756
uuauaccugugccuucaca

SEQ ID NO: 2335758 - RNA, 19 nt, Artificial Sequence
  Description of Artificial Sequence: Synthetic oligonucleotide
  Sense strand starting at position 1419 of SEQ ID NO: 1885351
ucagauucacguggagcaa

SEQ ID NO: 2335759 - RNA, 19 nt, Artificial Sequence
  Description of Artificial Sequence: Synthetic oligonucleotide
  Antisense strand to SEQ ID NO: 2335758
uugcuccacgugaaucuga

SEQ ID NO: 2335760 - RNA, 19 nt, Artificial Sequence
  Description of Artificial Sequence: Synthetic oligonucleotide
  Sense strand starting at position 2085 of SEQ ID NO: 1885351
gccuccugucucuagagua

SEQ ID NO: 2335761 - RNA, 19 nt, Artificial Sequence
  Description of Artificial Sequence: Synthetic oligonucleotide
  Antisense strand to SEQ ID NO: 2335760
uacucuagagacaggaggc

SEQ ID NO: 2335762 - RNA, 19 nt, Artificial Sequence
  Description of Artificial Sequence: Synthetic oligonucleotide
  Sense strand starting at position 2174 of SEQ ID NO: 1885351
aucgaauuccaguggacau

SEQ ID NO: 2335763 - RNA, 19 nt, Artificial Sequence
  Description of Artificial Sequence: Synthetic oligonucleotide
  Antisense strand to SEQ ID NO: 2335762
auguccacuggaauucgau

SEQ ID NO: 2335764 - RNA, 19 nt, Artificial Sequence
  Description of Artificial Sequence: Synthetic oligonucleotide
  Sense strand starting at position 2175 of SEQ ID NO: 1885351
ucgaauuccaguggacauu

SEQ ID NO: 2335765 - RNA, 19 nt, Artificial Sequence
  Description of Artificial Sequence: Synthetic oligonucleotide
  Antisense strand to SEQ ID NO: 2335764
aauguccacuggaauucga

SEQ ID NO: 2335766 - RNA, 19 nt, Artificial Sequence
  Description of Artificial Sequence: Synthetic oligonucleotide
  Sense strand starting at position 2176 of SEQ ID NO: 1885351
cgaauuccaguggacauua

SEQ ID NO: 2335767 - RNA, 19 nt, Artificial Sequence
  Description of Artificial Sequence: Synthetic oligonucleotide
  Antisense strand to SEQ ID NO: 2335766
uaauguccacuggaauucg

SEQ ID NO: 2335768 - RNA, 19 nt, Artificial Sequence
  Description of Artificial Sequence: Synthetic oligonucleotide
  Sense strand starting at position 2205 of SEQ ID NO: 1885351
gaugguagguucuugagua

SEQ ID NO: 2335769 - RNA, 19 nt, Artificial Sequence
  Description of Artificial Sequence: Synthetic oligonucleotide
  Antisense strand to SEQ ID NO: 2335768
uacucaagaaccuaccauc

SEQ ID NO: 2335770 - RNA, 19 nt, Artificial Sequence
  Description of Artificial Sequence: Synthetic oligonucleotide
  Sense strand starting at position 2209 of SEQ ID NO: 1885351
guagguucuugaguaaaca

SEQ ID NO: 2335771 - RNA, 19 nt, Artificial Sequence
  Description of Artificial Sequence: Synthetic oligonucleotide
  Antisense strand to SEQ ID NO: 2335770
uguuuacucaagaaccuac

SEQ ID NO: 2335772 - RNA, 19 nt, Artificial Sequence
  Description of Artificial Sequence: Synthetic oligonucleotide
  Sense strand starting at position 2468 of SEQ ID NO: 1885351
aauggacugucuguccuau

SEQ ID NO: 2335773 - RNA, 19 nt, Artificial Sequence
  Description of Artificial Sequence: Synthetic oligonucleotide
  Antisense strand to SEQ ID NO: 2335772
auaggacagacaguccauu

SEQ ID NO: 2335774 - RNA, 19 nt, Artificial Sequence
  Description of Artificial Sequence: Synthetic oligonucleotide
  Sense strand starting at position 2519 of SEQ ID NO: 1885351
ccaauuaacuugucugguu

SEQ ID NO: 2335775 - RNA, 19 nt, Artificial Sequence
  Description of Artificial Sequence: Synthetic oligonucleotide
  Antisense strand to SEQ ID NO: 2335774
aaccagacaaguuaauugg

SEQ ID NO: 2335776 - RNA, 19 nt, Artificial Sequence
  Description of Artificial Sequence: Synthetic oligonucleotide
  Sense strand starting at position 2587 of SEQ ID NO: 1885351
aggucuccucuguaacuua

SEQ ID NO: 2335777 - RNA, 19 nt, Artificial Sequence
  Description of Artificial Sequence: Synthetic oligonucleotide
  Antisense strand to SEQ ID NO: 2335776
uaaguuacagaggagaccu

SEQ ID NO: 2335778 - RNA, 19 nt, Artificial Sequence
  Description of Artificial Sequence: Synthetic oligonucleotide
  Sense strand starting at position 2630 of SEQ ID NO: 1885351
ugauguggaaaguguuaag

SEQ ID NO: 2335779 - RNA, 19 nt, Artificial Sequence
  Description of Artificial Sequence: Synthetic oligonucleotide
  Antisense strand to SEQ ID NO: 2335778
cuuaacacuuuccacauca

SEQ ID NO: 2335780 - RNA, 19 nt, Artificial Sequence
  Description of Artificial Sequence: Synthetic oligonucleotide
  Sense strand starting at position 2814 of SEQ ID NO: 1885351
ggaguuugcagauaugauu

SEQ ID NO: 2335781 - RNA, 19 nt, Artificial Sequence
  Description of Artificial Sequence: Synthetic oligonucleotide
  Antisense strand to SEQ ID NO: 2335780
aaucauaucugcaaacucc

SEQ ID NO: 2335782 - RNA, 19 nt, Artificial Sequence
  Description of Artificial Sequence: Synthetic oligonucleotide
  Sense strand starting at position 2877 of SEQ ID NO: 1885351
aaauuuggcugauacagga

SEQ ID NO: 2335783 - RNA, 19 nt, Artificial Sequence
  Description of Artificial Sequence: Synthetic oligonucleotide
  Antisense strand to SEQ ID NO: 2335782
uccuguaucagccaaauuu

SEQ ID NO: 2335784 - RNA, 19 nt, Artificial Sequence
  Description of Artificial Sequence: Synthetic oligonucleotide
  Sense strand starting at position 3097 of SEQ ID NO: 1885351
cuuuauuagggcgauccua

SEQ ID NO: 2335785 - RNA, 19 nt, Artificial Sequence
  Description of Artificial Sequence: Synthetic oligonucleotide
  Antisense strand to SEQ ID NO: 2335784
uaggaucgcccuaauaaag

SEQ ID NO: 2335786 - RNA, 19 nt, Artificial Sequence
  Description of Artificial Sequence: Synthetic oligonucleotide
  Sense strand starting at position 3190 of SEQ ID NO: 1885351
ugcugaauuacgggaggga

SEQ ID NO: 2335787 - RNA, 19 nt, Artificial Sequence
  Description of Artificial Sequence: Synthetic oligonucleotide
  Antisense strand to SEQ ID NO: 2335786
ucccucccguaauucagca

SEQ ID NO: 2335788 - RNA, 19 nt, Artificial Sequence
  Description of Artificial Sequence: Synthetic oligonucleotide
  Sense strand starting at position 3217 of SEQ ID NO: 1885351
aguucuaauguugggauau

SEQ ID NO: 2335789 - RNA, 19 nt, Artificial Sequence
  Description of Artificial Sequence: Synthetic oligonucleotide
  Antisense strand to SEQ ID NO: 2335788
auaucccaacauuagaacu

SEQ ID NO: 2335790 - RNA, 19 nt, Artificial Sequence
  Description of Artificial Sequence: Synthetic oligonucleotide
  Sense strand starting at position 3299 of SEQ ID NO: 1885351
augugauccuagguuagag

SEQ ID NO: 2335791 - RNA, 19 nt, Artificial Sequence
  Description of Artificial Sequence: Synthetic oligonucleotide
  Antisense strand to SEQ ID NO: 2335790
cucuaaccuaggaucacau

SEQ ID NO: 2335792 - RNA, 19 nt, Artificial Sequence
  Description of Artificial Sequence: Synthetic oligonucleotide
  Sense strand starting at position 3335 of SEQ ID NO: 1885351
uuauguauauacguagaag

SEQ ID NO: 2335793 - RNA, 19 nt, Artificial Sequence
  Description of Artificial Sequence: Synthetic oligonucleotide
  Antisense strand to SEQ ID NO: 2335792
cuucuacguauauacauaa

SEQ ID NO: 2335794 - RNA, 19 nt, Artificial Sequence
  Description of Artificial Sequence: Synthetic oligonucleotide
  Sense strand starting at position 3346 of SEQ ID NO: 1885351
cguagaagagcuggauaua

SEQ ID NO: 2335795 - RNA, 19 nt, Artificial Sequence
  Description of Artificial Sequence: Synthetic oligonucleotide
  Antisense strand to SEQ ID NO: 2335794
uauauccagcucuucuacg

SEQ ID NO: 2335796 - RNA, 19 nt, Artificial Sequence
  Description of Artificial Sequence: Synthetic oligonucleotide
  Sense strand starting at position 3356 of SEQ ID NO: 1885351
cuggauauauaguuguuua

SEQ ID NO: 2335797 - RNA, 19 nt, Artificial Sequence
  Description of Artificial Sequence: Synthetic oligonucleotide
  Antisense strand to SEQ ID NO: 2335796
uaaacaacuauauauccag

SEQ ID NO: 2335798 - RNA, 19 nt, Artificial Sequence
  Description of Artificial Sequence: Synthetic oligonucleotide
  Sense strand starting at position 3357 of SEQ ID NO: 1885351
uggauauauaguuguuuag

SEQ ID NO: 2335799 - RNA, 19 nt, Artificial Sequence
  Description of Artificial Sequence: Synthetic oligonucleotide
  Antisense strand to SEQ ID NO: 2335798
cuaaacaacuauauaucca

SEQ ID NO: 2335800 - RNA, 19 nt, Artificial Sequence
  Description of Artificial Sequence: Synthetic oligonucleotide
  Sense strand starting at position 3636 of SEQ ID NO: 1885351
cugaucauuugguaaacuu

SEQ ID NO: 2335801 - RNA, 19 nt, Artificial Sequence
  Description of Artificial Sequence: Synthetic oligonucleotide
  Antisense strand to SEQ ID NO: 2335800
aaguuuaccaaaugaucag

SEQ ID NO: 2335802 - RNA, 19 nt, Artificial Sequence
  Description of Artificial Sequence: Synthetic oligonucleotide
  Sense strand starting at position 3643 of SEQ ID NO: 1885351
uuugguaaacuuuggauaa

SEQ ID NO: 2335803 - RNA, 19 nt, Artificial Sequence
  Description of Artificial Sequence: Synthetic oligonucleotide
  Antisense strand to SEQ ID NO: 2335802
uuauccaaaguuuaccaaa

SEQ ID NO: 2335804 - RNA, 19 nt, Artificial Sequence
  Description of Artificial Sequence: Synthetic oligonucleotide
  Sense strand starting at position 3833 of SEQ ID NO: 1885351
augaauugccagcgcauuu

SEQ ID NO: 2335805 - RNA, 19 nt, Artificial Sequence
  Description of Artificial Sequence: Synthetic oligonucleotide
  Antisense strand to SEQ ID NO: 2335804
aaaugcgcuggcaauucau

SEQ ID NO: 2335806 - RNA, 19 nt, Artificial Sequence
  Description of Artificial Sequence: Synthetic oligonucleotide
  Sense strand starting at position 3983 of SEQ ID NO: 1885351
uagccuucgcauguuaguu

SEQ ID NO: 2335807 - RNA, 19 nt, Artificial Sequence
  Description of Artificial Sequence: Synthetic oligonucleotide
  Antisense strand to SEQ ID NO: 2335806
aacuaacaugcgaaggcua

SEQ ID NO: 2335808 - RNA, 19 nt, Artificial Sequence
  Description of Artificial Sequence: Synthetic oligonucleotide
  Sense strand starting at position 189 of SEQ ID NO: 1885352
gcaagcaaaguacauuaau

SEQ ID NO: 2335809 - RNA, 19 nt, Artificial Sequence
  Description of Artificial Sequence: Synthetic oligonucleotide
  Antisense strand to SEQ ID NO: 2335808
auuaauguacuuugcuugc

SEQ ID NO: 2335810 - RNA, 19 nt, Artificial Sequence
  Description of Artificial Sequence: Synthetic oligonucleotide
  Sense strand starting at position 289 of SEQ ID NO: 1885352
cuauauguccuagaugugu

SEQ ID NO: 2335811 - RNA, 19 nt, Artificial Sequence
  Description of Artificial Sequence: Synthetic oligonucleotide
  Antisense strand to SEQ ID NO: 2335810
acacaucuaggacauauag

SEQ ID NO: 2335812 - RNA, 19 nt, Artificial Sequence
  Description of Artificial Sequence: Synthetic oligonucleotide
  Sense strand starting at position 315 of SEQ ID NO: 1885352
aguggucuaaucuggacuu

SEQ ID NO: 2335813 - RNA, 19 nt, Artificial Sequence
  Description of Artificial Sequence: Synthetic oligonucleotide
  Antisense strand to SEQ ID NO: 2335812
aaguccagauuagaccacu

SEQ ID NO: 2335814 - RNA, 19 nt, Artificial Sequence
  Description of Artificial Sequence: Synthetic oligonucleotide
  Sense strand starting at position 431 of SEQ ID NO: 1885352
gugugugaugauuggaaga

SEQ ID NO: 2335815 - RNA, 19 nt, Artificial Sequence
  Description of Artificial Sequence: Synthetic oligonucleotide
  Antisense strand to SEQ ID NO: 2335814
ucuuccaaucaucacacac

SEQ ID NO: 2335816 - RNA, 19 nt, Artificial Sequence
  Description of Artificial Sequence: Synthetic oligonucleotide
  Sense strand starting at position 500 of SEQ ID NO: 1885352
cugacugccaugugagaga

SEQ ID NO: 2335817 - RNA, 19 nt, Artificial Sequence
  Description of Artificial Sequence: Synthetic oligonucleotide
  Antisense strand to SEQ ID NO: 2335816
ucucucacauggcagucag

SEQ ID NO: 2335818 - RNA, 19 nt, Artificial Sequence
  Description of Artificial Sequence: Synthetic oligonucleotide
  Sense strand starting at position 579 of SEQ ID NO: 1885352
guuggaaacuauccauggu

SEQ ID NO: 2335819 - RNA, 19 nt, Artificial Sequence
  Description of Artificial Sequence: Synthetic oligonucleotide
  Antisense strand to SEQ ID NO: 2335818
accauggauaguuuccaac

SEQ ID NO: 2335820 - RNA, 19 nt, Artificial Sequence
  Description of Artificial Sequence: Synthetic oligonucleotide
  Sense strand starting at position 761 of SEQ ID NO: 1885352
auaagaagcaaggguucua

SEQ ID NO: 2335821 - RNA, 19 nt, Artificial Sequence
  Description of Artificial Sequence: Synthetic oligonucleotide
  Antisense strand to SEQ ID NO: 2335820
uagaacccuugcuucuuau

SEQ ID NO: 2335822 - RNA, 19 nt, Artificial Sequence
  Description of Artificial Sequence: Synthetic oligonucleotide
  Sense strand starting at position 948 of SEQ ID NO: 1885352
ucagucaucuacuuaagga

SEQ ID NO: 2335823 - RNA, 19 nt, Artificial Sequence
  Description of Artificial Sequence: Synthetic oligonucleotide
  Antisense strand to SEQ ID NO: 2335822
uccuuaaguagaugacuga

SEQ ID NO: 2335824 - RNA, 19 nt, Artificial Sequence
  Description of Artificial Sequence: Synthetic oligonucleotide
  Sense strand starting at position 1178 of SEQ ID NO: 1885352
gcaaauuacuugcugaaug

SEQ ID NO: 2335825 - RNA, 19 nt, Artificial Sequence
  Description of Artificial Sequence: Synthetic oligonucleotide
  Antisense strand to SEQ ID NO: 2335824
cauucagcaaguaauuugc

SEQ ID NO: 2335826 - RNA, 19 nt, Artificial Sequence
  Description of Artificial Sequence: Synthetic oligonucleotide
  Sense strand starting at position 1288 of SEQ ID NO: 1885352
auguaugaccugugaucau

SEQ ID NO: 2335827 - RNA, 19 nt, Artificial Sequence
  Description of Artificial Sequence: Synthetic oligonucleotide
  Antisense strand to SEQ ID NO: 2335826
augaucacaggucauacau

SEQ ID NO: 2335828 - RNA, 19 nt, Artificial Sequence
  Description of Artificial Sequence: Synthetic oligonucleotide
  Sense strand starting at position 1317 of SEQ ID NO: 1885352
ucauaacauguggauguau

SEQ ID NO: 2335829 - RNA, 19 nt, Artificial Sequence
  Description of Artificial Sequence: Synthetic oligonucleotide
  Antisense strand to SEQ ID NO: 2335828
auacauccacauguuauga

SEQ ID NO: 2335830 - RNA, 19 nt, Artificial Sequence
  Description of Artificial Sequence: Synthetic oligonucleotide
  Sense strand starting at position 1325 of SEQ ID NO: 1885352
uguggauguaugcagaaga

SEQ ID NO: 2335831 - RNA, 19 nt, Artificial Sequence
  Description of Artificial Sequence: Synthetic oligonucleotide
  Antisense strand to SEQ ID NO: 2335830
ucuucugcauacauccaca

SEQ ID NO: 2335832 - RNA, 19 nt, Artificial Sequence
  Description of Artificial Sequence: Synthetic oligonucleotide
  Sense strand starting at position 1499 of SEQ ID NO: 1885352
gaaaucuguccagagcuga

SEQ ID NO: 2335833 - RNA, 19 nt, Artificial Sequence
  Description of Artificial Sequence: Synthetic oligonucleotide
  Antisense strand to SEQ ID NO: 2335832
ucagcucuggacagauuuc

SEQ ID NO: 2335834 - RNA, 19 nt, Artificial Sequence
  Description of Artificial Sequence: Synthetic oligonucleotide
  Sense strand starting at position 1628 of SEQ ID NO: 1885352
ccagcaggauugccugaaa

SEQ ID NO: 2335835 - RNA, 19 nt, Artificial Sequence
  Description of Artificial Sequence: Synthetic oligonucleotide
  Antisense strand to SEQ ID NO: 2335834
uuucaggcaauccugcugg

SEQ ID NO: 2335836 - RNA, 19 nt, Artificial Sequence
  Description of Artificial Sequence: Synthetic oligonucleotide
  Sense strand starting at position 1631 of SEQ ID NO: 1885352
gcaggauugccugaaaugu

SEQ ID NO: 2335837 - RNA, 19 nt, Artificial Sequence
  Description of Artificial Sequence: Synthetic oligonucleotide
  Antisense strand to SEQ ID NO: 2335836
acauuucaggcaauccugc

SEQ ID NO: 2335838 - RNA, 19 nt, Artificial Sequence
  Description of Artificial Sequence: Synthetic oligonucleotide
  Sense strand starting at position 1711 of SEQ ID NO: 1885352
cuguuaaagggauagucuu

SEQ ID NO: 2335839 - RNA, 19 nt, Artificial Sequence
  Description of Artificial Sequence: Synthetic oligonucleotide
  Antisense strand to SEQ ID NO: 2335838
aagacuaucccuuuaacag

SEQ ID NO: 2335840 - RNA, 19 nt, Artificial Sequence
  Description of Artificial Sequence: Synthetic oligonucleotide
  Sense strand starting at position 1807 of SEQ ID NO: 1885352
gaugcauuccuauauuagg

SEQ ID NO: 2335841 - RNA, 19 nt, Artificial Sequence
  Description of Artificial Sequence: Synthetic oligonucleotide
  Antisense strand to SEQ ID NO: 2335840
ccuaauauaggaaugcauc

SEQ ID NO: 2335842 - RNA, 19 nt, Artificial Sequence
  Description of Artificial Sequence: Synthetic oligonucleotide
  Sense strand starting at position 1891 of SEQ ID NO: 1885352
guucuugaccacugaugga

SEQ ID NO: 2335843 - RNA, 19 nt, Artificial Sequence
  Description of Artificial Sequence: Synthetic oligonucleotide
  Antisense strand to SEQ ID NO: 2335842
uccaucaguggucaagaac

SEQ ID NO: 2335844 - RNA, 19 nt, Artificial Sequence
  Description of Artificial Sequence: Synthetic oligonucleotide
  Sense strand starting at position 1901 of SEQ ID NO: 1885352
acugauggaguccggauau

SEQ ID NO: 2335845 - RNA, 19 nt, Artificial Sequence
  Description of Artificial Sequence: Synthetic oligonucleotide
  Antisense strand to SEQ ID NO: 2335844
auauccggacuccaucagu

SEQ ID NO: 2335846 - RNA, 19 nt, Artificial Sequence
  Description of Artificial Sequence: Synthetic oligonucleotide
  Sense strand starting at position 1911 of SEQ ID NO: 1885352
uccggauauuuguccucau

SEQ ID NO: 2335847 - RNA, 19 nt, Artificial Sequence
  Description of Artificial Sequence: Synthetic oligonucleotide
  Antisense strand to SEQ ID NO: 2335846
augaggacaaauauccgga

SEQ ID NO: 2335848 - RNA, 19 nt, Artificial Sequence
  Description of Artificial Sequence: Synthetic oligonucleotide
  Sense strand starting at position 1912 of SEQ ID NO: 1885352
ccggauauuuguccucauc

SEQ ID NO: 2335849 - RNA, 19 nt, Artificial Sequence
  Description of Artificial Sequence: Synthetic oligonucleotide
  Antisense strand to SEQ ID NO: 2335848
gaugaggacaaauauccgg

SEQ ID NO: 2335850 - RNA, 19 nt, Artificial Sequence
  Description of Artificial Sequence: Synthetic oligonucleotide
  Sense strand starting at position 1985 of SEQ ID NO: 1885352
acaggagauuugggaggua

SEQ ID NO: 2335851 - RNA, 19 nt, Artificial Sequence
  Description of Artificial Sequence: Synthetic oligonucleotide
  Antisense strand to SEQ ID NO: 2335850
uaccucccaaaucuccugu

SEQ ID NO: 2335852 - RNA, 19 nt, Artificial Sequence
  Description of Artificial Sequence: Synthetic oligonucleotide
  Sense strand starting at position 2167 of SEQ ID NO: 1885352
uuguaagcuccugaggacu

SEQ ID NO: 2335853 - RNA, 19 nt, Artificial Sequence
  Description of Artificial Sequence: Synthetic oligonucleotide
  Antisense strand to SEQ ID NO: 2335852
aguccucaggagcuuacaa

SEQ ID NO: 2335854 - RNA, 19 nt, Artificial Sequence
  Description of Artificial Sequence: Synthetic oligonucleotide
  Sense strand starting at position 2205 of SEQ ID NO: 1885352
gccagaaccauggguccua

SEQ ID NO: 2335855 - RNA, 19 nt, Artificial Sequence
  Description of Artificial Sequence: Synthetic oligonucleotide
  Antisense strand to SEQ ID NO: 2335854
uaggacccaugguucuggc

SEQ ID NO: 2335856 - RNA, 19 nt, Artificial Sequence
  Description of Artificial Sequence: Synthetic oligonucleotide
  Sense strand starting at position 2311 of SEQ ID NO: 1885352
ggucuaauauaaucaguga

SEQ ID NO: 2335857 - RNA, 19 nt, Artificial Sequence
  Description of Artificial Sequence: Synthetic oligonucleotide
  Antisense strand to SEQ ID NO: 2335856
ucacugauuauauuagacc

SEQ ID NO: 2335858 - RNA, 19 nt, Artificial Sequence
  Description of Artificial Sequence: Synthetic oligonucleotide
  Sense strand starting at position 2493 of SEQ ID NO: 1885352
uguuguuugacuggaauac

SEQ ID NO: 2335859 - RNA, 19 nt, Artificial Sequence
  Description of Artificial Sequence: Synthetic oligonucleotide
  Antisense strand to SEQ ID NO: 2335858
guauuccagucaaacaaca

SEQ ID NO: 2335860 - RNA, 19 nt, Artificial Sequence
  Description of Artificial Sequence: Synthetic oligonucleotide
  Sense strand starting at position 2557 of SEQ ID NO: 1885352
gaugguguuagauaugcca

SEQ ID NO: 2335861 - RNA, 19 nt, Artificial Sequence
  Description of Artificial Sequence: Synthetic oligonucleotide
  Antisense strand to SEQ ID NO: 2335860
uggcauaucuaacaccauc

SEQ ID NO: 2335862 - RNA, 19 nt, Artificial Sequence
  Description of Artificial Sequence: Synthetic oligonucleotide
  Sense strand starting at position 2560 of SEQ ID NO: 1885352
gguguuagauaugccaaag

SEQ ID NO: 2335863 - RNA, 19 nt, Artificial Sequence
  Description of Artificial Sequence: Synthetic oligonucleotide
  Antisense strand to SEQ ID NO: 2335862
cuuuggcauaucuaacacc

SEQ ID NO: 2335864 - RNA, 19 nt, Artificial Sequence
  Description of Artificial Sequence: Synthetic oligonucleotide
  Sense strand starting at position 2584 of SEQ ID NO: 1885352
ugucaugugaaguauuauc

SEQ ID NO: 2335865 - RNA, 19 nt, Artificial Sequence
  Description of Artificial Sequence: Synthetic oligonucleotide
  Antisense strand to SEQ ID NO: 2335864
gauaauacuucacaugaca

SEQ ID NO: 2335866 - RNA, 19 nt, Artificial Sequence
  Description of Artificial Sequence: Synthetic oligonucleotide
  Sense strand starting at position 2589 of SEQ ID NO: 1885352
ugugaaguauuaucuacug

SEQ ID NO: 2335867 - RNA, 19 nt, Artificial Sequence
  Description of Artificial Sequence: Synthetic oligonucleotide
  Antisense strand to SEQ ID NO: 2335866
caguagauaauacuucaca

SEQ ID NO: 2335868 - RNA, 19 nt, Artificial Sequence
  Description of Artificial Sequence: Synthetic oligonucleotide
  Sense strand starting at position 2667 of SEQ ID NO: 1885352
gcaaucuucuauuuacgua

SEQ ID NO: 2335869 - RNA, 19 nt, Artificial Sequence
  Description of Artificial Sequence: Synthetic oligonucleotide
  Antisense strand to SEQ ID NO: 2335868
uacguaaauagaagauugc

SEQ ID NO: 2335870 - RNA, 19 nt, Artificial Sequence
  Description of Artificial Sequence: Synthetic oligonucleotide
  Sense strand starting at position 2779 of SEQ ID NO: 1885352
aauagugaguuauccuaga

SEQ ID NO: 2335871 - RNA, 19 nt, Artificial Sequence
  Description of Artificial Sequence: Synthetic oligonucleotide
  Antisense strand to SEQ ID NO: 2335870
ucuaggauaacucacuauu

SEQ ID NO: 2335872 - RNA, 19 nt, Artificial Sequence
  Description of Artificial Sequence: Synthetic oligonucleotide
  Sense strand starting at position 2784 of SEQ ID NO: 1885352
ugaguuauccuagaagcau

SEQ ID NO: 2335873 - RNA, 19 nt, Artificial Sequence
  Description of Artificial Sequence: Synthetic oligonucleotide
  Antisense strand to SEQ ID NO: 2335872
augcuucuaggauaacuca

SEQ ID NO: 2335874 - RNA, 19 nt, Artificial Sequence
  Description of Artificial Sequence: Synthetic oligonucleotide
  Sense strand starting at position 3011 of SEQ ID NO: 1885352
ucuuauggauucccacagu

SEQ ID NO: 2335875 - RNA, 19 nt, Artificial Sequence
  Description of Artificial Sequence: Synthetic oligonucleotide
  Antisense strand to SEQ ID NO: 2335874
acugugggaauccauaaga

SEQ ID NO: 2335876 - RNA, 19 nt, Artificial Sequence
  Description of Artificial Sequence: Synthetic oligonucleotide
  Sense strand starting at position 3014 of SEQ ID NO: 1885352
uauggauucccacagugua

SEQ ID NO: 2335877 - RNA, 19 nt, Artificial Sequence
  Description of Artificial Sequence: Synthetic oligonucleotide
  Antisense strand to SEQ ID NO: 2335876
uacacugugggaauccaua

SEQ ID NO: 2335878 - RNA, 19 nt, Artificial Sequence
  Description of Artificial Sequence: Synthetic oligonucleotide
  Sense strand starting at position 3133 of SEQ ID NO: 1885352
gcuuccuuucucuaugaag

SEQ ID NO: 2335879 - RNA, 19 nt, Artificial Sequence
  Description of Artificial Sequence: Synthetic oligonucleotide
  Antisense strand to SEQ ID NO: 2335878
cuucauagagaaaggaagc

SEQ ID NO: 2335880 - RNA, 19 nt, Artificial Sequence
  Description of Artificial Sequence: Synthetic oligonucleotide
  Sense strand starting at position 3457 of SEQ ID NO: 1885352
ucauguguuugguccauuu

SEQ ID NO: 2335881 - RNA, 19 nt, Artificial Sequence
  Description of Artificial Sequence: Synthetic oligonucleotide
  Antisense strand to SEQ ID NO: 2335880
aaauggaccaaacacauga

SEQ ID NO: 2335882 - RNA, 19 nt, Artificial Sequence
  Description of Artificial Sequence: Synthetic oligonucleotide
  Sense strand starting at position 3658 of SEQ ID NO: 1885352
cuuaaagguaguugcagaa

SEQ ID NO: 2335883 - RNA, 19 nt, Artificial Sequence
  Description of Artificial Sequence: Synthetic oligonucleotide
  Antisense strand to SEQ ID NO: 2335882
uucugcaacuaccuuuaag

SEQ ID NO: 2335884 - RNA, 19 nt, Artificial Sequence
  Description of Artificial Sequence: Synthetic oligonucleotide
  Sense strand starting at position 3743 of SEQ ID NO: 1885352
acaugcuaagcuggaaauu

SEQ ID NO: 2335885 - RNA, 19 nt, Artificial Sequence
  Description of Artificial Sequence: Synthetic oligonucleotide
  Antisense strand to SEQ ID NO: 2335884
aauuuccagcuuagcaugu

SEQ ID NO: 2335886 - RNA, 19 nt, Artificial Sequence
  Description of Artificial Sequence: Synthetic oligonucleotide
  Sense strand starting at position 3945 of SEQ ID NO: 1885352
uuguaaagugacuguuaga

SEQ ID NO: 2335887 - RNA, 19 nt, Artificial Sequence
  Description of Artificial Sequence: Synthetic oligonucleotide
  Antisense strand to SEQ ID NO: 2335886
ucuaacagucacuuuacaa

SEQ ID NO: 2335888 - RNA, 19 nt, Artificial Sequence
  Description of Artificial Sequence: Synthetic oligonucleotide
  Sense strand starting at position 244 of SEQ ID NO: 1885353
auucuuagcuaucuugaag

SEQ ID NO: 2335889 - RNA, 19 nt, Artificial Sequence
  Description of Artificial Sequence: Synthetic oligonucleotide
  Antisense strand to SEQ ID NO: 2335888
cuucaagauagcuaagaau

SEQ ID NO: 2335890 - RNA, 19 nt, Artificial Sequence
  Description of Artificial Sequence: Synthetic oligonucleotide
  Sense strand starting at position 247 of SEQ ID NO: 1885353
cuuagcuaucuugaaguca

SEQ ID NO: 2335891 - RNA, 19 nt, Artificial Sequence
  Description of Artificial Sequence: Synthetic oligonucleotide
  Antisense strand to SEQ ID NO: 2335890
ugacuucaagauagcuaag

SEQ ID NO: 2335892 - RNA, 19 nt, Artificial Sequence
  Description of Artificial Sequence: Synthetic oligonucleotide
  Sense strand starting at position 562 of SEQ ID NO: 1885353
aguuuacaucaguacugga

SEQ ID NO: 2335893 - RNA, 19 nt, Artificial Sequence
  Description of Artificial Sequence: Synthetic oligonucleotide
  Antisense strand to SEQ ID NO: 2335892
uccaguacugauguaaacu

SEQ ID NO: 2335894 - RNA, 19 nt, Artificial Sequence
  Description of Artificial Sequence: Synthetic oligonucleotide
  Sense strand starting at position 570 of SEQ ID NO: 1885353
ucaguacuggaauguaauu

SEQ ID NO: 2335895 - RNA, 19 nt, Artificial Sequence
  Description of Artificial Sequence: Synthetic oligonucleotide
  Antisense strand to SEQ ID NO: 2335894
aauuacauuccaguacuga

SEQ ID NO: 2335896 - RNA, 19 nt, Artificial Sequence
  Description of Artificial Sequence: Synthetic oligonucleotide
  Sense strand starting at position 580 of SEQ ID NO: 1885353
aauguaauuugguaagcau

SEQ ID NO: 2335897 - RNA, 19 nt, Artificial Sequence
  Description of Artificial Sequence: Synthetic oligonucleotide
  Antisense strand to SEQ ID NO: 2335896
augcuuaccaaauuacauu

SEQ ID NO: 2335898 - RNA, 19 nt, Artificial Sequence
  Description of Artificial Sequence: Synthetic oligonucleotide
  Sense strand starting at position 699 of SEQ ID NO: 1885353
guguaucuguagguauaca

SEQ ID NO: 2335899 - RNA, 19 nt, Artificial Sequence
  Description of Artificial Sequence: Synthetic oligonucleotide
  Antisense strand to SEQ ID NO: 2335898
uguauaccuacagauacac

SEQ ID NO: 2335900 - RNA, 19 nt, Artificial Sequence
  Description of Artificial Sequence: Synthetic oligonucleotide
  Sense strand starting at position 759 of SEQ ID NO: 1885353
cuggauggaaauugugauu

SEQ ID NO: 2335901 - RNA, 19 nt, Artificial Sequence
  Description of Artificial Sequence: Synthetic oligonucleotide
  Antisense strand to SEQ ID NO: 2335900
aaucacaauuuccauccag

SEQ ID NO: 2335902 - RNA, 19 nt, Artificial Sequence
  Description of Artificial Sequence: Synthetic oligonucleotide
  Sense strand starting at position 958 of SEQ ID NO: 1885353
uuaagugccuagucacaua

SEQ ID NO: 2335903 - RNA, 19 nt, Artificial Sequence
  Description of Artificial Sequence: Synthetic oligonucleotide
  Antisense strand to SEQ ID NO: 2335902
uaugugacuaggcacuuaa

SEQ ID NO: 2335904 - RNA, 19 nt, Artificial Sequence
  Description of Artificial Sequence: Synthetic oligonucleotide
  Sense strand starting at position 1102 of SEQ ID NO: 1885353
uaucguugguucuuauaag

SEQ ID NO: 2335905 - RNA, 19 nt, Artificial Sequence
  Description of Artificial Sequence: Synthetic oligonucleotide
  Antisense strand to SEQ ID NO: 2335904
cuuauaagaaccaacgaua

SEQ ID NO: 2335906 - RNA, 19 nt, Artificial Sequence
  Description of Artificial Sequence: Synthetic oligonucleotide
  Sense strand starting at position 1181 of SEQ ID NO: 1885353
gugcauccucaaggauaag

SEQ ID NO: 2335907 - RNA, 19 nt, Artificial Sequence
  Description of Artificial Sequence: Synthetic oligonucleotide
  Antisense strand to SEQ ID NO: 2335906
cuuauccuugaggaugcac

SEQ ID NO: 2335908 - RNA, 19 nt, Artificial Sequence
  Description of Artificial Sequence: Synthetic oligonucleotide
  Sense strand starting at position 1389 of SEQ ID NO: 1885353
cauagaaguuuaguuugau

SEQ ID NO: 2335909 - RNA, 19 nt, Artificial Sequence
  Description of Artificial Sequence: Synthetic oligonucleotide
  Antisense strand to SEQ ID NO: 2335908
aucaaacuaaacuucuaug

SEQ ID NO: 2335910 - RNA, 19 nt, Artificial Sequence
  Description of Artificial Sequence: Synthetic oligonucleotide
  Sense strand starting at position 1419 of SEQ ID NO: 1885353
cuguguucucuuuaaccuu

SEQ ID NO: 2335911 - RNA, 19 nt, Artificial Sequence
  Description of Artificial Sequence: Synthetic oligonucleotide
  Antisense strand to SEQ ID NO: 2335910
aagguuaaagagaacacag

SEQ ID NO: 2335912 - RNA, 19 nt, Artificial Sequence
  Description of Artificial Sequence: Synthetic oligonucleotide
  Sense strand starting at position 1438 of SEQ ID NO: 1885353
uugaaacacuugcuaauga

SEQ ID NO: 2335913 - RNA, 19 nt, Artificial Sequence
  Description of Artificial Sequence: Synthetic oligonucleotide
  Antisense strand to SEQ ID NO: 2335912
ucauuagcaaguguuucaa

SEQ ID NO: 2335914 - RNA, 19 nt, Artificial Sequence
  Description of Artificial Sequence: Synthetic oligonucleotide
  Sense strand starting at position 1516 of SEQ ID NO: 1885353
augaaaguucuuuagucuc

SEQ ID NO: 2335915 - RNA, 19 nt, Artificial Sequence
  Description of Artificial Sequence: Synthetic oligonucleotide
  Antisense strand to SEQ ID NO: 2335914
gagacuaaagaacuuucau

SEQ ID NO: 2335916 - RNA, 19 nt, Artificial Sequence
  Description of Artificial Sequence: Synthetic oligonucleotide
  Sense strand starting at position 1550 of SEQ ID NO: 1885353
cgaagaagucacugaguga

SEQ ID NO: 2335917 - RNA, 19 nt, Artificial Sequence
  Description of Artificial Sequence: Synthetic oligonucleotide
  Antisense strand to SEQ ID NO: 2335916
ucacucagugacuucuucg

SEQ ID NO: 2335918 - RNA, 19 nt, Artificial Sequence
  Description of Artificial Sequence: Synthetic oligonucleotide
  Sense strand starting at position 1554 of SEQ ID NO: 1885353
gaagucacugagugaggau

SEQ ID NO: 2335919 - RNA, 19 nt, Artificial Sequence
  Description of Artificial Sequence: Synthetic oligonucleotide
  Antisense strand to SEQ ID NO: 2335918
auccucacucagugacuuc

SEQ ID NO: 2335920 - RNA, 19 nt, Artificial Sequence
  Description of Artificial Sequence: Synthetic oligonucleotide
  Sense strand starting at position 1589 of SEQ ID NO: 1885353
uugugacuugccuaugacu

SEQ ID NO: 2335921 - RNA, 19 nt, Artificial Sequence
  Description of Artificial Sequence: Synthetic oligonucleotide
  Antisense strand to SEQ ID NO: 2335920
agucauaggcaagucacaa

SEQ ID NO: 2335922 - RNA, 19 nt, Artificial Sequence
  Description of Artificial Sequence: Synthetic oligonucleotide
  Sense strand starting at position 1591 of SEQ ID NO: 1885353
gugacuugccuaugacuug

SEQ ID NO: 2335923 - RNA, 19 nt, Artificial Sequence
  Description of Artificial Sequence: Synthetic oligonucleotide
  Antisense strand to SEQ ID NO: 2335922
caagucauaggcaagucac

SEQ ID NO: 2335924 - RNA, 19 nt, Artificial Sequence
  Description of Artificial Sequence: Synthetic oligonucleotide
  Sense strand starting at position 1600 of SEQ ID NO: 1885353
cuaugacuugcuuguuaug

SEQ ID NO: 2335925 - RNA, 19 nt, Artificial Sequence
  Description of Artificial Sequence: Synthetic oligonucleotide
  Antisense strand to SEQ ID NO: 2335924
cauaacaagcaagucauag

SEQ ID NO: 2335926 - RNA, 19 nt, Artificial Sequence
  Description of Artificial Sequence: Synthetic oligonucleotide
  Sense strand starting at position 1602 of SEQ ID NO: 1885353
augacuugcuuguuaugau

SEQ ID NO: 2335927 - RNA, 19 nt, Artificial Sequence
  Description of Artificial Sequence: Synthetic oligonucleotide
  Antisense strand to SEQ ID NO: 2335926
aucauaacaagcaagucau

SEQ ID NO: 2335928 - RNA, 19 nt, Artificial Sequence
  Description of Artificial Sequence: Synthetic oligonucleotide
  Sense strand starting at position 1635 of SEQ ID NO: 1885353
agauuuacuuuggaaccua

SEQ ID NO: 2335929 - RNA, 19 nt, Artificial Sequence
  Description of Artificial Sequence: Synthetic oligonucleotide
  Antisense strand to SEQ ID NO: 2335928
uagguuccaaaguaaaucu

SEQ ID NO: 2335930 - RNA, 19 nt, Artificial Sequence
  Description of Artificial Sequence: Synthetic oligonucleotide
  Sense strand starting at position 1724 of SEQ ID NO: 1885353
acuuaucaucgcuaagagu

SEQ ID NO: 2335931 - RNA, 19 nt, Artificial Sequence
  Description of Artificial Sequence: Synthetic oligonucleotide
  Antisense strand to SEQ ID NO: 2335930
acucuuagcgaugauaagu

SEQ ID NO: 2335932 - RNA, 19 nt, Artificial Sequence
  Description of Artificial Sequence: Synthetic oligonucleotide
  Sense strand starting at position 1735 of SEQ ID NO: 1885353
cuaagaguccuuuguaaua

SEQ ID NO: 2335933 - RNA, 19 nt, Artificial Sequence
  Description of Artificial Sequence: Synthetic oligonucleotide
  Antisense strand to SEQ ID NO: 2335932
uauuacaaaggacucuuag

SEQ ID NO: 2335934 - RNA, 19 nt, Artificial Sequence
  Description of Artificial Sequence: Synthetic oligonucleotide
  Sense strand starting at position 1855 of SEQ ID NO: 1885353
ggaucaaguaagugcuaca

SEQ ID NO: 2335935 - RNA, 19 nt, Artificial Sequence
  Description of Artificial Sequence: Synthetic oligonucleotide
  Antisense strand to SEQ ID NO: 2335934
uguagcacuuacuugaucc

SEQ ID NO: 2335936 - RNA, 19 nt, Artificial Sequence
  Description of Artificial Sequence: Synthetic oligonucleotide
  Sense strand starting at position 1944 of SEQ ID NO: 1885353
cuugaauuacuuuggcuca

SEQ ID NO: 2335937 - RNA, 19 nt, Artificial Sequence
  Description of Artificial Sequence: Synthetic oligonucleotide
  Antisense strand to SEQ ID NO: 2335936
ugagccaaaguaauucaag

SEQ ID NO: 2335938 - RNA, 19 nt, Artificial Sequence
  Description of Artificial Sequence: Synthetic oligonucleotide
  Sense strand starting at position 1946 of SEQ ID NO: 1885353
ugaauuacuuuggcucaga

SEQ ID NO: 2335939 - RNA, 19 nt, Artificial Sequence
  Description of Artificial Sequence: Synthetic oligonucleotide
  Antisense strand to SEQ ID NO: 2335938
ucugagccaaaguaauuca

SEQ ID NO: 2335940 - RNA, 19 nt, Artificial Sequence
  Description of Artificial Sequence: Synthetic oligonucleotide
  Sense strand starting at position 1949 of SEQ ID NO: 1885353
auuacuuuggcucagauaa

SEQ ID NO: 2335941 - RNA, 19 nt, Artificial Sequence
  Description of Artificial Sequence: Synthetic oligonucleotide
  Antisense strand to SEQ ID NO: 2335940
uuaucugagccaaaguaau

SEQ ID NO: 2335942 - RNA, 19 nt, Artificial Sequence
  Description of Artificial Sequence: Synthetic oligonucleotide
  Sense strand starting at position 2062 of SEQ ID NO: 1885353
ugaagauguuguccuauga

SEQ ID NO: 2335943 - RNA, 19 nt, Artificial Sequence
  Description of Artificial Sequence: Synthetic oligonucleotide
  Antisense strand to SEQ ID NO: 2335942
ucauaggacaacaucuuca

SEQ ID NO: 2335944 - RNA, 19 nt, Artificial Sequence
  Description of Artificial Sequence: Synthetic oligonucleotide
  Sense strand starting at position 2097 of SEQ ID NO: 1885353
acacauuauguaugauaca

SEQ ID NO: 2335945 - RNA, 19 nt, Artificial Sequence
  Description of Artificial Sequence: Synthetic oligonucleotide
  Antisense strand to SEQ ID NO: 2335944
uguaucauacauaaugugu

SEQ ID NO: 2335946 - RNA, 19 nt, Artificial Sequence
  Description of Artificial Sequence: Synthetic oligonucleotide
  Sense strand starting at position 2247 of SEQ ID NO: 1885353
guuauuguaguguuaugcu

SEQ ID NO: 2335947 - RNA, 19 nt, Artificial Sequence
  Description of Artificial Sequence: Synthetic oligonucleotide
  Antisense strand to SEQ ID NO: 2335946
agcauaacacuacaauaac

SEQ ID NO: 2335948 - RNA, 19 nt, Artificial Sequence
  Description of Artificial Sequence: Synthetic oligonucleotide
  Sense strand starting at position 2306 of SEQ ID NO: 1885353
auggaaugguaagcaauua

SEQ ID NO: 2335949 - RNA, 19 nt, Artificial Sequence
  Description of Artificial Sequence: Synthetic oligonucleotide
  Antisense strand to SEQ ID NO: 2335948
uaauugcuuaccauuccau

SEQ ID NO: 2335950 - RNA, 19 nt, Artificial Sequence
  Description of Artificial Sequence: Synthetic oligonucleotide
  Sense strand starting at position 2349 of SEQ ID NO: 1885353
gcuagauuccaugaagcaa

SEQ ID NO: 2335951 - RNA, 19 nt, Artificial Sequence
  Description of Artificial Sequence: Synthetic oligonucleotide
  Antisense strand to SEQ ID NO: 2335950
uugcuucauggaaucuagc

SEQ ID NO: 2335952 - RNA, 19 nt, Artificial Sequence
  Description of Artificial Sequence: Synthetic oligonucleotide
  Sense strand starting at position 2456 of SEQ ID NO: 1885353
aguagagaguacuuuccau

SEQ ID NO: 2335953 - RNA, 19 nt, Artificial Sequence
  Description of Artificial Sequence: Synthetic oligonucleotide
  Antisense strand to SEQ ID NO: 2335952
auggaaaguacucucuacu

SEQ ID NO: 2335954 - RNA, 19 nt, Artificial Sequence
  Description of Artificial Sequence: Synthetic oligonucleotide
  Sense strand starting at position 2513 of SEQ ID NO: 1885353
uugucaaauuuccauaagu

SEQ ID NO: 2335955 - RNA, 19 nt, Artificial Sequence
  Description of Artificial Sequence: Synthetic oligonucleotide
  Antisense strand to SEQ ID NO: 2335954
acuuauggaaauuugacaa

SEQ ID NO: 2335956 - RNA, 19 nt, Artificial Sequence
  Description of Artificial Sequence: Synthetic oligonucleotide
  Sense strand starting at position 2575 of SEQ ID NO: 1885353
uuccuuagggaucaugcaa

SEQ ID NO: 2335957 - RNA, 19 nt, Artificial Sequence
  Description of Artificial Sequence: Synthetic oligonucleotide
  Antisense strand to SEQ ID NO: 2335956
uugcaugaucccuaaggaa

SEQ ID NO: 2335958 - RNA, 19 nt, Artificial Sequence
  Description of Artificial Sequence: Synthetic oligonucleotide
  Sense strand starting at position 2640 of SEQ ID NO: 1885353
gcaaauacccuuggguaga

SEQ ID NO: 2335959 - RNA, 19 nt, Artificial Sequence
  Description of Artificial Sequence: Synthetic oligonucleotide
  Antisense strand to SEQ ID NO: 2335958
ucuacccaaggguauuugc

SEQ ID NO: 2335960 - RNA, 19 nt, Artificial Sequence
  Description of Artificial Sequence: Synthetic oligonucleotide
  Sense strand starting at position 2754 of SEQ ID NO: 1885353
ucaaaucuguuguuaaucu

SEQ ID NO: 2335961 - RNA, 19 nt, Artificial Sequence
  Description of Artificial Sequence: Synthetic oligonucleotide
  Antisense strand to SEQ ID NO: 2335960
agauuaacaacagauuuga

SEQ ID NO: 2335962 - RNA, 19 nt, Artificial Sequence
  Description of Artificial Sequence: Synthetic oligonucleotide
  Sense strand starting at position 2826 of SEQ ID NO: 1885353
uuuccaaaugguuagaagu

SEQ ID NO: 2335963 - RNA, 19 nt, Artificial Sequence
  Description of Artificial Sequence: Synthetic oligonucleotide
  Antisense strand to SEQ ID NO: 2335962
acuucuaaccauuuggaaa

SEQ ID NO: 2335964 - RNA, 19 nt, Artificial Sequence
  Description of Artificial Sequence: Synthetic oligonucleotide
  Sense strand starting at position 3587 of SEQ ID NO: 1885353
gggccagauaagggugaau

SEQ ID NO: 2335965 - RNA, 19 nt, Artificial Sequence
  Description of Artificial Sequence: Synthetic oligonucleotide
  Antisense strand to SEQ ID NO: 2335964
auucacccuuaucuggccc

SEQ ID NO: 2335966 - RNA, 19 nt, Artificial Sequence
  Description of Artificial Sequence: Synthetic oligonucleotide
  Sense strand starting at position 3589 of SEQ ID NO: 1885353
gccagauaagggugaauac

SEQ ID NO: 2335967 - RNA, 19 nt, Artificial Sequence
  Description of Artificial Sequence: Synthetic oligonucleotide
  Antisense strand to SEQ ID NO: 2335966
guauucacccuuaucuggc

SEQ ID NO: 2335968 - RNA, 19 nt, Artificial Sequence
  Description of Artificial Sequence: Synthetic oligonucleotide
  Sense strand starting at position 73 of SEQ ID NO: 1885354
ccugccuuggccugagauu

SEQ ID NO: 2335969 - RNA, 19 nt, Artificial Sequence
  Description of Artificial Sequence: Synthetic oligonucleotide
  Antisense strand to SEQ ID NO: 2335968
aaucucaggccaaggcagg

SEQ ID NO: 2335970 - RNA, 19 nt, Artificial Sequence
  Description of Artificial Sequence: Synthetic oligonucleotide
  Sense strand starting at position 74 of SEQ ID NO: 1885354
cugccuuggccugagauua

SEQ ID NO: 2335971 - RNA, 19 nt, Artificial Sequence
  Description of Artificial Sequence: Synthetic oligonucleotide
  Antisense strand to SEQ ID NO: 2335970
uaaucucaggccaaggcag

SEQ ID NO: 2335972 - RNA, 19 nt, Artificial Sequence
  Description of Artificial Sequence: Synthetic oligonucleotide
  Sense strand starting at position 353 of SEQ ID NO: 1885354
gcgcgaucugggcucauua

SEQ ID NO: 2335973 - RNA, 19 nt, Artificial Sequence
  Description of Artificial Sequence: Synthetic oligonucleotide
  Antisense strand to SEQ ID NO: 2335972
uaaugagcccagaucgcgc

SEQ ID NO: 2335974 - RNA, 19 nt, Artificial Sequence
  Description of Artificial Sequence: Synthetic oligonucleotide
  Sense strand starting at position 355 of SEQ ID NO: 1885354
gcgaucugggcucauuaca

SEQ ID NO: 2335975 - RNA, 19 nt, Artificial Sequence
  Description of Artificial Sequence: Synthetic oligonucleotide
  Antisense strand to SEQ ID NO: 2335974
uguaaugagcccagaucgc

SEQ ID NO: 2335976 - RNA, 19 nt, Artificial Sequence
  Description of Artificial Sequence: Synthetic oligonucleotide
  Sense strand starting at position 995 of SEQ ID NO: 1885354
uuggucuuacucugaguua

SEQ ID NO: 2335977 - RNA, 19 nt, Artificial Sequence
  Description of Artificial Sequence: Synthetic oligonucleotide
  Antisense strand to SEQ ID NO: 2335976
uaacucagaguaagaccaa

SEQ ID NO: 2335978 - RNA, 19 nt, Artificial Sequence
  Description of Artificial Sequence: Synthetic oligonucleotide
  Sense strand starting at position 998 of SEQ ID NO: 1885354
gucuuacucugaguuaaau

SEQ ID NO: 2335979 - RNA, 19 nt, Artificial Sequence
  Description of Artificial Sequence: Synthetic oligonucleotide
  Antisense strand to SEQ ID NO: 2335978
auuuaacucagaguaagac

SEQ ID NO: 2335980 - RNA, 19 nt, Artificial Sequence
  Description of Artificial Sequence: Synthetic oligonucleotide
  Sense strand starting at position 1077 of SEQ ID NO: 1885354
aucuuuggcuaaggauuua

SEQ ID NO: 2335981 - RNA, 19 nt, Artificial Sequence
  Description of Artificial Sequence: Synthetic oligonucleotide
  Antisense strand to SEQ ID NO: 2335980
uaaauccuuagccaaagau

SEQ ID NO: 2335982 - RNA, 19 nt, Artificial Sequence
  Description of Artificial Sequence: Synthetic oligonucleotide
  Sense strand starting at position 1171 of SEQ ID NO: 1885354
aucugugauguguagcaaa

SEQ ID NO: 2335983 - RNA, 19 nt, Artificial Sequence
  Description of Artificial Sequence: Synthetic oligonucleotide
  Antisense strand to SEQ ID NO: 2335982
uuugcuacacaucacagau

SEQ ID NO: 2335984 - RNA, 19 nt, Artificial Sequence
  Description of Artificial Sequence: Synthetic oligonucleotide
  Sense strand starting at position 1203 of SEQ ID NO: 1885354
guguuuccuuagcuaucca

SEQ ID NO: 2335985 - RNA, 19 nt, Artificial Sequence
  Description of Artificial Sequence: Synthetic oligonucleotide
  Antisense strand to SEQ ID NO: 2335984
uggauagcuaaggaaacac

SEQ ID NO: 2335986 - RNA, 19 nt, Artificial Sequence
  Description of Artificial Sequence: Synthetic oligonucleotide
  Sense strand starting at position 1226 of SEQ ID NO: 1885354
guggguuggucacuuguaa

SEQ ID NO: 2335987 - RNA, 19 nt, Artificial Sequence
  Description of Artificial Sequence: Synthetic oligonucleotide
  Antisense strand to SEQ ID NO: 2335986
uuacaagugaccaacccac

SEQ ID NO: 2335988 - RNA, 19 nt, Artificial Sequence
  Description of Artificial Sequence: Synthetic oligonucleotide
  Sense strand starting at position 1260 of SEQ ID NO: 1885354
uaaaguuaugguuaagugu

SEQ ID NO: 2335989 - RNA, 19 nt, Artificial Sequence
  Description of Artificial Sequence: Synthetic oligonucleotide
  Antisense strand to SEQ ID NO: 2335988
acacuuaaccauaacuuua

SEQ ID NO: 2335990 - RNA, 19 nt, Artificial Sequence
  Description of Artificial Sequence: Synthetic oligonucleotide
  Sense strand starting at position 1496 of SEQ ID NO: 1885354
cugaauuaaugucuauguu

SEQ ID NO: 2335991 - RNA, 19 nt, Artificial Sequence
  Description of Artificial Sequence: Synthetic oligonucleotide
  Antisense strand to SEQ ID NO: 2335990
aacauagacauuaauucag

SEQ ID NO: 2335992 - RNA, 19 nt, Artificial Sequence
  Description of Artificial Sequence: Synthetic oligonucleotide
  Sense strand starting at position 1497 of SEQ ID NO: 1885354
ugaauuaaugucuauguug

SEQ ID NO: 2335993 - RNA, 19 nt, Artificial Sequence
  Description of Artificial Sequence: Synthetic oligonucleotide
  Antisense strand to SEQ ID NO: 2335992
caacauagacauuaauuca

SEQ ID NO: 2335994 - RNA, 19 nt, Artificial Sequence
  Description of Artificial Sequence: Synthetic oligonucleotide
  Sense strand starting at position 1761 of SEQ ID NO: 1885354
uguagaguauggucaaccu

SEQ ID NO: 2335995 - RNA, 19 nt, Artificial Sequence
  Description of Artificial Sequence: Synthetic oligonucleotide
  Antisense strand to SEQ ID NO: 2335994
agguugaccauacucuaca

SEQ ID NO: 2335996 - RNA, 19 nt, Artificial Sequence
  Description of Artificial Sequence: Synthetic oligonucleotide
  Sense strand starting at position 1984 of SEQ ID NO: 1885354
gcuacuuuacuccaagguu

SEQ ID NO: 2335997 - RNA, 19 nt, Artificial Sequence
  Description of Artificial Sequence: Synthetic oligonucleotide
  Antisense strand to SEQ ID NO: 2335996
aaccuuggaguaaaguagc

SEQ ID NO: 2335998 - RNA, 19 nt, Artificial Sequence
  Description of Artificial Sequence: Synthetic oligonucleotide
  Sense strand starting at position 2019 of SEQ ID NO: 1885354
cacauucgcgccuaaagaa

SEQ ID NO: 2335999 - RNA, 19 nt, Artificial Sequence
  Description of Artificial Sequence: Synthetic oligonucleotide
  Antisense strand to SEQ ID NO: 2335998
uucuuuaggcgcgaaugug

SEQ ID NO: 2336000 - RNA, 19 nt, Artificial Sequence
  Description of Artificial Sequence: Synthetic oligonucleotide
  Sense strand starting at position 2202 of SEQ ID NO: 1885354
agcacagugcuauagguua

SEQ ID NO: 2336001 - RNA, 19 nt, Artificial Sequence
  Description of Artificial Sequence: Synthetic oligonucleotide
  Antisense strand to SEQ ID NO: 2336000
uaaccuauagcacugugcu

SEQ ID NO: 2336002 - RNA, 19 nt, Artificial Sequence
  Description of Artificial Sequence: Synthetic oligonucleotide
  Sense strand starting at position 2207 of SEQ ID NO: 1885354
agugcuauagguuaggaaa

SEQ ID NO: 2336003 - RNA, 19 nt, Artificial Sequence
  Description of Artificial Sequence: Synthetic oligonucleotide
  Antisense strand to SEQ ID NO: 2336002
uuuccuaaccuauagcacu

SEQ ID NO: 2336004 - RNA, 19 nt, Artificial Sequence
  Description of Artificial Sequence: Synthetic oligonucleotide
  Sense strand starting at position 2254 of SEQ ID NO: 1885354
gcauuuauuugcuaugcca

SEQ ID NO: 2336005 - RNA, 19 nt, Artificial Sequence
  Description of Artificial Sequence: Synthetic oligonucleotide
  Antisense strand to SEQ ID NO: 2336004
uggcauagcaaauaaaugc

SEQ ID NO: 2336006 - RNA, 19 nt, Artificial Sequence
  Description of Artificial Sequence: Synthetic oligonucleotide
  Sense strand starting at position 2270 of SEQ ID NO: 1885354
ccaacuuaacagggcaaua

SEQ ID NO: 2336007 - RNA, 19 nt, Artificial Sequence
  Description of Artificial Sequence: Synthetic oligonucleotide
  Antisense strand to SEQ ID NO: 2336006
uauugcccuguuaaguugg

SEQ ID NO: 2336008 - RNA, 19 nt, Artificial Sequence
  Description of Artificial Sequence: Synthetic oligonucleotide
  Sense strand starting at position 2371 of SEQ ID NO: 1885354
uuugaucuuuaccuuggua

SEQ ID NO: 2336009 - RNA, 19 nt, Artificial Sequence
  Description of Artificial Sequence: Synthetic oligonucleotide
  Antisense strand to SEQ ID NO: 2336008
uaccaagguaaagaucaaa

SEQ ID NO: 2336010 - RNA, 19 nt, Artificial Sequence
  Description of Artificial Sequence: Synthetic oligonucleotide
  Sense strand starting at position 2373 of SEQ ID NO: 1885354
ugaucuuuaccuugguaaa

SEQ ID NO: 2336011 - RNA, 19 nt, Artificial Sequence
  Description of Artificial Sequence: Synthetic oligonucleotide
  Antisense strand to SEQ ID NO: 2336010
uuuaccaagguaaagauca

SEQ ID NO: 2336012 - RNA, 19 nt, Artificial Sequence
  Description of Artificial Sequence: Synthetic oligonucleotide
  Sense strand starting at position 2709 of SEQ ID NO: 1885354
acuagaaguucucuuagag

SEQ ID NO: 2336013 - RNA, 19 nt, Artificial Sequence
  Description of Artificial Sequence: Synthetic oligonucleotide
  Antisense strand to SEQ ID NO: 2336012
cucuaagagaacuucuagu

SEQ ID NO: 2336014 - RNA, 19 nt, Artificial Sequence
  Description of Artificial Sequence: Synthetic oligonucleotide
  Sense strand starting at position 2718 of SEQ ID NO: 1885354
ucucuuagaguuggauauc

SEQ ID NO: 2336015 - RNA, 19 nt, Artificial Sequence
  Description of Artificial Sequence: Synthetic oligonucleotide
  Antisense strand to SEQ ID NO: 2336014
gauauccaacucuaagaga

SEQ ID NO: 2336016 - RNA, 19 nt, Artificial Sequence
  Description of Artificial Sequence: Synthetic oligonucleotide
  Sense strand starting at position 2729 of SEQ ID NO: 1885354
uggauaucauuugauacag

SEQ ID NO: 2336017 - RNA, 19 nt, Artificial Sequence
  Description of Artificial Sequence: Synthetic oligonucleotide
  Antisense strand to SEQ ID NO: 2336016
cuguaucaaaugauaucca

SEQ ID NO: 2336018 - RNA, 19 nt, Artificial Sequence
  Description of Artificial Sequence: Synthetic oligonucleotide
  Sense strand starting at position 2785 of SEQ ID NO: 1885354
augaauccuugggaugaug

SEQ ID NO: 2336019 - RNA, 19 nt, Artificial Sequence
  Description of Artificial Sequence: Synthetic oligonucleotide
  Antisense strand to SEQ ID NO: 2336018
caucaucccaaggauucau

SEQ ID NO: 2336020 - RNA, 19 nt, Artificial Sequence
  Description of Artificial Sequence: Synthetic oligonucleotide
  Sense strand starting at position 2793 of SEQ ID NO: 1885354
uugggaugaugaguuaauu

SEQ ID NO: 2336021 - RNA, 19 nt, Artificial Sequence
  Description of Artificial Sequence: Synthetic oligonucleotide
  Antisense strand to SEQ ID NO: 2336020
aauuaacucaucaucccaa

SEQ ID NO: 2336022 - RNA, 19 nt, Artificial Sequence
  Description of Artificial Sequence: Synthetic oligonucleotide
  Sense strand starting at position 3065 of SEQ ID NO: 1885354
agaauaguaaggugaugua

SEQ ID NO: 2336023 - RNA, 19 nt, Artificial Sequence
  Description of Artificial Sequence: Synthetic oligonucleotide
  Antisense strand to SEQ ID NO: 2336022
uacaucaccuuacuauucu

SEQ ID NO: 2336024 - RNA, 19 nt, Artificial Sequence
  Description of Artificial Sequence: Synthetic oligonucleotide
  Sense strand starting at position 3249 of SEQ ID NO: 1885354
gcuccuuauugucucaagu

SEQ ID NO: 2336025 - RNA, 19 nt, Artificial Sequence
  Description of Artificial Sequence: Synthetic oligonucleotide
  Antisense strand to SEQ ID NO: 2336024
acuugagacaauaaggagc

SEQ ID NO: 2336026 - RNA, 19 nt, Artificial Sequence
  Description of Artificial Sequence: Synthetic oligonucleotide
  Sense strand starting at position 3263 of SEQ ID NO: 1885354
caaguuucugcacaacguu

SEQ ID NO: 2336027 - RNA, 19 nt, Artificial Sequence
  Description of Artificial Sequence: Synthetic oligonucleotide
  Antisense strand to SEQ ID NO: 2336026
aacguugugcagaaacuug

SEQ ID NO: 2336028 - RNA, 19 nt, Artificial Sequence
  Description of Artificial Sequence: Synthetic oligonucleotide
  Sense strand starting at position 3312 of SEQ ID NO: 1885354
agaguaguuuccguaucuu

SEQ ID NO: 2336029 - RNA, 19 nt, Artificial Sequence
  Description of Artificial Sequence: Synthetic oligonucleotide
  Antisense strand to SEQ ID NO: 2336028
aagauacggaaacuacucu

SEQ ID NO: 2336030 - RNA, 19 nt, Artificial Sequence
  Description of Artificial Sequence: Synthetic oligonucleotide
  Sense strand starting at position 3349 of SEQ ID NO: 1885354
auuucuacaucugaguaag

SEQ ID NO: 2336031 - RNA, 19 nt, Artificial Sequence
  Description of Artificial Sequence: Synthetic oligonucleotide
  Antisense strand to SEQ ID NO: 2336030
cuuacucagauguagaaau

SEQ ID NO: 2336032 - RNA, 19 nt, Artificial Sequence
  Description of Artificial Sequence: Synthetic oligonucleotide
  Sense strand starting at position 3355 of SEQ ID NO: 1885354
acaucugaguaaguggaaa

SEQ ID NO: 2336033 - RNA, 19 nt, Artificial Sequence
  Description of Artificial Sequence: Synthetic oligonucleotide
  Antisense strand to SEQ ID NO: 2336032
uuuccacuuacucagaugu

SEQ ID NO: 2336034 - RNA, 19 nt, Artificial Sequence
  Description of Artificial Sequence: Synthetic oligonucleotide
  Sense strand starting at position 3376 of SEQ ID NO: 1885354
uuaggaguauacuuccuua

SEQ ID NO: 2336035 - RNA, 19 nt, Artificial Sequence
  Description of Artificial Sequence: Synthetic oligonucleotide
  Antisense strand to SEQ ID NO: 2336034
uaaggaaguauacuccuaa

SEQ ID NO: 2336036 - RNA, 19 nt, Artificial Sequence
  Description of Artificial Sequence: Synthetic oligonucleotide
  Sense strand starting at position 3379 of SEQ ID NO: 1885354
ggaguauacuuccuuaccu

SEQ ID NO: 2336037 - RNA, 19 nt, Artificial Sequence
  Description of Artificial Sequence: Synthetic oligonucleotide
  Antisense strand to SEQ ID NO: 2336036
agguaaggaaguauacucc

SEQ ID NO: 2336038 - RNA, 19 nt, Artificial Sequence
  Description of Artificial Sequence: Synthetic oligonucleotide
  Sense strand starting at position 3397 of SEQ ID NO: 1885354
ugguaaauggaccggaaau

SEQ ID NO: 2336039 - RNA, 19 nt, Artificial Sequence
  Description of Artificial Sequence: Synthetic oligonucleotide
  Antisense strand to SEQ ID NO: 2336038
auuuccgguccauuuacca

SEQ ID NO: 2336040 - RNA, 19 nt, Artificial Sequence
  Description of Artificial Sequence: Synthetic oligonucleotide
  Sense strand starting at position 3472 of SEQ ID NO: 1885354
guacucuguugcccaggau

SEQ ID NO: 2336041 - RNA, 19 nt, Artificial Sequence
  Description of Artificial Sequence: Synthetic oligonucleotide
  Antisense strand to SEQ ID NO: 2336040
auccugggcaacagaguac

SEQ ID NO: 2336042 - RNA, 19 nt, Artificial Sequence
  Description of Artificial Sequence: Synthetic oligonucleotide
  Sense strand starting at position 3537 of SEQ ID NO: 1885354
ggcuuaagugaucagucca

SEQ ID NO: 2336043 - RNA, 19 nt, Artificial Sequence
  Description of Artificial Sequence: Synthetic oligonucleotide
  Antisense strand to SEQ ID NO: 2336042
uggacugaucacuuaagcc

SEQ ID NO: 2336044 - RNA, 19 nt, Artificial Sequence
  Description of Artificial Sequence: Synthetic oligonucleotide
  Sense strand starting at position 3916 of SEQ ID NO: 1885354
caagauaaauccguuugca

SEQ ID NO: 2336045 - RNA, 19 nt, Artificial Sequence
  Description of Artificial Sequence: Synthetic oligonucleotide
  Antisense strand to SEQ ID NO: 2336044
ugcaaacggauuuaucuug

SEQ ID NO: 2336046 - RNA, 19 nt, Artificial Sequence
  Description of Artificial Sequence: Synthetic oligonucleotide
  Sense strand starting at position 3919 of SEQ ID NO: 1885354
gauaaauccguuugcauuc

SEQ ID NO: 2336047 - RNA, 19 nt, Artificial Sequence
  Description of Artificial Sequence: Synthetic oligonucleotide
  Antisense strand to SEQ ID NO: 2336046
gaaugcaaacggauuuauc

SEQ ID NO: 2336048 - RNA, 19 nt, Artificial Sequence
  Description of Artificial Sequence: Synthetic oligonucleotide
  Sense strand starting at position 51 of SEQ ID NO: 1885355
agugauucucccggguuca

SEQ ID NO: 2336049 - RNA, 19 nt, Artificial Sequence
  Description of Artificial Sequence: Synthetic oligonucleotide
  Antisense strand to SEQ ID NO: 2336048
ugaacccgggagaaucacu

SEQ ID NO: 2336050 - RNA, 19 nt, Artificial Sequence
  Description of Artificial Sequence: Synthetic oligonucleotide
  Sense strand starting at position 52 of SEQ ID NO: 1885355
gugauucucccggguucaa

SEQ ID NO: 2336051 - RNA, 19 nt, Artificial Sequence
  Description of Artificial Sequence: Synthetic oligonucleotide
  Antisense strand to SEQ ID NO: 2336050
uugaacccgggagaaucac

SEQ ID NO: 2336052 - RNA, 19 nt, Artificial Sequence
  Description of Artificial Sequence: Synthetic oligonucleotide
  Sense strand starting at position 213 of SEQ ID NO: 1885355
ccugccuuggccugagauu

SEQ ID NO: 2336053 - RNA, 19 nt, Artificial Sequence
  Description of Artificial Sequence: Synthetic oligonucleotide
  Antisense strand to SEQ ID NO: 2336052
aaucucaggccaaggcagg

SEQ ID NO: 2336054 - RNA, 19 nt, Artificial Sequence
  Description of Artificial Sequence: Synthetic oligonucleotide
  Sense strand starting at position 214 of SEQ ID NO: 1885355
cugccuuggccugagauua

SEQ ID NO: 2336055 - RNA, 19 nt, Artificial Sequence
  Description of Artificial Sequence: Synthetic oligonucleotide
  Antisense strand to SEQ ID NO: 2336054
uaaucucaggccaaggcag

SEQ ID NO: 2336056 - RNA, 19 nt, Artificial Sequence
  Description of Artificial Sequence: Synthetic oligonucleotide
  Sense strand starting at position 493 of SEQ ID NO: 1885355
gcgcgaucugggcucauua

SEQ ID NO: 2336057 - RNA, 19 nt, Artificial Sequence
  Description of Artificial Sequence: Synthetic oligonucleotide
  Antisense strand to SEQ ID NO: 2336056
uaaugagcccagaucgcgc

SEQ ID NO: 2336058 - RNA, 19 nt, Artificial Sequence
  Description of Artificial Sequence: Synthetic oligonucleotide
  Sense strand starting at position 495 of SEQ ID NO: 1885355
gcgaucugggcucauuaca

SEQ ID NO: 2336059 - RNA, 19 nt, Artificial Sequence
  Description of Artificial Sequence: Synthetic oligonucleotide
  Antisense strand to SEQ ID NO: 2336058
uguaaugagcccagaucgc

SEQ ID NO: 2336060 - RNA, 19 nt, Artificial Sequence
  Description of Artificial Sequence: Synthetic oligonucleotide
  Sense strand starting at position 1135 of SEQ ID NO: 1885355
uuggucuuacucugaguua

SEQ ID NO: 2336061 - RNA, 19 nt, Artificial Sequence
  Description of Artificial Sequence: Synthetic oligonucleotide
  Antisense strand to SEQ ID NO: 2336060
uaacucagaguaagaccaa

SEQ ID NO: 2336062 - RNA, 19 nt, Artificial Sequence
  Description of Artificial Sequence: Synthetic oligonucleotide
  Sense strand starting at position 1138 of SEQ ID NO: 1885355
gucuuacucugaguuaaau

SEQ ID NO: 2336063 - RNA, 19 nt, Artificial Sequence
  Description of Artificial Sequence: Synthetic oligonucleotide
  Antisense strand to SEQ ID NO: 2336062
auuuaacucagaguaagac

SEQ ID NO: 2336064 - RNA, 19 nt, Artificial Sequence
  Description of Artificial Sequence: Synthetic oligonucleotide
  Sense strand starting at position 1217 of SEQ ID NO: 1885355
aucuuuggcuaaggauuua

SEQ ID NO: 2336065 - RNA, 19 nt, Artificial Sequence
  Description of Artificial Sequence: Synthetic oligonucleotide
  Antisense strand to SEQ ID NO: 2336064
uaaauccuuagccaaagau

SEQ ID NO: 2336066 - RNA, 19 nt, Artificial Sequence
  Description of Artificial Sequence: Synthetic oligonucleotide
  Sense strand starting at position 1311 of SEQ ID NO: 1885355
aucugugauguguagcaaa

SEQ ID NO: 2336067 - RNA, 19 nt, Artificial Sequence
  Description of Artificial Sequence: Synthetic oligonucleotide
  Antisense strand to SEQ ID NO: 2336066
uuugcuacacaucacagau

SEQ ID NO: 2336068 - RNA, 19 nt, Artificial Sequence
  Description of Artificial Sequence: Synthetic oligonucleotide
  Sense strand starting at position 1343 of SEQ ID NO: 1885355
guguuuccuuagcuaucca

SEQ ID NO: 2336069 - RNA, 19 nt, Artificial Sequence
  Description of Artificial Sequence: Synthetic oligonucleotide
  Antisense strand to SEQ ID NO: 2336068
uggauagcuaaggaaacac

SEQ ID NO: 2336070 - RNA, 19 nt, Artificial Sequence
  Description of Artificial Sequence: Synthetic oligonucleotide
  Sense strand starting at position 1366 of SEQ ID NO: 1885355
guggguuggucacuuguaa

SEQ ID NO: 2336071 - RNA, 19 nt, Artificial Sequence
  Description of Artificial Sequence: Synthetic oligonucleotide
  Antisense strand to SEQ ID NO: 2336070
uuacaagugaccaacccac

SEQ ID NO: 2336072 - RNA, 19 nt, Artificial Sequence
  Description of Artificial Sequence: Synthetic oligonucleotide
  Sense strand starting at position 1400 of SEQ ID NO: 1885355
uaaaguuaugguuaagugu

SEQ ID NO: 2336073 - RNA, 19 nt, Artificial Sequence
  Description of Artificial Sequence: Synthetic oligonucleotide
  Antisense strand to SEQ ID NO: 2336072
acacuuaaccauaacuuua

SEQ ID NO: 2336074 - RNA, 19 nt, Artificial Sequence
  Description of Artificial Sequence: Synthetic oligonucleotide
  Sense strand starting at position 1636 of SEQ ID NO: 1885355
cugaauuaaugucuauguu

SEQ ID NO: 2336075 - RNA, 19 nt, Artificial Sequence
  Description of Artificial Sequence: Synthetic oligonucleotide
  Antisense strand to SEQ ID NO: 2336074
aacauagacauuaauucag

SEQ ID NO: 2336076 - RNA, 19 nt, Artificial Sequence
  Description of Artificial Sequence: Synthetic oligonucleotide
  Sense strand starting at position 1637 of SEQ ID NO: 1885355
ugaauuaaugucuauguug

SEQ ID NO: 2336077 - RNA, 19 nt, Artificial Sequence
  Description of Artificial Sequence: Synthetic oligonucleotide
  Antisense strand to SEQ ID NO: 2336076
caacauagacauuaauuca

SEQ ID NO: 2336078 - RNA, 19 nt, Artificial Sequence
  Description of Artificial Sequence: Synthetic oligonucleotide
  Sense strand starting at position 1901 of SEQ ID NO: 1885355
uguagaguauggucaaccu

SEQ ID NO: 2336079 - RNA, 19 nt, Artificial Sequence
  Description of Artificial Sequence: Synthetic oligonucleotide
  Antisense strand to SEQ ID NO: 2336078
agguugaccauacucuaca

SEQ ID NO: 2336080 - RNA, 19 nt, Artificial Sequence
  Description of Artificial Sequence: Synthetic oligonucleotide
  Sense strand starting at position 2124 of SEQ ID NO: 1885355
gcuacuuuacuccaagguu

SEQ ID NO: 2336081 - RNA, 19 nt, Artificial Sequence
  Description of Artificial Sequence: Synthetic oligonucleotide
  Antisense strand to SEQ ID NO: 2336080
aaccuuggaguaaaguagc

SEQ ID NO: 2336082 - RNA, 19 nt, Artificial Sequence
  Description of Artificial Sequence: Synthetic oligonucleotide
  Sense strand starting at position 2159 of SEQ ID NO: 1885355
cacauucgcgccuaaagaa

SEQ ID NO: 2336083 - RNA, 19 nt, Artificial Sequence
  Description of Artificial Sequence: Synthetic oligonucleotide
  Antisense strand to SEQ ID NO: 2336082
uucuuuaggcgcgaaugug

SEQ ID NO: 2336084 - RNA, 19 nt, Artificial Sequence
  Description of Artificial Sequence: Synthetic oligonucleotide
  Sense strand starting at position 2342 of SEQ ID NO: 1885355
agcacagugcuauagguua

SEQ ID NO: 2336085 - RNA, 19 nt, Artificial Sequence
  Description of Artificial Sequence: Synthetic oligonucleotide
  Antisense strand to SEQ ID NO: 2336084
uaaccuauagcacugugcu

SEQ ID NO: 2336086 - RNA, 19 nt, Artificial Sequence
  Description of Artificial Sequence: Synthetic oligonucleotide
  Sense strand starting at position 2347 of SEQ ID NO: 1885355
agugcuauagguuaggaaa

SEQ ID NO: 2336087 - RNA, 19 nt, Artificial Sequence
  Description of Artificial Sequence: Synthetic oligonucleotide
  Antisense strand to SEQ ID NO: 2336086
uuuccuaaccuauagcacu

SEQ ID NO: 2336088 - RNA, 19 nt, Artificial Sequence
  Description of Artificial Sequence: Synthetic oligonucleotide
  Sense strand starting at position 2394 of SEQ ID NO: 1885355
gcauuuauuugcuaugcca

SEQ ID NO: 2336089 - RNA, 19 nt, Artificial Sequence
  Description of Artificial Sequence: Synthetic oligonucleotide
  Antisense strand to SEQ ID NO: 2336088
uggcauagcaaauaaaugc

SEQ ID NO: 2336090 - RNA, 19 nt, Artificial Sequence
  Description of Artificial Sequence: Synthetic oligonucleotide
  Sense strand starting at position 2410 of SEQ ID NO: 1885355
ccaacuuaacagggcaaua

SEQ ID NO: 2336091 - RNA, 19 nt, Artificial Sequence
  Description of Artificial Sequence: Synthetic oligonucleotide
  Antisense strand to SEQ ID NO: 2336090
uauugcccuguuaaguugg

SEQ ID NO: 2336092 - RNA, 19 nt, Artificial Sequence
  Description of Artificial Sequence: Synthetic oligonucleotide
  Sense strand starting at position 2511 of SEQ ID NO: 1885355
uuugaucuuuaccuuggua

SEQ ID NO: 2336093 - RNA, 19 nt, Artificial Sequence
  Description of Artificial Sequence: Synthetic oligonucleotide
  Antisense strand to SEQ ID NO: 2336092
uaccaagguaaagaucaaa

SEQ ID NO: 2336094 - RNA, 19 nt, Artificial Sequence
  Description of Artificial Sequence: Synthetic oligonucleotide
  Sense strand starting at position 2513 of SEQ ID NO: 1885355
ugaucuuuaccuugguaaa

SEQ ID NO: 2336095 - RNA, 19 nt, Artificial Sequence
  Description of Artificial Sequence: Synthetic oligonucleotide
  Antisense strand to SEQ ID NO: 2336094
uuuaccaagguaaagauca

SEQ ID NO: 2336096 - RNA, 19 nt, Artificial Sequence
  Description of Artificial Sequence: Synthetic oligonucleotide
  Sense strand starting at position 2849 of SEQ ID NO: 1885355
acuagaaguucucuuagag

SEQ ID NO: 2336097 - RNA, 19 nt, Artificial Sequence
  Description of Artificial Sequence: Synthetic oligonucleotide
  Antisense strand to SEQ ID NO: 2336096
cucuaagagaacuucuagu

SEQ ID NO: 2336098 - RNA, 19 nt, Artificial Sequence
  Description of Artificial Sequence: Synthetic oligonucleotide
  Sense strand starting at position 2858 of SEQ ID NO: 1885355
ucucuuagaguuggauauc

SEQ ID NO: 2336099 - RNA, 19 nt, Artificial Sequence
  Description of Artificial Sequence: Synthetic oligonucleotide
  Antisense strand to SEQ ID NO: 2336098
gauauccaacucuaagaga

SEQ ID NO: 2336100 - RNA, 19 nt, Artificial Sequence
  Description of Artificial Sequence: Synthetic oligonucleotide
  Sense strand starting at position 2869 of SEQ ID NO: 1885355
uggauaucauuugauacag

SEQ ID NO: 2336101 - RNA, 19 nt, Artificial Sequence
  Description of Artificial Sequence: Synthetic oligonucleotide
  Antisense strand to SEQ ID NO: 2336100
cuguaucaaaugauaucca

SEQ ID NO: 2336102 - RNA, 19 nt, Artificial Sequence
  Description of Artificial Sequence: Synthetic oligonucleotide
  Sense strand starting at position 2925 of SEQ ID NO: 1885355
augaauccuugggaugaug

SEQ ID NO: 2336103 - RNA, 19 nt, Artificial Sequence
  Description of Artificial Sequence: Synthetic oligonucleotide
  Antisense strand to SEQ ID NO: 2336102
caucaucccaaggauucau

SEQ ID NO: 2336104 - RNA, 19 nt, Artificial Sequence
  Description of Artificial Sequence: Synthetic oligonucleotide
  Sense strand starting at position 2933 of SEQ ID NO: 1885355
uugggaugaugaguuaauu

SEQ ID NO: 2336105 - RNA, 19 nt, Artificial Sequence
  Description of Artificial Sequence: Synthetic oligonucleotide
  Antisense strand to SEQ ID NO: 2336104
aauuaacucaucaucccaa

SEQ ID NO: 2336106 - RNA, 19 nt, Artificial Sequence
  Description of Artificial Sequence: Synthetic oligonucleotide
  Sense strand starting at position 3205 of SEQ ID NO: 1885355
agaauaguaaggugaugua

SEQ ID NO: 2336107 - RNA, 19 nt, Artificial Sequence
  Description of Artificial Sequence: Synthetic oligonucleotide
  Antisense strand to SEQ ID NO: 2336106
uacaucaccuuacuauucu

SEQ ID NO: 2336108 - RNA, 19 nt, Artificial Sequence
  Description of Artificial Sequence: Synthetic oligonucleotide
  Sense strand starting at position 3389 of SEQ ID NO: 1885355
gcuccuuauugucucaagu

SEQ ID NO: 2336109 - RNA, 19 nt, Artificial Sequence
  Description of Artificial Sequence: Synthetic oligonucleotide
  Antisense strand to SEQ ID NO: 2336108
acuugagacaauaaggagc

SEQ ID NO: 2336110 - RNA, 19 nt, Artificial Sequence
  Description of Artificial Sequence: Synthetic oligonucleotide
  Sense strand starting at position 3403 of SEQ ID NO: 1885355
caaguuucugcacaacguu

SEQ ID NO: 2336111 - RNA, 19 nt, Artificial Sequence
  Description of Artificial Sequence: Synthetic oligonucleotide
  Antisense strand to SEQ ID NO: 2336110
aacguugugcagaaacuug

SEQ ID NO: 2336112 - RNA, 19 nt, Artificial Sequence
  Description of Artificial Sequence: Synthetic oligonucleotide
  Sense strand starting at position 3452 of SEQ ID NO: 1885355
agaguaguuuccguaucuu

SEQ ID NO: 2336113 - RNA, 19 nt, Artificial Sequence
  Description of Artificial Sequence: Synthetic oligonucleotide
  Antisense strand to SEQ ID NO: 2336112
aagauacggaaacuacucu

SEQ ID NO: 2336114 - RNA, 19 nt, Artificial Sequence
  Description of Artificial Sequence: Synthetic oligonucleotide
  Sense strand starting at position 3489 of SEQ ID NO: 1885355
auuucuacaucugaguaag

SEQ ID NO: 2336115 - RNA, 19 nt, Artificial Sequence
  Description of Artificial Sequence: Synthetic oligonucleotide
  Antisense strand to SEQ ID NO: 2336114
cuuacucagauguagaaau

SEQ ID NO: 2336116 - RNA, 19 nt, Artificial Sequence
  Description of Artificial Sequence: Synthetic oligonucleotide
  Sense strand starting at position 3495 of SEQ ID NO: 1885355
acaucugaguaaguggaaa

SEQ ID NO: 2336117 - RNA, 19 nt, Artificial Sequence
  Description of Artificial Sequence: Synthetic oligonucleotide
  Antisense strand to SEQ ID NO: 2336116
uuuccacuuacucagaugu

SEQ ID NO: 2336118 - RNA, 19 nt, Artificial Sequence
  Description of Artificial Sequence: Synthetic oligonucleotide
  Sense strand starting at position 3516 of SEQ ID NO: 1885355
uuaggaguauacuuccuua

SEQ ID NO: 2336119 - RNA, 19 nt, Artificial Sequence
  Description of Artificial Sequence: Synthetic oligonucleotide
  Antisense strand to SEQ ID NO: 2336118
uaaggaaguauacuccuaa

SEQ ID NO: 2336120 - RNA, 19 nt, Artificial Sequence
  Description of Artificial Sequence: Synthetic oligonucleotide
  Sense strand starting at position 3519 of SEQ ID NO: 1885355
ggaguauacuuccuuaccu

SEQ ID NO: 2336121 - RNA, 19 nt, Artificial Sequence
  Description of Artificial Sequence: Synthetic oligonucleotide
  Antisense strand to SEQ ID NO: 2336120
agguaaggaaguauacucc

SEQ ID NO: 2336122 - RNA, 19 nt, Artificial Sequence
  Description of Artificial Sequence: Synthetic oligonucleotide
  Sense strand starting at position 3537 of SEQ ID NO: 1885355
ugguaaauggaccggaaau

SEQ ID NO: 2336123 - RNA, 19 nt, Artificial Sequence
  Description of Artificial Sequence: Synthetic oligonucleotide
  Antisense strand to SEQ ID NO: 2336122
auuuccgguccauuuacca

SEQ ID NO: 2336124 - RNA, 19 nt, Artificial Sequence
  Description of Artificial Sequence: Synthetic oligonucleotide
  Sense strand starting at position 3612 of SEQ ID NO: 1885355
guacucuguugcccaggau

SEQ ID NO: 2336125 - RNA, 19 nt, Artificial Sequence
  Description of Artificial Sequence: Synthetic oligonucleotide
  Antisense strand to SEQ ID NO: 2336124
auccugggcaacagaguac

SEQ ID NO: 2336126 - RNA, 19 nt, Artificial Sequence
  Description of Artificial Sequence: Synthetic oligonucleotide
  Sense strand starting at position 3677 of SEQ ID NO: 1885355
ggcuuaagugaucagucca

SEQ ID NO: 2336127 - RNA, 19 nt, Artificial Sequence
  Description of Artificial Sequence: Synthetic oligonucleotide
  Antisense strand to SEQ ID NO: 2336126
uggacugaucacuuaagcc

SEQ ID NO: 2336128 - RNA, 19 nt, Artificial Sequence
  Description of Artificial Sequence: Synthetic oligonucleotide
  Sense strand starting at position 2897 of SEQ ID NO: 1885356
ccacguguaugacuggaau

SEQ ID NO: 2336129 - RNA, 19 nt, Artificial Sequence
  Description of Artificial Sequence: Synthetic oligonucleotide
  Antisense strand to SEQ ID NO: 2336128
auuccagucauacacgugg

SEQ ID NO: 2336130 - RNA, 19 nt, Artificial Sequence
  Description of Artificial Sequence: Synthetic oligonucleotide
  Sense strand starting at position 2899 of SEQ ID NO: 1885356
acguguaugacuggaauag

SEQ ID NO: 2336131 - RNA, 19 nt, Artificial Sequence
  Description of Artificial Sequence: Synthetic oligonucleotide
  Antisense strand to SEQ ID NO: 2336130
cuauuccagucauacacgu

SEQ ID NO: 2336132 - RNA, 19 nt, Artificial Sequence
  Description of Artificial Sequence: Synthetic oligonucleotide
  Sense strand starting at position 3019 of SEQ ID NO: 1885356
uccauccauuugugagagu

SEQ ID NO: 2336133 - RNA, 19 nt, Artificial Sequence
  Description of Artificial Sequence: Synthetic oligonucleotide
  Antisense strand to SEQ ID NO: 2336132
acucucacaaauggaugga

SEQ ID NO: 2336134 - RNA, 19 nt, Artificial Sequence
  Description of Artificial Sequence: Synthetic oligonucleotide
  Sense strand starting at position 3020 of SEQ ID NO: 1885356
ccauccauuugugagagua

SEQ ID NO: 2336135 - RNA, 19 nt, Artificial Sequence
  Description of Artificial Sequence: Synthetic oligonucleotide
  Antisense strand to SEQ ID NO: 2336134
uacucucacaaauggaugg

SEQ ID NO: 2336136 - RNA, 19 nt, Artificial Sequence
  Description of Artificial Sequence: Synthetic oligonucleotide
  Sense strand starting at position 3022 of SEQ ID NO: 1885356
auccauuugugagaguaag

SEQ ID NO: 2336137 - RNA, 19 nt, Artificial Sequence
  Description of Artificial Sequence: Synthetic oligonucleotide
  Antisense strand to SEQ ID NO: 2336136
cuuacucucacaaauggau

SEQ ID NO: 2336138 - RNA, 19 nt, Artificial Sequence
  Description of Artificial Sequence: Synthetic oligonucleotide
  Sense strand starting at position 3032 of SEQ ID NO: 1885356
gagaguaagagucgagcaa

SEQ ID NO: 2336139 - RNA, 19 nt, Artificial Sequence
  Description of Artificial Sequence: Synthetic oligonucleotide
  Antisense strand to SEQ ID NO: 2336138
uugcucgacucuuacucuc

SEQ ID NO: 2336140 - RNA, 19 nt, Artificial Sequence
  Description of Artificial Sequence: Synthetic oligonucleotide
  Sense strand starting at position 3033 of SEQ ID NO: 1885356
agaguaagagucgagcaau

SEQ ID NO: 2336141 - RNA, 19 nt, Artificial Sequence
  Description of Artificial Sequence: Synthetic oligonucleotide
  Antisense strand to SEQ ID NO: 2336140
auugcucgacucuuacucu

SEQ ID NO: 2336142 - RNA, 19 nt, Artificial Sequence
  Description of Artificial Sequence: Synthetic oligonucleotide
  Sense strand starting at position 3036 of SEQ ID NO: 1885356
guaagagucgagcaauacu

SEQ ID NO: 2336143 - RNA, 19 nt, Artificial Sequence
  Description of Artificial Sequence: Synthetic oligonucleotide
  Antisense strand to SEQ ID NO: 2336142
aguauugcucgacucuuac

SEQ ID NO: 2336144 - RNA, 19 nt, Artificial Sequence
  Description of Artificial Sequence: Synthetic oligonucleotide
  Sense strand starting at position 3045 of SEQ ID NO: 1885356
gagcaauacuagcaggauu

SEQ ID NO: 2336145 - RNA, 19 nt, Artificial Sequence
  Description of Artificial Sequence: Synthetic oligonucleotide
  Antisense strand to SEQ ID NO: 2336144
aauccugcuaguauugcuc

SEQ ID NO: 2336146 - RNA, 19 nt, Artificial Sequence
  Description of Artificial Sequence: Synthetic oligonucleotide
  Sense strand starting at position 3192 of SEQ ID NO: 1885356
acuguacagcuccaguaaa

SEQ ID NO: 2336147 - RNA, 19 nt, Artificial Sequence
  Description of Artificial Sequence: Synthetic oligonucleotide
  Antisense strand to SEQ ID NO: 2336146
uuuacuggagcuguacagu

SEQ ID NO: 2336148 - RNA, 19 nt, Artificial Sequence
  Description of Artificial Sequence: Synthetic oligonucleotide
  Sense strand starting at position 3285 of SEQ ID NO: 1885356
gggauaaagaguuguuucu

SEQ ID NO: 2336149 - RNA, 19 nt, Artificial Sequence
  Description of Artificial Sequence: Synthetic oligonucleotide
  Antisense strand to SEQ ID NO: 2336148
agaaacaacucuuuauccc

SEQ ID NO: 2336150 - RNA, 19 nt, Artificial Sequence
  Description of Artificial Sequence: Synthetic oligonucleotide
  Sense strand starting at position 3292 of SEQ ID NO: 1885356
agaguuguuucuccaacug

SEQ ID NO: 2336151 - RNA, 19 nt, Artificial Sequence
  Description of Artificial Sequence: Synthetic oligonucleotide
  Antisense strand to SEQ ID NO: 2336150
caguuggagaaacaacucu

SEQ ID NO: 2336152 - RNA, 19 nt, Artificial Sequence
  Description of Artificial Sequence: Synthetic oligonucleotide
  Sense strand starting at position 3349 of SEQ ID NO: 1885356
gugauauugcaacgacgag

SEQ ID NO: 2336153 - RNA, 19 nt, Artificial Sequence
  Description of Artificial Sequence: Synthetic oligonucleotide
  Antisense strand to SEQ ID NO: 2336152
cucgucguugcaauaucac

SEQ ID NO: 2336154 - RNA, 19 nt, Artificial Sequence
  Description of Artificial Sequence: Synthetic oligonucleotide
  Sense strand starting at position 3742 of SEQ ID NO: 1885356
ggccuaagccgggaacaau

SEQ ID NO: 2336155 - RNA, 19 nt, Artificial Sequence
  Description of Artificial Sequence: Synthetic oligonucleotide
  Antisense strand to SEQ ID NO: 2336154
auuguucccggcuuaggcc

SEQ ID NO: 2336156 - RNA, 19 nt, Artificial Sequence
  Description of Artificial Sequence: Synthetic oligonucleotide
  Sense strand starting at position 112 of SEQ ID NO: 1885357
ccacguguaugacuggaau

SEQ ID NO: 2336157 - RNA, 19 nt, Artificial Sequence
  Description of Artificial Sequence: Synthetic oligonucleotide
  Antisense strand to SEQ ID NO: 2336156
auuccagucauacacgugg

SEQ ID NO: 2336158 - RNA, 19 nt, Artificial Sequence
  Description of Artificial Sequence: Synthetic oligonucleotide
  Sense strand starting at position 114 of SEQ ID NO: 1885357
acguguaugacuggaauag

SEQ ID NO: 2336159 - RNA, 19 nt, Artificial Sequence
  Description of Artificial Sequence: Synthetic oligonucleotide
  Antisense strand to SEQ ID NO: 2336158
cuauuccagucauacacgu

SEQ ID NO: 2336160 - RNA, 19 nt, Artificial Sequence
  Description of Artificial Sequence: Synthetic oligonucleotide
  Sense strand starting at position 235 of SEQ ID NO: 1885357
ccauccauuugugagagua

SEQ ID NO: 2336161 - RNA, 19 nt, Artificial Sequence
  Description of Artificial Sequence: Synthetic oligonucleotide
  Antisense strand to SEQ ID NO: 2336160
uacucucacaaauggaugg

SEQ ID NO: 2336162 - RNA, 19 nt, Artificial Sequence
  Description of Artificial Sequence: Synthetic oligonucleotide
  Sense strand starting at position 237 of SEQ ID NO: 1885357
auccauuugugagaguaag

SEQ ID NO: 2336163 - RNA, 19 nt, Artificial Sequence
  Description of Artificial Sequence: Synthetic oligonucleotide
  Antisense strand to SEQ ID NO: 2336162
cuuacucucacaaauggau

SEQ ID NO: 2336164 - RNA, 19 nt, Artificial Sequence
  Description of Artificial Sequence: Synthetic oligonucleotide
  Sense strand starting at position 247 of SEQ ID NO: 1885357
gagaguaagagucgagcaa

SEQ ID NO: 2336165 - RNA, 19 nt, Artificial Sequence
  Description of Artificial Sequence: Synthetic oligonucleotide
  Antisense strand to SEQ ID NO: 2336164
uugcucgacucuuacucuc

SEQ ID NO: 2336166 - RNA, 19 nt, Artificial Sequence
  Description of Artificial Sequence: Synthetic oligonucleotide
  Sense strand starting at position 248 of SEQ ID NO: 1885357
agaguaagagucgagcaau

SEQ ID NO: 2336167 - RNA, 19 nt, Artificial Sequence
  Description of Artificial Sequence: Synthetic oligonucleotide
  Antisense strand to SEQ ID NO: 2336166
auugcucgacucuuacucu

SEQ ID NO: 2336168 - RNA, 19 nt, Artificial Sequence
  Description of Artificial Sequence: Synthetic oligonucleotide
  Sense strand starting at position 251 of SEQ ID NO: 1885357
guaagagucgagcaauacu

SEQ ID NO: 2336169 - RNA, 19 nt, Artificial Sequence
  Description of Artificial Sequence: Synthetic oligonucleotide
  Antisense strand to SEQ ID NO: 2336168
aguauugcucgacucuuac

SEQ ID NO: 2336170 - RNA, 19 nt, Artificial Sequence
  Description of Artificial Sequence: Synthetic oligonucleotide
  Sense strand starting at position 407 of SEQ ID NO: 1885357
acuguacagcuccaguaaa

SEQ ID NO: 2336171 - RNA, 19 nt, Artificial Sequence
  Description of Artificial Sequence: Synthetic oligonucleotide
  Antisense strand to SEQ ID NO: 2336170
uuuacuggagcuguacagu

SEQ ID NO: 2336172 - RNA, 19 nt, Artificial Sequence
  Description of Artificial Sequence: Synthetic oligonucleotide
  Sense strand starting at position 500 of SEQ ID NO: 1885357
gggauaaagaguuguuucu

SEQ ID NO: 2336173 - RNA, 19 nt, Artificial Sequence
  Description of Artificial Sequence: Synthetic oligonucleotide
  Antisense strand to SEQ ID NO: 2336172
agaaacaacucuuuauccc

SEQ ID NO: 2336174 - RNA, 19 nt, Artificial Sequence
  Description of Artificial Sequence: Synthetic oligonucleotide
  Sense strand starting at position 507 of SEQ ID NO: 1885357
agaguuguuucuccaacug

SEQ ID NO: 2336175 - RNA, 19 nt, Artificial Sequence
  Description of Artificial Sequence: Synthetic oligonucleotide
  Antisense strand to SEQ ID NO: 2336174
caguuggagaaacaacucu

SEQ ID NO: 2336176 - RNA, 19 nt, Artificial Sequence
  Description of Artificial Sequence: Synthetic oligonucleotide
  Sense strand starting at position 564 of SEQ ID NO: 1885357
gugauauugcaacgacgag

SEQ ID NO: 2336177 - RNA, 19 nt, Artificial Sequence
  Description of Artificial Sequence: Synthetic oligonucleotide
  Antisense strand to SEQ ID NO: 2336176
cucgucguugcaauaucac

SEQ ID NO: 2336178 - RNA, 19 nt, Artificial Sequence
  Description of Artificial Sequence: Synthetic oligonucleotide
  Sense strand starting at position 957 of SEQ ID NO: 1885357
ggccuaagccgggaacaau

SEQ ID NO: 2336179 - RNA, 19 nt, Artificial Sequence
  Description of Artificial Sequence: Synthetic oligonucleotide
  Antisense strand to SEQ ID NO: 2336178
auuguucccggcuuaggcc

SEQ ID NO: 2336180 - RNA, 19 nt, Artificial Sequence
  Description of Artificial Sequence: Synthetic oligonucleotide
  Sense strand starting at position 2118 of SEQ ID NO: 1885357
ggaccaugugggugaauga

SEQ ID NO: 2336181 - RNA, 19 nt, Artificial Sequence
  Description of Artificial Sequence: Synthetic oligonucleotide
  Antisense strand to SEQ ID NO: 2336180
ucauucacccacauggucc

SEQ ID NO: 2336182 - RNA, 19 nt, Artificial Sequence
  Description of Artificial Sequence: Synthetic oligonucleotide
  Sense strand starting at position 2531 of SEQ ID NO: 1885357
gcgaucacaguuuauuacu

SEQ ID NO: 2336183 - RNA, 19 nt, Artificial Sequence
  Description of Artificial Sequence: Synthetic oligonucleotide
  Antisense strand to SEQ ID NO: 2336182
aguaauaaacugugaucgc

SEQ ID NO: 2336184 - RNA, 19 nt, Artificial Sequence
  Description of Artificial Sequence: Synthetic oligonucleotide
  Sense strand starting at position 2565 of SEQ ID NO: 1885357
ggguuuccgagguaauuag

SEQ ID NO: 2336185 - RNA, 19 nt, Artificial Sequence
  Description of Artificial Sequence: Synthetic oligonucleotide
  Antisense strand to SEQ ID NO: 2336184
cuaauuaccucggaaaccc

SEQ ID NO: 2336186 - RNA, 19 nt, Artificial Sequence
  Description of Artificial Sequence: Synthetic oligonucleotide
  Sense strand starting at position 2627 of SEQ ID NO: 1885357
ugacuuuaacaucgaaaca

SEQ ID NO: 2336187 - RNA, 19 nt, Artificial Sequence
  Description of Artificial Sequence: Synthetic oligonucleotide
  Antisense strand to SEQ ID NO: 2336186
uguuucgauguuaaaguca

SEQ ID NO: 2336188 - RNA, 19 nt, Artificial Sequence
  Description of Artificial Sequence: Synthetic oligonucleotide
  Sense strand starting at position 2645 of SEQ ID NO: 1885357
agaauuacucgcugcaaag

SEQ ID NO: 2336189 - RNA, 19 nt, Artificial Sequence
  Description of Artificial Sequence: Synthetic oligonucleotide
  Antisense strand to SEQ ID NO: 2336188
cuuugcagcgaguaauucu

SEQ ID NO: 2336190 - RNA, 19 nt, Artificial Sequence
  Description of Artificial Sequence: Synthetic oligonucleotide
  Sense strand starting at position 2656 of SEQ ID NO: 1885357
cugcaaagaucguuugaga

SEQ ID NO: 2336191 - RNA, 19 nt, Artificial Sequence
  Description of Artificial Sequence: Synthetic oligonucleotide
  Antisense strand to SEQ ID NO: 2336190
ucucaaacgaucuuugcag

SEQ ID NO: 2336192 - RNA, 19 nt, Artificial Sequence
  Description of Artificial Sequence: Synthetic oligonucleotide
  Sense strand starting at position 2665 of SEQ ID NO: 1885357
ucguuugagacccagaaau

SEQ ID NO: 2336193 - RNA, 19 nt, Artificial Sequence
  Description of Artificial Sequence: Synthetic oligonucleotide
  Antisense strand to SEQ ID NO: 2336192
auuucugggucucaaacga

SEQ ID NO: 2336194 - RNA, 19 nt, Artificial Sequence
  Description of Artificial Sequence: Synthetic oligonucleotide
  Sense strand starting at position 2825 of SEQ ID NO: 1885357
ugcauuuaguaagaacucu

SEQ ID NO: 2336195 - RNA, 19 nt, Artificial Sequence
  Description of Artificial Sequence: Synthetic oligonucleotide
  Antisense strand to SEQ ID NO: 2336194
agaguucuuacuaaaugca

SEQ ID NO: 2336196 - RNA, 19 nt, Artificial Sequence
  Description of Artificial Sequence: Synthetic oligonucleotide
  Sense strand starting at position 2831 of SEQ ID NO: 1885357
uaguaagaacucuggguuc

SEQ ID NO: 2336197 - RNA, 19 nt, Artificial Sequence
  Description of Artificial Sequence: Synthetic oligonucleotide
  Antisense strand to SEQ ID NO: 2336196
gaacccagaguucuuacua

SEQ ID NO: 2336198 - RNA, 19 nt, Artificial Sequence
  Description of Artificial Sequence: Synthetic oligonucleotide
  Sense strand starting at position 2833 of SEQ ID NO: 1885357
guaagaacucuggguucuc

SEQ ID NO: 2336199 - RNA, 19 nt, Artificial Sequence
  Description of Artificial Sequence: Synthetic oligonucleotide
  Antisense strand to SEQ ID NO: 2336198
gagaacccagaguucuuac

SEQ ID NO: 2336200 - RNA, 19 nt, Artificial Sequence
  Description of Artificial Sequence: Synthetic oligonucleotide
  Sense strand starting at position 2843 of SEQ ID NO: 1885357
uggguucuccaguagaaau

SEQ ID NO: 2336201 - RNA, 19 nt, Artificial Sequence
  Description of Artificial Sequence: Synthetic oligonucleotide
  Antisense strand to SEQ ID NO: 2336200
auuucuacuggagaaccca

SEQ ID NO: 2336202 - RNA, 19 nt, Artificial Sequence
  Description of Artificial Sequence: Synthetic oligonucleotide
  Sense strand starting at position 2860 of SEQ ID NO: 1885357
auagcauagcucggaaaga

SEQ ID NO: 2336203 - RNA, 19 nt, Artificial Sequence
  Description of Artificial Sequence: Synthetic oligonucleotide
  Antisense strand to SEQ ID NO: 2336202
ucuuuccgagcuaugcuau

SEQ ID NO: 2336204 - RNA, 19 nt, Artificial Sequence
  Description of Artificial Sequence: Synthetic oligonucleotide
  Sense strand starting at position 2996 of SEQ ID NO: 1885357
ucauaacauuuacgagaaa

SEQ ID NO: 2336205 - RNA, 19 nt, Artificial Sequence
  Description of Artificial Sequence: Synthetic oligonucleotide
  Antisense strand to SEQ ID NO: 2336204
uuucucguaaauguuauga

SEQ ID NO: 2336206 - RNA, 19 nt, Artificial Sequence
  Description of Artificial Sequence: Synthetic oligonucleotide
  Sense strand starting at position 3064 of SEQ ID NO: 1885357
acauaucacugguucguga

SEQ ID NO: 2336207 - RNA, 19 nt, Artificial Sequence
  Description of Artificial Sequence: Synthetic oligonucleotide
  Antisense strand to SEQ ID NO: 2336206
ucacgaaccagugauaugu

SEQ ID NO: 2336208 - RNA, 19 nt, Artificial Sequence
  Description of Artificial Sequence: Synthetic oligonucleotide
  Sense strand starting at position 3066 of SEQ ID NO: 1885357
auaucacugguucgugauu

SEQ ID NO: 2336209 - RNA, 19 nt, Artificial Sequence
  Description of Artificial Sequence: Synthetic oligonucleotide
  Antisense strand to SEQ ID NO: 2336208
aaucacgaaccagugauau

SEQ ID NO: 2336210 - RNA, 19 nt, Artificial Sequence
  Description of Artificial Sequence: Synthetic oligonucleotide
  Sense strand starting at position 3112 of SEQ ID NO: 1885357
accaaaggaugucuuuaau

SEQ ID NO: 2336211 - RNA, 19 nt, Artificial Sequence
  Description of Artificial Sequence: Synthetic oligonucleotide
  Antisense strand to SEQ ID NO: 2336210
auuaaagacauccuuuggu

SEQ ID NO: 2336212 - RNA, 19 nt, Artificial Sequence
  Description of Artificial Sequence: Synthetic oligonucleotide
  Sense strand starting at position 3280 of SEQ ID NO: 1885357
uauugagucuaguuucuag

SEQ ID NO: 2336213 - RNA, 19 nt, Artificial Sequence
  Description of Artificial Sequence: Synthetic oligonucleotide
  Antisense strand to SEQ ID NO: 2336212
cuagaaacuagacucaaua

SEQ ID NO: 2336214 - RNA, 19 nt, Artificial Sequence
  Description of Artificial Sequence: Synthetic oligonucleotide
  Sense strand starting at position 3283 of SEQ ID NO: 1885357
ugagucuaguuucuagaua

SEQ ID NO: 2336215 - RNA, 19 nt, Artificial Sequence
  Description of Artificial Sequence: Synthetic oligonucleotide
  Antisense strand to SEQ ID NO: 2336214
uaucuagaaacuagacuca

SEQ ID NO: 2336216 - RNA, 19 nt, Artificial Sequence
  Description of Artificial Sequence: Synthetic oligonucleotide
  Sense strand starting at position 3297 of SEQ ID NO: 1885357
agauauuccuuucuuugua

SEQ ID NO: 2336217 - RNA, 19 nt, Artificial Sequence
  Description of Artificial Sequence: Synthetic oligonucleotide
  Antisense strand to SEQ ID NO: 2336216
uacaaagaaaggaauaucu

SEQ ID NO: 2336218 - RNA, 19 nt, Artificial Sequence
  Description of Artificial Sequence: Synthetic oligonucleotide
  Sense strand starting at position 3440 of SEQ ID NO: 1885357
uuuggucggcauugacuaa

SEQ ID NO: 2336219 - RNA, 19 nt, Artificial Sequence
  Description of Artificial Sequence: Synthetic oligonucleotide
  Antisense strand to SEQ ID NO: 2336218
uuagucaaugccgaccaaa

SEQ ID NO: 2336220 - RNA, 19 nt, Artificial Sequence
  Description of Artificial Sequence: Synthetic oligonucleotide
  Sense strand starting at position 3523 of SEQ ID NO: 1885357
ggauguugugaguaagauu

SEQ ID NO: 2336221 - RNA, 19 nt, Artificial Sequence
  Description of Artificial Sequence: Synthetic oligonucleotide
  Antisense strand to SEQ ID NO: 2336220
aaucuuacucacaacaucc

SEQ ID NO: 2336222 - RNA, 19 nt, Artificial Sequence
  Description of Artificial Sequence: Synthetic oligonucleotide
  Sense strand starting at position 3586 of SEQ ID NO: 1885357
gguuucuuagcaggaguua

SEQ ID NO: 2336223 - RNA, 19 nt, Artificial Sequence
  Description of Artificial Sequence: Synthetic oligonucleotide
  Antisense strand to SEQ ID NO: 2336222
uaacuccugcuaagaaacc

SEQ ID NO: 2336224 - RNA, 19 nt, Artificial Sequence
  Description of Artificial Sequence: Synthetic oligonucleotide
  Sense strand starting at position 3587 of SEQ ID NO: 1885357
guuucuuagcaggaguuau

SEQ ID NO: 2336225 - RNA, 19 nt, Artificial Sequence
  Description of Artificial Sequence: Synthetic oligonucleotide
  Antisense strand to SEQ ID NO: 2336224
auaacuccugcuaagaaac

SEQ ID NO: 2336226 - RNA, 19 nt, Artificial Sequence
  Description of Artificial Sequence: Synthetic oligonucleotide
  Sense strand starting at position 3671 of SEQ ID NO: 1885357
uuagguaucucacuauauu

SEQ ID NO: 2336227 - RNA, 19 nt, Artificial Sequence
  Description of Artificial Sequence: Synthetic oligonucleotide
  Antisense strand to SEQ ID NO: 2336226
aauauagugagauaccuaa

SEQ ID NO: 2336228 - RNA, 19 nt, Artificial Sequence
  Description of Artificial Sequence: Synthetic oligonucleotide
  Sense strand starting at position 3807 of SEQ ID NO: 1885357
accuacugacuuggaaauu

SEQ ID NO: 2336229 - RNA, 19 nt, Artificial Sequence
  Description of Artificial Sequence: Synthetic oligonucleotide
  Antisense strand to SEQ ID NO: 2336228
aauuuccaagucaguaggu

SEQ ID NO: 2336230 - RNA, 19 nt, Artificial Sequence
  Description of Artificial Sequence: Synthetic oligonucleotide
  Sense strand starting at position 3837 of SEQ ID NO: 1885357
cagaauuaguagguugcau

SEQ ID NO: 2336231 - RNA, 19 nt, Artificial Sequence
  Description of Artificial Sequence: Synthetic oligonucleotide
  Antisense strand to SEQ ID NO: 2336230
augcaaccuacuaauucug

SEQ ID NO: 2336232 - RNA, 19 nt, Artificial Sequence
  Description of Artificial Sequence: Synthetic oligonucleotide
  Sense strand starting at position 3859 of SEQ ID NO: 1885357
aaggguuucgcucauacuu

SEQ ID NO: 2336233 - RNA, 19 nt, Artificial Sequence
  Description of Artificial Sequence: Synthetic oligonucleotide
  Antisense strand to SEQ ID NO: 2336232
aaguaugagcgaaacccuu

SEQ ID NO: 2336234 - RNA, 19 nt, Artificial Sequence
  Description of Artificial Sequence: Synthetic oligonucleotide
  Sense strand starting at position 3972 of SEQ ID NO: 1885357
uuuggaagucacuacuagu

SEQ ID NO: 2336235 - RNA, 19 nt, Artificial Sequence
  Description of Artificial Sequence: Synthetic oligonucleotide
  Antisense strand to SEQ ID NO: 2336234
acuaguagugacuuccaaa

SEQ ID NO: 2336236 - RNA, 19 nt, Artificial Sequence
  Description of Artificial Sequence: Synthetic oligonucleotide
  Sense strand starting at position 3043 of SEQ ID NO: 1885358
ccacguguaugacuggaau

SEQ ID NO: 2336237 - RNA, 19 nt, Artificial Sequence
  Description of Artificial Sequence: Synthetic oligonucleotide
  Antisense strand to SEQ ID NO: 2336236
auuccagucauacacgugg

SEQ ID NO: 2336238 - RNA, 19 nt, Artificial Sequence
  Description of Artificial Sequence: Synthetic oligonucleotide
  Sense strand starting at position 3045 of SEQ ID NO: 1885358
acguguaugacuggaauag

SEQ ID NO: 2336239 - RNA, 19 nt, Artificial Sequence
  Description of Artificial Sequence: Synthetic oligonucleotide
  Antisense strand to SEQ ID NO: 2336238
cuauuccagucauacacgu

SEQ ID NO: 2336240 - RNA, 19 nt, Artificial Sequence
  Description of Artificial Sequence: Synthetic oligonucleotide
  Sense strand starting at position 3165 of SEQ ID NO: 1885358
uccauccauuugugagagu

SEQ ID NO: 2336241 - RNA, 19 nt, Artificial Sequence
  Description of Artificial Sequence: Synthetic oligonucleotide
  Antisense strand to SEQ ID NO: 2336240
acucucacaaauggaugga

SEQ ID NO: 2336242 - RNA, 19 nt, Artificial Sequence
  Description of Artificial Sequence: Synthetic oligonucleotide
  Sense strand starting at position 3166 of SEQ ID NO: 1885358
ccauccauuugugagagua

SEQ ID NO: 2336243 - RNA, 19 nt, Artificial Sequence
  Description of Artificial Sequence: Synthetic oligonucleotide
  Antisense strand to SEQ ID NO: 2336242
uacucucacaaauggaugg

SEQ ID NO: 2336244 - RNA, 19 nt, Artificial Sequence
  Description of Artificial Sequence: Synthetic oligonucleotide
  Sense strand starting at position 3168 of SEQ ID NO: 1885358
auccauuugugagaguaag

SEQ ID NO: 2336245 - RNA, 19 nt, Artificial Sequence
  Description of Artificial Sequence: Synthetic oligonucleotide
  Antisense strand to SEQ ID NO: 2336244
cuuacucucacaaauggau

SEQ ID NO: 2336246 - RNA, 19 nt, Artificial Sequence
  Description of Artificial Sequence: Synthetic oligonucleotide
  Sense strand starting at position 3178 of SEQ ID NO: 1885358
gagaguaagagucgagcaa

SEQ ID NO: 2336247 - RNA, 19 nt, Artificial Sequence
  Description of Artificial Sequence: Synthetic oligonucleotide
  Antisense strand to SEQ ID NO: 2336246
uugcucgacucuuacucuc

SEQ ID NO: 2336248 - RNA, 19 nt, Artificial Sequence
  Description of Artificial Sequence: Synthetic oligonucleotide
  Sense strand starting at position 3179 of SEQ ID NO: 1885358
agaguaagagucgagcaau

SEQ ID NO: 2336249 - RNA, 19 nt, Artificial Sequence
  Description of Artificial Sequence: Synthetic oligonucleotide
  Antisense strand to SEQ ID NO: 2336248
auugcucgacucuuacucu

SEQ ID NO: 2336250 - RNA, 19 nt, Artificial Sequence
  Description of Artificial Sequence: Synthetic oligonucleotide
  Sense strand starting at position 3182 of SEQ ID NO: 1885358
guaagagucgagcaauacu

SEQ ID NO: 2336251 - RNA, 19 nt, Artificial Sequence
  Description of Artificial Sequence: Synthetic oligonucleotide
  Antisense strand to SEQ ID NO: 2336250
aguauugcucgacucuuac

SEQ ID NO: 2336252 - RNA, 19 nt, Artificial Sequence
  Description of Artificial Sequence: Synthetic oligonucleotide
  Sense strand starting at position 3191 of SEQ ID NO: 1885358
gagcaauacuagcaggauu

SEQ ID NO: 2336253 - RNA, 19 nt, Artificial Sequence
  Description of Artificial Sequence: Synthetic oligonucleotide
  Antisense strand to SEQ ID NO: 2336252
aauccugcuaguauugcuc

SEQ ID NO: 2336254 - RNA, 19 nt, Artificial Sequence
  Description of Artificial Sequence: Synthetic oligonucleotide
  Sense strand starting at position 3338 of SEQ ID NO: 1885358
acuguacagcuccaguaaa

SEQ ID NO: 2336255 - RNA, 19 nt, Artificial Sequence
  Description of Artificial Sequence: Synthetic oligonucleotide
  Antisense strand to SEQ ID NO: 2336254
uuuacuggagcuguacagu

SEQ ID NO: 2336256 - RNA, 19 nt, Artificial Sequence
  Description of Artificial Sequence: Synthetic oligonucleotide
  Sense strand starting at position 3431 of SEQ ID NO: 1885358
gggauaaagaguuguuucu

SEQ ID NO: 2336257 - RNA, 19 nt, Artificial Sequence
  Description of Artificial Sequence: Synthetic oligonucleotide
  Antisense strand to SEQ ID NO: 2336256
agaaacaacucuuuauccc

SEQ ID NO: 2336258 - RNA, 19 nt, Artificial Sequence
  Description of Artificial Sequence: Synthetic oligonucleotide
  Sense strand starting at position 3438 of SEQ ID NO: 1885358
agaguuguuucuccaacug

SEQ ID NO: 2336259 - RNA, 19 nt, Artificial Sequence
  Description of Artificial Sequence: Synthetic oligonucleotide
  Antisense strand to SEQ ID NO: 2336258
caguuggagaaacaacucu

SEQ ID NO: 2336260 - RNA, 19 nt, Artificial Sequence
  Description of Artificial Sequence: Synthetic oligonucleotide
  Sense strand starting at position 3495 of SEQ ID NO: 1885358
gugauauugcaacgacgag

SEQ ID NO: 2336261 - RNA, 19 nt, Artificial Sequence
  Description of Artificial Sequence: Synthetic oligonucleotide
  Antisense strand to SEQ ID NO: 2336260
cucgucguugcaauaucac

SEQ ID NO: 2336262 - RNA, 19 nt, Artificial Sequence
  Description of Artificial Sequence: Synthetic oligonucleotide
  Sense strand starting at position 3888 of SEQ ID NO: 1885358
ggccuaagccgggaacaau

SEQ ID NO: 2336263 - RNA, 19 nt, Artificial Sequence
  Description of Artificial Sequence: Synthetic oligonucleotide
  Antisense strand to SEQ ID NO: 2336262
auuguucccggcuuaggcc

SEQ ID NO: 2336264 - RNA, 19 nt, Artificial Sequence
  Description of Artificial Sequence: Synthetic oligonucleotide
  Sense strand starting at position 3183 of SEQ ID NO: 1885359
ccacguguaugacuggaau

SEQ ID NO: 2336265 - RNA, 19 nt, Artificial Sequence
  Description of Artificial Sequence: Synthetic oligonucleotide
  Antisense strand to SEQ ID NO: 2336264
auuccagucauacacgugg

SEQ ID NO: 2336266 - RNA, 19 nt, Artificial Sequence
  Description of Artificial Sequence: Synthetic oligonucleotide
  Sense strand starting at position 3185 of SEQ ID NO: 1885359
acguguaugacuggaauag

SEQ ID NO: 2336267 - RNA, 19 nt, Artificial Sequence
  Description of Artificial Sequence: Synthetic oligonucleotide
  Antisense strand to SEQ ID NO: 2336266
cuauuccagucauacacgu

SEQ ID NO: 2336268 - RNA, 19 nt, Artificial Sequence
  Description of Artificial Sequence: Synthetic oligonucleotide
  Sense strand starting at position 3305 of SEQ ID NO: 1885359
uccauccauuugugagagu

SEQ ID NO: 2336269 - RNA, 19 nt, Artificial Sequence
  Description of Artificial Sequence: Synthetic oligonucleotide
  Antisense strand to SEQ ID NO: 2336268
acucucacaaauggaugga

SEQ ID NO: 2336270 - RNA, 19 nt, Artificial Sequence
  Description of Artificial Sequence: Synthetic oligonucleotide
  Sense strand starting at position 3306 of SEQ ID NO: 1885359
ccauccauuugugagagua

SEQ ID NO: 2336271 - RNA, 19 nt, Artificial Sequence
  Description of Artificial Sequence: Synthetic oligonucleotide
  Antisense strand to SEQ ID NO: 2336270
uacucucacaaauggaugg

SEQ ID NO: 2336272 - RNA, 19 nt, Artificial Sequence
  Description of Artificial Sequence: Synthetic oligonucleotide
  Sense strand starting at position 3308 of SEQ ID NO: 1885359
auccauuugugagaguaag

SEQ ID NO: 2336273 - RNA, 19 nt, Artificial Sequence
  Description of Artificial Sequence: Synthetic oligonucleotide
  Antisense strand to SEQ ID NO: 2336272
cuuacucucacaaauggau

SEQ ID NO: 2336274 - RNA, 19 nt, Artificial Sequence
  Description of Artificial Sequence: Synthetic oligonucleotide
  Sense strand starting at position 3318 of SEQ ID NO: 1885359
gagaguaagagucgagcaa

SEQ ID NO: 2336275 - RNA, 19 nt, Artificial Sequence
  Description of Artificial Sequence: Synthetic oligonucleotide
  Antisense strand to SEQ ID NO: 2336274
uugcucgacucuuacucuc

SEQ ID NO: 2336276 - RNA, 19 nt, Artificial Sequence
  Description of Artificial Sequence: Synthetic oligonucleotide
  Sense strand starting at position 3319 of SEQ ID NO: 1885359
agaguaagagucgagcaau

SEQ ID NO: 2336277 - RNA, 19 nt, Artificial Sequence
  Description of Artificial Sequence: Synthetic oligonucleotide
  Antisense strand to SEQ ID NO: 2336276
auugcucgacucuuacucu

SEQ ID NO: 2336278 - RNA, 19 nt, Artificial Sequence
  Description of Artificial Sequence: Synthetic oligonucleotide
  Sense strand starting at position 3322 of SEQ ID NO: 1885359
guaagagucgagcaauacu

SEQ ID NO: 2336279 - RNA, 19 nt, Artificial Sequence
  Description of Artificial Sequence: Synthetic oligonucleotide
  Antisense strand to SEQ ID NO: 2336278
aguauugcucgacucuuac

SEQ ID NO: 2336280 - RNA, 19 nt, Artificial Sequence
  Description of Artificial Sequence: Synthetic oligonucleotide
  Sense strand starting at position 3331 of SEQ ID NO: 1885359
gagcaauacuagcaggauu

SEQ ID NO: 2336281 - RNA, 19 nt, Artificial Sequence
  Description of Artificial Sequence: Synthetic oligonucleotide
  Antisense strand to SEQ ID NO: 2336280
aauccugcuaguauugcuc

SEQ ID NO: 2336282 - RNA, 19 nt, Artificial Sequence
  Description of Artificial Sequence: Synthetic oligonucleotide
  Sense strand starting at position 3478 of SEQ ID NO: 1885359
acuguacagcuccaguaaa

SEQ ID NO: 2336283 - RNA, 19 nt, Artificial Sequence
  Description of Artificial Sequence: Synthetic oligonucleotide
  Antisense strand to SEQ ID NO: 2336282
uuuacuggagcuguacagu

SEQ ID NO: 2336284 - RNA, 19 nt, Artificial Sequence
  Description of Artificial Sequence: Synthetic oligonucleotide
  Sense strand starting at position 3571 of SEQ ID NO: 1885359
gggauaaagaguuguuucu

SEQ ID NO: 2336285 - RNA, 19 nt, Artificial Sequence
  Description of Artificial Sequence: Synthetic oligonucleotide
  Antisense strand to SEQ ID NO: 2336284
agaaacaacucuuuauccc

SEQ ID NO: 2336286 - RNA, 19 nt, Artificial Sequence
  Description of Artificial Sequence: Synthetic oligonucleotide
  Sense strand starting at position 3578 of SEQ ID NO: 1885359
agaguuguuucuccaacug

SEQ ID NO: 2336287 - RNA, 19 nt, Artificial Sequence
  Description of Artificial Sequence: Synthetic oligonucleotide
  Antisense strand to SEQ ID NO: 2336286
caguuggagaaacaacucu

SEQ ID NO: 2336288 - RNA, 19 nt, Artificial Sequence
  Description of Artificial Sequence: Synthetic oligonucleotide
  Sense strand starting at position 3635 of SEQ ID NO: 1885359
gugauauugcaacgacgag

SEQ ID NO: 2336289 - RNA, 19 nt, Artificial Sequence
  Description of Artificial Sequence: Synthetic oligonucleotide
  Antisense strand to SEQ ID NO: 2336288
cucgucguugcaauaucac

SEQ ID NO: 2336290 - RNA, 19 nt, Artificial Sequence
  Description of Artificial Sequence: Synthetic oligonucleotide
  Sense strand starting at position 3484 of SEQ ID NO: 1885360
ccacguguaugacuggaau

SEQ ID NO: 2336291 - RNA, 19 nt, Artificial Sequence
  Description of Artificial Sequence: Synthetic oligonucleotide
  Antisense strand to SEQ ID NO: 2336290
auuccagucauacacgugg

SEQ ID NO: 2336292 - RNA, 19 nt, Artificial Sequence
  Description of Artificial Sequence: Synthetic oligonucleotide
  Sense strand starting at position 3486 of SEQ ID NO: 1885360
acguguaugacuggaauag

SEQ ID NO: 2336293 - RNA, 19 nt, Artificial Sequence
  Description of Artificial Sequence: Synthetic oligonucleotide
  Antisense strand to SEQ ID NO: 2336292
cuauuccagucauacacgu

SEQ ID NO: 2336294 - RNA, 19 nt, Artificial Sequence
  Description of Artificial Sequence: Synthetic oligonucleotide
  Sense strand starting at position 3606 of SEQ ID NO: 1885360
uccauccauuugugagagu

SEQ ID NO: 2336295 - RNA, 19 nt, Artificial Sequence
  Description of Artificial Sequence: Synthetic oligonucleotide
  Antisense strand to SEQ ID NO: 2336294
acucucacaaauggaugga

SEQ ID NO: 2336296 - RNA, 19 nt, Artificial Sequence
  Description of Artificial Sequence: Synthetic oligonucleotide
  Sense strand starting at position 3607 of SEQ ID NO: 1885360
ccauccauuugugagagua

SEQ ID NO: 2336297 - RNA, 19 nt, Artificial Sequence
  Description of Artificial Sequence: Synthetic oligonucleotide
  Antisense strand to SEQ ID NO: 2336296
uacucucacaaauggaugg

SEQ ID NO: 2336298 - RNA, 19 nt, Artificial Sequence
  Description of Artificial Sequence: Synthetic oligonucleotide
  Sense strand starting at position 3609 of SEQ ID NO: 1885360
auccauuugugagaguaag

SEQ ID NO: 2336299 - RNA, 19 nt, Artificial Sequence
  Description of Artificial Sequence: Synthetic oligonucleotide
  Antisense strand to SEQ ID NO: 2336298
cuuacucucacaaauggau

SEQ ID NO: 2336300 - RNA, 19 nt, Artificial Sequence
  Description of Artificial Sequence: Synthetic oligonucleotide
  Sense strand starting at position 3619 of SEQ ID NO: 1885360
gagaguaagagucgagcaa

SEQ ID NO: 2336301 - RNA, 19 nt, Artificial Sequence
  Description of Artificial Sequence: Synthetic oligonucleotide
  Antisense strand to SEQ ID NO: 2336300
uugcucgacucuuacucuc

SEQ ID NO: 2336302 - RNA, 19 nt, Artificial Sequence
  Description of Artificial Sequence: Synthetic oligonucleotide
  Sense strand starting at position 3620 of SEQ ID NO: 1885360
agaguaagagucgagcaau

SEQ ID NO: 2336303 - RNA, 19 nt, Artificial Sequence
  Description of Artificial Sequence: Synthetic oligonucleotide
  Antisense strand to SEQ ID NO: 2336302
auugcucgacucuuacucu

SEQ ID NO: 2336304 - RNA, 19 nt, Artificial Sequence
  Description of Artificial Sequence: Synthetic oligonucleotide
  Sense strand starting at position 3623 of SEQ ID NO: 1885360
guaagagucgagcaauacu

SEQ ID NO: 2336305 - RNA, 19 nt, Artificial Sequence
  Description of Artificial Sequence: Synthetic oligonucleotide
  Antisense strand to SEQ ID NO: 2336304
aguauugcucgacucuuac

SEQ ID NO: 2336306 - RNA, 19 nt, Artificial Sequence
  Description of Artificial Sequence: Synthetic oligonucleotide
  Sense strand starting at position 3632 of SEQ ID NO: 1885360
gagcaauacuagcaggauu

SEQ ID NO: 2336307 - RNA, 19 nt, Artificial Sequence
  Description of Artificial Sequence: Synthetic oligonucleotide
  Antisense strand to SEQ ID NO: 2336306
aauccugcuaguauugcuc

SEQ ID NO: 2336308 - RNA, 19 nt, Artificial Sequence
  Description of Artificial Sequence: Synthetic oligonucleotide
  Sense strand starting at position 3779 of SEQ ID NO: 1885360
acuguacagcuccaguaaa

SEQ ID NO: 2336309 - RNA, 19 nt, Artificial Sequence
  Description of Artificial Sequence: Synthetic oligonucleotide
  Antisense strand to SEQ ID NO: 2336308
uuuacuggagcuguacagu

SEQ ID NO: 2336310 - RNA, 19 nt, Artificial Sequence
  Description of Artificial Sequence: Synthetic oligonucleotide
  Sense strand starting at position 3872 of SEQ ID NO: 1885360
gggauaaagaguuguuucu

SEQ ID NO: 2336311 - RNA, 19 nt, Artificial Sequence
  Description of Artificial Sequence: Synthetic oligonucleotide
  Antisense strand to SEQ ID NO: 2336310
agaaacaacucuuuauccc

SEQ ID NO: 2336312 - RNA, 19 nt, Artificial Sequence
  Description of Artificial Sequence: Synthetic oligonucleotide
  Sense strand starting at position 3879 of SEQ ID NO: 1885360
agaguuguuucuccaacug

SEQ ID NO: 2336313 - RNA, 19 nt, Artificial Sequence
  Description of Artificial Sequence: Synthetic oligonucleotide
  Antisense strand to SEQ ID NO: 2336312
caguuggagaaacaacucu

SEQ ID NO: 2336314 - RNA, 19 nt, Artificial Sequence
  Description of Artificial Sequence: Synthetic oligonucleotide
  Sense strand starting at position 3936 of SEQ ID NO: 1885360
gugauauugcaacgacgag

SEQ ID NO: 2336315 - RNA, 19 nt, Artificial Sequence
  Description of Artificial Sequence: Synthetic oligonucleotide
  Antisense strand to SEQ ID NO: 2336314
cucgucguugcaauaucac

SEQ ID NO: 2336316 - RNA, 19 nt, Artificial Sequence
  Description of Artificial Sequence: Synthetic oligonucleotide
  Sense strand starting at position 3357 of SEQ ID NO: 1885361
ccacguguaugacuggaau

SEQ ID NO: 2336317 - RNA, 19 nt, Artificial Sequence
  Description of Artificial Sequence: Synthetic oligonucleotide
  Antisense strand to SEQ ID NO: 2336316
auuccagucauacacgugg

SEQ ID NO: 2336318 - RNA, 19 nt, Artificial Sequence
  Description of Artificial Sequence: Synthetic oligonucleotide
  Sense strand starting at position 3359 of SEQ ID NO: 1885361
acguguaugacuggaauag

SEQ ID NO: 2336319 - RNA, 19 nt, Artificial Sequence
  Description of Artificial Sequence: Synthetic oligonucleotide
  Antisense strand to SEQ ID NO: 2336318
cuauuccagucauacacgu

SEQ ID NO: 2336320 - RNA, 19 nt, Artificial Sequence
  Description of Artificial Sequence: Synthetic oligonucleotide
  Sense strand starting at position 3479 of SEQ ID NO: 1885361
uccauccauuugugagagu

SEQ ID NO: 2336321 - RNA, 19 nt, Artificial Sequence
  Description of Artificial Sequence: Synthetic oligonucleotide
  Antisense strand to SEQ ID NO: 2336320
acucucacaaauggaugga

SEQ ID NO: 2336322 - RNA, 19 nt, Artificial Sequence
  Description of Artificial Sequence: Synthetic oligonucleotide
  Sense strand starting at position 3480 of SEQ ID NO: 1885361
ccauccauuugugagagua

SEQ ID NO: 2336323 - RNA, 19 nt, Artificial Sequence
  Description of Artificial Sequence: Synthetic oligonucleotide
  Antisense strand to SEQ ID NO: 2336322
uacucucacaaauggaugg

SEQ ID NO: 2336324 - RNA, 19 nt, Artificial Sequence
  Description of Artificial Sequence: Synthetic oligonucleotide
  Sense strand starting at position 3482 of SEQ ID NO: 1885361
auccauuugugagaguaag

SEQ ID NO: 2336325 - RNA, 19 nt, Artificial Sequence
  Description of Artificial Sequence: Synthetic oligonucleotide
  Antisense strand to SEQ ID NO: 2336324
cuuacucucacaaauggau

SEQ ID NO: 2336326 - RNA, 19 nt, Artificial Sequence
  Description of Artificial Sequence: Synthetic oligonucleotide
  Sense strand starting at position 3492 of SEQ ID NO: 1885361
gagaguaagagucgagcaa

SEQ ID NO: 2336327 - RNA, 19 nt, Artificial Sequence
  Description of Artificial Sequence: Synthetic oligonucleotide
  Antisense strand to SEQ ID NO: 2336326
uugcucgacucuuacucuc

SEQ ID NO: 2336328 - RNA, 19 nt, Artificial Sequence
  Description of Artificial Sequence: Synthetic oligonucleotide
  Sense strand starting at position 3493 of SEQ ID NO: 1885361
agaguaagagucgagcaau

SEQ ID NO: 2336329 - RNA, 19 nt, Artificial Sequence
  Description of Artificial Sequence: Synthetic oligonucleotide
  Antisense strand to SEQ ID NO: 2336328
auugcucgacucuuacucu

SEQ ID NO: 2336330 - RNA, 19 nt, Artificial Sequence
  Description of Artificial Sequence: Synthetic oligonucleotide
  Sense strand starting at position 3496 of SEQ ID NO: 1885361
guaagagucgagcaauacu

SEQ ID NO: 2336331 - RNA, 19 nt, Artificial Sequence
  Description of Artificial Sequence: Synthetic oligonucleotide
  Antisense strand to SEQ ID NO: 2336330
aguauugcucgacucuuac

SEQ ID NO: 2336332 - RNA, 19 nt, Artificial Sequence
  Description of Artificial Sequence: Synthetic oligonucleotide
  Sense strand starting at position 3505 of SEQ ID NO: 1885361
gagcaauacuagcaggauu

SEQ ID NO: 2336333 - RNA, 19 nt, Artificial Sequence
  Description of Artificial Sequence: Synthetic oligonucleotide
  Antisense strand to SEQ ID NO: 2336332
aauccugcuaguauugcuc

SEQ ID NO: 2336334 - RNA, 19 nt, Artificial Sequence
  Description of Artificial Sequence: Synthetic oligonucleotide
  Sense strand starting at position 3652 of SEQ ID NO: 1885361
acuguacagcuccaguaaa

SEQ ID NO: 2336335 - RNA, 19 nt, Artificial Sequence
  Description of Artificial Sequence: Synthetic oligonucleotide
  Antisense strand to SEQ ID NO: 2336334
uuuacuggagcuguacagu

SEQ ID NO: 2336336 - RNA, 19 nt, Artificial Sequence
  Description of Artificial Sequence: Synthetic oligonucleotide
  Sense strand starting at position 3745 of SEQ ID NO: 1885361
gggauaaagaguuguuucu

SEQ ID NO: 2336337 - RNA, 19 nt, Artificial Sequence
  Description of Artificial Sequence: Synthetic oligonucleotide
  Antisense strand to SEQ ID NO: 2336336
agaaacaacucuuuauccc

SEQ ID NO: 2336338 - RNA, 19 nt, Artificial Sequence
  Description of Artificial Sequence: Synthetic oligonucleotide
  Sense strand starting at position 3752 of SEQ ID NO: 1885361
agaguuguuucuccaacug

SEQ ID NO: 2336339 - RNA, 19 nt, Artificial Sequence
  Description of Artificial Sequence: Synthetic oligonucleotide
  Antisense strand to SEQ ID NO: 2336338
caguuggagaaacaacucu

SEQ ID NO: 2336340 - RNA, 19 nt, Artificial Sequence
  Description of Artificial Sequence: Synthetic oligonucleotide
  Sense strand starting at position 3809 of SEQ ID NO: 1885361
gugauauugcaacgacgag

SEQ ID NO: 2336341 - RNA, 19 nt, Artificial Sequence
  Description of Artificial Sequence: Synthetic oligonucleotide
  Antisense strand to SEQ ID NO: 2336340
cucgucguugcaauaucac

SEQ ID NO: 2336342 - RNA, 19 nt, Artificial Sequence
  Description of Artificial Sequence: Synthetic oligonucleotide
  Sense strand starting at position 400 of SEQ ID NO: 1885362
uuuauaccacugugauguu

SEQ ID NO: 2336343 - RNA, 19 nt, Artificial Sequence
  Description of Artificial Sequence: Synthetic oligonucleotide
  Antisense strand to SEQ ID NO: 2336342
aacaucacagugguauaaa

SEQ ID NO: 2336344 - RNA, 19 nt, Artificial Sequence
  Description of Artificial Sequence: Synthetic oligonucleotide
  Sense strand starting at position 433 of SEQ ID NO: 1885362
gcuauuacaugucucauag

SEQ ID NO: 2336345 - RNA, 19 nt, Artificial Sequence
  Description of Artificial Sequence: Synthetic oligonucleotide
  Antisense strand to SEQ ID NO: 2336344
cuaugagacauguaauagc

SEQ ID NO: 2336346 - RNA, 19 nt, Artificial Sequence
  Description of Artificial Sequence: Synthetic oligonucleotide
  Sense strand starting at position 564 of SEQ ID NO: 1885362
gaaagaaacuuuguugcuu

SEQ ID NO: 2336347 - RNA, 19 nt, Artificial Sequence
  Description of Artificial Sequence: Synthetic oligonucleotide
  Antisense strand to SEQ ID NO: 2336346
aagcaacaaaguuucuuuc

SEQ ID NO: 2336348 - RNA, 19 nt, Artificial Sequence
  Description of Artificial Sequence: Synthetic oligonucleotide
  Sense strand starting at position 575 of SEQ ID NO: 1885362
uguugcuuccagcagcaaa

SEQ ID NO: 2336349 - RNA, 19 nt, Artificial Sequence
  Description of Artificial Sequence: Synthetic oligonucleotide
  Antisense strand to SEQ ID NO: 2336348
uuugcugcuggaagcaaca

SEQ ID NO: 2336350 - RNA, 19 nt, Artificial Sequence
  Description of Artificial Sequence: Synthetic oligonucleotide
  Sense strand starting at position 626 of SEQ ID NO: 1885362
ggcauugagcccugaacca

SEQ ID NO: 2336351 - RNA, 19 nt, Artificial Sequence
  Description of Artificial Sequence: Synthetic oligonucleotide
  Antisense strand to SEQ ID NO: 2336350
ugguucagggcucaaugcc

SEQ ID NO: 2336352 - RNA, 19 nt, Artificial Sequence
  Description of Artificial Sequence: Synthetic oligonucleotide
  Sense strand starting at position 672 of SEQ ID NO: 1885362
gcugcuuucccuugaauau

SEQ ID NO: 2336353 - RNA, 19 nt, Artificial Sequence
  Description of Artificial Sequence: Synthetic oligonucleotide
  Antisense strand to SEQ ID NO: 2336352
auauucaagggaaagcagc

SEQ ID NO: 2336354 - RNA, 19 nt, Artificial Sequence
  Description of Artificial Sequence: Synthetic oligonucleotide
  Sense strand starting at position 673 of SEQ ID NO: 1885362
cugcuuucccuugaauaug

SEQ ID NO: 2336355 - RNA, 19 nt, Artificial Sequence
  Description of Artificial Sequence: Synthetic oligonucleotide
  Antisense strand to SEQ ID NO: 2336354
cauauucaagggaaagcag

SEQ ID NO: 2336356 - RNA, 19 nt, Artificial Sequence
  Description of Artificial Sequence: Synthetic oligonucleotide
  Sense strand starting at position 804 of SEQ ID NO: 1885362
uccaacucuuaggaagaua

SEQ ID NO: 2336357 - RNA, 19 nt, Artificial Sequence
  Description of Artificial Sequence: Synthetic oligonucleotide
  Antisense strand to SEQ ID NO: 2336356
uaucuuccuaagaguugga

SEQ ID NO: 2336358 - RNA, 19 nt, Artificial Sequence
  Description of Artificial Sequence: Synthetic oligonucleotide
  Sense strand starting at position 832 of SEQ ID NO: 1885362
aaagaaauguuuggacaag

SEQ ID NO: 2336359 - RNA, 19 nt, Artificial Sequence
  Description of Artificial Sequence: Synthetic oligonucleotide
  Antisense strand to SEQ ID NO: 2336358
cuuguccaaacauuucuuu

SEQ ID NO: 2336360 - RNA, 19 nt, Artificial Sequence
  Description of Artificial Sequence: Synthetic oligonucleotide
  Sense strand starting at position 851 of SEQ ID NO: 1885362
gcuuuaagauuacauaaug

SEQ ID NO: 2336361 - RNA, 19 nt, Artificial Sequence
  Description of Artificial Sequence: Synthetic oligonucleotide
  Antisense strand to SEQ ID NO: 2336360
cauuauguaaucuuaaagc

SEQ ID NO: 2336362 - RNA, 19 nt, Artificial Sequence
  Description of Artificial Sequence: Synthetic oligonucleotide
  Sense strand starting at position 874 of SEQ ID NO: 1885362
ggauauaaauaagacucau

SEQ ID NO: 2336363 - RNA, 19 nt, Artificial Sequence
  Description of Artificial Sequence: Synthetic oligonucleotide
  Antisense strand to SEQ ID NO: 2336362
augagucuuauuuauaucc

SEQ ID NO: 2336364 - RNA, 19 nt, Artificial Sequence
  Description of Artificial Sequence: Synthetic oligonucleotide
  Sense strand starting at position 1139 of SEQ ID NO: 1885362
aggugagugcgccaucaca

SEQ ID NO: 2336365 - RNA, 19 nt, Artificial Sequence
  Description of Artificial Sequence: Synthetic oligonucleotide
  Antisense strand to SEQ ID NO: 2336364
ugugauggcgcacucaccu

SEQ ID NO: 2336366 - RNA, 19 nt, Artificial Sequence
  Description of Artificial Sequence: Synthetic oligonucleotide
  Sense strand starting at position 1327 of SEQ ID NO: 1885362
cagggcuuccuguggcuaa

SEQ ID NO: 2336367 - RNA, 19 nt, Artificial Sequence
  Description of Artificial Sequence: Synthetic oligonucleotide
  Antisense strand to SEQ ID NO: 2336366
uuagccacaggaagcccug

SEQ ID NO: 2336368 - RNA, 19 nt, Artificial Sequence
  Description of Artificial Sequence: Synthetic oligonucleotide
  Sense strand starting at position 1438 of SEQ ID NO: 1885362
ugcacuguccuacagguau

SEQ ID NO: 2336369 - RNA, 19 nt, Artificial Sequence
  Description of Artificial Sequence: Synthetic oligonucleotide
  Antisense strand to SEQ ID NO: 2336368
auaccuguaggacagugca

SEQ ID NO: 2336370 - RNA, 19 nt, Artificial Sequence
  Description of Artificial Sequence: Synthetic oligonucleotide
  Sense strand starting at position 1444 of SEQ ID NO: 1885362
guccuacagguauagaauu

SEQ ID NO: 2336371 - RNA, 19 nt, Artificial Sequence
  Description of Artificial Sequence: Synthetic oligonucleotide
  Antisense strand to SEQ ID NO: 2336370
aauucuauaccuguaggac

SEQ ID NO: 2336372 - RNA, 19 nt, Artificial Sequence
  Description of Artificial Sequence: Synthetic oligonucleotide
  Sense strand starting at position 1477 of SEQ ID NO: 1885362
guguacauugcagacuaaa

SEQ ID NO: 2336373 - RNA, 19 nt, Artificial Sequence
  Description of Artificial Sequence: Synthetic oligonucleotide
  Antisense strand to SEQ ID NO: 2336372
uuuagucugcaauguacac

SEQ ID NO: 2336374 - RNA, 19 nt, Artificial Sequence
  Description of Artificial Sequence: Synthetic oligonucleotide
  Sense strand starting at position 1539 of SEQ ID NO: 1885362
aggcaugccugaguucaag

SEQ ID NO: 2336375 - RNA, 19 nt, Artificial Sequence
  Description of Artificial Sequence: Synthetic oligonucleotide
  Antisense strand to SEQ ID NO: 2336374
cuugaacucaggcaugccu

SEQ ID NO: 2336376 - RNA, 19 nt, Artificial Sequence
  Description of Artificial Sequence: Synthetic oligonucleotide
  Sense strand starting at position 1545 of SEQ ID NO: 1885362
gccugaguucaagagguca

SEQ ID NO: 2336377 - RNA, 19 nt, Artificial Sequence
  Description of Artificial Sequence: Synthetic oligonucleotide
  Antisense strand to SEQ ID NO: 2336376
ugaccucuugaacucaggc

SEQ ID NO: 2336378 - RNA, 19 nt, Artificial Sequence
  Description of Artificial Sequence: Synthetic oligonucleotide
  Sense strand starting at position 1688 of SEQ ID NO: 1885362
gauccuacauuauagggau

SEQ ID NO: 2336379 - RNA, 19 nt, Artificial Sequence
  Description of Artificial Sequence: Synthetic oligonucleotide
  Antisense strand to SEQ ID NO: 2336378
aucccuauaauguaggauc

SEQ ID NO: 2336380 - RNA, 19 nt, Artificial Sequence
  Description of Artificial Sequence: Synthetic oligonucleotide
  Sense strand starting at position 1692 of SEQ ID NO: 1885362
cuacauuauagggaugugu

SEQ ID NO: 2336381 - RNA, 19 nt, Artificial Sequence
  Description of Artificial Sequence: Synthetic oligonucleotide
  Antisense strand to SEQ ID NO: 2336380
acacaucccuauaauguag

SEQ ID NO: 2336382 - RNA, 19 nt, Artificial Sequence
  Description of Artificial Sequence: Synthetic oligonucleotide
  Sense strand starting at position 1724 of SEQ ID NO: 1885362
ugaguacugaugcacguua

SEQ ID NO: 2336383 - RNA, 19 nt, Artificial Sequence
  Description of Artificial Sequence: Synthetic oligonucleotide
  Antisense strand to SEQ ID NO: 2336382
uaacgugcaucaguacuca

SEQ ID NO: 2336384 - RNA, 19 nt, Artificial Sequence
  Description of Artificial Sequence: Synthetic oligonucleotide
  Sense strand starting at position 1737 of SEQ ID NO: 1885362
acguuaagcccucagaaca

SEQ ID NO: 2336385 - RNA, 19 nt, Artificial Sequence
  Description of Artificial Sequence: Synthetic oligonucleotide
  Antisense strand to SEQ ID NO: 2336384
uguucugagggcuuaacgu

SEQ ID NO: 2336386 - RNA, 19 nt, Artificial Sequence
  Description of Artificial Sequence: Synthetic oligonucleotide
  Sense strand starting at position 1772 of SEQ ID NO: 1885362
cagaguuugguagaugcua

SEQ ID NO: 2336387 - RNA, 19 nt, Artificial Sequence
  Description of Artificial Sequence: Synthetic oligonucleotide
  Antisense strand to SEQ ID NO: 2336386
uagcaucuaccaaacucug

SEQ ID NO: 2336388 - RNA, 19 nt, Artificial Sequence
  Description of Artificial Sequence: Synthetic oligonucleotide
  Sense strand starting at position 1780 of SEQ ID NO: 1885362
gguagaugcuaccuaacau

SEQ ID NO: 2336389 - RNA, 19 nt, Artificial Sequence
  Description of Artificial Sequence: Synthetic oligonucleotide
  Antisense strand to SEQ ID NO: 2336388
auguuagguagcaucuacc

SEQ ID NO: 2336390 - RNA, 19 nt, Artificial Sequence
  Description of Artificial Sequence: Synthetic oligonucleotide
  Sense strand starting at position 1813 of SEQ ID NO: 1885362
auucuagaacuauguagag

SEQ ID NO: 2336391 - RNA, 19 nt, Artificial Sequence
  Description of Artificial Sequence: Synthetic oligonucleotide
  Antisense strand to SEQ ID NO: 2336390
cucuacauaguucuagaau

SEQ ID NO: 2336392 - RNA, 19 nt, Artificial Sequence
  Description of Artificial Sequence: Synthetic oligonucleotide
  Sense strand starting at position 1885 of SEQ ID NO: 1885362
uccugaaauccagaguccu

SEQ ID NO: 2336393 - RNA, 19 nt, Artificial Sequence
  Description of Artificial Sequence: Synthetic oligonucleotide
  Antisense strand to SEQ ID NO: 2336392
aggacucuggauuucagga

SEQ ID NO: 2336394 - RNA, 19 nt, Artificial Sequence
  Description of Artificial Sequence: Synthetic oligonucleotide
  Sense strand starting at position 1896 of SEQ ID NO: 1885362
agaguccuccugcagagau

SEQ ID NO: 2336395 - RNA, 19 nt, Artificial Sequence
  Description of Artificial Sequence: Synthetic oligonucleotide
  Antisense strand to SEQ ID NO: 2336394
aucucugcaggaggacucu

SEQ ID NO: 2336396 - RNA, 19 nt, Artificial Sequence
  Description of Artificial Sequence: Synthetic oligonucleotide
  Sense strand starting at position 2257 of SEQ ID NO: 1885362
agaugagaauuaggauaug

SEQ ID NO: 2336397 - RNA, 19 nt, Artificial Sequence
  Description of Artificial Sequence: Synthetic oligonucleotide
  Antisense strand to SEQ ID NO: 2336396
cauauccuaauucucaucu

SEQ ID NO: 2336398 - RNA, 19 nt, Artificial Sequence
  Description of Artificial Sequence: Synthetic oligonucleotide
  Sense strand starting at position 2263 of SEQ ID NO: 1885362
gaauuaggauaugggauaa

SEQ ID NO: 2336399 - RNA, 19 nt, Artificial Sequence
  Description of Artificial Sequence: Synthetic oligonucleotide
  Antisense strand to SEQ ID NO: 2336398
uuaucccauauccuaauuc

SEQ ID NO: 2336400 - RNA, 19 nt, Artificial Sequence
  Description of Artificial Sequence: Synthetic oligonucleotide
  Sense strand starting at position 2411 of SEQ ID NO: 1885362
aggagaauuuguugggaaa

SEQ ID NO: 2336401 - RNA, 19 nt, Artificial Sequence
  Description of Artificial Sequence: Synthetic oligonucleotide
  Antisense strand to SEQ ID NO: 2336400
uuucccaacaaauucuccu

SEQ ID NO: 2336402 - RNA, 19 nt, Artificial Sequence
  Description of Artificial Sequence: Synthetic oligonucleotide
  Sense strand starting at position 2413 of SEQ ID NO: 1885362
gagaauuuguugggaaagg

SEQ ID NO: 2336403 - RNA, 19 nt, Artificial Sequence
  Description of Artificial Sequence: Synthetic oligonucleotide
  Antisense strand to SEQ ID NO: 2336402
ccuuucccaacaaauucuc

SEQ ID NO: 2336404 - RNA, 19 nt, Artificial Sequence
  Description of Artificial Sequence: Synthetic oligonucleotide
  Sense strand starting at position 2414 of SEQ ID NO: 1885362
agaauuuguugggaaaggu

SEQ ID NO: 2336405 - RNA, 19 nt, Artificial Sequence
  Description of Artificial Sequence: Synthetic oligonucleotide
  Antisense strand to SEQ ID NO: 2336404
accuuucccaacaaauucu

SEQ ID NO: 2336406 - RNA, 19 nt, Artificial Sequence
  Description of Artificial Sequence: Synthetic oligonucleotide
  Sense strand starting at position 2446 of SEQ ID NO: 1885362
gagugagauuucuccgccu

SEQ ID NO: 2336407 - RNA, 19 nt, Artificial Sequence
  Description of Artificial Sequence: Synthetic oligonucleotide
  Antisense strand to SEQ ID NO: 2336406
aggcggagaaaucucacuc

SEQ ID NO: 2336408 - RNA, 19 nt, Artificial Sequence
  Description of Artificial Sequence: Synthetic oligonucleotide
  Sense strand starting at position 2449 of SEQ ID NO: 1885362
ugagauuucuccgccuguu

SEQ ID NO: 2336409 - RNA, 19 nt, Artificial Sequence
  Description of Artificial Sequence: Synthetic oligonucleotide
  Antisense strand to SEQ ID NO: 2336408
aacaggcggagaaaucuca

SEQ ID NO: 2336410 - RNA, 19 nt, Artificial Sequence
  Description of Artificial Sequence: Synthetic oligonucleotide
  Sense strand starting at position 2485 of SEQ ID NO: 1885362
agagcaaaucgcuggguga

SEQ ID NO: 2336411 - RNA, 19 nt, Artificial Sequence
  Description of Artificial Sequence: Synthetic oligonucleotide
  Antisense strand to SEQ ID NO: 2336410
ucacccagcgauuugcucu

SEQ ID NO: 2336412 - RNA, 19 nt, Artificial Sequence
  Description of Artificial Sequence: Synthetic oligonucleotide
  Sense strand starting at position 2750 of SEQ ID NO: 1885362
gcucaagcucuguaaccuu

SEQ ID NO: 2336413 - RNA, 19 nt, Artificial Sequence
  Description of Artificial Sequence: Synthetic oligonucleotide
  Antisense strand to SEQ ID NO: 2336412
aagguuacagagcuugagc

SEQ ID NO: 2336414 - RNA, 19 nt, Artificial Sequence
  Description of Artificial Sequence: Synthetic oligonucleotide
  Sense strand starting at position 2962 of SEQ ID NO: 1885362
ggacgagacuccgcuggua

SEQ ID NO: 2336415 - RNA, 19 nt, Artificial Sequence
  Description of Artificial Sequence: Synthetic oligonucleotide
  Antisense strand to SEQ ID NO: 2336414
uaccagcggagucucgucc

SEQ ID NO: 2336416 - RNA, 19 nt, Artificial Sequence
  Description of Artificial Sequence: Synthetic oligonucleotide
  Sense strand starting at position 3224 of SEQ ID NO: 1885362
acgugcauguccucccaaa

SEQ ID NO: 2336417 - RNA, 19 nt, Artificial Sequence
  Description of Artificial Sequence: Synthetic oligonucleotide
  Antisense strand to SEQ ID NO: 2336416
uuugggaggacaugcacgu

SEQ ID NO: 2336418 - RNA, 19 nt, Artificial Sequence
  Description of Artificial Sequence: Synthetic oligonucleotide
  Sense strand starting at position 3403 of SEQ ID NO: 1885362
ggacucaaauccucccgau

SEQ ID NO: 2336419 - RNA, 19 nt, Artificial Sequence
  Description of Artificial Sequence: Synthetic oligonucleotide
  Antisense strand to SEQ ID NO: 2336418
aucgggaggauuugagucc

SEQ ID NO: 2336420 - RNA, 19 nt, Artificial Sequence
  Description of Artificial Sequence: Synthetic oligonucleotide
  Sense strand starting at position 3417 of SEQ ID NO: 1885362
ccgauauucuaccuaacag

SEQ ID NO: 2336421 - RNA, 19 nt, Artificial Sequence
  Description of Artificial Sequence: Synthetic oligonucleotide
  Antisense strand to SEQ ID NO: 2336420
cuguuagguagaauaucgg

SEQ ID NO: 2336422 - RNA, 19 nt, Artificial Sequence
  Description of Artificial Sequence: Synthetic oligonucleotide
  Sense strand starting at position 197 of SEQ ID NO: 1885363
agaagucagccagauguau

SEQ ID NO: 2336423 - RNA, 19 nt, Artificial Sequence
  Description of Artificial Sequence: Synthetic oligonucleotide
  Antisense strand to SEQ ID NO: 2336422
auacaucuggcugacuucu

SEQ ID NO: 2336424 - RNA, 19 nt, Artificial Sequence
  Description of Artificial Sequence: Synthetic oligonucleotide
  Sense strand starting at position 319 of SEQ ID NO: 1885363
aauguucuggauugaauug

SEQ ID NO: 2336425 - RNA, 19 nt, Artificial Sequence
  Description of Artificial Sequence: Synthetic oligonucleotide
  Antisense strand to SEQ ID NO: 2336424
caauucaauccagaacauu

SEQ ID NO: 2336426 - RNA, 19 nt, Artificial Sequence
  Description of Artificial Sequence: Synthetic oligonucleotide
  Sense strand starting at position 422 of SEQ ID NO: 1885363
aaagguaaguggguugaaa

SEQ ID NO: 2336427 - RNA, 19 nt, Artificial Sequence
  Description of Artificial Sequence: Synthetic oligonucleotide
  Antisense strand to SEQ ID NO: 2336426
uuucaacccacuuaccuuu

SEQ ID NO: 2336428 - RNA, 19 nt, Artificial Sequence
  Description of Artificial Sequence: Synthetic oligonucleotide
  Sense strand starting at position 424 of SEQ ID NO: 1885363
agguaaguggguugaaaug

SEQ ID NO: 2336429 - RNA, 19 nt, Artificial Sequence
  Description of Artificial Sequence: Synthetic oligonucleotide
  Antisense strand to SEQ ID NO: 2336428
cauuucaacccacuuaccu

SEQ ID NO: 2336430 - RNA, 19 nt, Artificial Sequence
  Description of Artificial Sequence: Synthetic oligonucleotide
  Sense strand starting at position 661 of SEQ ID NO: 1885363
caugguucugcagaaaccu

SEQ ID NO: 2336431 - RNA, 19 nt, Artificial Sequence
  Description of Artificial Sequence: Synthetic oligonucleotide
  Antisense strand to SEQ ID NO: 2336430
agguuucugcagaaccaug

SEQ ID NO: 2336432 - RNA, 19 nt, Artificial Sequence
  Description of Artificial Sequence: Synthetic oligonucleotide
  Sense strand starting at position 1033 of SEQ ID NO: 1885363
ccaaaucauuguguuuaaa

SEQ ID NO: 2336433 - RNA, 19 nt, Artificial Sequence
  Description of Artificial Sequence: Synthetic oligonucleotide
  Antisense strand to SEQ ID NO: 2336432
uuuaaacacaaugauuugg

SEQ ID NO: 2336434 - RNA, 19 nt, Artificial Sequence
  Description of Artificial Sequence: Synthetic oligonucleotide
  Sense strand starting at position 1146 of SEQ ID NO: 1885363
uggacuccggcucauauaa

SEQ ID NO: 2336435 - RNA, 19 nt, Artificial Sequence
  Description of Artificial Sequence: Synthetic oligonucleotide
  Antisense strand to SEQ ID NO: 2336434
uuauaugagccggagucca

SEQ ID NO: 2336436 - RNA, 19 nt, Artificial Sequence
  Description of Artificial Sequence: Synthetic oligonucleotide
  Sense strand starting at position 1190 of SEQ ID NO: 1885363
agaauauuacucuacgagu

SEQ ID NO: 2336437 - RNA, 19 nt, Artificial Sequence
  Description of Artificial Sequence: Synthetic oligonucleotide
  Antisense strand to SEQ ID NO: 2336436
acucguagaguaauauucu

SEQ ID NO: 2336438 - RNA, 19 nt, Artificial Sequence
  Description of Artificial Sequence: Synthetic oligonucleotide
  Sense strand starting at position 1198 of SEQ ID NO: 1885363
acucuacgaguguaagaau

SEQ ID NO: 2336439 - RNA, 19 nt, Artificial Sequence
  Description of Artificial Sequence: Synthetic oligonucleotide
  Antisense strand to SEQ ID NO: 2336438
auucuuacacucguagagu

SEQ ID NO: 2336440 - RNA, 19 nt, Artificial Sequence
  Description of Artificial Sequence: Synthetic oligonucleotide
  Sense strand starting at position 1398 of SEQ ID NO: 1885363
gcaucucagucacuuagaa

SEQ ID NO: 2336441 - RNA, 19 nt, Artificial Sequence
  Description of Artificial Sequence: Synthetic oligonucleotide
  Antisense strand to SEQ ID NO: 2336440
uucuaagugacugagaugc

SEQ ID NO: 2336442 - RNA, 19 nt, Artificial Sequence
  Description of Artificial Sequence: Synthetic oligonucleotide
  Sense strand starting at position 1476 of SEQ ID NO: 1885363
ucuucuguugaguaagaau

SEQ ID NO: 2336443 - RNA, 19 nt, Artificial Sequence
  Description of Artificial Sequence: Synthetic oligonucleotide
  Antisense strand to SEQ ID NO: 2336442
auucuuacucaacagaaga

SEQ ID NO: 2336444 - RNA, 19 nt, Artificial Sequence
  Description of Artificial Sequence: Synthetic oligonucleotide
  Sense strand starting at position 1506 of SEQ ID NO: 1885363
gaguguucuauugagucag

SEQ ID NO: 2336445 - RNA, 19 nt, Artificial Sequence
  Description of Artificial Sequence: Synthetic oligonucleotide
  Antisense strand to SEQ ID NO: 2336444
cugacucaauagaacacuc

SEQ ID NO: 2336446 - RNA, 19 nt, Artificial Sequence
  Description of Artificial Sequence: Synthetic oligonucleotide
  Sense strand starting at position 1510 of SEQ ID NO: 1885363
guucuauugagucagaaug

SEQ ID NO: 2336447 - RNA, 19 nt, Artificial Sequence
  Description of Artificial Sequence: Synthetic oligonucleotide
  Antisense strand to SEQ ID NO: 2336446
cauucugacucaauagaac

SEQ ID NO: 2336448 - RNA, 19 nt, Artificial Sequence
  Description of Artificial Sequence: Synthetic oligonucleotide
  Sense strand starting at position 1518 of SEQ ID NO: 1885363
gagucagaaugucuaaagu

SEQ ID NO: 2336449 - RNA, 19 nt, Artificial Sequence
  Description of Artificial Sequence: Synthetic oligonucleotide
  Antisense strand to SEQ ID NO: 2336448
acuuuagacauucugacuc

SEQ ID NO: 2336450 - RNA, 19 nt, Artificial Sequence
  Description of Artificial Sequence: Synthetic oligonucleotide
  Sense strand starting at position 1594 of SEQ ID NO: 1885363
cuauguuuacuugacuguu

SEQ ID NO: 2336451 - RNA, 19 nt, Artificial Sequence
  Description of Artificial Sequence: Synthetic oligonucleotide
  Antisense strand to SEQ ID NO: 2336450
aacagucaaguaaacauag

SEQ ID NO: 2336452 - RNA, 19 nt, Artificial Sequence
  Description of Artificial Sequence: Synthetic oligonucleotide
  Sense strand starting at position 1657 of SEQ ID NO: 1885363
ugagcuaaauguguaccaa

SEQ ID NO: 2336453 - RNA, 19 nt, Artificial Sequence
  Description of Artificial Sequence: Synthetic oligonucleotide
  Antisense strand to SEQ ID NO: 2336452
uugguacacauuuagcuca

SEQ ID NO: 2336454 - RNA, 19 nt, Artificial Sequence
  Description of Artificial Sequence: Synthetic oligonucleotide
  Sense strand starting at position 1658 of SEQ ID NO: 1885363
gagcuaaauguguaccaau

SEQ ID NO: 2336455 - RNA, 19 nt, Artificial Sequence
  Description of Artificial Sequence: Synthetic oligonucleotide
  Antisense strand to SEQ ID NO: 2336454
auugguacacauuuagcuc

SEQ ID NO: 2336456 - RNA, 19 nt, Artificial Sequence
  Description of Artificial Sequence: Synthetic oligonucleotide
  Sense strand starting at position 1681 of SEQ ID NO: 1885363
guuucugcaguauaaacaa

SEQ ID NO: 2336457 - RNA, 19 nt, Artificial Sequence
  Description of Artificial Sequence: Synthetic oligonucleotide
  Antisense strand to SEQ ID NO: 2336456
uuguuuauacugcagaaac

SEQ ID NO: 2336458 - RNA, 19 nt, Artificial Sequence
  Description of Artificial Sequence: Synthetic oligonucleotide
  Sense strand starting at position 1715 of SEQ ID NO: 1885363
aggucaugcagugagaaca

SEQ ID NO: 2336459 - RNA, 19 nt, Artificial Sequence
  Description of Artificial Sequence: Synthetic oligonucleotide
  Antisense strand to SEQ ID NO: 2336458
uguucucacugcaugaccu

SEQ ID NO: 2336460 - RNA, 19 nt, Artificial Sequence
  Description of Artificial Sequence: Synthetic oligonucleotide
  Sense strand starting at position 1731 of SEQ ID NO: 1885363
acauuuaugcuguguggga

SEQ ID NO: 2336461 - RNA, 19 nt, Artificial Sequence
  Description of Artificial Sequence: Synthetic oligonucleotide
  Antisense strand to SEQ ID NO: 2336460
ucccacacagcauaaaugu

SEQ ID NO: 2336462 - RNA, 19 nt, Artificial Sequence
  Description of Artificial Sequence: Synthetic oligonucleotide
  Sense strand starting at position 1859 of SEQ ID NO: 1885363
ugauuccucuaaucaaggu

SEQ ID NO: 2336463 - RNA, 19 nt, Artificial Sequence
  Description of Artificial Sequence: Synthetic oligonucleotide
  Antisense strand to SEQ ID NO: 2336462
accuugauuagaggaauca

SEQ ID NO: 2336464 - RNA, 19 nt, Artificial Sequence
  Description of Artificial Sequence: Synthetic oligonucleotide
  Sense strand starting at position 1872 of SEQ ID NO: 1885363
caaggugcuucuuuagaua

SEQ ID NO: 2336465 - RNA, 19 nt, Artificial Sequence
  Description of Artificial Sequence: Synthetic oligonucleotide
  Antisense strand to SEQ ID NO: 2336464
uaucuaaagaagcaccuug

SEQ ID NO: 2336466 - RNA, 19 nt, Artificial Sequence
  Description of Artificial Sequence: Synthetic oligonucleotide
  Sense strand starting at position 1890 of SEQ ID NO: 1885363
agcuuacacguugaauuau

SEQ ID NO: 2336467 - RNA, 19 nt, Artificial Sequence
  Description of Artificial Sequence: Synthetic oligonucleotide
  Antisense strand to SEQ ID NO: 2336466
auaauucaacguguaagcu

SEQ ID NO: 2336468 - RNA, 19 nt, Artificial Sequence
  Description of Artificial Sequence: Synthetic oligonucleotide
  Sense strand starting at position 1940 of SEQ ID NO: 1885363
acugaagagucuuugggca

SEQ ID NO: 2336469 - RNA, 19 nt, Artificial Sequence
  Description of Artificial Sequence: Synthetic oligonucleotide
  Antisense strand to SEQ ID NO: 2336468
ugcccaaagacucuucagu

SEQ ID NO: 2336470 - RNA, 19 nt, Artificial Sequence
  Description of Artificial Sequence: Synthetic oligonucleotide
  Sense strand starting at position 1959 of SEQ ID NO: 1885363
gucuccuggaggugguaaa

SEQ ID NO: 2336471 - RNA, 19 nt, Artificial Sequence
  Description of Artificial Sequence: Synthetic oligonucleotide
  Antisense strand to SEQ ID NO: 2336470
uuuaccaccuccaggagac

SEQ ID NO: 2336472 - RNA, 19 nt, Artificial Sequence
  Description of Artificial Sequence: Synthetic oligonucleotide
  Sense strand starting at position 2156 of SEQ ID NO: 1885363
gggugauggcuuggacaug

SEQ ID NO: 2336473 - RNA, 19 nt, Artificial Sequence
  Description of Artificial Sequence: Synthetic oligonucleotide
  Antisense strand to SEQ ID NO: 2336472
cauguccaagccaucaccc

SEQ ID NO: 2336474 - RNA, 19 nt, Artificial Sequence
  Description of Artificial Sequence: Synthetic oligonucleotide
  Sense strand starting at position 2174 of SEQ ID NO: 1885363
gcugguaacagagguaaca

SEQ ID NO: 2336475 - RNA, 19 nt, Artificial Sequence
  Description of Artificial Sequence: Synthetic oligonucleotide
  Antisense strand to SEQ ID NO: 2336474
uguuaccucuguuaccagc

SEQ ID NO: 2336476 - RNA, 19 nt, Artificial Sequence
  Description of Artificial Sequence: Synthetic oligonucleotide
  Sense strand starting at position 2235 of SEQ ID NO: 1885363
agaugagucacugggucaa

SEQ ID NO: 2336477 - RNA, 19 nt, Artificial Sequence
  Description of Artificial Sequence: Synthetic oligonucleotide
  Antisense strand to SEQ ID NO: 2336476
uugacccagugacucaucu

SEQ ID NO: 2336478 - RNA, 19 nt, Artificial Sequence
  Description of Artificial Sequence: Synthetic oligonucleotide
  Sense strand starting at position 2389 of SEQ ID NO: 1885363
uacucaaaugagugaaagu

SEQ ID NO: 2336479 - RNA, 19 nt, Artificial Sequence
  Description of Artificial Sequence: Synthetic oligonucleotide
  Antisense strand to SEQ ID NO: 2336478
acuuucacucauuugagua

SEQ ID NO: 2336480 - RNA, 19 nt, Artificial Sequence
  Description of Artificial Sequence: Synthetic oligonucleotide
  Sense strand starting at position 2580 of SEQ ID NO: 1885363
uuaccuguuggauguacaa

SEQ ID NO: 2336481 - RNA, 19 nt, Artificial Sequence
  Description of Artificial Sequence: Synthetic oligonucleotide
  Antisense strand to SEQ ID NO: 2336480
uuguacauccaacagguaa

SEQ ID NO: 2336482 - RNA, 19 nt, Artificial Sequence
  Description of Artificial Sequence: Synthetic oligonucleotide
  Sense strand starting at position 3124 of SEQ ID NO: 1885363
uuuaaaucugggcauuguu

SEQ ID NO: 2336483 - RNA, 19 nt, Artificial Sequence
  Description of Artificial Sequence: Synthetic oligonucleotide
  Antisense strand to SEQ ID NO: 2336482
aacaaugcccagauuuaaa

SEQ ID NO: 2336484 - RNA, 19 nt, Artificial Sequence
  Description of Artificial Sequence: Synthetic oligonucleotide
  Sense strand starting at position 3223 of SEQ ID NO: 1885363
uccacaauuccuugguaug

SEQ ID NO: 2336485 - RNA, 19 nt, Artificial Sequence
  Description of Artificial Sequence: Synthetic oligonucleotide
  Antisense strand to SEQ ID NO: 2336484
cauaccaaggaauugugga

SEQ ID NO: 2336486 - RNA, 19 nt, Artificial Sequence
  Description of Artificial Sequence: Synthetic oligonucleotide
  Sense strand starting at position 3225 of SEQ ID NO: 1885363
cacaauuccuugguaugga

SEQ ID NO: 2336487 - RNA, 19 nt, Artificial Sequence
  Description of Artificial Sequence: Synthetic oligonucleotide
  Antisense strand to SEQ ID NO: 2336486
uccauaccaaggaauugug

SEQ ID NO: 2336488 - RNA, 19 nt, Artificial Sequence
  Description of Artificial Sequence: Synthetic oligonucleotide
  Sense strand starting at position 3448 of SEQ ID NO: 1885363
cacuuaucaugggugggua

SEQ ID NO: 2336489 - RNA, 19 nt, Artificial Sequence
  Description of Artificial Sequence: Synthetic oligonucleotide
  Antisense strand to SEQ ID NO: 2336488
uacccacccaugauaagug

SEQ ID NO: 2336490 - RNA, 19 nt, Artificial Sequence
  Description of Artificial Sequence: Synthetic oligonucleotide
  Sense strand starting at position 3449 of SEQ ID NO: 1885363
acuuaucauggguggguaa

SEQ ID NO: 2336491 - RNA, 19 nt, Artificial Sequence
  Description of Artificial Sequence: Synthetic oligonucleotide
  Antisense strand to SEQ ID NO: 2336490
uuacccacccaugauaagu

SEQ ID NO: 2336492 - RNA, 19 nt, Artificial Sequence
  Description of Artificial Sequence: Synthetic oligonucleotide
  Sense strand starting at position 3451 of SEQ ID NO: 1885363
uuaucauggguggguaagu

SEQ ID NO: 2336493 - RNA, 19 nt, Artificial Sequence
  Description of Artificial Sequence: Synthetic oligonucleotide
  Antisense strand to SEQ ID NO: 2336492
acuuacccacccaugauaa

SEQ ID NO: 2336494 - RNA, 19 nt, Artificial Sequence
  Description of Artificial Sequence: Synthetic oligonucleotide
  Sense strand starting at position 3460 of SEQ ID NO: 1885363
guggguaaguuaccaaaua

SEQ ID NO: 2336495 - RNA, 19 nt, Artificial Sequence
  Description of Artificial Sequence: Synthetic oligonucleotide
  Antisense strand to SEQ ID NO: 2336494
uauuugguaacuuacccac

SEQ ID NO: 2336496 - RNA, 19 nt, Artificial Sequence
  Description of Artificial Sequence: Synthetic oligonucleotide
  Sense strand starting at position 3517 of SEQ ID NO: 1885363
uaagaaacgguauagucua

SEQ ID NO: 2336497 - RNA, 19 nt, Artificial Sequence
  Description of Artificial Sequence: Synthetic oligonucleotide
  Antisense strand to SEQ ID NO: 2336496
uagacuauaccguuucuua

SEQ ID NO: 2336498 - RNA, 19 nt, Artificial Sequence
  Description of Artificial Sequence: Synthetic oligonucleotide
  Sense strand starting at position 3674 of SEQ ID NO: 1885363
aaugguauagucuaguguu

SEQ ID NO: 2336499 - RNA, 19 nt, Artificial Sequence
  Description of Artificial Sequence: Synthetic oligonucleotide
  Antisense strand to SEQ ID NO: 2336498
aacacuagacuauaccauu

SEQ ID NO: 2336500 - RNA, 19 nt, Artificial Sequence
  Description of Artificial Sequence: Synthetic oligonucleotide
  Sense strand starting at position 3870 of SEQ ID NO: 1885363
ccacaugacugcuuguaag

SEQ ID NO: 2336501 - RNA, 19 nt, Artificial Sequence
  Description of Artificial Sequence: Synthetic oligonucleotide
  Antisense strand to SEQ ID NO: 2336500
cuuacaagcagucaugugg

SEQ ID NO: 2336502 - RNA, 19 nt, Artificial Sequence
  Description of Artificial Sequence: Synthetic oligonucleotide
  Sense strand starting at position 831 of SEQ ID NO: 1885364
uauauaggguucuugucaa

SEQ ID NO: 2336503 - RNA, 19 nt, Artificial Sequence
  Description of Artificial Sequence: Synthetic oligonucleotide
  Antisense strand to SEQ ID NO: 2336502
uugacaagaacccuauaua

SEQ ID NO: 2336504 - RNA, 19 nt, Artificial Sequence
  Description of Artificial Sequence: Synthetic oligonucleotide
  Sense strand starting at position 838 of SEQ ID NO: 1885364
gguucuugucaauguaaag

SEQ ID NO: 2336505 - RNA, 19 nt, Artificial Sequence
  Description of Artificial Sequence: Synthetic oligonucleotide
  Antisense strand to SEQ ID NO: 2336504
cuuuacauugacaagaacc

SEQ ID NO: 2336506 - RNA, 19 nt, Artificial Sequence
  Description of Artificial Sequence: Synthetic oligonucleotide
  Sense strand starting at position 855 of SEQ ID NO: 1885364
agacuaagcucaguuguau

SEQ ID NO: 2336507 - RNA, 19 nt, Artificial Sequence
  Description of Artificial Sequence: Synthetic oligonucleotide
  Antisense strand to SEQ ID NO: 2336506
auacaacugagcuuagucu

SEQ ID NO: 2336508 - RNA, 19 nt, Artificial Sequence
  Description of Artificial Sequence: Synthetic oligonucleotide
  Sense strand starting at position 952 of SEQ ID NO: 1885364
guguaaguacauuaaagca

SEQ ID NO: 2336509 - RNA, 19 nt, Artificial Sequence
  Description of Artificial Sequence: Synthetic oligonucleotide
  Antisense strand to SEQ ID NO: 2336508
ugcuuuaauguacuuacac

SEQ ID NO: 2336510 - RNA, 19 nt, Artificial Sequence
  Description of Artificial Sequence: Synthetic oligonucleotide
  Sense strand starting at position 974 of SEQ ID NO: 1885364
cuauaauuaugugaaagga

SEQ ID NO: 2336511 - RNA, 19 nt, Artificial Sequence
  Description of Artificial Sequence: Synthetic oligonucleotide
  Antisense strand to SEQ ID NO: 2336510
uccuuucacauaauuauag

SEQ ID NO: 2336512 - RNA, 19 nt, Artificial Sequence
  Description of Artificial Sequence: Synthetic oligonucleotide
  Sense strand starting at position 1035 of SEQ ID NO: 1885364
guaggaguuuguccuuaca

SEQ ID NO: 2336513 - RNA, 19 nt, Artificial Sequence
  Description of Artificial Sequence: Synthetic oligonucleotide
  Antisense strand to SEQ ID NO: 2336512
uguaaggacaaacuccuac

SEQ ID NO: 2336514 - RNA, 19 nt, Artificial Sequence
  Description of Artificial Sequence: Synthetic oligonucleotide
  Sense strand starting at position 1177 of SEQ ID NO: 1885364
ggcuccugcuucccuaaua

SEQ ID NO: 2336515 - RNA, 19 nt, Artificial Sequence
  Description of Artificial Sequence: Synthetic oligonucleotide
  Antisense strand to SEQ ID NO: 2336514
uauuagggaagcaggagcc

SEQ ID NO: 2336516 - RNA, 19 nt, Artificial Sequence
  Description of Artificial Sequence: Synthetic oligonucleotide
  Sense strand starting at position 1242 of SEQ ID NO: 1885364
auugauaccuugucacuac

SEQ ID NO: 2336517 - RNA, 19 nt, Artificial Sequence
  Description of Artificial Sequence: Synthetic oligonucleotide
  Antisense strand to SEQ ID NO: 2336516
guagugacaagguaucaau

SEQ ID NO: 2336518 - RNA, 19 nt, Artificial Sequence
  Description of Artificial Sequence: Synthetic oligonucleotide
  Sense strand starting at position 1274 of SEQ ID NO: 1885364
gcuagauguggcagugugu

SEQ ID NO: 2336519 - RNA, 19 nt, Artificial Sequence
  Description of Artificial Sequence: Synthetic oligonucleotide
  Antisense strand to SEQ ID NO: 2336518
acacacugccacaucuagc

SEQ ID NO: 2336520 - RNA, 19 nt, Artificial Sequence
  Description of Artificial Sequence: Synthetic oligonucleotide
  Sense strand starting at position 1528 of SEQ ID NO: 1885364
uugaaauauuaggcaacuu

SEQ ID NO: 2336521 - RNA, 19 nt, Artificial Sequence
  Description of Artificial Sequence: Synthetic oligonucleotide
  Antisense strand to SEQ ID NO: 2336520
aaguugccuaauauuucaa

SEQ ID NO: 2336522 - RNA, 19 nt, Artificial Sequence
  Description of Artificial Sequence: Synthetic oligonucleotide
  Sense strand starting at position 1616 of SEQ ID NO: 1885364
uuacauuggugggcucaaa

SEQ ID NO: 2336523 - RNA, 19 nt, Artificial Sequence
  Description of Artificial Sequence: Synthetic oligonucleotide
  Antisense strand to SEQ ID NO: 2336522
uuugagcccaccaauguaa

SEQ ID NO: 2336524 - RNA, 19 nt, Artificial Sequence
  Description of Artificial Sequence: Synthetic oligonucleotide
  Sense strand starting at position 1664 of SEQ ID NO: 1885364
uauggugucccuugagaaa

SEQ ID NO: 2336525 - RNA, 19 nt, Artificial Sequence
  Description of Artificial Sequence: Synthetic oligonucleotide
  Antisense strand to SEQ ID NO: 2336524
uuucucaagggacaccaua

SEQ ID NO: 2336526 - RNA, 19 nt, Artificial Sequence
  Description of Artificial Sequence: Synthetic oligonucleotide
  Sense strand starting at position 1676 of SEQ ID NO: 1885364
ugagaaacaucugcuuaau

SEQ ID NO: 2336527 - RNA, 19 nt, Artificial Sequence
  Description of Artificial Sequence: Synthetic oligonucleotide
  Antisense strand to SEQ ID NO: 2336526
auuaagcagauguuucuca

SEQ ID NO: 2336528 - RNA, 19 nt, Artificial Sequence
  Description of Artificial Sequence: Synthetic oligonucleotide
  Sense strand starting at position 1721 of SEQ ID NO: 1885364
auaugagaaucaugagaac

SEQ ID NO: 2336529 - RNA, 19 nt, Artificial Sequence
  Description of Artificial Sequence: Synthetic oligonucleotide
  Antisense strand to SEQ ID NO: 2336528
guucucaugauucucauau

SEQ ID NO: 2336530 - RNA, 19 nt, Artificial Sequence
  Description of Artificial Sequence: Synthetic oligonucleotide
  Sense strand starting at position 1724 of SEQ ID NO: 1885364
ugagaaucaugagaacaua

SEQ ID NO: 2336531 - RNA, 19 nt, Artificial Sequence
  Description of Artificial Sequence: Synthetic oligonucleotide
  Antisense strand to SEQ ID NO: 2336530
uauguucucaugauucuca

SEQ ID NO: 2336532 - RNA, 19 nt, Artificial Sequence
  Description of Artificial Sequence: Synthetic oligonucleotide
  Sense strand starting at position 1861 of SEQ ID NO: 1885364
ugagacagauacuaguauu

SEQ ID NO: 2336533 - RNA, 19 nt, Artificial Sequence
  Description of Artificial Sequence: Synthetic oligonucleotide
  Antisense strand to SEQ ID NO: 2336532
aauacuaguaucugucuca

SEQ ID NO: 2336534 - RNA, 19 nt, Artificial Sequence
  Description of Artificial Sequence: Synthetic oligonucleotide
  Sense strand starting at position 1973 of SEQ ID NO: 1885364
gcugucugacuguagaacu

SEQ ID NO: 2336535 - RNA, 19 nt, Artificial Sequence
  Description of Artificial Sequence: Synthetic oligonucleotide
  Antisense strand to SEQ ID NO: 2336534
aguucuacagucagacagc

SEQ ID NO: 2336536 - RNA, 19 nt, Artificial Sequence
  Description of Artificial Sequence: Synthetic oligonucleotide
  Sense strand starting at position 1983 of SEQ ID NO: 1885364
uguagaacucaugaucuuu

SEQ ID NO: 2336537 - RNA, 19 nt, Artificial Sequence
  Description of Artificial Sequence: Synthetic oligonucleotide
  Antisense strand to SEQ ID NO: 2336536
aaagaucaugaguucuaca

SEQ ID NO: 2336538 - RNA, 19 nt, Artificial Sequence
  Description of Artificial Sequence: Synthetic oligonucleotide
  Sense strand starting at position 2067 of SEQ ID NO: 1885364
guguguuucucugugagag

SEQ ID NO: 2336539 - RNA, 19 nt, Artificial Sequence
  Description of Artificial Sequence: Synthetic oligonucleotide
  Antisense strand to SEQ ID NO: 2336538
cucucacagagaaacacac

SEQ ID NO: 2336540 - RNA, 19 nt, Artificial Sequence
  Description of Artificial Sequence: Synthetic oligonucleotide
  Sense strand starting at position 2068 of SEQ ID NO: 1885364
uguguuucucugugagaga

SEQ ID NO: 2336541 - RNA, 19 nt, Artificial Sequence
  Description of Artificial Sequence: Synthetic oligonucleotide
  Antisense strand to SEQ ID NO: 2336540
ucucucacagagaaacaca

SEQ ID NO: 2336542 - RNA, 19 nt, Artificial Sequence
  Description of Artificial Sequence: Synthetic oligonucleotide
  Sense strand starting at position 2254 of SEQ ID NO: 1885364
acacauuucuaggagggau

SEQ ID NO: 2336543 - RNA, 19 nt, Artificial Sequence
  Description of Artificial Sequence: Synthetic oligonucleotide
  Antisense strand to SEQ ID NO: 2336542
aucccuccuagaaaugugu

SEQ ID NO: 2336544 - RNA, 19 nt, Artificial Sequence
  Description of Artificial Sequence: Synthetic oligonucleotide
  Sense strand starting at position 2275 of SEQ ID NO: 1885364
gugaaauggcaccauuaua

SEQ ID NO: 2336545 - RNA, 19 nt, Artificial Sequence
  Description of Artificial Sequence: Synthetic oligonucleotide
  Antisense strand to SEQ ID NO: 2336544
uauaauggugccauuucac

SEQ ID NO: 2336546 - RNA, 19 nt, Artificial Sequence
  Description of Artificial Sequence: Synthetic oligonucleotide
  Sense strand starting at position 2315 of SEQ ID NO: 1885364
gggcauaacuucuccagaa

SEQ ID NO: 2336547 - RNA, 19 nt, Artificial Sequence
  Description of Artificial Sequence: Synthetic oligonucleotide
  Antisense strand to SEQ ID NO: 2336546
uucuggagaaguuaugccc

SEQ ID NO: 2336548 - RNA, 19 nt, Artificial Sequence
  Description of Artificial Sequence: Synthetic oligonucleotide
  Sense strand starting at position 2316 of SEQ ID NO: 1885364
ggcauaacuucuccagaag

SEQ ID NO: 2336549 - RNA, 19 nt, Artificial Sequence
  Description of Artificial Sequence: Synthetic oligonucleotide
  Antisense strand to SEQ ID NO: 2336548
cuucuggagaaguuaugcc

SEQ ID NO: 2336550 - RNA, 19 nt, Artificial Sequence
  Description of Artificial Sequence: Synthetic oligonucleotide
  Sense strand starting at position 2340 of SEQ ID NO: 1885364
ucuguaauaccuugucaaa

SEQ ID NO: 2336551 - RNA, 19 nt, Artificial Sequence
  Description of Artificial Sequence: Synthetic oligonucleotide
  Antisense strand to SEQ ID NO: 2336550
uuugacaagguauuacaga

SEQ ID NO: 2336552 - RNA, 19 nt, Artificial Sequence
  Description of Artificial Sequence: Synthetic oligonucleotide
  Sense strand starting at position 2386 of SEQ ID NO: 1885364
uugagaaauugcuucuaaa

SEQ ID NO: 2336553 - RNA, 19 nt, Artificial Sequence
  Description of Artificial Sequence: Synthetic oligonucleotide
  Antisense strand to SEQ ID NO: 2336552
uuuagaagcaauuucucaa

SEQ ID NO: 2336554 - RNA, 19 nt, Artificial Sequence
  Description of Artificial Sequence: Synthetic oligonucleotide
  Sense strand starting at position 2505 of SEQ ID NO: 1885364
uggaaacuuaguggauuau

SEQ ID NO: 2336555 - RNA, 19 nt, Artificial Sequence
  Description of Artificial Sequence: Synthetic oligonucleotide
  Antisense strand to SEQ ID NO: 2336554
auaauccacuaaguuucca

SEQ ID NO: 2336556 - RNA, 19 nt, Artificial Sequence
  Description of Artificial Sequence: Synthetic oligonucleotide
  Sense strand starting at position 2514 of SEQ ID NO: 1885364
aguggauuaugauacauuu

SEQ ID NO: 2336557 - RNA, 19 nt, Artificial Sequence
  Description of Artificial Sequence: Synthetic oligonucleotide
  Antisense strand to SEQ ID NO: 2336556
aaauguaucauaauccacu

SEQ ID NO: 2336558 - RNA, 19 nt, Artificial Sequence
  Description of Artificial Sequence: Synthetic oligonucleotide
  Sense strand starting at position 2567 of SEQ ID NO: 1885364
gugagcagguccuugaugu

SEQ ID NO: 2336559 - RNA, 19 nt, Artificial Sequence
  Description of Artificial Sequence: Synthetic oligonucleotide
  Antisense strand to SEQ ID NO: 2336558
acaucaaggaccugcucac

SEQ ID NO: 2336560 - RNA, 19 nt, Artificial Sequence
  Description of Artificial Sequence: Synthetic oligonucleotide
  Sense strand starting at position 2568 of SEQ ID NO: 1885364
ugagcagguccuugaugua

SEQ ID NO: 2336561 - RNA, 19 nt, Artificial Sequence
  Description of Artificial Sequence: Synthetic oligonucleotide
  Antisense strand to SEQ ID NO: 2336560
uacaucaaggaccugcuca

SEQ ID NO: 2336562 - RNA, 19 nt, Artificial Sequence
  Description of Artificial Sequence: Synthetic oligonucleotide
  Sense strand starting at position 2756 of SEQ ID NO: 1885364
aaauuaguuccuggccaug

SEQ ID NO: 2336563 - RNA, 19 nt, Artificial Sequence
  Description of Artificial Sequence: Synthetic oligonucleotide
  Antisense strand to SEQ ID NO: 2336562
cauggccaggaacuaauuu

SEQ ID NO: 2336564 - RNA, 19 nt, Artificial Sequence
  Description of Artificial Sequence: Synthetic oligonucleotide
  Sense strand starting at position 2828 of SEQ ID NO: 1885364
ggcacaacugacuagcaau

SEQ ID NO: 2336565 - RNA, 19 nt, Artificial Sequence
  Description of Artificial Sequence: Synthetic oligonucleotide
  Antisense strand to SEQ ID NO: 2336564
auugcuagucaguugugcc

SEQ ID NO: 2336566 - RNA, 19 nt, Artificial Sequence
  Description of Artificial Sequence: Synthetic oligonucleotide
  Sense strand starting at position 2876 of SEQ ID NO: 1885364
agaacaaacucuguggcaa

SEQ ID NO: 2336567 - RNA, 19 nt, Artificial Sequence
  Description of Artificial Sequence: Synthetic oligonucleotide
  Antisense strand to SEQ ID NO: 2336566
uugccacagaguuuguucu

SEQ ID NO: 2336568 - RNA, 19 nt, Artificial Sequence
  Description of Artificial Sequence: Synthetic oligonucleotide
  Sense strand starting at position 2956 of SEQ ID NO: 1885364
caggccaucugucuugaua

SEQ ID NO: 2336569 - RNA, 19 nt, Artificial Sequence
  Description of Artificial Sequence: Synthetic oligonucleotide
  Antisense strand to SEQ ID NO: 2336568
uaucaagacagauggccug

SEQ ID NO: 2336570 - RNA, 19 nt, Artificial Sequence
  Description of Artificial Sequence: Synthetic oligonucleotide
  Sense strand starting at position 2959 of SEQ ID NO: 1885364
gccaucugucuugauaagu

SEQ ID NO: 2336571 - RNA, 19 nt, Artificial Sequence
  Description of Artificial Sequence: Synthetic oligonucleotide
  Antisense strand to SEQ ID NO: 2336570
acuuaucaagacagauggc

SEQ ID NO: 2336572 - RNA, 19 nt, Artificial Sequence
  Description of Artificial Sequence: Synthetic oligonucleotide
  Sense strand starting at position 2965 of SEQ ID NO: 1885364
ugucuugauaaguagguca

SEQ ID NO: 2336573 - RNA, 19 nt, Artificial Sequence
  Description of Artificial Sequence: Synthetic oligonucleotide
  Antisense strand to SEQ ID NO: 2336572
ugaccuacuuaucaagaca

SEQ ID NO: 2336574 - RNA, 19 nt, Artificial Sequence
  Description of Artificial Sequence: Synthetic oligonucleotide
  Sense strand starting at position 2967 of SEQ ID NO: 1885364
ucuugauaaguaggucauu

SEQ ID NO: 2336575 - RNA, 19 nt, Artificial Sequence
  Description of Artificial Sequence: Synthetic oligonucleotide
  Antisense strand to SEQ ID NO: 2336574
aaugaccuacuuaucaaga

SEQ ID NO: 2336576 - RNA, 19 nt, Artificial Sequence
  Description of Artificial Sequence: Synthetic oligonucleotide
  Sense strand starting at position 2998 of SEQ ID NO: 1885364
auugaagcuugcucucaca

SEQ ID NO: 2336577 - RNA, 19 nt, Artificial Sequence
  Description of Artificial Sequence: Synthetic oligonucleotide
  Antisense strand to SEQ ID NO: 2336576
ugugagagcaagcuucaau

SEQ ID NO: 2336578 - RNA, 19 nt, Artificial Sequence
  Description of Artificial Sequence: Synthetic oligonucleotide
  Sense strand starting at position 3189 of SEQ ID NO: 1885364
guguauaaccuccauguau

SEQ ID NO: 2336579 - RNA, 19 nt, Artificial Sequence
  Description of Artificial Sequence: Synthetic oligonucleotide
  Antisense strand to SEQ ID NO: 2336578
auacauggagguuauacac

SEQ ID NO: 2336580 - RNA, 19 nt, Artificial Sequence
  Description of Artificial Sequence: Synthetic oligonucleotide
  Sense strand starting at position 3482 of SEQ ID NO: 1885364
guggaucaagccuaugauc

SEQ ID NO: 2336581 - RNA, 19 nt, Artificial Sequence
  Description of Artificial Sequence: Synthetic oligonucleotide
  Antisense strand to SEQ ID NO: 2336580
gaucauaggcuugauccac

SEQ ID NO: 2336582 - RNA, 19 nt, Artificial Sequence
  Description of Artificial Sequence: Synthetic oligonucleotide
  Sense strand starting at position 30 of SEQ ID NO: 1885365
uuuacuagucaugagcaca

SEQ ID NO: 2336583 - RNA, 19 nt, Artificial Sequence
  Description of Artificial Sequence: Synthetic oligonucleotide
  Antisense strand to SEQ ID NO: 2336582
ugugcucaugacuaguaaa

SEQ ID NO: 2336584 - RNA, 19 nt, Artificial Sequence
  Description of Artificial Sequence: Synthetic oligonucleotide
  Sense strand starting at position 35 of SEQ ID NO: 1885365
uagucaugagcacauguau

SEQ ID NO: 2336585 - RNA, 19 nt, Artificial Sequence
  Description of Artificial Sequence: Synthetic oligonucleotide
  Antisense strand to SEQ ID NO: 2336584
auacaugugcucaugacua

SEQ ID NO: 2336586 - RNA, 19 nt, Artificial Sequence
  Description of Artificial Sequence: Synthetic oligonucleotide
  Sense strand starting at position 138 of SEQ ID NO: 1885365
aguaacuuuggacgaauua

SEQ ID NO: 2336587 - RNA, 19 nt, Artificial Sequence
  Description of Artificial Sequence: Synthetic oligonucleotide
  Antisense strand to SEQ ID NO: 2336586
uaauucguccaaaguuacu

SEQ ID NO: 2336588 - RNA, 19 nt, Artificial Sequence
  Description of Artificial Sequence: Synthetic oligonucleotide
  Sense strand starting at position 139 of SEQ ID NO: 1885365
guaacuuuggacgaauuau

SEQ ID NO: 2336589 - RNA, 19 nt, Artificial Sequence
  Description of Artificial Sequence: Synthetic oligonucleotide
  Antisense strand to SEQ ID NO: 2336588
auaauucguccaaaguuac

SEQ ID NO: 2336590 - RNA, 19 nt, Artificial Sequence
  Description of Artificial Sequence: Synthetic oligonucleotide
  Sense strand starting at position 181 of SEQ ID NO: 1885365
augaucaaacaguguuaau

SEQ ID NO: 2336591 - RNA, 19 nt, Artificial Sequence
  Description of Artificial Sequence: Synthetic oligonucleotide
  Antisense strand to SEQ ID NO: 2336590
auuaacacuguuugaucau

SEQ ID NO: 2336592 - RNA, 19 nt, Artificial Sequence
  Description of Artificial Sequence: Synthetic oligonucleotide
  Sense strand starting at position 211 of SEQ ID NO: 1885365
uuguuaucgcugcaauuua

SEQ ID NO: 2336593 - RNA, 19 nt, Artificial Sequence
  Description of Artificial Sequence: Synthetic oligonucleotide
  Antisense strand to SEQ ID NO: 2336592
uaaauugcagcgauaacaa

SEQ ID NO: 2336594 - RNA, 19 nt, Artificial Sequence
  Description of Artificial Sequence: Synthetic oligonucleotide
  Sense strand starting at position 222 of SEQ ID NO: 1885365
gcaauuuaaugggacucaa

SEQ ID NO: 2336595 - RNA, 19 nt, Artificial Sequence
  Description of Artificial Sequence: Synthetic oligonucleotide
  Antisense strand to SEQ ID NO: 2336594
uugagucccauuaaauugc

SEQ ID NO: 2336596 - RNA, 19 nt, Artificial Sequence
  Description of Artificial Sequence: Synthetic oligonucleotide
  Sense strand starting at position 249 of SEQ ID NO: 1885365
aucuaugugaaugaguguu

SEQ ID NO: 2336597 - RNA, 19 nt, Artificial Sequence
  Description of Artificial Sequence: Synthetic oligonucleotide
  Antisense strand to SEQ ID NO: 2336596
aacacucauucacauagau

SEQ ID NO: 2336598 - RNA, 19 nt, Artificial Sequence
  Description of Artificial Sequence: Synthetic oligonucleotide
  Sense strand starting at position 259 of SEQ ID NO: 1885365
augaguguugaagaguuga

SEQ ID NO: 2336599 - RNA, 19 nt, Artificial Sequence
  Description of Artificial Sequence: Synthetic oligonucleotide
  Antisense strand to SEQ ID NO: 2336598
ucaacucuucaacacucau

SEQ ID NO: 2336600 - RNA, 19 nt, Artificial Sequence
  Description of Artificial Sequence: Synthetic oligonucleotide
  Sense strand starting at position 442 of SEQ ID NO: 1885365
uagccuggagguugaauau

SEQ ID NO: 2336601 - RNA, 19 nt, Artificial Sequence
  Description of Artificial Sequence: Synthetic oligonucleotide
  Antisense strand to SEQ ID NO: 2336600
auauucaaccuccaggcua

SEQ ID NO: 2336602 - RNA, 19 nt, Artificial Sequence
  Description of Artificial Sequence: Synthetic oligonucleotide
  Sense strand starting at position 960 of SEQ ID NO: 1885365
gaaagcauauaugugagaa

SEQ ID NO: 2336603 - RNA, 19 nt, Artificial Sequence
  Description of Artificial Sequence: Synthetic oligonucleotide
  Antisense strand to SEQ ID NO: 2336602
uucucacauauaugcuuuc

SEQ ID NO: 2336604 - RNA, 19 nt, Artificial Sequence
  Description of Artificial Sequence: Synthetic oligonucleotide
  Sense strand starting at position 1532 of SEQ ID NO: 1885365
gcaagccaaguuuaugaau

SEQ ID NO: 2336605 - RNA, 19 nt, Artificial Sequence
  Description of Artificial Sequence: Synthetic oligonucleotide
  Antisense strand to SEQ ID NO: 2336604
auucauaaacuuggcuugc

SEQ ID NO: 2336606 - RNA, 19 nt, Artificial Sequence
  Description of Artificial Sequence: Synthetic oligonucleotide
  Sense strand starting at position 1541 of SEQ ID NO: 1885365
guuuaugaauaugugaaca

SEQ ID NO: 2336607 - RNA, 19 nt, Artificial Sequence
  Description of Artificial Sequence: Synthetic oligonucleotide
  Antisense strand to SEQ ID NO: 2336606
uguucacauauucauaaac

SEQ ID NO: 2336608 - RNA, 19 nt, Artificial Sequence
  Description of Artificial Sequence: Synthetic oligonucleotide
  Sense strand starting at position 1549 of SEQ ID NO: 1885365
auaugugaacagugaauag

SEQ ID NO: 2336609 - RNA, 19 nt, Artificial Sequence
  Description of Artificial Sequence: Synthetic oligonucleotide
  Antisense strand to SEQ ID NO: 2336608
cuauucacuguucacauau

SEQ ID NO: 2336610 - RNA, 19 nt, Artificial Sequence
  Description of Artificial Sequence: Synthetic oligonucleotide
  Sense strand starting at position 1730 of SEQ ID NO: 1885365
cuuaauguugucuguauuu

SEQ ID NO: 2336611 - RNA, 19 nt, Artificial Sequence
  Description of Artificial Sequence: Synthetic oligonucleotide
  Antisense strand to SEQ ID NO: 2336610
aaauacagacaacauuaag

SEQ ID NO: 2336612 - RNA, 19 nt, Artificial Sequence
  Description of Artificial Sequence: Synthetic oligonucleotide
  Sense strand starting at position 1784 of SEQ ID NO: 1885365
cuaggacauaucugaguug

SEQ ID NO: 2336613 - RNA, 19 nt, Artificial Sequence
  Description of Artificial Sequence: Synthetic oligonucleotide
  Antisense strand to SEQ ID NO: 2336612
caacucagauauguccuag

SEQ ID NO: 2336614 - RNA, 19 nt, Artificial Sequence
  Description of Artificial Sequence: Synthetic oligonucleotide
  Sense strand starting at position 1787 of SEQ ID NO: 1885365
ggacauaucugaguugaau

SEQ ID NO: 2336615 - RNA, 19 nt, Artificial Sequence
  Description of Artificial Sequence: Synthetic oligonucleotide
  Antisense strand to SEQ ID NO: 2336614
auucaacucagauaugucc

SEQ ID NO: 2336616 - RNA, 19 nt, Artificial Sequence
  Description of Artificial Sequence: Synthetic oligonucleotide
  Sense strand starting at position 1796 of SEQ ID NO: 1885365
ugaguugaauuccucauua

SEQ ID NO: 2336617 - RNA, 19 nt, Artificial Sequence
  Description of Artificial Sequence: Synthetic oligonucleotide
  Antisense strand to SEQ ID NO: 2336616
uaaugaggaauucaacuca

SEQ ID NO: 2336618 - RNA, 19 nt, Artificial Sequence
  Description of Artificial Sequence: Synthetic oligonucleotide
  Sense strand starting at position 1798 of SEQ ID NO: 1885365
aguugaauuccucauuaug

SEQ ID NO: 2336619 - RNA, 19 nt, Artificial Sequence
  Description of Artificial Sequence: Synthetic oligonucleotide
  Antisense strand to SEQ ID NO: 2336618
cauaaugaggaauucaacu

SEQ ID NO: 2336620 - RNA, 19 nt, Artificial Sequence
  Description of Artificial Sequence: Synthetic oligonucleotide
  Sense strand starting at position 2107 of SEQ ID NO: 1885365
cguuguuugcucuuuaagu

SEQ ID NO: 2336621 - RNA, 19 nt, Artificial Sequence
  Description of Artificial Sequence: Synthetic oligonucleotide
  Antisense strand to SEQ ID NO: 2336620
acuuaaagagcaaacaacg

SEQ ID NO: 2336622 - RNA, 19 nt, Artificial Sequence
  Description of Artificial Sequence: Synthetic oligonucleotide
  Sense strand starting at position 2185 of SEQ ID NO: 1885365
agcugaucucuuuacgaca

SEQ ID NO: 2336623 - RNA, 19 nt, Artificial Sequence
  Description of Artificial Sequence: Synthetic oligonucleotide
  Antisense strand to SEQ ID NO: 2336622
ugucguaaagagaucagcu

SEQ ID NO: 2336624 - RNA, 19 nt, Artificial Sequence
  Description of Artificial Sequence: Synthetic oligonucleotide
  Sense strand starting at position 2190 of SEQ ID NO: 1885365
aucucuuuacgacauugua

SEQ ID NO: 2336625 - RNA, 19 nt, Artificial Sequence
  Description of Artificial Sequence: Synthetic oligonucleotide
  Antisense strand to SEQ ID NO: 2336624
uacaaugucguaaagagau

SEQ ID NO: 2336626 - RNA, 19 nt, Artificial Sequence
  Description of Artificial Sequence: Synthetic oligonucleotide
  Sense strand starting at position 2198 of SEQ ID NO: 1885365
acgacauuguaucuuaaau

SEQ ID NO: 2336627 - RNA, 19 nt, Artificial Sequence
  Description of Artificial Sequence: Synthetic oligonucleotide
  Antisense strand to SEQ ID NO: 2336626
auuuaagauacaaugucgu

SEQ ID NO: 2336628 - RNA, 19 nt, Artificial Sequence
  Description of Artificial Sequence: Synthetic oligonucleotide
  Sense strand starting at position 2493 of SEQ ID NO: 1885365
ugggcugcaucugugauuu

SEQ ID NO: 2336629 - RNA, 19 nt, Artificial Sequence
  Description of Artificial Sequence: Synthetic oligonucleotide
  Antisense strand to SEQ ID NO: 2336628
aaaucacagaugcagccca

SEQ ID NO: 2336630 - RNA, 19 nt, Artificial Sequence
  Description of Artificial Sequence: Synthetic oligonucleotide
  Sense strand starting at position 2497 of SEQ ID NO: 1885365
cugcaucugugauuucuuu

SEQ ID NO: 2336631 - RNA, 19 nt, Artificial Sequence
  Description of Artificial Sequence: Synthetic oligonucleotide
  Antisense strand to SEQ ID NO: 2336630
aaagaaaucacagaugcag

SEQ ID NO: 2336632 - RNA, 19 nt, Artificial Sequence
  Description of Artificial Sequence: Synthetic oligonucleotide
  Sense strand starting at position 2536 of SEQ ID NO: 1885365
acagaaucaugagugagua

SEQ ID NO: 2336633 - RNA, 19 nt, Artificial Sequence
  Description of Artificial Sequence: Synthetic oligonucleotide
  Antisense strand to SEQ ID NO: 2336632
uacucacucaugauucugu

SEQ ID NO: 2336634 - RNA, 19 nt, Artificial Sequence
  Description of Artificial Sequence: Synthetic oligonucleotide
  Sense strand starting at position 2614 of SEQ ID NO: 1885365
uccaauugugucuaucacu

SEQ ID NO: 2336635 - RNA, 19 nt, Artificial Sequence
  Description of Artificial Sequence: Synthetic oligonucleotide
  Antisense strand to SEQ ID NO: 2336634
agugauagacacaauugga

SEQ ID NO: 2336636 - RNA, 19 nt, Artificial Sequence
  Description of Artificial Sequence: Synthetic oligonucleotide
  Sense strand starting at position 2659 of SEQ ID NO: 1885365
cauaaauggugguuuccaa

SEQ ID NO: 2336637 - RNA, 19 nt, Artificial Sequence
  Description of Artificial Sequence: Synthetic oligonucleotide
  Antisense strand to SEQ ID NO: 2336636
uuggaaaccaccauuuaug

SEQ ID NO: 2336638 - RNA, 19 nt, Artificial Sequence
  Description of Artificial Sequence: Synthetic oligonucleotide
  Sense strand starting at position 2719 of SEQ ID NO: 1885365
uuaucucuugucuaaggua

SEQ ID NO: 2336639 - RNA, 19 nt, Artificial Sequence
  Description of Artificial Sequence: Synthetic oligonucleotide
  Antisense strand to SEQ ID NO: 2336638
uaccuuagacaagagauaa

SEQ ID NO: 2336640 - RNA, 19 nt, Artificial Sequence
  Description of Artificial Sequence: Synthetic oligonucleotide
  Sense strand starting at position 2823 of SEQ ID NO: 1885365
aauuaagugugaucaagua

SEQ ID NO: 2336641 - RNA, 19 nt, Artificial Sequence
  Description of Artificial Sequence: Synthetic oligonucleotide
  Antisense strand to SEQ ID NO: 2336640
uacuugaucacacuuaauu

SEQ ID NO: 2336642 - RNA, 19 nt, Artificial Sequence
  Description of Artificial Sequence: Synthetic oligonucleotide
  Sense strand starting at position 3161 of SEQ ID NO: 1885365
agauuauucugguuaaagc

SEQ ID NO: 2336643 - RNA, 19 nt, Artificial Sequence
  Description of Artificial Sequence: Synthetic oligonucleotide
  Antisense strand to SEQ ID NO: 2336642
gcuuuaaccagaauaaucu

SEQ ID NO: 2336644 - RNA, 19 nt, Artificial Sequence
  Description of Artificial Sequence: Synthetic oligonucleotide
  Sense strand starting at position 3171 of SEQ ID NO: 1885365
gguuaaagccuccaucacu

SEQ ID NO: 2336645 - RNA, 19 nt, Artificial Sequence
  Description of Artificial Sequence: Synthetic oligonucleotide
  Antisense strand to SEQ ID NO: 2336644
agugauggaggcuuuaacc

SEQ ID NO: 2336646 - RNA, 19 nt, Artificial Sequence
  Description of Artificial Sequence: Synthetic oligonucleotide
  Sense strand starting at position 3185 of SEQ ID NO: 1885365
ucacucauaggaugaucau

SEQ ID NO: 2336647 - RNA, 19 nt, Artificial Sequence
  Description of Artificial Sequence: Synthetic oligonucleotide
  Antisense strand to SEQ ID NO: 2336646
augaucauccuaugaguga

SEQ ID NO: 2336648 - RNA, 19 nt, Artificial Sequence
  Description of Artificial Sequence: Synthetic oligonucleotide
  Sense strand starting at position 3312 of SEQ ID NO: 1885365
ucugaacuucuaggagcua

SEQ ID NO: 2336649 - RNA, 19 nt, Artificial Sequence
  Description of Artificial Sequence: Synthetic oligonucleotide
  Antisense strand to SEQ ID NO: 2336648
uagcuccuagaaguucaga

SEQ ID NO: 2336650 - RNA, 19 nt, Artificial Sequence
  Description of Artificial Sequence: Synthetic oligonucleotide
  Sense strand starting at position 3409 of SEQ ID NO: 1885365
uuuaucaaugcucagugau

SEQ ID NO: 2336651 - RNA, 19 nt, Artificial Sequence
  Description of Artificial Sequence: Synthetic oligonucleotide
  Antisense strand to SEQ ID NO: 2336650
aucacugagcauugauaaa

SEQ ID NO: 2336652 - RNA, 19 nt, Artificial Sequence
  Description of Artificial Sequence: Synthetic oligonucleotide
  Sense strand starting at position 3412 of SEQ ID NO: 1885365
aucaaugcucagugaugga

SEQ ID NO: 2336653 - RNA, 19 nt, Artificial Sequence
  Description of Artificial Sequence: Synthetic oligonucleotide
  Antisense strand to SEQ ID NO: 2336652
uccaucacugagcauugau

SEQ ID NO: 2336654 - RNA, 19 nt, Artificial Sequence
  Description of Artificial Sequence: Synthetic oligonucleotide
  Sense strand starting at position 3550 of SEQ ID NO: 1885365
ucuaaagcuuugucaggaa

SEQ ID NO: 2336655 - RNA, 19 nt, Artificial Sequence
  Description of Artificial Sequence: Synthetic oligonucleotide
  Antisense strand to SEQ ID NO: 2336654
uuccugacaaagcuuuaga

SEQ ID NO: 2336656 - RNA, 19 nt, Artificial Sequence
  Description of Artificial Sequence: Synthetic oligonucleotide
  Sense strand starting at position 3557 of SEQ ID NO: 1885365
cuuugucaggaaggugauu

SEQ ID NO: 2336657 - RNA, 19 nt, Artificial Sequence
  Description of Artificial Sequence: Synthetic oligonucleotide
  Antisense strand to SEQ ID NO: 2336656
aaucaccuuccugacaaag

SEQ ID NO: 2336658 - RNA, 19 nt, Artificial Sequence
  Description of Artificial Sequence: Synthetic oligonucleotide
  Sense strand starting at position 3705 of SEQ ID NO: 1885365
cuauuaagguguuuccaag

SEQ ID NO: 2336659 - RNA, 19 nt, Artificial Sequence
  Description of Artificial Sequence: Synthetic oligonucleotide
  Antisense strand to SEQ ID NO: 2336658
cuuggaaacaccuuaauag

SEQ ID NO: 2336660 - RNA, 19 nt, Artificial Sequence
  Description of Artificial Sequence: Synthetic oligonucleotide
  Sense strand starting at position 3875 of SEQ ID NO: 1885365
ugccuucuagguuauaaca

SEQ ID NO: 2336661 - RNA, 19 nt, Artificial Sequence
  Description of Artificial Sequence: Synthetic oligonucleotide
  Antisense strand to SEQ ID NO: 2336660
uguuauaaccuagaaggca

SEQ ID NO: 2336662 - RNA, 19 nt, Artificial Sequence
  Description of Artificial Sequence: Synthetic oligonucleotide
  Sense strand starting at position 12 of SEQ ID NO: 1885366
guuugaaaucagggcagaa

SEQ ID NO: 2336663 - RNA, 19 nt, Artificial Sequence
  Description of Artificial Sequence: Synthetic oligonucleotide
  Antisense strand to SEQ ID NO: 2336662
uucugcccugauuucaaac

SEQ ID NO: 2336664 - RNA, 19 nt, Artificial Sequence
  Description of Artificial Sequence: Synthetic oligonucleotide
  Sense strand starting at position 1064 of SEQ ID NO: 1885366
cagauagucugucuccuga

SEQ ID NO: 2336665 - RNA, 19 nt, Artificial Sequence
  Description of Artificial Sequence: Synthetic oligonucleotide
  Antisense strand to SEQ ID NO: 2336664
ucaggagacagacuaucug

SEQ ID NO: 2336666 - RNA, 19 nt, Artificial Sequence
  Description of Artificial Sequence: Synthetic oligonucleotide
  Sense strand starting at position 1634 of SEQ ID NO: 1885366
cccagaaguuuccuaauga

SEQ ID NO: 2336667 - RNA, 19 nt, Artificial Sequence
  Description of Artificial Sequence: Synthetic oligonucleotide
  Antisense strand to SEQ ID NO: 2336666
ucauuaggaaacuucuggg

SEQ ID NO: 2336668 - RNA, 19 nt, Artificial Sequence
  Description of Artificial Sequence: Synthetic oligonucleotide
  Sense strand starting at position 1780 of SEQ ID NO: 1885366
gggcguguccuuccaucga

SEQ ID NO: 2336669 - RNA, 19 nt, Artificial Sequence
  Description of Artificial Sequence: Synthetic oligonucleotide
  Antisense strand to SEQ ID NO: 2336668
ucgauggaaggacacgccc

SEQ ID NO: 2336670 - RNA, 19 nt, Artificial Sequence
  Description of Artificial Sequence: Synthetic oligonucleotide
  Sense strand starting at position 1793 of SEQ ID NO: 1885366
caucgaacaugucuaggaa

SEQ ID NO: 2336671 - RNA, 19 nt, Artificial Sequence
  Description of Artificial Sequence: Synthetic oligonucleotide
  Antisense strand to SEQ ID NO: 2336670
uuccuagacauguucgaug

SEQ ID NO: 2336672 - RNA, 19 nt, Artificial Sequence
  Description of Artificial Sequence: Synthetic oligonucleotide
  Sense strand starting at position 1796 of SEQ ID NO: 1885366
cgaacaugucuaggaaaca

SEQ ID NO: 2336673 - RNA, 19 nt, Artificial Sequence
  Description of Artificial Sequence: Synthetic oligonucleotide
  Antisense strand to SEQ ID NO: 2336672
uguuuccuagacauguucg

SEQ ID NO: 2336674 - RNA, 19 nt, Artificial Sequence
  Description of Artificial Sequence: Synthetic oligonucleotide
  Sense strand starting at position 1808 of SEQ ID NO: 1885366
ggaaacaccugaucacugu

SEQ ID NO: 2336675 - RNA, 19 nt, Artificial Sequence
  Description of Artificial Sequence: Synthetic oligonucleotide
  Antisense strand to SEQ ID NO: 2336674
acagugaucagguguuucc

SEQ ID NO: 2336676 - RNA, 19 nt, Artificial Sequence
  Description of Artificial Sequence: Synthetic oligonucleotide
  Sense strand starting at position 1815 of SEQ ID NO: 1885366
ccugaucacugucuaggaa

SEQ ID NO: 2336677 - RNA, 19 nt, Artificial Sequence
  Description of Artificial Sequence: Synthetic oligonucleotide
  Antisense strand to SEQ ID NO: 2336676
uuccuagacagugaucagg

SEQ ID NO: 2336678 - RNA, 19 nt, Artificial Sequence
  Description of Artificial Sequence: Synthetic oligonucleotide
  Sense strand starting at position 1818 of SEQ ID NO: 1885366
gaucacugucuaggaaaca

SEQ ID NO: 2336679 - RNA, 19 nt, Artificial Sequence
  Description of Artificial Sequence: Synthetic oligonucleotide
  Antisense strand to SEQ ID NO: 2336678
uguuuccuagacagugauc

SEQ ID NO: 2336680 - RNA, 19 nt, Artificial Sequence
  Description of Artificial Sequence: Synthetic oligonucleotide
  Sense strand starting at position 1992 of SEQ ID NO: 1885366
guguuaccagaugacauau

SEQ ID NO: 2336681 - RNA, 19 nt, Artificial Sequence
  Description of Artificial Sequence: Synthetic oligonucleotide
  Antisense strand to SEQ ID NO: 2336680
auaugucaucugguaacac

SEQ ID NO: 2336682 - RNA, 19 nt, Artificial Sequence
  Description of Artificial Sequence: Synthetic oligonucleotide
  Sense strand starting at position 2326 of SEQ ID NO: 1885366
uugaaugccugauuccaca

SEQ ID NO: 2336683 - RNA, 19 nt, Artificial Sequence
  Description of Artificial Sequence: Synthetic oligonucleotide
  Antisense strand to SEQ ID NO: 2336682
uguggaaucaggcauucaa

SEQ ID NO: 2336684 - RNA, 19 nt, Artificial Sequence
  Description of Artificial Sequence: Synthetic oligonucleotide
  Sense strand starting at position 2337 of SEQ ID NO: 1885366
auuccacaggucuguuaua

SEQ ID NO: 2336685 - RNA, 19 nt, Artificial Sequence
  Description of Artificial Sequence: Synthetic oligonucleotide
  Antisense strand to SEQ ID NO: 2336684
uauaacagaccuguggaau

SEQ ID NO: 2336686 - RNA, 19 nt, Artificial Sequence
  Description of Artificial Sequence: Synthetic oligonucleotide
  Sense strand starting at position 2338 of SEQ ID NO: 1885366
uuccacaggucuguuauau

SEQ ID NO: 2336687 - RNA, 19 nt, Artificial Sequence
  Description of Artificial Sequence: Synthetic oligonucleotide
  Antisense strand to SEQ ID NO: 2336686
auauaacagaccuguggaa

SEQ ID NO: 2336688 - RNA, 19 nt, Artificial Sequence
  Description of Artificial Sequence: Synthetic oligonucleotide
  Sense strand starting at position 2448 of SEQ ID NO: 1885366
acucauuagccuugagaga

SEQ ID NO: 2336689 - RNA, 19 nt, Artificial Sequence
  Description of Artificial Sequence: Synthetic oligonucleotide
  Antisense strand to SEQ ID NO: 2336688
ucucucaaggcuaaugagu

SEQ ID NO: 2336690 - RNA, 19 nt, Artificial Sequence
  Description of Artificial Sequence: Synthetic oligonucleotide
  Sense strand starting at position 2449 of SEQ ID NO: 1885366
cucauuagccuugagagau

SEQ ID NO: 2336691 - RNA, 19 nt, Artificial Sequence
  Description of Artificial Sequence: Synthetic oligonucleotide
  Antisense strand to SEQ ID NO: 2336690
aucucucaaggcuaaugag

SEQ ID NO: 2336692 - RNA, 19 nt, Artificial Sequence
  Description of Artificial Sequence: Synthetic oligonucleotide
  Sense strand starting at position 2466 of SEQ ID NO: 1885366
augagaccagccugguuaa

SEQ ID NO: 2336693 - RNA, 19 nt, Artificial Sequence
  Description of Artificial Sequence: Synthetic oligonucleotide
  Antisense strand to SEQ ID NO: 2336692
uuaaccaggcuggucucau

SEQ ID NO: 2336694 - RNA, 19 nt, Artificial Sequence
  Description of Artificial Sequence: Synthetic oligonucleotide
  Sense strand starting at position 2473 of SEQ ID NO: 1885366
cagccugguuaaucuagaa

SEQ ID NO: 2336695 - RNA, 19 nt, Artificial Sequence
  Description of Artificial Sequence: Synthetic oligonucleotide
  Antisense strand to SEQ ID NO: 2336694
uucuagauuaaccaggcug

SEQ ID NO: 2336696 - RNA, 19 nt, Artificial Sequence
  Description of Artificial Sequence: Synthetic oligonucleotide
  Sense strand starting at position 2643 of SEQ ID NO: 1885366
ucauuaugaagucaguugu

SEQ ID NO: 2336697 - RNA, 19 nt, Artificial Sequence
  Description of Artificial Sequence: Synthetic oligonucleotide
  Antisense strand to SEQ ID NO: 2336696
acaacugacuucauaauga

SEQ ID NO: 2336698 - RNA, 19 nt, Artificial Sequence
  Description of Artificial Sequence: Synthetic oligonucleotide
  Sense strand starting at position 3042 of SEQ ID NO: 1885366
agacccucccugcagauau

SEQ ID NO: 2336699 - RNA, 19 nt, Artificial Sequence
  Description of Artificial Sequence: Synthetic oligonucleotide
  Antisense strand to SEQ ID NO: 2336698
auaucugcagggagggucu

SEQ ID NO: 2336700 - RNA, 19 nt, Artificial Sequence
  Description of Artificial Sequence: Synthetic oligonucleotide
  Sense strand starting at position 3194 of SEQ ID NO: 1885366
uugaguuagucauuaacag

SEQ ID NO: 2336701 - RNA, 19 nt, Artificial Sequence
  Description of Artificial Sequence: Synthetic oligonucleotide
  Antisense strand to SEQ ID NO: 2336700
cuguuaaugacuaacucaa

SEQ ID NO: 2336702 - RNA, 19 nt, Artificial Sequence
  Description of Artificial Sequence: Synthetic oligonucleotide
  Sense strand starting at position 3208 of SEQ ID NO: 1885366
aacagauacuugguagcuu

SEQ ID NO: 2336703 - RNA, 19 nt, Artificial Sequence
  Description of Artificial Sequence: Synthetic oligonucleotide
  Antisense strand to SEQ ID NO: 2336702
aagcuaccaaguaucuguu

SEQ ID NO: 2336704 - RNA, 19 nt, Artificial Sequence
  Description of Artificial Sequence: Synthetic oligonucleotide
  Sense strand starting at position 3212 of SEQ ID NO: 1885366
gauacuugguagcuuaacu

SEQ ID NO: 2336705 - RNA, 19 nt, Artificial Sequence
  Description of Artificial Sequence: Synthetic oligonucleotide
  Antisense strand to SEQ ID NO: 2336704
aguuaagcuaccaaguauc

SEQ ID NO: 2336706 - RNA, 19 nt, Artificial Sequence
  Description of Artificial Sequence: Synthetic oligonucleotide
  Sense strand starting at position 3253 of SEQ ID NO: 1885366
ugaucucaugucuagguua

SEQ ID NO: 2336707 - RNA, 19 nt, Artificial Sequence
  Description of Artificial Sequence: Synthetic oligonucleotide
  Antisense strand to SEQ ID NO: 2336706
uaaccuagacaugagauca

SEQ ID NO: 2336708 - RNA, 19 nt, Artificial Sequence
  Description of Artificial Sequence: Synthetic oligonucleotide
  Sense strand starting at position 3255 of SEQ ID NO: 1885366
aucucaugucuagguuauu

SEQ ID NO: 2336709 - RNA, 19 nt, Artificial Sequence
  Description of Artificial Sequence: Synthetic oligonucleotide
  Antisense strand to SEQ ID NO: 2336708
aauaaccuagacaugagau

SEQ ID NO: 2336710 - RNA, 19 nt, Artificial Sequence
  Description of Artificial Sequence: Synthetic oligonucleotide
  Sense strand starting at position 3256 of SEQ ID NO: 1885366
ucucaugucuagguuauuu

SEQ ID NO: 2336711 - RNA, 19 nt, Artificial Sequence
  Description of Artificial Sequence: Synthetic oligonucleotide
  Antisense strand to SEQ ID NO: 2336710
aaauaaccuagacaugaga

SEQ ID NO: 2336712 - RNA, 19 nt, Artificial Sequence
  Description of Artificial Sequence: Synthetic oligonucleotide
  Sense strand starting at position 3283 of SEQ ID NO: 1885366
ggauacugaugcuugaaca

SEQ ID NO: 2336713 - RNA, 19 nt, Artificial Sequence
  Description of Artificial Sequence: Synthetic oligonucleotide
  Antisense strand to SEQ ID NO: 2336712
uguucaagcaucaguaucc

SEQ ID NO: 2336714 - RNA, 19 nt, Artificial Sequence
  Description of Artificial Sequence: Synthetic oligonucleotide
  Sense strand starting at position 3295 of SEQ ID NO: 1885366
uugaacaaaguaugucaua

SEQ ID NO: 2336715 - RNA, 19 nt, Artificial Sequence
  Description of Artificial Sequence: Synthetic oligonucleotide
  Antisense strand to SEQ ID NO: 2336714
uaugacauacuuuguucaa

SEQ ID NO: 2336716 - RNA, 19 nt, Artificial Sequence
  Description of Artificial Sequence: Synthetic oligonucleotide
  Sense strand starting at position 3429 of SEQ ID NO: 1885366
ggaacaucucaggaacgcu

SEQ ID NO: 2336717 - RNA, 19 nt, Artificial Sequence
  Description of Artificial Sequence: Synthetic oligonucleotide
  Antisense strand to SEQ ID NO: 2336716
agcguuccugagauguucc

SEQ ID NO: 2336718 - RNA, 19 nt, Artificial Sequence
  Description of Artificial Sequence: Synthetic oligonucleotide
  Sense strand starting at position 3449 of SEQ ID NO: 1885366
gcaagucauaaauggguaa

SEQ ID NO: 2336719 - RNA, 19 nt, Artificial Sequence
  Description of Artificial Sequence: Synthetic oligonucleotide
  Antisense strand to SEQ ID NO: 2336718
uuacccauuuaugacuugc

SEQ ID NO: 2336720 - RNA, 19 nt, Artificial Sequence
  Description of Artificial Sequence: Synthetic oligonucleotide
  Sense strand starting at position 3452 of SEQ ID NO: 1885366
agucauaaauggguaacca

SEQ ID NO: 2336721 - RNA, 19 nt, Artificial Sequence
  Description of Artificial Sequence: Synthetic oligonucleotide
  Antisense strand to SEQ ID NO: 2336720
ugguuacccauuuaugacu

SEQ ID NO: 2336722 - RNA, 19 nt, Artificial Sequence
  Description of Artificial Sequence: Synthetic oligonucleotide
  Sense strand starting at position 3494 of SEQ ID NO: 1885366
ugguaagcccaguaauaaa

SEQ ID NO: 2336723 - RNA, 19 nt, Artificial Sequence
  Description of Artificial Sequence: Synthetic oligonucleotide
  Antisense strand to SEQ ID NO: 2336722
uuuauuacugggcuuacca

SEQ ID NO: 2336724 - RNA, 19 nt, Artificial Sequence
  Description of Artificial Sequence: Synthetic oligonucleotide
  Sense strand starting at position 3514 of SEQ ID NO: 1885366
ugccgucuuccagauaaac

SEQ ID NO: 2336725 - RNA, 19 nt, Artificial Sequence
  Description of Artificial Sequence: Synthetic oligonucleotide
  Antisense strand to SEQ ID NO: 2336724
guuuaucuggaagacggca

SEQ ID NO: 2336726 - RNA, 19 nt, Artificial Sequence
  Description of Artificial Sequence: Synthetic oligonucleotide
  Sense strand starting at position 3545 of SEQ ID NO: 1885366
ccgaaaggccucuagugua

SEQ ID NO: 2336727 - RNA, 19 nt, Artificial Sequence
  Description of Artificial Sequence: Synthetic oligonucleotide
  Antisense strand to SEQ ID NO: 2336726
uacacuagaggccuuucgg

SEQ ID NO: 2336728 - RNA, 19 nt, Artificial Sequence
  Description of Artificial Sequence: Synthetic oligonucleotide
  Sense strand starting at position 3550 of SEQ ID NO: 1885366
aggccucuaguguauaaau

SEQ ID NO: 2336729 - RNA, 19 nt, Artificial Sequence
  Description of Artificial Sequence: Synthetic oligonucleotide
  Antisense strand to SEQ ID NO: 2336728
auuuauacacuagaggccu

SEQ ID NO: 2336730 - RNA, 19 nt, Artificial Sequence
  Description of Artificial Sequence: Synthetic oligonucleotide
  Sense strand starting at position 3552 of SEQ ID NO: 1885366
gccucuaguguauaaauau

SEQ ID NO: 2336731 - RNA, 19 nt, Artificial Sequence
  Description of Artificial Sequence: Synthetic oligonucleotide
  Antisense strand to SEQ ID NO: 2336730
auauuuauacacuagaggc

SEQ ID NO: 2336732 - RNA, 19 nt, Artificial Sequence
  Description of Artificial Sequence: Synthetic oligonucleotide
  Sense strand starting at position 3682 of SEQ ID NO: 1885366
gugauuauuccagaccuua

SEQ ID NO: 2336733 - RNA, 19 nt, Artificial Sequence
  Description of Artificial Sequence: Synthetic oligonucleotide
  Antisense strand to SEQ ID NO: 2336732
uaaggucuggaauaaucac

SEQ ID NO: 2336734 - RNA, 19 nt, Artificial Sequence
  Description of Artificial Sequence: Synthetic oligonucleotide
  Sense strand starting at position 3735 of SEQ ID NO: 1885366
uuagcucuauuugagaaau

SEQ ID NO: 2336735 - RNA, 19 nt, Artificial Sequence
  Description of Artificial Sequence: Synthetic oligonucleotide
  Antisense strand to SEQ ID NO: 2336734
auuucucaaauagagcuaa

SEQ ID NO: 2336736 - RNA, 19 nt, Artificial Sequence
  Description of Artificial Sequence: Synthetic oligonucleotide
  Sense strand starting at position 3737 of SEQ ID NO: 1885366
agcucuauuugagaaauua

SEQ ID NO: 2336737 - RNA, 19 nt, Artificial Sequence
  Description of Artificial Sequence: Synthetic oligonucleotide
  Antisense strand to SEQ ID NO: 2336736
uaauuucucaaauagagcu

SEQ ID NO: 2336738 - RNA, 19 nt, Artificial Sequence
  Description of Artificial Sequence: Synthetic oligonucleotide
  Sense strand starting at position 3815 of SEQ ID NO: 1885366
aaacuagaguugucuuguc

SEQ ID NO: 2336739 - RNA, 19 nt, Artificial Sequence
  Description of Artificial Sequence: Synthetic oligonucleotide
  Antisense strand to SEQ ID NO: 2336738
gacaagacaacucuaguuu

SEQ ID NO: 2336740 - RNA, 19 nt, Artificial Sequence
  Description of Artificial Sequence: Synthetic oligonucleotide
  Sense strand starting at position 3879 of SEQ ID NO: 1885366
agcaauaagcaguaaacua

SEQ ID NO: 2336741 - RNA, 19 nt, Artificial Sequence
  Description of Artificial Sequence: Synthetic oligonucleotide
  Antisense strand to SEQ ID NO: 2336740
uaguuuacugcuuauugcu

SEQ ID NO: 2336742 - RNA, 19 nt, Artificial Sequence
  Description of Artificial Sequence: Synthetic oligonucleotide
  Sense strand starting at position 195 of SEQ ID NO: 1885367
gagcgaagcugucucaaua

SEQ ID NO: 2336743 - RNA, 19 nt, Artificial Sequence
  Description of Artificial Sequence: Synthetic oligonucleotide
  Antisense strand to SEQ ID NO: 2336742
uauugagacagcuucgcuc

SEQ ID NO: 2336744 - RNA, 19 nt, Artificial Sequence
  Description of Artificial Sequence: Synthetic oligonucleotide
  Sense strand starting at position 606 of SEQ ID NO: 1885367
agcccucauuucugaaaga

SEQ ID NO: 2336745 - RNA, 19 nt, Artificial Sequence
  Description of Artificial Sequence: Synthetic oligonucleotide
  Antisense strand to SEQ ID NO: 2336744
ucuuucagaaaugagggcu

SEQ ID NO: 2336746 - RNA, 19 nt, Artificial Sequence
  Description of Artificial Sequence: Synthetic oligonucleotide
  Sense strand starting at position 607 of SEQ ID NO: 1885367
gcccucauuucugaaagac

SEQ ID NO: 2336747 - RNA, 19 nt, Artificial Sequence
  Description of Artificial Sequence: Synthetic oligonucleotide
  Antisense strand to SEQ ID NO: 2336746
gucuuucagaaaugagggc

SEQ ID NO: 2336748 - RNA, 19 nt, Artificial Sequence
  Description of Artificial Sequence: Synthetic oligonucleotide
  Sense strand starting at position 697 of SEQ ID NO: 1885367
gugucucauguguacugga

SEQ ID NO: 2336749 - RNA, 19 nt, Artificial Sequence
  Description of Artificial Sequence: Synthetic oligonucleotide
  Antisense strand to SEQ ID NO: 2336748
uccaguacacaugagacac

SEQ ID NO: 2336750 - RNA, 19 nt, Artificial Sequence
  Description of Artificial Sequence: Synthetic oligonucleotide
  Sense strand starting at position 1073 of SEQ ID NO: 1885367
uggccaagggauuguugau

SEQ ID NO: 2336751 - RNA, 19 nt, Artificial Sequence
  Description of Artificial Sequence: Synthetic oligonucleotide
  Antisense strand to SEQ ID NO: 2336750
aucaacaaucccuuggcca

SEQ ID NO: 2336752 - RNA, 19 nt, Artificial Sequence
  Description of Artificial Sequence: Synthetic oligonucleotide
  Sense strand starting at position 1079 of SEQ ID NO: 1885367
agggauuguugauuaacug

SEQ ID NO: 2336753 - RNA, 19 nt, Artificial Sequence
  Description of Artificial Sequence: Synthetic oligonucleotide
  Antisense strand to SEQ ID NO: 2336752
caguuaaucaacaaucccu

SEQ ID NO: 2336754 - RNA, 19 nt, Artificial Sequence
  Description of Artificial Sequence: Synthetic oligonucleotide
  Sense strand starting at position 1080 of SEQ ID NO: 1885367
gggauuguugauuaacugu

SEQ ID NO: 2336755 - RNA, 19 nt, Artificial Sequence
  Description of Artificial Sequence: Synthetic oligonucleotide
  Antisense strand to SEQ ID NO: 2336754
acaguuaaucaacaauccc

SEQ ID NO: 2336756 - RNA, 19 nt, Artificial Sequence
  Description of Artificial Sequence: Synthetic oligonucleotide
  Sense strand starting at position 1083 of SEQ ID NO: 1885367
auuguugauuaacugugaa

SEQ ID NO: 2336757 - RNA, 19 nt, Artificial Sequence
  Description of Artificial Sequence: Synthetic oligonucleotide
  Antisense strand to SEQ ID NO: 2336756
uucacaguuaaucaacaau

SEQ ID NO: 2336758 - RNA, 19 nt, Artificial Sequence
  Description of Artificial Sequence: Synthetic oligonucleotide
  Sense strand starting at position 1086 of SEQ ID NO: 1885367
guugauuaacugugaauua

SEQ ID NO: 2336759 - RNA, 19 nt, Artificial Sequence
  Description of Artificial Sequence: Synthetic oligonucleotide
  Antisense strand to SEQ ID NO: 2336758
uaauucacaguuaaucaac

SEQ ID NO: 2336760 - RNA, 19 nt, Artificial Sequence
  Description of Artificial Sequence: Synthetic oligonucleotide
  Sense strand starting at position 1779 of SEQ ID NO: 1885367
agaguuagccucugaccua

SEQ ID NO: 2336761 - RNA, 19 nt, Artificial Sequence
  Description of Artificial Sequence: Synthetic oligonucleotide
  Antisense strand to SEQ ID NO: 2336760
uaggucagaggcuaacucu

SEQ ID NO: 2336762 - RNA, 19 nt, Artificial Sequence
  Description of Artificial Sequence: Synthetic oligonucleotide
  Sense strand starting at position 1782 of SEQ ID NO: 1885367
guuagccucugaccuauuu

SEQ ID NO: 2336763 - RNA, 19 nt, Artificial Sequence
  Description of Artificial Sequence: Synthetic oligonucleotide
  Antisense strand to SEQ ID NO: 2336762
aaauaggucagaggcuaac

SEQ ID NO: 2336764 - RNA, 19 nt, Artificial Sequence
  Description of Artificial Sequence: Synthetic oligonucleotide
  Sense strand starting at position 1812 of SEQ ID NO: 1885367
uccuauuggcaauacgauu

SEQ ID NO: 2336765 - RNA, 19 nt, Artificial Sequence
  Description of Artificial Sequence: Synthetic oligonucleotide
  Antisense strand to SEQ ID NO: 2336764
aaucguauugccaauagga

SEQ ID NO: 2336766 - RNA, 19 nt, Artificial Sequence
  Description of Artificial Sequence: Synthetic oligonucleotide
  Sense strand starting at position 1818 of SEQ ID NO: 1885367
uggcaauacgauuguacaa

SEQ ID NO: 2336767 - RNA, 19 nt, Artificial Sequence
  Description of Artificial Sequence: Synthetic oligonucleotide
  Antisense strand to SEQ ID NO: 2336766
uuguacaaucguauugcca

SEQ ID NO: 2336768 - RNA, 19 nt, Artificial Sequence
  Description of Artificial Sequence: Synthetic oligonucleotide
  Sense strand starting at position 1891 of SEQ ID NO: 1885367
gcauauggauacuucuuua

SEQ ID NO: 2336769 - RNA, 19 nt, Artificial Sequence
  Description of Artificial Sequence: Synthetic oligonucleotide
  Antisense strand to SEQ ID NO: 2336768
uaaagaaguauccauaugc

SEQ ID NO: 2336770 - RNA, 19 nt, Artificial Sequence
  Description of Artificial Sequence: Synthetic oligonucleotide
  Sense strand starting at position 2022 of SEQ ID NO: 1885367
ucaaaucugcuuggucacu

SEQ ID NO: 2336771 - RNA, 19 nt, Artificial Sequence
  Description of Artificial Sequence: Synthetic oligonucleotide
  Antisense strand to SEQ ID NO: 2336770
agugaccaagcagauuuga

SEQ ID NO: 2336772 - RNA, 19 nt, Artificial Sequence
  Description of Artificial Sequence: Synthetic oligonucleotide
  Sense strand starting at position 2086 of SEQ ID NO: 1885367
auauucugacucugauaag

SEQ ID NO: 2336773 - RNA, 19 nt, Artificial Sequence
  Description of Artificial Sequence: Synthetic oligonucleotide
  Antisense strand to SEQ ID NO: 2336772
cuuaucagagucagaauau

SEQ ID NO: 2336774 - RNA, 19 nt, Artificial Sequence
  Description of Artificial Sequence: Synthetic oligonucleotide
  Sense strand starting at position 2116 of SEQ ID NO: 1885367
gaggcuuuaugagucugau

SEQ ID NO: 2336775 - RNA, 19 nt, Artificial Sequence
  Description of Artificial Sequence: Synthetic oligonucleotide
  Antisense strand to SEQ ID NO: 2336774
aucagacucauaaagccuc

SEQ ID NO: 2336776 - RNA, 19 nt, Artificial Sequence
  Description of Artificial Sequence: Synthetic oligonucleotide
  Sense strand starting at position 2119 of SEQ ID NO: 1885367
gcuuuaugagucugauucu

SEQ ID NO: 2336777 - RNA, 19 nt, Artificial Sequence
  Description of Artificial Sequence: Synthetic oligonucleotide
  Antisense strand to SEQ ID NO: 2336776
agaaucagacucauaaagc

SEQ ID NO: 2336778 - RNA, 19 nt, Artificial Sequence
  Description of Artificial Sequence: Synthetic oligonucleotide
  Sense strand starting at position 2122 of SEQ ID NO: 1885367
uuaugagucugauucuguu

SEQ ID NO: 2336779 - RNA, 19 nt, Artificial Sequence
  Description of Artificial Sequence: Synthetic oligonucleotide
  Antisense strand to SEQ ID NO: 2336778
aacagaaucagacucauaa

SEQ ID NO: 2336780 - RNA, 19 nt, Artificial Sequence
  Description of Artificial Sequence: Synthetic oligonucleotide
  Sense strand starting at position 2670 of SEQ ID NO: 1885367
accauagugguguaaucag

SEQ ID NO: 2336781 - RNA, 19 nt, Artificial Sequence
  Description of Artificial Sequence: Synthetic oligonucleotide
  Antisense strand to SEQ ID NO: 2336780
cugauuacaccacuauggu

SEQ ID NO: 2336782 - RNA, 19 nt, Artificial Sequence
  Description of Artificial Sequence: Synthetic oligonucleotide
  Sense strand starting at position 2681 of SEQ ID NO: 1885367
guaaucagagcucacugaa

SEQ ID NO: 2336783 - RNA, 19 nt, Artificial Sequence
  Description of Artificial Sequence: Synthetic oligonucleotide
  Antisense strand to SEQ ID NO: 2336782
uucagugagcucugauuac

SEQ ID NO: 2336784 - RNA, 19 nt, Artificial Sequence
  Description of Artificial Sequence: Synthetic oligonucleotide
  Sense strand starting at position 2836 of SEQ ID NO: 1885367
ucucaaacucguugguuua

SEQ ID NO: 2336785 - RNA, 19 nt, Artificial Sequence
  Description of Artificial Sequence: Synthetic oligonucleotide
  Antisense strand to SEQ ID NO: 2336784
uaaaccaacgaguuugaga

SEQ ID NO: 2336786 - RNA, 19 nt, Artificial Sequence
  Description of Artificial Sequence: Synthetic oligonucleotide
  Sense strand starting at position 2837 of SEQ ID NO: 1885367
cucaaacucguugguuuaa

SEQ ID NO: 2336787 - RNA, 19 nt, Artificial Sequence
  Description of Artificial Sequence: Synthetic oligonucleotide
  Antisense strand to SEQ ID NO: 2336786
uuaaaccaacgaguuugag

SEQ ID NO: 2336788 - RNA, 19 nt, Artificial Sequence
  Description of Artificial Sequence: Synthetic oligonucleotide
  Sense strand starting at position 2839 of SEQ ID NO: 1885367
caaacucguugguuuaagu

SEQ ID NO: 2336789 - RNA, 19 nt, Artificial Sequence
  Description of Artificial Sequence: Synthetic oligonucleotide
  Antisense strand to SEQ ID NO: 2336788
acuuaaaccaacgaguuug

SEQ ID NO: 2336790 - RNA, 19 nt, Artificial Sequence
  Description of Artificial Sequence: Synthetic oligonucleotide
  Sense strand starting at position 2846 of SEQ ID NO: 1885367
guugguuuaagugaucuuc

SEQ ID NO: 2336791 - RNA, 19 nt, Artificial Sequence
  Description of Artificial Sequence: Synthetic oligonucleotide
  Antisense strand to SEQ ID NO: 2336790
gaagaucacuuaaaccaac

SEQ ID NO: 2336792 - RNA, 19 nt, Artificial Sequence
  Description of Artificial Sequence: Synthetic oligonucleotide
  Sense strand starting at position 2848 of SEQ ID NO: 1885367
ugguuuaagugaucuuccu

SEQ ID NO: 2336793 - RNA, 19 nt, Artificial Sequence
  Description of Artificial Sequence: Synthetic oligonucleotide
  Antisense strand to SEQ ID NO: 2336792
aggaagaucacuuaaacca

SEQ ID NO: 2336794 - RNA, 19 nt, Artificial Sequence
  Description of Artificial Sequence: Synthetic oligonucleotide
  Sense strand starting at position 2927 of SEQ ID NO: 1885367
cuuugaauuguaugaaagu

SEQ ID NO: 2336795 - RNA, 19 nt, Artificial Sequence
  Description of Artificial Sequence: Synthetic oligonucleotide
  Antisense strand to SEQ ID NO: 2336794
acuuucauacaauucaaag

SEQ ID NO: 2336796 - RNA, 19 nt, Artificial Sequence
  Description of Artificial Sequence: Synthetic oligonucleotide
  Sense strand starting at position 2934 of SEQ ID NO: 1885367
uuguaugaaaguugaguca

SEQ ID NO: 2336797 - RNA, 19 nt, Artificial Sequence
  Description of Artificial Sequence: Synthetic oligonucleotide
  Antisense strand to SEQ ID NO: 2336796
ugacucaacuuucauacaa

SEQ ID NO: 2336798 - RNA, 19 nt, Artificial Sequence
  Description of Artificial Sequence: Synthetic oligonucleotide
  Sense strand starting at position 2984 of SEQ ID NO: 1885367
auucuaacuuuggcaugaa

SEQ ID NO: 2336799 - RNA, 19 nt, Artificial Sequence
  Description of Artificial Sequence: Synthetic oligonucleotide
  Antisense strand to SEQ ID NO: 2336798
uucaugccaaaguuagaau

SEQ ID NO: 2336800 - RNA, 19 nt, Artificial Sequence
  Description of Artificial Sequence: Synthetic oligonucleotide
  Sense strand starting at position 2987 of SEQ ID NO: 1885367
cuaacuuuggcaugaagac

SEQ ID NO: 2336801 - RNA, 19 nt, Artificial Sequence
  Description of Artificial Sequence: Synthetic oligonucleotide
  Antisense strand to SEQ ID NO: 2336800
gucuucaugccaaaguuag

SEQ ID NO: 2336802 - RNA, 19 nt, Artificial Sequence
  Description of Artificial Sequence: Synthetic oligonucleotide
  Sense strand starting at position 3219 of SEQ ID NO: 1885367
aaagaaguauggucaccga

SEQ ID NO: 2336803 - RNA, 19 nt, Artificial Sequence
  Description of Artificial Sequence: Synthetic oligonucleotide
  Antisense strand to SEQ ID NO: 2336802
ucggugaccauacuucuuu

SEQ ID NO: 2336804 - RNA, 19 nt, Artificial Sequence
  Description of Artificial Sequence: Synthetic oligonucleotide
  Sense strand starting at position 3222 of SEQ ID NO: 1885367
gaaguauggucaccgagug

SEQ ID NO: 2336805 - RNA, 19 nt, Artificial Sequence
  Description of Artificial Sequence: Synthetic oligonucleotide
  Antisense strand to SEQ ID NO: 2336804
cacucggugaccauacuuc

SEQ ID NO: 2336806 - RNA, 19 nt, Artificial Sequence
  Description of Artificial Sequence: Synthetic oligonucleotide
  Sense strand starting at position 3223 of SEQ ID NO: 1885367
aaguauggucaccgaguga

SEQ ID NO: 2336807 - RNA, 19 nt, Artificial Sequence
  Description of Artificial Sequence: Synthetic oligonucleotide
  Antisense strand to SEQ ID NO: 2336806
ucacucggugaccauacuu

SEQ ID NO: 2336808 - RNA, 19 nt, Artificial Sequence
  Description of Artificial Sequence: Synthetic oligonucleotide
  Sense strand starting at position 3255 of SEQ ID NO: 1885367
aggaguuguugucuuaaau

SEQ ID NO: 2336809 - RNA, 19 nt, Artificial Sequence
  Description of Artificial Sequence: Synthetic oligonucleotide
  Antisense strand to SEQ ID NO: 2336808
auuuaagacaacaacuccu

SEQ ID NO: 2336810 - RNA, 19 nt, Artificial Sequence
  Description of Artificial Sequence: Synthetic oligonucleotide
  Sense strand starting at position 3670 of SEQ ID NO: 1885367
ccagguguuucuccagaaa

SEQ ID NO: 2336811 - RNA, 19 nt, Artificial Sequence
  Description of Artificial Sequence: Synthetic oligonucleotide
  Antisense strand to SEQ ID NO: 2336810
uuucuggagaaacaccugg

SEQ ID NO: 2336812 - RNA, 19 nt, Artificial Sequence
  Description of Artificial Sequence: Synthetic oligonucleotide
  Sense strand starting at position 3673 of SEQ ID NO: 1885367
gguguuucuccagaaauau

SEQ ID NO: 2336813 - RNA, 19 nt, Artificial Sequence
  Description of Artificial Sequence: Synthetic oligonucleotide
  Antisense strand to SEQ ID NO: 2336812
auauuucuggagaaacacc

SEQ ID NO: 2336814 - RNA, 19 nt, Artificial Sequence
  Description of Artificial Sequence: Synthetic oligonucleotide
  Sense strand starting at position 3816 of SEQ ID NO: 1885367
caguuuaaggcaugaacuu

SEQ ID NO: 2336815 - RNA, 19 nt, Artificial Sequence
  Description of Artificial Sequence: Synthetic oligonucleotide
  Antisense strand to SEQ ID NO: 2336814
aaguucaugccuuaaacug

SEQ ID NO: 2336816 - RNA, 19 nt, Artificial Sequence
  Description of Artificial Sequence: Synthetic oligonucleotide
  Sense strand starting at position 3817 of SEQ ID NO: 1885367
aguuuaaggcaugaacuuu

SEQ ID NO: 2336817 - RNA, 19 nt, Artificial Sequence
  Description of Artificial Sequence: Synthetic oligonucleotide
  Antisense strand to SEQ ID NO: 2336816
aaaguucaugccuuaaacu

SEQ ID NO: 2336818 - RNA, 19 nt, Artificial Sequence
  Description of Artificial Sequence: Synthetic oligonucleotide
  Sense strand starting at position 3823 of SEQ ID NO: 1885367
aggcaugaacuuuggaguu

SEQ ID NO: 2336819 - RNA, 19 nt, Artificial Sequence
  Description of Artificial Sequence: Synthetic oligonucleotide
  Antisense strand to SEQ ID NO: 2336818
aacuccaaaguucaugccu

SEQ ID NO: 2336820 - RNA, 19 nt, Artificial Sequence
  Description of Artificial Sequence: Synthetic oligonucleotide
  Sense strand starting at position 3837 of SEQ ID NO: 1885367
gaguuagaccuagguugca

SEQ ID NO: 2336821 - RNA, 19 nt, Artificial Sequence
  Description of Artificial Sequence: Synthetic oligonucleotide
  Antisense strand to SEQ ID NO: 2336820
ugcaaccuaggucuaacuc

SEQ ID NO: 2336822 - RNA, 19 nt, Artificial Sequence
  Description of Artificial Sequence: Synthetic oligonucleotide
  Sense strand starting at position 2 of SEQ ID NO: 1885368
uugaguuucugguuacccu

SEQ ID NO: 2336823 - RNA, 19 nt, Artificial Sequence
  Description of Artificial Sequence: Synthetic oligonucleotide
  Antisense strand to SEQ ID NO: 2336822
aggguaaccagaaacucaa

SEQ ID NO: 2336824 - RNA, 19 nt, Artificial Sequence
  Description of Artificial Sequence: Synthetic oligonucleotide
  Sense strand starting at position 177 of SEQ ID NO: 1885368
guuaauaacuguccagucu

SEQ ID NO: 2336825 - RNA, 19 nt, Artificial Sequence
  Description of Artificial Sequence: Synthetic oligonucleotide
  Antisense strand to SEQ ID NO: 2336824
agacuggacaguuauuaac

SEQ ID NO: 2336826 - RNA, 19 nt, Artificial Sequence
  Description of Artificial Sequence: Synthetic oligonucleotide
  Sense strand starting at position 178 of SEQ ID NO: 1885368
uuaauaacuguccagucuu

SEQ ID NO: 2336827 - RNA, 19 nt, Artificial Sequence
  Description of Artificial Sequence: Synthetic oligonucleotide
  Antisense strand to SEQ ID NO: 2336826
aagacuggacaguuauuaa

SEQ ID NO: 2336828 - RNA, 19 nt, Artificial Sequence
  Description of Artificial Sequence: Synthetic oligonucleotide
  Sense strand starting at position 224 of SEQ ID NO: 1885368
ucugaaauguuuccauaug

SEQ ID NO: 2336829 - RNA, 19 nt, Artificial Sequence
  Description of Artificial Sequence: Synthetic oligonucleotide
  Antisense strand to SEQ ID NO: 2336828
cauauggaaacauuucaga

SEQ ID NO: 2336830 - RNA, 19 nt, Artificial Sequence
  Description of Artificial Sequence: Synthetic oligonucleotide
  Sense strand starting at position 963 of SEQ ID NO: 1885368
guagaaagagcccauaucu

SEQ ID NO: 2336831 - RNA, 19 nt, Artificial Sequence
  Description of Artificial Sequence: Synthetic oligonucleotide
  Antisense strand to SEQ ID NO: 2336830
agauaugggcucuuucuac

SEQ ID NO: 2336832 - RNA, 19 nt, Artificial Sequence
  Description of Artificial Sequence: Synthetic oligonucleotide
  Sense strand starting at position 1062 of SEQ ID NO: 1885368
ggaugaagaucauaauuuc

SEQ ID NO: 2336833 - RNA, 19 nt, Artificial Sequence
  Description of Artificial Sequence: Synthetic oligonucleotide
  Antisense strand to SEQ ID NO: 2336832
gaaauuaugaucuucaucc

SEQ ID NO: 2336834 - RNA, 19 nt, Artificial Sequence
  Description of Artificial Sequence: Synthetic oligonucleotide
  Sense strand starting at position 1090 of SEQ ID NO: 1885368
guguuaugagacugaauga

SEQ ID NO: 2336835 - RNA, 19 nt, Artificial Sequence
  Description of Artificial Sequence: Synthetic oligonucleotide
  Antisense strand to SEQ ID NO: 2336834
ucauucagucucauaacac

SEQ ID NO: 2336836 - RNA, 19 nt, Artificial Sequence
  Description of Artificial Sequence: Synthetic oligonucleotide
  Sense strand starting at position 1097 of SEQ ID NO: 1885368
gagacugaaugacagaaau

SEQ ID NO: 2336837 - RNA, 19 nt, Artificial Sequence
  Description of Artificial Sequence: Synthetic oligonucleotide
  Antisense strand to SEQ ID NO: 2336836
auuucugucauucagucuc

SEQ ID NO: 2336838 - RNA, 19 nt, Artificial Sequence
  Description of Artificial Sequence: Synthetic oligonucleotide
  Sense strand starting at position 1139 of SEQ ID NO: 1885368
aaaguuagguuucuuauag

SEQ ID NO: 2336839 - RNA, 19 nt, Artificial Sequence
  Description of Artificial Sequence: Synthetic oligonucleotide
  Antisense strand to SEQ ID NO: 2336838
cuauaagaaaccuaacuuu

SEQ ID NO: 2336840 - RNA, 19 nt, Artificial Sequence
  Description of Artificial Sequence: Synthetic oligonucleotide
  Sense strand starting at position 1230 of SEQ ID NO: 1885368
ugggcuaagcauuauuagu

SEQ ID NO: 2336841 - RNA, 19 nt, Artificial Sequence
  Description of Artificial Sequence: Synthetic oligonucleotide
  Antisense strand to SEQ ID NO: 2336840
acuaauaaugcuuagccca

SEQ ID NO: 2336842 - RNA, 19 nt, Artificial Sequence
  Description of Artificial Sequence: Synthetic oligonucleotide
  Sense strand starting at position 1232 of SEQ ID NO: 1885368
ggcuaagcauuauuaguca

SEQ ID NO: 2336843 - RNA, 19 nt, Artificial Sequence
  Description of Artificial Sequence: Synthetic oligonucleotide
  Antisense strand to SEQ ID NO: 2336842
ugacuaauaaugcuuagcc

SEQ ID NO: 2336844 - RNA, 19 nt, Artificial Sequence
  Description of Artificial Sequence: Synthetic oligonucleotide
  Sense strand starting at position 1281 of SEQ ID NO: 1885368
ugaauaccguuucuccaaa

SEQ ID NO: 2336845 - RNA, 19 nt, Artificial Sequence
  Description of Artificial Sequence: Synthetic oligonucleotide
  Antisense strand to SEQ ID NO: 2336844
uuuggagaaacgguauuca

SEQ ID NO: 2336846 - RNA, 19 nt, Artificial Sequence
  Description of Artificial Sequence: Synthetic oligonucleotide
  Sense strand starting at position 1402 of SEQ ID NO: 1885368
guaaauucuggaggagcca

SEQ ID NO: 2336847 - RNA, 19 nt, Artificial Sequence
  Description of Artificial Sequence: Synthetic oligonucleotide
  Antisense strand to SEQ ID NO: 2336846
uggcuccuccagaauuuac

SEQ ID NO: 2336848 - RNA, 19 nt, Artificial Sequence
  Description of Artificial Sequence: Synthetic oligonucleotide
  Sense strand starting at position 1462 of SEQ ID NO: 1885368
gguuaagugcuuaguacgu

SEQ ID NO: 2336849 - RNA, 19 nt, Artificial Sequence
  Description of Artificial Sequence: Synthetic oligonucleotide
  Antisense strand to SEQ ID NO: 2336848
acguacuaagcacuuaacc

SEQ ID NO: 2336850 - RNA, 19 nt, Artificial Sequence
  Description of Artificial Sequence: Synthetic oligonucleotide
  Sense strand starting at position 1468 of SEQ ID NO: 1885368
gugcuuaguacguuugcua

SEQ ID NO: 2336851 - RNA, 19 nt, Artificial Sequence
  Description of Artificial Sequence: Synthetic oligonucleotide
  Antisense strand to SEQ ID NO: 2336850
uagcaaacguacuaagcac

SEQ ID NO: 2336852 - RNA, 19 nt, Artificial Sequence
  Description of Artificial Sequence: Synthetic oligonucleotide
  Sense strand starting at position 1469 of SEQ ID NO: 1885368
ugcuuaguacguuugcuau

SEQ ID NO: 2336853 - RNA, 19 nt, Artificial Sequence
  Description of Artificial Sequence: Synthetic oligonucleotide
  Antisense strand to SEQ ID NO: 2336852
auagcaaacguacuaagca

SEQ ID NO: 2336854 - RNA, 19 nt, Artificial Sequence
  Description of Artificial Sequence: Synthetic oligonucleotide
  Sense strand starting at position 1475 of SEQ ID NO: 1885368
guacguuugcuauugggca

SEQ ID NO: 2336855 - RNA, 19 nt, Artificial Sequence
  Description of Artificial Sequence: Synthetic oligonucleotide
  Antisense strand to SEQ ID NO: 2336854
ugcccaauagcaaacguac

SEQ ID NO: 2336856 - RNA, 19 nt, Artificial Sequence
  Description of Artificial Sequence: Synthetic oligonucleotide
  Sense strand starting at position 1515 of SEQ ID NO: 1885368
acgucagaauagucagguu

SEQ ID NO: 2336857 - RNA, 19 nt, Artificial Sequence
  Description of Artificial Sequence: Synthetic oligonucleotide
  Antisense strand to SEQ ID NO: 2336856
aaccugacuauucugacgu

SEQ ID NO: 2336858 - RNA, 19 nt, Artificial Sequence
  Description of Artificial Sequence: Synthetic oligonucleotide
  Sense strand starting at position 1528 of SEQ ID NO: 1885368
cagguuaucgacugaguaa

SEQ ID NO: 2336859 - RNA, 19 nt, Artificial Sequence
  Description of Artificial Sequence: Synthetic oligonucleotide
  Antisense strand to SEQ ID NO: 2336858
uuacucagucgauaaccug

SEQ ID NO: 2336860 - RNA, 19 nt, Artificial Sequence
  Description of Artificial Sequence: Synthetic oligonucleotide
  Sense strand starting at position 1529 of SEQ ID NO: 1885368
agguuaucgacugaguaac

SEQ ID NO: 2336861 - RNA, 19 nt, Artificial Sequence
  Description of Artificial Sequence: Synthetic oligonucleotide
  Antisense strand to SEQ ID NO: 2336860
guuacucagucgauaaccu

SEQ ID NO: 2336862 - RNA, 19 nt, Artificial Sequence
  Description of Artificial Sequence: Synthetic oligonucleotide
  Sense strand starting at position 1543 of SEQ ID NO: 1885368
guaacuguuagugguggau

SEQ ID NO: 2336863 - RNA, 19 nt, Artificial Sequence
  Description of Artificial Sequence: Synthetic oligonucleotide
  Antisense strand to SEQ ID NO: 2336862
auccaccacuaacaguuac

SEQ ID NO: 2336864 - RNA, 19 nt, Artificial Sequence
  Description of Artificial Sequence: Synthetic oligonucleotide
  Sense strand starting at position 1546 of SEQ ID NO: 1885368
acuguuagugguggauaau

SEQ ID NO: 2336865 - RNA, 19 nt, Artificial Sequence
  Description of Artificial Sequence: Synthetic oligonucleotide
  Antisense strand to SEQ ID NO: 2336864
auuauccaccacuaacagu

SEQ ID NO: 2336866 - RNA, 19 nt, Artificial Sequence
  Description of Artificial Sequence: Synthetic oligonucleotide
  Sense strand starting at position 1547 of SEQ ID NO: 1885368
cuguuagugguggauaauu

SEQ ID NO: 2336867 - RNA, 19 nt, Artificial Sequence
  Description of Artificial Sequence: Synthetic oligonucleotide
  Antisense strand to SEQ ID NO: 2336866
aauuauccaccacuaacag

SEQ ID NO: 2336868 - RNA, 19 nt, Artificial Sequence
  Description of Artificial Sequence: Synthetic oligonucleotide
  Sense strand starting at position 1898 of SEQ ID NO: 1885368
ggucuugagaugcggauga

SEQ ID NO: 2336869 - RNA, 19 nt, Artificial Sequence
  Description of Artificial Sequence: Synthetic oligonucleotide
  Antisense strand to SEQ ID NO: 2336868
ucauccgcaucucaagacc

SEQ ID NO: 2336870 - RNA, 19 nt, Artificial Sequence
  Description of Artificial Sequence: Synthetic oligonucleotide
  Sense strand starting at position 2014 of SEQ ID NO: 1885368
gcagcuuaacugggagacu

SEQ ID NO: 2336871 - RNA, 19 nt, Artificial Sequence
  Description of Artificial Sequence: Synthetic oligonucleotide
  Antisense strand to SEQ ID NO: 2336870
agucucccaguuaagcugc

SEQ ID NO: 2336872 - RNA, 19 nt, Artificial Sequence
  Description of Artificial Sequence: Synthetic oligonucleotide
  Sense strand starting at position 3338 of SEQ ID NO: 1885368
aauggaacuguguguagaa

SEQ ID NO: 2336873 - RNA, 19 nt, Artificial Sequence
  Description of Artificial Sequence: Synthetic oligonucleotide
  Antisense strand to SEQ ID NO: 2336872
uucuacacacaguuccauu

SEQ ID NO: 2336874 - RNA, 19 nt, Artificial Sequence
  Description of Artificial Sequence: Synthetic oligonucleotide
  Sense strand starting at position 3339 of SEQ ID NO: 1885368
auggaacuguguguagaau

SEQ ID NO: 2336875 - RNA, 19 nt, Artificial Sequence
  Description of Artificial Sequence: Synthetic oligonucleotide
  Antisense strand to SEQ ID NO: 2336874
auucuacacacaguuccau

SEQ ID NO: 2336876 - RNA, 19 nt, Artificial Sequence
  Description of Artificial Sequence: Synthetic oligonucleotide
  Sense strand starting at position 3340 of SEQ ID NO: 1885368
uggaacuguguguagaaua

SEQ ID NO: 2336877 - RNA, 19 nt, Artificial Sequence
  Description of Artificial Sequence: Synthetic oligonucleotide
  Antisense strand to SEQ ID NO: 2336876
uauucuacacacaguucca

SEQ ID NO: 2336878 - RNA, 19 nt, Artificial Sequence
  Description of Artificial Sequence: Synthetic oligonucleotide
  Sense strand starting at position 3345 of SEQ ID NO: 1885368
cuguguguagaauacguau

SEQ ID NO: 2336879 - RNA, 19 nt, Artificial Sequence
  Description of Artificial Sequence: Synthetic oligonucleotide
  Antisense strand to SEQ ID NO: 2336878
auacguauucuacacacag

SEQ ID NO: 2336880 - RNA, 19 nt, Artificial Sequence
  Description of Artificial Sequence: Synthetic oligonucleotide
  Sense strand starting at position 3356 of SEQ ID NO: 1885368
auacguauguucccaucca

SEQ ID NO: 2336881 - RNA, 19 nt, Artificial Sequence
  Description of Artificial Sequence: Synthetic oligonucleotide
  Antisense strand to SEQ ID NO: 2336880
uggaugggaacauacguau

SEQ ID NO: 2336882 - RNA, 19 nt, Artificial Sequence
  Description of Artificial Sequence: Synthetic oligonucleotide
  Sense strand starting at position 3441 of SEQ ID NO: 1885368
gcaauuauuuaugugguau

SEQ ID NO: 2336883 - RNA, 19 nt, Artificial Sequence
  Description of Artificial Sequence: Synthetic oligonucleotide
  Antisense strand to SEQ ID NO: 2336882
auaccacauaaauaauugc

SEQ ID NO: 2336884 - RNA, 19 nt, Artificial Sequence
  Description of Artificial Sequence: Synthetic oligonucleotide
  Sense strand starting at position 3538 of SEQ ID NO: 1885368
uucuccuaugcuuagugaa

SEQ ID NO: 2336885 - RNA, 19 nt, Artificial Sequence
  Description of Artificial Sequence: Synthetic oligonucleotide
  Antisense strand to SEQ ID NO: 2336884
uucacuaagcauaggagaa

SEQ ID NO: 2336886 - RNA, 19 nt, Artificial Sequence
  Description of Artificial Sequence: Synthetic oligonucleotide
  Sense strand starting at position 3540 of SEQ ID NO: 1885368
cuccuaugcuuagugaauu

SEQ ID NO: 2336887 - RNA, 19 nt, Artificial Sequence
  Description of Artificial Sequence: Synthetic oligonucleotide
  Antisense strand to SEQ ID NO: 2336886
aauucacuaagcauaggag

SEQ ID NO: 2336888 - RNA, 19 nt, Artificial Sequence
  Description of Artificial Sequence: Synthetic oligonucleotide
  Sense strand starting at position 3658 of SEQ ID NO: 1885368
ucuaguagaacuugaugga

SEQ ID NO: 2336889 - RNA, 19 nt, Artificial Sequence
  Description of Artificial Sequence: Synthetic oligonucleotide
  Antisense strand to SEQ ID NO: 2336888
uccaucaaguucuacuaga

SEQ ID NO: 2336890 - RNA, 19 nt, Artificial Sequence
  Description of Artificial Sequence: Synthetic oligonucleotide
  Sense strand starting at position 3667 of SEQ ID NO: 1885368
acuugauggagcuguuaac

SEQ ID NO: 2336891 - RNA, 19 nt, Artificial Sequence
  Description of Artificial Sequence: Synthetic oligonucleotide
  Antisense strand to SEQ ID NO: 2336890
guuaacagcuccaucaagu

SEQ ID NO: 2336892 - RNA, 19 nt, Artificial Sequence
  Description of Artificial Sequence: Synthetic oligonucleotide
  Sense strand starting at position 3678 of SEQ ID NO: 1885368
cuguuaaccggcuauacuu

SEQ ID NO: 2336893 - RNA, 19 nt, Artificial Sequence
  Description of Artificial Sequence: Synthetic oligonucleotide
  Antisense strand to SEQ ID NO: 2336892
aaguauagccgguuaacag

SEQ ID NO: 2336894 - RNA, 19 nt, Artificial Sequence
  Description of Artificial Sequence: Synthetic oligonucleotide
  Sense strand starting at position 3834 of SEQ ID NO: 1885368
uagguuaucuggccuuaau

SEQ ID NO: 2336895 - RNA, 19 nt, Artificial Sequence
  Description of Artificial Sequence: Synthetic oligonucleotide
  Antisense strand to SEQ ID NO: 2336894
auuaaggccagauaaccua

SEQ ID NO: 2336896 - RNA, 19 nt, Artificial Sequence
  Description of Artificial Sequence: Synthetic oligonucleotide
  Sense strand starting at position 3837 of SEQ ID NO: 1885368
guuaucuggccuuaauucu

SEQ ID NO: 2336897 - RNA, 19 nt, Artificial Sequence
  Description of Artificial Sequence: Synthetic oligonucleotide
  Antisense strand to SEQ ID NO: 2336896
agaauuaaggccagauaac

SEQ ID NO: 2336898 - RNA, 19 nt, Artificial Sequence
  Description of Artificial Sequence: Synthetic oligonucleotide
  Sense strand starting at position 3844 of SEQ ID NO: 1885368
ggccuuaauucugucacag

SEQ ID NO: 2336899 - RNA, 19 nt, Artificial Sequence
  Description of Artificial Sequence: Synthetic oligonucleotide
  Antisense strand to SEQ ID NO: 2336898
cugugacagaauuaaggcc

SEQ ID NO: 2336900 - RNA, 19 nt, Artificial Sequence
  Description of Artificial Sequence: Synthetic oligonucleotide
  Sense strand starting at position 3929 of SEQ ID NO: 1885368
uugccuugccuugaaauca

SEQ ID NO: 2336901 - RNA, 19 nt, Artificial Sequence
  Description of Artificial Sequence: Synthetic oligonucleotide
  Antisense strand to SEQ ID NO: 2336900
ugauuucaaggcaaggcaa

SEQ ID NO: 2336902 - RNA, 19 nt, Artificial Sequence
  Description of Artificial Sequence: Synthetic oligonucleotide
  Sense strand starting at position 98 of SEQ ID NO: 1885369
aaaggugaugggugauaca

SEQ ID NO: 2336903 - RNA, 19 nt, Artificial Sequence
  Description of Artificial Sequence: Synthetic oligonucleotide
  Antisense strand to SEQ ID NO: 2336902
uguaucacccaucaccuuu

SEQ ID NO: 2336904 - RNA, 19 nt, Artificial Sequence
  Description of Artificial Sequence: Synthetic oligonucleotide
  Sense strand starting at position 107 of SEQ ID NO: 1885369
gggugauacaggugguuag

SEQ ID NO: 2336905 - RNA, 19 nt, Artificial Sequence
  Description of Artificial Sequence: Synthetic oligonucleotide
  Antisense strand to SEQ ID NO: 2336904
cuaaccaccuguaucaccc

SEQ ID NO: 2336906 - RNA, 19 nt, Artificial Sequence
  Description of Artificial Sequence: Synthetic oligonucleotide
  Sense strand starting at position 164 of SEQ ID NO: 1885369
ggagucaucacacgcauuu

SEQ ID NO: 2336907 - RNA, 19 nt, Artificial Sequence
  Description of Artificial Sequence: Synthetic oligonucleotide
  Antisense strand to SEQ ID NO: 2336906
aaaugcgugugaugacucc

SEQ ID NO: 2336908 - RNA, 19 nt, Artificial Sequence
  Description of Artificial Sequence: Synthetic oligonucleotide
  Sense strand starting at position 211 of SEQ ID NO: 1885369
auguuaaaugcagaacauc

SEQ ID NO: 2336909 - RNA, 19 nt, Artificial Sequence
  Description of Artificial Sequence: Synthetic oligonucleotide
  Antisense strand to SEQ ID NO: 2336908
gauguucugcauuuaacau

SEQ ID NO: 2336910 - RNA, 19 nt, Artificial Sequence
  Description of Artificial Sequence: Synthetic oligonucleotide
  Sense strand starting at position 242 of SEQ ID NO: 1885369
agaagcuagagauguagau

SEQ ID NO: 2336911 - RNA, 19 nt, Artificial Sequence
  Description of Artificial Sequence: Synthetic oligonucleotide
  Antisense strand to SEQ ID NO: 2336910
aucuacaucucuagcuucu

SEQ ID NO: 2336912 - RNA, 19 nt, Artificial Sequence
  Description of Artificial Sequence: Synthetic oligonucleotide
  Sense strand starting at position 280 of SEQ ID NO: 1885369
aguguuucugagcaggaag

SEQ ID NO: 2336913 - RNA, 19 nt, Artificial Sequence
  Description of Artificial Sequence: Synthetic oligonucleotide
  Antisense strand to SEQ ID NO: 2336912
cuuccugcucagaaacacu

SEQ ID NO: 2336914 - RNA, 19 nt, Artificial Sequence
  Description of Artificial Sequence: Synthetic oligonucleotide
  Sense strand starting at position 336 of SEQ ID NO: 1885369
uuagcagcuccagagaaau

SEQ ID NO: 2336915 - RNA, 19 nt, Artificial Sequence
  Description of Artificial Sequence: Synthetic oligonucleotide
  Antisense strand to SEQ ID NO: 2336914
auuucucuggagcugcuaa

SEQ ID NO: 2336916 - RNA, 19 nt, Artificial Sequence
  Description of Artificial Sequence: Synthetic oligonucleotide
  Sense strand starting at position 342 of SEQ ID NO: 1885369
gcuccagagaaaugaggua

SEQ ID NO: 2336917 - RNA, 19 nt, Artificial Sequence
  Description of Artificial Sequence: Synthetic oligonucleotide
  Antisense strand to SEQ ID NO: 2336916
uaccucauuucucuggagc

SEQ ID NO: 2336918 - RNA, 19 nt, Artificial Sequence
  Description of Artificial Sequence: Synthetic oligonucleotide
  Sense strand starting at position 354 of SEQ ID NO: 1885369
ugagguacauugucacaaa

SEQ ID NO: 2336919 - RNA, 19 nt, Artificial Sequence
  Description of Artificial Sequence: Synthetic oligonucleotide
  Antisense strand to SEQ ID NO: 2336918
uuugugacaauguaccuca

SEQ ID NO: 2336920 - RNA, 19 nt, Artificial Sequence
  Description of Artificial Sequence: Synthetic oligonucleotide
  Sense strand starting at position 366 of SEQ ID NO: 1885369
ucacaaagauugguaugua

SEQ ID NO: 2336921 - RNA, 19 nt, Artificial Sequence
  Description of Artificial Sequence: Synthetic oligonucleotide
  Antisense strand to SEQ ID NO: 2336920
uacauaccaaucuuuguga

SEQ ID NO: 2336922 - RNA, 19 nt, Artificial Sequence
  Description of Artificial Sequence: Synthetic oligonucleotide
  Sense strand starting at position 369 of SEQ ID NO: 1885369
caaagauugguauguaaag

SEQ ID NO: 2336923 - RNA, 19 nt, Artificial Sequence
  Description of Artificial Sequence: Synthetic oligonucleotide
  Antisense strand to SEQ ID NO: 2336922
cuuuacauaccaaucuuug

SEQ ID NO: 2336924 - RNA, 19 nt, Artificial Sequence
  Description of Artificial Sequence: Synthetic oligonucleotide
  Sense strand starting at position 370 of SEQ ID NO: 1885369
aaagauugguauguaaagu

SEQ ID NO: 2336925 - RNA, 19 nt, Artificial Sequence
  Description of Artificial Sequence: Synthetic oligonucleotide
  Antisense strand to SEQ ID NO: 2336924
acuuuacauaccaaucuuu

SEQ ID NO: 2336926 - RNA, 19 nt, Artificial Sequence
  Description of Artificial Sequence: Synthetic oligonucleotide
  Sense strand starting at position 380 of SEQ ID NO: 1885369
auguaaagucccuagcaag

SEQ ID NO: 2336927 - RNA, 19 nt, Artificial Sequence
  Description of Artificial Sequence: Synthetic oligonucleotide
  Antisense strand to SEQ ID NO: 2336926
cuugcuagggacuuuacau

SEQ ID NO: 2336928 - RNA, 19 nt, Artificial Sequence
  Description of Artificial Sequence: Synthetic oligonucleotide
  Sense strand starting at position 611 of SEQ ID NO: 1885369
agguuugcaggugagauua

SEQ ID NO: 2336929 - RNA, 19 nt, Artificial Sequence
  Description of Artificial Sequence: Synthetic oligonucleotide
  Antisense strand to SEQ ID NO: 2336928
uaaucucaccugcaaaccu

SEQ ID NO: 2336930 - RNA, 19 nt, Artificial Sequence
  Description of Artificial Sequence: Synthetic oligonucleotide
  Sense strand starting at position 621 of SEQ ID NO: 1885369
gugagauuaaaguguauug

SEQ ID NO: 2336931 - RNA, 19 nt, Artificial Sequence
  Description of Artificial Sequence: Synthetic oligonucleotide
  Antisense strand to SEQ ID NO: 2336930
caauacacuuuaaucucac

SEQ ID NO: 2336932 - RNA, 19 nt, Artificial Sequence
  Description of Artificial Sequence: Synthetic oligonucleotide
  Sense strand starting at position 630 of SEQ ID NO: 1885369
aaguguauuggguagaauu

SEQ ID NO: 2336933 - RNA, 19 nt, Artificial Sequence
  Description of Artificial Sequence: Synthetic oligonucleotide
  Antisense strand to SEQ ID NO: 2336932
aauucuacccaauacacuu

SEQ ID NO: 2336934 - RNA, 19 nt, Artificial Sequence
  Description of Artificial Sequence: Synthetic oligonucleotide
  Sense strand starting at position 632 of SEQ ID NO: 1885369
guguauuggguagaauucu

SEQ ID NO: 2336935 - RNA, 19 nt, Artificial Sequence
  Description of Artificial Sequence: Synthetic oligonucleotide
  Antisense strand to SEQ ID NO: 2336934
agaauucuacccaauacac

SEQ ID NO: 2336936 - RNA, 19 nt, Artificial Sequence
  Description of Artificial Sequence: Synthetic oligonucleotide
  Sense strand starting at position 818 of SEQ ID NO: 1885369
agaguaggugcucaaagau

SEQ ID NO: 2336937 - RNA, 19 nt, Artificial Sequence
  Description of Artificial Sequence: Synthetic oligonucleotide
  Antisense strand to SEQ ID NO: 2336936
aucuuugagcaccuacucu

SEQ ID NO: 2336938 - RNA, 19 nt, Artificial Sequence
  Description of Artificial Sequence: Synthetic oligonucleotide
  Sense strand starting at position 1160 of SEQ ID NO: 1885369
auucguuagccaguggcua

SEQ ID NO: 2336939 - RNA, 19 nt, Artificial Sequence
  Description of Artificial Sequence: Synthetic oligonucleotide
  Antisense strand to SEQ ID NO: 2336938
uagccacuggcuaacgaau

SEQ ID NO: 2336940 - RNA, 19 nt, Artificial Sequence
  Description of Artificial Sequence: Synthetic oligonucleotide
  Sense strand starting at position 2594 of SEQ ID NO: 1885369
cgaugaggcuucucaugaa

SEQ ID NO: 2336941 - RNA, 19 nt, Artificial Sequence
  Description of Artificial Sequence: Synthetic oligonucleotide
  Antisense strand to SEQ ID NO: 2336940
uucaugagaagccucaucg

SEQ ID NO: 2336942 - RNA, 19 nt, Artificial Sequence
  Description of Artificial Sequence: Synthetic oligonucleotide
  Sense strand starting at position 2598 of SEQ ID NO: 1885369
gaggcuucucaugaaggca

SEQ ID NO: 2336943 - RNA, 19 nt, Artificial Sequence
  Description of Artificial Sequence: Synthetic oligonucleotide
  Antisense strand to SEQ ID NO: 2336942
ugccuucaugagaagccuc

SEQ ID NO: 2336944 - RNA, 19 nt, Artificial Sequence
  Description of Artificial Sequence: Synthetic oligonucleotide
  Sense strand starting at position 2681 of SEQ ID NO: 1885369
ggguucugcuauuugcuga

SEQ ID NO: 2336945 - RNA, 19 nt, Artificial Sequence
  Description of Artificial Sequence: Synthetic oligonucleotide
  Antisense strand to SEQ ID NO: 2336944
ucagcaaauagcagaaccc

SEQ ID NO: 2336946 - RNA, 19 nt, Artificial Sequence
  Description of Artificial Sequence: Synthetic oligonucleotide
  Sense strand starting at position 2686 of SEQ ID NO: 1885369
cugcuauuugcugauuguu

SEQ ID NO: 2336947 - RNA, 19 nt, Artificial Sequence
  Description of Artificial Sequence: Synthetic oligonucleotide
  Antisense strand to SEQ ID NO: 2336946
aacaaucagcaaauagcag

SEQ ID NO: 2336948 - RNA, 19 nt, Artificial Sequence
  Description of Artificial Sequence: Synthetic oligonucleotide
  Sense strand starting at position 2943 of SEQ ID NO: 1885369
uucguucuugcuguuugaa

SEQ ID NO: 2336949 - RNA, 19 nt, Artificial Sequence
  Description of Artificial Sequence: Synthetic oligonucleotide
  Antisense strand to SEQ ID NO: 2336948
uucaaacagcaagaacgaa

SEQ ID NO: 2336950 - RNA, 19 nt, Artificial Sequence
  Description of Artificial Sequence: Synthetic oligonucleotide
  Sense strand starting at position 2944 of SEQ ID NO: 1885369
ucguucuugcuguuugaau

SEQ ID NO: 2336951 - RNA, 19 nt, Artificial Sequence
  Description of Artificial Sequence: Synthetic oligonucleotide
  Antisense strand to SEQ ID NO: 2336950
auucaaacagcaagaacga

SEQ ID NO: 2336952 - RNA, 19 nt, Artificial Sequence
  Description of Artificial Sequence: Synthetic oligonucleotide
  Sense strand starting at position 2946 of SEQ ID NO: 1885369
guucuugcuguuugaauuu

SEQ ID NO: 2336953 - RNA, 19 nt, Artificial Sequence
  Description of Artificial Sequence: Synthetic oligonucleotide
  Antisense strand to SEQ ID NO: 2336952
aaauucaaacagcaagaac

SEQ ID NO: 2336954 - RNA, 19 nt, Artificial Sequence
  Description of Artificial Sequence: Synthetic oligonucleotide
  Sense strand starting at position 3050 of SEQ ID NO: 1885369
cuggcuuucccauaaauag

SEQ ID NO: 2336955 - RNA, 19 nt, Artificial Sequence
  Description of Artificial Sequence: Synthetic oligonucleotide
  Antisense strand to SEQ ID NO: 2336954
cuauuuaugggaaagccag

SEQ ID NO: 2336956 - RNA, 19 nt, Artificial Sequence
  Description of Artificial Sequence: Synthetic oligonucleotide
  Sense strand starting at position 3242 of SEQ ID NO: 1885369
uuagcuugguuaucagaaa

SEQ ID NO: 2336957 - RNA, 19 nt, Artificial Sequence
  Description of Artificial Sequence: Synthetic oligonucleotide
  Antisense strand to SEQ ID NO: 2336956
uuucugauaaccaagcuaa

SEQ ID NO: 2336958 - RNA, 19 nt, Artificial Sequence
  Description of Artificial Sequence: Synthetic oligonucleotide
  Sense strand starting at position 3287 of SEQ ID NO: 1885369
uugacaucugguuagcacu

SEQ ID NO: 2336959 - RNA, 19 nt, Artificial Sequence
  Description of Artificial Sequence: Synthetic oligonucleotide
  Antisense strand to SEQ ID NO: 2336958
agugcuaaccagaugucaa

SEQ ID NO: 2336960 - RNA, 19 nt, Artificial Sequence
  Description of Artificial Sequence: Synthetic oligonucleotide
  Sense strand starting at position 3306 of SEQ ID NO: 1885369
gucuacuuuccaugaauga

SEQ ID NO: 2336961 - RNA, 19 nt, Artificial Sequence
  Description of Artificial Sequence: Synthetic oligonucleotide
  Antisense strand to SEQ ID NO: 2336960
ucauucauggaaaguagac

SEQ ID NO: 2336962 - RNA, 19 nt, Artificial Sequence
  Description of Artificial Sequence: Synthetic oligonucleotide
  Sense strand starting at position 3310 of SEQ ID NO: 1885369
acuuuccaugaaugaguaa

SEQ ID NO: 2336963 - RNA, 19 nt, Artificial Sequence
  Description of Artificial Sequence: Synthetic oligonucleotide
  Antisense strand to SEQ ID NO: 2336962
uuacucauucauggaaagu

SEQ ID NO: 2336964 - RNA, 19 nt, Artificial Sequence
  Description of Artificial Sequence: Synthetic oligonucleotide
  Sense strand starting at position 3465 of SEQ ID NO: 1885369
uggagauccuuacugguuu

SEQ ID NO: 2336965 - RNA, 19 nt, Artificial Sequence
  Description of Artificial Sequence: Synthetic oligonucleotide
  Antisense strand to SEQ ID NO: 2336964
aaaccaguaaggaucucca

SEQ ID NO: 2336966 - RNA, 19 nt, Artificial Sequence
  Description of Artificial Sequence: Synthetic oligonucleotide
  Sense strand starting at position 3478 of SEQ ID NO: 1885369
ugguuuccuauugggaacu

SEQ ID NO: 2336967 - RNA, 19 nt, Artificial Sequence
  Description of Artificial Sequence: Synthetic oligonucleotide
  Antisense strand to SEQ ID NO: 2336966
aguucccaauaggaaacca

SEQ ID NO: 2336968 - RNA, 19 nt, Artificial Sequence
  Description of Artificial Sequence: Synthetic oligonucleotide
  Sense strand starting at position 3526 of SEQ ID NO: 1885369
augugagagcucuaacugu

SEQ ID NO: 2336969 - RNA, 19 nt, Artificial Sequence
  Description of Artificial Sequence: Synthetic oligonucleotide
  Antisense strand to SEQ ID NO: 2336968
acaguuagagcucucacau

SEQ ID NO: 2336970 - RNA, 19 nt, Artificial Sequence
  Description of Artificial Sequence: Synthetic oligonucleotide
  Sense strand starting at position 3532 of SEQ ID NO: 1885369
gagcucuaacuguaaagua

SEQ ID NO: 2336971 - RNA, 19 nt, Artificial Sequence
  Description of Artificial Sequence: Synthetic oligonucleotide
  Antisense strand to SEQ ID NO: 2336970
uacuuuacaguuagagcuc

SEQ ID NO: 2336972 - RNA, 19 nt, Artificial Sequence
  Description of Artificial Sequence: Synthetic oligonucleotide
  Sense strand starting at position 3786 of SEQ ID NO: 1885369
ucaugaugguccuuagauu

SEQ ID NO: 2336973 - RNA, 19 nt, Artificial Sequence
  Description of Artificial Sequence: Synthetic oligonucleotide
  Antisense strand to SEQ ID NO: 2336972
aaucuaaggaccaucauga

SEQ ID NO: 2336974 - RNA, 19 nt, Artificial Sequence
  Description of Artificial Sequence: Synthetic oligonucleotide
  Sense strand starting at position 3876 of SEQ ID NO: 1885369
ucugaugguauguauguaa

SEQ ID NO: 2336975 - RNA, 19 nt, Artificial Sequence
  Description of Artificial Sequence: Synthetic oligonucleotide
  Antisense strand to SEQ ID NO: 2336974
uuacauacauaccaucaga

SEQ ID NO: 2336976 - RNA, 19 nt, Artificial Sequence
  Description of Artificial Sequence: Synthetic oligonucleotide
  Sense strand starting at position 3879 of SEQ ID NO: 1885369
gaugguauguauguaaaca

SEQ ID NO: 2336977 - RNA, 19 nt, Artificial Sequence
  Description of Artificial Sequence: Synthetic oligonucleotide
  Antisense strand to SEQ ID NO: 2336976
uguuuacauacauaccauc

SEQ ID NO: 2336978 - RNA, 19 nt, Artificial Sequence
  Description of Artificial Sequence: Synthetic oligonucleotide
  Sense strand starting at position 3880 of SEQ ID NO: 1885369
augguauguauguaaacag

SEQ ID NO: 2336979 - RNA, 19 nt, Artificial Sequence
  Description of Artificial Sequence: Synthetic oligonucleotide
  Antisense strand to SEQ ID NO: 2336978
cuguuuacauacauaccau

SEQ ID NO: 2336980 - RNA, 19 nt, Artificial Sequence
  Description of Artificial Sequence: Synthetic oligonucleotide
  Sense strand starting at position 3901 of SEQ ID NO: 1885369
gaaggaaacuuguuuacau

SEQ ID NO: 2336981 - RNA, 19 nt, Artificial Sequence
  Description of Artificial Sequence: Synthetic oligonucleotide
  Antisense strand to SEQ ID NO: 2336980
auguaaacaaguuuccuuc

SEQ ID NO: 2336982 - RNA, 19 nt, Artificial Sequence
  Description of Artificial Sequence: Synthetic oligonucleotide
  Sense strand starting at position 287 of SEQ ID NO: 1885370
cggccaguccuuuauauuu

SEQ ID NO: 2336983 - RNA, 19 nt, Artificial Sequence
  Description of Artificial Sequence: Synthetic oligonucleotide
  Antisense strand to SEQ ID NO: 2336982
aaauauaaaggacuggccg

SEQ ID NO: 2336984 - RNA, 19 nt, Artificial Sequence
  Description of Artificial Sequence: Synthetic oligonucleotide
  Sense strand starting at position 390 of SEQ ID NO: 1885370
ggaauaauuuaugaauggu

SEQ ID NO: 2336985 - RNA, 19 nt, Artificial Sequence
  Description of Artificial Sequence: Synthetic oligonucleotide
  Antisense strand to SEQ ID NO: 2336984
accauucauaaauuauucc

SEQ ID NO: 2336986 - RNA, 19 nt, Artificial Sequence
  Description of Artificial Sequence: Synthetic oligonucleotide
  Sense strand starting at position 406 of SEQ ID NO: 1885370
gguaauaaacugcauccau

SEQ ID NO: 2336987 - RNA, 19 nt, Artificial Sequence
  Description of Artificial Sequence: Synthetic oligonucleotide
  Antisense strand to SEQ ID NO: 2336986
auggaugcaguuuauuacc

SEQ ID NO: 2336988 - RNA, 19 nt, Artificial Sequence
  Description of Artificial Sequence: Synthetic oligonucleotide
  Sense strand starting at position 761 of SEQ ID NO: 1885370
cuuagaguauccucacuuu

SEQ ID NO: 2336989 - RNA, 19 nt, Artificial Sequence
  Description of Artificial Sequence: Synthetic oligonucleotide
  Antisense strand to SEQ ID NO: 2336988
aaagugaggauacucuaag

SEQ ID NO: 2336990 - RNA, 19 nt, Artificial Sequence
  Description of Artificial Sequence: Synthetic oligonucleotide
  Sense strand starting at position 833 of SEQ ID NO: 1885370
ucugaaaugcuuugacuau

SEQ ID NO: 2336991 - RNA, 19 nt, Artificial Sequence
  Description of Artificial Sequence: Synthetic oligonucleotide
  Antisense strand to SEQ ID NO: 2336990
auagucaaagcauuucaga

SEQ ID NO: 2336992 - RNA, 19 nt, Artificial Sequence
  Description of Artificial Sequence: Synthetic oligonucleotide
  Sense strand starting at position 837 of SEQ ID NO: 1885370
aaaugcuuugacuauggua

SEQ ID NO: 2336993 - RNA, 19 nt, Artificial Sequence
  Description of Artificial Sequence: Synthetic oligonucleotide
  Antisense strand to SEQ ID NO: 2336992
uaccauagucaaagcauuu

SEQ ID NO: 2336994 - RNA, 19 nt, Artificial Sequence
  Description of Artificial Sequence: Synthetic oligonucleotide
  Sense strand starting at position 1068 of SEQ ID NO: 1885370
uuggaauucuuaccauagu

SEQ ID NO: 2336995 - RNA, 19 nt, Artificial Sequence
  Description of Artificial Sequence: Synthetic oligonucleotide
  Antisense strand to SEQ ID NO: 2336994
acuaugguaagaauuccaa

SEQ ID NO: 2336996 - RNA, 19 nt, Artificial Sequence
  Description of Artificial Sequence: Synthetic oligonucleotide
  Sense strand starting at position 1176 of SEQ ID NO: 1885370
auaaaugguguugauugua

SEQ ID NO: 2336997 - RNA, 19 nt, Artificial Sequence
  Description of Artificial Sequence: Synthetic oligonucleotide
  Antisense strand to SEQ ID NO: 2336996
uacaaucaacaccauuuau

SEQ ID NO: 2336998 - RNA, 19 nt, Artificial Sequence
  Description of Artificial Sequence: Synthetic oligonucleotide
  Sense strand starting at position 1362 of SEQ ID NO: 1885370
auggaacuuuagcauuuaa

SEQ ID NO: 2336999 - RNA, 19 nt, Artificial Sequence
  Description of Artificial Sequence: Synthetic oligonucleotide
  Antisense strand to SEQ ID NO: 2336998
uuaaaugcuaaaguuccau

SEQ ID NO: 2337000 - RNA, 19 nt, Artificial Sequence
  Description of Artificial Sequence: Synthetic oligonucleotide
  Sense strand starting at position 1384 of SEQ ID NO: 1885370
guaugagcauuugaagaac

SEQ ID NO: 2337001 - RNA, 19 nt, Artificial Sequence
  Description of Artificial Sequence: Synthetic oligonucleotide
  Antisense strand to SEQ ID NO: 2337000
guucuucaaaugcucauac

SEQ ID NO: 2337002 - RNA, 19 nt, Artificial Sequence
  Description of Artificial Sequence: Synthetic oligonucleotide
  Sense strand starting at position 1533 of SEQ ID NO: 1885370
gcagaaugauccuuuguga

SEQ ID NO: 2337003 - RNA, 19 nt, Artificial Sequence
  Description of Artificial Sequence: Synthetic oligonucleotide
  Antisense strand to SEQ ID NO: 2337002
ucacaaaggaucauucugc

SEQ ID NO: 2337004 - RNA, 19 nt, Artificial Sequence
  Description of Artificial Sequence: Synthetic oligonucleotide
  Sense strand starting at position 1536 of SEQ ID NO: 1885370
gaaugauccuuugugacca

SEQ ID NO: 2337005 - RNA, 19 nt, Artificial Sequence
  Description of Artificial Sequence: Synthetic oligonucleotide
  Antisense strand to SEQ ID NO: 2337004
uggucacaaaggaucauuc

SEQ ID NO: 2337006 - RNA, 19 nt, Artificial Sequence
  Description of Artificial Sequence: Synthetic oligonucleotide
  Sense strand starting at position 1821 of SEQ ID NO: 1885370
ucuauuuccugggaacaua

SEQ ID NO: 2337007 - RNA, 19 nt, Artificial Sequence
  Description of Artificial Sequence: Synthetic oligonucleotide
  Antisense strand to SEQ ID NO: 2337006
uauguucccaggaaauaga

SEQ ID NO: 2337008 - RNA, 19 nt, Artificial Sequence
  Description of Artificial Sequence: Synthetic oligonucleotide
  Sense strand starting at position 1939 of SEQ ID NO: 1885370
ugaguuuguagaggauuag

SEQ ID NO: 2337009 - RNA, 19 nt, Artificial Sequence
  Description of Artificial Sequence: Synthetic oligonucleotide
  Antisense strand to SEQ ID NO: 2337008
cuaauccucuacaaacuca

SEQ ID NO: 2337010 - RNA, 19 nt, Artificial Sequence
  Description of Artificial Sequence: Synthetic oligonucleotide
  Sense strand starting at position 1978 of SEQ ID NO: 1885370
ggaggugucuaggucuaag

SEQ ID NO: 2337011 - RNA, 19 nt, Artificial Sequence
  Description of Artificial Sequence: Synthetic oligonucleotide
  Antisense strand to SEQ ID NO: 2337010
cuuagaccuagacaccucc

SEQ ID NO: 2337012 - RNA, 19 nt, Artificial Sequence
  Description of Artificial Sequence: Synthetic oligonucleotide
  Sense strand starting at position 2167 of SEQ ID NO: 1885370
gcaucuuucuggcucauuu

SEQ ID NO: 2337013 - RNA, 19 nt, Artificial Sequence
  Description of Artificial Sequence: Synthetic oligonucleotide
  Antisense strand to SEQ ID NO: 2337012
aaaugagccagaaagaugc

SEQ ID NO: 2337014 - RNA, 19 nt, Artificial Sequence
  Description of Artificial Sequence: Synthetic oligonucleotide
  Sense strand starting at position 2295 of SEQ ID NO: 1885370
gagagaaucucauugucuu

SEQ ID NO: 2337015 - RNA, 19 nt, Artificial Sequence
  Description of Artificial Sequence: Synthetic oligonucleotide
  Antisense strand to SEQ ID NO: 2337014
aagacaaugagauucucuc

SEQ ID NO: 2337016 - RNA, 19 nt, Artificial Sequence
  Description of Artificial Sequence: Synthetic oligonucleotide
  Sense strand starting at position 2720 of SEQ ID NO: 1885370
ucaguaucuggauaccuuu

SEQ ID NO: 2337017 - RNA, 19 nt, Artificial Sequence
  Description of Artificial Sequence: Synthetic oligonucleotide
  Antisense strand to SEQ ID NO: 2337016
aaagguauccagauacuga

SEQ ID NO: 2337018 - RNA, 19 nt, Artificial Sequence
  Description of Artificial Sequence: Synthetic oligonucleotide
  Sense strand starting at position 2758 of SEQ ID NO: 1885370
gcauuauguguauauuaag

SEQ ID NO: 2337019 - RNA, 19 nt, Artificial Sequence
  Description of Artificial Sequence: Synthetic oligonucleotide
  Antisense strand to SEQ ID NO: 2337018
cuuaauauacacauaaugc

SEQ ID NO: 2337020 - RNA, 19 nt, Artificial Sequence
  Description of Artificial Sequence: Synthetic oligonucleotide
  Sense strand starting at position 2796 of SEQ ID NO: 1885370
guggaugagccuugaaaca

SEQ ID NO: 2337021 - RNA, 19 nt, Artificial Sequence
  Description of Artificial Sequence: Synthetic oligonucleotide
  Antisense strand to SEQ ID NO: 2337020
uguuucaaggcucauccac

SEQ ID NO: 2337022 - RNA, 19 nt, Artificial Sequence
  Description of Artificial Sequence: Synthetic oligonucleotide
  Sense strand starting at position 2841 of SEQ ID NO: 1885370
uugaguuccauagagugau

SEQ ID NO: 2337023 - RNA, 19 nt, Artificial Sequence
  Description of Artificial Sequence: Synthetic oligonucleotide
  Antisense strand to SEQ ID NO: 2337022
aucacucuauggaacucaa

SEQ ID NO: 2337024 - RNA, 19 nt, Artificial Sequence
  Description of Artificial Sequence: Synthetic oligonucleotide
  Sense strand starting at position 2847 of SEQ ID NO: 1885370
uccauagagugaucucauu

SEQ ID NO: 2337025 - RNA, 19 nt, Artificial Sequence
  Description of Artificial Sequence: Synthetic oligonucleotide
  Antisense strand to SEQ ID NO: 2337024
aaugagaucacucuaugga

SEQ ID NO: 2337026 - RNA, 19 nt, Artificial Sequence
  Description of Artificial Sequence: Synthetic oligonucleotide
  Sense strand starting at position 3171 of SEQ ID NO: 1885370
gcauaaagacaguaguuua

SEQ ID NO: 2337027 - RNA, 19 nt, Artificial Sequence
  Description of Artificial Sequence: Synthetic oligonucleotide
  Antisense strand to SEQ ID NO: 2337026
uaaacuacugucuuuaugc

SEQ ID NO: 2337028 - RNA, 19 nt, Artificial Sequence
  Description of Artificial Sequence: Synthetic oligonucleotide
  Sense strand starting at position 3182 of SEQ ID NO: 1885370
guaguuuaggagcaauaaa

SEQ ID NO: 2337029 - RNA, 19 nt, Artificial Sequence
  Description of Artificial Sequence: Synthetic oligonucleotide
  Antisense strand to SEQ ID NO: 2337028
uuuauugcuccuaaacuac

SEQ ID NO: 2337030 - RNA, 19 nt, Artificial Sequence
  Description of Artificial Sequence: Synthetic oligonucleotide
  Sense strand starting at position 3197 of SEQ ID NO: 1885370
uaaacuugacauugagguu

SEQ ID NO: 2337031 - RNA, 19 nt, Artificial Sequence
  Description of Artificial Sequence: Synthetic oligonucleotide
  Antisense strand to SEQ ID NO: 2337030
aaccucaaugucaaguuua

SEQ ID NO: 2337032 - RNA, 19 nt, Artificial Sequence
  Description of Artificial Sequence: Synthetic oligonucleotide
  Sense strand starting at position 3214 of SEQ ID NO: 1885370
uugagagauuauuccuucu

SEQ ID NO: 2337033 - RNA, 19 nt, Artificial Sequence
  Description of Artificial Sequence: Synthetic oligonucleotide
  Antisense strand to SEQ ID NO: 2337032
agaaggaauaaucucucaa

SEQ ID NO: 2337034 - RNA, 19 nt, Artificial Sequence
  Description of Artificial Sequence: Synthetic oligonucleotide
  Sense strand starting at position 3217 of SEQ ID NO: 1885370
agagauuauuccuucuuug

SEQ ID NO: 2337035 - RNA, 19 nt, Artificial Sequence
  Description of Artificial Sequence: Synthetic oligonucleotide
  Antisense strand to SEQ ID NO: 2337034
caaagaaggaauaaucucu

SEQ ID NO: 2337036 - RNA, 19 nt, Artificial Sequence
  Description of Artificial Sequence: Synthetic oligonucleotide
  Sense strand starting at position 3373 of SEQ ID NO: 1885370
auauauccucucugguaua

SEQ ID NO: 2337037 - RNA, 19 nt, Artificial Sequence
  Description of Artificial Sequence: Synthetic oligonucleotide
  Antisense strand to SEQ ID NO: 2337036
uauaccagagaggauauau

SEQ ID NO: 2337038 - RNA, 19 nt, Artificial Sequence
  Description of Artificial Sequence: Synthetic oligonucleotide
  Sense strand starting at position 3415 of SEQ ID NO: 1885370
cuccuuguaguuuauacaa

SEQ ID NO: 2337039 - RNA, 19 nt, Artificial Sequence
  Description of Artificial Sequence: Synthetic oligonucleotide
  Antisense strand to SEQ ID NO: 2337038
uuguauaaacuacaaggag

SEQ ID NO: 2337040 - RNA, 19 nt, Artificial Sequence
  Description of Artificial Sequence: Synthetic oligonucleotide
  Sense strand starting at position 3435 of SEQ ID NO: 1885370
agguauacuauugguugau

SEQ ID NO: 2337041 - RNA, 19 nt, Artificial Sequence
  Description of Artificial Sequence: Synthetic oligonucleotide
  Antisense strand to SEQ ID NO: 2337040
aucaaccaauaguauaccu

SEQ ID NO: 2337042 - RNA, 19 nt, Artificial Sequence
  Description of Artificial Sequence: Synthetic oligonucleotide
  Sense strand starting at position 3436 of SEQ ID NO: 1885370
gguauacuauugguugauu

SEQ ID NO: 2337043 - RNA, 19 nt, Artificial Sequence
  Description of Artificial Sequence: Synthetic oligonucleotide
  Antisense strand to SEQ ID NO: 2337042
aaucaaccaauaguauacc

SEQ ID NO: 2337044 - RNA, 19 nt, Artificial Sequence
  Description of Artificial Sequence: Synthetic oligonucleotide
  Sense strand starting at position 3438 of SEQ ID NO: 1885370
uauacuauugguugauuga

SEQ ID NO: 2337045 - RNA, 19 nt, Artificial Sequence
  Description of Artificial Sequence: Synthetic oligonucleotide
  Antisense strand to SEQ ID NO: 2337044
ucaaucaaccaauaguaua

SEQ ID NO: 2337046 - RNA, 19 nt, Artificial Sequence
  Description of Artificial Sequence: Synthetic oligonucleotide
  Sense strand starting at position 3475 of SEQ ID NO: 1885370
gaauaaaggugaguacagu

SEQ ID NO: 2337047 - RNA, 19 nt, Artificial Sequence
  Description of Artificial Sequence: Synthetic oligonucleotide
  Antisense strand to SEQ ID NO: 2337046
acuguacucaccuuuauuc

SEQ ID NO: 2337048 - RNA, 19 nt, Artificial Sequence
  Description of Artificial Sequence: Synthetic oligonucleotide
  Sense strand starting at position 3502 of SEQ ID NO: 1885370
guguaaugugugguguuca

SEQ ID NO: 2337049 - RNA, 19 nt, Artificial Sequence
  Description of Artificial Sequence: Synthetic oligonucleotide
  Antisense strand to SEQ ID NO: 2337048
ugaacaccacacauuacac

SEQ ID NO: 2337050 - RNA, 19 nt, Artificial Sequence
  Description of Artificial Sequence: Synthetic oligonucleotide
  Sense strand starting at position 3571 of SEQ ID NO: 1885370
ucauguguggaguaguaua

SEQ ID NO: 2337051 - RNA, 19 nt, Artificial Sequence
  Description of Artificial Sequence: Synthetic oligonucleotide
  Antisense strand to SEQ ID NO: 2337050
uauacuacuccacacauga

SEQ ID NO: 2337052 - RNA, 19 nt, Artificial Sequence
  Description of Artificial Sequence: Synthetic oligonucleotide
  Sense strand starting at position 3636 of SEQ ID NO: 1885370
ucaguaguuggguacauca

SEQ ID NO: 2337053 - RNA, 19 nt, Artificial Sequence
  Description of Artificial Sequence: Synthetic oligonucleotide
  Antisense strand to SEQ ID NO: 2337052
ugauguacccaacuacuga

SEQ ID NO: 2337054 - RNA, 19 nt, Artificial Sequence
  Description of Artificial Sequence: Synthetic oligonucleotide
  Sense strand starting at position 3732 of SEQ ID NO: 1885370
gucaguauacuauaguaua

SEQ ID NO: 2337055 - RNA, 19 nt, Artificial Sequence
  Description of Artificial Sequence: Synthetic oligonucleotide
  Antisense strand to SEQ ID NO: 2337054
uauacuauaguauacugac

SEQ ID NO: 2337056 - RNA, 19 nt, Artificial Sequence
  Description of Artificial Sequence: Synthetic oligonucleotide
  Sense strand starting at position 3905 of SEQ ID NO: 1885370
gaccauauguggccuacaa

SEQ ID NO: 2337057 - RNA, 19 nt, Artificial Sequence
  Description of Artificial Sequence: Synthetic oligonucleotide
  Antisense strand to SEQ ID NO: 2337056
uuguaggccacauaugguc

SEQ ID NO: 2337058 - RNA, 19 nt, Artificial Sequence
  Description of Artificial Sequence: Synthetic oligonucleotide
  Sense strand starting at position 3907 of SEQ ID NO: 1885370
ccauauguggccuacaaag

SEQ ID NO: 2337059 - RNA, 19 nt, Artificial Sequence
  Description of Artificial Sequence: Synthetic oligonucleotide
  Antisense strand to SEQ ID NO: 2337058
cuuuguaggccacauaugg

SEQ ID NO: 2337060 - RNA, 19 nt, Artificial Sequence
  Description of Artificial Sequence: Synthetic oligonucleotide
  Sense strand starting at position 3965 of SEQ ID NO: 1885370
ugugacuucugauccaacu

SEQ ID NO: 2337061 - RNA, 19 nt, Artificial Sequence
  Description of Artificial Sequence: Synthetic oligonucleotide
  Antisense strand to SEQ ID NO: 2337060
aguuggaucagaagucaca

SEQ ID NO: 2337062 - RNA, 19 nt, Artificial Sequence
  Description of Artificial Sequence: Synthetic oligonucleotide
  Sense strand starting at position 107 of SEQ ID NO: 1885371
agcaaagauuugggagcaa

SEQ ID NO: 2337063 - RNA, 19 nt, Artificial Sequence
  Description of Artificial Sequence: Synthetic oligonucleotide
  Antisense strand to SEQ ID NO: 2337062
uugcucccaaaucuuugcu

SEQ ID NO: 2337064 - RNA, 19 nt, Artificial Sequence
  Description of Artificial Sequence: Synthetic oligonucleotide
  Sense strand starting at position 309 of SEQ ID NO: 1885371
acuugugggagcugaaagu

SEQ ID NO: 2337065 - RNA, 19 nt, Artificial Sequence
  Description of Artificial Sequence: Synthetic oligonucleotide
  Antisense strand to SEQ ID NO: 2337064
acuuucagcucccacaagu

SEQ ID NO: 2337066 - RNA, 19 nt, Artificial Sequence
  Description of Artificial Sequence: Synthetic oligonucleotide
  Sense strand starting at position 354 of SEQ ID NO: 1885371
agacuagaauauugguuau

SEQ ID NO: 2337067 - RNA, 19 nt, Artificial Sequence
  Description of Artificial Sequence: Synthetic oligonucleotide
  Antisense strand to SEQ ID NO: 2337066
auaaccaauauucuagucu

SEQ ID NO: 2337068 - RNA, 19 nt, Artificial Sequence
  Description of Artificial Sequence: Synthetic oligonucleotide
  Sense strand starting at position 356 of SEQ ID NO: 1885371
acuagaauauugguuauca

SEQ ID NO: 2337069 - RNA, 19 nt, Artificial Sequence
  Description of Artificial Sequence: Synthetic oligonucleotide
  Antisense strand to SEQ ID NO: 2337068
ugauaaccaauauucuagu

SEQ ID NO: 2337070 - RNA, 19 nt, Artificial Sequence
  Description of Artificial Sequence: Synthetic oligonucleotide
  Sense strand starting at position 357 of SEQ ID NO: 1885371
cuagaauauugguuaucag

SEQ ID NO: 2337071 - RNA, 19 nt, Artificial Sequence
  Description of Artificial Sequence: Synthetic oligonucleotide
  Antisense strand to SEQ ID NO: 2337070
cugauaaccaauauucuag

SEQ ID NO: 2337072 - RNA, 19 nt, Artificial Sequence
  Description of Artificial Sequence: Synthetic oligonucleotide
  Sense strand starting at position 535 of SEQ ID NO: 1885371
guauaacuggaauguuuga

SEQ ID NO: 2337073 - RNA, 19 nt, Artificial Sequence
  Description of Artificial Sequence: Synthetic oligonucleotide
  Antisense strand to SEQ ID NO: 2337072
ucaaacauuccaguuauac

SEQ ID NO: 2337074 - RNA, 19 nt, Artificial Sequence
  Description of Artificial Sequence: Synthetic oligonucleotide
  Sense strand starting at position 540 of SEQ ID NO: 1885371
acuggaauguuugaaacac

SEQ ID NO: 2337075 - RNA, 19 nt, Artificial Sequence
  Description of Artificial Sequence: Synthetic oligonucleotide
  Antisense strand to SEQ ID NO: 2337074
guguuucaaacauuccagu

SEQ ID NO: 2337076 - RNA, 19 nt, Artificial Sequence
  Description of Artificial Sequence: Synthetic oligonucleotide
  Sense strand starting at position 566 of SEQ ID NO: 1885371
ugacaaaugcuugagguca

SEQ ID NO: 2337077 - RNA, 19 nt, Artificial Sequence
  Description of Artificial Sequence: Synthetic oligonucleotide
  Antisense strand to SEQ ID NO: 2337076
ugaccucaagcauuuguca

SEQ ID NO: 2337078 - RNA, 19 nt, Artificial Sequence
  Description of Artificial Sequence: Synthetic oligonucleotide
  Sense strand starting at position 752 of SEQ ID NO: 1885371
guguauuuauagugagagc

SEQ ID NO: 2337079 - RNA, 19 nt, Artificial Sequence
  Description of Artificial Sequence: Synthetic oligonucleotide
  Antisense strand to SEQ ID NO: 2337078
gcucucacuauaaauacac

SEQ ID NO: 2337080 - RNA, 19 nt, Artificial Sequence
  Description of Artificial Sequence: Synthetic oligonucleotide
  Sense strand starting at position 755 of SEQ ID NO: 1885371
uauuuauagugagagcuug

SEQ ID NO: 2337081 - RNA, 19 nt, Artificial Sequence
  Description of Artificial Sequence: Synthetic oligonucleotide
  Antisense strand to SEQ ID NO: 2337080
caagcucucacuauaaaua

SEQ ID NO: 2337082 - RNA, 19 nt, Artificial Sequence
  Description of Artificial Sequence: Synthetic oligonucleotide
  Sense strand starting at position 989 of SEQ ID NO: 1885371
gugugaugggcucagaauu

SEQ ID NO: 2337083 - RNA, 19 nt, Artificial Sequence
  Description of Artificial Sequence: Synthetic oligonucleotide
  Antisense strand to SEQ ID NO: 2337082
aauucugagcccaucacac

SEQ ID NO: 2337084 - RNA, 19 nt, Artificial Sequence
  Description of Artificial Sequence: Synthetic oligonucleotide
  Sense strand starting at position 1354 of SEQ ID NO: 1885371
cgcucauugugaccuaaua

SEQ ID NO: 2337085 - RNA, 19 nt, Artificial Sequence
  Description of Artificial Sequence: Synthetic oligonucleotide
  Antisense strand to SEQ ID NO: 2337084
uauuaggucacaaugagcg

SEQ ID NO: 2337086 - RNA, 19 nt, Artificial Sequence
  Description of Artificial Sequence: Synthetic oligonucleotide
  Sense strand starting at position 1698 of SEQ ID NO: 1885371
gcaaaucaugcugaugaaa

SEQ ID NO: 2337087 - RNA, 19 nt, Artificial Sequence
  Description of Artificial Sequence: Synthetic oligonucleotide
  Antisense strand to SEQ ID NO: 2337086
uuucaucagcaugauuugc

SEQ ID NO: 2337088 - RNA, 19 nt, Artificial Sequence
  Description of Artificial Sequence: Synthetic oligonucleotide
  Sense strand starting at position 1718 of SEQ ID NO: 1885371
gccugaagaucuguaaauc

SEQ ID NO: 2337089 - RNA, 19 nt, Artificial Sequence
  Description of Artificial Sequence: Synthetic oligonucleotide
  Antisense strand to SEQ ID NO: 2337088
gauuuacagaucuucaggc

SEQ ID NO: 2337090 - RNA, 19 nt, Artificial Sequence
  Description of Artificial Sequence: Synthetic oligonucleotide
  Sense strand starting at position 1823 of SEQ ID NO: 1885371
cuggcuggucaugagaaca

SEQ ID NO: 2337091 - RNA, 19 nt, Artificial Sequence
  Description of Artificial Sequence: Synthetic oligonucleotide
  Antisense strand to SEQ ID NO: 2337090
uguucucaugaccagccag

SEQ ID NO: 2337092 - RNA, 19 nt, Artificial Sequence
  Description of Artificial Sequence: Synthetic oligonucleotide
  Sense strand starting at position 2009 of SEQ ID NO: 1885371
cuucuaugagcccaugagu

SEQ ID NO: 2337093 - RNA, 19 nt, Artificial Sequence
  Description of Artificial Sequence: Synthetic oligonucleotide
  Antisense strand to SEQ ID NO: 2337092
acucaugggcucauagaag

SEQ ID NO: 2337094 - RNA, 19 nt, Artificial Sequence
  Description of Artificial Sequence: Synthetic oligonucleotide
  Sense strand starting at position 2012 of SEQ ID NO: 1885371
cuaugagcccaugaguaaa

SEQ ID NO: 2337095 - RNA, 19 nt, Artificial Sequence
  Description of Artificial Sequence: Synthetic oligonucleotide
  Antisense strand to SEQ ID NO: 2337094
uuuacucaugggcucauag

SEQ ID NO: 2337096 - RNA, 19 nt, Artificial Sequence
  Description of Artificial Sequence: Synthetic oligonucleotide
  Sense strand starting at position 2023 of SEQ ID NO: 1885371
ugaguaaaguccucaugca

SEQ ID NO: 2337097 - RNA, 19 nt, Artificial Sequence
  Description of Artificial Sequence: Synthetic oligonucleotide
  Antisense strand to SEQ ID NO: 2337096
ugcaugaggacuuuacuca

SEQ ID NO: 2337098 - RNA, 19 nt, Artificial Sequence
  Description of Artificial Sequence: Synthetic oligonucleotide
  Sense strand starting at position 2024 of SEQ ID NO: 1885371
gaguaaaguccucaugcag

SEQ ID NO: 2337099 - RNA, 19 nt, Artificial Sequence
  Description of Artificial Sequence: Synthetic oligonucleotide
  Antisense strand to SEQ ID NO: 2337098
cugcaugaggacuuuacuc

SEQ ID NO: 2337100 - RNA, 19 nt, Artificial Sequence
  Description of Artificial Sequence: Synthetic oligonucleotide
  Sense strand starting at position 2056 of SEQ ID NO: 1885371
agcaguugagcucagugua

SEQ ID NO: 2337101 - RNA, 19 nt, Artificial Sequence
  Description of Artificial Sequence: Synthetic oligonucleotide
  Antisense strand to SEQ ID NO: 2337100
uacacugagcucaacugcu

SEQ ID NO: 2337102 - RNA, 19 nt, Artificial Sequence
  Description of Artificial Sequence: Synthetic oligonucleotide
  Sense strand starting at position 2059 of SEQ ID NO: 1885371
aguugagcucaguguauua

SEQ ID NO: 2337103 - RNA, 19 nt, Artificial Sequence
  Description of Artificial Sequence: Synthetic oligonucleotide
  Antisense strand to SEQ ID NO: 2337102
uaauacacugagcucaacu

SEQ ID NO: 2337104 - RNA, 19 nt, Artificial Sequence
  Description of Artificial Sequence: Synthetic oligonucleotide
  Sense strand starting at position 2061 of SEQ ID NO: 1885371
uugagcucaguguauuaga

SEQ ID NO: 2337105 - RNA, 19 nt, Artificial Sequence
  Description of Artificial Sequence: Synthetic oligonucleotide
  Antisense strand to SEQ ID NO: 2337104
ucuaauacacugagcucaa

SEQ ID NO: 2337106 - RNA, 19 nt, Artificial Sequence
  Description of Artificial Sequence: Synthetic oligonucleotide
  Sense strand starting at position 2066 of SEQ ID NO: 1885371
cucaguguauuagaaauga

SEQ ID NO: 2337107 - RNA, 19 nt, Artificial Sequence
  Description of Artificial Sequence: Synthetic oligonucleotide
  Antisense strand to SEQ ID NO: 2337106
ucauuucuaauacacugag

SEQ ID NO: 2337108 - RNA, 19 nt, Artificial Sequence
  Description of Artificial Sequence: Synthetic oligonucleotide
  Sense strand starting at position 2070 of SEQ ID NO: 1885371
guguauuagaaaugagagc

SEQ ID NO: 2337109 - RNA, 19 nt, Artificial Sequence
  Description of Artificial Sequence: Synthetic oligonucleotide
  Antisense strand to SEQ ID NO: 2337108
gcucucauuucuaauacac

SEQ ID NO: 2337110 - RNA, 19 nt, Artificial Sequence
  Description of Artificial Sequence: Synthetic oligonucleotide
  Sense strand starting at position 2101 of SEQ ID NO: 1885371
auaguaagaccuuggcucu

SEQ ID NO: 2337111 - RNA, 19 nt, Artificial Sequence
  Description of Artificial Sequence: Synthetic oligonucleotide
  Antisense strand to SEQ ID NO: 2337110
agagccaaggucuuacuau

SEQ ID NO: 2337112 - RNA, 19 nt, Artificial Sequence
  Description of Artificial Sequence: Synthetic oligonucleotide
  Sense strand starting at position 2102 of SEQ ID NO: 1885371
uaguaagaccuuggcucua

SEQ ID NO: 2337113 - RNA, 19 nt, Artificial Sequence
  Description of Artificial Sequence: Synthetic oligonucleotide
  Antisense strand to SEQ ID NO: 2337112
uagagccaaggucuuacua

SEQ ID NO: 2337114 - RNA, 19 nt, Artificial Sequence
  Description of Artificial Sequence: Synthetic oligonucleotide
  Sense strand starting at position 2150 of SEQ ID NO: 1885371
gguguaugccuguagcugu

SEQ ID NO: 2337115 - RNA, 19 nt, Artificial Sequence
  Description of Artificial Sequence: Synthetic oligonucleotide
  Antisense strand to SEQ ID NO: 2337114
acagcuacaggcauacacc

SEQ ID NO: 2337116 - RNA, 19 nt, Artificial Sequence
  Description of Artificial Sequence: Synthetic oligonucleotide
  Sense strand starting at position 2753 of SEQ ID NO: 1885371
ggcugauggugacugaaua

SEQ ID NO: 2337117 - RNA, 19 nt, Artificial Sequence
  Description of Artificial Sequence: Synthetic oligonucleotide
  Antisense strand to SEQ ID NO: 2337116
uauucagucaccaucagcc

SEQ ID NO: 2337118 - RNA, 19 nt, Artificial Sequence
  Description of Artificial Sequence: Synthetic oligonucleotide
  Sense strand starting at position 2754 of SEQ ID NO: 1885371
gcugauggugacugaauau

SEQ ID NO: 2337119 - RNA, 19 nt, Artificial Sequence
  Description of Artificial Sequence: Synthetic oligonucleotide
  Antisense strand to SEQ ID NO: 2337118
auauucagucaccaucagc

SEQ ID NO: 2337120 - RNA, 19 nt, Artificial Sequence
  Description of Artificial Sequence: Synthetic oligonucleotide
  Sense strand starting at position 2920 of SEQ ID NO: 1885371
ugagaauccuucccagcaa

SEQ ID NO: 2337121 - RNA, 19 nt, Artificial Sequence
  Description of Artificial Sequence: Synthetic oligonucleotide
  Antisense strand to SEQ ID NO: 2337120
uugcugggaaggauucuca

SEQ ID NO: 2337122 - RNA, 19 nt, Artificial Sequence
  Description of Artificial Sequence: Synthetic oligonucleotide
  Sense strand starting at position 3001 of SEQ ID NO: 1885371
gggugucuguccuccuuga

SEQ ID NO: 2337123 - RNA, 19 nt, Artificial Sequence
  Description of Artificial Sequence: Synthetic oligonucleotide
  Antisense strand to SEQ ID NO: 2337122
ucaaggaggacagacaccc

SEQ ID NO: 2337124 - RNA, 19 nt, Artificial Sequence
  Description of Artificial Sequence: Synthetic oligonucleotide
  Sense strand starting at position 3005 of SEQ ID NO: 1885371
gucuguccuccuugagaca

SEQ ID NO: 2337125 - RNA, 19 nt, Artificial Sequence
  Description of Artificial Sequence: Synthetic oligonucleotide
  Antisense strand to SEQ ID NO: 2337124
ugucucaaggaggacagac

SEQ ID NO: 2337126 - RNA, 19 nt, Artificial Sequence
  Description of Artificial Sequence: Synthetic oligonucleotide
  Sense strand starting at position 3006 of SEQ ID NO: 1885371
ucuguccuccuugagacau

SEQ ID NO: 2337127 - RNA, 19 nt, Artificial Sequence
  Description of Artificial Sequence: Synthetic oligonucleotide
  Antisense strand to SEQ ID NO: 2337126
augucucaaggaggacaga

SEQ ID NO: 2337128 - RNA, 19 nt, Artificial Sequence
  Description of Artificial Sequence: Synthetic oligonucleotide
  Sense strand starting at position 3154 of SEQ ID NO: 1885371
gcaccaaucucagaaaugu

SEQ ID NO: 2337129 - RNA, 19 nt, Artificial Sequence
  Description of Artificial Sequence: Synthetic oligonucleotide
  Antisense strand to SEQ ID NO: 2337128
acauuucugagauuggugc

SEQ ID NO: 2337130 - RNA, 19 nt, Artificial Sequence
  Description of Artificial Sequence: Synthetic oligonucleotide
  Sense strand starting at position 3220 of SEQ ID NO: 1885371
ccuucuuguguuggacuau

SEQ ID NO: 2337131 - RNA, 19 nt, Artificial Sequence
  Description of Artificial Sequence: Synthetic oligonucleotide
  Antisense strand to SEQ ID NO: 2337130
auaguccaacacaagaagg

SEQ ID NO: 2337132 - RNA, 19 nt, Artificial Sequence
  Description of Artificial Sequence: Synthetic oligonucleotide
  Sense strand starting at position 3809 of SEQ ID NO: 1885371
accuauagguuauaaauga

SEQ ID NO: 2337133 - RNA, 19 nt, Artificial Sequence
  Description of Artificial Sequence: Synthetic oligonucleotide
  Antisense strand to SEQ ID NO: 2337132
ucauuuauaaccuauaggu

SEQ ID NO: 2337134 - RNA, 19 nt, Artificial Sequence
  Description of Artificial Sequence: Synthetic oligonucleotide
  Sense strand starting at position 3864 of SEQ ID NO: 1885371
uaucauugagguuguauca

SEQ ID NO: 2337135 - RNA, 19 nt, Artificial Sequence
  Description of Artificial Sequence: Synthetic oligonucleotide
  Antisense strand to SEQ ID NO: 2337134
ugauacaaccucaaugaua

SEQ ID NO: 2337136 - RNA, 19 nt, Artificial Sequence
  Description of Artificial Sequence: Synthetic oligonucleotide
  Sense strand starting at position 3903 of SEQ ID NO: 1885371
guaggcuugcacuggugau

SEQ ID NO: 2337137 - RNA, 19 nt, Artificial Sequence
  Description of Artificial Sequence: Synthetic oligonucleotide
  Antisense strand to SEQ ID NO: 2337136
aucaccagugcaagccuac

SEQ ID NO: 2337138 - RNA, 19 nt, Artificial Sequence
  Description of Artificial Sequence: Synthetic oligonucleotide
  Sense strand starting at position 3907 of SEQ ID NO: 1885371
gcuugcacuggugaucuga

SEQ ID NO: 2337139 - RNA, 19 nt, Artificial Sequence
  Description of Artificial Sequence: Synthetic oligonucleotide
  Antisense strand to SEQ ID NO: 2337138
ucagaucaccagugcaagc

SEQ ID NO: 2337140 - RNA, 19 nt, Artificial Sequence
  Description of Artificial Sequence: Synthetic oligonucleotide
  Sense strand starting at position 3909 of SEQ ID NO: 1885371
uugcacuggugaucugaga

SEQ ID NO: 2337141 - RNA, 19 nt, Artificial Sequence
  Description of Artificial Sequence: Synthetic oligonucleotide
  Antisense strand to SEQ ID NO: 2337140
ucucagaucaccagugcaa

SEQ ID NO: 2337142 - RNA, 19 nt, Artificial Sequence
  Description of Artificial Sequence: Synthetic oligonucleotide
  Sense strand starting at position 4 of SEQ ID NO: 1885372
ugucaucguguccugguau

SEQ ID NO: 2337143 - RNA, 19 nt, Artificial Sequence
  Description of Artificial Sequence: Synthetic oligonucleotide
  Antisense strand to SEQ ID NO: 2337142
auaccaggacacgaugaca

SEQ ID NO: 2337144 - RNA, 19 nt, Artificial Sequence
  Description of Artificial Sequence: Synthetic oligonucleotide
  Sense strand starting at position 19 of SEQ ID NO: 1885372
guaucaggugacuguaaga

SEQ ID NO: 2337145 - RNA, 19 nt, Artificial Sequence
  Description of Artificial Sequence: Synthetic oligonucleotide
  Antisense strand to SEQ ID NO: 2337144
ucuuacagucaccugauac

SEQ ID NO: 2337146 - RNA, 19 nt, Artificial Sequence
  Description of Artificial Sequence: Synthetic oligonucleotide
  Sense strand starting at position 91 of SEQ ID NO: 1885372
ggcccuuggucuccagaau

SEQ ID NO: 2337147 - RNA, 19 nt, Artificial Sequence
  Description of Artificial Sequence: Synthetic oligonucleotide
  Antisense strand to SEQ ID NO: 2337146
auucuggagaccaagggcc

SEQ ID NO: 2337148 - RNA, 19 nt, Artificial Sequence
  Description of Artificial Sequence: Synthetic oligonucleotide
  Sense strand starting at position 92 of SEQ ID NO: 1885372
gcccuuggucuccagaaua

SEQ ID NO: 2337149 - RNA, 19 nt, Artificial Sequence
  Description of Artificial Sequence: Synthetic oligonucleotide
  Antisense strand to SEQ ID NO: 2337148
uauucuggagaccaagggc

SEQ ID NO: 2337150 - RNA, 19 nt, Artificial Sequence
  Description of Artificial Sequence: Synthetic oligonucleotide
  Sense strand starting at position 441 of SEQ ID NO: 1885372
gcggauucaccuuaggaga

SEQ ID NO: 2337151 - RNA, 19 nt, Artificial Sequence
  Description of Artificial Sequence: Synthetic oligonucleotide
  Antisense strand to SEQ ID NO: 2337150
ucuccuaaggugaauccgc

SEQ ID NO: 2337152 - RNA, 19 nt, Artificial Sequence
  Description of Artificial Sequence: Synthetic oligonucleotide
  Sense strand starting at position 482 of SEQ ID NO: 1885372
ggagaugauccuggguuug

SEQ ID NO: 2337153 - RNA, 19 nt, Artificial Sequence
  Description of Artificial Sequence: Synthetic oligonucleotide
  Antisense strand to SEQ ID NO: 2337152
caaacccaggaucaucucc

SEQ ID NO: 2337154 - RNA, 19 nt, Artificial Sequence
  Description of Artificial Sequence: Synthetic oligonucleotide
  Sense strand starting at position 534 of SEQ ID NO: 1885372
gcagaugcaucuuuggaau

SEQ ID NO: 2337155 - RNA, 19 nt, Artificial Sequence
  Description of Artificial Sequence: Synthetic oligonucleotide
  Antisense strand to SEQ ID NO: 2337154
auuccaaagaugcaucugc

SEQ ID NO: 2337156 - RNA, 19 nt, Artificial Sequence
  Description of Artificial Sequence: Synthetic oligonucleotide
  Sense strand starting at position 546 of SEQ ID NO: 1885372
uuggaauggugccuuuaga

SEQ ID NO: 2337157 - RNA, 19 nt, Artificial Sequence
  Description of Artificial Sequence: Synthetic oligonucleotide
  Antisense strand to SEQ ID NO: 2337156
ucuaaaggcaccauuccaa

SEQ ID NO: 2337158 - RNA, 19 nt, Artificial Sequence
  Description of Artificial Sequence: Synthetic oligonucleotide
  Sense strand starting at position 701 of SEQ ID NO: 1885372
gcuugcuauccuguauguu

SEQ ID NO: 2337159 - RNA, 19 nt, Artificial Sequence
  Description of Artificial Sequence: Synthetic oligonucleotide
  Antisense strand to SEQ ID NO: 2337158
aacauacaggauagcaagc

SEQ ID NO: 2337160 - RNA, 19 nt, Artificial Sequence
  Description of Artificial Sequence: Synthetic oligonucleotide
  Sense strand starting at position 1027 of SEQ ID NO: 1885372
cuaggugugguguugugua

SEQ ID NO: 2337161 - RNA, 19 nt, Artificial Sequence
  Description of Artificial Sequence: Synthetic oligonucleotide
  Antisense strand to SEQ ID NO: 2337160
uacacaacaccacaccuag

SEQ ID NO: 2337162 - RNA, 19 nt, Artificial Sequence
  Description of Artificial Sequence: Synthetic oligonucleotide
  Sense strand starting at position 1149 of SEQ ID NO: 1885372
gugacagugccagaucauc

SEQ ID NO: 2337163 - RNA, 19 nt, Artificial Sequence
  Description of Artificial Sequence: Synthetic oligonucleotide
  Antisense strand to SEQ ID NO: 2337162
gaugaucuggcacugucac

SEQ ID NO: 2337164 - RNA, 19 nt, Artificial Sequence
  Description of Artificial Sequence: Synthetic oligonucleotide
  Sense strand starting at position 1154 of SEQ ID NO: 1885372
agugccagaucaucucaaa

SEQ ID NO: 2337165 - RNA, 19 nt, Artificial Sequence
  Description of Artificial Sequence: Synthetic oligonucleotide
  Antisense strand to SEQ ID NO: 2337164
uuugagaugaucuggcacu

SEQ ID NO: 2337166 - RNA, 19 nt, Artificial Sequence
  Description of Artificial Sequence: Synthetic oligonucleotide
  Sense strand starting at position 1222 of SEQ ID NO: 1885372
uccauauuguaccuuaagu

SEQ ID NO: 2337167 - RNA, 19 nt, Artificial Sequence
  Description of Artificial Sequence: Synthetic oligonucleotide
  Antisense strand to SEQ ID NO: 2337166
acuuaagguacaauaugga

SEQ ID NO: 2337168 - RNA, 19 nt, Artificial Sequence
  Description of Artificial Sequence: Synthetic oligonucleotide
  Sense strand starting at position 1338 of SEQ ID NO: 1885372
gaaggcauuguccagguga

SEQ ID NO: 2337169 - RNA, 19 nt, Artificial Sequence
  Description of Artificial Sequence: Synthetic oligonucleotide
  Antisense strand to SEQ ID NO: 2337168
ucaccuggacaaugccuuc

SEQ ID NO: 2337170 - RNA, 19 nt, Artificial Sequence
  Description of Artificial Sequence: Synthetic oligonucleotide
  Sense strand starting at position 1416 of SEQ ID NO: 1885372
uugagaaacuguucuuaga

SEQ ID NO: 2337171 - RNA, 19 nt, Artificial Sequence
  Description of Artificial Sequence: Synthetic oligonucleotide
  Antisense strand to SEQ ID NO: 2337170
ucuaagaacaguuucucaa

SEQ ID NO: 2337172 - RNA, 19 nt, Artificial Sequence
  Description of Artificial Sequence: Synthetic oligonucleotide
  Sense strand starting at position 1432 of SEQ ID NO: 1885372
agagauuccucacagagag

SEQ ID NO: 2337173 - RNA, 19 nt, Artificial Sequence
  Description of Artificial Sequence: Synthetic oligonucleotide
  Antisense strand to SEQ ID NO: 2337172
cucucugugaggaaucucu

SEQ ID NO: 2337174 - RNA, 19 nt, Artificial Sequence
  Description of Artificial Sequence: Synthetic oligonucleotide
  Sense strand starting at position 1450 of SEQ ID NO: 1885372
guuaucaaauguccaaaga

SEQ ID NO: 2337175 - RNA, 19 nt, Artificial Sequence
  Description of Artificial Sequence: Synthetic oligonucleotide
  Antisense strand to SEQ ID NO: 2337174
ucuuuggacauuugauaac

SEQ ID NO: 2337176 - RNA, 19 nt, Artificial Sequence
  Description of Artificial Sequence: Synthetic oligonucleotide
  Sense strand starting at position 1498 of SEQ ID NO: 1885372
ugagcacugagccaaguau

SEQ ID NO: 2337177 - RNA, 19 nt, Artificial Sequence
  Description of Artificial Sequence: Synthetic oligonucleotide
  Antisense strand to SEQ ID NO: 2337176
auacuuggcucagugcuca

SEQ ID NO: 2337178 - RNA, 19 nt, Artificial Sequence
  Description of Artificial Sequence: Synthetic oligonucleotide
  Sense strand starting at position 1567 of SEQ ID NO: 1885372
gggugauagguagaauguc

SEQ ID NO: 2337179 - RNA, 19 nt, Artificial Sequence
  Description of Artificial Sequence: Synthetic oligonucleotide
  Antisense strand to SEQ ID NO: 2337178
gacauucuaccuaucaccc

SEQ ID NO: 2337180 - RNA, 19 nt, Artificial Sequence
  Description of Artificial Sequence: Synthetic oligonucleotide
  Sense strand starting at position 1573 of SEQ ID NO: 1885372
uagguagaaugucacauuu

SEQ ID NO: 2337181 - RNA, 19 nt, Artificial Sequence
  Description of Artificial Sequence: Synthetic oligonucleotide
  Antisense strand to SEQ ID NO: 2337180
aaaugugacauucuaccua

SEQ ID NO: 2337182 - RNA, 19 nt, Artificial Sequence
  Description of Artificial Sequence: Synthetic oligonucleotide
  Sense strand starting at position 1598 of SEQ ID NO: 1885372
ugaugcuuccaugagcaga

SEQ ID NO: 2337183 - RNA, 19 nt, Artificial Sequence
  Description of Artificial Sequence: Synthetic oligonucleotide
  Antisense strand to SEQ ID NO: 2337182
ucugcucauggaagcauca

SEQ ID NO: 2337184 - RNA, 19 nt, Artificial Sequence
  Description of Artificial Sequence: Synthetic oligonucleotide
  Sense strand starting at position 1993 of SEQ ID NO: 1885372
ucagucuucucugcgauuu

SEQ ID NO: 2337185 - RNA, 19 nt, Artificial Sequence
  Description of Artificial Sequence: Synthetic oligonucleotide
  Antisense strand to SEQ ID NO: 2337184
aaaucgcagagaagacuga

SEQ ID NO: 2337186 - RNA, 19 nt, Artificial Sequence
  Description of Artificial Sequence: Synthetic oligonucleotide
  Sense strand starting at position 2258 of SEQ ID NO: 1885372
uccugaucucagugagaau

SEQ ID NO: 2337187 - RNA, 19 nt, Artificial Sequence
  Description of Artificial Sequence: Synthetic oligonucleotide
  Antisense strand to SEQ ID NO: 2337186
auucucacugagaucagga

SEQ ID NO: 2337188 - RNA, 19 nt, Artificial Sequence
  Description of Artificial Sequence: Synthetic oligonucleotide
  Sense strand starting at position 2267 of SEQ ID NO: 1885372
cagugagaaugugucacau

SEQ ID NO: 2337189 - RNA, 19 nt, Artificial Sequence
  Description of Artificial Sequence: Synthetic oligonucleotide
  Antisense strand to SEQ ID NO: 2337188
augugacacauucucacug

SEQ ID NO: 2337190 - RNA, 19 nt, Artificial Sequence
  Description of Artificial Sequence: Synthetic oligonucleotide
  Sense strand starting at position 2383 of SEQ ID NO: 1885372
cugggucaagugugaacuu

SEQ ID NO: 2337191 - RNA, 19 nt, Artificial Sequence
  Description of Artificial Sequence: Synthetic oligonucleotide
  Antisense strand to SEQ ID NO: 2337190
aaguucacacuugacccag

SEQ ID NO: 2337192 - RNA, 19 nt, Artificial Sequence
  Description of Artificial Sequence: Synthetic oligonucleotide
  Sense strand starting at position 2654 of SEQ ID NO: 1885372
agggaacucugauaggaca

SEQ ID NO: 2337193 - RNA, 19 nt, Artificial Sequence
  Description of Artificial Sequence: Synthetic oligonucleotide
  Antisense strand to SEQ ID NO: 2337192
uguccuaucagaguucccu

SEQ ID NO: 2337194 - RNA, 19 nt, Artificial Sequence
  Description of Artificial Sequence: Synthetic oligonucleotide
  Sense strand starting at position 2657 of SEQ ID NO: 1885372
gaacucugauaggacagaa

SEQ ID NO: 2337195 - RNA, 19 nt, Artificial Sequence
  Description of Artificial Sequence: Synthetic oligonucleotide
  Antisense strand to SEQ ID NO: 2337194
uucuguccuaucagaguuc

SEQ ID NO: 2337196 - RNA, 19 nt, Artificial Sequence
  Description of Artificial Sequence: Synthetic oligonucleotide
  Sense strand starting at position 3137 of SEQ ID NO: 1885372
gagcaauccguguuguagc

SEQ ID NO: 2337197 - RNA, 19 nt, Artificial Sequence
  Description of Artificial Sequence: Synthetic oligonucleotide
  Antisense strand to SEQ ID NO: 2337196
gcuacaacacggauugcuc

SEQ ID NO: 2337198 - RNA, 19 nt, Artificial Sequence
  Description of Artificial Sequence: Synthetic oligonucleotide
  Sense strand starting at position 3213 of SEQ ID NO: 1885372
gguggagcuguggaaaguu

SEQ ID NO: 2337199 - RNA, 19 nt, Artificial Sequence
  Description of Artificial Sequence: Synthetic oligonucleotide
  Antisense strand to SEQ ID NO: 2337198
aacuuuccacagcuccacc

SEQ ID NO: 2337200 - RNA, 19 nt, Artificial Sequence
  Description of Artificial Sequence: Synthetic oligonucleotide
  Sense strand starting at position 3235 of SEQ ID NO: 1885372
guuucauggguaggagguu

SEQ ID NO: 2337201 - RNA, 19 nt, Artificial Sequence
  Description of Artificial Sequence: Synthetic oligonucleotide
  Antisense strand to SEQ ID NO: 2337200
aaccuccuacccaugaaac

SEQ ID NO: 2337202 - RNA, 19 nt, Artificial Sequence
  Description of Artificial Sequence: Synthetic oligonucleotide
  Sense strand starting at position 3244 of SEQ ID NO: 1885372
guaggagguucagucuuau

SEQ ID NO: 2337203 - RNA, 19 nt, Artificial Sequence
  Description of Artificial Sequence: Synthetic oligonucleotide
  Antisense strand to SEQ ID NO: 2337202
auaagacugaaccuccuac

SEQ ID NO: 2337204 - RNA, 19 nt, Artificial Sequence
  Description of Artificial Sequence: Synthetic oligonucleotide
  Sense strand starting at position 3299 of SEQ ID NO: 1885372
gcugcacaccagugagaau

SEQ ID NO: 2337205 - RNA, 19 nt, Artificial Sequence
  Description of Artificial Sequence: Synthetic oligonucleotide
  Antisense strand to SEQ ID NO: 2337204
auucucacuggugugcagc

SEQ ID NO: 2337206 - RNA, 19 nt, Artificial Sequence
  Description of Artificial Sequence: Synthetic oligonucleotide
  Sense strand starting at position 3308 of SEQ ID NO: 1885372
cagugagaauguccuuaau

SEQ ID NO: 2337207 - RNA, 19 nt, Artificial Sequence
  Description of Artificial Sequence: Synthetic oligonucleotide
  Antisense strand to SEQ ID NO: 2337206
auuaaggacauucucacug

SEQ ID NO: 2337208 - RNA, 19 nt, Artificial Sequence
  Description of Artificial Sequence: Synthetic oligonucleotide
  Sense strand starting at position 3310 of SEQ ID NO: 1885372
gugagaauguccuuaaugc

SEQ ID NO: 2337209 - RNA, 19 nt, Artificial Sequence
  Description of Artificial Sequence: Synthetic oligonucleotide
  Antisense strand to SEQ ID NO: 2337208
gcauuaaggacauucucac

SEQ ID NO: 2337210 - RNA, 19 nt, Artificial Sequence
  Description of Artificial Sequence: Synthetic oligonucleotide
  Sense strand starting at position 3349 of SEQ ID NO: 1885372
aauaguuaagacgguagau

SEQ ID NO: 2337211 - RNA, 19 nt, Artificial Sequence
  Description of Artificial Sequence: Synthetic oligonucleotide
  Antisense strand to SEQ ID NO: 2337210
aucuaccgucuuaacuauu

SEQ ID NO: 2337212 - RNA, 19 nt, Artificial Sequence
  Description of Artificial Sequence: Synthetic oligonucleotide
  Sense strand starting at position 3426 of SEQ ID NO: 1885372
ucaugccuucuccaacgaa

SEQ ID NO: 2337213 - RNA, 19 nt, Artificial Sequence
  Description of Artificial Sequence: Synthetic oligonucleotide
  Antisense strand to SEQ ID NO: 2337212
uucguuggagaaggcauga

SEQ ID NO: 2337214 - RNA, 19 nt, Artificial Sequence
  Description of Artificial Sequence: Synthetic oligonucleotide
  Sense strand starting at position 3626 of SEQ ID NO: 1885372
gggaaacagucucccuaac

SEQ ID NO: 2337215 - RNA, 19 nt, Artificial Sequence
  Description of Artificial Sequence: Synthetic oligonucleotide
  Antisense strand to SEQ ID NO: 2337214
guuagggagacuguuuccc

SEQ ID NO: 2337216 - RNA, 19 nt, Artificial Sequence
  Description of Artificial Sequence: Synthetic oligonucleotide
  Sense strand starting at position 3662 of SEQ ID NO: 1885372
ggcccaagaggucaaucuu

SEQ ID NO: 2337217 - RNA, 19 nt, Artificial Sequence
  Description of Artificial Sequence: Synthetic oligonucleotide
  Antisense strand to SEQ ID NO: 2337216
aagauugaccucuugggcc

SEQ ID NO: 2337218 - RNA, 19 nt, Artificial Sequence
  Description of Artificial Sequence: Synthetic oligonucleotide
  Sense strand starting at position 3670 of SEQ ID NO: 1885372
aggucaaucuugucaauaa

SEQ ID NO: 2337219 - RNA, 19 nt, Artificial Sequence
  Description of Artificial Sequence: Synthetic oligonucleotide
  Antisense strand to SEQ ID NO: 2337218
uuauugacaagauugaccu

SEQ ID NO: 2337220 - RNA, 19 nt, Artificial Sequence
  Description of Artificial Sequence: Synthetic oligonucleotide
  Sense strand starting at position 3813 of SEQ ID NO: 1885372
cccgaaaggguucgacaga

SEQ ID NO: 2337221 - RNA, 19 nt, Artificial Sequence
  Description of Artificial Sequence: Synthetic oligonucleotide
  Antisense strand to SEQ ID NO: 2337220
ucugucgaacccuuucggg

SEQ ID NO: 2337222 - RNA, 19 nt, Artificial Sequence
  Description of Artificial Sequence: Synthetic oligonucleotide
  Sense strand starting at position 37 of SEQ ID NO: 1885373
augauaugauuguugugau

SEQ ID NO: 2337223 - RNA, 19 nt, Artificial Sequence
  Description of Artificial Sequence: Synthetic oligonucleotide
  Antisense strand to SEQ ID NO: 2337222
aucacaacaaucauaucau

SEQ ID NO: 2337224 - RNA, 19 nt, Artificial Sequence
  Description of Artificial Sequence: Synthetic oligonucleotide
  Sense strand starting at position 160 of SEQ ID NO: 1885373
agugucaucggcguguaau

SEQ ID NO: 2337225 - RNA, 19 nt, Artificial Sequence
  Description of Artificial Sequence: Synthetic oligonucleotide
  Antisense strand to SEQ ID NO: 2337224
auuacacgccgaugacacu

SEQ ID NO: 2337226 - RNA, 19 nt, Artificial Sequence
  Description of Artificial Sequence: Synthetic oligonucleotide
  Sense strand starting at position 171 of SEQ ID NO: 1885373
cguguaauuugggcuucac

SEQ ID NO: 2337227 - RNA, 19 nt, Artificial Sequence
  Description of Artificial Sequence: Synthetic oligonucleotide
  Antisense strand to SEQ ID NO: 2337226
gugaagcccaaauuacacg

SEQ ID NO: 2337228 - RNA, 19 nt, Artificial Sequence
  Description of Artificial Sequence: Synthetic oligonucleotide
  Sense strand starting at position 303 of SEQ ID NO: 1885373
auaaccgaucuguauugua

SEQ ID NO: 2337229 - RNA, 19 nt, Artificial Sequence
  Description of Artificial Sequence: Synthetic oligonucleotide
  Antisense strand to SEQ ID NO: 2337228
uacaauacagaucgguuau

SEQ ID NO: 2337230 - RNA, 19 nt, Artificial Sequence
  Description of Artificial Sequence: Synthetic oligonucleotide
  Sense strand starting at position 404 of SEQ ID NO: 1885373
agagaacuuguggaacgua

SEQ ID NO: 2337231 - RNA, 19 nt, Artificial Sequence
  Description of Artificial Sequence: Synthetic oligonucleotide
  Antisense strand to SEQ ID NO: 2337230
uacguuccacaaguucucu

SEQ ID NO: 2337232 - RNA, 19 nt, Artificial Sequence
  Description of Artificial Sequence: Synthetic oligonucleotide
  Sense strand starting at position 768 of SEQ ID NO: 1885373
aguuucuggagguauugua

SEQ ID NO: 2337233 - RNA, 19 nt, Artificial Sequence
  Description of Artificial Sequence: Synthetic oligonucleotide
  Antisense strand to SEQ ID NO: 2337232
uacaauaccuccagaaacu

SEQ ID NO: 2337234 - RNA, 19 nt, Artificial Sequence
  Description of Artificial Sequence: Synthetic oligonucleotide
  Sense strand starting at position 919 of SEQ ID NO: 1885373
cugaaaggaccugguuaca

SEQ ID NO: 2337235 - RNA, 19 nt, Artificial Sequence
  Description of Artificial Sequence: Synthetic oligonucleotide
  Antisense strand to SEQ ID NO: 2337234
uguaaccagguccuuucag

SEQ ID NO: 2337236 - RNA, 19 nt, Artificial Sequence
  Description of Artificial Sequence: Synthetic oligonucleotide
  Sense strand starting at position 932 of SEQ ID NO: 1885373
guuacaaauggaggcuuaa

SEQ ID NO: 2337237 - RNA, 19 nt, Artificial Sequence
  Description of Artificial Sequence: Synthetic oligonucleotide
  Antisense strand to SEQ ID NO: 2337236
uuaagccuccauuuguaac

SEQ ID NO: 2337238 - RNA, 19 nt, Artificial Sequence
  Description of Artificial Sequence: Synthetic oligonucleotide
  Sense strand starting at position 990 of SEQ ID NO: 1885373
uuagaaaguuaagucucau

SEQ ID NO: 2337239 - RNA, 19 nt, Artificial Sequence
  Description of Artificial Sequence: Synthetic oligonucleotide
  Antisense strand to SEQ ID NO: 2337238
augagacuuaacuuucuaa

SEQ ID NO: 2337240 - RNA, 19 nt, Artificial Sequence
  Description of Artificial Sequence: Synthetic oligonucleotide
  Sense strand starting at position 1148 of SEQ ID NO: 1885373
aucagucaggaguagugau

SEQ ID NO: 2337241 - RNA, 19 nt, Artificial Sequence
  Description of Artificial Sequence: Synthetic oligonucleotide
  Antisense strand to SEQ ID NO: 2337240
aucacuacuccugacugau

SEQ ID NO: 2337242 - RNA, 19 nt, Artificial Sequence
  Description of Artificial Sequence: Synthetic oligonucleotide
  Sense strand starting at position 1568 of SEQ ID NO: 1885373
gccauuaauggauacuauu

SEQ ID NO: 2337243 - RNA, 19 nt, Artificial Sequence
  Description of Artificial Sequence: Synthetic oligonucleotide
  Antisense strand to SEQ ID NO: 2337242
aauaguauccauuaauggc

SEQ ID NO: 2337244 - RNA, 19 nt, Artificial Sequence
  Description of Artificial Sequence: Synthetic oligonucleotide
  Sense strand starting at position 1948 of SEQ ID NO: 1885373
gccauuaugcguuugaucu

SEQ ID NO: 2337245 - RNA, 19 nt, Artificial Sequence
  Description of Artificial Sequence: Synthetic oligonucleotide
  Antisense strand to SEQ ID NO: 2337244
agaucaaacgcauaauggc

SEQ ID NO: 2337246 - RNA, 19 nt, Artificial Sequence
  Description of Artificial Sequence: Synthetic oligonucleotide
  Sense strand starting at position 2106 of SEQ ID NO: 1885373
ggaucaucuuguguauaag

SEQ ID NO: 2337247 - RNA, 19 nt, Artificial Sequence
  Description of Artificial Sequence: Synthetic oligonucleotide
  Antisense strand to SEQ ID NO: 2337246
cuuauacacaagaugaucc

SEQ ID NO: 2337248 - RNA, 19 nt, Artificial Sequence
  Description of Artificial Sequence: Synthetic oligonucleotide
  Sense strand starting at position 2107 of SEQ ID NO: 1885373
gaucaucuuguguauaagu

SEQ ID NO: 2337249 - RNA, 19 nt, Artificial Sequence
  Description of Artificial Sequence: Synthetic oligonucleotide
  Antisense strand to SEQ ID NO: 2337248
acuuauacacaagaugauc

SEQ ID NO: 2337250 - RNA, 19 nt, Artificial Sequence
  Description of Artificial Sequence: Synthetic oligonucleotide
  Sense strand starting at position 2116 of SEQ ID NO: 1885373
guguauaaguuauuaggga

SEQ ID NO: 2337251 - RNA, 19 nt, Artificial Sequence
  Description of Artificial Sequence: Synthetic oligonucleotide
  Antisense strand to SEQ ID NO: 2337250
ucccuaauaacuuauacac

SEQ ID NO: 2337252 - RNA, 19 nt, Artificial Sequence
  Description of Artificial Sequence: Synthetic oligonucleotide
  Sense strand starting at position 2311 of SEQ ID NO: 1885373
augggugccuuccuuauuu

SEQ ID NO: 2337253 - RNA, 19 nt, Artificial Sequence
  Description of Artificial Sequence: Synthetic oligonucleotide
  Antisense strand to SEQ ID NO: 2337252
aaauaaggaaggcacccau

SEQ ID NO: 2337254 - RNA, 19 nt, Artificial Sequence
  Description of Artificial Sequence: Synthetic oligonucleotide
  Sense strand starting at position 2409 of SEQ ID NO: 1885373
acccaucuuugguugauga

SEQ ID NO: 2337255 - RNA, 19 nt, Artificial Sequence
  Description of Artificial Sequence: Synthetic oligonucleotide
  Antisense strand to SEQ ID NO: 2337254
ucaucaaccaaagaugggu

SEQ ID NO: 2337256 - RNA, 19 nt, Artificial Sequence
  Description of Artificial Sequence: Synthetic oligonucleotide
  Sense strand starting at position 2410 of SEQ ID NO: 1885373
cccaucuuugguugaugaa

SEQ ID NO: 2337257 - RNA, 19 nt, Artificial Sequence
  Description of Artificial Sequence: Synthetic oligonucleotide
  Antisense strand to SEQ ID NO: 2337256
uucaucaaccaaagauggg

SEQ ID NO: 2337258 - RNA, 19 nt, Artificial Sequence
  Description of Artificial Sequence: Synthetic oligonucleotide
  Sense strand starting at position 2441 of SEQ ID NO: 1885373
ugucuuaaucucgaucaaa

SEQ ID NO: 2337259 - RNA, 19 nt, Artificial Sequence
  Description of Artificial Sequence: Synthetic oligonucleotide
  Antisense strand to SEQ ID NO: 2337258
uuugaucgagauuaagaca

SEQ ID NO: 2337260 - RNA, 19 nt, Artificial Sequence
  Description of Artificial Sequence: Synthetic oligonucleotide
  Sense strand starting at position 2462 of SEQ ID NO: 1885373
guguucuuuagggaagaau

SEQ ID NO: 2337261 - RNA, 19 nt, Artificial Sequence
  Description of Artificial Sequence: Synthetic oligonucleotide
  Antisense strand to SEQ ID NO: 2337260
auucuucccuaaagaacac

SEQ ID NO: 2337262 - RNA, 19 nt, Artificial Sequence
  Description of Artificial Sequence: Synthetic oligonucleotide
  Sense strand starting at position 2482 of SEQ ID NO: 1885373
uugagauauuuggaaccga

SEQ ID NO: 2337263 - RNA, 19 nt, Artificial Sequence
  Description of Artificial Sequence: Synthetic oligonucleotide
  Antisense strand to SEQ ID NO: 2337262
ucgguuccaaauaucucaa

SEQ ID NO: 2337264 - RNA, 19 nt, Artificial Sequence
  Description of Artificial Sequence: Synthetic oligonucleotide
  Sense strand starting at position 2546 of SEQ ID NO: 1885373
uugauaugcuauucuaaga

SEQ ID NO: 2337265 - RNA, 19 nt, Artificial Sequence
  Description of Artificial Sequence: Synthetic oligonucleotide
  Antisense strand to SEQ ID NO: 2337264
ucuuagaauagcauaucaa

SEQ ID NO: 2337266 - RNA, 19 nt, Artificial Sequence
  Description of Artificial Sequence: Synthetic oligonucleotide
  Sense strand starting at position 2553 of SEQ ID NO: 1885373
gcuauucuaagaugaggac

SEQ ID NO: 2337267 - RNA, 19 nt, Artificial Sequence
  Description of Artificial Sequence: Synthetic oligonucleotide
  Antisense strand to SEQ ID NO: 2337266
guccucaucuuagaauagc

SEQ ID NO: 2337268 - RNA, 19 nt, Artificial Sequence
  Description of Artificial Sequence: Synthetic oligonucleotide
  Sense strand starting at position 2612 of SEQ ID NO: 1885373
guucuauauccacacagcu

SEQ ID NO: 2337269 - RNA, 19 nt, Artificial Sequence
  Description of Artificial Sequence: Synthetic oligonucleotide
  Antisense strand to SEQ ID NO: 2337268
agcuguguggauauagaac

SEQ ID NO: 2337270 - RNA, 19 nt, Artificial Sequence
  Description of Artificial Sequence: Synthetic oligonucleotide
  Sense strand starting at position 2879 of SEQ ID NO: 1885373
auagacuuucuaugucaua

SEQ ID NO: 2337271 - RNA, 19 nt, Artificial Sequence
  Description of Artificial Sequence: Synthetic oligonucleotide
  Antisense strand to SEQ ID NO: 2337270
uaugacauagaaagucuau

SEQ ID NO: 2337272 - RNA, 19 nt, Artificial Sequence
  Description of Artificial Sequence: Synthetic oligonucleotide
  Sense strand starting at position 2909 of SEQ ID NO: 1885373
aaauauaguugggucuauu

SEQ ID NO: 2337273 - RNA, 19 nt, Artificial Sequence
  Description of Artificial Sequence: Synthetic oligonucleotide
  Antisense strand to SEQ ID NO: 2337272
aauagacccaacuauauuu

SEQ ID NO: 2337274 - RNA, 19 nt, Artificial Sequence
  Description of Artificial Sequence: Synthetic oligonucleotide
  Sense strand starting at position 2912 of SEQ ID NO: 1885373
uauaguugggucuauugua

SEQ ID NO: 2337275 - RNA, 19 nt, Artificial Sequence
  Description of Artificial Sequence: Synthetic oligonucleotide
  Antisense strand to SEQ ID NO: 2337274
uacaauagacccaacuaua

SEQ ID NO: 2337276 - RNA, 19 nt, Artificial Sequence
  Description of Artificial Sequence: Synthetic oligonucleotide
  Sense strand starting at position 2919 of SEQ ID NO: 1885373
gggucuauuguagauuaau

SEQ ID NO: 2337277 - RNA, 19 nt, Artificial Sequence
  Description of Artificial Sequence: Synthetic oligonucleotide
  Antisense strand to SEQ ID NO: 2337276
auuaaucuacaauagaccc

SEQ ID NO: 2337278 - RNA, 19 nt, Artificial Sequence
  Description of Artificial Sequence: Synthetic oligonucleotide
  Sense strand starting at position 3142 of SEQ ID NO: 1885373
uuuggagauauaugcuuga

SEQ ID NO: 2337279 - RNA, 19 nt, Artificial Sequence
  Description of Artificial Sequence: Synthetic oligonucleotide
  Antisense strand to SEQ ID NO: 2337278
ucaagcauauaucuccaaa

SEQ ID NO: 2337280 - RNA, 19 nt, Artificial Sequence
  Description of Artificial Sequence: Synthetic oligonucleotide
  Sense strand starting at position 3145 of SEQ ID NO: 1885373
ggagauauaugcuugaagu

SEQ ID NO: 2337281 - RNA, 19 nt, Artificial Sequence
  Description of Artificial Sequence: Synthetic oligonucleotide
  Antisense strand to SEQ ID NO: 2337280
acuucaagcauauaucucc

SEQ ID NO: 2337282 - RNA, 19 nt, Artificial Sequence
  Description of Artificial Sequence: Synthetic oligonucleotide
  Sense strand starting at position 3146 of SEQ ID NO: 1885373
gagauauaugcuugaagua

SEQ ID NO: 2337283 - RNA, 19 nt, Artificial Sequence
  Description of Artificial Sequence: Synthetic oligonucleotide
  Antisense strand to SEQ ID NO: 2337282
uacuucaagcauauaucuc

SEQ ID NO: 2337284 - RNA, 19 nt, Artificial Sequence
  Description of Artificial Sequence: Synthetic oligonucleotide
  Sense strand starting at position 3147 of SEQ ID NO: 1885373
agauauaugcuugaaguau

SEQ ID NO: 2337285 - RNA, 19 nt, Artificial Sequence
  Description of Artificial Sequence: Synthetic oligonucleotide
  Antisense strand to SEQ ID NO: 2337284
auacuucaagcauauaucu

SEQ ID NO: 2337286 - RNA, 19 nt, Artificial Sequence
  Description of Artificial Sequence: Synthetic oligonucleotide
  Sense strand starting at position 3176 of SEQ ID NO: 1885373
guaccaauguaucuauaau

SEQ ID NO: 2337287 - RNA, 19 nt, Artificial Sequence
  Description of Artificial Sequence: Synthetic oligonucleotide
  Antisense strand to SEQ ID NO: 2337286
auuauagauacauugguac

SEQ ID NO: 2337288 - RNA, 19 nt, Artificial Sequence
  Description of Artificial Sequence: Synthetic oligonucleotide
  Sense strand starting at position 3254 of SEQ ID NO: 1885373
gcauauagacuuggguaua

SEQ ID NO: 2337289 - RNA, 19 nt, Artificial Sequence
  Description of Artificial Sequence: Synthetic oligonucleotide
  Antisense strand to SEQ ID NO: 2337288
uauacccaagucuauaugc

SEQ ID NO: 2337290 - RNA, 19 nt, Artificial Sequence
  Description of Artificial Sequence: Synthetic oligonucleotide
  Sense strand starting at position 3266 of SEQ ID NO: 1885373
ggguauagaguguauuaca

SEQ ID NO: 2337291 - RNA, 19 nt, Artificial Sequence
  Description of Artificial Sequence: Synthetic oligonucleotide
  Antisense strand to SEQ ID NO: 2337290
uguaauacacucuauaccc

SEQ ID NO: 2337292 - RNA, 19 nt, Artificial Sequence
  Description of Artificial Sequence: Synthetic oligonucleotide
  Sense strand starting at position 3276 of SEQ ID NO: 1885373
uguauuacacucuguauuu

SEQ ID NO: 2337293 - RNA, 19 nt, Artificial Sequence
  Description of Artificial Sequence: Synthetic oligonucleotide
  Antisense strand to SEQ ID NO: 2337292
aaauacagaguguaauaca

SEQ ID NO: 2337294 - RNA, 19 nt, Artificial Sequence
  Description of Artificial Sequence: Synthetic oligonucleotide
  Sense strand starting at position 3294 of SEQ ID NO: 1885373
uuuccaaauguguaauaga

SEQ ID NO: 2337295 - RNA, 19 nt, Artificial Sequence
  Description of Artificial Sequence: Synthetic oligonucleotide
  Antisense strand to SEQ ID NO: 2337294
ucuauuacacauuuggaaa

SEQ ID NO: 2337296 - RNA, 19 nt, Artificial Sequence
  Description of Artificial Sequence: Synthetic oligonucleotide
  Sense strand starting at position 3511 of SEQ ID NO: 1885373
gaaggagagcucugcaaau

SEQ ID NO: 2337297 - RNA, 19 nt, Artificial Sequence
  Description of Artificial Sequence: Synthetic oligonucleotide
  Antisense strand to SEQ ID NO: 2337296
auuugcagagcucuccuuc

SEQ ID NO: 2337298 - RNA, 19 nt, Artificial Sequence
  Description of Artificial Sequence: Synthetic oligonucleotide
  Sense strand starting at position 3548 of SEQ ID NO: 1885373
aggugaaugguguaguuag

SEQ ID NO: 2337299 - RNA, 19 nt, Artificial Sequence
  Description of Artificial Sequence: Synthetic oligonucleotide
  Antisense strand to SEQ ID NO: 2337298
cuaacuacaccauucaccu

SEQ ID NO: 2337300 - RNA, 19 nt, Artificial Sequence
  Description of Artificial Sequence: Synthetic oligonucleotide
  Sense strand starting at position 3977 of SEQ ID NO: 1885373
auauguaggcauuacacaa

SEQ ID NO: 2337301 - RNA, 19 nt, Artificial Sequence
  Description of Artificial Sequence: Synthetic oligonucleotide
  Antisense strand to SEQ ID NO: 2337300
uuguguaaugccuacauau

SEQ ID NO: 2337302 - RNA, 19 nt, Artificial Sequence
  Description of Artificial Sequence: Synthetic oligonucleotide
  Sense strand starting at position 19 of SEQ ID NO: 1885374
auuugcagguaucaaauua

SEQ ID NO: 2337303 - RNA, 19 nt, Artificial Sequence
  Description of Artificial Sequence: Synthetic oligonucleotide
  Antisense strand to SEQ ID NO: 2337302
uaauuugauaccugcaaau

SEQ ID NO: 2337304 - RNA, 19 nt, Artificial Sequence
  Description of Artificial Sequence: Synthetic oligonucleotide
  Sense strand starting at position 158 of SEQ ID NO: 1885374
uugcaaacauuuggacaaa

SEQ ID NO: 2337305 - RNA, 19 nt, Artificial Sequence
  Description of Artificial Sequence: Synthetic oligonucleotide
  Antisense strand to SEQ ID NO: 2337304
uuuguccaaauguuugcaa

SEQ ID NO: 2337306 - RNA, 19 nt, Artificial Sequence
  Description of Artificial Sequence: Synthetic oligonucleotide
  Sense strand starting at position 159 of SEQ ID NO: 1885374
ugcaaacauuuggacaaau

SEQ ID NO: 2337307 - RNA, 19 nt, Artificial Sequence
  Description of Artificial Sequence: Synthetic oligonucleotide
  Antisense strand to SEQ ID NO: 2337306
auuuguccaaauguuugca

SEQ ID NO: 2337308 - RNA, 19 nt, Artificial Sequence
  Description of Artificial Sequence: Synthetic oligonucleotide
  Sense strand starting at position 236 of SEQ ID NO: 1885374
ggagauauauuugaucaau

SEQ ID NO: 2337309 - RNA, 19 nt, Artificial Sequence
  Description of Artificial Sequence: Synthetic oligonucleotide
  Antisense strand to SEQ ID NO: 2337308
auugaucaaauauaucucc

SEQ ID NO: 2337310 - RNA, 19 nt, Artificial Sequence
  Description of Artificial Sequence: Synthetic oligonucleotide
  Sense strand starting at position 279 of SEQ ID NO: 1885374
guaucuauguaauuaagug

SEQ ID NO: 2337311 - RNA, 19 nt, Artificial Sequence
  Description of Artificial Sequence: Synthetic oligonucleotide
  Antisense strand to SEQ ID NO: 2337310
cacuuaauuacauagauac

SEQ ID NO: 2337312 - RNA, 19 nt, Artificial Sequence
  Description of Artificial Sequence: Synthetic oligonucleotide
  Sense strand starting at position 311 of SEQ ID NO: 1885374
gcugucugaaagcauguau

SEQ ID NO: 2337313 - RNA, 19 nt, Artificial Sequence
  Description of Artificial Sequence: Synthetic oligonucleotide
  Antisense strand to SEQ ID NO: 2337312
auacaugcuuucagacagc

SEQ ID NO: 2337314 - RNA, 19 nt, Artificial Sequence
  Description of Artificial Sequence: Synthetic oligonucleotide
  Sense strand starting at position 331 of SEQ ID NO: 1885374
cacauaugaccauguguug

SEQ ID NO: 2337315 - RNA, 19 nt, Artificial Sequence
  Description of Artificial Sequence: Synthetic oligonucleotide
  Antisense strand to SEQ ID NO: 2337314
caacacauggucauaugug

SEQ ID NO: 2337316 - RNA, 19 nt, Artificial Sequence
  Description of Artificial Sequence: Synthetic oligonucleotide
  Sense strand starting at position 345 of SEQ ID NO: 1885374
uguugcuuaguauagacua

SEQ ID NO: 2337317 - RNA, 19 nt, Artificial Sequence
  Description of Artificial Sequence: Synthetic oligonucleotide
  Antisense strand to SEQ ID NO: 2337316
uagucuauacuaagcaaca

SEQ ID NO: 2337318 - RNA, 19 nt, Artificial Sequence
  Description of Artificial Sequence: Synthetic oligonucleotide
  Sense strand starting at position 501 of SEQ ID NO: 1885374
uccuuauaucuaugauguu

SEQ ID NO: 2337319 - RNA, 19 nt, Artificial Sequence
  Description of Artificial Sequence: Synthetic oligonucleotide
  Antisense strand to SEQ ID NO: 2337318
aacaucauagauauaagga

SEQ ID NO: 2337320 - RNA, 19 nt, Artificial Sequence
  Description of Artificial Sequence: Synthetic oligonucleotide
  Sense strand starting at position 635 of SEQ ID NO: 1885374
cgggaccauccuuaauguu

SEQ ID NO: 2337321 - RNA, 19 nt, Artificial Sequence
  Description of Artificial Sequence: Synthetic oligonucleotide
  Antisense strand to SEQ ID NO: 2337320
aacauuaaggauggucccg

SEQ ID NO: 2337322 - RNA, 19 nt, Artificial Sequence
  Description of Artificial Sequence: Synthetic oligonucleotide
  Sense strand starting at position 642 of SEQ ID NO: 1885374
auccuuaauguugaguuaa

SEQ ID NO: 2337323 - RNA, 19 nt, Artificial Sequence
  Description of Artificial Sequence: Synthetic oligonucleotide
  Antisense strand to SEQ ID NO: 2337322
uuaacucaacauuaaggau

SEQ ID NO: 2337324 - RNA, 19 nt, Artificial Sequence
  Description of Artificial Sequence: Synthetic oligonucleotide
  Sense strand starting at position 644 of SEQ ID NO: 1885374
ccuuaauguugaguuaaug

SEQ ID NO: 2337325 - RNA, 19 nt, Artificial Sequence
  Description of Artificial Sequence: Synthetic oligonucleotide
  Antisense strand to SEQ ID NO: 2337324
cauuaacucaacauuaagg

SEQ ID NO: 2337326 - RNA, 19 nt, Artificial Sequence
  Description of Artificial Sequence: Synthetic oligonucleotide
  Sense strand starting at position 650 of SEQ ID NO: 1885374
uguugaguuaauggcagaa

SEQ ID NO: 2337327 - RNA, 19 nt, Artificial Sequence
  Description of Artificial Sequence: Synthetic oligonucleotide
  Antisense strand to SEQ ID NO: 2337326
uucugccauuaacucaaca

SEQ ID NO: 2337328 - RNA, 19 nt, Artificial Sequence
  Description of Artificial Sequence: Synthetic oligonucleotide
  Sense strand starting at position 654 of SEQ ID NO: 1885374
gaguuaauggcagaaaguu

SEQ ID NO: 2337329 - RNA, 19 nt, Artificial Sequence
  Description of Artificial Sequence: Synthetic oligonucleotide
  Antisense strand to SEQ ID NO: 2337328
aacuuucugccauuaacuc

SEQ ID NO: 2337330 - RNA, 19 nt, Artificial Sequence
  Description of Artificial Sequence: Synthetic oligonucleotide
  Sense strand starting at position 707 of SEQ ID NO: 1885374
acuagauuauuagcauaag

SEQ ID NO: 2337331 - RNA, 19 nt, Artificial Sequence
  Description of Artificial Sequence: Synthetic oligonucleotide
  Antisense strand to SEQ ID NO: 2337330
cuuaugcuaauaaucuagu

SEQ ID NO: 2337332 - RNA, 19 nt, Artificial Sequence
  Description of Artificial Sequence: Synthetic oligonucleotide
  Sense strand starting at position 710 of SEQ ID NO: 1885374
agauuauuagcauaagugu

SEQ ID NO: 2337333 - RNA, 19 nt, Artificial Sequence
  Description of Artificial Sequence: Synthetic oligonucleotide
  Antisense strand to SEQ ID NO: 2337332
acacuuaugcuaauaaucu

SEQ ID NO: 2337334 - RNA, 19 nt, Artificial Sequence
  Description of Artificial Sequence: Synthetic oligonucleotide
  Sense strand starting at position 719 of SEQ ID NO: 1885374
gcauaaguguuucuaacaa

SEQ ID NO: 2337335 - RNA, 19 nt, Artificial Sequence
  Description of Artificial Sequence: Synthetic oligonucleotide
  Antisense strand to SEQ ID NO: 2337334
uuguuagaaacacuuaugc

SEQ ID NO: 2337336 - RNA, 19 nt, Artificial Sequence
  Description of Artificial Sequence: Synthetic oligonucleotide
  Sense strand starting at position 970 of SEQ ID NO: 1885374
cuacaaaguuaaucgauau

SEQ ID NO: 2337337 - RNA, 19 nt, Artificial Sequence
  Description of Artificial Sequence: Synthetic oligonucleotide
  Antisense strand to SEQ ID NO: 2337336
auaucgauuaacuuuguag

SEQ ID NO: 2337338 - RNA, 19 nt, Artificial Sequence
  Description of Artificial Sequence: Synthetic oligonucleotide
  Sense strand starting at position 1188 of SEQ ID NO: 1885374
guggaugacguguaaguua

SEQ ID NO: 2337339 - RNA, 19 nt, Artificial Sequence
  Description of Artificial Sequence: Synthetic oligonucleotide
  Antisense strand to SEQ ID NO: 2337338
uaacuuacacgucauccac

SEQ ID NO: 2337340 - RNA, 19 nt, Artificial Sequence
  Description of Artificial Sequence: Synthetic oligonucleotide
  Sense strand starting at position 1191 of SEQ ID NO: 1885374
gaugacguguaaguuauau

SEQ ID NO: 2337341 - RNA, 19 nt, Artificial Sequence
  Description of Artificial Sequence: Synthetic oligonucleotide
  Antisense strand to SEQ ID NO: 2337340
auauaacuuacacgucauc

SEQ ID NO: 2337342 - RNA, 19 nt, Artificial Sequence
  Description of Artificial Sequence: Synthetic oligonucleotide
  Sense strand starting at position 1229 of SEQ ID NO: 1885374
acagcuaguggcuaucauu

SEQ ID NO: 2337343 - RNA, 19 nt, Artificial Sequence
  Description of Artificial Sequence: Synthetic oligonucleotide
  Antisense strand to SEQ ID NO: 2337342
aaugauagccacuagcugu

SEQ ID NO: 2337344 - RNA, 19 nt, Artificial Sequence
  Description of Artificial Sequence: Synthetic oligonucleotide
  Sense strand starting at position 1620 of SEQ ID NO: 1885374
agacguaauuaauugcaaa

SEQ ID NO: 2337345 - RNA, 19 nt, Artificial Sequence
  Description of Artificial Sequence: Synthetic oligonucleotide
  Antisense strand to SEQ ID NO: 2337344
uuugcaauuaauuacgucu

SEQ ID NO: 2337346 - RNA, 19 nt, Artificial Sequence
  Description of Artificial Sequence: Synthetic oligonucleotide
  Sense strand starting at position 1721 of SEQ ID NO: 1885374
cugggucacuuacuauuau

SEQ ID NO: 2337347 - RNA, 19 nt, Artificial Sequence
  Description of Artificial Sequence: Synthetic oligonucleotide
  Antisense strand to SEQ ID NO: 2337346
auaauaguaagugacccag

SEQ ID NO: 2337348 - RNA, 19 nt, Artificial Sequence
  Description of Artificial Sequence: Synthetic oligonucleotide
  Sense strand starting at position 1747 of SEQ ID NO: 1885374
ucucuuauacccgggauga

SEQ ID NO: 2337349 - RNA, 19 nt, Artificial Sequence
  Description of Artificial Sequence: Synthetic oligonucleotide
  Antisense strand to SEQ ID NO: 2337348
ucaucccggguauaagaga

SEQ ID NO: 2337350 - RNA, 19 nt, Artificial Sequence
  Description of Artificial Sequence: Synthetic oligonucleotide
  Sense strand starting at position 1748 of SEQ ID NO: 1885374
cucuuauacccgggaugaa

SEQ ID NO: 2337351 - RNA, 19 nt, Artificial Sequence
  Description of Artificial Sequence: Synthetic oligonucleotide
  Antisense strand to SEQ ID NO: 2337350
uucaucccggguauaagag

SEQ ID NO: 2337352 - RNA, 19 nt, Artificial Sequence
  Description of Artificial Sequence: Synthetic oligonucleotide
  Sense strand starting at position 1830 of SEQ ID NO: 1885374
gauggaagugucugguuuc

SEQ ID NO: 2337353 - RNA, 19 nt, Artificial Sequence
  Description of Artificial Sequence: Synthetic oligonucleotide
  Antisense strand to SEQ ID NO: 2337352
gaaaccagacacuuccauc

SEQ ID NO: 2337354 - RNA, 19 nt, Artificial Sequence
  Description of Artificial Sequence: Synthetic oligonucleotide
  Sense strand starting at position 1833 of SEQ ID NO: 1885374
ggaagugucugguuucaug

SEQ ID NO: 2337355 - RNA, 19 nt, Artificial Sequence
  Description of Artificial Sequence: Synthetic oligonucleotide
  Antisense strand to SEQ ID NO: 2337354
caugaaaccagacacuucc

SEQ ID NO: 2337356 - RNA, 19 nt, Artificial Sequence
  Description of Artificial Sequence: Synthetic oligonucleotide
  Sense strand starting at position 1879 of SEQ ID NO: 1885374
gaugacucuaguggaguuu

SEQ ID NO: 2337357 - RNA, 19 nt, Artificial Sequence
  Description of Artificial Sequence: Synthetic oligonucleotide
  Antisense strand to SEQ ID NO: 2337356
aaacuccacuagagucauc

SEQ ID NO: 2337358 - RNA, 19 nt, Artificial Sequence
  Description of Artificial Sequence: Synthetic oligonucleotide
  Sense strand starting at position 1890 of SEQ ID NO: 1885374
uggaguuuagcagaugacu

SEQ ID NO: 2337359 - RNA, 19 nt, Artificial Sequence
  Description of Artificial Sequence: Synthetic oligonucleotide
  Antisense strand to SEQ ID NO: 2337358
agucaucugcuaaacucca

SEQ ID NO: 2337360 - RNA, 19 nt, Artificial Sequence
  Description of Artificial Sequence: Synthetic oligonucleotide
  Sense strand starting at position 1911 of SEQ ID NO: 1885374
ucaagaaacucgcuuucua

SEQ ID NO: 2337361 - RNA, 19 nt, Artificial Sequence
  Description of Artificial Sequence: Synthetic oligonucleotide
  Antisense strand to SEQ ID NO: 2337360
uagaaagcgaguuucuuga

SEQ ID NO: 2337362 - RNA, 19 nt, Artificial Sequence
  Description of Artificial Sequence: Synthetic oligonucleotide
  Sense strand starting at position 2019 of SEQ ID NO: 1885374
ccuuguguugccuagacac

SEQ ID NO: 2337363 - RNA, 19 nt, Artificial Sequence
  Description of Artificial Sequence: Synthetic oligonucleotide
  Antisense strand to SEQ ID NO: 2337362
gugucuaggcaacacaagg

SEQ ID NO: 2337364 - RNA, 19 nt, Artificial Sequence
  Description of Artificial Sequence: Synthetic oligonucleotide
  Sense strand starting at position 2194 of SEQ ID NO: 1885374
ggaaucaucuguuccugac

SEQ ID NO: 2337365 - RNA, 19 nt, Artificial Sequence
  Description of Artificial Sequence: Synthetic oligonucleotide
  Antisense strand to SEQ ID NO: 2337364
gucaggaacagaugauucc

SEQ ID NO: 2337366 - RNA, 19 nt, Artificial Sequence
  Description of Artificial Sequence: Synthetic oligonucleotide
  Sense strand starting at position 2320 of SEQ ID NO: 1885374
ucuuccuacgaaugugaca

SEQ ID NO: 2337367 - RNA, 19 nt, Artificial Sequence
  Description of Artificial Sequence: Synthetic oligonucleotide
  Antisense strand to SEQ ID NO: 2337366
ugucacauucguaggaaga

SEQ ID NO: 2337368 - RNA, 19 nt, Artificial Sequence
  Description of Artificial Sequence: Synthetic oligonucleotide
  Sense strand starting at position 2687 of SEQ ID NO: 1885374
aaaggaugucggugauaga

SEQ ID NO: 2337369 - RNA, 19 nt, Artificial Sequence
  Description of Artificial Sequence: Synthetic oligonucleotide
  Antisense strand to SEQ ID NO: 2337368
ucuaucaccgacauccuuu

SEQ ID NO: 2337370 - RNA, 19 nt, Artificial Sequence
  Description of Artificial Sequence: Synthetic oligonucleotide
  Sense strand starting at position 2764 of SEQ ID NO: 1885374
cugcaaacaccgugaggau

SEQ ID NO: 2337371 - RNA, 19 nt, Artificial Sequence
  Description of Artificial Sequence: Synthetic oligonucleotide
  Antisense strand to SEQ ID NO: 2337370
auccucacgguguuugcag

SEQ ID NO: 2337372 - RNA, 19 nt, Artificial Sequence
  Description of Artificial Sequence: Synthetic oligonucleotide
  Sense strand starting at position 3206 of SEQ ID NO: 1885374
agcugggucggagaaaguu

SEQ ID NO: 2337373 - RNA, 19 nt, Artificial Sequence
  Description of Artificial Sequence: Synthetic oligonucleotide
  Antisense strand to SEQ ID NO: 2337372
aacuuucuccgacccagcu

SEQ ID NO: 2337374 - RNA, 19 nt, Artificial Sequence
  Description of Artificial Sequence: Synthetic oligonucleotide
  Sense strand starting at position 3295 of SEQ ID NO: 1885374
ccgcgaucgcgccuuaaca

SEQ ID NO: 2337375 - RNA, 19 nt, Artificial Sequence
  Description of Artificial Sequence: Synthetic oligonucleotide
  Antisense strand to SEQ ID NO: 2337374
uguuaaggcgcgaucgcgg

SEQ ID NO: 2337376 - RNA, 19 nt, Artificial Sequence
  Description of Artificial Sequence: Synthetic oligonucleotide
  Sense strand starting at position 3304 of SEQ ID NO: 1885374
cgccuuaacacguauugga

SEQ ID NO: 2337377 - RNA, 19 nt, Artificial Sequence
  Description of Artificial Sequence: Synthetic oligonucleotide
  Antisense strand to SEQ ID NO: 2337376
uccaauacguguuaaggcg

SEQ ID NO: 2337378 - RNA, 19 nt, Artificial Sequence
  Description of Artificial Sequence: Synthetic oligonucleotide
  Sense strand starting at position 3323 of SEQ ID NO: 1885374
gcgagugugcgagugauca

SEQ ID NO: 2337379 - RNA, 19 nt, Artificial Sequence
  Description of Artificial Sequence: Synthetic oligonucleotide
  Antisense strand to SEQ ID NO: 2337378
ugaucacucgcacacucgc

SEQ ID NO: 2337380 - RNA, 19 nt, Artificial Sequence
  Description of Artificial Sequence: Synthetic oligonucleotide
  Sense strand starting at position 3333 of SEQ ID NO: 1885374
gagugaucaugagugugag

SEQ ID NO: 2337381 - RNA, 19 nt, Artificial Sequence
  Description of Artificial Sequence: Synthetic oligonucleotide
  Antisense strand to SEQ ID NO: 2337380
cucacacucaugaucacuc

SEQ ID NO: 2337382 - RNA, 19 nt, Artificial Sequence
  Description of Artificial Sequence: Synthetic oligonucleotide
  Sense strand starting at position 232 of SEQ ID NO: 1885375
cuguaauaugggcacguga

SEQ ID NO: 2337383 - RNA, 19 nt, Artificial Sequence
  Description of Artificial Sequence: Synthetic oligonucleotide
  Antisense strand to SEQ ID NO: 2337382
ucacgugcccauauuacag

SEQ ID NO: 2337384 - RNA, 19 nt, Artificial Sequence
  Description of Artificial Sequence: Synthetic oligonucleotide
  Sense strand starting at position 302 of SEQ ID NO: 1885375
guguucuuccaccauauuc

SEQ ID NO: 2337385 - RNA, 19 nt, Artificial Sequence
  Description of Artificial Sequence: Synthetic oligonucleotide
  Antisense strand to SEQ ID NO: 2337384
gaauaugguggaagaacac

SEQ ID NO: 2337386 - RNA, 19 nt, Artificial Sequence
  Description of Artificial Sequence: Synthetic oligonucleotide
  Sense strand starting at position 413 of SEQ ID NO: 1885375
ccaagaagcugcuucuauu

SEQ ID NO: 2337387 - RNA, 19 nt, Artificial Sequence
  Description of Artificial Sequence: Synthetic oligonucleotide
  Antisense strand to SEQ ID NO: 2337386
aauagaagcagcuucuugg

SEQ ID NO: 2337388 - RNA, 19 nt, Artificial Sequence
  Description of Artificial Sequence: Synthetic oligonucleotide
  Sense strand starting at position 452 of SEQ ID NO: 1885375
acuugcauuccugguuaaa

SEQ ID NO: 2337389 - RNA, 19 nt, Artificial Sequence
  Description of Artificial Sequence: Synthetic oligonucleotide
  Antisense strand to SEQ ID NO: 2337388
uuuaaccaggaaugcaagu

SEQ ID NO: 2337390 - RNA, 19 nt, Artificial Sequence
  Description of Artificial Sequence: Synthetic oligonucleotide
  Sense strand starting at position 455 of SEQ ID NO: 1885375
ugcauuccugguuaaaucu

SEQ ID NO: 2337391 - RNA, 19 nt, Artificial Sequence
  Description of Artificial Sequence: Synthetic oligonucleotide
  Antisense strand to SEQ ID NO: 2337390
agauuuaaccaggaaugca

SEQ ID NO: 2337392 - RNA, 19 nt, Artificial Sequence
  Description of Artificial Sequence: Synthetic oligonucleotide
  Sense strand starting at position 566 of SEQ ID NO: 1885375
cuccuuguaccugacauua

SEQ ID NO: 2337393 - RNA, 19 nt, Artificial Sequence
  Description of Artificial Sequence: Synthetic oligonucleotide
  Antisense strand to SEQ ID NO: 2337392
uaaugucagguacaaggag

SEQ ID NO: 2337394 - RNA, 19 nt, Artificial Sequence
  Description of Artificial Sequence: Synthetic oligonucleotide
  Sense strand starting at position 576 of SEQ ID NO: 1885375
cugacauuauuugaagauu

SEQ ID NO: 2337395 - RNA, 19 nt, Artificial Sequence
  Description of Artificial Sequence: Synthetic oligonucleotide
  Antisense strand to SEQ ID NO: 2337394
aaucuucaaauaaugucag

SEQ ID NO: 2337396 - RNA, 19 nt, Artificial Sequence
  Description of Artificial Sequence: Synthetic oligonucleotide
  Sense strand starting at position 585 of SEQ ID NO: 1885375
uuugaagauugggucuuua

SEQ ID NO: 2337397 - RNA, 19 nt, Artificial Sequence
  Description of Artificial Sequence: Synthetic oligonucleotide
  Antisense strand to SEQ ID NO: 2337396
uaaagacccaaucuucaaa

SEQ ID NO: 2337398 - RNA, 19 nt, Artificial Sequence
  Description of Artificial Sequence: Synthetic oligonucleotide
  Sense strand starting at position 850 of SEQ ID NO: 1885375
cacccaguccgugauacuu

SEQ ID NO: 2337399 - RNA, 19 nt, Artificial Sequence
  Description of Artificial Sequence: Synthetic oligonucleotide
  Antisense strand to SEQ ID NO: 2337398
aaguaucacggacugggug

SEQ ID NO: 2337400 - RNA, 19 nt, Artificial Sequence
  Description of Artificial Sequence: Synthetic oligonucleotide
  Sense strand starting at position 1099 of SEQ ID NO: 1885375
uggugaucugcccaccaca

SEQ ID NO: 2337401 - RNA, 19 nt, Artificial Sequence
  Description of Artificial Sequence: Synthetic oligonucleotide
  Antisense strand to SEQ ID NO: 2337400
uguggugggcagaucacca

SEQ ID NO: 2337402 - RNA, 19 nt, Artificial Sequence
  Description of Artificial Sequence: Synthetic oligonucleotide
  Sense strand starting at position 1110 of SEQ ID NO: 1885375
ccaccacaucugugauacu

SEQ ID NO: 2337403 - RNA, 19 nt, Artificial Sequence
  Description of Artificial Sequence: Synthetic oligonucleotide
  Antisense strand to SEQ ID NO: 2337402
aguaucacagauguggugg

SEQ ID NO: 2337404 - RNA, 19 nt, Artificial Sequence
  Description of Artificial Sequence: Synthetic oligonucleotide
  Sense strand starting at position 1133 of SEQ ID NO: 1885375
auggcagccuuaucaaacu

SEQ ID NO: 2337405 - RNA, 19 nt, Artificial Sequence
  Description of Artificial Sequence: Synthetic oligonucleotide
  Antisense strand to SEQ ID NO: 2337404
aguuugauaaggcugccau

SEQ ID NO: 2337406 - RNA, 19 nt, Artificial Sequence
  Description of Artificial Sequence: Synthetic oligonucleotide
  Sense strand starting at position 1162 of SEQ ID NO: 1885375
ccucaaaugugucucauau

SEQ ID NO: 2337407 - RNA, 19 nt, Artificial Sequence
  Description of Artificial Sequence: Synthetic oligonucleotide
  Antisense strand to SEQ ID NO: 2337406
auaugagacacauuugagg

SEQ ID NO: 2337408 - RNA, 19 nt, Artificial Sequence
  Description of Artificial Sequence: Synthetic oligonucleotide
  Sense strand starting at position 1253 of SEQ ID NO: 1885375
acauuacuucuaugguauu

SEQ ID NO: 2337409 - RNA, 19 nt, Artificial Sequence
  Description of Artificial Sequence: Synthetic oligonucleotide
  Antisense strand to SEQ ID NO: 2337408
aauaccauagaaguaaugu

SEQ ID NO: 2337410 - RNA, 19 nt, Artificial Sequence
  Description of Artificial Sequence: Synthetic oligonucleotide
  Sense strand starting at position 1290 of SEQ ID NO: 1885375
acucaaucuguccaugagu

SEQ ID NO: 2337411 - RNA, 19 nt, Artificial Sequence
  Description of Artificial Sequence: Synthetic oligonucleotide
  Antisense strand to SEQ ID NO: 2337410
acucauggacagauugagu

SEQ ID NO: 2337412 - RNA, 19 nt, Artificial Sequence
  Description of Artificial Sequence: Synthetic oligonucleotide
  Sense strand starting at position 1292 of SEQ ID NO: 1885375
ucaaucuguccaugaguag

SEQ ID NO: 2337413 - RNA, 19 nt, Artificial Sequence
  Description of Artificial Sequence: Synthetic oligonucleotide
  Antisense strand to SEQ ID NO: 2337412
cuacucauggacagauuga

SEQ ID NO: 2337414 - RNA, 19 nt, Artificial Sequence
  Description of Artificial Sequence: Synthetic oligonucleotide
  Sense strand starting at position 1310 of SEQ ID NO: 1885375
ggcaucagauaaucccaaa

SEQ ID NO: 2337415 - RNA, 19 nt, Artificial Sequence
  Description of Artificial Sequence: Synthetic oligonucleotide
  Antisense strand to SEQ ID NO: 2337414
uuugggauuaucugaugcc

SEQ ID NO: 2337416 - RNA, 19 nt, Artificial Sequence
  Description of Artificial Sequence: Synthetic oligonucleotide
  Sense strand starting at position 1396 of SEQ ID NO: 1885375
guccaagaauugccacaga

SEQ ID NO: 2337417 - RNA, 19 nt, Artificial Sequence
  Description of Artificial Sequence: Synthetic oligonucleotide
  Antisense strand to SEQ ID NO: 2337416
ucuguggcaauucuuggac

SEQ ID NO: 2337418 - RNA, 19 nt, Artificial Sequence
  Description of Artificial Sequence: Synthetic oligonucleotide
  Sense strand starting at position 1802 of SEQ ID NO: 1885375
ugugaagucuucccugaaa

SEQ ID NO: 2337419 - RNA, 19 nt, Artificial Sequence
  Description of Artificial Sequence: Synthetic oligonucleotide
  Antisense strand to SEQ ID NO: 2337418
uuucagggaagacuucaca

SEQ ID NO: 2337420 - RNA, 19 nt, Artificial Sequence
  Description of Artificial Sequence: Synthetic oligonucleotide
  Sense strand starting at position 1804 of SEQ ID NO: 1885375
ugaagucuucccugaaaua

SEQ ID NO: 2337421 - RNA, 19 nt, Artificial Sequence
  Description of Artificial Sequence: Synthetic oligonucleotide
  Antisense strand to SEQ ID NO: 2337420
uauuucagggaagacuuca

SEQ ID NO: 2337422 - RNA, 19 nt, Artificial Sequence
  Description of Artificial Sequence: Synthetic oligonucleotide
  Sense strand starting at position 1882 of SEQ ID NO: 1885375
cugaguauuugacagguac

SEQ ID NO: 2337423 - RNA, 19 nt, Artificial Sequence
  Description of Artificial Sequence: Synthetic oligonucleotide
  Antisense strand to SEQ ID NO: 2337422
guaccugucaaauacucag

SEQ ID NO: 2337424 - RNA, 19 nt, Artificial Sequence
  Description of Artificial Sequence: Synthetic oligonucleotide
  Sense strand starting at position 2058 of SEQ ID NO: 1885375
uguucuccugguuaaguau

SEQ ID NO: 2337425 - RNA, 19 nt, Artificial Sequence
  Description of Artificial Sequence: Synthetic oligonucleotide
  Antisense strand to SEQ ID NO: 2337424
auacuuaaccaggagaaca

SEQ ID NO: 2337426 - RNA, 19 nt, Artificial Sequence
  Description of Artificial Sequence: Synthetic oligonucleotide
  Sense strand starting at position 2061 of SEQ ID NO: 1885375
ucuccugguuaaguaugaa

SEQ ID NO: 2337427 - RNA, 19 nt, Artificial Sequence
  Description of Artificial Sequence: Synthetic oligonucleotide
  Antisense strand to SEQ ID NO: 2337426
uucauacuuaaccaggaga

SEQ ID NO: 2337428 - RNA, 19 nt, Artificial Sequence
  Description of Artificial Sequence: Synthetic oligonucleotide
  Sense strand starting at position 2110 of SEQ ID NO: 1885375
cuaaguauauccguucuaa

SEQ ID NO: 2337429 - RNA, 19 nt, Artificial Sequence
  Description of Artificial Sequence: Synthetic oligonucleotide
  Antisense strand to SEQ ID NO: 2337428
uuagaacggauauacuuag

SEQ ID NO: 2337430 - RNA, 19 nt, Artificial Sequence
  Description of Artificial Sequence: Synthetic oligonucleotide
  Sense strand starting at position 2292 of SEQ ID NO: 1885375
ucuacuaguuuaucaaugu

SEQ ID NO: 2337431 - RNA, 19 nt, Artificial Sequence
  Description of Artificial Sequence: Synthetic oligonucleotide
  Antisense strand to SEQ ID NO: 2337430
acauugauaaacuaguaga

SEQ ID NO: 2337432 - RNA, 19 nt, Artificial Sequence
  Description of Artificial Sequence: Synthetic oligonucleotide
  Sense strand starting at position 2536 of SEQ ID NO: 1885375
agcaguugacuccagagau

SEQ ID NO: 2337433 - RNA, 19 nt, Artificial Sequence
  Description of Artificial Sequence: Synthetic oligonucleotide
  Antisense strand to SEQ ID NO: 2337432
aucucuggagucaacugcu

SEQ ID NO: 2337434 - RNA, 19 nt, Artificial Sequence
  Description of Artificial Sequence: Synthetic oligonucleotide
  Sense strand starting at position 2674 of SEQ ID NO: 1885375
accaucaagcuauguaaga

SEQ ID NO: 2337435 - RNA, 19 nt, Artificial Sequence
  Description of Artificial Sequence: Synthetic oligonucleotide
  Antisense strand to SEQ ID NO: 2337434
ucuuacauagcuugauggu

SEQ ID NO: 2337436 - RNA, 19 nt, Artificial Sequence
  Description of Artificial Sequence: Synthetic oligonucleotide
  Sense strand starting at position 2998 of SEQ ID NO: 1885375
uuaugaagcuuauuagcuu

SEQ ID NO: 2337437 - RNA, 19 nt, Artificial Sequence
  Description of Artificial Sequence: Synthetic oligonucleotide
  Antisense strand to SEQ ID NO: 2337436
aagcuaauaagcuucauaa

SEQ ID NO: 2337438 - RNA, 19 nt, Artificial Sequence
  Description of Artificial Sequence: Synthetic oligonucleotide
  Sense strand starting at position 3294 of SEQ ID NO: 1885375
aacagagcaugcucaguaa

SEQ ID NO: 2337439 - RNA, 19 nt, Artificial Sequence
  Description of Artificial Sequence: Synthetic oligonucleotide
  Antisense strand to SEQ ID NO: 2337438
uuacugagcaugcucuguu

SEQ ID NO: 2337440 - RNA, 19 nt, Artificial Sequence
  Description of Artificial Sequence: Synthetic oligonucleotide
  Sense strand starting at position 3313 of SEQ ID NO: 1885375
gggcuugugcaauaaauga

SEQ ID NO: 2337441 - RNA, 19 nt, Artificial Sequence
  Description of Artificial Sequence: Synthetic oligonucleotide
  Antisense strand to SEQ ID NO: 2337440
ucauuuauugcacaagccc

SEQ ID NO: 2337442 - RNA, 19 nt, Artificial Sequence
  Description of Artificial Sequence: Synthetic oligonucleotide
  Sense strand starting at position 3494 of SEQ ID NO: 1885375
guuaguagagaaugguuau

SEQ ID NO: 2337443 - RNA, 19 nt, Artificial Sequence
  Description of Artificial Sequence: Synthetic oligonucleotide
  Antisense strand to SEQ ID NO: 2337442
auaaccauucucuacuaac

SEQ ID NO: 2337444 - RNA, 19 nt, Artificial Sequence
  Description of Artificial Sequence: Synthetic oligonucleotide
  Sense strand starting at position 3495 of SEQ ID NO: 1885375
uuaguagagaaugguuauu

SEQ ID NO: 2337445 - RNA, 19 nt, Artificial Sequence
  Description of Artificial Sequence: Synthetic oligonucleotide
  Antisense strand to SEQ ID NO: 2337444
aauaaccauucucuacuaa

SEQ ID NO: 2337446 - RNA, 19 nt, Artificial Sequence
  Description of Artificial Sequence: Synthetic oligonucleotide
  Sense strand starting at position 3770 of SEQ ID NO: 1885375
uaaugaagccuguguauga

SEQ ID NO: 2337447 - RNA, 19 nt, Artificial Sequence
  Description of Artificial Sequence: Synthetic oligonucleotide
  Antisense strand to SEQ ID NO: 2337446
ucauacacaggcuucauua

SEQ ID NO: 2337448 - RNA, 19 nt, Artificial Sequence
  Description of Artificial Sequence: Synthetic oligonucleotide
  Sense strand starting at position 3771 of SEQ ID NO: 1885375
aaugaagccuguguaugaa

SEQ ID NO: 2337449 - RNA, 19 nt, Artificial Sequence
  Description of Artificial Sequence: Synthetic oligonucleotide
  Antisense strand to SEQ ID NO: 2337448
uucauacacaggcuucauu

SEQ ID NO: 2337450 - RNA, 19 nt, Artificial Sequence
  Description of Artificial Sequence: Synthetic oligonucleotide
  Sense strand starting at position 3833 of SEQ ID NO: 1885375
ggacuuggcagauauucuc

SEQ ID NO: 2337451 - RNA, 19 nt, Artificial Sequence
  Description of Artificial Sequence: Synthetic oligonucleotide
  Antisense strand to SEQ ID NO: 2337450
gagaauaucugccaagucc

SEQ ID NO: 2337452 - RNA, 19 nt, Artificial Sequence
  Description of Artificial Sequence: Synthetic oligonucleotide
  Sense strand starting at position 3836 of SEQ ID NO: 1885375
cuuggcagauauucucaua

SEQ ID NO: 2337453 - RNA, 19 nt, Artificial Sequence
  Description of Artificial Sequence: Synthetic oligonucleotide
  Antisense strand to SEQ ID NO: 2337452
uaugagaauaucugccaag

SEQ ID NO: 2337454 - RNA, 19 nt, Artificial Sequence
  Description of Artificial Sequence: Synthetic oligonucleotide
  Sense strand starting at position 3866 of SEQ ID NO: 1885375
gagauuucuuuaggacauu

SEQ ID NO: 2337455 - RNA, 19 nt, Artificial Sequence
  Description of Artificial Sequence: Synthetic oligonucleotide
  Antisense strand to SEQ ID NO: 2337454
aauguccuaaagaaaucuc

SEQ ID NO: 2337456 - RNA, 19 nt, Artificial Sequence
  Description of Artificial Sequence: Synthetic oligonucleotide
  Sense strand starting at position 3959 of SEQ ID NO: 1885375
auguauuuauuccuugcua

SEQ ID NO: 2337457 - RNA, 19 nt, Artificial Sequence
  Description of Artificial Sequence: Synthetic oligonucleotide
  Antisense strand to SEQ ID NO: 2337456
uagcaaggaauaaauacau

SEQ ID NO: 2337458 - RNA, 19 nt, Artificial Sequence
  Description of Artificial Sequence: Synthetic oligonucleotide
  Sense strand starting at position 3960 of SEQ ID NO: 1885375
uguauuuauuccuugcuau

SEQ ID NO: 2337459 - RNA, 19 nt, Artificial Sequence
  Description of Artificial Sequence: Synthetic oligonucleotide
  Antisense strand to SEQ ID NO: 2337458
auagcaaggaauaaauaca

SEQ ID NO: 2337460 - RNA, 19 nt, Artificial Sequence
  Description of Artificial Sequence: Synthetic oligonucleotide
  Sense strand starting at position 3961 of SEQ ID NO: 1885375
guauuuauuccuugcuaug

SEQ ID NO: 2337461 - RNA, 19 nt, Artificial Sequence
  Description of Artificial Sequence: Synthetic oligonucleotide
  Antisense strand to SEQ ID NO: 2337460
cauagcaaggaauaaauac

SEQ ID NO: 2337462 - RNA, 19 nt, Artificial Sequence
  Description of Artificial Sequence: Synthetic oligonucleotide
  Sense strand starting at position 113 of SEQ ID NO: 1885376
agagaaggcaguugaacuu

SEQ ID NO: 2337463 - RNA, 19 nt, Artificial Sequence
  Description of Artificial Sequence: Synthetic oligonucleotide
  Antisense strand to SEQ ID NO: 2337462
aaguucaacugccuucucu

SEQ ID NO: 2337464 - RNA, 19 nt, Artificial Sequence
  Description of Artificial Sequence: Synthetic oligonucleotide
  Sense strand starting at position 122 of SEQ ID NO: 1885376
aguugaacuuauccagucu

SEQ ID NO: 2337465 - RNA, 19 nt, Artificial Sequence
  Description of Artificial Sequence: Synthetic oligonucleotide
  Antisense strand to SEQ ID NO: 2337464
agacuggauaaguucaacu

SEQ ID NO: 2337466 - RNA, 19 nt, Artificial Sequence
  Description of Artificial Sequence: Synthetic oligonucleotide
  Sense strand starting at position 283 of SEQ ID NO: 1885376
gaaauaauggccgggaaau

SEQ ID NO: 2337467 - RNA, 19 nt, Artificial Sequence
  Description of Artificial Sequence: Synthetic oligonucleotide
  Antisense strand to SEQ ID NO: 2337466
auuucccggccauuauuuc

SEQ ID NO: 2337468 - RNA, 19 nt, Artificial Sequence
  Description of Artificial Sequence: Synthetic oligonucleotide
  Sense strand starting at position 284 of SEQ ID NO: 1885376
aaauaauggccgggaaaug

SEQ ID NO: 2337469 - RNA, 19 nt, Artificial Sequence
  Description of Artificial Sequence: Synthetic oligonucleotide
  Antisense strand to SEQ ID NO: 2337468
cauuucccggccauuauuu

SEQ ID NO: 2337470 - RNA, 19 nt, Artificial Sequence
  Description of Artificial Sequence: Synthetic oligonucleotide
  Sense strand starting at position 443 of SEQ ID NO: 1885376
agccuuauugcggcggaua

SEQ ID NO: 2337471 - RNA, 19 nt, Artificial Sequence
  Description of Artificial Sequence: Synthetic oligonucleotide
  Antisense strand to SEQ ID NO: 2337470
uauccgccgcaauaaggcu

SEQ ID NO: 2337472 - RNA, 19 nt, Artificial Sequence
  Description of Artificial Sequence: Synthetic oligonucleotide
  Sense strand starting at position 463 of SEQ ID NO: 1885376
ggagaagguuugagugauc

SEQ ID NO: 2337473 - RNA, 19 nt, Artificial Sequence
  Description of Artificial Sequence: Synthetic oligonucleotide
  Antisense strand to SEQ ID NO: 2337472
gaucacucaaaccuucucc

SEQ ID NO: 2337474 - RNA, 19 nt, Artificial Sequence
  Description of Artificial Sequence: Synthetic oligonucleotide
  Sense strand starting at position 468 of SEQ ID NO: 1885376
agguuugagugaucuggau

SEQ ID NO: 2337475 - RNA, 19 nt, Artificial Sequence
  Description of Artificial Sequence: Synthetic oligonucleotide
  Antisense strand to SEQ ID NO: 2337474
auccagaucacucaaaccu

SEQ ID NO: 2337476 - RNA, 19 nt, Artificial Sequence
  Description of Artificial Sequence: Synthetic oligonucleotide
  Sense strand starting at position 470 of SEQ ID NO: 1885376
guuugagugaucuggauac

SEQ ID NO: 2337477 - RNA, 19 nt, Artificial Sequence
  Description of Artificial Sequence: Synthetic oligonucleotide
  Antisense strand to SEQ ID NO: 2337476
guauccagaucacucaaac

SEQ ID NO: 2337478 - RNA, 19 nt, Artificial Sequence
  Description of Artificial Sequence: Synthetic oligonucleotide
  Sense strand starting at position 472 of SEQ ID NO: 1885376
uugagugaucuggauacga

SEQ ID NO: 2337479 - RNA, 19 nt, Artificial Sequence
  Description of Artificial Sequence: Synthetic oligonucleotide
  Antisense strand to SEQ ID NO: 2337478
ucguauccagaucacucaa

SEQ ID NO: 2337480 - RNA, 19 nt, Artificial Sequence
  Description of Artificial Sequence: Synthetic oligonucleotide
  Sense strand starting at position 822 of SEQ ID NO: 1885376
aggagucaaugucuuguuu

SEQ ID NO: 2337481 - RNA, 19 nt, Artificial Sequence
  Description of Artificial Sequence: Synthetic oligonucleotide
  Antisense strand to SEQ ID NO: 2337480
aaacaagacauugacuccu

SEQ ID NO: 2337482 - RNA, 19 nt, Artificial Sequence
  Description of Artificial Sequence: Synthetic oligonucleotide
  Sense strand starting at position 844 of SEQ ID NO: 1885376
acgauaggcugacuuguua

SEQ ID NO: 2337483 - RNA, 19 nt, Artificial Sequence
  Description of Artificial Sequence: Synthetic oligonucleotide
  Antisense strand to SEQ ID NO: 2337482
uaacaagucagccuaucgu

SEQ ID NO: 2337484 - RNA, 19 nt, Artificial Sequence
  Description of Artificial Sequence: Synthetic oligonucleotide
  Sense strand starting at position 1019 of SEQ ID NO: 1885376
acccgugagaccuacuguu

SEQ ID NO: 2337485 - RNA, 19 nt, Artificial Sequence
  Description of Artificial Sequence: Synthetic oligonucleotide
  Antisense strand to SEQ ID NO: 2337484
aacaguaggucucacgggu

SEQ ID NO: 2337486 - RNA, 19 nt, Artificial Sequence
  Description of Artificial Sequence: Synthetic oligonucleotide
  Sense strand starting at position 1121 of SEQ ID NO: 1885376
guacaagaugaaugcuguu

SEQ ID NO: 2337487 - RNA, 19 nt, Artificial Sequence
  Description of Artificial Sequence: Synthetic oligonucleotide
  Antisense strand to SEQ ID NO: 2337486
aacagcauucaucuuguac

SEQ ID NO: 2337488 - RNA, 19 nt, Artificial Sequence
  Description of Artificial Sequence: Synthetic oligonucleotide
  Sense strand starting at position 1134 of SEQ ID NO: 1885376
gcuguuugcaugcugcuaa

SEQ ID NO: 2337489 - RNA, 19 nt, Artificial Sequence
  Description of Artificial Sequence: Synthetic oligonucleotide
  Antisense strand to SEQ ID NO: 2337488
uuagcagcaugcaaacagc

SEQ ID NO: 2337490 - RNA, 19 nt, Artificial Sequence
  Description of Artificial Sequence: Synthetic oligonucleotide
  Sense strand starting at position 1246 of SEQ ID NO: 1885376
cauagagagugauuccuca

SEQ ID NO: 2337491 - RNA, 19 nt, Artificial Sequence
  Description of Artificial Sequence: Synthetic oligonucleotide
  Antisense strand to SEQ ID NO: 2337490
ugaggaaucacucucuaug

SEQ ID NO: 2337492 - RNA, 19 nt, Artificial Sequence
  Description of Artificial Sequence: Synthetic oligonucleotide
  Sense strand starting at position 1250 of SEQ ID NO: 1885376
gagagugauuccucagaug

SEQ ID NO: 2337493 - RNA, 19 nt, Artificial Sequence
  Description of Artificial Sequence: Synthetic oligonucleotide
  Antisense strand to SEQ ID NO: 2337492
caucugaggaaucacucuc

SEQ ID NO: 2337494 - RNA, 19 nt, Artificial Sequence
  Description of Artificial Sequence: Synthetic oligonucleotide
  Sense strand starting at position 1334 of SEQ ID NO: 1885376
auuugugauucaugagacg

SEQ ID NO: 2337495 - RNA, 19 nt, Artificial Sequence
  Description of Artificial Sequence: Synthetic oligonucleotide
  Antisense strand to SEQ ID NO: 2337494
cgucucaugaaucacaaau

SEQ ID NO: 2337496 - RNA, 19 nt, Artificial Sequence
  Description of Artificial Sequence: Synthetic oligonucleotide
  Sense strand starting at position 1385 of SEQ ID NO: 1885376
gcagcauguggugauaaua

SEQ ID NO: 2337497 - RNA, 19 nt, Artificial Sequence
  Description of Artificial Sequence: Synthetic oligonucleotide
  Antisense strand to SEQ ID NO: 2337496
uauuaucaccacaugcugc

SEQ ID NO: 2337498 - RNA, 19 nt, Artificial Sequence
  Description of Artificial Sequence: Synthetic oligonucleotide
  Sense strand starting at position 1635 of SEQ ID NO: 1885376
aggaguugcucucuaugga

SEQ ID NO: 2337499 - RNA, 19 nt, Artificial Sequence
  Description of Artificial Sequence: Synthetic oligonucleotide
  Antisense strand to SEQ ID NO: 2337498
uccauagagagcaacuccu

SEQ ID NO: 2337500 - RNA, 19 nt, Artificial Sequence
  Description of Artificial Sequence: Synthetic oligonucleotide
  Sense strand starting at position 1636 of SEQ ID NO: 1885376
ggaguugcucucuauggau

SEQ ID NO: 2337501 - RNA, 19 nt, Artificial Sequence
  Description of Artificial Sequence: Synthetic oligonucleotide
  Antisense strand to SEQ ID NO: 2337500
auccauagagagcaacucc

SEQ ID NO: 2337502 - RNA, 19 nt, Artificial Sequence
  Description of Artificial Sequence: Synthetic oligonucleotide
  Sense strand starting at position 1638 of SEQ ID NO: 1885376
aguugcucucuauggauga

SEQ ID NO: 2337503 - RNA, 19 nt, Artificial Sequence
  Description of Artificial Sequence: Synthetic oligonucleotide
  Antisense strand to SEQ ID NO: 2337502
ucauccauagagagcaacu

SEQ ID NO: 2337504 - RNA, 19 nt, Artificial Sequence
  Description of Artificial Sequence: Synthetic oligonucleotide
  Sense strand starting at position 1693 of SEQ ID NO: 1885376
uggugaagauacucugaac

SEQ ID NO: 2337505 - RNA, 19 nt, Artificial Sequence
  Description of Artificial Sequence: Synthetic oligonucleotide
  Antisense strand to SEQ ID NO: 2337504
guucagaguaucuucacca

SEQ ID NO: 2337506 - RNA, 19 nt, Artificial Sequence
  Description of Artificial Sequence: Synthetic oligonucleotide
  Sense strand starting at position 1696 of SEQ ID NO: 1885376
ugaagauacucugaacacu

SEQ ID NO: 2337507 - RNA, 19 nt, Artificial Sequence
  Description of Artificial Sequence: Synthetic oligonucleotide
  Antisense strand to SEQ ID NO: 2337506
aguguucagaguaucuuca

SEQ ID NO: 2337508 - RNA, 19 nt, Artificial Sequence
  Description of Artificial Sequence: Synthetic oligonucleotide
  Sense strand starting at position 1990 of SEQ ID NO: 1885376
uugcuaaaggcuuagagga

SEQ ID NO: 2337509 - RNA, 19 nt, Artificial Sequence
  Description of Artificial Sequence: Synthetic oligonucleotide
  Antisense strand to SEQ ID NO: 2337508
uccucuaagccuuuagcaa

SEQ ID NO: 2337510 - RNA, 19 nt, Artificial Sequence
  Description of Artificial Sequence: Synthetic oligonucleotide
  Sense strand starting at position 2260 of SEQ ID NO: 1885376
ucucgaacuccugaaagua

SEQ ID NO: 2337511 - RNA, 19 nt, Artificial Sequence
  Description of Artificial Sequence: Synthetic oligonucleotide
  Antisense strand to SEQ ID NO: 2337510
uacuuucaggaguucgaga

SEQ ID NO: 2337512 - RNA, 19 nt, Artificial Sequence
  Description of Artificial Sequence: Synthetic oligonucleotide
  Sense strand starting at position 2400 of SEQ ID NO: 1885376
ugugauauuugcuuuaucu

SEQ ID NO: 2337513 - RNA, 19 nt, Artificial Sequence
  Description of Artificial Sequence: Synthetic oligonucleotide
  Antisense strand to SEQ ID NO: 2337512
agauaaagcaaauaucaca

SEQ ID NO: 2337514 - RNA, 19 nt, Artificial Sequence
  Description of Artificial Sequence: Synthetic oligonucleotide
  Sense strand starting at position 2451 of SEQ ID NO: 1885376
aaggcaugccuguagguaa

SEQ ID NO: 2337515 - RNA, 19 nt, Artificial Sequence
  Description of Artificial Sequence: Synthetic oligonucleotide
  Antisense strand to SEQ ID NO: 2337514
uuaccuacaggcaugccuu

SEQ ID NO: 2337516 - RNA, 19 nt, Artificial Sequence
  Description of Artificial Sequence: Synthetic oligonucleotide
  Sense strand starting at position 2464 of SEQ ID NO: 1885376
agguaaacaugaguccaua

SEQ ID NO: 2337517 - RNA, 19 nt, Artificial Sequence
  Description of Artificial Sequence: Synthetic oligonucleotide
  Antisense strand to SEQ ID NO: 2337516
uauggacucauguuuaccu

SEQ ID NO: 2337518 - RNA, 19 nt, Artificial Sequence
  Description of Artificial Sequence: Synthetic oligonucleotide
  Sense strand starting at position 2666 of SEQ ID NO: 1885376
gucagcacugccugggaua

SEQ ID NO: 2337519 - RNA, 19 nt, Artificial Sequence
  Description of Artificial Sequence: Synthetic oligonucleotide
  Antisense strand to SEQ ID NO: 2337518
uaucccaggcagugcugac

SEQ ID NO: 2337520 - RNA, 19 nt, Artificial Sequence
  Description of Artificial Sequence: Synthetic oligonucleotide
  Sense strand starting at position 2719 of SEQ ID NO: 1885376
ugaugagaaaggugcuuga

SEQ ID NO: 2337521 - RNA, 19 nt, Artificial Sequence
  Description of Artificial Sequence: Synthetic oligonucleotide
  Antisense strand to SEQ ID NO: 2337520
ucaagcaccuuucucauca

SEQ ID NO: 2337522 - RNA, 19 nt, Artificial Sequence
  Description of Artificial Sequence: Synthetic oligonucleotide
  Sense strand starting at position 2722 of SEQ ID NO: 1885376
ugagaaaggugcuugagaa

SEQ ID NO: 2337523 - RNA, 19 nt, Artificial Sequence
  Description of Artificial Sequence: Synthetic oligonucleotide
  Antisense strand to SEQ ID NO: 2337522
uucucaagcaccuuucuca

SEQ ID NO: 2337524 - RNA, 19 nt, Artificial Sequence
  Description of Artificial Sequence: Synthetic oligonucleotide
  Sense strand starting at position 2980 of SEQ ID NO: 1885376
aauguugguuucuuaguca

SEQ ID NO: 2337525 - RNA, 19 nt, Artificial Sequence
  Description of Artificial Sequence: Synthetic oligonucleotide
  Antisense strand to SEQ ID NO: 2337524
ugacuaagaaaccaacauu

SEQ ID NO: 2337526 - RNA, 19 nt, Artificial Sequence
  Description of Artificial Sequence: Synthetic oligonucleotide
  Sense strand starting at position 2983 of SEQ ID NO: 1885376
guugguuucuuagucauga

SEQ ID NO: 2337527 - RNA, 19 nt, Artificial Sequence
  Description of Artificial Sequence: Synthetic oligonucleotide
  Antisense strand to SEQ ID NO: 2337526
ucaugacuaagaaaccaac

SEQ ID NO: 2337528 - RNA, 19 nt, Artificial Sequence
  Description of Artificial Sequence: Synthetic oligonucleotide
  Sense strand starting at position 2984 of SEQ ID NO: 1885376
uugguuucuuagucaugac

SEQ ID NO: 2337529 - RNA, 19 nt, Artificial Sequence
  Description of Artificial Sequence: Synthetic oligonucleotide
  Antisense strand to SEQ ID NO: 2337528
gucaugacuaagaaaccaa

SEQ ID NO: 2337530 - RNA, 19 nt, Artificial Sequence
  Description of Artificial Sequence: Synthetic oligonucleotide
  Sense strand starting at position 2999 of SEQ ID NO: 1885376
ugacaaauguaccauggga

SEQ ID NO: 2337531 - RNA, 19 nt, Artificial Sequence
  Description of Artificial Sequence: Synthetic oligonucleotide
  Antisense strand to SEQ ID NO: 2337530
ucccaugguacauuuguca

SEQ ID NO: 2337532 - RNA, 19 nt, Artificial Sequence
  Description of Artificial Sequence: Synthetic oligonucleotide
  Sense strand starting at position 3069 of SEQ ID NO: 1885376
ucuguacuaucucugccau

SEQ ID NO: 2337533 - RNA, 19 nt, Artificial Sequence
  Description of Artificial Sequence: Synthetic oligonucleotide
  Antisense strand to SEQ ID NO: 2337532
auggcagagauaguacaga

SEQ ID NO: 2337534 - RNA, 19 nt, Artificial Sequence
  Description of Artificial Sequence: Synthetic oligonucleotide
  Sense strand starting at position 3070 of SEQ ID NO: 1885376
cuguacuaucucugccauu

SEQ ID NO: 2337535 - RNA, 19 nt, Artificial Sequence
  Description of Artificial Sequence: Synthetic oligonucleotide
  Antisense strand to SEQ ID NO: 2337534
aauggcagagauaguacag

SEQ ID NO: 2337536 - RNA, 19 nt, Artificial Sequence
  Description of Artificial Sequence: Synthetic oligonucleotide
  Sense strand starting at position 3735 of SEQ ID NO: 1885376
gucagauuauacuauuuag

SEQ ID NO: 2337537 - RNA, 19 nt, Artificial Sequence
  Description of Artificial Sequence: Synthetic oligonucleotide
  Antisense strand to SEQ ID NO: 2337536
cuaaauaguauaaucugac

SEQ ID NO: 2337538 - RNA, 19 nt, Artificial Sequence
  Description of Artificial Sequence: Synthetic oligonucleotide
  Sense strand starting at position 3899 of SEQ ID NO: 1885376
uugcaaaggaagugucaga

SEQ ID NO: 2337539 - RNA, 19 nt, Artificial Sequence
  Description of Artificial Sequence: Synthetic oligonucleotide
  Antisense strand to SEQ ID NO: 2337538
ucugacacuuccuuugcaa

SEQ ID NO: 2337540 - RNA, 19 nt, Artificial Sequence
  Description of Artificial Sequence: Synthetic oligonucleotide
  Sense strand starting at position 3904 of SEQ ID NO: 1885376
aaggaagugucagaagacu

SEQ ID NO: 2337541 - RNA, 19 nt, Artificial Sequence
  Description of Artificial Sequence: Synthetic oligonucleotide
  Antisense strand to SEQ ID NO: 2337540
agucuucugacacuuccuu

SEQ ID NO: 2337542 - RNA, 19 nt, Artificial Sequence
  Description of Artificial Sequence: Synthetic oligonucleotide
  Sense strand starting at position 68 of SEQ ID NO: 1885377
aauguuaaucuugggucaa

SEQ ID NO: 2337543 - RNA, 19 nt, Artificial Sequence
  Description of Artificial Sequence: Synthetic oligonucleotide
  Antisense strand to SEQ ID NO: 2337542
uugacccaagauuaacauu

SEQ ID NO: 2337544 - RNA, 19 nt, Artificial Sequence
  Description of Artificial Sequence: Synthetic oligonucleotide
  Sense strand starting at position 115 of SEQ ID NO: 1885377
cauuaaugagagcacuagu

SEQ ID NO: 2337545 - RNA, 19 nt, Artificial Sequence
  Description of Artificial Sequence: Synthetic oligonucleotide
  Antisense strand to SEQ ID NO: 2337544
acuagugcucucauuaaug

SEQ ID NO: 2337546 - RNA, 19 nt, Artificial Sequence
  Description of Artificial Sequence: Synthetic oligonucleotide
  Sense strand starting at position 123 of SEQ ID NO: 1885377
agagcacuaguaugacaau

SEQ ID NO: 2337547 - RNA, 19 nt, Artificial Sequence
  Description of Artificial Sequence: Synthetic oligonucleotide
  Antisense strand to SEQ ID NO: 2337546
auugucauacuagugcucu

SEQ ID NO: 2337548 - RNA, 19 nt, Artificial Sequence
  Description of Artificial Sequence: Synthetic oligonucleotide
  Sense strand starting at position 254 of SEQ ID NO: 1885377
ugucuuauugaacaauagu

SEQ ID NO: 2337549 - RNA, 19 nt, Artificial Sequence
  Description of Artificial Sequence: Synthetic oligonucleotide
  Antisense strand to SEQ ID NO: 2337548
acuauuguucaauaagaca

SEQ ID NO: 2337550 - RNA, 19 nt, Artificial Sequence
  Description of Artificial Sequence: Synthetic oligonucleotide
  Sense strand starting at position 286 of SEQ ID NO: 1885377
augucaguucuccaccaau

SEQ ID NO: 2337551 - RNA, 19 nt, Artificial Sequence
  Description of Artificial Sequence: Synthetic oligonucleotide
  Antisense strand to SEQ ID NO: 2337550
auugguggagaacugacau

SEQ ID NO: 2337552 - RNA, 19 nt, Artificial Sequence
  Description of Artificial Sequence: Synthetic oligonucleotide
  Sense strand starting at position 532 of SEQ ID NO: 1885377
aauugaguuugauuaaguc

SEQ ID NO: 2337553 - RNA, 19 nt, Artificial Sequence
  Description of Artificial Sequence: Synthetic oligonucleotide
  Antisense strand to SEQ ID NO: 2337552
gacuuaaucaaacucaauu

SEQ ID NO: 2337554 - RNA, 19 nt, Artificial Sequence
  Description of Artificial Sequence: Synthetic oligonucleotide
  Sense strand starting at position 536 of SEQ ID NO: 1885377
gaguuugauuaagucauau

SEQ ID NO: 2337555 - RNA, 19 nt, Artificial Sequence
  Description of Artificial Sequence: Synthetic oligonucleotide
  Antisense strand to SEQ ID NO: 2337554
auaugacuuaaucaaacuc

SEQ ID NO: 2337556 - RNA, 19 nt, Artificial Sequence
  Description of Artificial Sequence: Synthetic oligonucleotide
  Sense strand starting at position 1053 of SEQ ID NO: 1885377
gguaccauuuguccaagca

SEQ ID NO: 2337557 - RNA, 19 nt, Artificial Sequence
  Description of Artificial Sequence: Synthetic oligonucleotide
  Antisense strand to SEQ ID NO: 2337556
ugcuuggacaaaugguacc

SEQ ID NO: 2337558 - RNA, 19 nt, Artificial Sequence
  Description of Artificial Sequence: Synthetic oligonucleotide
  Sense strand starting at position 1238 of SEQ ID NO: 1885377
ugcuuuggaggguauuaca

SEQ ID NO: 2337559 - RNA, 19 nt, Artificial Sequence
  Description of Artificial Sequence: Synthetic oligonucleotide
  Antisense strand to SEQ ID NO: 2337558
uguaauacccuccaaagca

SEQ ID NO: 2337560 - RNA, 19 nt, Artificial Sequence
  Description of Artificial Sequence: Synthetic oligonucleotide
  Sense strand starting at position 1592 of SEQ ID NO: 1885377
ggaccugggacuuguaauu

SEQ ID NO: 2337561 - RNA, 19 nt, Artificial Sequence
  Description of Artificial Sequence: Synthetic oligonucleotide
  Antisense strand to SEQ ID NO: 2337560
aauuacaagucccaggucc

SEQ ID NO: 2337562 - RNA, 19 nt, Artificial Sequence
  Description of Artificial Sequence: Synthetic oligonucleotide
  Sense strand starting at position 1653 of SEQ ID NO: 1885377
agguuagaacuuuaccuuu

SEQ ID NO: 2337563 - RNA, 19 nt, Artificial Sequence
  Description of Artificial Sequence: Synthetic oligonucleotide
  Antisense strand to SEQ ID NO: 2337562
aaagguaaaguucuaaccu

SEQ ID NO: 2337564 - RNA, 19 nt, Artificial Sequence
  Description of Artificial Sequence: Synthetic oligonucleotide
  Sense strand starting at position 1666 of SEQ ID NO: 1885377
accuuuauguuucuggaau

SEQ ID NO: 2337565 - RNA, 19 nt, Artificial Sequence
  Description of Artificial Sequence: Synthetic oligonucleotide
  Antisense strand to SEQ ID NO: 2337564
auuccagaaacauaaaggu

SEQ ID NO: 2337566 - RNA, 19 nt, Artificial Sequence
  Description of Artificial Sequence: Synthetic oligonucleotide
  Sense strand starting at position 1679 of SEQ ID NO: 1885377
uggaaucccugaucaccau

SEQ ID NO: 2337567 - RNA, 19 nt, Artificial Sequence
  Description of Artificial Sequence: Synthetic oligonucleotide
  Antisense strand to SEQ ID NO: 2337566
auggugaucagggauucca

SEQ ID NO: 2337568 - RNA, 19 nt, Artificial Sequence
  Description of Artificial Sequence: Synthetic oligonucleotide
  Sense strand starting at position 1740 of SEQ ID NO: 1885377
aucugagucccugaagucu

SEQ ID NO: 2337569 - RNA, 19 nt, Artificial Sequence
  Description of Artificial Sequence: Synthetic oligonucleotide
  Antisense strand to SEQ ID NO: 2337568
agacuucagggacucagau

SEQ ID NO: 2337570 - RNA, 19 nt, Artificial Sequence
  Description of Artificial Sequence: Synthetic oligonucleotide
  Sense strand starting at position 1751 of SEQ ID NO: 1885377
ugaagucugaagcaguaua

SEQ ID NO: 2337571 - RNA, 19 nt, Artificial Sequence
  Description of Artificial Sequence: Synthetic oligonucleotide
  Antisense strand to SEQ ID NO: 2337570
uauacugcuucagacuuca

SEQ ID NO: 2337572 - RNA, 19 nt, Artificial Sequence
  Description of Artificial Sequence: Synthetic oligonucleotide
  Sense strand starting at position 1898 of SEQ ID NO: 1885377
agguaucuagcugaugauu

SEQ ID NO: 2337573 - RNA, 19 nt, Artificial Sequence
  Description of Artificial Sequence: Synthetic oligonucleotide
  Antisense strand to SEQ ID NO: 2337572
aaucaucagcuagauaccu

SEQ ID NO: 2337574 - RNA, 19 nt, Artificial Sequence
  Description of Artificial Sequence: Synthetic oligonucleotide
  Sense strand starting at position 1987 of SEQ ID NO: 1885377
ugcuaauaugcauaaagca

SEQ ID NO: 2337575 - RNA, 19 nt, Artificial Sequence
  Description of Artificial Sequence: Synthetic oligonucleotide
  Antisense strand to SEQ ID NO: 2337574
ugcuuuaugcauauuagca

SEQ ID NO: 2337576 - RNA, 19 nt, Artificial Sequence
  Description of Artificial Sequence: Synthetic oligonucleotide
  Sense strand starting at position 2010 of SEQ ID NO: 1885377
ucgcaaaugguauaggauu

SEQ ID NO: 2337577 - RNA, 19 nt, Artificial Sequence
  Description of Artificial Sequence: Synthetic oligonucleotide
  Antisense strand to SEQ ID NO: 2337576
aauccuauaccauuugcga

SEQ ID NO: 2337578 - RNA, 19 nt, Artificial Sequence
  Description of Artificial Sequence: Synthetic oligonucleotide
  Sense strand starting at position 2055 of SEQ ID NO: 1885377
augcuuaguccacagugaa

SEQ ID NO: 2337579 - RNA, 19 nt, Artificial Sequence
  Description of Artificial Sequence: Synthetic oligonucleotide
  Antisense strand to SEQ ID NO: 2337578
uucacuguggacuaagcau

SEQ ID NO: 2337580 - RNA, 19 nt, Artificial Sequence
  Description of Artificial Sequence: Synthetic oligonucleotide
  Sense strand starting at position 2058 of SEQ ID NO: 1885377
cuuaguccacagugaaaga

SEQ ID NO: 2337581 - RNA, 19 nt, Artificial Sequence
  Description of Artificial Sequence: Synthetic oligonucleotide
  Antisense strand to SEQ ID NO: 2337580
ucuuucacuguggacuaag

SEQ ID NO: 2337582 - RNA, 19 nt, Artificial Sequence
  Description of Artificial Sequence: Synthetic oligonucleotide
  Sense strand starting at position 2151 of SEQ ID NO: 1885377
gacaccauguucuugagaa

SEQ ID NO: 2337583 - RNA, 19 nt, Artificial Sequence
  Description of Artificial Sequence: Synthetic oligonucleotide
  Antisense strand to SEQ ID NO: 2337582
uucucaagaacaugguguc

SEQ ID NO: 2337584 - RNA, 19 nt, Artificial Sequence
  Description of Artificial Sequence: Synthetic oligonucleotide
  Sense strand starting at position 2316 of SEQ ID NO: 1885377
agcagaagucuggaaaguc

SEQ ID NO: 2337585 - RNA, 19 nt, Artificial Sequence
  Description of Artificial Sequence: Synthetic oligonucleotide
  Antisense strand to SEQ ID NO: 2337584
gacuuuccagacuucugcu

SEQ ID NO: 2337586 - RNA, 19 nt, Artificial Sequence
  Description of Artificial Sequence: Synthetic oligonucleotide
  Sense strand starting at position 2583 of SEQ ID NO: 1885377
auuuguuagucauugguuu

SEQ ID NO: 2337587 - RNA, 19 nt, Artificial Sequence
  Description of Artificial Sequence: Synthetic oligonucleotide
  Antisense strand to SEQ ID NO: 2337586
aaaccaaugacuaacaaau

SEQ ID NO: 2337588 - RNA, 19 nt, Artificial Sequence
  Description of Artificial Sequence: Synthetic oligonucleotide
  Sense strand starting at position 2785 of SEQ ID NO: 1885377
gcaaucguauuucugugau

SEQ ID NO: 2337589 - RNA, 19 nt, Artificial Sequence
  Description of Artificial Sequence: Synthetic oligonucleotide
  Antisense strand to SEQ ID NO: 2337588
aucacagaaauacgauugc

SEQ ID NO: 2337590 - RNA, 19 nt, Artificial Sequence
  Description of Artificial Sequence: Synthetic oligonucleotide
  Sense strand starting at position 2787 of SEQ ID NO: 1885377
aaucguauuucugugauuc

SEQ ID NO: 2337591 - RNA, 19 nt, Artificial Sequence
  Description of Artificial Sequence: Synthetic oligonucleotide
  Antisense strand to SEQ ID NO: 2337590
gaaucacagaaauacgauu

SEQ ID NO: 2337592 - RNA, 19 nt, Artificial Sequence
  Description of Artificial Sequence: Synthetic oligonucleotide
  Sense strand starting at position 2788 of SEQ ID NO: 1885377
aucguauuucugugauucu

SEQ ID NO: 2337593 - RNA, 19 nt, Artificial Sequence
  Description of Artificial Sequence: Synthetic oligonucleotide
  Antisense strand to SEQ ID NO: 2337592
agaaucacagaaauacgau

SEQ ID NO: 2337594 - RNA, 19 nt, Artificial Sequence
  Description of Artificial Sequence: Synthetic oligonucleotide
  Sense strand starting at position 2845 of SEQ ID NO: 1885377
guaucagguuauuuauugu

SEQ ID NO: 2337595 - RNA, 19 nt, Artificial Sequence
  Description of Artificial Sequence: Synthetic oligonucleotide
  Antisense strand to SEQ ID NO: 2337594
acaauaaauaaccugauac

SEQ ID NO: 2337596 - RNA, 19 nt, Artificial Sequence
  Description of Artificial Sequence: Synthetic oligonucleotide
  Sense strand starting at position 2964 of SEQ ID NO: 1885377
uaaggaagcucucuaugua

SEQ ID NO: 2337597 - RNA, 19 nt, Artificial Sequence
  Description of Artificial Sequence: Synthetic oligonucleotide
  Antisense strand to SEQ ID NO: 2337596
uacauagagagcuuccuua

SEQ ID NO: 2337598 - RNA, 19 nt, Artificial Sequence
  Description of Artificial Sequence: Synthetic oligonucleotide
  Sense strand starting at position 3000 of SEQ ID NO: 1885377
agcuuuaggacauauggca

SEQ ID NO: 2337599 - RNA, 19 nt, Artificial Sequence
  Description of Artificial Sequence: Synthetic oligonucleotide
  Antisense strand to SEQ ID NO: 2337598
ugccauauguccuaaagcu

SEQ ID NO: 2337600 - RNA, 19 nt, Artificial Sequence
  Description of Artificial Sequence: Synthetic oligonucleotide
  Sense strand starting at position 3154 of SEQ ID NO: 1885377
agggauaucaucggagggu

SEQ ID NO: 2337601 - RNA, 19 nt, Artificial Sequence
  Description of Artificial Sequence: Synthetic oligonucleotide
  Antisense strand to SEQ ID NO: 2337600
acccuccgaugauaucccu

SEQ ID NO: 2337602 - RNA, 19 nt, Artificial Sequence
  Description of Artificial Sequence: Synthetic oligonucleotide
  Sense strand starting at position 3190 of SEQ ID NO: 1885377
gagugaacgcaagacuucu

SEQ ID NO: 2337603 - RNA, 19 nt, Artificial Sequence
  Description of Artificial Sequence: Synthetic oligonucleotide
  Antisense strand to SEQ ID NO: 2337602
agaagucuugcguucacuc

SEQ ID NO: 2337604 - RNA, 19 nt, Artificial Sequence
  Description of Artificial Sequence: Synthetic oligonucleotide
  Sense strand starting at position 3198 of SEQ ID NO: 1885377
gcaagacuucucugaacau

SEQ ID NO: 2337605 - RNA, 19 nt, Artificial Sequence
  Description of Artificial Sequence: Synthetic oligonucleotide
  Antisense strand to SEQ ID NO: 2337604
auguucagagaagucuugc

SEQ ID NO: 2337606 - RNA, 19 nt, Artificial Sequence
  Description of Artificial Sequence: Synthetic oligonucleotide
  Sense strand starting at position 3413 of SEQ ID NO: 1885377
gguggagcuggugagaaau

SEQ ID NO: 2337607 - RNA, 19 nt, Artificial Sequence
  Description of Artificial Sequence: Synthetic oligonucleotide
  Antisense strand to SEQ ID NO: 2337606
auuucucaccagcuccacc

SEQ ID NO: 2337608 - RNA, 19 nt, Artificial Sequence
  Description of Artificial Sequence: Synthetic oligonucleotide
  Sense strand starting at position 3423 of SEQ ID NO: 1885377
gugagaaauggugagcuca

SEQ ID NO: 2337609 - RNA, 19 nt, Artificial Sequence
  Description of Artificial Sequence: Synthetic oligonucleotide
  Antisense strand to SEQ ID NO: 2337608
ugagcucaccauuucucac

SEQ ID NO: 2337610 - RNA, 19 nt, Artificial Sequence
  Description of Artificial Sequence: Synthetic oligonucleotide
  Sense strand starting at position 3425 of SEQ ID NO: 1885377
gagaaauggugagcucaag

SEQ ID NO: 2337611 - RNA, 19 nt, Artificial Sequence
  Description of Artificial Sequence: Synthetic oligonucleotide
  Antisense strand to SEQ ID NO: 2337610
cuugagcucaccauuucuc

SEQ ID NO: 2337612 - RNA, 19 nt, Artificial Sequence
  Description of Artificial Sequence: Synthetic oligonucleotide
  Sense strand starting at position 3469 of SEQ ID NO: 1885377
guggauauaguguaugaga

SEQ ID NO: 2337613 - RNA, 19 nt, Artificial Sequence
  Description of Artificial Sequence: Synthetic oligonucleotide
  Antisense strand to SEQ ID NO: 2337612
ucucauacacuauauccac

SEQ ID NO: 2337614 - RNA, 19 nt, Artificial Sequence
  Description of Artificial Sequence: Synthetic oligonucleotide
  Sense strand starting at position 3471 of SEQ ID NO: 1885377
ggauauaguguaugagaga

SEQ ID NO: 2337615 - RNA, 19 nt, Artificial Sequence
  Description of Artificial Sequence: Synthetic oligonucleotide
  Antisense strand to SEQ ID NO: 2337614
ucucucauacacuauaucc

SEQ ID NO: 2337616 - RNA, 19 nt, Artificial Sequence
  Description of Artificial Sequence: Synthetic oligonucleotide
  Sense strand starting at position 3629 of SEQ ID NO: 1885377
gccuguuaggugucgaagu

SEQ ID NO: 2337617 - RNA, 19 nt, Artificial Sequence
  Description of Artificial Sequence: Synthetic oligonucleotide
  Antisense strand to SEQ ID NO: 2337616
acuucgacaccuaacaggc

SEQ ID NO: 2337618 - RNA, 19 nt, Artificial Sequence
  Description of Artificial Sequence: Synthetic oligonucleotide
  Sense strand starting at position 3636 of SEQ ID NO: 1885377
aggugucgaagugaacaua

SEQ ID NO: 2337619 - RNA, 19 nt, Artificial Sequence
  Description of Artificial Sequence: Synthetic oligonucleotide
  Antisense strand to SEQ ID NO: 2337618
uauguucacuucgacaccu

SEQ ID NO: 2337620 - RNA, 19 nt, Artificial Sequence
  Description of Artificial Sequence: Synthetic oligonucleotide
  Sense strand starting at position 3819 of SEQ ID NO: 1885377
uaaaguggagaaugucauu

SEQ ID NO: 2337621 - RNA, 19 nt, Artificial Sequence
  Description of Artificial Sequence: Synthetic oligonucleotide
  Antisense strand to SEQ ID NO: 2337620
aaugacauucuccacuuua

SEQ ID NO: 2337622 - RNA, 19 nt, Artificial Sequence
  Description of Artificial Sequence: Synthetic oligonucleotide
  Sense strand starting at position 126 of SEQ ID NO: 1885378
guaagcuuccuugauaacu

SEQ ID NO: 2337623 - RNA, 19 nt, Artificial Sequence
  Description of Artificial Sequence: Synthetic oligonucleotide
  Antisense strand to SEQ ID NO: 2337622
aguuaucaaggaagcuuac

SEQ ID NO: 2337624 - RNA, 19 nt, Artificial Sequence
  Description of Artificial Sequence: Synthetic oligonucleotide
  Sense strand starting at position 235 of SEQ ID NO: 1885378
aggcuuaguggauaucaac

SEQ ID NO: 2337625 - RNA, 19 nt, Artificial Sequence
  Description of Artificial Sequence: Synthetic oligonucleotide
  Antisense strand to SEQ ID NO: 2337624
guugauauccacuaagccu

SEQ ID NO: 2337626 - RNA, 19 nt, Artificial Sequence
  Description of Artificial Sequence: Synthetic oligonucleotide
  Sense strand starting at position 261 of SEQ ID NO: 1885378
ucaugaccuuguuuauaua

SEQ ID NO: 2337627 - RNA, 19 nt, Artificial Sequence
  Description of Artificial Sequence: Synthetic oligonucleotide
  Antisense strand to SEQ ID NO: 2337626
uauauaaacaaggucauga

SEQ ID NO: 2337628 - RNA, 19 nt, Artificial Sequence
  Description of Artificial Sequence: Synthetic oligonucleotide
  Sense strand starting at position 320 of SEQ ID NO: 1885378
guggaaagguguuccagga

SEQ ID NO: 2337629 - RNA, 19 nt, Artificial Sequence
  Description of Artificial Sequence: Synthetic oligonucleotide
  Antisense strand to SEQ ID NO: 2337628
uccuggaacaccuuuccac

SEQ ID NO: 2337630 - RNA, 19 nt, Artificial Sequence
  Description of Artificial Sequence: Synthetic oligonucleotide
  Sense strand starting at position 324 of SEQ ID NO: 1885378
aaagguguuccaggaccua

SEQ ID NO: 2337631 - RNA, 19 nt, Artificial Sequence
  Description of Artificial Sequence: Synthetic oligonucleotide
  Antisense strand to SEQ ID NO: 2337630
uagguccuggaacaccuuu

SEQ ID NO: 2337632 - RNA, 19 nt, Artificial Sequence
  Description of Artificial Sequence: Synthetic oligonucleotide
  Sense strand starting at position 472 of SEQ ID NO: 1885378
aucaguagugaccauaagu

SEQ ID NO: 2337633 - RNA, 19 nt, Artificial Sequence
  Description of Artificial Sequence: Synthetic oligonucleotide
  Antisense strand to SEQ ID NO: 2337632
acuuauggucacuacugau

SEQ ID NO: 2337634 - RNA, 19 nt, Artificial Sequence
  Description of Artificial Sequence: Synthetic oligonucleotide
  Sense strand starting at position 548 of SEQ ID NO: 1885378
caguuucuacuggauaugu

SEQ ID NO: 2337635 - RNA, 19 nt, Artificial Sequence
  Description of Artificial Sequence: Synthetic oligonucleotide
  Antisense strand to SEQ ID NO: 2337634
acauauccaguagaaacug

SEQ ID NO: 2337636 - RNA, 19 nt, Artificial Sequence
  Description of Artificial Sequence: Synthetic oligonucleotide
  Sense strand starting at position 557 of SEQ ID NO: 1885378
cuggauaugugucuaaauc

SEQ ID NO: 2337637 - RNA, 19 nt, Artificial Sequence
  Description of Artificial Sequence: Synthetic oligonucleotide
  Antisense strand to SEQ ID NO: 2337636
gauuuagacacauauccag

SEQ ID NO: 2337638 - RNA, 19 nt, Artificial Sequence
  Description of Artificial Sequence: Synthetic oligonucleotide
  Sense strand starting at position 558 of SEQ ID NO: 1885378
uggauaugugucuaaauca

SEQ ID NO: 2337639 - RNA, 19 nt, Artificial Sequence
  Description of Artificial Sequence: Synthetic oligonucleotide
  Antisense strand to SEQ ID NO: 2337638
ugauuuagacacauaucca

SEQ ID NO: 2337640 - RNA, 19 nt, Artificial Sequence
  Description of Artificial Sequence: Synthetic oligonucleotide
  Sense strand starting at position 589 of SEQ ID NO: 1885378
uuguuagcugccucaguua

SEQ ID NO: 2337641 - RNA, 19 nt, Artificial Sequence
  Description of Artificial Sequence: Synthetic oligonucleotide
  Antisense strand to SEQ ID NO: 2337640
uaacugaggcagcuaacaa

SEQ ID NO: 2337642 - RNA, 19 nt, Artificial Sequence
  Description of Artificial Sequence: Synthetic oligonucleotide
  Sense strand starting at position 699 of SEQ ID NO: 1885378
ugagauugcccacaguaua

SEQ ID NO: 2337643 - RNA, 19 nt, Artificial Sequence
  Description of Artificial Sequence: Synthetic oligonucleotide
  Antisense strand to SEQ ID NO: 2337642
uauacugugggcaaucuca

SEQ ID NO: 2337644 - RNA, 19 nt, Artificial Sequence
  Description of Artificial Sequence: Synthetic oligonucleotide
  Sense strand starting at position 749 of SEQ ID NO: 1885378
augguaaaugucuauugca

SEQ ID NO: 2337645 - RNA, 19 nt, Artificial Sequence
  Description of Artificial Sequence: Synthetic oligonucleotide
  Antisense strand to SEQ ID NO: 2337644
ugcaauagacauuuaccau

SEQ ID NO: 2337646 - RNA, 19 nt, Artificial Sequence
  Description of Artificial Sequence: Synthetic oligonucleotide
  Sense strand starting at position 859 of SEQ ID NO: 1885378
gauucugauuuacgauuua

SEQ ID NO: 2337647 - RNA, 19 nt, Artificial Sequence
  Description of Artificial Sequence: Synthetic oligonucleotide
  Antisense strand to SEQ ID NO: 2337646
uaaaucguaaaucagaauc

SEQ ID NO: 2337648 - RNA, 19 nt, Artificial Sequence
  Description of Artificial Sequence: Synthetic oligonucleotide
  Sense strand starting at position 1108 of SEQ ID NO: 1885378
ggaugauagaugugauagu

SEQ ID NO: 2337649 - RNA, 19 nt, Artificial Sequence
  Description of Artificial Sequence: Synthetic oligonucleotide
  Antisense strand to SEQ ID NO: 2337648
acuaucacaucuaucaucc

SEQ ID NO: 2337650 - RNA, 19 nt, Artificial Sequence
  Description of Artificial Sequence: Synthetic oligonucleotide
  Sense strand starting at position 1298 of SEQ ID NO: 1885378
agaggcuugaguugagaau

SEQ ID NO: 2337651 - RNA, 19 nt, Artificial Sequence
  Description of Artificial Sequence: Synthetic oligonucleotide
  Antisense strand to SEQ ID NO: 2337650
auucucaacucaagccucu

SEQ ID NO: 2337652 - RNA, 19 nt, Artificial Sequence
  Description of Artificial Sequence: Synthetic oligonucleotide
  Sense strand starting at position 1299 of SEQ ID NO: 1885378
gaggcuugaguugagaauc

SEQ ID NO: 2337653 - RNA, 19 nt, Artificial Sequence
  Description of Artificial Sequence: Synthetic oligonucleotide
  Antisense strand to SEQ ID NO: 2337652
gauucucaacucaagccuc

SEQ ID NO: 2337654 - RNA, 19 nt, Artificial Sequence
  Description of Artificial Sequence: Synthetic oligonucleotide
  Sense strand starting at position 1535 of SEQ ID NO: 1885378
ccauguaaagcauagcaua

SEQ ID NO: 2337655 - RNA, 19 nt, Artificial Sequence
  Description of Artificial Sequence: Synthetic oligonucleotide
  Antisense strand to SEQ ID NO: 2337654
uaugcuaugcuuuacaugg

SEQ ID NO: 2337656 - RNA, 19 nt, Artificial Sequence
  Description of Artificial Sequence: Synthetic oligonucleotide
  Sense strand starting at position 1547 of SEQ ID NO: 1885378
uagcauagaucucugagau

SEQ ID NO: 2337657 - RNA, 19 nt, Artificial Sequence
  Description of Artificial Sequence: Synthetic oligonucleotide
  Antisense strand to SEQ ID NO: 2337656
aucucagagaucuaugcua

SEQ ID NO: 2337658 - RNA, 19 nt, Artificial Sequence
  Description of Artificial Sequence: Synthetic oligonucleotide
  Sense strand starting at position 1548 of SEQ ID NO: 1885378
agcauagaucucugagauu

SEQ ID NO: 2337659 - RNA, 19 nt, Artificial Sequence
  Description of Artificial Sequence: Synthetic oligonucleotide
  Antisense strand to SEQ ID NO: 2337658
aaucucagagaucuaugcu

SEQ ID NO: 2337660 - RNA, 19 nt, Artificial Sequence
  Description of Artificial Sequence: Synthetic oligonucleotide
  Sense strand starting at position 1619 of SEQ ID NO: 1885378
ucaagauguuagucuaacu

SEQ ID NO: 2337661 - RNA, 19 nt, Artificial Sequence
  Description of Artificial Sequence: Synthetic oligonucleotide
  Antisense strand to SEQ ID NO: 2337660
aguuagacuaacaucuuga

SEQ ID NO: 2337662 - RNA, 19 nt, Artificial Sequence
  Description of Artificial Sequence: Synthetic oligonucleotide
  Sense strand starting at position 1887 of SEQ ID NO: 1885378
agagacaagagguguucua

SEQ ID NO: 2337663 - RNA, 19 nt, Artificial Sequence
  Description of Artificial Sequence: Synthetic oligonucleotide
  Antisense strand to SEQ ID NO: 2337662
uagaacaccucuugucucu

SEQ ID NO: 2337664 - RNA, 19 nt, Artificial Sequence
  Description of Artificial Sequence: Synthetic oligonucleotide
  Sense strand starting at position 1919 of SEQ ID NO: 1885378
ugagucuucucauucuaga

SEQ ID NO: 2337665 - RNA, 19 nt, Artificial Sequence
  Description of Artificial Sequence: Synthetic oligonucleotide
  Antisense strand to SEQ ID NO: 2337664
ucuagaaugagaagacuca

SEQ ID NO: 2337666 - RNA, 19 nt, Artificial Sequence
  Description of Artificial Sequence: Synthetic oligonucleotide
  Sense strand starting at position 2148 of SEQ ID NO: 1885378
aggguaauuuacuauggag

SEQ ID NO: 2337667 - RNA, 19 nt, Artificial Sequence
  Description of Artificial Sequence: Synthetic oligonucleotide
  Antisense strand to SEQ ID NO: 2337666
cuccauaguaaauuacccu

SEQ ID NO: 2337668 - RNA, 19 nt, Artificial Sequence
  Description of Artificial Sequence: Synthetic oligonucleotide
  Sense strand starting at position 2356 of SEQ ID NO: 1885378
ugugacuuuaaguaugagu

SEQ ID NO: 2337669 - RNA, 19 nt, Artificial Sequence
  Description of Artificial Sequence: Synthetic oligonucleotide
  Antisense strand to SEQ ID NO: 2337668
acucauacuuaaagucaca

SEQ ID NO: 2337670 - RNA, 19 nt, Artificial Sequence
  Description of Artificial Sequence: Synthetic oligonucleotide
  Sense strand starting at position 2361 of SEQ ID NO: 1885378
cuuuaaguaugagucuuaa

SEQ ID NO: 2337671 - RNA, 19 nt, Artificial Sequence
  Description of Artificial Sequence: Synthetic oligonucleotide
  Antisense strand to SEQ ID NO: 2337670
uuaagacucauacuuaaag

SEQ ID NO: 2337672 - RNA, 19 nt, Artificial Sequence
  Description of Artificial Sequence: Synthetic oligonucleotide
  Sense strand starting at position 2405 of SEQ ID NO: 1885378
cugccuuaucuguagaaug

SEQ ID NO: 2337673 - RNA, 19 nt, Artificial Sequence
  Description of Artificial Sequence: Synthetic oligonucleotide
  Antisense strand to SEQ ID NO: 2337672
cauucuacagauaaggcag

SEQ ID NO: 2337674 - RNA, 19 nt, Artificial Sequence
  Description of Artificial Sequence: Synthetic oligonucleotide
  Sense strand starting at position 2450 of SEQ ID NO: 1885378
gguauauucugacuauuaa

SEQ ID NO: 2337675 - RNA, 19 nt, Artificial Sequence
  Description of Artificial Sequence: Synthetic oligonucleotide
  Antisense strand to SEQ ID NO: 2337674
uuaauagucagaauauacc

SEQ ID NO: 2337676 - RNA, 19 nt, Artificial Sequence
  Description of Artificial Sequence: Synthetic oligonucleotide
  Sense strand starting at position 2631 of SEQ ID NO: 1885378
uuaugaagaugucccaguu

SEQ ID NO: 2337677 - RNA, 19 nt, Artificial Sequence
  Description of Artificial Sequence: Synthetic oligonucleotide
  Antisense strand to SEQ ID NO: 2337676
aacugggacaucuucauaa

SEQ ID NO: 2337678 - RNA, 19 nt, Artificial Sequence
  Description of Artificial Sequence: Synthetic oligonucleotide
  Sense strand starting at position 2695 of SEQ ID NO: 1885378
gugggaaacuucccaaaug

SEQ ID NO: 2337679 - RNA, 19 nt, Artificial Sequence
  Description of Artificial Sequence: Synthetic oligonucleotide
  Antisense strand to SEQ ID NO: 2337678
cauuugggaaguuucccac

SEQ ID NO: 2337680 - RNA, 19 nt, Artificial Sequence
  Description of Artificial Sequence: Synthetic oligonucleotide
  Sense strand starting at position 3333 of SEQ ID NO: 1885378
acucaugucucucuaggga

SEQ ID NO: 2337681 - RNA, 19 nt, Artificial Sequence
  Description of Artificial Sequence: Synthetic oligonucleotide
  Antisense strand to SEQ ID NO: 2337680
ucccuagagagacaugagu

SEQ ID NO: 2337682 - RNA, 19 nt, Artificial Sequence
  Description of Artificial Sequence: Synthetic oligonucleotide
  Sense strand starting at position 3425 of SEQ ID NO: 1885378
gccgcaguuacagaaagaa

SEQ ID NO: 2337683 - RNA, 19 nt, Artificial Sequence
  Description of Artificial Sequence: Synthetic oligonucleotide
  Antisense strand to SEQ ID NO: 2337682
uucuuucuguaacugcggc

SEQ ID NO: 2337684 - RNA, 19 nt, Artificial Sequence
  Description of Artificial Sequence: Synthetic oligonucleotide
  Sense strand starting at position 3449 of SEQ ID NO: 1885378
uaggcaucaguccaagauu

SEQ ID NO: 2337685 - RNA, 19 nt, Artificial Sequence
  Description of Artificial Sequence: Synthetic oligonucleotide
  Antisense strand to SEQ ID NO: 2337684
aaucuuggacugaugccua

SEQ ID NO: 2337686 - RNA, 19 nt, Artificial Sequence
  Description of Artificial Sequence: Synthetic oligonucleotide
  Sense strand starting at position 3564 of SEQ ID NO: 1885378
uuguuuggagcucaagacu

SEQ ID NO: 2337687 - RNA, 19 nt, Artificial Sequence
  Description of Artificial Sequence: Synthetic oligonucleotide
  Antisense strand to SEQ ID NO: 2337686
agucuugagcuccaaacaa

SEQ ID NO: 2337688 - RNA, 19 nt, Artificial Sequence
  Description of Artificial Sequence: Synthetic oligonucleotide
  Sense strand starting at position 3575 of SEQ ID NO: 1885378
ucaagacucugaccuguuu

SEQ ID NO: 2337689 - RNA, 19 nt, Artificial Sequence
  Description of Artificial Sequence: Synthetic oligonucleotide
  Antisense strand to SEQ ID NO: 2337688
aaacaggucagagucuuga

SEQ ID NO: 2337690 - RNA, 19 nt, Artificial Sequence
  Description of Artificial Sequence: Synthetic oligonucleotide
  Sense strand starting at position 3598 of SEQ ID NO: 1885378
gcaauaaccuauuugugca

SEQ ID NO: 2337691 - RNA, 19 nt, Artificial Sequence
  Description of Artificial Sequence: Synthetic oligonucleotide
  Antisense strand to SEQ ID NO: 2337690
ugcacaaauagguuauugc

SEQ ID NO: 2337692 - RNA, 19 nt, Artificial Sequence
  Description of Artificial Sequence: Synthetic oligonucleotide
  Sense strand starting at position 3675 of SEQ ID NO: 1885378
uguuccagagucugauaaa

SEQ ID NO: 2337693 - RNA, 19 nt, Artificial Sequence
  Description of Artificial Sequence: Synthetic oligonucleotide
  Antisense strand to SEQ ID NO: 2337692
uuuaucagacucuggaaca

SEQ ID NO: 2337694 - RNA, 19 nt, Artificial Sequence
  Description of Artificial Sequence: Synthetic oligonucleotide
  Sense strand starting at position 3709 of SEQ ID NO: 1885378
cuaaacucuuuagugagaa

SEQ ID NO: 2337695 - RNA, 19 nt, Artificial Sequence
  Description of Artificial Sequence: Synthetic oligonucleotide
  Antisense strand to SEQ ID NO: 2337694
uucucacuaaagaguuuag

SEQ ID NO: 2337696 - RNA, 19 nt, Artificial Sequence
  Description of Artificial Sequence: Synthetic oligonucleotide
  Sense strand starting at position 3824 of SEQ ID NO: 1885378
acaucuuccugagaauuug

SEQ ID NO: 2337697 - RNA, 19 nt, Artificial Sequence
  Description of Artificial Sequence: Synthetic oligonucleotide
  Antisense strand to SEQ ID NO: 2337696
caaauucucaggaagaugu

SEQ ID NO: 2337698 - RNA, 19 nt, Artificial Sequence
  Description of Artificial Sequence: Synthetic oligonucleotide
  Sense strand starting at position 3841 of SEQ ID NO: 1885378
ugagcuaguuaaguuaaga

SEQ ID NO: 2337699 - RNA, 19 nt, Artificial Sequence
  Description of Artificial Sequence: Synthetic oligonucleotide
  Antisense strand to SEQ ID NO: 2337698
ucuuaacuuaacuagcuca

SEQ ID NO: 2337700 - RNA, 19 nt, Artificial Sequence
  Description of Artificial Sequence: Synthetic oligonucleotide
  Sense strand starting at position 3874 of SEQ ID NO: 1885378
ucuugauucuugguauuag

SEQ ID NO: 2337701 - RNA, 19 nt, Artificial Sequence
  Description of Artificial Sequence: Synthetic oligonucleotide
  Antisense strand to SEQ ID NO: 2337700
cuaauaccaagaaucaaga

SEQ ID NO: 2337702 - RNA, 19 nt, Artificial Sequence
  Description of Artificial Sequence: Synthetic oligonucleotide
  Sense strand starting at position 19 of SEQ ID NO: 1885379
cuggaaugugaaugccaau

SEQ ID NO: 2337703 - RNA, 19 nt, Artificial Sequence
  Description of Artificial Sequence: Synthetic oligonucleotide
  Antisense strand to SEQ ID NO: 2337702
auuggcauucacauuccag

SEQ ID NO: 2337704 - RNA, 19 nt, Artificial Sequence
  Description of Artificial Sequence: Synthetic oligonucleotide
  Sense strand starting at position 69 of SEQ ID NO: 1885379
cuaacuugucuugaagucu

SEQ ID NO: 2337705 - RNA, 19 nt, Artificial Sequence
  Description of Artificial Sequence: Synthetic oligonucleotide
  Antisense strand to SEQ ID NO: 2337704
agacuucaagacaaguuag

SEQ ID NO: 2337706 - RNA, 19 nt, Artificial Sequence
  Description of Artificial Sequence: Synthetic oligonucleotide
  Sense strand starting at position 484 of SEQ ID NO: 1885379
agaucaucgaucuguugag

SEQ ID NO: 2337707 - RNA, 19 nt, Artificial Sequence
  Description of Artificial Sequence: Synthetic oligonucleotide
  Antisense strand to SEQ ID NO: 2337706
cucaacagaucgaugaucu

SEQ ID NO: 2337708 - RNA, 19 nt, Artificial Sequence
  Description of Artificial Sequence: Synthetic oligonucleotide
  Sense strand starting at position 485 of SEQ ID NO: 1885379
gaucaucgaucuguugaga

SEQ ID NO: 2337709 - RNA, 19 nt, Artificial Sequence
  Description of Artificial Sequence: Synthetic oligonucleotide
  Antisense strand to SEQ ID NO: 2337708
ucucaacagaucgaugauc

SEQ ID NO: 2337710 - RNA, 19 nt, Artificial Sequence
  Description of Artificial Sequence: Synthetic oligonucleotide
  Sense strand starting at position 670 of SEQ ID NO: 1885379
gccauuuaauugcuguaaa

SEQ ID NO: 2337711 - RNA, 19 nt, Artificial Sequence
  Description of Artificial Sequence: Synthetic oligonucleotide
  Antisense strand to SEQ ID NO: 2337710
uuuacagcaauuaaauggc

SEQ ID NO: 2337712 - RNA, 19 nt, Artificial Sequence
  Description of Artificial Sequence: Synthetic oligonucleotide
  Sense strand starting at position 754 of SEQ ID NO: 1885379
aaagauauacaucgucagu

SEQ ID NO: 2337713 - RNA, 19 nt, Artificial Sequence
  Description of Artificial Sequence: Synthetic oligonucleotide
  Antisense strand to SEQ ID NO: 2337712
acugacgauguauaucuuu

SEQ ID NO: 2337714 - RNA, 19 nt, Artificial Sequence
  Description of Artificial Sequence: Synthetic oligonucleotide
  Sense strand starting at position 816 of SEQ ID NO: 1885379
gccagaugcauguagauca

SEQ ID NO: 2337715 - RNA, 19 nt, Artificial Sequence
  Description of Artificial Sequence: Synthetic oligonucleotide
  Antisense strand to SEQ ID NO: 2337714
ugaucuacaugcaucuggc

SEQ ID NO: 2337716 - RNA, 19 nt, Artificial Sequence
  Description of Artificial Sequence: Synthetic oligonucleotide
  Sense strand starting at position 941 of SEQ ID NO: 1885379
aauagaggugucuacucau

SEQ ID NO: 2337717 - RNA, 19 nt, Artificial Sequence
  Description of Artificial Sequence: Synthetic oligonucleotide
  Antisense strand to SEQ ID NO: 2337716
augaguagacaccucuauu

SEQ ID NO: 2337718 - RNA, 19 nt, Artificial Sequence
  Description of Artificial Sequence: Synthetic oligonucleotide
  Sense strand starting at position 1056 of SEQ ID NO: 1885379
agagucugagagugucaau

SEQ ID NO: 2337719 - RNA, 19 nt, Artificial Sequence
  Description of Artificial Sequence: Synthetic oligonucleotide
  Antisense strand to SEQ ID NO: 2337718
auugacacucucagacucu

SEQ ID NO: 2337720 - RNA, 19 nt, Artificial Sequence
  Description of Artificial Sequence: Synthetic oligonucleotide
  Sense strand starting at position 1126 of SEQ ID NO: 1885379
uacauuauagggugaaguu

SEQ ID NO: 2337721 - RNA, 19 nt, Artificial Sequence
  Description of Artificial Sequence: Synthetic oligonucleotide
  Antisense strand to SEQ ID NO: 2337720
aacuucacccuauaaugua

SEQ ID NO: 2337722 - RNA, 19 nt, Artificial Sequence
  Description of Artificial Sequence: Synthetic oligonucleotide
  Sense strand starting at position 1249 of SEQ ID NO: 1885379
aggaaacugcuaugcagau

SEQ ID NO: 2337723 - RNA, 19 nt, Artificial Sequence
  Description of Artificial Sequence: Synthetic oligonucleotide
  Antisense strand to SEQ ID NO: 2337722
aucugcauagcaguuuccu

SEQ ID NO: 2337724 - RNA, 19 nt, Artificial Sequence
  Description of Artificial Sequence: Synthetic oligonucleotide
  Sense strand starting at position 1253 of SEQ ID NO: 1885379
aacugcuaugcagauggaa

SEQ ID NO: 2337725 - RNA, 19 nt, Artificial Sequence
  Description of Artificial Sequence: Synthetic oligonucleotide
  Antisense strand to SEQ ID NO: 2337724
uuccaucugcauagcaguu

SEQ ID NO: 2337726 - RNA, 19 nt, Artificial Sequence
  Description of Artificial Sequence: Synthetic oligonucleotide
  Sense strand starting at position 1348 of SEQ ID NO: 1885379
acaggaaugcuugaucucu

SEQ ID NO: 2337727 - RNA, 19 nt, Artificial Sequence
  Description of Artificial Sequence: Synthetic oligonucleotide
  Antisense strand to SEQ ID NO: 2337726
agagaucaagcauuccugu

SEQ ID NO: 2337728 - RNA, 19 nt, Artificial Sequence
  Description of Artificial Sequence: Synthetic oligonucleotide
  Sense strand starting at position 1350 of SEQ ID NO: 1885379
aggaaugcuugaucucuuu

SEQ ID NO: 2337729 - RNA, 19 nt, Artificial Sequence
  Description of Artificial Sequence: Synthetic oligonucleotide
  Antisense strand to SEQ ID NO: 2337728
aaagagaucaagcauuccu

SEQ ID NO: 2337730 - RNA, 19 nt, Artificial Sequence
  Description of Artificial Sequence: Synthetic oligonucleotide
  Sense strand starting at position 1424 of SEQ ID NO: 1885379
cacagaaggcugugguaga

SEQ ID NO: 2337731 - RNA, 19 nt, Artificial Sequence
  Description of Artificial Sequence: Synthetic oligonucleotide
  Antisense strand to SEQ ID NO: 2337730
ucuaccacagccuucugug

SEQ ID NO: 2337732 - RNA, 19 nt, Artificial Sequence
  Description of Artificial Sequence: Synthetic oligonucleotide
  Sense strand starting at position 1473 of SEQ ID NO: 1885379
aggacaacucauugucuga

SEQ ID NO: 2337733 - RNA, 19 nt, Artificial Sequence
  Description of Artificial Sequence: Synthetic oligonucleotide
  Antisense strand to SEQ ID NO: 2337732
ucagacaaugaguuguccu

SEQ ID NO: 2337734 - RNA, 19 nt, Artificial Sequence
  Description of Artificial Sequence: Synthetic oligonucleotide
  Sense strand starting at position 1566 of SEQ ID NO: 1885379
caugcaguggcagaauaau

SEQ ID NO: 2337735 - RNA, 19 nt, Artificial Sequence
  Description of Artificial Sequence: Synthetic oligonucleotide
  Antisense strand to SEQ ID NO: 2337734
auuauucugccacugcaug

SEQ ID NO: 2337736 - RNA, 19 nt, Artificial Sequence
  Description of Artificial Sequence: Synthetic oligonucleotide
  Sense strand starting at position 1682 of SEQ ID NO: 1885379
acaguuuagagauguguaa

SEQ ID NO: 2337737 - RNA, 19 nt, Artificial Sequence
  Description of Artificial Sequence: Synthetic oligonucleotide
  Antisense strand to SEQ ID NO: 2337736
uuacacaucucuaaacugu

SEQ ID NO: 2337738 - RNA, 19 nt, Artificial Sequence
  Description of Artificial Sequence: Synthetic oligonucleotide
  Sense strand starting at position 1689 of SEQ ID NO: 1885379
agagauguguaauuaucua

SEQ ID NO: 2337739 - RNA, 19 nt, Artificial Sequence
  Description of Artificial Sequence: Synthetic oligonucleotide
  Antisense strand to SEQ ID NO: 2337738
uagauaauuacacaucucu

SEQ ID NO: 2337740 - RNA, 19 nt, Artificial Sequence
  Description of Artificial Sequence: Synthetic oligonucleotide
  Sense strand starting at position 1760 of SEQ ID NO: 1885379
gugugauuaaagcaacuga

SEQ ID NO: 2337741 - RNA, 19 nt, Artificial Sequence
  Description of Artificial Sequence: Synthetic oligonucleotide
  Antisense strand to SEQ ID NO: 2337740
ucaguugcuuuaaucacac

SEQ ID NO: 2337742 - RNA, 19 nt, Artificial Sequence
  Description of Artificial Sequence: Synthetic oligonucleotide
  Sense strand starting at position 1799 of SEQ ID NO: 1885379
cucugccaucuauaggaua

SEQ ID NO: 2337743 - RNA, 19 nt, Artificial Sequence
  Description of Artificial Sequence: Synthetic oligonucleotide
  Antisense strand to SEQ ID NO: 2337742
uauccuauagauggcagag

SEQ ID NO: 2337744 - RNA, 19 nt, Artificial Sequence
  Description of Artificial Sequence: Synthetic oligonucleotide
  Sense strand starting at position 1886 of SEQ ID NO: 1885379
cugacaagccugugaggaa

SEQ ID NO: 2337745 - RNA, 19 nt, Artificial Sequence
  Description of Artificial Sequence: Synthetic oligonucleotide
  Antisense strand to SEQ ID NO: 2337744
uuccucacaggcuugucag

SEQ ID NO: 2337746 - RNA, 19 nt, Artificial Sequence
  Description of Artificial Sequence: Synthetic oligonucleotide
  Sense strand starting at position 1977 of SEQ ID NO: 1885379
uuaccaagugauugaucuu

SEQ ID NO: 2337747 - RNA, 19 nt, Artificial Sequence
  Description of Artificial Sequence: Synthetic oligonucleotide
  Antisense strand to SEQ ID NO: 2337746
aagaucaaucacuugguaa

SEQ ID NO: 2337748 - RNA, 19 nt, Artificial Sequence
  Description of Artificial Sequence: Synthetic oligonucleotide
  Sense strand starting at position 1989 of SEQ ID NO: 1885379
ugaucuugugaggguuaga

SEQ ID NO: 2337749 - RNA, 19 nt, Artificial Sequence
  Description of Artificial Sequence: Synthetic oligonucleotide
  Antisense strand to SEQ ID NO: 2337748
ucuaacccucacaagauca

SEQ ID NO: 2337750 - RNA, 19 nt, Artificial Sequence
  Description of Artificial Sequence: Synthetic oligonucleotide
  Sense strand starting at position 2000 of SEQ ID NO: 1885379
ggguuagagaagugguaaa

SEQ ID NO: 2337751 - RNA, 19 nt, Artificial Sequence
  Description of Artificial Sequence: Synthetic oligonucleotide
  Antisense strand to SEQ ID NO: 2337750
uuuaccacuucucuaaccc

SEQ ID NO: 2337752 - RNA, 19 nt, Artificial Sequence
  Description of Artificial Sequence: Synthetic oligonucleotide
  Sense strand starting at position 2044 of SEQ ID NO: 1885379
ugucaaugucaagaucuau

SEQ ID NO: 2337753 - RNA, 19 nt, Artificial Sequence
  Description of Artificial Sequence: Synthetic oligonucleotide
  Antisense strand to SEQ ID NO: 2337752
auagaucuugacauugaca

SEQ ID NO: 2337754 - RNA, 19 nt, Artificial Sequence
  Description of Artificial Sequence: Synthetic oligonucleotide
  Sense strand starting at position 2273 of SEQ ID NO: 1885379
gauagauuguaguuaacug

SEQ ID NO: 2337755 - RNA, 19 nt, Artificial Sequence
  Description of Artificial Sequence: Synthetic oligonucleotide
  Antisense strand to SEQ ID NO: 2337754
caguuaacuacaaucuauc

SEQ ID NO: 2337756 - RNA, 19 nt, Artificial Sequence
  Description of Artificial Sequence: Synthetic oligonucleotide
  Sense strand starting at position 2319 of SEQ ID NO: 1885379
aaagcuugugcauaaugau

SEQ ID NO: 2337757 - RNA, 19 nt, Artificial Sequence
  Description of Artificial Sequence: Synthetic oligonucleotide
  Antisense strand to SEQ ID NO: 2337756
aucauuaugcacaagcuuu

SEQ ID NO: 2337758 - RNA, 19 nt, Artificial Sequence
  Description of Artificial Sequence: Synthetic oligonucleotide
  Sense strand starting at position 2327 of SEQ ID NO: 1885379
ugcauaaugaugugggaaa

SEQ ID NO: 2337759 - RNA, 19 nt, Artificial Sequence
  Description of Artificial Sequence: Synthetic oligonucleotide
  Antisense strand to SEQ ID NO: 2337758
uuucccacaucauuaugca

SEQ ID NO: 2337760 - RNA, 19 nt, Artificial Sequence
  Description of Artificial Sequence: Synthetic oligonucleotide
  Sense strand starting at position 2478 of SEQ ID NO: 1885379
uguugcgucaaauaggaaa

SEQ ID NO: 2337761 - RNA, 19 nt, Artificial Sequence
  Description of Artificial Sequence: Synthetic oligonucleotide
  Antisense strand to SEQ ID NO: 2337760
uuuccuauuugacgcaaca

SEQ ID NO: 2337762 - RNA, 19 nt, Artificial Sequence
  Description of Artificial Sequence: Synthetic oligonucleotide
  Sense strand starting at position 2504 of SEQ ID NO: 1885379
auagcuacccaggguuaaa

SEQ ID NO: 2337763 - RNA, 19 nt, Artificial Sequence
  Description of Artificial Sequence: Synthetic oligonucleotide
  Antisense strand to SEQ ID NO: 2337762
uuuaacccuggguagcuau

SEQ ID NO: 2337764 - RNA, 19 nt, Artificial Sequence
  Description of Artificial Sequence: Synthetic oligonucleotide
  Sense strand starting at position 2622 of SEQ ID NO: 1885379
aacaaauugugagugcuga

SEQ ID NO: 2337765 - RNA, 19 nt, Artificial Sequence
  Description of Artificial Sequence: Synthetic oligonucleotide
  Antisense strand to SEQ ID NO: 2337764
ucagcacucacaauuuguu

SEQ ID NO: 2337766 - RNA, 19 nt, Artificial Sequence
  Description of Artificial Sequence: Synthetic oligonucleotide
  Sense strand starting at position 2760 of SEQ ID NO: 1885379
uaccauuagcaagggauga

SEQ ID NO: 2337767 - RNA, 19 nt, Artificial Sequence
  Description of Artificial Sequence: Synthetic oligonucleotide
  Antisense strand to SEQ ID NO: 2337766
ucaucccuugcuaauggua

SEQ ID NO: 2337768 - RNA, 19 nt, Artificial Sequence
  Description of Artificial Sequence: Synthetic oligonucleotide
  Sense strand starting at position 2761 of SEQ ID NO: 1885379
accauuagcaagggaugau

SEQ ID NO: 2337769 - RNA, 19 nt, Artificial Sequence
  Description of Artificial Sequence: Synthetic oligonucleotide
  Antisense strand to SEQ ID NO: 2337768
aucaucccuugcuaauggu

SEQ ID NO: 2337770 - RNA, 19 nt, Artificial Sequence
  Description of Artificial Sequence: Synthetic oligonucleotide
  Sense strand starting at position 2964 of SEQ ID NO: 1885379
aggugucagguuaguguua

SEQ ID NO: 2337771 - RNA, 19 nt, Artificial Sequence
  Description of Artificial Sequence: Synthetic oligonucleotide
  Antisense strand to SEQ ID NO: 2337770
uaacacuaaccugacaccu

SEQ ID NO: 2337772 - RNA, 19 nt, Artificial Sequence
  Description of Artificial Sequence: Synthetic oligonucleotide
  Sense strand starting at position 3050 of SEQ ID NO: 1885379
acaggaauuggcgaaguau

SEQ ID NO: 2337773 - RNA, 19 nt, Artificial Sequence
  Description of Artificial Sequence: Synthetic oligonucleotide
  Antisense strand to SEQ ID NO: 2337772
auacuucgccaauuccugu

SEQ ID NO: 2337774 - RNA, 19 nt, Artificial Sequence
  Description of Artificial Sequence: Synthetic oligonucleotide
  Sense strand starting at position 3120 of SEQ ID NO: 1885379
uggguuguagccuagauaa

SEQ ID NO: 2337775 - RNA, 19 nt, Artificial Sequence
  Description of Artificial Sequence: Synthetic oligonucleotide
  Antisense strand to SEQ ID NO: 2337774
uuaucuaggcuacaaccca

SEQ ID NO: 2337776 - RNA, 19 nt, Artificial Sequence
  Description of Artificial Sequence: Synthetic oligonucleotide
  Sense strand starting at position 3122 of SEQ ID NO: 1885379
gguuguagccuagauaaga

SEQ ID NO: 2337777 - RNA, 19 nt, Artificial Sequence
  Description of Artificial Sequence: Synthetic oligonucleotide
  Antisense strand to SEQ ID NO: 2337776
ucuuaucuaggcuacaacc

SEQ ID NO: 2337778 - RNA, 19 nt, Artificial Sequence
  Description of Artificial Sequence: Synthetic oligonucleotide
  Sense strand starting at position 3363 of SEQ ID NO: 1885379
ucugcucuugagggagauu

SEQ ID NO: 2337779 - RNA, 19 nt, Artificial Sequence
  Description of Artificial Sequence: Synthetic oligonucleotide
  Antisense strand to SEQ ID NO: 2337778
aaucucccucaagagcaga

SEQ ID NO: 2337780 - RNA, 19 nt, Artificial Sequence
  Description of Artificial Sequence: Synthetic oligonucleotide
  Sense strand starting at position 3965 of SEQ ID NO: 1885379
guuccuuuagaaggagacu

SEQ ID NO: 2337781 - RNA, 19 nt, Artificial Sequence
  Description of Artificial Sequence: Synthetic oligonucleotide
  Antisense strand to SEQ ID NO: 2337780
agucuccuucuaaaggaac

SEQ ID NO: 2337782 - RNA, 19 nt, Artificial Sequence
  Description of Artificial Sequence: Synthetic oligonucleotide
  Sense strand starting at position 88 of SEQ ID NO: 1885380
uaccaugaauaguuaguga

SEQ ID NO: 2337783 - RNA, 19 nt, Artificial Sequence
  Description of Artificial Sequence: Synthetic oligonucleotide
  Antisense strand to SEQ ID NO: 2337782
ucacuaacuauucauggua

SEQ ID NO: 2337784 - RNA, 19 nt, Artificial Sequence
  Description of Artificial Sequence: Synthetic oligonucleotide
  Sense strand starting at position 91 of SEQ ID NO: 1885380
caugaauaguuagugaaag

SEQ ID NO: 2337785 - RNA, 19 nt, Artificial Sequence
  Description of Artificial Sequence: Synthetic oligonucleotide
  Antisense strand to SEQ ID NO: 2337784
cuuucacuaacuauucaug

SEQ ID NO: 2337786 - RNA, 19 nt, Artificial Sequence
  Description of Artificial Sequence: Synthetic oligonucleotide
  Sense strand starting at position 93 of SEQ ID NO: 1885380
ugaauaguuagugaaaggu

SEQ ID NO: 2337787 - RNA, 19 nt, Artificial Sequence
  Description of Artificial Sequence: Synthetic oligonucleotide
  Antisense strand to SEQ ID NO: 2337786
accuuucacuaacuauuca

SEQ ID NO: 2337788 - RNA, 19 nt, Artificial Sequence
  Description of Artificial Sequence: Synthetic oligonucleotide
  Sense strand starting at position 101 of SEQ ID NO: 1885380
uagugaaaggucuaguaac

SEQ ID NO: 2337789 - RNA, 19 nt, Artificial Sequence
  Description of Artificial Sequence: Synthetic oligonucleotide
  Antisense strand to SEQ ID NO: 2337788
guuacuagaccuuucacua

SEQ ID NO: 2337790 - RNA, 19 nt, Artificial Sequence
  Description of Artificial Sequence: Synthetic oligonucleotide
  Sense strand starting at position 109 of SEQ ID NO: 1885380
ggucuaguaacaggaaucu

SEQ ID NO: 2337791 - RNA, 19 nt, Artificial Sequence
  Description of Artificial Sequence: Synthetic oligonucleotide
  Antisense strand to SEQ ID NO: 2337790
agauuccuguuacuagacc

SEQ ID NO: 2337792 - RNA, 19 nt, Artificial Sequence
  Description of Artificial Sequence: Synthetic oligonucleotide
  Sense strand starting at position 225 of SEQ ID NO: 1885380
ugaaauaauguaugcaauc

SEQ ID NO: 2337793 - RNA, 19 nt, Artificial Sequence
  Description of Artificial Sequence: Synthetic oligonucleotide
  Antisense strand to SEQ ID NO: 2337792
gauugcauacauuauuuca

SEQ ID NO: 2337794 - RNA, 19 nt, Artificial Sequence
  Description of Artificial Sequence: Synthetic oligonucleotide
  Sense strand starting at position 649 of SEQ ID NO: 1885380
gcccuaacguuucugauuu

SEQ ID NO: 2337795 - RNA, 19 nt, Artificial Sequence
  Description of Artificial Sequence: Synthetic oligonucleotide
  Antisense strand to SEQ ID NO: 2337794
aaaucagaaacguuagggc

SEQ ID NO: 2337796 - RNA, 19 nt, Artificial Sequence
  Description of Artificial Sequence: Synthetic oligonucleotide
  Sense strand starting at position 1249 of SEQ ID NO: 1885380
gauauugcuguuggaggga

SEQ ID NO: 2337797 - RNA, 19 nt, Artificial Sequence
  Description of Artificial Sequence: Synthetic oligonucleotide
  Antisense strand to SEQ ID NO: 2337796
ucccuccaacagcaauauc

SEQ ID NO: 2337798 - RNA, 19 nt, Artificial Sequence
  Description of Artificial Sequence: Synthetic oligonucleotide
  Sense strand starting at position 1587 of SEQ ID NO: 1885380
uaaacucaucaguggagua

SEQ ID NO: 2337799 - RNA, 19 nt, Artificial Sequence
  Description of Artificial Sequence: Synthetic oligonucleotide
  Antisense strand to SEQ ID NO: 2337798
uacuccacugaugaguuua

SEQ ID NO: 2337800 - RNA, 19 nt, Artificial Sequence
  Description of Artificial Sequence: Synthetic oligonucleotide
  Sense strand starting at position 1592 of SEQ ID NO: 1885380
ucaucaguggaguaucuuu

SEQ ID NO: 2337801 - RNA, 19 nt, Artificial Sequence
  Description of Artificial Sequence: Synthetic oligonucleotide
  Antisense strand to SEQ ID NO: 2337800
aaagauacuccacugauga

SEQ ID NO: 2337802 - RNA, 19 nt, Artificial Sequence
  Description of Artificial Sequence: Synthetic oligonucleotide
  Sense strand starting at position 1640 of SEQ ID NO: 1885380
ucugaauucucauuacgga

SEQ ID NO: 2337803 - RNA, 19 nt, Artificial Sequence
  Description of Artificial Sequence: Synthetic oligonucleotide
  Antisense strand to SEQ ID NO: 2337802
uccguaaugagaauucaga

SEQ ID NO: 2337804 - RNA, 19 nt, Artificial Sequence
  Description of Artificial Sequence: Synthetic oligonucleotide
  Sense strand starting at position 1675 of SEQ ID NO: 1885380
ccaggaaugccggaaucau

SEQ ID NO: 2337805 - RNA, 19 nt, Artificial Sequence
  Description of Artificial Sequence: Synthetic oligonucleotide
  Antisense strand to SEQ ID NO: 2337804
augauuccggcauuccugg

SEQ ID NO: 2337806 - RNA, 19 nt, Artificial Sequence
  Description of Artificial Sequence: Synthetic oligonucleotide
  Sense strand starting at position 1825 of SEQ ID NO: 1885380
aggugaagaucuguuguaa

SEQ ID NO: 2337807 - RNA, 19 nt, Artificial Sequence
  Description of Artificial Sequence: Synthetic oligonucleotide
  Antisense strand to SEQ ID NO: 2337806
uuacaacagaucuucaccu

SEQ ID NO: 2337808 - RNA, 19 nt, Artificial Sequence
  Description of Artificial Sequence: Synthetic oligonucleotide
  Sense strand starting at position 1849 of SEQ ID NO: 1885380
gagggauauccuugguauc

SEQ ID NO: 2337809 - RNA, 19 nt, Artificial Sequence
  Description of Artificial Sequence: Synthetic oligonucleotide
  Antisense strand to SEQ ID NO: 2337808
gauaccaaggauaucccuc

SEQ ID NO: 2337810 - RNA, 19 nt, Artificial Sequence
  Description of Artificial Sequence: Synthetic oligonucleotide
  Sense strand starting at position 1851 of SEQ ID NO: 1885380
gggauauccuugguaucca

SEQ ID NO: 2337811 - RNA, 19 nt, Artificial Sequence
  Description of Artificial Sequence: Synthetic oligonucleotide
  Antisense strand to SEQ ID NO: 2337810
uggauaccaaggauauccc

SEQ ID NO: 2337812 - RNA, 19 nt, Artificial Sequence
  Description of Artificial Sequence: Synthetic oligonucleotide
  Sense strand starting at position 1891 of SEQ ID NO: 1885380
cugguaaaguucucugaag

SEQ ID NO: 2337813 - RNA, 19 nt, Artificial Sequence
  Description of Artificial Sequence: Synthetic oligonucleotide
  Antisense strand to SEQ ID NO: 2337812
cuucagagaacuuuaccag

SEQ ID NO: 2337814 - RNA, 19 nt, Artificial Sequence
  Description of Artificial Sequence: Synthetic oligonucleotide
  Sense strand starting at position 1932 of SEQ ID NO: 1885380
ggaaguuaccacuguaaau

SEQ ID NO: 2337815 - RNA, 19 nt, Artificial Sequence
  Description of Artificial Sequence: Synthetic oligonucleotide
  Antisense strand to SEQ ID NO: 2337814
auuuacagugguaacuucc

SEQ ID NO: 2337816 - RNA, 19 nt, Artificial Sequence
  Description of Artificial Sequence: Synthetic oligonucleotide
  Sense strand starting at position 1990 of SEQ ID NO: 1885380
cccuaaugguuucuuagga

SEQ ID NO: 2337817 - RNA, 19 nt, Artificial Sequence
  Description of Artificial Sequence: Synthetic oligonucleotide
  Antisense strand to SEQ ID NO: 2337816
uccuaagaaaccauuaggg

SEQ ID NO: 2337818 - RNA, 19 nt, Artificial Sequence
  Description of Artificial Sequence: Synthetic oligonucleotide
  Sense strand starting at position 2052 of SEQ ID NO: 1885380
ugaauuagucgucauuaaa

SEQ ID NO: 2337819 - RNA, 19 nt, Artificial Sequence
  Description of Artificial Sequence: Synthetic oligonucleotide
  Antisense strand to SEQ ID NO: 2337818
uuuaaugacgacuaauuca

SEQ ID NO: 2337820 - RNA, 19 nt, Artificial Sequence
  Description of Artificial Sequence: Synthetic oligonucleotide
  Sense strand starting at position 2055 of SEQ ID NO: 1885380
auuagucgucauuaaacaa

SEQ ID NO: 2337821 - RNA, 19 nt, Artificial Sequence
  Description of Artificial Sequence: Synthetic oligonucleotide
  Antisense strand to SEQ ID NO: 2337820
uuguuuaaugacgacuaau

SEQ ID NO: 2337822 - RNA, 19 nt, Artificial Sequence
  Description of Artificial Sequence: Synthetic oligonucleotide
  Sense strand starting at position 2142 of SEQ ID NO: 1885380
gugagaaagucagugaauu

SEQ ID NO: 2337823 - RNA, 19 nt, Artificial Sequence
  Description of Artificial Sequence: Synthetic oligonucleotide
  Antisense strand to SEQ ID NO: 2337822
aauucacugacuuucucac

SEQ ID NO: 2337824 - RNA, 19 nt, Artificial Sequence
  Description of Artificial Sequence: Synthetic oligonucleotide
  Sense strand starting at position 2273 of SEQ ID NO: 1885380
agcaaauauguugaccuua

SEQ ID NO: 2337825 - RNA, 19 nt, Artificial Sequence
  Description of Artificial Sequence: Synthetic oligonucleotide
  Antisense strand to SEQ ID NO: 2337824
uaaggucaacauauuugcu

SEQ ID NO: 2337826 - RNA, 19 nt, Artificial Sequence
  Description of Artificial Sequence: Synthetic oligonucleotide
  Sense strand starting at position 2468 of SEQ ID NO: 1885380
guuauacaggcuuaugaaa

SEQ ID NO: 2337827 - RNA, 19 nt, Artificial Sequence
  Description of Artificial Sequence: Synthetic oligonucleotide
  Antisense strand to SEQ ID NO: 2337826
uuucauaagccuguauaac

SEQ ID NO: 2337828 - RNA, 19 nt, Artificial Sequence
  Description of Artificial Sequence: Synthetic oligonucleotide
  Sense strand starting at position 2564 of SEQ ID NO: 1885380
ugucauugaaguuacgaua

SEQ ID NO: 2337829 - RNA, 19 nt, Artificial Sequence
  Description of Artificial Sequence: Synthetic oligonucleotide
  Antisense strand to SEQ ID NO: 2337828
uaucguaacuucaaugaca

SEQ ID NO: 2337830 - RNA, 19 nt, Artificial Sequence
  Description of Artificial Sequence: Synthetic oligonucleotide
  Sense strand starting at position 2695 of SEQ ID NO: 1885380
cuggcuuuggaaugacauu

SEQ ID NO: 2337831 - RNA, 19 nt, Artificial Sequence
  Description of Artificial Sequence: Synthetic oligonucleotide
  Antisense strand to SEQ ID NO: 2337830
aaugucauuccaaagccag

SEQ ID NO: 2337832 - RNA, 19 nt, Artificial Sequence
  Description of Artificial Sequence: Synthetic oligonucleotide
  Sense strand starting at position 2908 of SEQ ID NO: 1885380
aguauuuguugagcuuguu

SEQ ID NO: 2337833 - RNA, 19 nt, Artificial Sequence
  Description of Artificial Sequence: Synthetic oligonucleotide
  Antisense strand to SEQ ID NO: 2337832
aacaagcucaacaaauacu

SEQ ID NO: 2337834 - RNA, 19 nt, Artificial Sequence
  Description of Artificial Sequence: Synthetic oligonucleotide
  Sense strand starting at position 2920 of SEQ ID NO: 1885380
gcuuguugucugccuaaua

SEQ ID NO: 2337835 - RNA, 19 nt, Artificial Sequence
  Description of Artificial Sequence: Synthetic oligonucleotide
  Antisense strand to SEQ ID NO: 2337834
uauuaggcagacaacaagc

SEQ ID NO: 2337836 - RNA, 19 nt, Artificial Sequence
  Description of Artificial Sequence: Synthetic oligonucleotide
  Sense strand starting at position 2940 of SEQ ID NO: 1885380
ugggcugaugcugaggaaa

SEQ ID NO: 2337837 - RNA, 19 nt, Artificial Sequence
  Description of Artificial Sequence: Synthetic oligonucleotide
  Antisense strand to SEQ ID NO: 2337836
uuuccucagcaucagccca

SEQ ID NO: 2337838 - RNA, 19 nt, Artificial Sequence
  Description of Artificial Sequence: Synthetic oligonucleotide
  Sense strand starting at position 3076 of SEQ ID NO: 1885380
acaugauauuaagucuguu

SEQ ID NO: 2337839 - RNA, 19 nt, Artificial Sequence
  Description of Artificial Sequence: Synthetic oligonucleotide
  Antisense strand to SEQ ID NO: 2337838
aacagacuuaauaucaugu

SEQ ID NO: 2337840 - RNA, 19 nt, Artificial Sequence
  Description of Artificial Sequence: Synthetic oligonucleotide
  Sense strand starting at position 3228 of SEQ ID NO: 1885380
gcccuuugugcuuuaggca

SEQ ID NO: 2337841 - RNA, 19 nt, Artificial Sequence
  Description of Artificial Sequence: Synthetic oligonucleotide
  Antisense strand to SEQ ID NO: 2337840
ugccuaaagcacaaagggc

SEQ ID NO: 2337842 - RNA, 19 nt, Artificial Sequence
  Description of Artificial Sequence: Synthetic oligonucleotide
  Sense strand starting at position 3235 of SEQ ID NO: 1885380
gugcuuuaggcagggauuu

SEQ ID NO: 2337843 - RNA, 19 nt, Artificial Sequence
  Description of Artificial Sequence: Synthetic oligonucleotide
  Antisense strand to SEQ ID NO: 2337842
aaaucccugccuaaagcac

SEQ ID NO: 2337844 - RNA, 19 nt, Artificial Sequence
  Description of Artificial Sequence: Synthetic oligonucleotide
  Sense strand starting at position 3377 of SEQ ID NO: 1885380
uuaugaaaguguuuccaga

SEQ ID NO: 2337845 - RNA, 19 nt, Artificial Sequence
  Description of Artificial Sequence: Synthetic oligonucleotide
  Antisense strand to SEQ ID NO: 2337844
ucuggaaacacuuucauaa

SEQ ID NO: 2337846 - RNA, 19 nt, Artificial Sequence
  Description of Artificial Sequence: Synthetic oligonucleotide
  Sense strand starting at position 3379 of SEQ ID NO: 1885380
augaaaguguuuccagauc

SEQ ID NO: 2337847 - RNA, 19 nt, Artificial Sequence
  Description of Artificial Sequence: Synthetic oligonucleotide
  Antisense strand to SEQ ID NO: 2337846
gaucuggaaacacuuucau

SEQ ID NO: 2337848 - RNA, 19 nt, Artificial Sequence
  Description of Artificial Sequence: Synthetic oligonucleotide
  Sense strand starting at position 3425 of SEQ ID NO: 1885380
uuuauugucugaucauaag

SEQ ID NO: 2337849 - RNA, 19 nt, Artificial Sequence
  Description of Artificial Sequence: Synthetic oligonucleotide
  Antisense strand to SEQ ID NO: 2337848
cuuaugaucagacaauaaa

SEQ ID NO: 2337850 - RNA, 19 nt, Artificial Sequence
  Description of Artificial Sequence: Synthetic oligonucleotide
  Sense strand starting at position 3473 of SEQ ID NO: 1885380
uguaguaucuaacuauaug

SEQ ID NO: 2337851 - RNA, 19 nt, Artificial Sequence
  Description of Artificial Sequence: Synthetic oligonucleotide
  Antisense strand to SEQ ID NO: 2337850
cauauaguuagauacuaca

SEQ ID NO: 2337852 - RNA, 19 nt, Artificial Sequence
  Description of Artificial Sequence: Synthetic oligonucleotide
  Sense strand starting at position 3499 of SEQ ID NO: 1885380
ucuuauguugucgccaagu

SEQ ID NO: 2337853 - RNA, 19 nt, Artificial Sequence
  Description of Artificial Sequence: Synthetic oligonucleotide
  Antisense strand to SEQ ID NO: 2337852
acuuggcgacaacauaaga

SEQ ID NO: 2337854 - RNA, 19 nt, Artificial Sequence
  Description of Artificial Sequence: Synthetic oligonucleotide
  Sense strand starting at position 3530 of SEQ ID NO: 1885380
uugucucuccagcaauaag

SEQ ID NO: 2337855 - RNA, 19 nt, Artificial Sequence
  Description of Artificial Sequence: Synthetic oligonucleotide
  Antisense strand to SEQ ID NO: 2337854
cuuauugcuggagagacaa

SEQ ID NO: 2337856 - RNA, 19 nt, Artificial Sequence
  Description of Artificial Sequence: Synthetic oligonucleotide
  Sense strand starting at position 3549 of SEQ ID NO: 1885380
aagggauacaugugagugu

SEQ ID NO: 2337857 - RNA, 19 nt, Artificial Sequence
  Description of Artificial Sequence: Synthetic oligonucleotide
  Antisense strand to SEQ ID NO: 2337856
acacucacauguaucccuu

SEQ ID NO: 2337858 - RNA, 19 nt, Artificial Sequence
  Description of Artificial Sequence: Synthetic oligonucleotide
  Sense strand starting at position 3646 of SEQ ID NO: 1885380
gucuaauauguacagacau

SEQ ID NO: 2337859 - RNA, 19 nt, Artificial Sequence
  Description of Artificial Sequence: Synthetic oligonucleotide
  Antisense strand to SEQ ID NO: 2337858
augucuguacauauuagac

SEQ ID NO: 2337860 - RNA, 19 nt, Artificial Sequence
  Description of Artificial Sequence: Synthetic oligonucleotide
  Sense strand starting at position 3796 of SEQ ID NO: 1885380
cgguuuauuagugacaaau

SEQ ID NO: 2337861 - RNA, 19 nt, Artificial Sequence
  Description of Artificial Sequence: Synthetic oligonucleotide
  Antisense strand to SEQ ID NO: 2337860
auuugucacuaauaaaccg

SEQ ID NO: 2337862 - RNA, 19 nt, Artificial Sequence
  Description of Artificial Sequence: Synthetic oligonucleotide
  Sense strand starting at position 32 of SEQ ID NO: 1885381
guuuccauagguuaggauu

SEQ ID NO: 2337863 - RNA, 19 nt, Artificial Sequence
  Description of Artificial Sequence: Synthetic oligonucleotide
  Antisense strand to SEQ ID NO: 2337862
aauccuaaccuauggaaac

SEQ ID NO: 2337864 - RNA, 19 nt, Artificial Sequence
  Description of Artificial Sequence: Synthetic oligonucleotide
  Sense strand starting at position 346 of SEQ ID NO: 1885381
agcucagauugacucacau

SEQ ID NO: 2337865 - RNA, 19 nt, Artificial Sequence
  Description of Artificial Sequence: Synthetic oligonucleotide
  Antisense strand to SEQ ID NO: 2337864
augugagucaaucugagcu

SEQ ID NO: 2337866 - RNA, 19 nt, Artificial Sequence
  Description of Artificial Sequence: Synthetic oligonucleotide
  Sense strand starting at position 355 of SEQ ID NO: 1885381
ugacucacauauguuuaua

SEQ ID NO: 2337867 - RNA, 19 nt, Artificial Sequence
  Description of Artificial Sequence: Synthetic oligonucleotide
  Antisense strand to SEQ ID NO: 2337866
uauaaacauaugugaguca

SEQ ID NO: 2337868 - RNA, 19 nt, Artificial Sequence
  Description of Artificial Sequence: Synthetic oligonucleotide
  Sense strand starting at position 451 of SEQ ID NO: 1885381
auaucccuugaguaaguua

SEQ ID NO: 2337869 - RNA, 19 nt, Artificial Sequence
  Description of Artificial Sequence: Synthetic oligonucleotide
  Antisense strand to SEQ ID NO: 2337868
uaacuuacucaagggauau

SEQ ID NO: 2337870 - RNA, 19 nt, Artificial Sequence
  Description of Artificial Sequence: Synthetic oligonucleotide
  Sense strand starting at position 466 of SEQ ID NO: 1885381
guuacuagugaguacuaua

SEQ ID NO: 2337871 - RNA, 19 nt, Artificial Sequence
  Description of Artificial Sequence: Synthetic oligonucleotide
  Antisense strand to SEQ ID NO: 2337870
uauaguacucacuaguaac

SEQ ID NO: 2337872 - RNA, 19 nt, Artificial Sequence
  Description of Artificial Sequence: Synthetic oligonucleotide
  Sense strand starting at position 510 of SEQ ID NO: 1885381
gagugcucagaauaguaaa

SEQ ID NO: 2337873 - RNA, 19 nt, Artificial Sequence
  Description of Artificial Sequence: Synthetic oligonucleotide
  Antisense strand to SEQ ID NO: 2337872
uuuacuauucugagcacuc

SEQ ID NO: 2337874 - RNA, 19 nt, Artificial Sequence
  Description of Artificial Sequence: Synthetic oligonucleotide
  Sense strand starting at position 607 of SEQ ID NO: 1885381
uuugaagaucagugugaua

SEQ ID NO: 2337875 - RNA, 19 nt, Artificial Sequence
  Description of Artificial Sequence: Synthetic oligonucleotide
  Antisense strand to SEQ ID NO: 2337874
uaucacacugaucuucaaa

SEQ ID NO: 2337876 - RNA, 19 nt, Artificial Sequence
  Description of Artificial Sequence: Synthetic oligonucleotide
  Sense strand starting at position 609 of SEQ ID NO: 1885381
ugaagaucagugugauaag

SEQ ID NO: 2337877 - RNA, 19 nt, Artificial Sequence
  Description of Artificial Sequence: Synthetic oligonucleotide
  Antisense strand to SEQ ID NO: 2337876
cuuaucacacugaucuuca

SEQ ID NO: 2337878 - RNA, 19 nt, Artificial Sequence
  Description of Artificial Sequence: Synthetic oligonucleotide
  Sense strand starting at position 619 of SEQ ID NO: 1885381
ugugauaagccauacuuga

SEQ ID NO: 2337879 - RNA, 19 nt, Artificial Sequence
  Description of Artificial Sequence: Synthetic oligonucleotide
  Antisense strand to SEQ ID NO: 2337878
ucaaguauggcuuaucaca

SEQ ID NO: 2337880 - RNA, 19 nt, Artificial Sequence
  Description of Artificial Sequence: Synthetic oligonucleotide
  Sense strand starting at position 774 of SEQ ID NO: 1885381
cuuguaauucuguagacuc

SEQ ID NO: 2337881 - RNA, 19 nt, Artificial Sequence
  Description of Artificial Sequence: Synthetic oligonucleotide
  Antisense strand to SEQ ID NO: 2337880
gagucuacagaauuacaag

SEQ ID NO: 2337882 - RNA, 19 nt, Artificial Sequence
  Description of Artificial Sequence: Synthetic oligonucleotide
  Sense strand starting at position 913 of SEQ ID NO: 1885381
uugggauaugucuauagua

SEQ ID NO: 2337883 - RNA, 19 nt, Artificial Sequence
  Description of Artificial Sequence: Synthetic oligonucleotide
  Antisense strand to SEQ ID NO: 2337882
uacuauagacauaucccaa

SEQ ID NO: 2337884 - RNA, 19 nt, Artificial Sequence
  Description of Artificial Sequence: Synthetic oligonucleotide
  Sense strand starting at position 990 of SEQ ID NO: 1885381
ccuauuauagcugauguca

SEQ ID NO: 2337885 - RNA, 19 nt, Artificial Sequence
  Description of Artificial Sequence: Synthetic oligonucleotide
  Antisense strand to SEQ ID NO: 2337884
ugacaucagcuauaauagg

SEQ ID NO: 2337886 - RNA, 19 nt, Artificial Sequence
  Description of Artificial Sequence: Synthetic oligonucleotide
  Sense strand starting at position 1022 of SEQ ID NO: 1885381
aguagaaaggcaugacuca

SEQ ID NO: 2337887 - RNA, 19 nt, Artificial Sequence
  Description of Artificial Sequence: Synthetic oligonucleotide
  Antisense strand to SEQ ID NO: 2337886
ugagucaugccuuucuacu

SEQ ID NO: 2337888 - RNA, 19 nt, Artificial Sequence
  Description of Artificial Sequence: Synthetic oligonucleotide
  Sense strand starting at position 1331 of SEQ ID NO: 1885381
gaccauauuuauucgucga

SEQ ID NO: 2337889 - RNA, 19 nt, Artificial Sequence
  Description of Artificial Sequence: Synthetic oligonucleotide
  Antisense strand to SEQ ID NO: 2337888
ucgacgaauaaauaugguc

SEQ ID NO: 2337890 - RNA, 19 nt, Artificial Sequence
  Description of Artificial Sequence: Synthetic oligonucleotide
  Sense strand starting at position 1333 of SEQ ID NO: 1885381
ccauauuuauucgucgaau

SEQ ID NO: 2337891 - RNA, 19 nt, Artificial Sequence
  Description of Artificial Sequence: Synthetic oligonucleotide
  Antisense strand to SEQ ID NO: 2337890
auucgacgaauaaauaugg

SEQ ID NO: 2337892 - RNA, 19 nt, Artificial Sequence
  Description of Artificial Sequence: Synthetic oligonucleotide
  Sense strand starting at position 1334 of SEQ ID NO: 1885381
cauauuuauucgucgaauc

SEQ ID NO: 2337893 - RNA, 19 nt, Artificial Sequence
  Description of Artificial Sequence: Synthetic oligonucleotide
  Antisense strand to SEQ ID NO: 2337892
gauucgacgaauaaauaug

SEQ ID NO: 2337894 - RNA, 19 nt, Artificial Sequence
  Description of Artificial Sequence: Synthetic oligonucleotide
  Sense strand starting at position 1335 of SEQ ID NO: 1885381
auauuuauucgucgaauca

SEQ ID NO: 2337895 - RNA, 19 nt, Artificial Sequence
  Description of Artificial Sequence: Synthetic oligonucleotide
  Antisense strand to SEQ ID NO: 2337894
ugauucgacgaauaaauau

SEQ ID NO: 2337896 - RNA, 19 nt, Artificial Sequence
  Description of Artificial Sequence: Synthetic oligonucleotide
  Sense strand starting at position 1368 of SEQ ID NO: 1885381
gguaguaagacuggauauu

SEQ ID NO: 2337897 - RNA, 19 nt, Artificial Sequence
  Description of Artificial Sequence: Synthetic oligonucleotide
  Antisense strand to SEQ ID NO: 2337896
aauauccagucuuacuacc

SEQ ID NO: 2337898 - RNA, 19 nt, Artificial Sequence
  Description of Artificial Sequence: Synthetic oligonucleotide
  Sense strand starting at position 1440 of SEQ ID NO: 1885381
guuaauuaucagcagguua

SEQ ID NO: 2337899 - RNA, 19 nt, Artificial Sequence
  Description of Artificial Sequence: Synthetic oligonucleotide
  Antisense strand to SEQ ID NO: 2337898
uaaccugcugauaauuaac

SEQ ID NO: 2337900 - RNA, 19 nt, Artificial Sequence
  Description of Artificial Sequence: Synthetic oligonucleotide
  Sense strand starting at position 1464 of SEQ ID NO: 1885381
gagcuuagucuuugaagaa

SEQ ID NO: 2337901 - RNA, 19 nt, Artificial Sequence
  Description of Artificial Sequence: Synthetic oligonucleotide
  Antisense strand to SEQ ID NO: 2337900
uucuucaaagacuaagcuc

SEQ ID NO: 2337902 - RNA, 19 nt, Artificial Sequence
  Description of Artificial Sequence: Synthetic oligonucleotide
  Sense strand starting at position 1605 of SEQ ID NO: 1885381
uuaugucuggaagguaaau

SEQ ID NO: 2337903 - RNA, 19 nt, Artificial Sequence
  Description of Artificial Sequence: Synthetic oligonucleotide
  Antisense strand to SEQ ID NO: 2337902
auuuaccuuccagacauaa

SEQ ID NO: 2337904 - RNA, 19 nt, Artificial Sequence
  Description of Artificial Sequence: Synthetic oligonucleotide
  Sense strand starting at position 1611 of SEQ ID NO: 1885381
cuggaagguaaaugaguuu

SEQ ID NO: 2337905 - RNA, 19 nt, Artificial Sequence
  Description of Artificial Sequence: Synthetic oligonucleotide
  Antisense strand to SEQ ID NO: 2337904
aaacucauuuaccuuccag

SEQ ID NO: 2337906 - RNA, 19 nt, Artificial Sequence
  Description of Artificial Sequence: Synthetic oligonucleotide
  Sense strand starting at position 1871 of SEQ ID NO: 1885381
aaggcugauuuggaagaua

SEQ ID NO: 2337907 - RNA, 19 nt, Artificial Sequence
  Description of Artificial Sequence: Synthetic oligonucleotide
  Antisense strand to SEQ ID NO: 2337906
uaucuuccaaaucagccuu

SEQ ID NO: 2337908 - RNA, 19 nt, Artificial Sequence
  Description of Artificial Sequence: Synthetic oligonucleotide
  Sense strand starting at position 1883 of SEQ ID NO: 1885381
gaagauauuugagggauaa

SEQ ID NO: 2337909 - RNA, 19 nt, Artificial Sequence
  Description of Artificial Sequence: Synthetic oligonucleotide
  Antisense strand to SEQ ID NO: 2337908
uuaucccucaaauaucuuc

SEQ ID NO: 2337910 - RNA, 19 nt, Artificial Sequence
  Description of Artificial Sequence: Synthetic oligonucleotide
  Sense strand starting at position 2049 of SEQ ID NO: 1885381
uugggaagugacuggauca

SEQ ID NO: 2337911 - RNA, 19 nt, Artificial Sequence
  Description of Artificial Sequence: Synthetic oligonucleotide
  Antisense strand to SEQ ID NO: 2337910
ugauccagucacuucccaa

SEQ ID NO: 2337912 - RNA, 19 nt, Artificial Sequence
  Description of Artificial Sequence: Synthetic oligonucleotide
  Sense strand starting at position 2120 of SEQ ID NO: 1885381
cugauagugagucaguuau

SEQ ID NO: 2337913 - RNA, 19 nt, Artificial Sequence
  Description of Artificial Sequence: Synthetic oligonucleotide
  Antisense strand to SEQ ID NO: 2337912
auaacugacucacuaucag

SEQ ID NO: 2337914 - RNA, 19 nt, Artificial Sequence
  Description of Artificial Sequence: Synthetic oligonucleotide
  Sense strand starting at position 2392 of SEQ ID NO: 1885381
cuaauacacuggcuaaaga

SEQ ID NO: 2337915 - RNA, 19 nt, Artificial Sequence
  Description of Artificial Sequence: Synthetic oligonucleotide
  Antisense strand to SEQ ID NO: 2337914
ucuuuagccaguguauuag

SEQ ID NO: 2337916 - RNA, 19 nt, Artificial Sequence
  Description of Artificial Sequence: Synthetic oligonucleotide
  Sense strand starting at position 2430 of SEQ ID NO: 1885381
ugcacugcccaauaagaua

SEQ ID NO: 2337917 - RNA, 19 nt, Artificial Sequence
  Description of Artificial Sequence: Synthetic oligonucleotide
  Antisense strand to SEQ ID NO: 2337916
uaucuuauugggcagugca

SEQ ID NO: 2337918 - RNA, 19 nt, Artificial Sequence
  Description of Artificial Sequence: Synthetic oligonucleotide
  Sense strand starting at position 2705 of SEQ ID NO: 1885381
ucuauuggacagcaguaau

SEQ ID NO: 2337919 - RNA, 19 nt, Artificial Sequence
  Description of Artificial Sequence: Synthetic oligonucleotide
  Antisense strand to SEQ ID NO: 2337918
auuacugcuguccaauaga

SEQ ID NO: 2337920 - RNA, 19 nt, Artificial Sequence
  Description of Artificial Sequence: Synthetic oligonucleotide
  Sense strand starting at position 2742 of SEQ ID NO: 1885381
auccuuuguguuuaucaga

SEQ ID NO: 2337921 - RNA, 19 nt, Artificial Sequence
  Description of Artificial Sequence: Synthetic oligonucleotide
  Antisense strand to SEQ ID NO: 2337920
ucugauaaacacaaaggau

SEQ ID NO: 2337922 - RNA, 19 nt, Artificial Sequence
  Description of Artificial Sequence: Synthetic oligonucleotide
  Sense strand starting at position 2828 of SEQ ID NO: 1885381
cauuaaauguggguauaca

SEQ ID NO: 2337923 - RNA, 19 nt, Artificial Sequence
  Description of Artificial Sequence: Synthetic oligonucleotide
  Antisense strand to SEQ ID NO: 2337922
uguauacccacauuuaaug

SEQ ID NO: 2337924 - RNA, 19 nt, Artificial Sequence
  Description of Artificial Sequence: Synthetic oligonucleotide
  Sense strand starting at position 3145 of SEQ ID NO: 1885381
ucugacaagugauucuaaa

SEQ ID NO: 2337925 - RNA, 19 nt, Artificial Sequence
  Description of Artificial Sequence: Synthetic oligonucleotide
  Antisense strand to SEQ ID NO: 2337924
uuuagaaucacuugucaga

SEQ ID NO: 2337926 - RNA, 19 nt, Artificial Sequence
  Description of Artificial Sequence: Synthetic oligonucleotide
  Sense strand starting at position 3288 of SEQ ID NO: 1885381
aucacaaaguugucuuaua

SEQ ID NO: 2337927 - RNA, 19 nt, Artificial Sequence
  Description of Artificial Sequence: Synthetic oligonucleotide
  Antisense strand to SEQ ID NO: 2337926
uauaagacaacuuugugau

SEQ ID NO: 2337928 - RNA, 19 nt, Artificial Sequence
  Description of Artificial Sequence: Synthetic oligonucleotide
  Sense strand starting at position 3289 of SEQ ID NO: 1885381
ucacaaaguugucuuauaa

SEQ ID NO: 2337929 - RNA, 19 nt, Artificial Sequence
  Description of Artificial Sequence: Synthetic oligonucleotide
  Antisense strand to SEQ ID NO: 2337928
uuauaagacaacuuuguga

SEQ ID NO: 2337930 - RNA, 19 nt, Artificial Sequence
  Description of Artificial Sequence: Synthetic oligonucleotide
  Sense strand starting at position 3416 of SEQ ID NO: 1885381
uguggaauauaacucuuau

SEQ ID NO: 2337931 - RNA, 19 nt, Artificial Sequence
  Description of Artificial Sequence: Synthetic oligonucleotide
  Antisense strand to SEQ ID NO: 2337930
auaagaguuauauuccaca

SEQ ID NO: 2337932 - RNA, 19 nt, Artificial Sequence
  Description of Artificial Sequence: Synthetic oligonucleotide
  Sense strand starting at position 3470 of SEQ ID NO: 1885381
gauaguucuuauguuaaag

SEQ ID NO: 2337933 - RNA, 19 nt, Artificial Sequence
  Description of Artificial Sequence: Synthetic oligonucleotide
  Antisense strand to SEQ ID NO: 2337932
cuuuaacauaagaacuauc

SEQ ID NO: 2337934 - RNA, 19 nt, Artificial Sequence
  Description of Artificial Sequence: Synthetic oligonucleotide
  Sense strand starting at position 3597 of SEQ ID NO: 1885381
gcacuaagauuucuuuguu

SEQ ID NO: 2337935 - RNA, 19 nt, Artificial Sequence
  Description of Artificial Sequence: Synthetic oligonucleotide
  Antisense strand to SEQ ID NO: 2337934
aacaaagaaaucuuagugc

SEQ ID NO: 2337936 - RNA, 19 nt, Artificial Sequence
  Description of Artificial Sequence: Synthetic oligonucleotide
  Sense strand starting at position 3921 of SEQ ID NO: 1885381
auuggauuaaugugauuga

SEQ ID NO: 2337937 - RNA, 19 nt, Artificial Sequence
  Description of Artificial Sequence: Synthetic oligonucleotide
  Antisense strand to SEQ ID NO: 2337936
ucaaucacauuaauccaau

SEQ ID NO: 2337938 - RNA, 19 nt, Artificial Sequence
  Description of Artificial Sequence: Synthetic oligonucleotide
  Sense strand starting at position 3925 of SEQ ID NO: 1885381
gauuaaugugauugaaacu

SEQ ID NO: 2337939 - RNA, 19 nt, Artificial Sequence
  Description of Artificial Sequence: Synthetic oligonucleotide
  Antisense strand to SEQ ID NO: 2337938
aguuucaaucacauuaauc

SEQ ID NO: 2337940 - RNA, 19 nt, Artificial Sequence
  Description of Artificial Sequence: Synthetic oligonucleotide
  Sense strand starting at position 3959 of SEQ ID NO: 1885381
agauaaacuuggcuuuaag

SEQ ID NO: 2337941 - RNA, 19 nt, Artificial Sequence
  Description of Artificial Sequence: Synthetic oligonucleotide
  Antisense strand to SEQ ID NO: 2337940
cuuaaagccaaguuuaucu

SEQ ID NO: 2337942 - RNA, 19 nt, Artificial Sequence
  Description of Artificial Sequence: Synthetic oligonucleotide
  Sense strand starting at position 40 of SEQ ID NO: 1885382
cauuccgauccaugacagu

SEQ ID NO: 2337943 - RNA, 19 nt, Artificial Sequence
  Description of Artificial Sequence: Synthetic oligonucleotide
  Antisense strand to SEQ ID NO: 2337942
acugucauggaucggaaug

SEQ ID NO: 2337944 - RNA, 19 nt, Artificial Sequence
  Description of Artificial Sequence: Synthetic oligonucleotide
  Sense strand starting at position 77 of SEQ ID NO: 1885382
ucaacagguugucuuacau

SEQ ID NO: 2337945 - RNA, 19 nt, Artificial Sequence
  Description of Artificial Sequence: Synthetic oligonucleotide
  Antisense strand to SEQ ID NO: 2337944
auguaagacaaccuguuga

SEQ ID NO: 2337946 - RNA, 19 nt, Artificial Sequence
  Description of Artificial Sequence: Synthetic oligonucleotide
  Sense strand starting at position 92 of SEQ ID NO: 1885382
acaugugcaaugugagaaa

SEQ ID NO: 2337947 - RNA, 19 nt, Artificial Sequence
  Description of Artificial Sequence: Synthetic oligonucleotide
  Antisense strand to SEQ ID NO: 2337946
uuucucacauugcacaugu

SEQ ID NO: 2337948 - RNA, 19 nt, Artificial Sequence
  Description of Artificial Sequence: Synthetic oligonucleotide
  Sense strand starting at position 101 of SEQ ID NO: 1885382
augugagaaagcugccaaa

SEQ ID NO: 2337949 - RNA, 19 nt, Artificial Sequence
  Description of Artificial Sequence: Synthetic oligonucleotide
  Antisense strand to SEQ ID NO: 2337948
uuuggcagcuuucucacau

SEQ ID NO: 2337950 - RNA, 19 nt, Artificial Sequence
  Description of Artificial Sequence: Synthetic oligonucleotide
  Sense strand starting at position 153 of SEQ ID NO: 1885382
gacugucauggucaguauu

SEQ ID NO: 2337951 - RNA, 19 nt, Artificial Sequence
  Description of Artificial Sequence: Synthetic oligonucleotide
  Antisense strand to SEQ ID NO: 2337950
aauacugaccaugacaguc

SEQ ID NO: 2337952 - RNA, 19 nt, Artificial Sequence
  Description of Artificial Sequence: Synthetic oligonucleotide
  Sense strand starting at position 322 of SEQ ID NO: 1885382
cuaggagauucuguugcaa

SEQ ID NO: 2337953 - RNA, 19 nt, Artificial Sequence
  Description of Artificial Sequence: Synthetic oligonucleotide
  Antisense strand to SEQ ID NO: 2337952
uugcaacagaaucuccuag

SEQ ID NO: 2337954 - RNA, 19 nt, Artificial Sequence
  Description of Artificial Sequence: Synthetic oligonucleotide
  Sense strand starting at position 527 of SEQ ID NO: 1885382
aaagaacaauuguucguau

SEQ ID NO: 2337955 - RNA, 19 nt, Artificial Sequence
  Description of Artificial Sequence: Synthetic oligonucleotide
  Antisense strand to SEQ ID NO: 2337954
auacgaacaauuguucuuu

SEQ ID NO: 2337956 - RNA, 19 nt, Artificial Sequence
  Description of Artificial Sequence: Synthetic oligonucleotide
  Sense strand starting at position 529 of SEQ ID NO: 1885382
agaacaauuguucguauca

SEQ ID NO: 2337957 - RNA, 19 nt, Artificial Sequence
  Description of Artificial Sequence: Synthetic oligonucleotide
  Antisense strand to SEQ ID NO: 2337956
ugauacgaacaauuguucu

SEQ ID NO: 2337958 - RNA, 19 nt, Artificial Sequence
  Description of Artificial Sequence: Synthetic oligonucleotide
  Sense strand starting at position 598 of SEQ ID NO: 1885382
cugcucuuacagcaaugau

SEQ ID NO: 2337959 - RNA, 19 nt, Artificial Sequence
  Description of Artificial Sequence: Synthetic oligonucleotide
  Antisense strand to SEQ ID NO: 2337958
aucauugcuguaagagcag

SEQ ID NO: 2337960 - RNA, 19 nt, Artificial Sequence
  Description of Artificial Sequence: Synthetic oligonucleotide
  Sense strand starting at position 717 of SEQ ID NO: 1885382
acagcacuucccgaauacu

SEQ ID NO: 2337961 - RNA, 19 nt, Artificial Sequence
  Description of Artificial Sequence: Synthetic oligonucleotide
  Antisense strand to SEQ ID NO: 2337960
aguauucgggaagugcugu

SEQ ID NO: 2337962 - RNA, 19 nt, Artificial Sequence
  Description of Artificial Sequence: Synthetic oligonucleotide
  Sense strand starting at position 888 of SEQ ID NO: 1885382
uguguaaauccuggcauuu

SEQ ID NO: 2337963 - RNA, 19 nt, Artificial Sequence
  Description of Artificial Sequence: Synthetic oligonucleotide
  Antisense strand to SEQ ID NO: 2337962
aaaugccaggauuuacaca

SEQ ID NO: 2337964 - RNA, 19 nt, Artificial Sequence
  Description of Artificial Sequence: Synthetic oligonucleotide
  Sense strand starting at position 909 of SEQ ID NO: 1885382
agaugauguuuccugcaug

SEQ ID NO: 2337965 - RNA, 19 nt, Artificial Sequence
  Description of Artificial Sequence: Synthetic oligonucleotide
  Antisense strand to SEQ ID NO: 2337964
caugcaggaaacaucaucu

SEQ ID NO: 2337966 - RNA, 19 nt, Artificial Sequence
  Description of Artificial Sequence: Synthetic oligonucleotide
  Sense strand starting at position 1028 of SEQ ID NO: 1885382
cagggauucggugaggguu

SEQ ID NO: 2337967 - RNA, 19 nt, Artificial Sequence
  Description of Artificial Sequence: Synthetic oligonucleotide
  Antisense strand to SEQ ID NO: 2337966
aacccucaccgaaucccug

SEQ ID NO: 2337968 - RNA, 19 nt, Artificial Sequence
  Description of Artificial Sequence: Synthetic oligonucleotide
  Sense strand starting at position 1198 of SEQ ID NO: 1885382
auaucagauuuccagugga

SEQ ID NO: 2337969 - RNA, 19 nt, Artificial Sequence
  Description of Artificial Sequence: Synthetic oligonucleotide
  Antisense strand to SEQ ID NO: 2337968
uccacuggaaaucugauau

SEQ ID NO: 2337970 - RNA, 19 nt, Artificial Sequence
  Description of Artificial Sequence: Synthetic oligonucleotide
  Sense strand starting at position 1331 of SEQ ID NO: 1885382
agaacuaauuguucugaug

SEQ ID NO: 2337971 - RNA, 19 nt, Artificial Sequence
  Description of Artificial Sequence: Synthetic oligonucleotide
  Antisense strand to SEQ ID NO: 2337970
caucagaacaauuaguucu

SEQ ID NO: 2337972 - RNA, 19 nt, Artificial Sequence
  Description of Artificial Sequence: Synthetic oligonucleotide
  Sense strand starting at position 1621 of SEQ ID NO: 1885382
aaguuaaagcgacacauua

SEQ ID NO: 2337973 - RNA, 19 nt, Artificial Sequence
  Description of Artificial Sequence: Synthetic oligonucleotide
  Antisense strand to SEQ ID NO: 2337972
uaaugugucgcuuuaacuu

SEQ ID NO: 2337974 - RNA, 19 nt, Artificial Sequence
  Description of Artificial Sequence: Synthetic oligonucleotide
  Sense strand starting at position 1684 of SEQ ID NO: 1885382
uguguagacagucauuaug

SEQ ID NO: 2337975 - RNA, 19 nt, Artificial Sequence
  Description of Artificial Sequence: Synthetic oligonucleotide
  Antisense strand to SEQ ID NO: 2337974
cauaaugacugucuacaca

SEQ ID NO: 2337976 - RNA, 19 nt, Artificial Sequence
  Description of Artificial Sequence: Synthetic oligonucleotide
  Sense strand starting at position 1687 of SEQ ID NO: 1885382
guagacagucauuauggua

SEQ ID NO: 2337977 - RNA, 19 nt, Artificial Sequence
  Description of Artificial Sequence: Synthetic oligonucleotide
  Antisense strand to SEQ ID NO: 2337976
uaccauaaugacugucuac

SEQ ID NO: 2337978 - RNA, 19 nt, Artificial Sequence
  Description of Artificial Sequence: Synthetic oligonucleotide
  Sense strand starting at position 1776 of SEQ ID NO: 1885382
ggccauaauuaaguuacaa

SEQ ID NO: 2337979 - RNA, 19 nt, Artificial Sequence
  Description of Artificial Sequence: Synthetic oligonucleotide
  Antisense strand to SEQ ID NO: 2337978
uuguaacuuaauuauggcc

SEQ ID NO: 2337980 - RNA, 19 nt, Artificial Sequence
  Description of Artificial Sequence: Synthetic oligonucleotide
  Sense strand starting at position 1809 of SEQ ID NO: 1885382
ucugguuuauuugaaagga

SEQ ID NO: 2337981 - RNA, 19 nt, Artificial Sequence
  Description of Artificial Sequence: Synthetic oligonucleotide
  Antisense strand to SEQ ID NO: 2337980
uccuuucaaauaaaccaga

SEQ ID NO: 2337982 - RNA, 19 nt, Artificial Sequence
  Description of Artificial Sequence: Synthetic oligonucleotide
  Sense strand starting at position 2020 of SEQ ID NO: 1885382
gguuauguguauuugccaa

SEQ ID NO: 2337983 - RNA, 19 nt, Artificial Sequence
  Description of Artificial Sequence: Synthetic oligonucleotide
  Antisense strand to SEQ ID NO: 2337982
uuggcaaauacacauaacc

SEQ ID NO: 2337984 - RNA, 19 nt, Artificial Sequence
  Description of Artificial Sequence: Synthetic oligonucleotide
  Sense strand starting at position 2022 of SEQ ID NO: 1885382
uuauguguauuugccaauu

SEQ ID NO: 2337985 - RNA, 19 nt, Artificial Sequence
  Description of Artificial Sequence: Synthetic oligonucleotide
  Antisense strand to SEQ ID NO: 2337984
aauuggcaaauacacauaa

SEQ ID NO: 2337986 - RNA, 19 nt, Artificial Sequence
  Description of Artificial Sequence: Synthetic oligonucleotide
  Sense strand starting at position 2203 of SEQ ID NO: 1885382
ugagucucauaauugagaa

SEQ ID NO: 2337987 - RNA, 19 nt, Artificial Sequence
  Description of Artificial Sequence: Synthetic oligonucleotide
  Antisense strand to SEQ ID NO: 2337986
uucucaauuaugagacuca

SEQ ID NO: 2337988 - RNA, 19 nt, Artificial Sequence
  Description of Artificial Sequence: Synthetic oligonucleotide
  Sense strand starting at position 2265 of SEQ ID NO: 1885382
gcaaauuaucaagaucagu

SEQ ID NO: 2337989 - RNA, 19 nt, Artificial Sequence
  Description of Artificial Sequence: Synthetic oligonucleotide
  Antisense strand to SEQ ID NO: 2337988
acugaucuugauaauuugc

SEQ ID NO: 2337990 - RNA, 19 nt, Artificial Sequence
  Description of Artificial Sequence: Synthetic oligonucleotide
  Sense strand starting at position 2280 of SEQ ID NO: 1885382
caguaagagcaacauguau

SEQ ID NO: 2337991 - RNA, 19 nt, Artificial Sequence
  Description of Artificial Sequence: Synthetic oligonucleotide
  Antisense strand to SEQ ID NO: 2337990
auacauguugcucuuacug

SEQ ID NO: 2337992 - RNA, 19 nt, Artificial Sequence
  Description of Artificial Sequence: Synthetic oligonucleotide
  Sense strand starting at position 2386 of SEQ ID NO: 1885382
gcucuacaauugguaaaga

SEQ ID NO: 2337993 - RNA, 19 nt, Artificial Sequence
  Description of Artificial Sequence: Synthetic oligonucleotide
  Antisense strand to SEQ ID NO: 2337992
ucuuuaccaauuguagagc

SEQ ID NO: 2337994 - RNA, 19 nt, Artificial Sequence
  Description of Artificial Sequence: Synthetic oligonucleotide
  Sense strand starting at position 2449 of SEQ ID NO: 1885382
ccgugaaucaccuagguaa

SEQ ID NO: 2337995 - RNA, 19 nt, Artificial Sequence
  Description of Artificial Sequence: Synthetic oligonucleotide
  Antisense strand to SEQ ID NO: 2337994
uuaccuaggugauucacgg

SEQ ID NO: 2337996 - RNA, 19 nt, Artificial Sequence
  Description of Artificial Sequence: Synthetic oligonucleotide
  Sense strand starting at position 2451 of SEQ ID NO: 1885382
gugaaucaccuagguaaga

SEQ ID NO: 2337997 - RNA, 19 nt, Artificial Sequence
  Description of Artificial Sequence: Synthetic oligonucleotide
  Antisense strand to SEQ ID NO: 2337996
ucuuaccuaggugauucac

SEQ ID NO: 2337998 - RNA, 19 nt, Artificial Sequence
  Description of Artificial Sequence: Synthetic oligonucleotide
  Sense strand starting at position 2452 of SEQ ID NO: 1885382
ugaaucaccuagguaagau

SEQ ID NO: 2337999 - RNA, 19 nt, Artificial Sequence
  Description of Artificial Sequence: Synthetic oligonucleotide
  Antisense strand to SEQ ID NO: 2337998
aucuuaccuaggugauuca

SEQ ID NO: 2338000 - RNA, 19 nt, Artificial Sequence
  Description of Artificial Sequence: Synthetic oligonucleotide
  Sense strand starting at position 2714 of SEQ ID NO: 1885382
auuuguguuuggcccaagu

SEQ ID NO: 2338001 - RNA, 19 nt, Artificial Sequence
  Description of Artificial Sequence: Synthetic oligonucleotide
  Antisense strand to SEQ ID NO: 2338000
acuugggccaaacacaaau

SEQ ID NO: 2338002 - RNA, 19 nt, Artificial Sequence
  Description of Artificial Sequence: Synthetic oligonucleotide
  Sense strand starting at position 2718 of SEQ ID NO: 1885382
guguuuggcccaagugguu

SEQ ID NO: 2338003 - RNA, 19 nt, Artificial Sequence
  Description of Artificial Sequence: Synthetic oligonucleotide
  Antisense strand to SEQ ID NO: 2338002
aaccacuugggccaaacac

SEQ ID NO: 2338004 - RNA, 19 nt, Artificial Sequence
  Description of Artificial Sequence: Synthetic oligonucleotide
  Sense strand starting at position 3006 of SEQ ID NO: 1885382
uuggaaucuuauguaucuu

SEQ ID NO: 2338005 - RNA, 19 nt, Artificial Sequence
  Description of Artificial Sequence: Synthetic oligonucleotide
  Antisense strand to SEQ ID NO: 2338004
aagauacauaagauuccaa

SEQ ID NO: 2338006 - RNA, 19 nt, Artificial Sequence
  Description of Artificial Sequence: Synthetic oligonucleotide
  Sense strand starting at position 3331 of SEQ ID NO: 1885382
caguucuuggucuaaguaa

SEQ ID NO: 2338007 - RNA, 19 nt, Artificial Sequence
  Description of Artificial Sequence: Synthetic oligonucleotide
  Antisense strand to SEQ ID NO: 2338006
uuacuuagaccaagaacug

SEQ ID NO: 2338008 - RNA, 19 nt, Artificial Sequence
  Description of Artificial Sequence: Synthetic oligonucleotide
  Sense strand starting at position 3424 of SEQ ID NO: 1885382
gaaucaucuggugggugga

SEQ ID NO: 2338009 - RNA, 19 nt, Artificial Sequence
  Description of Artificial Sequence: Synthetic oligonucleotide
  Antisense strand to SEQ ID NO: 2338008
uccacccaccagaugauuc

SEQ ID NO: 2338010 - RNA, 19 nt, Artificial Sequence
  Description of Artificial Sequence: Synthetic oligonucleotide
  Sense strand starting at position 3701 of SEQ ID NO: 1885382
ucacucugguugguugaga

SEQ ID NO: 2338011 - RNA, 19 nt, Artificial Sequence
  Description of Artificial Sequence: Synthetic oligonucleotide
  Antisense strand to SEQ ID NO: 2338010
ucucaaccaaccagaguga

SEQ ID NO: 2338012 - RNA, 19 nt, Artificial Sequence
  Description of Artificial Sequence: Synthetic oligonucleotide
  Sense strand starting at position 3702 of SEQ ID NO: 1885382
cacucugguugguugagaa

SEQ ID NO: 2338013 - RNA, 19 nt, Artificial Sequence
  Description of Artificial Sequence: Synthetic oligonucleotide
  Antisense strand to SEQ ID NO: 2338012
uucucaaccaaccagagug

SEQ ID NO: 2338014 - RNA, 19 nt, Artificial Sequence
  Description of Artificial Sequence: Synthetic oligonucleotide
  Sense strand starting at position 3932 of SEQ ID NO: 1885382
gagcaacacgguugagaau

SEQ ID NO: 2338015 - RNA, 19 nt, Artificial Sequence
  Description of Artificial Sequence: Synthetic oligonucleotide
  Antisense strand to SEQ ID NO: 2338014
auucucaaccguguugcuc

SEQ ID NO: 2338016 - RNA, 19 nt, Artificial Sequence
  Description of Artificial Sequence: Synthetic oligonucleotide
  Sense strand starting at position 3941 of SEQ ID NO: 1885382
gguugagaaucacugcaug

SEQ ID NO: 2338017 - RNA, 19 nt, Artificial Sequence
  Description of Artificial Sequence: Synthetic oligonucleotide
  Antisense strand to SEQ ID NO: 2338016
caugcagugauucucaacc

SEQ ID NO: 2338018 - RNA, 19 nt, Artificial Sequence
  Description of Artificial Sequence: Synthetic oligonucleotide
  Sense strand starting at position 3946 of SEQ ID NO: 1885382
agaaucacugcaugagaua

SEQ ID NO: 2338019 - RNA, 19 nt, Artificial Sequence
  Description of Artificial Sequence: Synthetic oligonucleotide
  Antisense strand to SEQ ID NO: 2338018
uaucucaugcagugauucu

SEQ ID NO: 2338020 - RNA, 19 nt, Artificial Sequence
  Description of Artificial Sequence: Synthetic oligonucleotide
  Sense strand starting at position 3965 of SEQ ID NO: 1885382
cugaaauccugguuuauac

SEQ ID NO: 2338021 - RNA, 19 nt, Artificial Sequence
  Description of Artificial Sequence: Synthetic oligonucleotide
  Antisense strand to SEQ ID NO: 2338020
guauaaaccaggauuucag

SEQ ID NO: 2338022 - RNA, 19 nt, Artificial Sequence
  Description of Artificial Sequence: Synthetic oligonucleotide
  Sense strand starting at position 51 of SEQ ID NO: 1885383
uguauuguugcacaagaau

SEQ ID NO: 2338023 - RNA, 19 nt, Artificial Sequence
  Description of Artificial Sequence: Synthetic oligonucleotide
  Antisense strand to SEQ ID NO: 2338022
auucuugugcaacaauaca

SEQ ID NO: 2338024 - RNA, 19 nt, Artificial Sequence
  Description of Artificial Sequence: Synthetic oligonucleotide
  Sense strand starting at position 54 of SEQ ID NO: 1885383
auuguugcacaagaaugau

SEQ ID NO: 2338025 - RNA, 19 nt, Artificial Sequence
  Description of Artificial Sequence: Synthetic oligonucleotide
  Antisense strand to SEQ ID NO: 2338024
aucauucuugugcaacaau

SEQ ID NO: 2338026 - RNA, 19 nt, Artificial Sequence
  Description of Artificial Sequence: Synthetic oligonucleotide
  Sense strand starting at position 57 of SEQ ID NO: 1885383
guugcacaagaaugauaaa

SEQ ID NO: 2338027 - RNA, 19 nt, Artificial Sequence
  Description of Artificial Sequence: Synthetic oligonucleotide
  Antisense strand to SEQ ID NO: 2338026
uuuaucauucuugugcaac

SEQ ID NO: 2338028 - RNA, 19 nt, Artificial Sequence
  Description of Artificial Sequence: Synthetic oligonucleotide
  Sense strand starting at position 502 of SEQ ID NO: 1885383
ugcugaaguggauaaucua

SEQ ID NO: 2338029 - RNA, 19 nt, Artificial Sequence
  Description of Artificial Sequence: Synthetic oligonucleotide
  Antisense strand to SEQ ID NO: 2338028
uagauuauccacuucagca

SEQ ID NO: 2338030 - RNA, 19 nt, Artificial Sequence
  Description of Artificial Sequence: Synthetic oligonucleotide
  Sense strand starting at position 509 of SEQ ID NO: 1885383
guggauaaucuacacgguu

SEQ ID NO: 2338031 - RNA, 19 nt, Artificial Sequence
  Description of Artificial Sequence: Synthetic oligonucleotide
  Antisense strand to SEQ ID NO: 2338030
aaccguguagauuauccac

SEQ ID NO: 2338032 - RNA, 19 nt, Artificial Sequence
  Description of Artificial Sequence: Synthetic oligonucleotide
  Sense strand starting at position 655 of SEQ ID NO: 1885383
uuugcuuuaccaugagaaa

SEQ ID NO: 2338033 - RNA, 19 nt, Artificial Sequence
  Description of Artificial Sequence: Synthetic oligonucleotide
  Antisense strand to SEQ ID NO: 2338032
uuucucaugguaaagcaaa

SEQ ID NO: 2338034 - RNA, 19 nt, Artificial Sequence
  Description of Artificial Sequence: Synthetic oligonucleotide
  Sense strand starting at position 900 of SEQ ID NO: 1885383
uauagcuuguaauuaugga

SEQ ID NO: 2338035 - RNA, 19 nt, Artificial Sequence
  Description of Artificial Sequence: Synthetic oligonucleotide
  Antisense strand to SEQ ID NO: 2338034
uccauaauuacaagcuaua

SEQ ID NO: 2338036 - RNA, 19 nt, Artificial Sequence
  Description of Artificial Sequence: Synthetic oligonucleotide
  Sense strand starting at position 1039 of SEQ ID NO: 1885383
cugaaauaaucagcaauug

SEQ ID NO: 2338037 - RNA, 19 nt, Artificial Sequence
  Description of Artificial Sequence: Synthetic oligonucleotide
  Antisense strand to SEQ ID NO: 2338036
caauugcugauuauuucag

SEQ ID NO: 2338038 - RNA, 19 nt, Artificial Sequence
  Description of Artificial Sequence: Synthetic oligonucleotide
  Sense strand starting at position 1048 of SEQ ID NO: 1885383
ucagcaauugaguacacau

SEQ ID NO: 2338039 - RNA, 19 nt, Artificial Sequence
  Description of Artificial Sequence: Synthetic oligonucleotide
  Antisense strand to SEQ ID NO: 2338038
auguguacucaauugcuga

SEQ ID NO: 2338040 - RNA, 19 nt, Artificial Sequence
  Description of Artificial Sequence: Synthetic oligonucleotide
  Sense strand starting at position 1108 of SEQ ID NO: 1885383
agcagaaacuugguuccau

SEQ ID NO: 2338041 - RNA, 19 nt, Artificial Sequence
  Description of Artificial Sequence: Synthetic oligonucleotide
  Antisense strand to SEQ ID NO: 2338040
auggaaccaaguuucugcu

SEQ ID NO: 2338042 - RNA, 19 nt, Artificial Sequence
  Description of Artificial Sequence: Synthetic oligonucleotide
  Sense strand starting at position 1109 of SEQ ID NO: 1885383
gcagaaacuugguuccaua

SEQ ID NO: 2338043 - RNA, 19 nt, Artificial Sequence
  Description of Artificial Sequence: Synthetic oligonucleotide
  Antisense strand to SEQ ID NO: 2338042
uauggaaccaaguuucugc

SEQ ID NO: 2338044 - RNA, 19 nt, Artificial Sequence
  Description of Artificial Sequence: Synthetic oligonucleotide
  Sense strand starting at position 1212 of SEQ ID NO: 1885383
ggaguugacaguuauuccu

SEQ ID NO: 2338045 - RNA, 19 nt, Artificial Sequence
  Description of Artificial Sequence: Synthetic oligonucleotide
  Antisense strand to SEQ ID NO: 2338044
aggaauaacugucaacucc

SEQ ID NO: 2338046 - RNA, 19 nt, Artificial Sequence
  Description of Artificial Sequence: Synthetic oligonucleotide
  Sense strand starting at position 1294 of SEQ ID NO: 1885383
uccaauaauuagcuuggau

SEQ ID NO: 2338047 - RNA, 19 nt, Artificial Sequence
  Description of Artificial Sequence: Synthetic oligonucleotide
  Antisense strand to SEQ ID NO: 2338046
auccaagcuaauuauugga

SEQ ID NO: 2338048 - RNA, 19 nt, Artificial Sequence
  Description of Artificial Sequence: Synthetic oligonucleotide
  Sense strand starting at position 1601 of SEQ ID NO: 1885383
uacugaggcuuaccaaagu

SEQ ID NO: 2338049 - RNA, 19 nt, Artificial Sequence
  Description of Artificial Sequence: Synthetic oligonucleotide
  Antisense strand to SEQ ID NO: 2338048
acuuugguaagccucagua

SEQ ID NO: 2338050 - RNA, 19 nt, Artificial Sequence
  Description of Artificial Sequence: Synthetic oligonucleotide
  Sense strand starting at position 1700 of SEQ ID NO: 1885383
aauguauagcaaggauacu

SEQ ID NO: 2338051 - RNA, 19 nt, Artificial Sequence
  Description of Artificial Sequence: Synthetic oligonucleotide
  Antisense strand to SEQ ID NO: 2338050
aguauccuugcuauacauu

SEQ ID NO: 2338052 - RNA, 19 nt, Artificial Sequence
  Description of Artificial Sequence: Synthetic oligonucleotide
  Sense strand starting at position 1913 of SEQ ID NO: 1885383
cgauaaugagauugcuuag

SEQ ID NO: 2338053 - RNA, 19 nt, Artificial Sequence
  Description of Artificial Sequence: Synthetic oligonucleotide
  Antisense strand to SEQ ID NO: 2338052
cuaagcaaucucauuaucg

SEQ ID NO: 2338054 - RNA, 19 nt, Artificial Sequence
  Description of Artificial Sequence: Synthetic oligonucleotide
  Sense strand starting at position 1916 of SEQ ID NO: 1885383
uaaugagauugcuuaggau

SEQ ID NO: 2338055 - RNA, 19 nt, Artificial Sequence
  Description of Artificial Sequence: Synthetic oligonucleotide
  Antisense strand to SEQ ID NO: 2338054
auccuaagcaaucucauua

SEQ ID NO: 2338056 - RNA, 19 nt, Artificial Sequence
  Description of Artificial Sequence: Synthetic oligonucleotide
  Sense strand starting at position 2055 of SEQ ID NO: 1885383
gggaaacaaugcgcugaaa

SEQ ID NO: 2338057 - RNA, 19 nt, Artificial Sequence
  Description of Artificial Sequence: Synthetic oligonucleotide
  Antisense strand to SEQ ID NO: 2338056
uuucagcgcauuguuuccc

SEQ ID NO: 2338058 - RNA, 19 nt, Artificial Sequence
  Description of Artificial Sequence: Synthetic oligonucleotide
  Sense strand starting at position 2144 of SEQ ID NO: 1885383
ggaagaagcacauguuaaa

SEQ ID NO: 2338059 - RNA, 19 nt, Artificial Sequence
  Description of Artificial Sequence: Synthetic oligonucleotide
  Antisense strand to SEQ ID NO: 2338058
uuuaacaugugcuucuucc

SEQ ID NO: 2338060 - RNA, 19 nt, Artificial Sequence
  Description of Artificial Sequence: Synthetic oligonucleotide
  Sense strand starting at position 2173 of SEQ ID NO: 1885383
uacauauaauguuuaggga

SEQ ID NO: 2338061 - RNA, 19 nt, Artificial Sequence
  Description of Artificial Sequence: Synthetic oligonucleotide
  Antisense strand to SEQ ID NO: 2338060
ucccuaaacauuauaugua

SEQ ID NO: 2338062 - RNA, 19 nt, Artificial Sequence
  Description of Artificial Sequence: Synthetic oligonucleotide
  Sense strand starting at position 2337 of SEQ ID NO: 1885383
uccuuccuggcuuaugaau

SEQ ID NO: 2338063 - RNA, 19 nt, Artificial Sequence
  Description of Artificial Sequence: Synthetic oligonucleotide
  Antisense strand to SEQ ID NO: 2338062
auucauaagccaggaagga

SEQ ID NO: 2338064 - RNA, 19 nt, Artificial Sequence
  Description of Artificial Sequence: Synthetic oligonucleotide
  Sense strand starting at position 2343 of SEQ ID NO: 1885383
cuggcuuaugaauagguga

SEQ ID NO: 2338065 - RNA, 19 nt, Artificial Sequence
  Description of Artificial Sequence: Synthetic oligonucleotide
  Antisense strand to SEQ ID NO: 2338064
ucaccuauucauaagccag

SEQ ID NO: 2338066 - RNA, 19 nt, Artificial Sequence
  Description of Artificial Sequence: Synthetic oligonucleotide
  Sense strand starting at position 2345 of SEQ ID NO: 1885383
ggcuuaugaauaggugaau

SEQ ID NO: 2338067 - RNA, 19 nt, Artificial Sequence
  Description of Artificial Sequence: Synthetic oligonucleotide
  Antisense strand to SEQ ID NO: 2338066
auucaccuauucauaagcc

SEQ ID NO: 2338068 - RNA, 19 nt, Artificial Sequence
  Description of Artificial Sequence: Synthetic oligonucleotide
  Sense strand starting at position 2618 of SEQ ID NO: 1885383
ccaccuuucgaguaacccu

SEQ ID NO: 2338069 - RNA, 19 nt, Artificial Sequence
  Description of Artificial Sequence: Synthetic oligonucleotide
  Antisense strand to SEQ ID NO: 2338068
aggguuacucgaaaggugg

SEQ ID NO: 2338070 - RNA, 19 nt, Artificial Sequence
  Description of Artificial Sequence: Synthetic oligonucleotide
  Sense strand starting at position 2726 of SEQ ID NO: 1885383
gugucucaucaauaucuga

SEQ ID NO: 2338071 - RNA, 19 nt, Artificial Sequence
  Description of Artificial Sequence: Synthetic oligonucleotide
  Antisense strand to SEQ ID NO: 2338070
ucagauauugaugagacac

SEQ ID NO: 2338072 - RNA, 19 nt, Artificial Sequence
  Description of Artificial Sequence: Synthetic oligonucleotide
  Sense strand starting at position 2752 of SEQ ID NO: 1885383
uguauuuacugguuuguuu

SEQ ID NO: 2338073 - RNA, 19 nt, Artificial Sequence
  Description of Artificial Sequence: Synthetic oligonucleotide
  Antisense strand to SEQ ID NO: 2338072
aaacaaaccaguaaauaca

SEQ ID NO: 2338074 - RNA, 19 nt, Artificial Sequence
  Description of Artificial Sequence: Synthetic oligonucleotide
  Sense strand starting at position 2819 of SEQ ID NO: 1885383
gagaauuggugagucacaa

SEQ ID NO: 2338075 - RNA, 19 nt, Artificial Sequence
  Description of Artificial Sequence: Synthetic oligonucleotide
  Antisense strand to SEQ ID NO: 2338074
uugugacucaccaauucuc

SEQ ID NO: 2338076 - RNA, 19 nt, Artificial Sequence
  Description of Artificial Sequence: Synthetic oligonucleotide
  Sense strand starting at position 2893 of SEQ ID NO: 1885383
uguauaggaucauuagaua

SEQ ID NO: 2338077 - RNA, 19 nt, Artificial Sequence
  Description of Artificial Sequence: Synthetic oligonucleotide
  Antisense strand to SEQ ID NO: 2338076
uaucuaaugauccuauaca

SEQ ID NO: 2338078 - RNA, 19 nt, Artificial Sequence
  Description of Artificial Sequence: Synthetic oligonucleotide
  Sense strand starting at position 2959 of SEQ ID NO: 1885383
uaguuuggugguuaaauca

SEQ ID NO: 2338079 - RNA, 19 nt, Artificial Sequence
  Description of Artificial Sequence: Synthetic oligonucleotide
  Antisense strand to SEQ ID NO: 2338078
ugauuuaaccaccaaacua

SEQ ID NO: 2338080 - RNA, 19 nt, Artificial Sequence
  Description of Artificial Sequence: Synthetic oligonucleotide
  Sense strand starting at position 2967 of SEQ ID NO: 1885383
ugguuaaaucauuauucug

SEQ ID NO: 2338081 - RNA, 19 nt, Artificial Sequence
  Description of Artificial Sequence: Synthetic oligonucleotide
  Antisense strand to SEQ ID NO: 2338080
cagaauaaugauuuaacca

SEQ ID NO: 2338082 - RNA, 19 nt, Artificial Sequence
  Description of Artificial Sequence: Synthetic oligonucleotide
  Sense strand starting at position 2975 of SEQ ID NO: 1885383
ucauuauucugugucauuu

SEQ ID NO: 2338083 - RNA, 19 nt, Artificial Sequence
  Description of Artificial Sequence: Synthetic oligonucleotide
  Antisense strand to SEQ ID NO: 2338082
aaaugacacagaauaauga

SEQ ID NO: 2338084 - RNA, 19 nt, Artificial Sequence
  Description of Artificial Sequence: Synthetic oligonucleotide
  Sense strand starting at position 2998 of SEQ ID NO: 1885383
agaguuuagcaguagacua

SEQ ID NO: 2338085 - RNA, 19 nt, Artificial Sequence
  Description of Artificial Sequence: Synthetic oligonucleotide
  Antisense strand to SEQ ID NO: 2338084
uagucuacugcuaaacucu

SEQ ID NO: 2338086 - RNA, 19 nt, Artificial Sequence
  Description of Artificial Sequence: Synthetic oligonucleotide
  Sense strand starting at position 3077 of SEQ ID NO: 1885383
ugaagagcuugauuaaauu

SEQ ID NO: 2338087 - RNA, 19 nt, Artificial Sequence
  Description of Artificial Sequence: Synthetic oligonucleotide
  Antisense strand to SEQ ID NO: 2338086
aauuuaaucaagcucuuca

SEQ ID NO: 2338088 - RNA, 19 nt, Artificial Sequence
  Description of Artificial Sequence: Synthetic oligonucleotide
  Sense strand starting at position 3099 of SEQ ID NO: 1885383
augugcugauuugugcaua

SEQ ID NO: 2338089 - RNA, 19 nt, Artificial Sequence
  Description of Artificial Sequence: Synthetic oligonucleotide
  Antisense strand to SEQ ID NO: 2338088
uaugcacaaaucagcacau

SEQ ID NO: 2338090 - RNA, 19 nt, Artificial Sequence
  Description of Artificial Sequence: Synthetic oligonucleotide
  Sense strand starting at position 3296 of SEQ ID NO: 1885383
auguuagcacauugauaca

SEQ ID NO: 2338091 - RNA, 19 nt, Artificial Sequence
  Description of Artificial Sequence: Synthetic oligonucleotide
  Antisense strand to SEQ ID NO: 2338090
uguaucaaugugcuaacau

SEQ ID NO: 2338092 - RNA, 19 nt, Artificial Sequence
  Description of Artificial Sequence: Synthetic oligonucleotide
  Sense strand starting at position 3415 of SEQ ID NO: 1885383
augcaaugccugcaagaaa

SEQ ID NO: 2338093 - RNA, 19 nt, Artificial Sequence
  Description of Artificial Sequence: Synthetic oligonucleotide
  Antisense strand to SEQ ID NO: 2338092
uuucuugcaggcauugcau

SEQ ID NO: 2338094 - RNA, 19 nt, Artificial Sequence
  Description of Artificial Sequence: Synthetic oligonucleotide
  Sense strand starting at position 3527 of SEQ ID NO: 1885383
ugaauucugccuuacagga

SEQ ID NO: 2338095 - RNA, 19 nt, Artificial Sequence
  Description of Artificial Sequence: Synthetic oligonucleotide
  Antisense strand to SEQ ID NO: 2338094
uccuguaaggcagaauuca

SEQ ID NO: 2338096 - RNA, 19 nt, Artificial Sequence
  Description of Artificial Sequence: Synthetic oligonucleotide
  Sense strand starting at position 3788 of SEQ ID NO: 1885383
guggaucugaaguaagcau

SEQ ID NO: 2338097 - RNA, 19 nt, Artificial Sequence
  Description of Artificial Sequence: Synthetic oligonucleotide
  Antisense strand to SEQ ID NO: 2338096
augcuuacuucagauccac

SEQ ID NO: 2338098 - RNA, 19 nt, Artificial Sequence
  Description of Artificial Sequence: Synthetic oligonucleotide
  Sense strand starting at position 3795 of SEQ ID NO: 1885383
ugaaguaagcauuggauag

SEQ ID NO: 2338099 - RNA, 19 nt, Artificial Sequence
  Description of Artificial Sequence: Synthetic oligonucleotide
  Antisense strand to SEQ ID NO: 2338098
cuauccaaugcuuacuuca

SEQ ID NO: 2338100 - RNA, 19 nt, Artificial Sequence
  Description of Artificial Sequence: Synthetic oligonucleotide
  Sense strand starting at position 3821 of SEQ ID NO: 1885383
uuagcauuccaucacggaa

SEQ ID NO: 2338101 - RNA, 19 nt, Artificial Sequence
  Description of Artificial Sequence: Synthetic oligonucleotide
  Antisense strand to SEQ ID NO: 2338100
uuccgugauggaaugcuaa

SEQ ID NO: 2338102 - RNA, 19 nt, Artificial Sequence
  Description of Artificial Sequence: Synthetic oligonucleotide
  Sense strand starting at position 6 of SEQ ID NO: 1885384
guuuaucuaccaggaaaug

SEQ ID NO: 2338103 - RNA, 19 nt, Artificial Sequence
  Description of Artificial Sequence: Synthetic oligonucleotide
  Antisense strand to SEQ ID NO: 2338102
cauuuccugguagauaaac

SEQ ID NO: 2338104 - RNA, 19 nt, Artificial Sequence
  Description of Artificial Sequence: Synthetic oligonucleotide
  Sense strand starting at position 128 of SEQ ID NO: 1885384
ucaggauaauuugauauca

SEQ ID NO: 2338105 - RNA, 19 nt, Artificial Sequence
  Description of Artificial Sequence: Synthetic oligonucleotide
  Antisense strand to SEQ ID NO: 2338104
ugauaucaaauuauccuga

SEQ ID NO: 2338106 - RNA, 19 nt, Artificial Sequence
  Description of Artificial Sequence: Synthetic oligonucleotide
  Sense strand starting at position 130 of SEQ ID NO: 1885384
aggauaauuugauaucauc

SEQ ID NO: 2338107 - RNA, 19 nt, Artificial Sequence
  Description of Artificial Sequence: Synthetic oligonucleotide
  Antisense strand to SEQ ID NO: 2338106
gaugauaucaaauuauccu

SEQ ID NO: 2338108 - RNA, 19 nt, Artificial Sequence
  Description of Artificial Sequence: Synthetic oligonucleotide
  Sense strand starting at position 164 of SEQ ID NO: 1885384
uucuuugugcuagagacau

SEQ ID NO: 2338109 - RNA, 19 nt, Artificial Sequence
  Description of Artificial Sequence: Synthetic oligonucleotide
  Antisense strand to SEQ ID NO: 2338108
augucucuagcacaaagaa

SEQ ID NO: 2338110 - RNA, 19 nt, Artificial Sequence
  Description of Artificial Sequence: Synthetic oligonucleotide
  Sense strand starting at position 213 of SEQ ID NO: 1885384
uguucagucgaugaugaau

SEQ ID NO: 2338111 - RNA, 19 nt, Artificial Sequence
  Description of Artificial Sequence: Synthetic oligonucleotide
  Antisense strand to SEQ ID NO: 2338110
auucaucaucgacugaaca

SEQ ID NO: 2338112 - RNA, 19 nt, Artificial Sequence
  Description of Artificial Sequence: Synthetic oligonucleotide
  Sense strand starting at position 222 of SEQ ID NO: 1885384
gaugaugaaucagucauug

SEQ ID NO: 2338113 - RNA, 19 nt, Artificial Sequence
  Description of Artificial Sequence: Synthetic oligonucleotide
  Antisense strand to SEQ ID NO: 2338112
caaugacugauucaucauc

SEQ ID NO: 2338114 - RNA, 19 nt, Artificial Sequence
  Description of Artificial Sequence: Synthetic oligonucleotide
  Sense strand starting at position 226 of SEQ ID NO: 1885384
augaaucagucauugauua

SEQ ID NO: 2338115 - RNA, 19 nt, Artificial Sequence
  Description of Artificial Sequence: Synthetic oligonucleotide
  Antisense strand to SEQ ID NO: 2338114
uaaucaaugacugauucau

SEQ ID NO: 2338116 - RNA, 19 nt, Artificial Sequence
  Description of Artificial Sequence: Synthetic oligonucleotide
  Sense strand starting at position 227 of SEQ ID NO: 1885384
ugaaucagucauugauuaa

SEQ ID NO: 2338117 - RNA, 19 nt, Artificial Sequence
  Description of Artificial Sequence: Synthetic oligonucleotide
  Antisense strand to SEQ ID NO: 2338116
uuaaucaaugacugauuca

SEQ ID NO: 2338118 - RNA, 19 nt, Artificial Sequence
  Description of Artificial Sequence: Synthetic oligonucleotide
  Sense strand starting at position 272 of SEQ ID NO: 1885384
ugucuuauuucuucuguuu

SEQ ID NO: 2338119 - RNA, 19 nt, Artificial Sequence
  Description of Artificial Sequence: Synthetic oligonucleotide
  Antisense strand to SEQ ID NO: 2338118
aaacagaagaaauaagaca

SEQ ID NO: 2338120 - RNA, 19 nt, Artificial Sequence
  Description of Artificial Sequence: Synthetic oligonucleotide
  Sense strand starting at position 884 of SEQ ID NO: 1885384
uuaaaucaugaauggcuau

SEQ ID NO: 2338121 - RNA, 19 nt, Artificial Sequence
  Description of Artificial Sequence: Synthetic oligonucleotide
  Antisense strand to SEQ ID NO: 2338120
auagccauucaugauuuaa

SEQ ID NO: 2338122 - RNA, 19 nt, Artificial Sequence
  Description of Artificial Sequence: Synthetic oligonucleotide
  Sense strand starting at position 1032 of SEQ ID NO: 1885384
ucuugaaaugaaugcagua

SEQ ID NO: 2338123 - RNA, 19 nt, Artificial Sequence
  Description of Artificial Sequence: Synthetic oligonucleotide
  Antisense strand to SEQ ID NO: 2338122
uacugcauucauuucaaga

SEQ ID NO: 2338124 - RNA, 19 nt, Artificial Sequence
  Description of Artificial Sequence: Synthetic oligonucleotide
  Sense strand starting at position 1153 of SEQ ID NO: 1885384
uuuaauuaggcauagccaa

SEQ ID NO: 2338125 - RNA, 19 nt, Artificial Sequence
  Description of Artificial Sequence: Synthetic oligonucleotide
  Antisense strand to SEQ ID NO: 2338124
uuggcuaugccuaauuaaa

SEQ ID NO: 2338126 - RNA, 19 nt, Artificial Sequence
  Description of Artificial Sequence: Synthetic oligonucleotide
  Sense strand starting at position 1230 of SEQ ID NO: 1885384
cugaacuguccagaacgau

SEQ ID NO: 2338127 - RNA, 19 nt, Artificial Sequence
  Description of Artificial Sequence: Synthetic oligonucleotide
  Antisense strand to SEQ ID NO: 2338126
aucguucuggacaguucag

SEQ ID NO: 2338128 - RNA, 19 nt, Artificial Sequence
  Description of Artificial Sequence: Synthetic oligonucleotide
  Sense strand starting at position 1293 of SEQ ID NO: 1885384
gcuugugagcuucuaguuc

SEQ ID NO: 2338129 - RNA, 19 nt, Artificial Sequence
  Description of Artificial Sequence: Synthetic oligonucleotide
  Antisense strand to SEQ ID NO: 2338128
gaacuagaagcucacaagc

SEQ ID NO: 2338130 - RNA, 19 nt, Artificial Sequence
  Description of Artificial Sequence: Synthetic oligonucleotide
  Sense strand starting at position 1332 of SEQ ID NO: 1885384
gaguucuuucgacaaccag

SEQ ID NO: 2338131 - RNA, 19 nt, Artificial Sequence
  Description of Artificial Sequence: Synthetic oligonucleotide
  Antisense strand to SEQ ID NO: 2338130
cugguugucgaaagaacuc

SEQ ID NO: 2338132 - RNA, 19 nt, Artificial Sequence
  Description of Artificial Sequence: Synthetic oligonucleotide
  Sense strand starting at position 1432 of SEQ ID NO: 1885384
ugaccuaucuaagugauag

SEQ ID NO: 2338133 - RNA, 19 nt, Artificial Sequence
  Description of Artificial Sequence: Synthetic oligonucleotide
  Antisense strand to SEQ ID NO: 2338132
cuaucacuuagauagguca

SEQ ID NO: 2338134 - RNA, 19 nt, Artificial Sequence
  Description of Artificial Sequence: Synthetic oligonucleotide
  Sense strand starting at position 1482 of SEQ ID NO: 1885384
aucagacucgccuauaauu

SEQ ID NO: 2338135 - RNA, 19 nt, Artificial Sequence
  Description of Artificial Sequence: Synthetic oligonucleotide
  Antisense strand to SEQ ID NO: 2338134
aauuauaggcgagucugau

SEQ ID NO: 2338136 - RNA, 19 nt, Artificial Sequence
  Description of Artificial Sequence: Synthetic oligonucleotide
  Sense strand starting at position 1592 of SEQ ID NO: 1885384
augaucuuggaaugaugua

SEQ ID NO: 2338137 - RNA, 19 nt, Artificial Sequence
  Description of Artificial Sequence: Synthetic oligonucleotide
  Antisense strand to SEQ ID NO: 2338136
uacaucauuccaagaucau

SEQ ID NO: 2338138 - RNA, 19 nt, Artificial Sequence
  Description of Artificial Sequence: Synthetic oligonucleotide
  Sense strand starting at position 1707 of SEQ ID NO: 1885384
uuuccuaaguucuuugaag

SEQ ID NO: 2338139 - RNA, 19 nt, Artificial Sequence
  Description of Artificial Sequence: Synthetic oligonucleotide
  Antisense strand to SEQ ID NO: 2338138
cuucaaagaacuuaggaaa

SEQ ID NO: 2338140 - RNA, 19 nt, Artificial Sequence
  Description of Artificial Sequence: Synthetic oligonucleotide
  Sense strand starting at position 1708 of SEQ ID NO: 1885384
uuccuaaguucuuugaaga

SEQ ID NO: 2338141 - RNA, 19 nt, Artificial Sequence
  Description of Artificial Sequence: Synthetic oligonucleotide
  Antisense strand to SEQ ID NO: 2338140
ucuucaaagaacuuaggaa

SEQ ID NO: 2338142 - RNA, 19 nt, Artificial Sequence
  Description of Artificial Sequence: Synthetic oligonucleotide
  Sense strand starting at position 1709 of SEQ ID NO: 1885384
uccuaaguucuuugaagag

SEQ ID NO: 2338143 - RNA, 19 nt, Artificial Sequence
  Description of Artificial Sequence: Synthetic oligonucleotide
  Antisense strand to SEQ ID NO: 2338142
cucuucaaagaacuuagga

SEQ ID NO: 2338144 - RNA, 19 nt, Artificial Sequence
  Description of Artificial Sequence: Synthetic oligonucleotide
  Sense strand starting at position 1801 of SEQ ID NO: 1885384
uuuacucaugcugagaaau

SEQ ID NO: 2338145 - RNA, 19 nt, Artificial Sequence
  Description of Artificial Sequence: Synthetic oligonucleotide
  Antisense strand to SEQ ID NO: 2338144
auuucucagcaugaguaaa

SEQ ID NO: 2338146 - RNA, 19 nt, Artificial Sequence
  Description of Artificial Sequence: Synthetic oligonucleotide
  Sense strand starting at position 1849 of SEQ ID NO: 1885384
augggauuuguucguuguu

SEQ ID NO: 2338147 - RNA, 19 nt, Artificial Sequence
  Description of Artificial Sequence: Synthetic oligonucleotide
  Antisense strand to SEQ ID NO: 2338146
aacaacgaacaaaucccau

SEQ ID NO: 2338148 - RNA, 19 nt, Artificial Sequence
  Description of Artificial Sequence: Synthetic oligonucleotide
  Sense strand starting at position 1884 of SEQ ID NO: 1885384
ggaaauuuguaagaccuca

SEQ ID NO: 2338149 - RNA, 19 nt, Artificial Sequence
  Description of Artificial Sequence: Synthetic oligonucleotide
  Antisense strand to SEQ ID NO: 2338148
ugaggucuuacaaauuucc

SEQ ID NO: 2338150 - RNA, 19 nt, Artificial Sequence
  Description of Artificial Sequence: Synthetic oligonucleotide
  Sense strand starting at position 2006 of SEQ ID NO: 1885384
ggguuuaccacugaagcau

SEQ ID NO: 2338151 - RNA, 19 nt, Artificial Sequence
  Description of Artificial Sequence: Synthetic oligonucleotide
  Antisense strand to SEQ ID NO: 2338150
augcuucagugguaaaccc

SEQ ID NO: 2338152 - RNA, 19 nt, Artificial Sequence
  Description of Artificial Sequence: Synthetic oligonucleotide
  Sense strand starting at position 2181 of SEQ ID NO: 1885384
uucuaauucucuguaggau

SEQ ID NO: 2338153 - RNA, 19 nt, Artificial Sequence
  Description of Artificial Sequence: Synthetic oligonucleotide
  Antisense strand to SEQ ID NO: 2338152
auccuacagagaauuagaa

SEQ ID NO: 2338154 - RNA, 19 nt, Artificial Sequence
  Description of Artificial Sequence: Synthetic oligonucleotide
  Sense strand starting at position 2182 of SEQ ID NO: 1885384
ucuaauucucuguaggauu

SEQ ID NO: 2338155 - RNA, 19 nt, Artificial Sequence
  Description of Artificial Sequence: Synthetic oligonucleotide
  Antisense strand to SEQ ID NO: 2338154
aauccuacagagaauuaga

SEQ ID NO: 2338156 - RNA, 19 nt, Artificial Sequence
  Description of Artificial Sequence: Synthetic oligonucleotide
  Sense strand starting at position 2497 of SEQ ID NO: 1885384
guagcaucucuugauauca

SEQ ID NO: 2338157 - RNA, 19 nt, Artificial Sequence
  Description of Artificial Sequence: Synthetic oligonucleotide
  Antisense strand to SEQ ID NO: 2338156
ugauaucaagagaugcuac

SEQ ID NO: 2338158 - RNA, 19 nt, Artificial Sequence
  Description of Artificial Sequence: Synthetic oligonucleotide
  Sense strand starting at position 2568 of SEQ ID NO: 1885384
gccugaguucuccaggaaa

SEQ ID NO: 2338159 - RNA, 19 nt, Artificial Sequence
  Description of Artificial Sequence: Synthetic oligonucleotide
  Antisense strand to SEQ ID NO: 2338158
uuuccuggagaacucaggc

SEQ ID NO: 2338160 - RNA, 19 nt, Artificial Sequence
  Description of Artificial Sequence: Synthetic oligonucleotide
  Sense strand starting at position 2593 of SEQ ID NO: 1885384
gaaucugucccagagcagu

SEQ ID NO: 2338161 - RNA, 19 nt, Artificial Sequence
  Description of Artificial Sequence: Synthetic oligonucleotide
  Antisense strand to SEQ ID NO: 2338160
acugcucugggacagauuc

SEQ ID NO: 2338162 - RNA, 19 nt, Artificial Sequence
  Description of Artificial Sequence: Synthetic oligonucleotide
  Sense strand starting at position 2775 of SEQ ID NO: 1885384
ucucaugaugucuagcaag

SEQ ID NO: 2338163 - RNA, 19 nt, Artificial Sequence
  Description of Artificial Sequence: Synthetic oligonucleotide
  Antisense strand to SEQ ID NO: 2338162
cuugcuagacaucaugaga

SEQ ID NO: 2338164 - RNA, 19 nt, Artificial Sequence
  Description of Artificial Sequence: Synthetic oligonucleotide
  Sense strand starting at position 3092 of SEQ ID NO: 1885384
aaugguccugcucaguaga

SEQ ID NO: 2338165 - RNA, 19 nt, Artificial Sequence
  Description of Artificial Sequence: Synthetic oligonucleotide
  Antisense strand to SEQ ID NO: 2338164
ucuacugagcaggaccauu

SEQ ID NO: 2338166 - RNA, 19 nt, Artificial Sequence
  Description of Artificial Sequence: Synthetic oligonucleotide
  Sense strand starting at position 3095 of SEQ ID NO: 1885384
gguccugcucaguagaaau

SEQ ID NO: 2338167 - RNA, 19 nt, Artificial Sequence
  Description of Artificial Sequence: Synthetic oligonucleotide
  Antisense strand to SEQ ID NO: 2338166
auuucuacugagcaggacc

SEQ ID NO: 2338168 - RNA, 19 nt, Artificial Sequence
  Description of Artificial Sequence: Synthetic oligonucleotide
  Sense strand starting at position 3298 of SEQ ID NO: 1885384
uuugucguccgcuuucaga

SEQ ID NO: 2338169 - RNA, 19 nt, Artificial Sequence
  Description of Artificial Sequence: Synthetic oligonucleotide
  Antisense strand to SEQ ID NO: 2338168
ucugaaagcggacgacaaa

SEQ ID NO: 2338170 - RNA, 19 nt, Artificial Sequence
  Description of Artificial Sequence: Synthetic oligonucleotide
  Sense strand starting at position 3300 of SEQ ID NO: 1885384
ugucguccgcuuucagaga

SEQ ID NO: 2338171 - RNA, 19 nt, Artificial Sequence
  Description of Artificial Sequence: Synthetic oligonucleotide
  Antisense strand to SEQ ID NO: 2338170
ucucugaaagcggacgaca

SEQ ID NO: 2338172 - RNA, 19 nt, Artificial Sequence
  Description of Artificial Sequence: Synthetic oligonucleotide
  Sense strand starting at position 3322 of SEQ ID NO: 1885384
ugcaauauuugagauuugu

SEQ ID NO: 2338173 - RNA, 19 nt, Artificial Sequence
  Description of Artificial Sequence: Synthetic oligonucleotide
  Antisense strand to SEQ ID NO: 2338172
acaaaucucaaauauugca

SEQ ID NO: 2338174 - RNA, 19 nt, Artificial Sequence
  Description of Artificial Sequence: Synthetic oligonucleotide
  Sense strand starting at position 3445 of SEQ ID NO: 1885384
gugagcaaauuauuccaaa

SEQ ID NO: 2338175 - RNA, 19 nt, Artificial Sequence
  Description of Artificial Sequence: Synthetic oligonucleotide
  Antisense strand to SEQ ID NO: 2338174
uuuggaauaauuugcucac

SEQ ID NO: 2338176 - RNA, 19 nt, Artificial Sequence
  Description of Artificial Sequence: Synthetic oligonucleotide
  Sense strand starting at position 3711 of SEQ ID NO: 1885384
uaaggucuuggucaugauu

SEQ ID NO: 2338177 - RNA, 19 nt, Artificial Sequence
  Description of Artificial Sequence: Synthetic oligonucleotide
  Antisense strand to SEQ ID NO: 2338176
aaucaugaccaagaccuua

SEQ ID NO: 2338178 - RNA, 19 nt, Artificial Sequence
  Description of Artificial Sequence: Synthetic oligonucleotide
  Sense strand starting at position 3714 of SEQ ID NO: 1885384
ggucuuggucaugauuauu

SEQ ID NO: 2338179 - RNA, 19 nt, Artificial Sequence
  Description of Artificial Sequence: Synthetic oligonucleotide
  Antisense strand to SEQ ID NO: 2338178
aauaaucaugaccaagacc

SEQ ID NO: 2338180 - RNA, 19 nt, Artificial Sequence
  Description of Artificial Sequence: Synthetic oligonucleotide
  Sense strand starting at position 3717 of SEQ ID NO: 1885384
cuuggucaugauuauuauu

SEQ ID NO: 2338181 - RNA, 19 nt, Artificial Sequence
  Description of Artificial Sequence: Synthetic oligonucleotide
  Antisense strand to SEQ ID NO: 2338180
aauaauaaucaugaccaag

SEQ ID NO: 2338182 - RNA, 19 nt, Artificial Sequence
  Description of Artificial Sequence: Synthetic oligonucleotide
  Sense strand starting at position 78 of SEQ ID NO: 1885385
cugugagguuaucuuaaag

SEQ ID NO: 2338183 - RNA, 19 nt, Artificial Sequence
  Description of Artificial Sequence: Synthetic oligonucleotide
  Antisense strand to SEQ ID NO: 2338182
cuuuaagauaaccucacag

SEQ ID NO: 2338184 - RNA, 19 nt, Artificial Sequence
  Description of Artificial Sequence: Synthetic oligonucleotide
  Sense strand starting at position 124 of SEQ ID NO: 1885385
gaccauaucgcucaacagu

SEQ ID NO: 2338185 - RNA, 19 nt, Artificial Sequence
  Description of Artificial Sequence: Synthetic oligonucleotide
  Antisense strand to SEQ ID NO: 2338184
acuguugagcgauaugguc

SEQ ID NO: 2338186 - RNA, 19 nt, Artificial Sequence
  Description of Artificial Sequence: Synthetic oligonucleotide
  Sense strand starting at position 681 of SEQ ID NO: 1885385
aagggaucgggauguguuu

SEQ ID NO: 2338187 - RNA, 19 nt, Artificial Sequence
  Description of Artificial Sequence: Synthetic oligonucleotide
  Antisense strand to SEQ ID NO: 2338186
aaacacaucccgaucccuu

SEQ ID NO: 2338188 - RNA, 19 nt, Artificial Sequence
  Description of Artificial Sequence: Synthetic oligonucleotide
  Sense strand starting at position 760 of SEQ ID NO: 1885385
agacuuuagagaggagugu

SEQ ID NO: 2338189 - RNA, 19 nt, Artificial Sequence
  Description of Artificial Sequence: Synthetic oligonucleotide
  Antisense strand to SEQ ID NO: 2338188
acacuccucucuaaagucu

SEQ ID NO: 2338190 - RNA, 19 nt, Artificial Sequence
  Description of Artificial Sequence: Synthetic oligonucleotide
  Sense strand starting at position 849 of SEQ ID NO: 1885385
uuccuucugcacuaguaga

SEQ ID NO: 2338191 - RNA, 19 nt, Artificial Sequence
  Description of Artificial Sequence: Synthetic oligonucleotide
  Antisense strand to SEQ ID NO: 2338190
ucuacuagugcagaaggaa

SEQ ID NO: 2338192 - RNA, 19 nt, Artificial Sequence
  Description of Artificial Sequence: Synthetic oligonucleotide
  Sense strand starting at position 923 of SEQ ID NO: 1885385
uccuuuaagaucggguaca

SEQ ID NO: 2338193 - RNA, 19 nt, Artificial Sequence
  Description of Artificial Sequence: Synthetic oligonucleotide
  Antisense strand to SEQ ID NO: 2338192
uguacccgaucuuaaagga

SEQ ID NO: 2338194 - RNA, 19 nt, Artificial Sequence
  Description of Artificial Sequence: Synthetic oligonucleotide
  Sense strand starting at position 1094 of SEQ ID NO: 1885385
ucuguuccaccugagauau

SEQ ID NO: 2338195 - RNA, 19 nt, Artificial Sequence
  Description of Artificial Sequence: Synthetic oligonucleotide
  Antisense strand to SEQ ID NO: 2338194
auaucucagguggaacaga

SEQ ID NO: 2338196 - RNA, 19 nt, Artificial Sequence
  Description of Artificial Sequence: Synthetic oligonucleotide
  Sense strand starting at position 1181 of SEQ ID NO: 1885385
cagucaucagaucgagaaa

SEQ ID NO: 2338197 - RNA, 19 nt, Artificial Sequence
  Description of Artificial Sequence: Synthetic oligonucleotide
  Antisense strand to SEQ ID NO: 2338196
uuucucgaucugaugacug

SEQ ID NO: 2338198 - RNA, 19 nt, Artificial Sequence
  Description of Artificial Sequence: Synthetic oligonucleotide
  Sense strand starting at position 1361 of SEQ ID NO: 1885385
cugugaggguaucuuaaag

SEQ ID NO: 2338199 - RNA, 19 nt, Artificial Sequence
  Description of Artificial Sequence: Synthetic oligonucleotide
  Antisense strand to SEQ ID NO: 2338198
cuuuaagauacccucacag

SEQ ID NO: 2338200 - RNA, 19 nt, Artificial Sequence
  Description of Artificial Sequence: Synthetic oligonucleotide
  Sense strand starting at position 1407 of SEQ ID NO: 1885385
gaccauaucgcccaacagu

SEQ ID NO: 2338201 - RNA, 19 nt, Artificial Sequence
  Description of Artificial Sequence: Synthetic oligonucleotide
  Antisense strand to SEQ ID NO: 2338200
acuguugggcgauaugguc

SEQ ID NO: 2338202 - RNA, 19 nt, Artificial Sequence
  Description of Artificial Sequence: Synthetic oligonucleotide
  Sense strand starting at position 1420 of SEQ ID NO: 1885385
aacagucuuuggccugaaa

SEQ ID NO: 2338203 - RNA, 19 nt, Artificial Sequence
  Description of Artificial Sequence: Synthetic oligonucleotide
  Antisense strand to SEQ ID NO: 2338202
uuucaggccaaagacuguu

SEQ ID NO: 2338204 - RNA, 19 nt, Artificial Sequence
  Description of Artificial Sequence: Synthetic oligonucleotide
  Sense strand starting at position 1543 of SEQ ID NO: 1885385
agagcugaccucugaucca

SEQ ID NO: 2338205 - RNA, 19 nt, Artificial Sequence
  Description of Artificial Sequence: Synthetic oligonucleotide
  Antisense strand to SEQ ID NO: 2338204
uggaucagaggucagcucu

SEQ ID NO: 2338206 - RNA, 19 nt, Artificial Sequence
  Description of Artificial Sequence: Synthetic oligonucleotide
  Sense strand starting at position 1815 of SEQ ID NO: 1885385
gucagaagagcguggauuu

SEQ ID NO: 2338207 - RNA, 19 nt, Artificial Sequence
  Description of Artificial Sequence: Synthetic oligonucleotide
  Antisense strand to SEQ ID NO: 2338206
aaauccacgcucuucugac

SEQ ID NO: 2338208 - RNA, 19 nt, Artificial Sequence
  Description of Artificial Sequence: Synthetic oligonucleotide
  Sense strand starting at position 1874 of SEQ ID NO: 1885385
ugggaugacuuguuuaaua

SEQ ID NO: 2338209 - RNA, 19 nt, Artificial Sequence
  Description of Artificial Sequence: Synthetic oligonucleotide
  Antisense strand to SEQ ID NO: 2338208
uauuaaacaagucauccca

SEQ ID NO: 2338210 - RNA, 19 nt, Artificial Sequence
  Description of Artificial Sequence: Synthetic oligonucleotide
  Sense strand starting at position 1985 of SEQ ID NO: 1885385
ugaacuaacuucccagagu

SEQ ID NO: 2338211 - RNA, 19 nt, Artificial Sequence
  Description of Artificial Sequence: Synthetic oligonucleotide
  Antisense strand to SEQ ID NO: 2338210
acucugggaaguuaguuca

SEQ ID NO: 2338212 - RNA, 19 nt, Artificial Sequence
  Description of Artificial Sequence: Synthetic oligonucleotide
  Sense strand starting at position 1994 of SEQ ID NO: 1885385
uucccagagucuuuccaag

SEQ ID NO: 2338213 - RNA, 19 nt, Artificial Sequence
  Description of Artificial Sequence: Synthetic oligonucleotide
  Antisense strand to SEQ ID NO: 2338212
cuuggaaagacucugggaa

SEQ ID NO: 2338214 - RNA, 19 nt, Artificial Sequence
  Description of Artificial Sequence: Synthetic oligonucleotide
  Sense strand starting at position 1996 of SEQ ID NO: 1885385
cccagagucuuuccaagac

SEQ ID NO: 2338215 - RNA, 19 nt, Artificial Sequence
  Description of Artificial Sequence: Synthetic oligonucleotide
  Antisense strand to SEQ ID NO: 2338214
gucuuggaaagacucuggg

SEQ ID NO: 2338216 - RNA, 19 nt, Artificial Sequence
  Description of Artificial Sequence: Synthetic oligonucleotide
  Sense strand starting at position 2184 of SEQ ID NO: 1885385
gagauaagaugacuuacgu

SEQ ID NO: 2338217 - RNA, 19 nt, Artificial Sequence
  Description of Artificial Sequence: Synthetic oligonucleotide
  Antisense strand to SEQ ID NO: 2338216
acguaagucaucuuaucuc

SEQ ID NO: 2338218 - RNA, 19 nt, Artificial Sequence
  Description of Artificial Sequence: Synthetic oligonucleotide
  Sense strand starting at position 2227 of SEQ ID NO: 1885385
cugaucagacgccaaauua

SEQ ID NO: 2338219 - RNA, 19 nt, Artificial Sequence
  Description of Artificial Sequence: Synthetic oligonucleotide
  Antisense strand to SEQ ID NO: 2338218
uaauuuggcgucugaucag

SEQ ID NO: 2338220 - RNA, 19 nt, Artificial Sequence
  Description of Artificial Sequence: Synthetic oligonucleotide
  Sense strand starting at position 2307 of SEQ ID NO: 1885385
ggugaacucuccuuuaaga

SEQ ID NO: 2338221 - RNA, 19 nt, Artificial Sequence
  Description of Artificial Sequence: Synthetic oligonucleotide
  Antisense strand to SEQ ID NO: 2338220
ucuuaaaggagaguucacc

SEQ ID NO: 2338222 - RNA, 19 nt, Artificial Sequence
  Description of Artificial Sequence: Synthetic oligonucleotide
  Sense strand starting at position 2440 of SEQ ID NO: 1885385
ggcuucuuuaaaugaugag

SEQ ID NO: 2338223 - RNA, 19 nt, Artificial Sequence
  Description of Artificial Sequence: Synthetic oligonucleotide
  Antisense strand to SEQ ID NO: 2338222
cucaucauuuaaagaagcc

SEQ ID NO: 2338224 - RNA, 19 nt, Artificial Sequence
  Description of Artificial Sequence: Synthetic oligonucleotide
  Sense strand starting at position 2509 of SEQ ID NO: 1885385
agcauuaagcaaggaaugu

SEQ ID NO: 2338225 - RNA, 19 nt, Artificial Sequence
  Description of Artificial Sequence: Synthetic oligonucleotide
  Antisense strand to SEQ ID NO: 2338224
acauuccuugcuuaaugcu

SEQ ID NO: 2338226 - RNA, 19 nt, Artificial Sequence
  Description of Artificial Sequence: Synthetic oligonucleotide
  Sense strand starting at position 2510 of SEQ ID NO: 1885385
gcauuaagcaaggaauguu

SEQ ID NO: 2338227 - RNA, 19 nt, Artificial Sequence
  Description of Artificial Sequence: Synthetic oligonucleotide
  Antisense strand to SEQ ID NO: 2338226
aacauuccuugcuuaaugc

SEQ ID NO: 2338228 - RNA, 19 nt, Artificial Sequence
  Description of Artificial Sequence: Synthetic oligonucleotide
  Sense strand starting at position 2518 of SEQ ID NO: 1885385
caaggaauguuguccagua

SEQ ID NO: 2338229 - RNA, 19 nt, Artificial Sequence
  Description of Artificial Sequence: Synthetic oligonucleotide
  Antisense strand to SEQ ID NO: 2338228
uacuggacaacauuccuug

SEQ ID NO: 2338230 - RNA, 19 nt, Artificial Sequence
  Description of Artificial Sequence: Synthetic oligonucleotide
  Sense strand starting at position 2519 of SEQ ID NO: 1885385
aaggaauguuguccaguag

SEQ ID NO: 2338231 - RNA, 19 nt, Artificial Sequence
  Description of Artificial Sequence: Synthetic oligonucleotide
  Antisense strand to SEQ ID NO: 2338230
cuacuggacaacauuccuu

SEQ ID NO: 2338232 - RNA, 19 nt, Artificial Sequence
  Description of Artificial Sequence: Synthetic oligonucleotide
  Sense strand starting at position 2601 of SEQ ID NO: 1885385
gcaguacucccuugaggag

SEQ ID NO: 2338233 - RNA, 19 nt, Artificial Sequence
  Description of Artificial Sequence: Synthetic oligonucleotide
  Antisense strand to SEQ ID NO: 2338232
cuccucaagggaguacugc

SEQ ID NO: 2338234 - RNA, 19 nt, Artificial Sequence
  Description of Artificial Sequence: Synthetic oligonucleotide
  Sense strand starting at position 2602 of SEQ ID NO: 1885385
caguacucccuugaggagu

SEQ ID NO: 2338235 - RNA, 19 nt, Artificial Sequence
  Description of Artificial Sequence: Synthetic oligonucleotide
  Antisense strand to SEQ ID NO: 2338234
acuccucaagggaguacug

SEQ ID NO: 2338236 - RNA, 19 nt, Artificial Sequence
  Description of Artificial Sequence: Synthetic oligonucleotide
  Sense strand starting at position 2723 of SEQ ID NO: 1885385
ugcacuuaacucuaaggua

SEQ ID NO: 2338237 - RNA, 19 nt, Artificial Sequence
  Description of Artificial Sequence: Synthetic oligonucleotide
  Antisense strand to SEQ ID NO: 2338236
uaccuuagaguuaagugca

SEQ ID NO: 2338238 - RNA, 19 nt, Artificial Sequence
  Description of Artificial Sequence: Synthetic oligonucleotide
  Sense strand starting at position 2845 of SEQ ID NO: 1885385
ccuauuauauuugagagaa

SEQ ID NO: 2338239 - RNA, 19 nt, Artificial Sequence
  Description of Artificial Sequence: Synthetic oligonucleotide
  Antisense strand to SEQ ID NO: 2338238
uucucucaaauauaauagg

SEQ ID NO: 2338240 - RNA, 19 nt, Artificial Sequence
  Description of Artificial Sequence: Synthetic oligonucleotide
  Sense strand starting at position 2971 of SEQ ID NO: 1885385
ggacucauccucgagcagu

SEQ ID NO: 2338241 - RNA, 19 nt, Artificial Sequence
  Description of Artificial Sequence: Synthetic oligonucleotide
  Antisense strand to SEQ ID NO: 2338240
acugcucgaggaugagucc

SEQ ID NO: 2338242 - RNA, 19 nt, Artificial Sequence
  Description of Artificial Sequence: Synthetic oligonucleotide
  Sense strand starting at position 2986 of SEQ ID NO: 1885385
caguucuucccuggaagag

SEQ ID NO: 2338243 - RNA, 19 nt, Artificial Sequence
  Description of Artificial Sequence: Synthetic oligonucleotide
  Antisense strand to SEQ ID NO: 2338242
cucuuccagggaagaacug

SEQ ID NO: 2338244 - RNA, 19 nt, Artificial Sequence
  Description of Artificial Sequence: Synthetic oligonucleotide
  Sense strand starting at position 3129 of SEQ ID NO: 1885385
gcagaaaucuuaguaacac

SEQ ID NO: 2338245 - RNA, 19 nt, Artificial Sequence
  Description of Artificial Sequence: Synthetic oligonucleotide
  Antisense strand to SEQ ID NO: 2338244
guguuacuaagauuucugc

SEQ ID NO: 2338246 - RNA, 19 nt, Artificial Sequence
  Description of Artificial Sequence: Synthetic oligonucleotide
  Sense strand starting at position 3212 of SEQ ID NO: 1885385
acugcuguccaaggaggau

SEQ ID NO: 2338247 - RNA, 19 nt, Artificial Sequence
  Description of Artificial Sequence: Synthetic oligonucleotide
  Antisense strand to SEQ ID NO: 2338246
auccuccuuggacagcagu

SEQ ID NO: 2338248 - RNA, 19 nt, Artificial Sequence
  Description of Artificial Sequence: Synthetic oligonucleotide
  Sense strand starting at position 3362 of SEQ ID NO: 1885385
agguauaaacuuuggauca

SEQ ID NO: 2338249 - RNA, 19 nt, Artificial Sequence
  Description of Artificial Sequence: Synthetic oligonucleotide
  Antisense strand to SEQ ID NO: 2338248
ugauccaaaguuuauaccu

SEQ ID NO: 2338250 - RNA, 19 nt, Artificial Sequence
  Description of Artificial Sequence: Synthetic oligonucleotide
  Sense strand starting at position 3483 of SEQ ID NO: 1885385
uucguuuaacaagagcaaa

SEQ ID NO: 2338251 - RNA, 19 nt, Artificial Sequence
  Description of Artificial Sequence: Synthetic oligonucleotide
  Antisense strand to SEQ ID NO: 2338250
uuugcucuuguuaaacgaa

SEQ ID NO: 2338252 - RNA, 19 nt, Artificial Sequence
  Description of Artificial Sequence: Synthetic oligonucleotide
  Sense strand starting at position 3588 of SEQ ID NO: 1885385
guagauucuggacgaauua

SEQ ID NO: 2338253 - RNA, 19 nt, Artificial Sequence
  Description of Artificial Sequence: Synthetic oligonucleotide
  Antisense strand to SEQ ID NO: 2338252
uaauucguccagaaucuac

SEQ ID NO: 2338254 - RNA, 19 nt, Artificial Sequence
  Description of Artificial Sequence: Synthetic oligonucleotide
  Sense strand starting at position 3684 of SEQ ID NO: 1885385
ggacgcuuagcauacuaaa

SEQ ID NO: 2338255 - RNA, 19 nt, Artificial Sequence
  Description of Artificial Sequence: Synthetic oligonucleotide
  Antisense strand to SEQ ID NO: 2338254
uuuaguaugcuaagcgucc

SEQ ID NO: 2338256 - RNA, 19 nt, Artificial Sequence
  Description of Artificial Sequence: Synthetic oligonucleotide
  Sense strand starting at position 3735 of SEQ ID NO: 1885385
gguuguuuauaaccacaau

SEQ ID NO: 2338257 - RNA, 19 nt, Artificial Sequence
  Description of Artificial Sequence: Synthetic oligonucleotide
  Antisense strand to SEQ ID NO: 2338256
auugugguuauaaacaacc

SEQ ID NO: 2338258 - RNA, 19 nt, Artificial Sequence
  Description of Artificial Sequence: Synthetic oligonucleotide
  Sense strand starting at position 3810 of SEQ ID NO: 1885385
acauuugauuauuagguca

SEQ ID NO: 2338259 - RNA, 19 nt, Artificial Sequence
  Description of Artificial Sequence: Synthetic oligonucleotide
  Antisense strand to SEQ ID NO: 2338258
ugaccuaauaaucaaaugu

SEQ ID NO: 2338260 - RNA, 19 nt, Artificial Sequence
  Description of Artificial Sequence: Synthetic oligonucleotide
  Sense strand starting at position 3813 of SEQ ID NO: 1885385
uuugauuauuaggucaaca

SEQ ID NO: 2338261 - RNA, 19 nt, Artificial Sequence
  Description of Artificial Sequence: Synthetic oligonucleotide
  Antisense strand to SEQ ID NO: 2338260
uguugaccuaauaaucaaa

SEQ ID NO: 2338262 - RNA, 19 nt, Artificial Sequence
  Description of Artificial Sequence: Synthetic oligonucleotide
  Sense strand starting at position 74 of SEQ ID NO: 1885386
gggagaaaguaauucuagu

SEQ ID NO: 2338263 - RNA, 19 nt, Artificial Sequence
  Description of Artificial Sequence: Synthetic oligonucleotide
  Antisense strand to SEQ ID NO: 2338262
acuagaauuacuuucuccc

SEQ ID NO: 2338264 - RNA, 19 nt, Artificial Sequence
  Description of Artificial Sequence: Synthetic oligonucleotide
  Sense strand starting at position 80 of SEQ ID NO: 1885386
aaguaauucuagugagcca

SEQ ID NO: 2338265 - RNA, 19 nt, Artificial Sequence
  Description of Artificial Sequence: Synthetic oligonucleotide
  Antisense strand to SEQ ID NO: 2338264
uggcucacuagaauuacuu

SEQ ID NO: 2338266 - RNA, 19 nt, Artificial Sequence
  Description of Artificial Sequence: Synthetic oligonucleotide
  Sense strand starting at position 133 of SEQ ID NO: 1885386
ucaccuuaccuauggugaa

SEQ ID NO: 2338267 - RNA, 19 nt, Artificial Sequence
  Description of Artificial Sequence: Synthetic oligonucleotide
  Antisense strand to SEQ ID NO: 2338266
uucaccauagguaagguga

SEQ ID NO: 2338268 - RNA, 19 nt, Artificial Sequence
  Description of Artificial Sequence: Synthetic oligonucleotide
  Sense strand starting at position 136 of SEQ ID NO: 1885386
ccuuaccuauggugaaauu

SEQ ID NO: 2338269 - RNA, 19 nt, Artificial Sequence
  Description of Artificial Sequence: Synthetic oligonucleotide
  Antisense strand to SEQ ID NO: 2338268
aauuucaccauagguaagg

SEQ ID NO: 2338270 - RNA, 19 nt, Artificial Sequence
  Description of Artificial Sequence: Synthetic oligonucleotide
  Sense strand starting at position 163 of SEQ ID NO: 1885386
ugaggugucuugcugacag

SEQ ID NO: 2338271 - RNA, 19 nt, Artificial Sequence
  Description of Artificial Sequence: Synthetic oligonucleotide
  Antisense strand to SEQ ID NO: 2338270
cugucagcaagacaccuca

SEQ ID NO: 2338272 - RNA, 19 nt, Artificial Sequence
  Description of Artificial Sequence: Synthetic oligonucleotide
  Sense strand starting at position 165 of SEQ ID NO: 1885386
aggugucuugcugacagaa

SEQ ID NO: 2338273 - RNA, 19 nt, Artificial Sequence
  Description of Artificial Sequence: Synthetic oligonucleotide
  Antisense strand to SEQ ID NO: 2338272
uucugucagcaagacaccu

SEQ ID NO: 2338274 - RNA, 19 nt, Artificial Sequence
  Description of Artificial Sequence: Synthetic oligonucleotide
  Sense strand starting at position 247 of SEQ ID NO: 1885386
ccugacaguuguuucccaa

SEQ ID NO: 2338275 - RNA, 19 nt, Artificial Sequence
  Description of Artificial Sequence: Synthetic oligonucleotide
  Antisense strand to SEQ ID NO: 2338274
uugggaaacaacugucagg

SEQ ID NO: 2338276 - RNA, 19 nt, Artificial Sequence
  Description of Artificial Sequence: Synthetic oligonucleotide
  Sense strand starting at position 251 of SEQ ID NO: 1885386
acaguuguuucccaacaug

SEQ ID NO: 2338277 - RNA, 19 nt, Artificial Sequence
  Description of Artificial Sequence: Synthetic oligonucleotide
  Antisense strand to SEQ ID NO: 2338276
cauguugggaaacaacugu

SEQ ID NO: 2338278 - RNA, 19 nt, Artificial Sequence
  Description of Artificial Sequence: Synthetic oligonucleotide
  Sense strand starting at position 254 of SEQ ID NO: 1885386
guuguuucccaacauggau

SEQ ID NO: 2338279 - RNA, 19 nt, Artificial Sequence
  Description of Artificial Sequence: Synthetic oligonucleotide
  Antisense strand to SEQ ID NO: 2338278
auccauguugggaaacaac

SEQ ID NO: 2338280 - RNA, 19 nt, Artificial Sequence
  Description of Artificial Sequence: Synthetic oligonucleotide
  Sense strand starting at position 3214 of SEQ ID NO: 1885386
ggccguuauuccuagcaaa

SEQ ID NO: 2338281 - RNA, 19 nt, Artificial Sequence
  Description of Artificial Sequence: Synthetic oligonucleotide
  Antisense strand to SEQ ID NO: 2338280
uuugcuaggaauaacggcc

SEQ ID NO: 2338282 - RNA, 19 nt, Artificial Sequence
  Description of Artificial Sequence: Synthetic oligonucleotide
  Sense strand starting at position 3217 of SEQ ID NO: 1885386
cguuauuccuagcaaauaa

SEQ ID NO: 2338283 - RNA, 19 nt, Artificial Sequence
  Description of Artificial Sequence: Synthetic oligonucleotide
  Antisense strand to SEQ ID NO: 2338282
uuauuugcuaggaauaacg

SEQ ID NO: 2338284 - RNA, 19 nt, Artificial Sequence
  Description of Artificial Sequence: Synthetic oligonucleotide
  Sense strand starting at position 3287 of SEQ ID NO: 1885386
ugcauagcauagguauauu

SEQ ID NO: 2338285 - RNA, 19 nt, Artificial Sequence
  Description of Artificial Sequence: Synthetic oligonucleotide
  Antisense strand to SEQ ID NO: 2338284
aauauaccuaugcuaugca

SEQ ID NO: 2338286 - RNA, 19 nt, Artificial Sequence
  Description of Artificial Sequence: Synthetic oligonucleotide
  Sense strand starting at position 3318 of SEQ ID NO: 1885386
cccagacaacagugcuaaa

SEQ ID NO: 2338287 - RNA, 19 nt, Artificial Sequence
  Description of Artificial Sequence: Synthetic oligonucleotide
  Antisense strand to SEQ ID NO: 2338286
uuuagcacuguugucuggg

SEQ ID NO: 2338288 - RNA, 19 nt, Artificial Sequence
  Description of Artificial Sequence: Synthetic oligonucleotide
  Sense strand starting at position 3450 of SEQ ID NO: 1885386
caauuccacgcuugguuaa

SEQ ID NO: 2338289 - RNA, 19 nt, Artificial Sequence
  Description of Artificial Sequence: Synthetic oligonucleotide
  Antisense strand to SEQ ID NO: 2338288
uuaaccaagcguggaauug

SEQ ID NO: 2338290 - RNA, 19 nt, Artificial Sequence
  Description of Artificial Sequence: Synthetic oligonucleotide
  Sense strand starting at position 3592 of SEQ ID NO: 1885386
guuggagaccuguguauag

SEQ ID NO: 2338291 - RNA, 19 nt, Artificial Sequence
  Description of Artificial Sequence: Synthetic oligonucleotide
  Antisense strand to SEQ ID NO: 2338290
cuauacacaggucuccaac

SEQ ID NO: 2338292 - RNA, 19 nt, Artificial Sequence
  Description of Artificial Sequence: Synthetic oligonucleotide
  Sense strand starting at position 3594 of SEQ ID NO: 1885386
uggagaccuguguauagua

SEQ ID NO: 2338293 - RNA, 19 nt, Artificial Sequence
  Description of Artificial Sequence: Synthetic oligonucleotide
  Antisense strand to SEQ ID NO: 2338292
uacuauacacaggucucca

SEQ ID NO: 2338294 - RNA, 19 nt, Artificial Sequence
  Description of Artificial Sequence: Synthetic oligonucleotide
  Sense strand starting at position 3596 of SEQ ID NO: 1885386
gagaccuguguauaguauu

SEQ ID NO: 2338295 - RNA, 19 nt, Artificial Sequence
  Description of Artificial Sequence: Synthetic oligonucleotide
  Antisense strand to SEQ ID NO: 2338294
aauacuauacacaggucuc

SEQ ID NO: 2338296 - RNA, 19 nt, Artificial Sequence
  Description of Artificial Sequence: Synthetic oligonucleotide
  Sense strand starting at position 3599 of SEQ ID NO: 1885386
accuguguauaguauuagu

SEQ ID NO: 2338297 - RNA, 19 nt, Artificial Sequence
  Description of Artificial Sequence: Synthetic oligonucleotide
  Antisense strand to SEQ ID NO: 2338296
acuaauacuauacacaggu

SEQ ID NO: 2338298 - RNA, 19 nt, Artificial Sequence
  Description of Artificial Sequence: Synthetic oligonucleotide
  Sense strand starting at position 3602 of SEQ ID NO: 1885386
uguguauaguauuaguacu

SEQ ID NO: 2338299 - RNA, 19 nt, Artificial Sequence
  Description of Artificial Sequence: Synthetic oligonucleotide
  Antisense strand to SEQ ID NO: 2338298
aguacuaauacuauacaca

SEQ ID NO: 2338300 - RNA, 19 nt, Artificial Sequence
  Description of Artificial Sequence: Synthetic oligonucleotide
  Sense strand starting at position 3646 of SEQ ID NO: 1885386
uuagauaagggagguguaa

SEQ ID NO: 2338301 - RNA, 19 nt, Artificial Sequence
  Description of Artificial Sequence: Synthetic oligonucleotide
  Antisense strand to SEQ ID NO: 2338300
uuacaccucccuuaucuaa

SEQ ID NO: 2338302 - RNA, 19 nt, Artificial Sequence
  Description of Artificial Sequence: Synthetic oligonucleotide
  Sense strand starting at position 3648 of SEQ ID NO: 1885386
agauaagggagguguaagu

SEQ ID NO: 2338303 - RNA, 19 nt, Artificial Sequence
  Description of Artificial Sequence: Synthetic oligonucleotide
  Antisense strand to SEQ ID NO: 2338302
acuuacaccucccuuaucu

SEQ ID NO: 2338304 - RNA, 19 nt, Artificial Sequence
  Description of Artificial Sequence: Synthetic oligonucleotide
  Sense strand starting at position 3657 of SEQ ID NO: 1885386
agguguaaguacuuuguaa

SEQ ID NO: 2338305 - RNA, 19 nt, Artificial Sequence
  Description of Artificial Sequence: Synthetic oligonucleotide
  Antisense strand to SEQ ID NO: 2338304
uuacaaaguacuuacaccu

SEQ ID NO: 2338306 - RNA, 19 nt, Artificial Sequence
  Description of Artificial Sequence: Synthetic oligonucleotide
  Sense strand starting at position 3703 of SEQ ID NO: 1885386
gaggauuacuaugaguaac

SEQ ID NO: 2338307 - RNA, 19 nt, Artificial Sequence
  Description of Artificial Sequence: Synthetic oligonucleotide
  Antisense strand to SEQ ID NO: 2338306
guuacucauaguaauccuc

SEQ ID NO: 2338308 - RNA, 19 nt, Artificial Sequence
  Description of Artificial Sequence: Synthetic oligonucleotide
  Sense strand starting at position 3727 of SEQ ID NO: 1885386
agguaucuguccucuauuu

SEQ ID NO: 2338309 - RNA, 19 nt, Artificial Sequence
  Description of Artificial Sequence: Synthetic oligonucleotide
  Antisense strand to SEQ ID NO: 2338308
aaauagaggacagauaccu

SEQ ID NO: 2338310 - RNA, 19 nt, Artificial Sequence
  Description of Artificial Sequence: Synthetic oligonucleotide
  Sense strand starting at position 3735 of SEQ ID NO: 1885386
guccucuauuugggacaca

SEQ ID NO: 2338311 - RNA, 19 nt, Artificial Sequence
  Description of Artificial Sequence: Synthetic oligonucleotide
  Antisense strand to SEQ ID NO: 2338310
ugugucccaaauagaggac

SEQ ID NO: 2338312 - RNA, 19 nt, Artificial Sequence
  Description of Artificial Sequence: Synthetic oligonucleotide
  Sense strand starting at position 3736 of SEQ ID NO: 1885386
uccucuauuugggacacaa

SEQ ID NO: 2338313 - RNA, 19 nt, Artificial Sequence
  Description of Artificial Sequence: Synthetic oligonucleotide
  Antisense strand to SEQ ID NO: 2338312
uugugucccaaauagagga

SEQ ID NO: 2338314 - RNA, 19 nt, Artificial Sequence
  Description of Artificial Sequence: Synthetic oligonucleotide
  Sense strand starting at position 3760 of SEQ ID NO: 1885386
cuguguuacuguccucuuu

SEQ ID NO: 2338315 - RNA, 19 nt, Artificial Sequence
  Description of Artificial Sequence: Synthetic oligonucleotide
  Antisense strand to SEQ ID NO: 2338314
aaagaggacaguaacacag

SEQ ID NO: 2338316 - RNA, 19 nt, Artificial Sequence
  Description of Artificial Sequence: Synthetic oligonucleotide
  Sense strand starting at position 550 of SEQ ID NO: 1885387
gcagauagguuuccuuuag

SEQ ID NO: 2338317 - RNA, 19 nt, Artificial Sequence
  Description of Artificial Sequence: Synthetic oligonucleotide
  Antisense strand to SEQ ID NO: 2338316
cuaaaggaaaccuaucugc

SEQ ID NO: 2338318 - RNA, 19 nt, Artificial Sequence
  Description of Artificial Sequence: Synthetic oligonucleotide
  Sense strand starting at position 551 of SEQ ID NO: 1885387
cagauagguuuccuuuaga

SEQ ID NO: 2338319 - RNA, 19 nt, Artificial Sequence
  Description of Artificial Sequence: Synthetic oligonucleotide
  Antisense strand to SEQ ID NO: 2338318
ucuaaaggaaaccuaucug

SEQ ID NO: 2338320 - RNA, 19 nt, Artificial Sequence
  Description of Artificial Sequence: Synthetic oligonucleotide
  Sense strand starting at position 669 of SEQ ID NO: 1885387
uuaacuauuugaugagaac

SEQ ID NO: 2338321 - RNA, 19 nt, Artificial Sequence
  Description of Artificial Sequence: Synthetic oligonucleotide
  Antisense strand to SEQ ID NO: 2338320
guucucaucaaauaguuaa

SEQ ID NO: 2338322 - RNA, 19 nt, Artificial Sequence
  Description of Artificial Sequence: Synthetic oligonucleotide
  Sense strand starting at position 672 of SEQ ID NO: 1885387
acuauuugaugagaacuuu

SEQ ID NO: 2338323 - RNA, 19 nt, Artificial Sequence
  Description of Artificial Sequence: Synthetic oligonucleotide
  Antisense strand to SEQ ID NO: 2338322
aaaguucucaucaaauagu

SEQ ID NO: 2338324 - RNA, 19 nt, Artificial Sequence
  Description of Artificial Sequence: Synthetic oligonucleotide
  Sense strand starting at position 699 of SEQ ID NO: 1885387
uccuuugauguguaacuuu

SEQ ID NO: 2338325 - RNA, 19 nt, Artificial Sequence
  Description of Artificial Sequence: Synthetic oligonucleotide
  Antisense strand to SEQ ID NO: 2338324
aaaguuacacaucaaagga

SEQ ID NO: 2338326 - RNA, 19 nt, Artificial Sequence
  Description of Artificial Sequence: Synthetic oligonucleotide
  Sense strand starting at position 706 of SEQ ID NO: 1885387
auguguaacuuucucuuga

SEQ ID NO: 2338327 - RNA, 19 nt, Artificial Sequence
  Description of Artificial Sequence: Synthetic oligonucleotide
  Antisense strand to SEQ ID NO: 2338326
ucaagagaaaguuacacau

SEQ ID NO: 2338328 - RNA, 19 nt, Artificial Sequence
  Description of Artificial Sequence: Synthetic oligonucleotide
  Sense strand starting at position 708 of SEQ ID NO: 1885387
guguaacuuucucuugaga

SEQ ID NO: 2338329 - RNA, 19 nt, Artificial Sequence
  Description of Artificial Sequence: Synthetic oligonucleotide
  Antisense strand to SEQ ID NO: 2338328
ucucaagagaaaguuacac

SEQ ID NO: 2338330 - RNA, 19 nt, Artificial Sequence
  Description of Artificial Sequence: Synthetic oligonucleotide
  Sense strand starting at position 736 of SEQ ID NO: 1885387
ggcagcucugacugagauu

SEQ ID NO: 2338331 - RNA, 19 nt, Artificial Sequence
  Description of Artificial Sequence: Synthetic oligonucleotide
  Antisense strand to SEQ ID NO: 2338330
aaucucagucagagcugcc

SEQ ID NO: 2338332 - RNA, 19 nt, Artificial Sequence
  Description of Artificial Sequence: Synthetic oligonucleotide
  Sense strand starting at position 737 of SEQ ID NO: 1885387
gcagcucugacugagauug

SEQ ID NO: 2338333 - RNA, 19 nt, Artificial Sequence
  Description of Artificial Sequence: Synthetic oligonucleotide
  Antisense strand to SEQ ID NO: 2338332
caaucucagucagagcugc

SEQ ID NO: 2338334 - RNA, 19 nt, Artificial Sequence
  Description of Artificial Sequence: Synthetic oligonucleotide
  Sense strand starting at position 761 of SEQ ID NO: 1885387
ugaagaaucuaaguguugu

SEQ ID NO: 2338335 - RNA, 19 nt, Artificial Sequence
  Description of Artificial Sequence: Synthetic oligonucleotide
  Antisense strand to SEQ ID NO: 2338334
acaacacuuagauucuuca

SEQ ID NO: 2338336 - RNA, 19 nt, Artificial Sequence
  Description of Artificial Sequence: Synthetic oligonucleotide
  Sense strand starting at position 798 of SEQ ID NO: 1885387
uuguauuuguuugugggua

SEQ ID NO: 2338337 - RNA, 19 nt, Artificial Sequence
  Description of Artificial Sequence: Synthetic oligonucleotide
  Antisense strand to SEQ ID NO: 2338336
uacccacaaacaaauacaa

SEQ ID NO: 2338338 - RNA, 19 nt, Artificial Sequence
  Description of Artificial Sequence: Synthetic oligonucleotide
  Sense strand starting at position 803 of SEQ ID NO: 1885387
uuuguuuguggguaaauau

SEQ ID NO: 2338339 - RNA, 19 nt, Artificial Sequence
  Description of Artificial Sequence: Synthetic oligonucleotide
  Antisense strand to SEQ ID NO: 2338338
auauuuacccacaaacaaa

SEQ ID NO: 2338340 - RNA, 19 nt, Artificial Sequence
  Description of Artificial Sequence: Synthetic oligonucleotide
  Sense strand starting at position 956 of SEQ ID NO: 1885387
gcucauacuuaguuugaga

SEQ ID NO: 2338341 - RNA, 19 nt, Artificial Sequence
  Description of Artificial Sequence: Synthetic oligonucleotide
  Antisense strand to SEQ ID NO: 2338340
ucucaaacuaaguaugagc

SEQ ID NO: 2338342 - RNA, 19 nt, Artificial Sequence
  Description of Artificial Sequence: Synthetic oligonucleotide
  Sense strand starting at position 958 of SEQ ID NO: 1885387
ucauacuuaguuugagauu

SEQ ID NO: 2338343 - RNA, 19 nt, Artificial Sequence
  Description of Artificial Sequence: Synthetic oligonucleotide
  Antisense strand to SEQ ID NO: 2338342
aaucucaaacuaaguauga

SEQ ID NO: 2338344 - RNA, 19 nt, Artificial Sequence
  Description of Artificial Sequence: Synthetic oligonucleotide
  Sense strand starting at position 1078 of SEQ ID NO: 1885387
aaaguugauuguguuugau

SEQ ID NO: 2338345 - RNA, 19 nt, Artificial Sequence
  Description of Artificial Sequence: Synthetic oligonucleotide
  Antisense strand to SEQ ID NO: 2338344
aucaaacacaaucaacuuu

SEQ ID NO: 2338346 - RNA, 19 nt, Artificial Sequence
  Description of Artificial Sequence: Synthetic oligonucleotide
  Sense strand starting at position 1112 of SEQ ID NO: 1885387
aacagagaucugugagcuc

SEQ ID NO: 2338347 - RNA, 19 nt, Artificial Sequence
  Description of Artificial Sequence: Synthetic oligonucleotide
  Antisense strand to SEQ ID NO: 2338346
gagcucacagaucucuguu

SEQ ID NO: 2338348 - RNA, 19 nt, Artificial Sequence
  Description of Artificial Sequence: Synthetic oligonucleotide
  Sense strand starting at position 1115 of SEQ ID NO: 1885387
agagaucugugagcucuuu

SEQ ID NO: 2338349 - RNA, 19 nt, Artificial Sequence
  Description of Artificial Sequence: Synthetic oligonucleotide
  Antisense strand to SEQ ID NO: 2338348
aaagagcucacagaucucu

SEQ ID NO: 2338350 - RNA, 19 nt, Artificial Sequence
  Description of Artificial Sequence: Synthetic oligonucleotide
  Sense strand starting at position 1121 of SEQ ID NO: 1885387
cugugagcucuuuaugaau

SEQ ID NO: 2338351 - RNA, 19 nt, Artificial Sequence
  Description of Artificial Sequence: Synthetic oligonucleotide
  Antisense strand to SEQ ID NO: 2338350
auucauaaagagcucacag

SEQ ID NO: 2338352 - RNA, 19 nt, Artificial Sequence
  Description of Artificial Sequence: Synthetic oligonucleotide
  Sense strand starting at position 1127 of SEQ ID NO: 1885387
gcucuuuaugaaugaacau

SEQ ID NO: 2338353 - RNA, 19 nt, Artificial Sequence
  Description of Artificial Sequence: Synthetic oligonucleotide
  Antisense strand to SEQ ID NO: 2338352
auguucauucauaaagagc

SEQ ID NO: 2338354 - RNA, 19 nt, Artificial Sequence
  Description of Artificial Sequence: Synthetic oligonucleotide
  Sense strand starting at position 1489 of SEQ ID NO: 1885387
gcgucugcuggcuuaaugu

SEQ ID NO: 2338355 - RNA, 19 nt, Artificial Sequence
  Description of Artificial Sequence: Synthetic oligonucleotide
  Antisense strand to SEQ ID NO: 2338354
acauuaagccagcagacgc

SEQ ID NO: 2338356 - RNA, 19 nt, Artificial Sequence
  Description of Artificial Sequence: Synthetic oligonucleotide
  Sense strand starting at position 1609 of SEQ ID NO: 1885387
gcaucaccaugauugaagu

SEQ ID NO: 2338357 - RNA, 19 nt, Artificial Sequence
  Description of Artificial Sequence: Synthetic oligonucleotide
  Antisense strand to SEQ ID NO: 2338356
acuucaaucauggugaugc

SEQ ID NO: 2338358 - RNA, 19 nt, Artificial Sequence
  Description of Artificial Sequence: Synthetic oligonucleotide
  Sense strand starting at position 2346 of SEQ ID NO: 1885387
gugggcauuguccacaaua

SEQ ID NO: 2338359 - RNA, 19 nt, Artificial Sequence
  Description of Artificial Sequence: Synthetic oligonucleotide
  Antisense strand to SEQ ID NO: 2338358
uauuguggacaaugcccac

SEQ ID NO: 2338360 - RNA, 19 nt, Artificial Sequence
  Description of Artificial Sequence: Synthetic oligonucleotide
  Sense strand starting at position 3138 of SEQ ID NO: 1885387
ugcucuuaacucugagaua

SEQ ID NO: 2338361 - RNA, 19 nt, Artificial Sequence
  Description of Artificial Sequence: Synthetic oligonucleotide
  Antisense strand to SEQ ID NO: 2338360
uaucucagaguuaagagca

SEQ ID NO: 2338362 - RNA, 19 nt, Artificial Sequence
  Description of Artificial Sequence: Synthetic oligonucleotide
  Sense strand starting at position 3284 of SEQ ID NO: 1885387
uuuguagucuuacugauga

SEQ ID NO: 2338363 - RNA, 19 nt, Artificial Sequence
  Description of Artificial Sequence: Synthetic oligonucleotide
  Antisense strand to SEQ ID NO: 2338362
ucaucaguaagacuacaaa

SEQ ID NO: 2338364 - RNA, 19 nt, Artificial Sequence
  Description of Artificial Sequence: Synthetic oligonucleotide
  Sense strand starting at position 3309 of SEQ ID NO: 1885387
gucauugcuacgggaagaa

SEQ ID NO: 2338365 - RNA, 19 nt, Artificial Sequence
  Description of Artificial Sequence: Synthetic oligonucleotide
  Antisense strand to SEQ ID NO: 2338364
uucuucccguagcaaugac

SEQ ID NO: 2338366 - RNA, 19 nt, Artificial Sequence
  Description of Artificial Sequence: Synthetic oligonucleotide
  Sense strand starting at position 3382 of SEQ ID NO: 1885387
ggugcuacucaauacucau

SEQ ID NO: 2338367 - RNA, 19 nt, Artificial Sequence
  Description of Artificial Sequence: Synthetic oligonucleotide
  Antisense strand to SEQ ID NO: 2338366
augaguauugaguagcacc

SEQ ID NO: 2338368 - RNA, 19 nt, Artificial Sequence
  Description of Artificial Sequence: Synthetic oligonucleotide
  Sense strand starting at position 3422 of SEQ ID NO: 1885387
uugacugcugaauaaaguu

SEQ ID NO: 2338369 - RNA, 19 nt, Artificial Sequence
  Description of Artificial Sequence: Synthetic oligonucleotide
  Antisense strand to SEQ ID NO: 2338368
aacuuuauucagcagucaa

SEQ ID NO: 2338370 - RNA, 19 nt, Artificial Sequence
  Description of Artificial Sequence: Synthetic oligonucleotide
  Sense strand starting at position 3518 of SEQ ID NO: 1885387
acagcauggguuugugaga

SEQ ID NO: 2338371 - RNA, 19 nt, Artificial Sequence
  Description of Artificial Sequence: Synthetic oligonucleotide
  Antisense strand to SEQ ID NO: 2338370
ucucacaaacccaugcugu

SEQ ID NO: 2338372 - RNA, 19 nt, Artificial Sequence
  Description of Artificial Sequence: Synthetic oligonucleotide
  Sense strand starting at position 3519 of SEQ ID NO: 1885387
cagcauggguuugugagaa

SEQ ID NO: 2338373 - RNA, 19 nt, Artificial Sequence
  Description of Artificial Sequence: Synthetic oligonucleotide
  Antisense strand to SEQ ID NO: 2338372
uucucacaaacccaugcug

SEQ ID NO: 2338374 - RNA, 19 nt, Artificial Sequence
  Description of Artificial Sequence: Synthetic oligonucleotide
  Sense strand starting at position 3523 of SEQ ID NO: 1885387
auggguuugugagaaauuu

SEQ ID NO: 2338375 - RNA, 19 nt, Artificial Sequence
  Description of Artificial Sequence: Synthetic oligonucleotide
  Antisense strand to SEQ ID NO: 2338374
aaauuucucacaaacccau

SEQ ID NO: 2338376 - RNA, 19 nt, Artificial Sequence
  Description of Artificial Sequence: Synthetic oligonucleotide
  Sense strand starting at position 3805 of SEQ ID NO: 1885387
ugauauagguuucuuggua

SEQ ID NO: 2338377 - RNA, 19 nt, Artificial Sequence
  Description of Artificial Sequence: Synthetic oligonucleotide
  Antisense strand to SEQ ID NO: 2338376
uaccaagaaaccuauauca

SEQ ID NO: 2338378 - RNA, 19 nt, Artificial Sequence
  Description of Artificial Sequence: Synthetic oligonucleotide
  Sense strand starting at position 3806 of SEQ ID NO: 1885387
gauauagguuucuugguau

SEQ ID NO: 2338379 - RNA, 19 nt, Artificial Sequence
  Description of Artificial Sequence: Synthetic oligonucleotide
  Antisense strand to SEQ ID NO: 2338378
auaccaagaaaccuauauc

SEQ ID NO: 2338380 - RNA, 19 nt, Artificial Sequence
  Description of Artificial Sequence: Synthetic oligonucleotide
  Sense strand starting at position 3812 of SEQ ID NO: 1885387
gguuucuugguauaguuga

SEQ ID NO: 2338381 - RNA, 19 nt, Artificial Sequence
  Description of Artificial Sequence: Synthetic oligonucleotide
  Antisense strand to SEQ ID NO: 2338380
ucaacuauaccaagaaacc

SEQ ID NO: 2338382 - RNA, 19 nt, Artificial Sequence
  Description of Artificial Sequence: Synthetic oligonucleotide
  Sense strand starting at position 3817 of SEQ ID NO: 1885387
cuugguauaguugauacuu

SEQ ID NO: 2338383 - RNA, 19 nt, Artificial Sequence
  Description of Artificial Sequence: Synthetic oligonucleotide
  Antisense strand to SEQ ID NO: 2338382
aaguaucaacuauaccaag

SEQ ID NO: 2338384 - RNA, 19 nt, Artificial Sequence
  Description of Artificial Sequence: Synthetic oligonucleotide
  Sense strand starting at position 3826 of SEQ ID NO: 1885387
guugauacuuugucauuuc

SEQ ID NO: 2338385 - RNA, 19 nt, Artificial Sequence
  Description of Artificial Sequence: Synthetic oligonucleotide
  Antisense strand to SEQ ID NO: 2338384
gaaaugacaaaguaucaac

SEQ ID NO: 2338386 - RNA, 19 nt, Artificial Sequence
  Description of Artificial Sequence: Synthetic oligonucleotide
  Sense strand starting at position 3845 of SEQ ID NO: 1885387
auaaccugugcugaacaua

SEQ ID NO: 2338387 - RNA, 19 nt, Artificial Sequence
  Description of Artificial Sequence: Synthetic oligonucleotide
  Antisense strand to SEQ ID NO: 2338386
uauguucagcacagguuau

SEQ ID NO: 2338388 - RNA, 19 nt, Artificial Sequence
  Description of Artificial Sequence: Synthetic oligonucleotide
  Sense strand starting at position 3848 of SEQ ID NO: 1885387
accugugcugaacauaauu

SEQ ID NO: 2338389 - RNA, 19 nt, Artificial Sequence
  Description of Artificial Sequence: Synthetic oligonucleotide
  Antisense strand to SEQ ID NO: 2338388
aauuauguucagcacaggu

SEQ ID NO: 2338390 - RNA, 19 nt, Artificial Sequence
  Description of Artificial Sequence: Synthetic oligonucleotide
  Sense strand starting at position 3877 of SEQ ID NO: 1885387
guuggaucucaaugagaau

SEQ ID NO: 2338391 - RNA, 19 nt, Artificial Sequence
  Description of Artificial Sequence: Synthetic oligonucleotide
  Antisense strand to SEQ ID NO: 2338390
auucucauugagauccaac

SEQ ID NO: 2338392 - RNA, 19 nt, Artificial Sequence
  Description of Artificial Sequence: Synthetic oligonucleotide
  Sense strand starting at position 3926 of SEQ ID NO: 1885387
augugaauuucugcaagca

SEQ ID NO: 2338393 - RNA, 19 nt, Artificial Sequence
  Description of Artificial Sequence: Synthetic oligonucleotide
  Antisense strand to SEQ ID NO: 2338392
ugcuugcagaaauucacau

SEQ ID NO: 2338394 - RNA, 19 nt, Artificial Sequence
  Description of Artificial Sequence: Synthetic oligonucleotide
  Sense strand starting at position 3983 of SEQ ID NO: 1885387
uccuauucucuauggauag

SEQ ID NO: 2338395 - RNA, 19 nt, Artificial Sequence
  Description of Artificial Sequence: Synthetic oligonucleotide
  Antisense strand to SEQ ID NO: 2338394
cuauccauagagaauagga

SEQ ID NO: 2338396 - RNA, 19 nt, Artificial Sequence
  Description of Artificial Sequence: Synthetic oligonucleotide
  Sense strand starting at position 258 of SEQ ID NO: 1885388
ugaggcauauugcugaguu

SEQ ID NO: 2338397 - RNA, 19 nt, Artificial Sequence
  Description of Artificial Sequence: Synthetic oligonucleotide
  Antisense strand to SEQ ID NO: 2338396
aacucagcaauaugccuca

SEQ ID NO: 2338398 - RNA, 19 nt, Artificial Sequence
  Description of Artificial Sequence: Synthetic oligonucleotide
  Sense strand starting at position 260 of SEQ ID NO: 1885388
aggcauauugcugaguuaa

SEQ ID NO: 2338399 - RNA, 19 nt, Artificial Sequence
  Description of Artificial Sequence: Synthetic oligonucleotide
  Antisense strand to SEQ ID NO: 2338398
uuaacucagcaauaugccu

SEQ ID NO: 2338400 - RNA, 19 nt, Artificial Sequence
  Description of Artificial Sequence: Synthetic oligonucleotide
  Sense strand starting at position 262 of SEQ ID NO: 1885388
gcauauugcugaguuaagg

SEQ ID NO: 2338401 - RNA, 19 nt, Artificial Sequence
  Description of Artificial Sequence: Synthetic oligonucleotide
  Antisense strand to SEQ ID NO: 2338400
ccuuaacucagcaauaugc

SEQ ID NO: 2338402 - RNA, 19 nt, Artificial Sequence
  Description of Artificial Sequence: Synthetic oligonucleotide
  Sense strand starting at position 291 of SEQ ID NO: 1885388
uuucuuagccaagacugua

SEQ ID NO: 2338403 - RNA, 19 nt, Artificial Sequence
  Description of Artificial Sequence: Synthetic oligonucleotide
  Antisense strand to SEQ ID NO: 2338402
uacagucuuggcuaagaaa

SEQ ID NO: 2338404 - RNA, 19 nt, Artificial Sequence
  Description of Artificial Sequence: Synthetic oligonucleotide
  Sense strand starting at position 303 of SEQ ID NO: 1885388
gacuguaguuaguugggau

SEQ ID NO: 2338405 - RNA, 19 nt, Artificial Sequence
  Description of Artificial Sequence: Synthetic oligonucleotide
  Antisense strand to SEQ ID NO: 2338404
aucccaacuaacuacaguc

SEQ ID NO: 2338406 - RNA, 19 nt, Artificial Sequence
  Description of Artificial Sequence: Synthetic oligonucleotide
  Sense strand starting at position 304 of SEQ ID NO: 1885388
acuguaguuaguugggaua

SEQ ID NO: 2338407 - RNA, 19 nt, Artificial Sequence
  Description of Artificial Sequence: Synthetic oligonucleotide
  Antisense strand to SEQ ID NO: 2338406
uaucccaacuaacuacagu

SEQ ID NO: 2338408 - RNA, 19 nt, Artificial Sequence
  Description of Artificial Sequence: Synthetic oligonucleotide
  Sense strand starting at position 333 of SEQ ID NO: 1885388
ggugauggguuacuaauga

SEQ ID NO: 2338409 - RNA, 19 nt, Artificial Sequence
  Description of Artificial Sequence: Synthetic oligonucleotide
  Antisense strand to SEQ ID NO: 2338408
ucauuaguaacccaucacc

SEQ ID NO: 2338410 - RNA, 19 nt, Artificial Sequence
  Description of Artificial Sequence: Synthetic oligonucleotide
  Sense strand starting at position 471 of SEQ ID NO: 1885388
gaagcaaugcugggaaacu

SEQ ID NO: 2338411 - RNA, 19 nt, Artificial Sequence
  Description of Artificial Sequence: Synthetic oligonucleotide
  Antisense strand to SEQ ID NO: 2338410
aguuucccagcauugcuuc

SEQ ID NO: 2338412 - RNA, 19 nt, Artificial Sequence
  Description of Artificial Sequence: Synthetic oligonucleotide
  Sense strand starting at position 503 of SEQ ID NO: 1885388
auggcagcuccucauagaa

SEQ ID NO: 2338413 - RNA, 19 nt, Artificial Sequence
  Description of Artificial Sequence: Synthetic oligonucleotide
  Antisense strand to SEQ ID NO: 2338412
uucuaugaggagcugccau

SEQ ID NO: 2338414 - RNA, 19 nt, Artificial Sequence
  Description of Artificial Sequence: Synthetic oligonucleotide
  Sense strand starting at position 762 of SEQ ID NO: 1885388
agaggcaucuuguuagacu

SEQ ID NO: 2338415 - RNA, 19 nt, Artificial Sequence
  Description of Artificial Sequence: Synthetic oligonucleotide
  Antisense strand to SEQ ID NO: 2338414
agucuaacaagaugccucu

SEQ ID NO: 2338416 - RNA, 19 nt, Artificial Sequence
  Description of Artificial Sequence: Synthetic oligonucleotide
  Sense strand starting at position 787 of SEQ ID NO: 1885388
uguagucacgugucgcuua

SEQ ID NO: 2338417 - RNA, 19 nt, Artificial Sequence
  Description of Artificial Sequence: Synthetic oligonucleotide
  Antisense strand to SEQ ID NO: 2338416
uaagcgacacgugacuaca

SEQ ID NO: 2338418 - RNA, 19 nt, Artificial Sequence
  Description of Artificial Sequence: Synthetic oligonucleotide
  Sense strand starting at position 979 of SEQ ID NO: 1885388
acacaaugguaguugugua

SEQ ID NO: 2338419 - RNA, 19 nt, Artificial Sequence
  Description of Artificial Sequence: Synthetic oligonucleotide
  Antisense strand to SEQ ID NO: 2338418
uacacaacuaccauugugu

SEQ ID NO: 2338420 - RNA, 19 nt, Artificial Sequence
  Description of Artificial Sequence: Synthetic oligonucleotide
  Sense strand starting at position 1097 of SEQ ID NO: 1885388
ggugcaugacuacaagagu

SEQ ID NO: 2338421 - RNA, 19 nt, Artificial Sequence
  Description of Artificial Sequence: Synthetic oligonucleotide
  Antisense strand to SEQ ID NO: 2338420
acucuuguagucaugcacc

SEQ ID NO: 2338422 - RNA, 19 nt, Artificial Sequence
  Description of Artificial Sequence: Synthetic oligonucleotide
  Sense strand starting at position 1106 of SEQ ID NO: 1885388
cuacaagagugagcacaau

SEQ ID NO: 2338423 - RNA, 19 nt, Artificial Sequence
  Description of Artificial Sequence: Synthetic oligonucleotide
  Antisense strand to SEQ ID NO: 2338422
auugugcucacucuuguag

SEQ ID NO: 2338424 - RNA, 19 nt, Artificial Sequence
  Description of Artificial Sequence: Synthetic oligonucleotide
  Sense strand starting at position 1417 of SEQ ID NO: 1885388
gaucuuugugucgugcuau

SEQ ID NO: 2338425 - RNA, 19 nt, Artificial Sequence
  Description of Artificial Sequence: Synthetic oligonucleotide
  Antisense strand to SEQ ID NO: 2338424
auagcacgacacaaagauc

SEQ ID NO: 2338426 - RNA, 19 nt, Artificial Sequence
  Description of Artificial Sequence: Synthetic oligonucleotide
  Sense strand starting at position 1420 of SEQ ID NO: 1885388
cuuugugucgugcuauaaa

SEQ ID NO: 2338427 - RNA, 19 nt, Artificial Sequence
  Description of Artificial Sequence: Synthetic oligonucleotide
  Antisense strand to SEQ ID NO: 2338426
uuuauagcacgacacaaag

SEQ ID NO: 2338428 - RNA, 19 nt, Artificial Sequence
  Description of Artificial Sequence: Synthetic oligonucleotide
  Sense strand starting at position 1516 of SEQ ID NO: 1885388
aggagaugaucgcuugaac

SEQ ID NO: 2338429 - RNA, 19 nt, Artificial Sequence
  Description of Artificial Sequence: Synthetic oligonucleotide
  Antisense strand to SEQ ID NO: 2338428
guucaagcgaucaucuccu

SEQ ID NO: 2338430 - RNA, 19 nt, Artificial Sequence
  Description of Artificial Sequence: Synthetic oligonucleotide
  Sense strand starting at position 1589 of SEQ ID NO: 1885388
cacagugaccaguguugau

SEQ ID NO: 2338431 - RNA, 19 nt, Artificial Sequence
  Description of Artificial Sequence: Synthetic oligonucleotide
  Antisense strand to SEQ ID NO: 2338430
aucaacacuggucacugug

SEQ ID NO: 2338432 - RNA, 19 nt, Artificial Sequence
  Description of Artificial Sequence: Synthetic oligonucleotide
  Sense strand starting at position 1593 of SEQ ID NO: 1885388
gugaccaguguugauggau

SEQ ID NO: 2338433 - RNA, 19 nt, Artificial Sequence
  Description of Artificial Sequence: Synthetic oligonucleotide
  Antisense strand to SEQ ID NO: 2338432
auccaucaacacuggucac

SEQ ID NO: 2338434 - RNA, 19 nt, Artificial Sequence
  Description of Artificial Sequence: Synthetic oligonucleotide
  Sense strand starting at position 1599 of SEQ ID NO: 1885388
aguguugauggaugagaua

SEQ ID NO: 2338435 - RNA, 19 nt, Artificial Sequence
  Description of Artificial Sequence: Synthetic oligonucleotide
  Antisense strand to SEQ ID NO: 2338434
uaucucauccaucaacacu

SEQ ID NO: 2338436 - RNA, 19 nt, Artificial Sequence
  Description of Artificial Sequence: Synthetic oligonucleotide
  Sense strand starting at position 1867 of SEQ ID NO: 1885388
ugguguuccagggacugau

SEQ ID NO: 2338437 - RNA, 19 nt, Artificial Sequence
  Description of Artificial Sequence: Synthetic oligonucleotide
  Antisense strand to SEQ ID NO: 2338436
aucagucccuggaacacca

SEQ ID NO: 2338438 - RNA, 19 nt, Artificial Sequence
  Description of Artificial Sequence: Synthetic oligonucleotide
  Sense strand starting at position 1994 of SEQ ID NO: 1885388
cuguguacagucugacaga

SEQ ID NO: 2338439 - RNA, 19 nt, Artificial Sequence
  Description of Artificial Sequence: Synthetic oligonucleotide
  Antisense strand to SEQ ID NO: 2338438
ucugucagacuguacacag

SEQ ID NO: 2338440 - RNA, 19 nt, Artificial Sequence
  Description of Artificial Sequence: Synthetic oligonucleotide
  Sense strand starting at position 2021 of SEQ ID NO: 1885388
ccaagucuuguuuacuuua

SEQ ID NO: 2338441 - RNA, 19 nt, Artificial Sequence
  Description of Artificial Sequence: Synthetic oligonucleotide
  Antisense strand to SEQ ID NO: 2338440
uaaaguaaacaagacuugg

SEQ ID NO: 2338442 - RNA, 19 nt, Artificial Sequence
  Description of Artificial Sequence: Synthetic oligonucleotide
  Sense strand starting at position 2024 of SEQ ID NO: 1885388
agucuuguuuacuuuaaug

SEQ ID NO: 2338443 - RNA, 19 nt, Artificial Sequence
  Description of Artificial Sequence: Synthetic oligonucleotide
  Antisense strand to SEQ ID NO: 2338442
cauuaaaguaaacaagacu

SEQ ID NO: 2338444 - RNA, 19 nt, Artificial Sequence
  Description of Artificial Sequence: Synthetic oligonucleotide
  Sense strand starting at position 2079 of SEQ ID NO: 1885388
cugaucuuacugugacaua

SEQ ID NO: 2338445 - RNA, 19 nt, Artificial Sequence
  Description of Artificial Sequence: Synthetic oligonucleotide
  Antisense strand to SEQ ID NO: 2338444
uaugucacaguaagaucag

SEQ ID NO: 2338446 - RNA, 19 nt, Artificial Sequence
  Description of Artificial Sequence: Synthetic oligonucleotide
  Sense strand starting at position 2799 of SEQ ID NO: 1885388
ucucucagaguguggauua

SEQ ID NO: 2338447 - RNA, 19 nt, Artificial Sequence
  Description of Artificial Sequence: Synthetic oligonucleotide
  Antisense strand to SEQ ID NO: 2338446
uaauccacacucugagaga

SEQ ID NO: 2338448 - RNA, 19 nt, Artificial Sequence
  Description of Artificial Sequence: Synthetic oligonucleotide
  Sense strand starting at position 2804 of SEQ ID NO: 1885388
cagaguguggauuauccau

SEQ ID NO: 2338449 - RNA, 19 nt, Artificial Sequence
  Description of Artificial Sequence: Synthetic oligonucleotide
  Antisense strand to SEQ ID NO: 2338448
auggauaauccacacucug

SEQ ID NO: 2338450 - RNA, 19 nt, Artificial Sequence
  Description of Artificial Sequence: Synthetic oligonucleotide
  Sense strand starting at position 2819 of SEQ ID NO: 1885388
ccauuucugcaucguauau

SEQ ID NO: 2338451 - RNA, 19 nt, Artificial Sequence
  Description of Artificial Sequence: Synthetic oligonucleotide
  Antisense strand to SEQ ID NO: 2338450
auauacgaugcagaaaugg

SEQ ID NO: 2338452 - RNA, 19 nt, Artificial Sequence
  Description of Artificial Sequence: Synthetic oligonucleotide
  Sense strand starting at position 3260 of SEQ ID NO: 1885388
guugcacuccgagauuaug

SEQ ID NO: 2338453 - RNA, 19 nt, Artificial Sequence
  Description of Artificial Sequence: Synthetic oligonucleotide
  Antisense strand to SEQ ID NO: 2338452
cauaaucucggagugcaac

SEQ ID NO: 2338454 - RNA, 19 nt, Artificial Sequence
  Description of Artificial Sequence: Synthetic oligonucleotide
  Sense strand starting at position 3266 of SEQ ID NO: 1885388
cuccgagauuaugccaaca

SEQ ID NO: 2338455 - RNA, 19 nt, Artificial Sequence
  Description of Artificial Sequence: Synthetic oligonucleotide
  Antisense strand to SEQ ID NO: 2338454
uguuggcauaaucucggag

SEQ ID NO: 2338456 - RNA, 19 nt, Artificial Sequence
  Description of Artificial Sequence: Synthetic oligonucleotide
  Sense strand starting at position 3298 of SEQ ID NO: 1885388
caugacugccaguaagauu

SEQ ID NO: 2338457 - RNA, 19 nt, Artificial Sequence
  Description of Artificial Sequence: Synthetic oligonucleotide
  Antisense strand to SEQ ID NO: 2338456
aaucuuacuggcagucaug

SEQ ID NO: 2338458 - RNA, 19 nt, Artificial Sequence
  Description of Artificial Sequence: Synthetic oligonucleotide
  Sense strand starting at position 3485 of SEQ ID NO: 1885388
auuacuaugucggcucaaa

SEQ ID NO: 2338459 - RNA, 19 nt, Artificial Sequence
  Description of Artificial Sequence: Synthetic oligonucleotide
  Antisense strand to SEQ ID NO: 2338458
uuugagccgacauaguaau

SEQ ID NO: 2338460 - RNA, 19 nt, Artificial Sequence
  Description of Artificial Sequence: Synthetic oligonucleotide
  Sense strand starting at position 3625 of SEQ ID NO: 1885388
gcugaacuuccacagaacu

SEQ ID NO: 2338461 - RNA, 19 nt, Artificial Sequence
  Description of Artificial Sequence: Synthetic oligonucleotide
  Antisense strand to SEQ ID NO: 2338460
aguucuguggaaguucagc

SEQ ID NO: 2338462 - RNA, 19 nt, Artificial Sequence
  Description of Artificial Sequence: Synthetic oligonucleotide
  Sense strand starting at position 3717 of SEQ ID NO: 1885388
acuagauagccuuaagcua

SEQ ID NO: 2338463 - RNA, 19 nt, Artificial Sequence
  Description of Artificial Sequence: Synthetic oligonucleotide
  Antisense strand to SEQ ID NO: 2338462
uagcuuaaggcuaucuagu

SEQ ID NO: 2338464 - RNA, 19 nt, Artificial Sequence
  Description of Artificial Sequence: Synthetic oligonucleotide
  Sense strand starting at position 3725 of SEQ ID NO: 1885388
gccuuaagcuaguuaugag

SEQ ID NO: 2338465 - RNA, 19 nt, Artificial Sequence
  Description of Artificial Sequence: Synthetic oligonucleotide
  Antisense strand to SEQ ID NO: 2338464
cucauaacuagcuuaaggc

SEQ ID NO: 2338466 - RNA, 19 nt, Artificial Sequence
  Description of Artificial Sequence: Synthetic oligonucleotide
  Sense strand starting at position 3839 of SEQ ID NO: 1885388
ggaggagcuccuggacaga

SEQ ID NO: 2338467 - RNA, 19 nt, Artificial Sequence
  Description of Artificial Sequence: Synthetic oligonucleotide
  Antisense strand to SEQ ID NO: 2338466
ucuguccaggagcuccucc

SEQ ID NO: 2338468 - RNA, 19 nt, Artificial Sequence
  Description of Artificial Sequence: Synthetic oligonucleotide
  Sense strand starting at position 3885 of SEQ ID NO: 1885388
ggcucacacugcucaugaa

SEQ ID NO: 2338469 - RNA, 19 nt, Artificial Sequence
  Description of Artificial Sequence: Synthetic oligonucleotide
  Antisense strand to SEQ ID NO: 2338468
uucaugagcagugugagcc

SEQ ID NO: 2338470 - RNA, 19 nt, Artificial Sequence
  Description of Artificial Sequence: Synthetic oligonucleotide
  Sense strand starting at position 3886 of SEQ ID NO: 1885388
gcucacacugcucaugaau

SEQ ID NO: 2338471 - RNA, 19 nt, Artificial Sequence
  Description of Artificial Sequence: Synthetic oligonucleotide
  Antisense strand to SEQ ID NO: 2338470
auucaugagcagugugagc

SEQ ID NO: 2338472 - RNA, 19 nt, Artificial Sequence
  Description of Artificial Sequence: Synthetic oligonucleotide
  Sense strand starting at position 3897 of SEQ ID NO: 1885388
ucaugaaugucaccuguac

SEQ ID NO: 2338473 - RNA, 19 nt, Artificial Sequence
  Description of Artificial Sequence: Synthetic oligonucleotide
  Antisense strand to SEQ ID NO: 2338472
guacaggugacauucauga

SEQ ID NO: 2338474 - RNA, 19 nt, Artificial Sequence
  Description of Artificial Sequence: Synthetic oligonucleotide
  Sense strand starting at position 3936 of SEQ ID NO: 1885388
auaugagcuccuugggcaa

SEQ ID NO: 2338475 - RNA, 19 nt, Artificial Sequence
  Description of Artificial Sequence: Synthetic oligonucleotide
  Antisense strand to SEQ ID NO: 2338474
uugcccaaggagcucauau

SEQ ID NO: 2338476 - RNA, 19 nt, Artificial Sequence
  Description of Artificial Sequence: Synthetic oligonucleotide
  Sense strand starting at position 56 of SEQ ID NO: 1885389
cugccaucauuugugcaaa

SEQ ID NO: 2338477 - RNA, 19 nt, Artificial Sequence
  Description of Artificial Sequence: Synthetic oligonucleotide
  Antisense strand to SEQ ID NO: 2338476
uuugcacaaaugauggcag

SEQ ID NO: 2338478 - RNA, 19 nt, Artificial Sequence
  Description of Artificial Sequence: Synthetic oligonucleotide
  Sense strand starting at position 58 of SEQ ID NO: 1885389
gccaucauuugugcaaaca

SEQ ID NO: 2338479 - RNA, 19 nt, Artificial Sequence
  Description of Artificial Sequence: Synthetic oligonucleotide
  Antisense strand to SEQ ID NO: 2338478
uguuugcacaaaugauggc

SEQ ID NO: 2338480 - RNA, 19 nt, Artificial Sequence
  Description of Artificial Sequence: Synthetic oligonucleotide
  Sense strand starting at position 136 of SEQ ID NO: 1885389
gaggaaaguagacgaguuu

SEQ ID NO: 2338481 - RNA, 19 nt, Artificial Sequence
  Description of Artificial Sequence: Synthetic oligonucleotide
  Antisense strand to SEQ ID NO: 2338480
aaacucgucuacuuuccuc

SEQ ID NO: 2338482 - RNA, 19 nt, Artificial Sequence
  Description of Artificial Sequence: Synthetic oligonucleotide
  Sense strand starting at position 223 of SEQ ID NO: 1885389
agguuacuauuugaaauga

SEQ ID NO: 2338483 - RNA, 19 nt, Artificial Sequence
  Description of Artificial Sequence: Synthetic oligonucleotide
  Antisense strand to SEQ ID NO: 2338482
ucauuucaaauaguaaccu

SEQ ID NO: 2338484 - RNA, 19 nt, Artificial Sequence
  Description of Artificial Sequence: Synthetic oligonucleotide
  Sense strand starting at position 437 of SEQ ID NO: 1885389
ggaaucauguucuuccuaa

SEQ ID NO: 2338485 - RNA, 19 nt, Artificial Sequence
  Description of Artificial Sequence: Synthetic oligonucleotide
  Antisense strand to SEQ ID NO: 2338484
uuaggaagaacaugauucc

SEQ ID NO: 2338486 - RNA, 19 nt, Artificial Sequence
  Description of Artificial Sequence: Synthetic oligonucleotide
  Sense strand starting at position 470 of SEQ ID NO: 1885389
acacuauucuauguggaug

SEQ ID NO: 2338487 - RNA, 19 nt, Artificial Sequence
  Description of Artificial Sequence: Synthetic oligonucleotide
  Antisense strand to SEQ ID NO: 2338486
cauccacauagaauagugu

SEQ ID NO: 2338488 - RNA, 19 nt, Artificial Sequence
  Description of Artificial Sequence: Synthetic oligonucleotide
  Sense strand starting at position 500 of SEQ ID NO: 1885389
aguauuucuguaugcuauu

SEQ ID NO: 2338489 - RNA, 19 nt, Artificial Sequence
  Description of Artificial Sequence: Synthetic oligonucleotide
  Antisense strand to SEQ ID NO: 2338488
aauagcauacagaaauacu

SEQ ID NO: 2338490 - RNA, 19 nt, Artificial Sequence
  Description of Artificial Sequence: Synthetic oligonucleotide
  Sense strand starting at position 535 of SEQ ID NO: 1885389
auaugaguuuaauuggaac

SEQ ID NO: 2338491 - RNA, 19 nt, Artificial Sequence
  Description of Artificial Sequence: Synthetic oligonucleotide
  Antisense strand to SEQ ID NO: 2338490
guuccaauuaaacucauau

SEQ ID NO: 2338492 - RNA, 19 nt, Artificial Sequence
  Description of Artificial Sequence: Synthetic oligonucleotide
  Sense strand starting at position 583 of SEQ ID NO: 1885389
agaauagcucauugacuaa

SEQ ID NO: 2338493 - RNA, 19 nt, Artificial Sequence
  Description of Artificial Sequence: Synthetic oligonucleotide
  Antisense strand to SEQ ID NO: 2338492
uuagucaaugagcuauucu

SEQ ID NO: 2338494 - RNA, 19 nt, Artificial Sequence
  Description of Artificial Sequence: Synthetic oligonucleotide
  Sense strand starting at position 707 of SEQ ID NO: 1885389
gcaacaaugcuggauauug

SEQ ID NO: 2338495 - RNA, 19 nt, Artificial Sequence
  Description of Artificial Sequence: Synthetic oligonucleotide
  Antisense strand to SEQ ID NO: 2338494
caauauccagcauuguugc

SEQ ID NO: 2338496 - RNA, 19 nt, Artificial Sequence
  Description of Artificial Sequence: Synthetic oligonucleotide
  Sense strand starting at position 1064 of SEQ ID NO: 1885389
guagaaaggcuaugaguga

SEQ ID NO: 2338497 - RNA, 19 nt, Artificial Sequence
  Description of Artificial Sequence: Synthetic oligonucleotide
  Antisense strand to SEQ ID NO: 2338496
ucacucauagccuuucuac

SEQ ID NO: 2338498 - RNA, 19 nt, Artificial Sequence
  Description of Artificial Sequence: Synthetic oligonucleotide
  Sense strand starting at position 1068 of SEQ ID NO: 1885389
aaaggcuaugagugacuaa

SEQ ID NO: 2338499 - RNA, 19 nt, Artificial Sequence
  Description of Artificial Sequence: Synthetic oligonucleotide
  Antisense strand to SEQ ID NO: 2338498
uuagucacucauagccuuu

SEQ ID NO: 2338500 - RNA, 19 nt, Artificial Sequence
  Description of Artificial Sequence: Synthetic oligonucleotide
  Sense strand starting at position 1075 of SEQ ID NO: 1885389
augagugacuaaguuggaa

SEQ ID NO: 2338501 - RNA, 19 nt, Artificial Sequence
  Description of Artificial Sequence: Synthetic oligonucleotide
  Antisense strand to SEQ ID NO: 2338500
uuccaacuuagucacucau

SEQ ID NO: 2338502 - RNA, 19 nt, Artificial Sequence
  Description of Artificial Sequence: Synthetic oligonucleotide
  Sense strand starting at position 1077 of SEQ ID NO: 1885389
gagugacuaaguuggaagu

SEQ ID NO: 2338503 - RNA, 19 nt, Artificial Sequence
  Description of Artificial Sequence: Synthetic oligonucleotide
  Antisense strand to SEQ ID NO: 2338502
acuuccaacuuagucacuc

SEQ ID NO: 2338504 - RNA, 19 nt, Artificial Sequence
  Description of Artificial Sequence: Synthetic oligonucleotide
  Sense strand starting at position 1113 of SEQ ID NO: 1885389
ugugaaggaccuugaauug

SEQ ID NO: 2338505 - RNA, 19 nt, Artificial Sequence
  Description of Artificial Sequence: Synthetic oligonucleotide
  Antisense strand to SEQ ID NO: 2338504
caauucaagguccuucaca

SEQ ID NO: 2338506 - RNA, 19 nt, Artificial Sequence
  Description of Artificial Sequence: Synthetic oligonucleotide
  Sense strand starting at position 1142 of SEQ ID NO: 1885389
gcaguaaggagucaccaaa

SEQ ID NO: 2338507 - RNA, 19 nt, Artificial Sequence
  Description of Artificial Sequence: Synthetic oligonucleotide
  Antisense strand to SEQ ID NO: 2338506
uuuggugacuccuuacugc

SEQ ID NO: 2338508 - RNA, 19 nt, Artificial Sequence
  Description of Artificial Sequence: Synthetic oligonucleotide
  Sense strand starting at position 1231 of SEQ ID NO: 1885389
gaacuauuagcugauguaa

SEQ ID NO: 2338509 - RNA, 19 nt, Artificial Sequence
  Description of Artificial Sequence: Synthetic oligonucleotide
  Antisense strand to SEQ ID NO: 2338508
uuacaucagcuaauaguuc

SEQ ID NO: 2338510 - RNA, 19 nt, Artificial Sequence
  Description of Artificial Sequence: Synthetic oligonucleotide
  Sense strand starting at position 1380 of SEQ ID NO: 1885389
auaacucuaccacguagaa

SEQ ID NO: 2338511 - RNA, 19 nt, Artificial Sequence
  Description of Artificial Sequence: Synthetic oligonucleotide
  Antisense strand to SEQ ID NO: 2338510
uucuacgugguagaguuau

SEQ ID NO: 2338512 - RNA, 19 nt, Artificial Sequence
  Description of Artificial Sequence: Synthetic oligonucleotide
  Sense strand starting at position 1410 of SEQ ID NO: 1885389
caggaaaucugggccuaga

SEQ ID NO: 2338513 - RNA, 19 nt, Artificial Sequence
  Description of Artificial Sequence: Synthetic oligonucleotide
  Antisense strand to SEQ ID NO: 2338512
ucuaggcccagauuuccug

SEQ ID NO: 2338514 - RNA, 19 nt, Artificial Sequence
  Description of Artificial Sequence: Synthetic oligonucleotide
  Sense strand starting at position 1481 of SEQ ID NO: 1885389
ugguaauaugauggugaug

SEQ ID NO: 2338515 - RNA, 19 nt, Artificial Sequence
  Description of Artificial Sequence: Synthetic oligonucleotide
  Antisense strand to SEQ ID NO: 2338514
caucaccaucauauuacca

SEQ ID NO: 2338516 - RNA, 19 nt, Artificial Sequence
  Description of Artificial Sequence: Synthetic oligonucleotide
  Sense strand starting at position 1590 of SEQ ID NO: 1885389
auggaacagauucgccaua

SEQ ID NO: 2338517 - RNA, 19 nt, Artificial Sequence
  Description of Artificial Sequence: Synthetic oligonucleotide
  Antisense strand to SEQ ID NO: 2338516
uauggcgaaucuguuccau

SEQ ID NO: 2338518 - RNA, 19 nt, Artificial Sequence
  Description of Artificial Sequence: Synthetic oligonucleotide
  Sense strand starting at position 1592 of SEQ ID NO: 1885389
ggaacagauucgccauaua

SEQ ID NO: 2338519 - RNA, 19 nt, Artificial Sequence
  Description of Artificial Sequence: Synthetic oligonucleotide
  Antisense strand to SEQ ID NO: 2338518
uauauggcgaaucuguucc

SEQ ID NO: 2338520 - RNA, 19 nt, Artificial Sequence
  Description of Artificial Sequence: Synthetic oligonucleotide
  Sense strand starting at position 1595 of SEQ ID NO: 1885389
acagauucgccauauaauc

SEQ ID NO: 2338521 - RNA, 19 nt, Artificial Sequence
  Description of Artificial Sequence: Synthetic oligonucleotide
  Antisense strand to SEQ ID NO: 2338520
gauuauauggcgaaucugu

SEQ ID NO: 2338522 - RNA, 19 nt, Artificial Sequence
  Description of Artificial Sequence: Synthetic oligonucleotide
  Sense strand starting at position 1664 of SEQ ID NO: 1885389
aguuguuucccagacuaaa

SEQ ID NO: 2338523 - RNA, 19 nt, Artificial Sequence
  Description of Artificial Sequence: Synthetic oligonucleotide
  Antisense strand to SEQ ID NO: 2338522
uuuagucugggaaacaacu

SEQ ID NO: 2338524 - RNA, 19 nt, Artificial Sequence
  Description of Artificial Sequence: Synthetic oligonucleotide
  Sense strand starting at position 1684 of SEQ ID NO: 1885389
guacuauggcaucaucuaa

SEQ ID NO: 2338525 - RNA, 19 nt, Artificial Sequence
  Description of Artificial Sequence: Synthetic oligonucleotide
  Antisense strand to SEQ ID NO: 2338524
uuagaugaugccauaguac

SEQ ID NO: 2338526 - RNA, 19 nt, Artificial Sequence
  Description of Artificial Sequence: Synthetic oligonucleotide
  Sense strand starting at position 1747 of SEQ ID NO: 1885389
gucugcaggguuuaaagau

SEQ ID NO: 2338527 - RNA, 19 nt, Artificial Sequence
  Description of Artificial Sequence: Synthetic oligonucleotide
  Antisense strand to SEQ ID NO: 2338526
aucuuuaaacccugcagac

SEQ ID NO: 2338528 - RNA, 19 nt, Artificial Sequence
  Description of Artificial Sequence: Synthetic oligonucleotide
  Sense strand starting at position 1753 of SEQ ID NO: 1885389
aggguuuaaagauguuaag

SEQ ID NO: 2338529 - RNA, 19 nt, Artificial Sequence
  Description of Artificial Sequence: Synthetic oligonucleotide
  Antisense strand to SEQ ID NO: 2338528
cuuaacaucuuuaaacccu

SEQ ID NO: 2338530 - RNA, 19 nt, Artificial Sequence
  Description of Artificial Sequence: Synthetic oligonucleotide
  Sense strand starting at position 1786 of SEQ ID NO: 1885389
augagaaaucaacgcacau

SEQ ID NO: 2338531 - RNA, 19 nt, Artificial Sequence
  Description of Artificial Sequence: Synthetic oligonucleotide
  Antisense strand to SEQ ID NO: 2338530
augugcguugauuucucau

SEQ ID NO: 2338532 - RNA, 19 nt, Artificial Sequence
  Description of Artificial Sequence: Synthetic oligonucleotide
  Sense strand starting at position 2095 of SEQ ID NO: 1885389
cagaaugugacgugagaac

SEQ ID NO: 2338533 - RNA, 19 nt, Artificial Sequence
  Description of Artificial Sequence: Synthetic oligonucleotide
  Antisense strand to SEQ ID NO: 2338532
guucucacgucacauucug

SEQ ID NO: 2338534 - RNA, 19 nt, Artificial Sequence
  Description of Artificial Sequence: Synthetic oligonucleotide
  Sense strand starting at position 2112 of SEQ ID NO: 1885389
acuaaauuggacugcaaau

SEQ ID NO: 2338535 - RNA, 19 nt, Artificial Sequence
  Description of Artificial Sequence: Synthetic oligonucleotide
  Antisense strand to SEQ ID NO: 2338534
auuugcaguccaauuuagu

SEQ ID NO: 2338536 - RNA, 19 nt, Artificial Sequence
  Description of Artificial Sequence: Synthetic oligonucleotide
  Sense strand starting at position 2464 of SEQ ID NO: 1885389
gcugacugcacugauaaag

SEQ ID NO: 2338537 - RNA, 19 nt, Artificial Sequence
  Description of Artificial Sequence: Synthetic oligonucleotide
  Antisense strand to SEQ ID NO: 2338536
cuuuaucagugcagucagc

SEQ ID NO: 2338538 - RNA, 19 nt, Artificial Sequence
  Description of Artificial Sequence: Synthetic oligonucleotide
  Sense strand starting at position 2644 of SEQ ID NO: 1885389
acugucucccagggaaaca

SEQ ID NO: 2338539 - RNA, 19 nt, Artificial Sequence
  Description of Artificial Sequence: Synthetic oligonucleotide
  Antisense strand to SEQ ID NO: 2338538
uguuucccugggagacagu

SEQ ID NO: 2338540 - RNA, 19 nt, Artificial Sequence
  Description of Artificial Sequence: Synthetic oligonucleotide
  Sense strand starting at position 3128 of SEQ ID NO: 1885389
gauuguuuauacuuugaga

SEQ ID NO: 2338541 - RNA, 19 nt, Artificial Sequence
  Description of Artificial Sequence: Synthetic oligonucleotide
  Antisense strand to SEQ ID NO: 2338540
ucucaaaguauaaacaauc

SEQ ID NO: 2338542 - RNA, 19 nt, Artificial Sequence
  Description of Artificial Sequence: Synthetic oligonucleotide
  Sense strand starting at position 3224 of SEQ ID NO: 1885389
ggaggaaaucguugaaucu

SEQ ID NO: 2338543 - RNA, 19 nt, Artificial Sequence
  Description of Artificial Sequence: Synthetic oligonucleotide
  Antisense strand to SEQ ID NO: 2338542
agauucaacgauuuccucc

SEQ ID NO: 2338544 - RNA, 19 nt, Artificial Sequence
  Description of Artificial Sequence: Synthetic oligonucleotide
  Sense strand starting at position 3233 of SEQ ID NO: 1885389
cguugaaucuagccaauuu

SEQ ID NO: 2338545 - RNA, 19 nt, Artificial Sequence
  Description of Artificial Sequence: Synthetic oligonucleotide
  Antisense strand to SEQ ID NO: 2338544
aaauuggcuagauucaacg

SEQ ID NO: 2338546 - RNA, 19 nt, Artificial Sequence
  Description of Artificial Sequence: Synthetic oligonucleotide
  Sense strand starting at position 3244 of SEQ ID NO: 1885389
gccaauuuguuguuucuga

SEQ ID NO: 2338547 - RNA, 19 nt, Artificial Sequence
  Description of Artificial Sequence: Synthetic oligonucleotide
  Antisense strand to SEQ ID NO: 2338546
ucagaaacaacaaauuggc

SEQ ID NO: 2338548 - RNA, 19 nt, Artificial Sequence
  Description of Artificial Sequence: Synthetic oligonucleotide
  Sense strand starting at position 3302 of SEQ ID NO: 1885389
ccaaauaauguaggucauu

SEQ ID NO: 2338549 - RNA, 19 nt, Artificial Sequence
  Description of Artificial Sequence: Synthetic oligonucleotide
  Antisense strand to SEQ ID NO: 2338548
aaugaccuacauuauuugg

SEQ ID NO: 2338550 - RNA, 19 nt, Artificial Sequence
  Description of Artificial Sequence: Synthetic oligonucleotide
  Sense strand starting at position 3520 of SEQ ID NO: 1885389
aaggguuguaauuaaguga

SEQ ID NO: 2338551 - RNA, 19 nt, Artificial Sequence
  Description of Artificial Sequence: Synthetic oligonucleotide
  Antisense strand to SEQ ID NO: 2338550
ucacuuaauuacaacccuu

SEQ ID NO: 2338552 - RNA, 19 nt, Artificial Sequence
  Description of Artificial Sequence: Synthetic oligonucleotide
  Sense strand starting at position 3525 of SEQ ID NO: 1885389
uuguaauuaagugaggcau

SEQ ID NO: 2338553 - RNA, 19 nt, Artificial Sequence
  Description of Artificial Sequence: Synthetic oligonucleotide
  Antisense strand to SEQ ID NO: 2338552
augccucacuuaauuacaa

SEQ ID NO: 2338554 - RNA, 19 nt, Artificial Sequence
  Description of Artificial Sequence: Synthetic oligonucleotide
  Sense strand starting at position 3617 of SEQ ID NO: 1885389
auguguuaagcacauuaua

SEQ ID NO: 2338555 - RNA, 19 nt, Artificial Sequence
  Description of Artificial Sequence: Synthetic oligonucleotide
  Antisense strand to SEQ ID NO: 2338554
uauaaugugcuuaacacau

SEQ ID NO: 2338556 - RNA, 19 nt, Artificial Sequence
  Description of Artificial Sequence: Synthetic oligonucleotide
  Sense strand starting at position 58 of SEQ ID NO: 1885390
ucuggaguguuugcaagaa

SEQ ID NO: 2338557 - RNA, 19 nt, Artificial Sequence
  Description of Artificial Sequence: Synthetic oligonucleotide
  Antisense strand to SEQ ID NO: 2338556
uucuugcaaacacuccaga

SEQ ID NO: 2338558 - RNA, 19 nt, Artificial Sequence
  Description of Artificial Sequence: Synthetic oligonucleotide
  Sense strand starting at position 62 of SEQ ID NO: 1885390
gaguguuugcaagaagaug

SEQ ID NO: 2338559 - RNA, 19 nt, Artificial Sequence
  Description of Artificial Sequence: Synthetic oligonucleotide
  Antisense strand to SEQ ID NO: 2338558
caucuucuugcaaacacuc

SEQ ID NO: 2338560 - RNA, 19 nt, Artificial Sequence
  Description of Artificial Sequence: Synthetic oligonucleotide
  Sense strand starting at position 160 of SEQ ID NO: 1885390
ucuccagugcugcagauuu

SEQ ID NO: 2338561 - RNA, 19 nt, Artificial Sequence
  Description of Artificial Sequence: Synthetic oligonucleotide
  Antisense strand to SEQ ID NO: 2338560
aaaucugcagcacuggaga

SEQ ID NO: 2338562 - RNA, 19 nt, Artificial Sequence
  Description of Artificial Sequence: Synthetic oligonucleotide
  Sense strand starting at position 197 of SEQ ID NO: 1885390
cuguguuugggagaaacuu

SEQ ID NO: 2338563 - RNA, 19 nt, Artificial Sequence
  Description of Artificial Sequence: Synthetic oligonucleotide
  Antisense strand to SEQ ID NO: 2338562
aaguuucucccaaacacag

SEQ ID NO: 2338564 - RNA, 19 nt, Artificial Sequence
  Description of Artificial Sequence: Synthetic oligonucleotide
  Sense strand starting at position 270 of SEQ ID NO: 1885390
ucuugugaggaaugcucau

SEQ ID NO: 2338565 - RNA, 19 nt, Artificial Sequence
  Description of Artificial Sequence: Synthetic oligonucleotide
  Antisense strand to SEQ ID NO: 2338564
augagcauuccucacaaga

SEQ ID NO: 2338566 - RNA, 19 nt, Artificial Sequence
  Description of Artificial Sequence: Synthetic oligonucleotide
  Sense strand starting at position 298 of SEQ ID NO: 1885390
ccugcaggguccucauuua

SEQ ID NO: 2338567 - RNA, 19 nt, Artificial Sequence
  Description of Artificial Sequence: Synthetic oligonucleotide
  Antisense strand to SEQ ID NO: 2338566
uaaaugaggacccugcagg

SEQ ID NO: 2338568 - RNA, 19 nt, Artificial Sequence
  Description of Artificial Sequence: Synthetic oligonucleotide
  Sense strand starting at position 556 of SEQ ID NO: 1885390
ggagauugcucuuuaugga

SEQ ID NO: 2338569 - RNA, 19 nt, Artificial Sequence
  Description of Artificial Sequence: Synthetic oligonucleotide
  Antisense strand to SEQ ID NO: 2338568
uccauaaagagcaaucucc

SEQ ID NO: 2338570 - RNA, 19 nt, Artificial Sequence
  Description of Artificial Sequence: Synthetic oligonucleotide
  Sense strand starting at position 557 of SEQ ID NO: 1885390
gagauugcucuuuauggag

SEQ ID NO: 2338571 - RNA, 19 nt, Artificial Sequence
  Description of Artificial Sequence: Synthetic oligonucleotide
  Antisense strand to SEQ ID NO: 2338570
cuccauaaagagcaaucuc

SEQ ID NO: 2338572 - RNA, 19 nt, Artificial Sequence
  Description of Artificial Sequence: Synthetic oligonucleotide
  Sense strand starting at position 563 of SEQ ID NO: 1885390
gcucuuuauggagacacuu

SEQ ID NO: 2338573 - RNA, 19 nt, Artificial Sequence
  Description of Artificial Sequence: Synthetic oligonucleotide
  Antisense strand to SEQ ID NO: 2338572
aagugucuccauaaagagc

SEQ ID NO: 2338574 - RNA, 19 nt, Artificial Sequence
  Description of Artificial Sequence: Synthetic oligonucleotide
  Sense strand starting at position 578 of SEQ ID NO: 1885390
acuugcaugcuuuaggauu

SEQ ID NO: 2338575 - RNA, 19 nt, Artificial Sequence
  Description of Artificial Sequence: Synthetic oligonucleotide
  Antisense strand to SEQ ID NO: 2338574
aauccuaaagcaugcaagu

SEQ ID NO: 2338576 - RNA, 19 nt, Artificial Sequence
  Description of Artificial Sequence: Synthetic oligonucleotide
  Sense strand starting at position 613 of SEQ ID NO: 1885390
gcauauaaugcugacucua

SEQ ID NO: 2338577 - RNA, 19 nt, Artificial Sequence
  Description of Artificial Sequence: Synthetic oligonucleotide
  Antisense strand to SEQ ID NO: 2338576
uagagucagcauuauaugc

SEQ ID NO: 2338578 - RNA, 19 nt, Artificial Sequence
  Description of Artificial Sequence: Synthetic oligonucleotide
  Sense strand starting at position 843 of SEQ ID NO: 1885390
cucaucuaugccgaaucuu

SEQ ID NO: 2338579 - RNA, 19 nt, Artificial Sequence
  Description of Artificial Sequence: Synthetic oligonucleotide
  Antisense strand to SEQ ID NO: 2338578
aagauucggcauagaugag

SEQ ID NO: 2338580 - RNA, 19 nt, Artificial Sequence
  Description of Artificial Sequence: Synthetic oligonucleotide
  Sense strand starting at position 953 of SEQ ID NO: 1885390
ucgugaguccugucuaagc

SEQ ID NO: 2338581 - RNA, 19 nt, Artificial Sequence
  Description of Artificial Sequence: Synthetic oligonucleotide
  Antisense strand to SEQ ID NO: 2338580
gcuuagacaggacucacga

SEQ ID NO: 2338582 - RNA, 19 nt, Artificial Sequence
  Description of Artificial Sequence: Synthetic oligonucleotide
  Sense strand starting at position 955 of SEQ ID NO: 1885390
gugaguccugucuaagcaa

SEQ ID NO: 2338583 - RNA, 19 nt, Artificial Sequence
  Description of Artificial Sequence: Synthetic oligonucleotide
  Antisense strand to SEQ ID NO: 2338582
uugcuuagacaggacucac

SEQ ID NO: 2338584 - RNA, 19 nt, Artificial Sequence
  Description of Artificial Sequence: Synthetic oligonucleotide
  Sense strand starting at position 958 of SEQ ID NO: 1885390
aguccugucuaagcaacaa

SEQ ID NO: 2338585 - RNA, 19 nt, Artificial Sequence
  Description of Artificial Sequence: Synthetic oligonucleotide
  Antisense strand to SEQ ID NO: 2338584
uuguugcuuagacaggacu

SEQ ID NO: 2338586 - RNA, 19 nt, Artificial Sequence
  Description of Artificial Sequence: Synthetic oligonucleotide
  Sense strand starting at position 978 of SEQ ID NO: 1885390
gcuuguaguccuccuaugu

SEQ ID NO: 2338587 - RNA, 19 nt, Artificial Sequence
  Description of Artificial Sequence: Synthetic oligonucleotide
  Antisense strand to SEQ ID NO: 2338586
acauaggaggacuacaagc

SEQ ID NO: 2338588 - RNA, 19 nt, Artificial Sequence
  Description of Artificial Sequence: Synthetic oligonucleotide
  Sense strand starting at position 1070 of SEQ ID NO: 1885390
uccaguauucuaugugaug

SEQ ID NO: 2338589 - RNA, 19 nt, Artificial Sequence
  Description of Artificial Sequence: Synthetic oligonucleotide
  Antisense strand to SEQ ID NO: 2338588
caucacauagaauacugga

SEQ ID NO: 2338590 - RNA, 19 nt, Artificial Sequence
  Description of Artificial Sequence: Synthetic oligonucleotide
  Sense strand starting at position 1356 of SEQ ID NO: 1885390
ggaguuguuacugaguugu

SEQ ID NO: 2338591 - RNA, 19 nt, Artificial Sequence
  Description of Artificial Sequence: Synthetic oligonucleotide
  Antisense strand to SEQ ID NO: 2338590
acaacucaguaacaacucc

SEQ ID NO: 2338592 - RNA, 19 nt, Artificial Sequence
  Description of Artificial Sequence: Synthetic oligonucleotide
  Sense strand starting at position 1651 of SEQ ID NO: 1885390
uggcuaugggugggaacau

SEQ ID NO: 2338593 - RNA, 19 nt, Artificial Sequence
  Description of Artificial Sequence: Synthetic oligonucleotide
  Antisense strand to SEQ ID NO: 2338592
auguucccacccauagcca

SEQ ID NO: 2338594 - RNA, 19 nt, Artificial Sequence
  Description of Artificial Sequence: Synthetic oligonucleotide
  Sense strand starting at position 2075 of SEQ ID NO: 1885390
aacagaguccucugaaguc

SEQ ID NO: 2338595 - RNA, 19 nt, Artificial Sequence
  Description of Artificial Sequence: Synthetic oligonucleotide
  Antisense strand to SEQ ID NO: 2338594
gacuucagaggacucuguu

SEQ ID NO: 2338596 - RNA, 19 nt, Artificial Sequence
  Description of Artificial Sequence: Synthetic oligonucleotide
  Sense strand starting at position 2215 of SEQ ID NO: 1885390
gagugagcucgagacccua

SEQ ID NO: 2338597 - RNA, 19 nt, Artificial Sequence
  Description of Artificial Sequence: Synthetic oligonucleotide
  Antisense strand to SEQ ID NO: 2338596
uagggucucgagcucacuc

SEQ ID NO: 2338598 - RNA, 19 nt, Artificial Sequence
  Description of Artificial Sequence: Synthetic oligonucleotide
  Sense strand starting at position 2253 of SEQ ID NO: 1885390
caguucuuugugcuucgua

SEQ ID NO: 2338599 - RNA, 19 nt, Artificial Sequence
  Description of Artificial Sequence: Synthetic oligonucleotide
  Antisense strand to SEQ ID NO: 2338598
uacgaagcacaaagaacug

SEQ ID NO: 2338600 - RNA, 19 nt, Artificial Sequence
  Description of Artificial Sequence: Synthetic oligonucleotide
  Sense strand starting at position 2255 of SEQ ID NO: 1885390
guucuuugugcuucguaau

SEQ ID NO: 2338601 - RNA, 19 nt, Artificial Sequence
  Description of Artificial Sequence: Synthetic oligonucleotide
  Antisense strand to SEQ ID NO: 2338600
auuacgaagcacaaagaac

SEQ ID NO: 2338602 - RNA, 19 nt, Artificial Sequence
  Description of Artificial Sequence: Synthetic oligonucleotide
  Sense strand starting at position 2488 of SEQ ID NO: 1885390
acaucuuuagaaugaaguc

SEQ ID NO: 2338603 - RNA, 19 nt, Artificial Sequence
  Description of Artificial Sequence: Synthetic oligonucleotide
  Antisense strand to SEQ ID NO: 2338602
gacuucauucuaaagaugu

SEQ ID NO: 2338604 - RNA, 19 nt, Artificial Sequence
  Description of Artificial Sequence: Synthetic oligonucleotide
  Sense strand starting at position 2503 of SEQ ID NO: 1885390
agucuuuggaaagguggau

SEQ ID NO: 2338605 - RNA, 19 nt, Artificial Sequence
  Description of Artificial Sequence: Synthetic oligonucleotide
  Antisense strand to SEQ ID NO: 2338604
auccaccuuuccaaagacu

SEQ ID NO: 2338606 - RNA, 19 nt, Artificial Sequence
  Description of Artificial Sequence: Synthetic oligonucleotide
  Sense strand starting at position 2525 of SEQ ID NO: 1885390
cuguauuuguagucagcuu

SEQ ID NO: 2338607 - RNA, 19 nt, Artificial Sequence
  Description of Artificial Sequence: Synthetic oligonucleotide
  Antisense strand to SEQ ID NO: 2338606
aagcugacuacaaauacag

SEQ ID NO: 2338608 - RNA, 19 nt, Artificial Sequence
  Description of Artificial Sequence: Synthetic oligonucleotide
  Sense strand starting at position 2526 of SEQ ID NO: 1885390
uguauuuguagucagcuua

SEQ ID NO: 2338609 - RNA, 19 nt, Artificial Sequence
  Description of Artificial Sequence: Synthetic oligonucleotide
  Antisense strand to SEQ ID NO: 2338608
uaagcugacuacaaauaca

SEQ ID NO: 2338610 - RNA, 19 nt, Artificial Sequence
  Description of Artificial Sequence: Synthetic oligonucleotide
  Sense strand starting at position 2550 of SEQ ID NO: 1885390
ggaccauggccauaucugu

SEQ ID NO: 2338611 - RNA, 19 nt, Artificial Sequence
  Description of Artificial Sequence: Synthetic oligonucleotide
  Antisense strand to SEQ ID NO: 2338610
acagauauggccauggucc

SEQ ID NO: 2338612 - RNA, 19 nt, Artificial Sequence
  Description of Artificial Sequence: Synthetic oligonucleotide
  Sense strand starting at position 2560 of SEQ ID NO: 1885390
cauaucuguggcuagagua

SEQ ID NO: 2338613 - RNA, 19 nt, Artificial Sequence
  Description of Artificial Sequence: Synthetic oligonucleotide
  Antisense strand to SEQ ID NO: 2338612
uacucuagccacagauaug

SEQ ID NO: 2338614 - RNA, 19 nt, Artificial Sequence
  Description of Artificial Sequence: Synthetic oligonucleotide
  Sense strand starting at position 2994 of SEQ ID NO: 1885390
uccuuccaaucaguguaaa

SEQ ID NO: 2338615 - RNA, 19 nt, Artificial Sequence
  Description of Artificial Sequence: Synthetic oligonucleotide
  Antisense strand to SEQ ID NO: 2338614
uuuacacugauuggaagga

SEQ ID NO: 2338616 - RNA, 19 nt, Artificial Sequence
  Description of Artificial Sequence: Synthetic oligonucleotide
  Sense strand starting at position 2995 of SEQ ID NO: 1885390
ccuuccaaucaguguaaac

SEQ ID NO: 2338617 - RNA, 19 nt, Artificial Sequence
  Description of Artificial Sequence: Synthetic oligonucleotide
  Antisense strand to SEQ ID NO: 2338616
guuuacacugauuggaagg

SEQ ID NO: 2338618 - RNA, 19 nt, Artificial Sequence
  Description of Artificial Sequence: Synthetic oligonucleotide
  Sense strand starting at position 3033 of SEQ ID NO: 1885390
ggguuaguuacaggauaca

SEQ ID NO: 2338619 - RNA, 19 nt, Artificial Sequence
  Description of Artificial Sequence: Synthetic oligonucleotide
  Antisense strand to SEQ ID NO: 2338618
uguauccuguaacuaaccc

SEQ ID NO: 2338620 - RNA, 19 nt, Artificial Sequence
  Description of Artificial Sequence: Synthetic oligonucleotide
  Sense strand starting at position 3075 of SEQ ID NO: 1885390
gagugccauuguuccauuu

SEQ ID NO: 2338621 - RNA, 19 nt, Artificial Sequence
  Description of Artificial Sequence: Synthetic oligonucleotide
  Antisense strand to SEQ ID NO: 2338620
aaauggaacaauggcacuc

SEQ ID NO: 2338622 - RNA, 19 nt, Artificial Sequence
  Description of Artificial Sequence: Synthetic oligonucleotide
  Sense strand starting at position 3270 of SEQ ID NO: 1885390
agaucagauuuccagaacu

SEQ ID NO: 2338623 - RNA, 19 nt, Artificial Sequence
  Description of Artificial Sequence: Synthetic oligonucleotide
  Antisense strand to SEQ ID NO: 2338622
aguucuggaaaucugaucu

SEQ ID NO: 2338624 - RNA, 19 nt, Artificial Sequence
  Description of Artificial Sequence: Synthetic oligonucleotide
  Sense strand starting at position 3297 of SEQ ID NO: 1885390
ugagcaagaugauuaauuc

SEQ ID NO: 2338625 - RNA, 19 nt, Artificial Sequence
  Description of Artificial Sequence: Synthetic oligonucleotide
  Antisense strand to SEQ ID NO: 2338624
gaauuaaucaucuugcuca

SEQ ID NO: 2338626 - RNA, 19 nt, Artificial Sequence
  Description of Artificial Sequence: Synthetic oligonucleotide
  Sense strand starting at position 3445 of SEQ ID NO: 1885390
uggcucaguccucacaauu

SEQ ID NO: 2338627 - RNA, 19 nt, Artificial Sequence
  Description of Artificial Sequence: Synthetic oligonucleotide
  Antisense strand to SEQ ID NO: 2338626
aauugugaggacugagcca

SEQ ID NO: 2338628 - RNA, 19 nt, Artificial Sequence
  Description of Artificial Sequence: Synthetic oligonucleotide
  Sense strand starting at position 3475 of SEQ ID NO: 1885390
aguaaacucguuugagacu

SEQ ID NO: 2338629 - RNA, 19 nt, Artificial Sequence
  Description of Artificial Sequence: Synthetic oligonucleotide
  Antisense strand to SEQ ID NO: 2338628
agucucaaacgaguuuacu

SEQ ID NO: 2338630 - RNA, 19 nt, Artificial Sequence
  Description of Artificial Sequence: Synthetic oligonucleotide
  Sense strand starting at position 3534 of SEQ ID NO: 1885390
acgacauucuucccacgaa

SEQ ID NO: 2338631 - RNA, 19 nt, Artificial Sequence
  Description of Artificial Sequence: Synthetic oligonucleotide
  Antisense strand to SEQ ID NO: 2338630
uucgugggaagaaugucgu

SEQ ID NO: 2338632 - RNA, 19 nt, Artificial Sequence
  Description of Artificial Sequence: Synthetic oligonucleotide
  Sense strand starting at position 3631 of SEQ ID NO: 1885390
ccaggaaucucaucacgau

SEQ ID NO: 2338633 - RNA, 19 nt, Artificial Sequence
  Description of Artificial Sequence: Synthetic oligonucleotide
  Antisense strand to SEQ ID NO: 2338632
aucgugaugagauuccugg

SEQ ID NO: 2338634 - RNA, 19 nt, Artificial Sequence
  Description of Artificial Sequence: Synthetic oligonucleotide
  Sense strand starting at position 3831 of SEQ ID NO: 1885390
cuguucuuaccacaugaua

SEQ ID NO: 2338635 - RNA, 19 nt, Artificial Sequence
  Description of Artificial Sequence: Synthetic oligonucleotide
  Antisense strand to SEQ ID NO: 2338634
uaucaugugguaagaacag

SEQ ID NO: 2338636 - RNA, 19 nt, Artificial Sequence
  Description of Artificial Sequence: Synthetic oligonucleotide
  Sense strand starting at position 1501 of SEQ ID NO: 1885391
ggguauaugcaugaaguau

SEQ ID NO: 2338637 - RNA, 19 nt, Artificial Sequence
  Description of Artificial Sequence: Synthetic oligonucleotide
  Antisense strand to SEQ ID NO: 2338636
auacuucaugcauauaccc

SEQ ID NO: 2338638 - RNA, 19 nt, Artificial Sequence
  Description of Artificial Sequence: Synthetic oligonucleotide
  Sense strand starting at position 1507 of SEQ ID NO: 1885391
augcaugaaguauguaacu

SEQ ID NO: 2338639 - RNA, 19 nt, Artificial Sequence
  Description of Artificial Sequence: Synthetic oligonucleotide
  Antisense strand to SEQ ID NO: 2338638
aguuacauacuucaugcau

SEQ ID NO: 2338640 - RNA, 19 nt, Artificial Sequence
  Description of Artificial Sequence: Synthetic oligonucleotide
  Sense strand starting at position 1512 of SEQ ID NO: 1885391
ugaaguauguaacuauacu

SEQ ID NO: 2338641 - RNA, 19 nt, Artificial Sequence
  Description of Artificial Sequence: Synthetic oligonucleotide
  Antisense strand to SEQ ID NO: 2338640
aguauaguuacauacuuca

SEQ ID NO: 2338642 - RNA, 19 nt, Artificial Sequence
  Description of Artificial Sequence: Synthetic oligonucleotide
  Sense strand starting at position 1687 of SEQ ID NO: 1885391
uccugagggaaacgugaaa

SEQ ID NO: 2338643 - RNA, 19 nt, Artificial Sequence
  Description of Artificial Sequence: Synthetic oligonucleotide
  Antisense strand to SEQ ID NO: 2338642
uuucacguuucccucagga

SEQ ID NO: 2338644 - RNA, 19 nt, Artificial Sequence
  Description of Artificial Sequence: Synthetic oligonucleotide
  Sense strand starting at position 1707 of SEQ ID NO: 1885391
uugugaaauguacauacau

SEQ ID NO: 2338645 - RNA, 19 nt, Artificial Sequence
  Description of Artificial Sequence: Synthetic oligonucleotide
  Antisense strand to SEQ ID NO: 2338644
auguauguacauuucacaa

SEQ ID NO: 2338646 - RNA, 19 nt, Artificial Sequence
  Description of Artificial Sequence: Synthetic oligonucleotide
  Sense strand starting at position 2150 of SEQ ID NO: 1885391
acccgaucacgugacacau

SEQ ID NO: 2338647 - RNA, 19 nt, Artificial Sequence
  Description of Artificial Sequence: Synthetic oligonucleotide
  Antisense strand to SEQ ID NO: 2338646
augugucacgugaucgggu

SEQ ID NO: 2338648 - RNA, 19 nt, Artificial Sequence
  Description of Artificial Sequence: Synthetic oligonucleotide
  Sense strand starting at position 2152 of SEQ ID NO: 1885391
ccgaucacgugacacauuu

SEQ ID NO: 2338649 - RNA, 19 nt, Artificial Sequence
  Description of Artificial Sequence: Synthetic oligonucleotide
  Antisense strand to SEQ ID NO: 2338648
aaaugugucacgugaucgg

SEQ ID NO: 2338650 - RNA, 19 nt, Artificial Sequence
  Description of Artificial Sequence: Synthetic oligonucleotide
  Sense strand starting at position 2227 of SEQ ID NO: 1885391
ggaugcuucugccuaagua

SEQ ID NO: 2338651 - RNA, 19 nt, Artificial Sequence
  Description of Artificial Sequence: Synthetic oligonucleotide
  Antisense strand to SEQ ID NO: 2338650
uacuuaggcagaagcaucc

SEQ ID NO: 2338652 - RNA, 19 nt, Artificial Sequence
  Description of Artificial Sequence: Synthetic oligonucleotide
  Sense strand starting at position 2228 of SEQ ID NO: 1885391
gaugcuucugccuaaguag

SEQ ID NO: 2338653 - RNA, 19 nt, Artificial Sequence
  Description of Artificial Sequence: Synthetic oligonucleotide
  Antisense strand to SEQ ID NO: 2338652
cuacuuaggcagaagcauc

SEQ ID NO: 2338654 - RNA, 19 nt, Artificial Sequence
  Description of Artificial Sequence: Synthetic oligonucleotide
  Sense strand starting at position 2235 of SEQ ID NO: 1885391
cugccuaaguaguguauuu

SEQ ID NO: 2338655 - RNA, 19 nt, Artificial Sequence
  Description of Artificial Sequence: Synthetic oligonucleotide
  Antisense strand to SEQ ID NO: 2338654
aaauacacuacuuaggcag

SEQ ID NO: 2338656 - RNA, 19 nt, Artificial Sequence
  Description of Artificial Sequence: Synthetic oligonucleotide
  Sense strand starting at position 2558 of SEQ ID NO: 1885391
uuuauucucguguauuuac

SEQ ID NO: 2338657 - RNA, 19 nt, Artificial Sequence
  Description of Artificial Sequence: Synthetic oligonucleotide
  Antisense strand to SEQ ID NO: 2338656
guaaauacacgagaauaaa

SEQ ID NO: 2338658 - RNA, 19 nt, Artificial Sequence
  Description of Artificial Sequence: Synthetic oligonucleotide
  Sense strand starting at position 2561 of SEQ ID NO: 1885391
auucucguguauuuacaua

SEQ ID NO: 2338659 - RNA, 19 nt, Artificial Sequence
  Description of Artificial Sequence: Synthetic oligonucleotide
  Antisense strand to SEQ ID NO: 2338658
uauguaaauacacgagaau

SEQ ID NO: 2338660 - RNA, 19 nt, Artificial Sequence
  Description of Artificial Sequence: Synthetic oligonucleotide
  Sense strand starting at position 2577 of SEQ ID NO: 1885391
auaguuauugcaugccaug

SEQ ID NO: 2338661 - RNA, 19 nt, Artificial Sequence
  Description of Artificial Sequence: Synthetic oligonucleotide
  Antisense strand to SEQ ID NO: 2338660
cauggcaugcaauaacuau

SEQ ID NO: 2338662 - RNA, 19 nt, Artificial Sequence
  Description of Artificial Sequence: Synthetic oligonucleotide
  Sense strand starting at position 2588 of SEQ ID NO: 1885391
augccauguccacguaagu

SEQ ID NO: 2338663 - RNA, 19 nt, Artificial Sequence
  Description of Artificial Sequence: Synthetic oligonucleotide
  Antisense strand to SEQ ID NO: 2338662
acuuacguggacauggcau

SEQ ID NO: 2338664 - RNA, 19 nt, Artificial Sequence
  Description of Artificial Sequence: Synthetic oligonucleotide
  Sense strand starting at position 2623 of SEQ ID NO: 1885391
guguuccugcacuaagagu

SEQ ID NO: 2338665 - RNA, 19 nt, Artificial Sequence
  Description of Artificial Sequence: Synthetic oligonucleotide
  Antisense strand to SEQ ID NO: 2338664
acucuuagugcaggaacac

SEQ ID NO: 2338666 - RNA, 19 nt, Artificial Sequence
  Description of Artificial Sequence: Synthetic oligonucleotide
  Sense strand starting at position 2708 of SEQ ID NO: 1885391
ucugcuguauuaggaagaa

SEQ ID NO: 2338667 - RNA, 19 nt, Artificial Sequence
  Description of Artificial Sequence: Synthetic oligonucleotide
  Antisense strand to SEQ ID NO: 2338666
uucuuccuaauacagcaga

SEQ ID NO: 2338668 - RNA, 19 nt, Artificial Sequence
  Description of Artificial Sequence: Synthetic oligonucleotide
  Sense strand starting at position 2726 of SEQ ID NO: 1885391
aaaucugugugagcacuua

SEQ ID NO: 2338669 - RNA, 19 nt, Artificial Sequence
  Description of Artificial Sequence: Synthetic oligonucleotide
  Antisense strand to SEQ ID NO: 2338668
uaagugcucacacagauuu

SEQ ID NO: 2338670 - RNA, 19 nt, Artificial Sequence
  Description of Artificial Sequence: Synthetic oligonucleotide
  Sense strand starting at position 2746 of SEQ ID NO: 1885391
gugcaaggcucucccuaua

SEQ ID NO: 2338671 - RNA, 19 nt, Artificial Sequence
  Description of Artificial Sequence: Synthetic oligonucleotide
  Antisense strand to SEQ ID NO: 2338670
uauagggagagccuugcac

SEQ ID NO: 2338672 - RNA, 19 nt, Artificial Sequence
  Description of Artificial Sequence: Synthetic oligonucleotide
  Sense strand starting at position 3287 of SEQ ID NO: 1885391
gggccugauuguuugcagu

SEQ ID NO: 2338673 - RNA, 19 nt, Artificial Sequence
  Description of Artificial Sequence: Synthetic oligonucleotide
  Antisense strand to SEQ ID NO: 2338672
acugcaaacaaucaggccc

SEQ ID NO: 2338674 - RNA, 19 nt, Artificial Sequence
  Description of Artificial Sequence: Synthetic oligonucleotide
  Sense strand starting at position 3293 of SEQ ID NO: 1885391
gauuguuugcaguggcaac

SEQ ID NO: 2338675 - RNA, 19 nt, Artificial Sequence
  Description of Artificial Sequence: Synthetic oligonucleotide
  Antisense strand to SEQ ID NO: 2338674
guugccacugcaaacaauc

SEQ ID NO: 2338676 - RNA, 19 nt, Artificial Sequence
  Description of Artificial Sequence: Synthetic oligonucleotide
  Sense strand starting at position 3417 of SEQ ID NO: 1885391
gcaaaugugggcugaugga

SEQ ID NO: 2338677 - RNA, 19 nt, Artificial Sequence
  Description of Artificial Sequence: Synthetic oligonucleotide
  Antisense strand to SEQ ID NO: 2338676
uccaucagcccacauuugc

SEQ ID NO: 2338678 - RNA, 19 nt, Artificial Sequence
  Description of Artificial Sequence: Synthetic oligonucleotide
  Sense strand starting at position 3447 of SEQ ID NO: 1885391
ccaccagacucuuaagugu

SEQ ID NO: 2338679 - RNA, 19 nt, Artificial Sequence
  Description of Artificial Sequence: Synthetic oligonucleotide
  Antisense strand to SEQ ID NO: 2338678
acacuuaagagucuggugg

SEQ ID NO: 2338680 - RNA, 19 nt, Artificial Sequence
  Description of Artificial Sequence: Synthetic oligonucleotide
  Sense strand starting at position 3454 of SEQ ID NO: 1885391
acucuuaaguguucgacua

SEQ ID NO: 2338681 - RNA, 19 nt, Artificial Sequence
  Description of Artificial Sequence: Synthetic oligonucleotide
  Antisense strand to SEQ ID NO: 2338680
uagucgaacacuuaagagu

SEQ ID NO: 2338682 - RNA, 19 nt, Artificial Sequence
  Description of Artificial Sequence: Synthetic oligonucleotide
  Sense strand starting at position 3455 of SEQ ID NO: 1885391
cucuuaaguguucgacuau

SEQ ID NO: 2338683 - RNA, 19 nt, Artificial Sequence
  Description of Artificial Sequence: Synthetic oligonucleotide
  Antisense strand to SEQ ID NO: 2338682
auagucgaacacuuaagag

SEQ ID NO: 2338684 - RNA, 19 nt, Artificial Sequence
  Description of Artificial Sequence: Synthetic oligonucleotide
  Sense strand starting at position 3487 of SEQ ID NO: 1885391
acuuuauucccuugaugga

SEQ ID NO: 2338685 - RNA, 19 nt, Artificial Sequence
  Description of Artificial Sequence: Synthetic oligonucleotide
  Antisense strand to SEQ ID NO: 2338684
uccaucaagggaauaaagu

SEQ ID NO: 2338686 - RNA, 19 nt, Artificial Sequence
  Description of Artificial Sequence: Synthetic oligonucleotide
  Sense strand starting at position 3540 of SEQ ID NO: 1885391
ggacuuucccuccaaagca

SEQ ID NO: 2338687 - RNA, 19 nt, Artificial Sequence
  Description of Artificial Sequence: Synthetic oligonucleotide
  Antisense strand to SEQ ID NO: 2338686
ugcuuuggagggaaagucc

SEQ ID NO: 2338688 - RNA, 19 nt, Artificial Sequence
  Description of Artificial Sequence: Synthetic oligonucleotide
  Sense strand starting at position 3657 of SEQ ID NO: 1885391
cggcuuauccugcauccca

SEQ ID NO: 2338689 - RNA, 19 nt, Artificial Sequence
  Description of Artificial Sequence: Synthetic oligonucleotide
  Antisense strand to SEQ ID NO: 2338688
ugggaugcaggauaagccg

SEQ ID NO: 2338690 - RNA, 19 nt, Artificial Sequence
  Description of Artificial Sequence: Synthetic oligonucleotide
  Sense strand starting at position 3760 of SEQ ID NO: 1885391
agacuauuaccguggugga

SEQ ID NO: 2338691 - RNA, 19 nt, Artificial Sequence
  Description of Artificial Sequence: Synthetic oligonucleotide
  Antisense strand to SEQ ID NO: 2338690
uccaccacgguaauagucu

SEQ ID NO: 2338692 - RNA, 19 nt, Artificial Sequence
  Description of Artificial Sequence: Synthetic oligonucleotide
  Sense strand starting at position 3761 of SEQ ID NO: 1885391
gacuauuaccgugguggaa

SEQ ID NO: 2338693 - RNA, 19 nt, Artificial Sequence
  Description of Artificial Sequence: Synthetic oligonucleotide
  Antisense strand to SEQ ID NO: 2338692
uuccaccacgguaauaguc

SEQ ID NO: 2338694 - RNA, 19 nt, Artificial Sequence
  Description of Artificial Sequence: Synthetic oligonucleotide
  Sense strand starting at position 3791 of SEQ ID NO: 1885391
ggcuguaaacgcugaguaa

SEQ ID NO: 2338695 - RNA, 19 nt, Artificial Sequence
  Description of Artificial Sequence: Synthetic oligonucleotide
  Antisense strand to SEQ ID NO: 2338694
uuacucagcguuuacagcc

SEQ ID NO: 2338696 - RNA, 19 nt, Artificial Sequence
  Description of Artificial Sequence: Synthetic oligonucleotide
  Sense strand starting at position 3792 of SEQ ID NO: 1885391
gcuguaaacgcugaguaag

SEQ ID NO: 2338697 - RNA, 19 nt, Artificial Sequence
  Description of Artificial Sequence: Synthetic oligonucleotide
  Antisense strand to SEQ ID NO: 2338696
cuuacucagcguuuacagc

SEQ ID NO: 2338698 - RNA, 19 nt, Artificial Sequence
  Description of Artificial Sequence: Synthetic oligonucleotide
  Sense strand starting at position 3794 of SEQ ID NO: 1885391
uguaaacgcugaguaaguu

SEQ ID NO: 2338699 - RNA, 19 nt, Artificial Sequence
  Description of Artificial Sequence: Synthetic oligonucleotide
  Antisense strand to SEQ ID NO: 2338698
aacuuacucagcguuuaca

SEQ ID NO: 2338700 - RNA, 19 nt, Artificial Sequence
  Description of Artificial Sequence: Synthetic oligonucleotide
  Sense strand starting at position 3795 of SEQ ID NO: 1885391
guaaacgcugaguaaguua

SEQ ID NO: 2338701 - RNA, 19 nt, Artificial Sequence
  Description of Artificial Sequence: Synthetic oligonucleotide
  Antisense strand to SEQ ID NO: 2338700
uaacuuacucagcguuuac

SEQ ID NO: 2338702 - RNA, 19 nt, Artificial Sequence
  Description of Artificial Sequence: Synthetic oligonucleotide
  Sense strand starting at position 3800 of SEQ ID NO: 1885391
cgcugaguaaguuaguuau

SEQ ID NO: 2338703 - RNA, 19 nt, Artificial Sequence
  Description of Artificial Sequence: Synthetic oligonucleotide
  Antisense strand to SEQ ID NO: 2338702
auaacuaacuuacucagcg

SEQ ID NO: 2338704 - RNA, 19 nt, Artificial Sequence
  Description of Artificial Sequence: Synthetic oligonucleotide
  Sense strand starting at position 3803 of SEQ ID NO: 1885391
ugaguaaguuaguuauugu

SEQ ID NO: 2338705 - RNA, 19 nt, Artificial Sequence
  Description of Artificial Sequence: Synthetic oligonucleotide
  Antisense strand to SEQ ID NO: 2338704
acaauaacuaacuuacuca

SEQ ID NO: 2338706 - RNA, 19 nt, Artificial Sequence
  Description of Artificial Sequence: Synthetic oligonucleotide
  Sense strand starting at position 3855 of SEQ ID NO: 1885391
gaccgcuacuacuaugaga

SEQ ID NO: 2338707 - RNA, 19 nt, Artificial Sequence
  Description of Artificial Sequence: Synthetic oligonucleotide
  Antisense strand to SEQ ID NO: 2338706
ucucauaguaguagcgguc

SEQ ID NO: 2338708 - RNA, 19 nt, Artificial Sequence
  Description of Artificial Sequence: Synthetic oligonucleotide
  Sense strand starting at position 3857 of SEQ ID NO: 1885391
ccgcuacuacuaugagaaa

SEQ ID NO: 2338709 - RNA, 19 nt, Artificial Sequence
  Description of Artificial Sequence: Synthetic oligonucleotide
  Antisense strand to SEQ ID NO: 2338708
uuucucauaguaguagcgg

SEQ ID NO: 2338710 - RNA, 19 nt, Artificial Sequence
  Description of Artificial Sequence: Synthetic oligonucleotide
  Sense strand starting at position 3935 of SEQ ID NO: 1885391
gcaccaucccugggaagga

SEQ ID NO: 2338711 - RNA, 19 nt, Artificial Sequence
  Description of Artificial Sequence: Synthetic oligonucleotide
  Antisense strand to SEQ ID NO: 2338710
uccuucccagggauggugc

SEQ ID NO: 2338712 - RNA, 19 nt, Artificial Sequence
  Description of Artificial Sequence: Synthetic oligonucleotide
  Sense strand starting at position 3964 of SEQ ID NO: 1885391
gcucuaucauuucugcagu

SEQ ID NO: 2338713 - RNA, 19 nt, Artificial Sequence
  Description of Artificial Sequence: Synthetic oligonucleotide
  Antisense strand to SEQ ID NO: 2338712
acugcagaaaugauagagc

SEQ ID NO: 2338714 - RNA, 19 nt, Artificial Sequence
  Description of Artificial Sequence: Synthetic oligonucleotide
  Sense strand starting at position 3970 of SEQ ID NO: 1885391
ucauuucugcaguggcaau

SEQ ID NO: 2338715 - RNA, 19 nt, Artificial Sequence
  Description of Artificial Sequence: Synthetic oligonucleotide
  Antisense strand to SEQ ID NO: 2338714
auugccacugcagaaauga

SEQ ID NO: 2338716 - RNA, 19 nt, Artificial Sequence
  Description of Artificial Sequence: Synthetic oligonucleotide
  Sense strand starting at position 721 of SEQ ID NO: 1885392
gaugguaucucacugcgau

SEQ ID NO: 2338717 - RNA, 19 nt, Artificial Sequence
  Description of Artificial Sequence: Synthetic oligonucleotide
  Antisense strand to SEQ ID NO: 2338716
aucgcagugagauaccauc

SEQ ID NO: 2338718 - RNA, 19 nt, Artificial Sequence
  Description of Artificial Sequence: Synthetic oligonucleotide
  Sense strand starting at position 1159 of SEQ ID NO: 1885392
ggguuugagcuauaagcuu

SEQ ID NO: 2338719 - RNA, 19 nt, Artificial Sequence
  Description of Artificial Sequence: Synthetic oligonucleotide
  Antisense strand to SEQ ID NO: 2338718
aagcuuauagcucaaaccc

SEQ ID NO: 2338720 - RNA, 19 nt, Artificial Sequence
  Description of Artificial Sequence: Synthetic oligonucleotide
  Sense strand starting at position 1167 of SEQ ID NO: 1885392
gcuauaagcuuucuaaaga

SEQ ID NO: 2338721 - RNA, 19 nt, Artificial Sequence
  Description of Artificial Sequence: Synthetic oligonucleotide
  Antisense strand to SEQ ID NO: 2338720
ucuuuagaaagcuuauagc

SEQ ID NO: 2338722 - RNA, 19 nt, Artificial Sequence
  Description of Artificial Sequence: Synthetic oligonucleotide
  Sense strand starting at position 1183 of SEQ ID NO: 1885392
agaugacauagguggaguu

SEQ ID NO: 2338723 - RNA, 19 nt, Artificial Sequence
  Description of Artificial Sequence: Synthetic oligonucleotide
  Antisense strand to SEQ ID NO: 2338722
aacuccaccuaugucaucu

SEQ ID NO: 2338724 - RNA, 19 nt, Artificial Sequence
  Description of Artificial Sequence: Synthetic oligonucleotide
  Sense strand starting at position 1190 of SEQ ID NO: 1885392
auagguggaguucagcaaa

SEQ ID NO: 2338725 - RNA, 19 nt, Artificial Sequence
  Description of Artificial Sequence: Synthetic oligonucleotide
  Antisense strand to SEQ ID NO: 2338724
uuugcugaacuccaccuau

SEQ ID NO: 2338726 - RNA, 19 nt, Artificial Sequence
  Description of Artificial Sequence: Synthetic oligonucleotide
  Sense strand starting at position 1193 of SEQ ID NO: 1885392
gguggaguucagcaaagag

SEQ ID NO: 2338727 - RNA, 19 nt, Artificial Sequence
  Description of Artificial Sequence: Synthetic oligonucleotide
  Antisense strand to SEQ ID NO: 2338726
cucuuugcugaacuccacc

SEQ ID NO: 2338728 - RNA, 19 nt, Artificial Sequence
  Description of Artificial Sequence: Synthetic oligonucleotide
  Sense strand starting at position 1214 of SEQ ID NO: 1885392
ggaggaaaugaguguucac

SEQ ID NO: 2338729 - RNA, 19 nt, Artificial Sequence
  Description of Artificial Sequence: Synthetic oligonucleotide
  Antisense strand to SEQ ID NO: 2338728
gugaacacucauuuccucc

SEQ ID NO: 2338730 - RNA, 19 nt, Artificial Sequence
  Description of Artificial Sequence: Synthetic oligonucleotide
  Sense strand starting at position 1587 of SEQ ID NO: 1885392
caguguaguuugcuaauuu

SEQ ID NO: 2338731 - RNA, 19 nt, Artificial Sequence
  Description of Artificial Sequence: Synthetic oligonucleotide
  Antisense strand to SEQ ID NO: 2338730
aaauuagcaaacuacacug

SEQ ID NO: 2338732 - RNA, 19 nt, Artificial Sequence
  Description of Artificial Sequence: Synthetic oligonucleotide
  Sense strand starting at position 1724 of SEQ ID NO: 1885392
uccuuuaucguguaauagc

SEQ ID NO: 2338733 - RNA, 19 nt, Artificial Sequence
  Description of Artificial Sequence: Synthetic oligonucleotide
  Antisense strand to SEQ ID NO: 2338732
gcuauuacacgauaaagga

SEQ ID NO: 2338734 - RNA, 19 nt, Artificial Sequence
  Description of Artificial Sequence: Synthetic oligonucleotide
  Sense strand starting at position 1733 of SEQ ID NO: 1885392
guguaauagcuagcguuug

SEQ ID NO: 2338735 - RNA, 19 nt, Artificial Sequence
  Description of Artificial Sequence: Synthetic oligonucleotide
  Antisense strand to SEQ ID NO: 2338734
caaacgcuagcuauuacac

SEQ ID NO: 2338736 - RNA, 19 nt, Artificial Sequence
  Description of Artificial Sequence: Synthetic oligonucleotide
  Sense strand starting at position 1735 of SEQ ID NO: 1885392
guaauagcuagcguuuguu

SEQ ID NO: 2338737 - RNA, 19 nt, Artificial Sequence
  Description of Artificial Sequence: Synthetic oligonucleotide
  Antisense strand to SEQ ID NO: 2338736
aacaaacgcuagcuauuac

SEQ ID NO: 2338738 - RNA, 19 nt, Artificial Sequence
  Description of Artificial Sequence: Synthetic oligonucleotide
  Sense strand starting at position 1789 of SEQ ID NO: 1885392
acccuauggaguuggucau

SEQ ID NO: 2338739 - RNA, 19 nt, Artificial Sequence
  Description of Artificial Sequence: Synthetic oligonucleotide
  Antisense strand to SEQ ID NO: 2338738
augaccaacuccauagggu

SEQ ID NO: 2338740 - RNA, 19 nt, Artificial Sequence
  Description of Artificial Sequence: Synthetic oligonucleotide
  Sense strand starting at position 1790 of SEQ ID NO: 1885392
cccuauggaguuggucauu

SEQ ID NO: 2338741 - RNA, 19 nt, Artificial Sequence
  Description of Artificial Sequence: Synthetic oligonucleotide
  Antisense strand to SEQ ID NO: 2338740
aaugaccaacuccauaggg

SEQ ID NO: 2338742 - RNA, 19 nt, Artificial Sequence
  Description of Artificial Sequence: Synthetic oligonucleotide
  Sense strand starting at position 1793 of SEQ ID NO: 1885392
uauggaguuggucauuauc

SEQ ID NO: 2338743 - RNA, 19 nt, Artificial Sequence
  Description of Artificial Sequence: Synthetic oligonucleotide
  Antisense strand to SEQ ID NO: 2338742
gauaaugaccaacuccaua

SEQ ID NO: 2338744 - RNA, 19 nt, Artificial Sequence
  Description of Artificial Sequence: Synthetic oligonucleotide
  Sense strand starting at position 1795 of SEQ ID NO: 1885392
uggaguuggucauuaucug

SEQ ID NO: 2338745 - RNA, 19 nt, Artificial Sequence
  Description of Artificial Sequence: Synthetic oligonucleotide
  Antisense strand to SEQ ID NO: 2338744
cagauaaugaccaacucca

SEQ ID NO: 2338746 - RNA, 19 nt, Artificial Sequence
  Description of Artificial Sequence: Synthetic oligonucleotide
  Sense strand starting at position 1796 of SEQ ID NO: 1885392
ggaguuggucauuaucuga

SEQ ID NO: 2338747 - RNA, 19 nt, Artificial Sequence
  Description of Artificial Sequence: Synthetic oligonucleotide
  Antisense strand to SEQ ID NO: 2338746
ucagauaaugaccaacucc

SEQ ID NO: 2338748 - RNA, 19 nt, Artificial Sequence
  Description of Artificial Sequence: Synthetic oligonucleotide
  Sense strand starting at position 1799 of SEQ ID NO: 1885392
guuggucauuaucugauga

SEQ ID NO: 2338749 - RNA, 19 nt, Artificial Sequence
  Description of Artificial Sequence: Synthetic oligonucleotide
  Antisense strand to SEQ ID NO: 2338748
ucaucagauaaugaccaac

SEQ ID NO: 2338750 - RNA, 19 nt, Artificial Sequence
  Description of Artificial Sequence: Synthetic oligonucleotide
  Sense strand starting at position 1819 of SEQ ID NO: 1885392
gagagugagcuuugaagaa

SEQ ID NO: 2338751 - RNA, 19 nt, Artificial Sequence
  Description of Artificial Sequence: Synthetic oligonucleotide
  Antisense strand to SEQ ID NO: 2338750
uucuucaaagcucacucuc

SEQ ID NO: 2338752 - RNA, 19 nt, Artificial Sequence
  Description of Artificial Sequence: Synthetic oligonucleotide
  Sense strand starting at position 1823 of SEQ ID NO: 1885392
gugagcuuugaagaaguua

SEQ ID NO: 2338753 - RNA, 19 nt, Artificial Sequence
  Description of Artificial Sequence: Synthetic oligonucleotide
  Antisense strand to SEQ ID NO: 2338752
uaacuucuucaaagcucac

SEQ ID NO: 2338754 - RNA, 19 nt, Artificial Sequence
  Description of Artificial Sequence: Synthetic oligonucleotide
  Sense strand starting at position 1866 of SEQ ID NO: 1885392
gcagaaucaggacguuaac

SEQ ID NO: 2338755 - RNA, 19 nt, Artificial Sequence
  Description of Artificial Sequence: Synthetic oligonucleotide
  Antisense strand to SEQ ID NO: 2338754
guuaacguccugauucugc

SEQ ID NO: 2338756 - RNA, 19 nt, Artificial Sequence
  Description of Artificial Sequence: Synthetic oligonucleotide
  Sense strand starting at position 2337 of SEQ ID NO: 1885392
gcuucugacucauuguuga

SEQ ID NO: 2338757 - RNA, 19 nt, Artificial Sequence
  Description of Artificial Sequence: Synthetic oligonucleotide
  Antisense strand to SEQ ID NO: 2338756
ucaacaaugagucagaagc

SEQ ID NO: 2338758 - RNA, 19 nt, Artificial Sequence
  Description of Artificial Sequence: Synthetic oligonucleotide
  Sense strand starting at position 2340 of SEQ ID NO: 1885392
ucugacucauuguugagua

SEQ ID NO: 2338759 - RNA, 19 nt, Artificial Sequence
  Description of Artificial Sequence: Synthetic oligonucleotide
  Antisense strand to SEQ ID NO: 2338758
uacucaacaaugagucaga

SEQ ID NO: 2338760 - RNA, 19 nt, Artificial Sequence
  Description of Artificial Sequence: Synthetic oligonucleotide
  Sense strand starting at position 2342 of SEQ ID NO: 1885392
ugacucauuguugaguaaa

SEQ ID NO: 2338761 - RNA, 19 nt, Artificial Sequence
  Description of Artificial Sequence: Synthetic oligonucleotide
  Antisense strand to SEQ ID NO: 2338760
uuuacucaacaaugaguca

SEQ ID NO: 2338762 - RNA, 19 nt, Artificial Sequence
  Description of Artificial Sequence: Synthetic oligonucleotide
  Sense strand starting at position 2441 of SEQ ID NO: 1885392
gccugugauuugccugugu

SEQ ID NO: 2338763 - RNA, 19 nt, Artificial Sequence
  Description of Artificial Sequence: Synthetic oligonucleotide
  Antisense strand to SEQ ID NO: 2338762
acacaggcaaaucacaggc

SEQ ID NO: 2338764 - RNA, 19 nt, Artificial Sequence
  Description of Artificial Sequence: Synthetic oligonucleotide
  Sense strand starting at position 2443 of SEQ ID NO: 1885392
cugugauuugccuguguug

SEQ ID NO: 2338765 - RNA, 19 nt, Artificial Sequence
  Description of Artificial Sequence: Synthetic oligonucleotide
  Antisense strand to SEQ ID NO: 2338764
caacacaggcaaaucacag

SEQ ID NO: 2338766 - RNA, 19 nt, Artificial Sequence
  Description of Artificial Sequence: Synthetic oligonucleotide
  Sense strand starting at position 2452 of SEQ ID NO: 1885392
gccuguguugccuccagau

SEQ ID NO: 2338767 - RNA, 19 nt, Artificial Sequence
  Description of Artificial Sequence: Synthetic oligonucleotide
  Antisense strand to SEQ ID NO: 2338766
aucuggaggcaacacaggc

SEQ ID NO: 2338768 - RNA, 19 nt, Artificial Sequence
  Description of Artificial Sequence: Synthetic oligonucleotide
  Sense strand starting at position 2572 of SEQ ID NO: 1885392
ccuagauuagugcaagaca

SEQ ID NO: 2338769 - RNA, 19 nt, Artificial Sequence
  Description of Artificial Sequence: Synthetic oligonucleotide
  Antisense strand to SEQ ID NO: 2338768
ugucuugcacuaaucuagg

SEQ ID NO: 2338770 - RNA, 19 nt, Artificial Sequence
  Description of Artificial Sequence: Synthetic oligonucleotide
  Sense strand starting at position 2616 of SEQ ID NO: 1885392
aucacuauggcaggugauu

SEQ ID NO: 2338771 - RNA, 19 nt, Artificial Sequence
  Description of Artificial Sequence: Synthetic oligonucleotide
  Antisense strand to SEQ ID NO: 2338770
aaucaccugccauagugau

SEQ ID NO: 2338772 - RNA, 19 nt, Artificial Sequence
  Description of Artificial Sequence: Synthetic oligonucleotide
  Sense strand starting at position 2922 of SEQ ID NO: 1885392
aauggugugucuccuuaag

SEQ ID NO: 2338773 - RNA, 19 nt, Artificial Sequence
  Description of Artificial Sequence: Synthetic oligonucleotide
  Antisense strand to SEQ ID NO: 2338772
cuuaaggagacacaccauu

SEQ ID NO: 2338774 - RNA, 19 nt, Artificial Sequence
  Description of Artificial Sequence: Synthetic oligonucleotide
  Sense strand starting at position 2924 of SEQ ID NO: 1885392
uggugugucuccuuaagga

SEQ ID NO: 2338775 - RNA, 19 nt, Artificial Sequence
  Description of Artificial Sequence: Synthetic oligonucleotide
  Antisense strand to SEQ ID NO: 2338774
uccuuaaggagacacacca

SEQ ID NO: 2338776 - RNA, 19 nt, Artificial Sequence
  Description of Artificial Sequence: Synthetic oligonucleotide
  Sense strand starting at position 3028 of SEQ ID NO: 1885392
ggcugaguguguccugaag

SEQ ID NO: 2338777 - RNA, 19 nt, Artificial Sequence
  Description of Artificial Sequence: Synthetic oligonucleotide
  Antisense strand to SEQ ID NO: 2338776
cuucaggacacacucagcc

SEQ ID NO: 2338778 - RNA, 19 nt, Artificial Sequence
  Description of Artificial Sequence: Synthetic oligonucleotide
  Sense strand starting at position 3034 of SEQ ID NO: 1885392
guguguccugaagagaaag

SEQ ID NO: 2338779 - RNA, 19 nt, Artificial Sequence
  Description of Artificial Sequence: Synthetic oligonucleotide
  Antisense strand to SEQ ID NO: 2338778
cuuucucuucaggacacac

SEQ ID NO: 2338780 - RNA, 19 nt, Artificial Sequence
  Description of Artificial Sequence: Synthetic oligonucleotide
  Sense strand starting at position 3046 of SEQ ID NO: 1885392
gagaaaggauuacauguaa

SEQ ID NO: 2338781 - RNA, 19 nt, Artificial Sequence
  Description of Artificial Sequence: Synthetic oligonucleotide
  Antisense strand to SEQ ID NO: 2338780
uuacauguaauccuuucuc

SEQ ID NO: 2338782 - RNA, 19 nt, Artificial Sequence
  Description of Artificial Sequence: Synthetic oligonucleotide
  Sense strand starting at position 3084 of SEQ ID NO: 1885392
acuucuguaguccaagcaa

SEQ ID NO: 2338783 - RNA, 19 nt, Artificial Sequence
  Description of Artificial Sequence: Synthetic oligonucleotide
  Antisense strand to SEQ ID NO: 2338782
uugcuuggacuacagaagu

SEQ ID NO: 2338784 - RNA, 19 nt, Artificial Sequence
  Description of Artificial Sequence: Synthetic oligonucleotide
  Sense strand starting at position 3230 of SEQ ID NO: 1885392
ucguauugugaagggagga

SEQ ID NO: 2338785 - RNA, 19 nt, Artificial Sequence
  Description of Artificial Sequence: Synthetic oligonucleotide
  Antisense strand to SEQ ID NO: 2338784
uccucccuucacaauacga

SEQ ID NO: 2338786 - RNA, 19 nt, Artificial Sequence
  Description of Artificial Sequence: Synthetic oligonucleotide
  Sense strand starting at position 3345 of SEQ ID NO: 1885392
ucacaaggagucuaguuau

SEQ ID NO: 2338787 - RNA, 19 nt, Artificial Sequence
  Description of Artificial Sequence: Synthetic oligonucleotide
  Antisense strand to SEQ ID NO: 2338786
auaacuagacuccuuguga

SEQ ID NO: 2338788 - RNA, 19 nt, Artificial Sequence
  Description of Artificial Sequence: Synthetic oligonucleotide
  Sense strand starting at position 3370 of SEQ ID NO: 1885392
guaguaguuuacccauuga

SEQ ID NO: 2338789 - RNA, 19 nt, Artificial Sequence
  Description of Artificial Sequence: Synthetic oligonucleotide
  Antisense strand to SEQ ID NO: 2338788
ucaauggguaaacuacuac

SEQ ID NO: 2338790 - RNA, 19 nt, Artificial Sequence
  Description of Artificial Sequence: Synthetic oligonucleotide
  Sense strand starting at position 3736 of SEQ ID NO: 1885392
agucacuuguccuuugaac

SEQ ID NO: 2338791 - RNA, 19 nt, Artificial Sequence
  Description of Artificial Sequence: Synthetic oligonucleotide
  Antisense strand to SEQ ID NO: 2338790
guucaaaggacaagugacu

SEQ ID NO: 2338792 - RNA, 19 nt, Artificial Sequence
  Description of Artificial Sequence: Synthetic oligonucleotide
  Sense strand starting at position 3759 of SEQ ID NO: 1885392
ugaucugugggcugaggaa

SEQ ID NO: 2338793 - RNA, 19 nt, Artificial Sequence
  Description of Artificial Sequence: Synthetic oligonucleotide
  Antisense strand to SEQ ID NO: 2338792
uuccucagcccacagauca

SEQ ID NO: 2338794 - RNA, 19 nt, Artificial Sequence
  Description of Artificial Sequence: Synthetic oligonucleotide
  Sense strand starting at position 3862 of SEQ ID NO: 1885392
ggcugaaacucucucacca

SEQ ID NO: 2338795 - RNA, 19 nt, Artificial Sequence
  Description of Artificial Sequence: Synthetic oligonucleotide
  Antisense strand to SEQ ID NO: 2338794
uggugagagaguuucagcc

SEQ ID NO: 2338796 - RNA, 19 nt, Artificial Sequence
  Description of Artificial Sequence: Synthetic oligonucleotide
  Sense strand starting at position 3606 of SEQ ID NO: 1885393
ccacguguaugacuggaau

SEQ ID NO: 2338797 - RNA, 19 nt, Artificial Sequence
  Description of Artificial Sequence: Synthetic oligonucleotide
  Antisense strand to SEQ ID NO: 2338796
auuccagucauacacgugg

SEQ ID NO: 2338798 - RNA, 19 nt, Artificial Sequence
  Description of Artificial Sequence: Synthetic oligonucleotide
  Sense strand starting at position 3608 of SEQ ID NO: 1885393
acguguaugacuggaauag

SEQ ID NO: 2338799 - RNA, 19 nt, Artificial Sequence
  Description of Artificial Sequence: Synthetic oligonucleotide
  Antisense strand to SEQ ID NO: 2338798
cuauuccagucauacacgu

SEQ ID NO: 2338800 - RNA, 19 nt, Artificial Sequence
  Description of Artificial Sequence: Synthetic oligonucleotide
  Sense strand starting at position 3728 of SEQ ID NO: 1885393
uccauccauuugugagagu

SEQ ID NO: 2338801 - RNA, 19 nt, Artificial Sequence
  Description of Artificial Sequence: Synthetic oligonucleotide
  Antisense strand to SEQ ID NO: 2338800
acucucacaaauggaugga

SEQ ID NO: 2338802 - RNA, 19 nt, Artificial Sequence
  Description of Artificial Sequence: Synthetic oligonucleotide
  Sense strand starting at position 3729 of SEQ ID NO: 1885393
ccauccauuugugagagua

SEQ ID NO: 2338803 - RNA, 19 nt, Artificial Sequence
  Description of Artificial Sequence: Synthetic oligonucleotide
  Antisense strand to SEQ ID NO: 2338802
uacucucacaaauggaugg

SEQ ID NO: 2338804 - RNA, 19 nt, Artificial Sequence
  Description of Artificial Sequence: Synthetic oligonucleotide
  Sense strand starting at position 3731 of SEQ ID NO: 1885393
auccauuugugagaguaag

SEQ ID NO: 2338805 - RNA, 19 nt, Artificial Sequence
  Description of Artificial Sequence: Synthetic oligonucleotide
  Antisense strand to SEQ ID NO: 2338804
cuuacucucacaaauggau

SEQ ID NO: 2338806 - RNA, 19 nt, Artificial Sequence
  Description of Artificial Sequence: Synthetic oligonucleotide
  Sense strand starting at position 3741 of SEQ ID NO: 1885393
gagaguaagagucgagcaa

SEQ ID NO: 2338807 - RNA, 19 nt, Artificial Sequence
  Description of Artificial Sequence: Synthetic oligonucleotide
  Antisense strand to SEQ ID NO: 2338806
uugcucgacucuuacucuc

SEQ ID NO: 2338808 - RNA, 19 nt, Artificial Sequence
  Description of Artificial Sequence: Synthetic oligonucleotide
  Sense strand starting at position 3742 of SEQ ID NO: 1885393
agaguaagagucgagcaau

SEQ ID NO: 2338809 - RNA, 19 nt, Artificial Sequence
  Description of Artificial Sequence: Synthetic oligonucleotide
  Antisense strand to SEQ ID NO: 2338808
auugcucgacucuuacucu

SEQ ID NO: 2338810 - RNA, 19 nt, Artificial Sequence
  Description of Artificial Sequence: Synthetic oligonucleotide
  Sense strand starting at position 3745 of SEQ ID NO: 1885393
guaagagucgagcaauacu

SEQ ID NO: 2338811 - RNA, 19 nt, Artificial Sequence
  Description of Artificial Sequence: Synthetic oligonucleotide
  Antisense strand to SEQ ID NO: 2338810
aguauugcucgacucuuac

SEQ ID NO: 2338812 - RNA, 19 nt, Artificial Sequence
  Description of Artificial Sequence: Synthetic oligonucleotide
  Sense strand starting at position 3754 of SEQ ID NO: 1885393
gagcaauacuagcaggauu

SEQ ID NO: 2338813 - RNA, 19 nt, Artificial Sequence
  Description of Artificial Sequence: Synthetic oligonucleotide
  Antisense strand to SEQ ID NO: 2338812
aauccugcuaguauugcuc

SEQ ID NO: 2338814 - RNA, 19 nt, Artificial Sequence
  Description of Artificial Sequence: Synthetic oligonucleotide
  Sense strand starting at position 3901 of SEQ ID NO: 1885393
acuguacagcuccaguaaa

SEQ ID NO: 2338815 - RNA, 19 nt, Artificial Sequence
  Description of Artificial Sequence: Synthetic oligonucleotide
  Antisense strand to SEQ ID NO: 2338814
uuuacuggagcuguacagu

SEQ ID NO: 2338816 - RNA, 19 nt, Artificial Sequence
  Description of Artificial Sequence: Synthetic oligonucleotide
  Sense strand starting at position 475 of SEQ ID NO: 1885394
uuuacagaaaggugguaau

SEQ ID NO: 2338817 - RNA, 19 nt, Artificial Sequence
  Description of Artificial Sequence: Synthetic oligonucleotide
  Antisense strand to SEQ ID NO: 2338816
auuaccaccuuucuguaaa

SEQ ID NO: 2338818 - RNA, 19 nt, Artificial Sequence
  Description of Artificial Sequence: Synthetic oligonucleotide
  Sense strand starting at position 497 of SEQ ID NO: 1885394
gggaaugaaucucacauau

SEQ ID NO: 2338819 - RNA, 19 nt, Artificial Sequence
  Description of Artificial Sequence: Synthetic oligonucleotide
  Antisense strand to SEQ ID NO: 2338818
auaugugagauucauuccc

SEQ ID NO: 2338820 - RNA, 19 nt, Artificial Sequence
  Description of Artificial Sequence: Synthetic oligonucleotide
  Sense strand starting at position 849 of SEQ ID NO: 1885394
uucugcuaacauuaaggau

SEQ ID NO: 2338821 - RNA, 19 nt, Artificial Sequence
  Description of Artificial Sequence: Synthetic oligonucleotide
  Antisense strand to SEQ ID NO: 2338820
auccuuaauguuagcagaa

SEQ ID NO: 2338822 - RNA, 19 nt, Artificial Sequence
  Description of Artificial Sequence: Synthetic oligonucleotide
  Sense strand starting at position 886 of SEQ ID NO: 1885394
aguugaaaucuuugcucuc

SEQ ID NO: 2338823 - RNA, 19 nt, Artificial Sequence
  Description of Artificial Sequence: Synthetic oligonucleotide
  Antisense strand to SEQ ID NO: 2338822
gagagcaaagauuucaacu

SEQ ID NO: 2338824 - RNA, 19 nt, Artificial Sequence
  Description of Artificial Sequence: Synthetic oligonucleotide
  Sense strand starting at position 887 of SEQ ID NO: 1885394
guugaaaucuuugcucucu

SEQ ID NO: 2338825 - RNA, 19 nt, Artificial Sequence
  Description of Artificial Sequence: Synthetic oligonucleotide
  Antisense strand to SEQ ID NO: 2338824
agagagcaaagauuucaac

SEQ ID NO: 2338826 - RNA, 19 nt, Artificial Sequence
  Description of Artificial Sequence: Synthetic oligonucleotide
  Sense strand starting at position 917 of SEQ ID NO: 1885394
accauuaucccaugauguc

SEQ ID NO: 2338827 - RNA, 19 nt, Artificial Sequence
  Description of Artificial Sequence: Synthetic oligonucleotide
  Antisense strand to SEQ ID NO: 2338826
gacaucaugggauaauggu

SEQ ID NO: 2338828 - RNA, 19 nt, Artificial Sequence
  Description of Artificial Sequence: Synthetic oligonucleotide
  Sense strand starting at position 918 of SEQ ID NO: 1885394
ccauuaucccaugauguca

SEQ ID NO: 2338829 - RNA, 19 nt, Artificial Sequence
  Description of Artificial Sequence: Synthetic oligonucleotide
  Antisense strand to SEQ ID NO: 2338828
ugacaucaugggauaaugg

SEQ ID NO: 2338830 - RNA, 19 nt, Artificial Sequence
  Description of Artificial Sequence: Synthetic oligonucleotide
  Sense strand starting at position 944 of SEQ ID NO: 1885394
uuaauucuaccugggcaau

SEQ ID NO: 2338831 - RNA, 19 nt, Artificial Sequence
  Description of Artificial Sequence: Synthetic oligonucleotide
  Antisense strand to SEQ ID NO: 2338830
auugcccagguagaauuaa

SEQ ID NO: 2338832 - RNA, 19 nt, Artificial Sequence
  Description of Artificial Sequence: Synthetic oligonucleotide
  Sense strand starting at position 1035 of SEQ ID NO: 1885394
acuggcuucugaguguuau

SEQ ID NO: 2338833 - RNA, 19 nt, Artificial Sequence
  Description of Artificial Sequence: Synthetic oligonucleotide
  Antisense strand to SEQ ID NO: 2338832
auaacacucagaagccagu

SEQ ID NO: 2338834 - RNA, 19 nt, Artificial Sequence
  Description of Artificial Sequence: Synthetic oligonucleotide
  Sense strand starting at position 1043 of SEQ ID NO: 1885394
cugaguguuaugcauggaa

SEQ ID NO: 2338835 - RNA, 19 nt, Artificial Sequence
  Description of Artificial Sequence: Synthetic oligonucleotide
  Antisense strand to SEQ ID NO: 2338834
uuccaugcauaacacucag

SEQ ID NO: 2338836 - RNA, 19 nt, Artificial Sequence
  Description of Artificial Sequence: Synthetic oligonucleotide
  Sense strand starting at position 1045 of SEQ ID NO: 1885394
gaguguuaugcauggaagu

SEQ ID NO: 2338837 - RNA, 19 nt, Artificial Sequence
  Description of Artificial Sequence: Synthetic oligonucleotide
  Antisense strand to SEQ ID NO: 2338836
acuuccaugcauaacacuc

SEQ ID NO: 2338838 - RNA, 19 nt, Artificial Sequence
  Description of Artificial Sequence: Synthetic oligonucleotide
  Sense strand starting at position 1046 of SEQ ID NO: 1885394
aguguuaugcauggaaguu

SEQ ID NO: 2338839 - RNA, 19 nt, Artificial Sequence
  Description of Artificial Sequence: Synthetic oligonucleotide
  Antisense strand to SEQ ID NO: 2338838
aacuuccaugcauaacacu

SEQ ID NO: 2338840 - RNA, 19 nt, Artificial Sequence
  Description of Artificial Sequence: Synthetic oligonucleotide
  Sense strand starting at position 1047 of SEQ ID NO: 1885394
guguuaugcauggaaguua

SEQ ID NO: 2338841 - RNA, 19 nt, Artificial Sequence
  Description of Artificial Sequence: Synthetic oligonucleotide
  Antisense strand to SEQ ID NO: 2338840
uaacuuccaugcauaacac

SEQ ID NO: 2338842 - RNA, 19 nt, Artificial Sequence
  Description of Artificial Sequence: Synthetic oligonucleotide
  Sense strand starting at position 1059 of SEQ ID NO: 1885394
gaaguuacacaguggaauu

SEQ ID NO: 2338843 - RNA, 19 nt, Artificial Sequence
  Description of Artificial Sequence: Synthetic oligonucleotide
  Antisense strand to SEQ ID NO: 2338842
aauuccacuguguaacuuc

SEQ ID NO: 2338844 - RNA, 19 nt, Artificial Sequence
  Description of Artificial Sequence: Synthetic oligonucleotide
  Sense strand starting at position 1091 of SEQ ID NO: 1885394
aauaaaguacucggaggau

SEQ ID NO: 2338845 - RNA, 19 nt, Artificial Sequence
  Description of Artificial Sequence: Synthetic oligonucleotide
  Antisense strand to SEQ ID NO: 2338844
auccuccgaguacuuuauu

SEQ ID NO: 2338846 - RNA, 19 nt, Artificial Sequence
  Description of Artificial Sequence: Synthetic oligonucleotide
  Sense strand starting at position 1121 of SEQ ID NO: 1885394
ccaaguaugcugcaacauc

SEQ ID NO: 2338847 - RNA, 19 nt, Artificial Sequence
  Description of Artificial Sequence: Synthetic oligonucleotide
  Antisense strand to SEQ ID NO: 2338846
gauguugcagcauacuugg

SEQ ID NO: 2338848 - RNA, 19 nt, Artificial Sequence
  Description of Artificial Sequence: Synthetic oligonucleotide
  Sense strand starting at position 1237 of SEQ ID NO: 1885394
gucccuauuugcuccucua

SEQ ID NO: 2338849 - RNA, 19 nt, Artificial Sequence
  Description of Artificial Sequence: Synthetic oligonucleotide
  Antisense strand to SEQ ID NO: 2338848
uagaggagcaaauagggac

SEQ ID NO: 2338850 - RNA, 19 nt, Artificial Sequence
  Description of Artificial Sequence: Synthetic oligonucleotide
  Sense strand starting at position 1260 of SEQ ID NO: 1885394
uuacuuguugcaugaauag

SEQ ID NO: 2338851 - RNA, 19 nt, Artificial Sequence
  Description of Artificial Sequence: Synthetic oligonucleotide
  Antisense strand to SEQ ID NO: 2338850
cuauucaugcaacaaguaa

SEQ ID NO: 2338852 - RNA, 19 nt, Artificial Sequence
  Description of Artificial Sequence: Synthetic oligonucleotide
  Sense strand starting at position 1337 of SEQ ID NO: 1885394
ugucuacuugcuggaacua

SEQ ID NO: 2338853 - RNA, 19 nt, Artificial Sequence
  Description of Artificial Sequence: Synthetic oligonucleotide
  Antisense strand to SEQ ID NO: 2338852
uaguuccagcaaguagaca

SEQ ID NO: 2338854 - RNA, 19 nt, Artificial Sequence
  Description of Artificial Sequence: Synthetic oligonucleotide
  Sense strand starting at position 1365 of SEQ ID NO: 1885394
ugacgacaagacugucuua

SEQ ID NO: 2338855 - RNA, 19 nt, Artificial Sequence
  Description of Artificial Sequence: Synthetic oligonucleotide
  Antisense strand to SEQ ID NO: 2338854
uaagacagucuugucguca

SEQ ID NO: 2338856 - RNA, 19 nt, Artificial Sequence
  Description of Artificial Sequence: Synthetic oligonucleotide
  Sense strand starting at position 1368 of SEQ ID NO: 1885394
cgacaagacugucuuacuu

SEQ ID NO: 2338857 - RNA, 19 nt, Artificial Sequence
  Description of Artificial Sequence: Synthetic oligonucleotide
  Antisense strand to SEQ ID NO: 2338856
aaguaagacagucuugucg

SEQ ID NO: 2338858 - RNA, 19 nt, Artificial Sequence
  Description of Artificial Sequence: Synthetic oligonucleotide
  Sense strand starting at position 1572 of SEQ ID NO: 1885394
uuguaaucggagcacuguu

SEQ ID NO: 2338859 - RNA, 19 nt, Artificial Sequence
  Description of Artificial Sequence: Synthetic oligonucleotide
  Antisense strand to SEQ ID NO: 2338858
aacagugcuccgauuacaa

SEQ ID NO: 2338860 - RNA, 19 nt, Artificial Sequence
  Description of Artificial Sequence: Synthetic oligonucleotide
  Sense strand starting at position 1840 of SEQ ID NO: 1885394
cgggcuuccacaggacaaa

SEQ ID NO: 2338861 - RNA, 19 nt, Artificial Sequence
  Description of Artificial Sequence: Synthetic oligonucleotide
  Antisense strand to SEQ ID NO: 2338860
uuuguccuguggaagcccg

SEQ ID NO: 2338862 - RNA, 19 nt, Artificial Sequence
  Description of Artificial Sequence: Synthetic oligonucleotide
  Sense strand starting at position 2114 of SEQ ID NO: 1885394
gcgauucuauuccuggaga

SEQ ID NO: 2338863 - RNA, 19 nt, Artificial Sequence
  Description of Artificial Sequence: Synthetic oligonucleotide
  Antisense strand to SEQ ID NO: 2338862
ucuccaggaauagaaucgc

SEQ ID NO: 2338864 - RNA, 19 nt, Artificial Sequence
  Description of Artificial Sequence: Synthetic oligonucleotide
  Sense strand starting at position 2143 of SEQ ID NO: 1885394
gccaguguucagcaagguu

SEQ ID NO: 2338865 - RNA, 19 nt, Artificial Sequence
  Description of Artificial Sequence: Synthetic oligonucleotide
  Antisense strand to SEQ ID NO: 2338864
aaccuugcugaacacuggc

SEQ ID NO: 2338866 - RNA, 19 nt, Artificial Sequence
  Description of Artificial Sequence: Synthetic oligonucleotide
  Sense strand starting at position 2214 of SEQ ID NO: 1885394
gggcgugaucaguugugca

SEQ ID NO: 2338867 - RNA, 19 nt, Artificial Sequence
  Description of Artificial Sequence: Synthetic oligonucleotide
  Antisense strand to SEQ ID NO: 2338866
ugcacaacugaucacgccc

SEQ ID NO: 2338868 - RNA, 19 nt, Artificial Sequence
  Description of Artificial Sequence: Synthetic oligonucleotide
  Sense strand starting at position 2216 of SEQ ID NO: 1885394
gcgugaucaguugugcaaa

SEQ ID NO: 2338869 - RNA, 19 nt, Artificial Sequence
  Description of Artificial Sequence: Synthetic oligonucleotide
  Antisense strand to SEQ ID NO: 2338868
uuugcacaacugaucacgc

SEQ ID NO: 2338870 - RNA, 19 nt, Artificial Sequence
  Description of Artificial Sequence: Synthetic oligonucleotide
  Sense strand starting at position 2568 of SEQ ID NO: 1885394
cgaucagucuguucuuuaa

SEQ ID NO: 2338871 - RNA, 19 nt, Artificial Sequence
  Description of Artificial Sequence: Synthetic oligonucleotide
  Antisense strand to SEQ ID NO: 2338870
uuaaagaacagacugaucg

SEQ ID NO: 2338872 - RNA, 19 nt, Artificial Sequence
  Description of Artificial Sequence: Synthetic oligonucleotide
  Sense strand starting at position 2570 of SEQ ID NO: 1885394
aucagucuguucuuuaaca

SEQ ID NO: 2338873 - RNA, 19 nt, Artificial Sequence
  Description of Artificial Sequence: Synthetic oligonucleotide
  Antisense strand to SEQ ID NO: 2338872
uguuaaagaacagacugau

SEQ ID NO: 2338874 - RNA, 19 nt, Artificial Sequence
  Description of Artificial Sequence: Synthetic oligonucleotide
  Sense strand starting at position 2678 of SEQ ID NO: 1885394
ccugcugcccgaugaaaua

SEQ ID NO: 2338875 - RNA, 19 nt, Artificial Sequence
  Description of Artificial Sequence: Synthetic oligonucleotide
  Antisense strand to SEQ ID NO: 2338874
uauuucaucgggcagcagg

SEQ ID NO: 2338876 - RNA, 19 nt, Artificial Sequence
  Description of Artificial Sequence: Synthetic oligonucleotide
  Sense strand starting at position 2710 of SEQ ID NO: 1885394
gucuuuauucuugauguag

SEQ ID NO: 2338877 - RNA, 19 nt, Artificial Sequence
  Description of Artificial Sequence: Synthetic oligonucleotide
  Antisense strand to SEQ ID NO: 2338876
cuacaucaagaauaaagac

SEQ ID NO: 2338878 - RNA, 19 nt, Artificial Sequence
  Description of Artificial Sequence: Synthetic oligonucleotide
  Sense strand starting at position 2716 of SEQ ID NO: 1885394
auucuugauguagagucaa

SEQ ID NO: 2338879 - RNA, 19 nt, Artificial Sequence
  Description of Artificial Sequence: Synthetic oligonucleotide
  Antisense strand to SEQ ID NO: 2338878
uugacucuacaucaagaau

SEQ ID NO: 2338880 - RNA, 19 nt, Artificial Sequence
  Description of Artificial Sequence: Synthetic oligonucleotide
  Sense strand starting at position 3060 of SEQ ID NO: 1885394
cgaguucccacuuagggaa

SEQ ID NO: 2338881 - RNA, 19 nt, Artificial Sequence
  Description of Artificial Sequence: Synthetic oligonucleotide
  Antisense strand to SEQ ID NO: 2338880
uucccuaagugggaacucg

SEQ ID NO: 2338882 - RNA, 19 nt, Artificial Sequence
  Description of Artificial Sequence: Synthetic oligonucleotide
  Sense strand starting at position 3381 of SEQ ID NO: 1885394
agaucuuaccaugguucuu

SEQ ID NO: 2338883 - RNA, 19 nt, Artificial Sequence
  Description of Artificial Sequence: Synthetic oligonucleotide
  Antisense strand to SEQ ID NO: 2338882
aagaaccaugguaagaucu

SEQ ID NO: 2338884 - RNA, 19 nt, Artificial Sequence
  Description of Artificial Sequence: Synthetic oligonucleotide
  Sense strand starting at position 3732 of SEQ ID NO: 1885394
cucugugcuauguggagau

SEQ ID NO: 2338885 - RNA, 19 nt, Artificial Sequence
  Description of Artificial Sequence: Synthetic oligonucleotide
  Antisense strand to SEQ ID NO: 2338884
aucuccacauagcacagag

SEQ ID NO: 2338886 - RNA, 19 nt, Artificial Sequence
  Description of Artificial Sequence: Synthetic oligonucleotide
  Sense strand starting at position 3734 of SEQ ID NO: 1885394
cugugcuauguggagauua

SEQ ID NO: 2338887 - RNA, 19 nt, Artificial Sequence
  Description of Artificial Sequence: Synthetic oligonucleotide
  Antisense strand to SEQ ID NO: 2338886
uaaucuccacauagcacag

SEQ ID NO: 2338888 - RNA, 19 nt, Artificial Sequence
  Description of Artificial Sequence: Synthetic oligonucleotide
  Sense strand starting at position 3747 of SEQ ID NO: 1885394
agauuaggaggguguugua

SEQ ID NO: 2338889 - RNA, 19 nt, Artificial Sequence
  Description of Artificial Sequence: Synthetic oligonucleotide
  Antisense strand to SEQ ID NO: 2338888
uacaacacccuccuaaucu

SEQ ID NO: 2338890 - RNA, 19 nt, Artificial Sequence
  Description of Artificial Sequence: Synthetic oligonucleotide
  Sense strand starting at position 3757 of SEQ ID NO: 1885394
gguguuguauuacucuuga

SEQ ID NO: 2338891 - RNA, 19 nt, Artificial Sequence
  Description of Artificial Sequence: Synthetic oligonucleotide
  Antisense strand to SEQ ID NO: 2338890
ucaagaguaauacaacacc

SEQ ID NO: 2338892 - RNA, 19 nt, Artificial Sequence
  Description of Artificial Sequence: Synthetic oligonucleotide
  Sense strand starting at position 3762 of SEQ ID NO: 1885394
uguauuacucuugauaaug

SEQ ID NO: 2338893 - RNA, 19 nt, Artificial Sequence
  Description of Artificial Sequence: Synthetic oligonucleotide
  Antisense strand to SEQ ID NO: 2338892
cauuaucaagaguaauaca

SEQ ID NO: 2338894 - RNA, 19 nt, Artificial Sequence
  Description of Artificial Sequence: Synthetic oligonucleotide
  Sense strand starting at position 3854 of SEQ ID NO: 1885394
ucuuauggauauuaaagga

SEQ ID NO: 2338895 - RNA, 19 nt, Artificial Sequence
  Description of Artificial Sequence: Synthetic oligonucleotide
  Antisense strand to SEQ ID NO: 2338894
uccuuuaauauccauaaga

SEQ ID NO: 2338896 - RNA, 19 nt, Artificial Sequence
  Description of Artificial Sequence: Synthetic oligonucleotide
  Sense strand starting at position 81 of SEQ ID NO: 1885395
uguguaagcaccgaauaaa

SEQ ID NO: 2338897 - RNA, 19 nt, Artificial Sequence
  Description of Artificial Sequence: Synthetic oligonucleotide
  Antisense strand to SEQ ID NO: 2338896
uuuauucggugcuuacaca

SEQ ID NO: 2338898 - RNA, 19 nt, Artificial Sequence
  Description of Artificial Sequence: Synthetic oligonucleotide
  Sense strand starting at position 84 of SEQ ID NO: 1885395
guaagcaccgaauaaauua

SEQ ID NO: 2338899 - RNA, 19 nt, Artificial Sequence
  Description of Artificial Sequence: Synthetic oligonucleotide
  Antisense strand to SEQ ID NO: 2338898
uaauuuauucggugcuuac

SEQ ID NO: 2338900 - RNA, 19 nt, Artificial Sequence
  Description of Artificial Sequence: Synthetic oligonucleotide
  Sense strand starting at position 312 of SEQ ID NO: 1885395
ggacaaagauuccaugaaa

SEQ ID NO: 2338901 - RNA, 19 nt, Artificial Sequence
  Description of Artificial Sequence: Synthetic oligonucleotide
  Antisense strand to SEQ ID NO: 2338900
uuucauggaaucuuugucc

SEQ ID NO: 2338902 - RNA, 19 nt, Artificial Sequence
  Description of Artificial Sequence: Synthetic oligonucleotide
  Sense strand starting at position 413 of SEQ ID NO: 1885395
guaaauacgguuugaucaa

SEQ ID NO: 2338903 - RNA, 19 nt, Artificial Sequence
  Description of Artificial Sequence: Synthetic oligonucleotide
  Antisense strand to SEQ ID NO: 2338902
uugaucaaaccguauuuac

SEQ ID NO: 2338904 - RNA, 19 nt, Artificial Sequence
  Description of Artificial Sequence: Synthetic oligonucleotide
  Sense strand starting at position 436 of SEQ ID NO: 1885395
ggccuuuaaaugggaguga

SEQ ID NO: 2338905 - RNA, 19 nt, Artificial Sequence
  Description of Artificial Sequence: Synthetic oligonucleotide
  Antisense strand to SEQ ID NO: 2338904
ucacucccauuuaaaggcc

SEQ ID NO: 2338906 - RNA, 19 nt, Artificial Sequence
  Description of Artificial Sequence: Synthetic oligonucleotide
  Sense strand starting at position 483 of SEQ ID NO: 1885395
cugcgaugcagcuuuccua

SEQ ID NO: 2338907 - RNA, 19 nt, Artificial Sequence
  Description of Artificial Sequence: Synthetic oligonucleotide
  Antisense strand to SEQ ID NO: 2338906
uaggaaagcugcaucgcag

SEQ ID NO: 2338908 - RNA, 19 nt, Artificial Sequence
  Description of Artificial Sequence: Synthetic oligonucleotide
  Sense strand starting at position 549 of SEQ ID NO: 1885395
ggaugaaguucucauuuac

SEQ ID NO: 2338909 - RNA, 19 nt, Artificial Sequence
  Description of Artificial Sequence: Synthetic oligonucleotide
  Antisense strand to SEQ ID NO: 2338908
guaaaugagaacuucaucc

SEQ ID NO: 2338910 - RNA, 19 nt, Artificial Sequence
  Description of Artificial Sequence: Synthetic oligonucleotide
  Sense strand starting at position 583 of SEQ ID NO: 1885395
ucaggauaauuguuugaug

SEQ ID NO: 2338911 - RNA, 19 nt, Artificial Sequence
  Description of Artificial Sequence: Synthetic oligonucleotide
  Antisense strand to SEQ ID NO: 2338910
caucaaacaauuauccuga

SEQ ID NO: 2338912 - RNA, 19 nt, Artificial Sequence
  Description of Artificial Sequence: Synthetic oligonucleotide
  Sense strand starting at position 584 of SEQ ID NO: 1885395
caggauaauuguuugauga

SEQ ID NO: 2338913 - RNA, 19 nt, Artificial Sequence
  Description of Artificial Sequence: Synthetic oligonucleotide
  Antisense strand to SEQ ID NO: 2338912
ucaucaaacaauuauccug

SEQ ID NO: 2338914 - RNA, 19 nt, Artificial Sequence
  Description of Artificial Sequence: Synthetic oligonucleotide
  Sense strand starting at position 601 of SEQ ID NO: 1885395
gaaauuauaguaugcagaa

SEQ ID NO: 2338915 - RNA, 19 nt, Artificial Sequence
  Description of Artificial Sequence: Synthetic oligonucleotide
  Antisense strand to SEQ ID NO: 2338914
uucugcauacuauaauuuc

SEQ ID NO: 2338916 - RNA, 19 nt, Artificial Sequence
  Description of Artificial Sequence: Synthetic oligonucleotide
  Sense strand starting at position 608 of SEQ ID NO: 1885395
uaguaugcagaaugggaaa

SEQ ID NO: 2338917 - RNA, 19 nt, Artificial Sequence
  Description of Artificial Sequence: Synthetic oligonucleotide
  Antisense strand to SEQ ID NO: 2338916
uuucccauucugcauacua

SEQ ID NO: 2338918 - RNA, 19 nt, Artificial Sequence
  Description of Artificial Sequence: Synthetic oligonucleotide
  Sense strand starting at position 717 of SEQ ID NO: 1885395
aagguuagccugugaauuc

SEQ ID NO: 2338919 - RNA, 19 nt, Artificial Sequence
  Description of Artificial Sequence: Synthetic oligonucleotide
  Antisense strand to SEQ ID NO: 2338918
gaauucacaggcuaaccuu

SEQ ID NO: 2338920 - RNA, 19 nt, Artificial Sequence
  Description of Artificial Sequence: Synthetic oligonucleotide
  Sense strand starting at position 757 of SEQ ID NO: 1885395
cccagagguggcugaauau

SEQ ID NO: 2338921 - RNA, 19 nt, Artificial Sequence
  Description of Artificial Sequence: Synthetic oligonucleotide
  Antisense strand to SEQ ID NO: 2338920
auauucagccaccucuggg

SEQ ID NO: 2338922 - RNA, 19 nt, Artificial Sequence
  Description of Artificial Sequence: Synthetic oligonucleotide
  Sense strand starting at position 766 of SEQ ID NO: 1885395
ggcugaauaugaccagcua

SEQ ID NO: 2338923 - RNA, 19 nt, Artificial Sequence
  Description of Artificial Sequence: Synthetic oligonucleotide
  Antisense strand to SEQ ID NO: 2338922
uagcuggucauauucagcc

SEQ ID NO: 2338924 - RNA, 19 nt, Artificial Sequence
  Description of Artificial Sequence: Synthetic oligonucleotide
  Sense strand starting at position 787 of SEQ ID NO: 1885395
agcaaugucuucuuaacug

SEQ ID NO: 2338925 - RNA, 19 nt, Artificial Sequence
  Description of Artificial Sequence: Synthetic oligonucleotide
  Antisense strand to SEQ ID NO: 2338924
caguuaagaagacauugcu

SEQ ID NO: 2338926 - RNA, 19 nt, Artificial Sequence
  Description of Artificial Sequence: Synthetic oligonucleotide
  Sense strand starting at position 1038 of SEQ ID NO: 1885395
cugugauauuguguacaau

SEQ ID NO: 2338927 - RNA, 19 nt, Artificial Sequence
  Description of Artificial Sequence: Synthetic oligonucleotide
  Antisense strand to SEQ ID NO: 2338926
auuguacacaauaucacag

SEQ ID NO: 2338928 - RNA, 19 nt, Artificial Sequence
  Description of Artificial Sequence: Synthetic oligonucleotide
  Sense strand starting at position 1039 of SEQ ID NO: 1885395
ugugauauuguguacaaug

SEQ ID NO: 2338929 - RNA, 19 nt, Artificial Sequence
  Description of Artificial Sequence: Synthetic oligonucleotide
  Antisense strand to SEQ ID NO: 2338928
cauuguacacaauaucaca

SEQ ID NO: 2338930 - RNA, 19 nt, Artificial Sequence
  Description of Artificial Sequence: Synthetic oligonucleotide
  Sense strand starting at position 1041 of SEQ ID NO: 1885395
ugauauuguguacaauggu

SEQ ID NO: 2338931 - RNA, 19 nt, Artificial Sequence
  Description of Artificial Sequence: Synthetic oligonucleotide
  Antisense strand to SEQ ID NO: 2338930
accauuguacacaauauca

SEQ ID NO: 2338932 - RNA, 19 nt, Artificial Sequence
  Description of Artificial Sequence: Synthetic oligonucleotide
  Sense strand starting at position 1044 of SEQ ID NO: 1885395
uauuguguacaauggugau

SEQ ID NO: 2338933 - RNA, 19 nt, Artificial Sequence
  Description of Artificial Sequence: Synthetic oligonucleotide
  Antisense strand to SEQ ID NO: 2338932
aucaccauuguacacaaua

SEQ ID NO: 2338934 - RNA, 19 nt, Artificial Sequence
  Description of Artificial Sequence: Synthetic oligonucleotide
  Sense strand starting at position 1117 of SEQ ID NO: 1885395
aggagagauuugcaaucau

SEQ ID NO: 2338935 - RNA, 19 nt, Artificial Sequence
  Description of Artificial Sequence: Synthetic oligonucleotide
  Antisense strand to SEQ ID NO: 2338934
augauugcaaaucucuccu

SEQ ID NO: 2338936 - RNA, 19 nt, Artificial Sequence
  Description of Artificial Sequence: Synthetic oligonucleotide
  Sense strand starting at position 1169 of SEQ ID NO: 1885395
agucauacauuugaaguua

SEQ ID NO: 2338937 - RNA, 19 nt, Artificial Sequence
  Description of Artificial Sequence: Synthetic oligonucleotide
  Antisense strand to SEQ ID NO: 2338936
uaacuucaaauguaugacu

SEQ ID NO: 2338938 - RNA, 19 nt, Artificial Sequence
  Description of Artificial Sequence: Synthetic oligonucleotide
  Sense strand starting at position 1369 of SEQ ID NO: 1885395
accacauugccugagcaga

SEQ ID NO: 2338939 - RNA, 19 nt, Artificial Sequence
  Description of Artificial Sequence: Synthetic oligonucleotide
  Antisense strand to SEQ ID NO: 2338938
ucugcucaggcaauguggu

SEQ ID NO: 2338940 - RNA, 19 nt, Artificial Sequence
  Description of Artificial Sequence: Synthetic oligonucleotide
  Sense strand starting at position 1409 of SEQ ID NO: 1885395
gggcaaccuuauguuuaaa

SEQ ID NO: 2338941 - RNA, 19 nt, Artificial Sequence
  Description of Artificial Sequence: Synthetic oligonucleotide
  Antisense strand to SEQ ID NO: 2338940
uuuaaacauaagguugccc

SEQ ID NO: 2338942 - RNA, 19 nt, Artificial Sequence
  Description of Artificial Sequence: Synthetic oligonucleotide
  Sense strand starting at position 1455 of SEQ ID NO: 1885395
ccugguauuggcgagagaa

SEQ ID NO: 2338943 - RNA, 19 nt, Artificial Sequence
  Description of Artificial Sequence: Synthetic oligonucleotide
  Antisense strand to SEQ ID NO: 2338942
uucucucgccaauaccagg

SEQ ID NO: 2338944 - RNA, 19 nt, Artificial Sequence
  Description of Artificial Sequence: Synthetic oligonucleotide
  Sense strand starting at position 1457 of SEQ ID NO: 1885395
ugguauuggcgagagaauc

SEQ ID NO: 2338945 - RNA, 19 nt, Artificial Sequence
  Description of Artificial Sequence: Synthetic oligonucleotide
  Antisense strand to SEQ ID NO: 2338944
gauucucucgccaauacca

SEQ ID NO: 2338946 - RNA, 19 nt, Artificial Sequence
  Description of Artificial Sequence: Synthetic oligonucleotide
  Sense strand starting at position 1592 of SEQ ID NO: 1885395
uuauuagcccuugggcaaa

SEQ ID NO: 2338947 - RNA, 19 nt, Artificial Sequence
  Description of Artificial Sequence: Synthetic oligonucleotide
  Antisense strand to SEQ ID NO: 2338946
uuugcccaagggcuaauaa

SEQ ID NO: 2338948 - RNA, 19 nt, Artificial Sequence
  Description of Artificial Sequence: Synthetic oligonucleotide
  Sense strand starting at position 1636 of SEQ ID NO: 1885395
guuuccacaucugucaauu

SEQ ID NO: 2338949 - RNA, 19 nt, Artificial Sequence
  Description of Artificial Sequence: Synthetic oligonucleotide
  Antisense strand to SEQ ID NO: 2338948
aauugacagauguggaaac

SEQ ID NO: 2338950 - RNA, 19 nt, Artificial Sequence
  Description of Artificial Sequence: Synthetic oligonucleotide
  Sense strand starting at position 1645 of SEQ ID NO: 1885395
ucugucaauugggcauaaa

SEQ ID NO: 2338951 - RNA, 19 nt, Artificial Sequence
  Description of Artificial Sequence: Synthetic oligonucleotide
  Antisense strand to SEQ ID NO: 2338950
uuuaugcccaauugacaga

SEQ ID NO: 2338952 - RNA, 19 nt, Artificial Sequence
  Description of Artificial Sequence: Synthetic oligonucleotide
  Sense strand starting at position 2114 of SEQ ID NO: 1885395
cucucugucuaaccaguaa

SEQ ID NO: 2338953 - RNA, 19 nt, Artificial Sequence
  Description of Artificial Sequence: Synthetic oligonucleotide
  Antisense strand to SEQ ID NO: 2338952
uuacugguuagacagagag

SEQ ID NO: 2338954 - RNA, 19 nt, Artificial Sequence
  Description of Artificial Sequence: Synthetic oligonucleotide
  Sense strand starting at position 2431 of SEQ ID NO: 1885395
gguaguuagcugcuucuuu

SEQ ID NO: 2338955 - RNA, 19 nt, Artificial Sequence
  Description of Artificial Sequence: Synthetic oligonucleotide
  Antisense strand to SEQ ID NO: 2338954
aaagaagcagcuaacuacc

SEQ ID NO: 2338956 - RNA, 19 nt, Artificial Sequence
  Description of Artificial Sequence: Synthetic oligonucleotide
  Sense strand starting at position 2612 of SEQ ID NO: 1885395
ggauucuaauguguagcca

SEQ ID NO: 2338957 - RNA, 19 nt, Artificial Sequence
  Description of Artificial Sequence: Synthetic oligonucleotide
  Antisense strand to SEQ ID NO: 2338956
uggcuacacauuagaaucc

SEQ ID NO: 2338958 - RNA, 19 nt, Artificial Sequence
  Description of Artificial Sequence: Synthetic oligonucleotide
  Sense strand starting at position 3061 of SEQ ID NO: 1885395
uuugaauuaucuuuggguu

SEQ ID NO: 2338959 - RNA, 19 nt, Artificial Sequence
  Description of Artificial Sequence: Synthetic oligonucleotide
  Antisense strand to SEQ ID NO: 2338958
aacccaaagauaauucaaa

SEQ ID NO: 2338960 - RNA, 19 nt, Artificial Sequence
  Description of Artificial Sequence: Synthetic oligonucleotide
  Sense strand starting at position 3086 of SEQ ID NO: 1885395
gggucauaacagcaucauu

SEQ ID NO: 2338961 - RNA, 19 nt, Artificial Sequence
  Description of Artificial Sequence: Synthetic oligonucleotide
  Antisense strand to SEQ ID NO: 2338960
aaugaugcuguuaugaccc

SEQ ID NO: 2338962 - RNA, 19 nt, Artificial Sequence
  Description of Artificial Sequence: Synthetic oligonucleotide
  Sense strand starting at position 3129 of SEQ ID NO: 1885395
uugugaaagaggcagcauu

SEQ ID NO: 2338963 - RNA, 19 nt, Artificial Sequence
  Description of Artificial Sequence: Synthetic oligonucleotide
  Antisense strand to SEQ ID NO: 2338962
aaugcugccucuuucacaa

SEQ ID NO: 2338964 - RNA, 19 nt, Artificial Sequence
  Description of Artificial Sequence: Synthetic oligonucleotide
  Sense strand starting at position 3633 of SEQ ID NO: 1885395
cccagugugccauaaccaa

SEQ ID NO: 2338965 - RNA, 19 nt, Artificial Sequence
  Description of Artificial Sequence: Synthetic oligonucleotide
  Antisense strand to SEQ ID NO: 2338964
uugguuauggcacacuggg

SEQ ID NO: 2338966 - RNA, 19 nt, Artificial Sequence
  Description of Artificial Sequence: Synthetic oligonucleotide
  Sense strand starting at position 3644 of SEQ ID NO: 1885395
auaaccaaggucuguguua

SEQ ID NO: 2338967 - RNA, 19 nt, Artificial Sequence
  Description of Artificial Sequence: Synthetic oligonucleotide
  Antisense strand to SEQ ID NO: 2338966
uaacacagaccuugguuau

SEQ ID NO: 2338968 - RNA, 19 nt, Artificial Sequence
  Description of Artificial Sequence: Synthetic oligonucleotide
  Sense strand starting at position 3645 of SEQ ID NO: 1885395
uaaccaaggucuguguuau

SEQ ID NO: 2338969 - RNA, 19 nt, Artificial Sequence
  Description of Artificial Sequence: Synthetic oligonucleotide
  Antisense strand to SEQ ID NO: 2338968
auaacacagaccuugguua

SEQ ID NO: 2338970 - RNA, 19 nt, Artificial Sequence
  Description of Artificial Sequence: Synthetic oligonucleotide
  Sense strand starting at position 3646 of SEQ ID NO: 1885395
aaccaaggucuguguuauu

SEQ ID NO: 2338971 - RNA, 19 nt, Artificial Sequence
  Description of Artificial Sequence: Synthetic oligonucleotide
  Antisense strand to SEQ ID NO: 2338970
aauaacacagaccuugguu

SEQ ID NO: 2338972 - RNA, 19 nt, Artificial Sequence
  Description of Artificial Sequence: Synthetic oligonucleotide
  Sense strand starting at position 3866 of SEQ ID NO: 1885395
ggcucuuaccucugauauu

SEQ ID NO: 2338973 - RNA, 19 nt, Artificial Sequence
  Description of Artificial Sequence: Synthetic oligonucleotide
  Antisense strand to SEQ ID NO: 2338972
aauaucagagguaagagcc

SEQ ID NO: 2338974 - RNA, 19 nt, Artificial Sequence
  Description of Artificial Sequence: Synthetic oligonucleotide
  Sense strand starting at position 3978 of SEQ ID NO: 1885395
uguuaaacaccguauuaag

SEQ ID NO: 2338975 - RNA, 19 nt, Artificial Sequence
  Description of Artificial Sequence: Synthetic oligonucleotide
  Antisense strand to SEQ ID NO: 2338974
cuuaauacgguguuuaaca

SEQ ID NO: 2338976 - RNA, 19 nt, Artificial Sequence
  Description of Artificial Sequence: Synthetic oligonucleotide
  Sense strand starting at position 22 of SEQ ID NO: 1885396
gugcaauucuuuguuauuu

SEQ ID NO: 2338977 - RNA, 19 nt, Artificial Sequence
  Description of Artificial Sequence: Synthetic oligonucleotide
  Antisense strand to SEQ ID NO: 2338976
aaauaacaaagaauugcac

SEQ ID NO: 2338978 - RNA, 19 nt, Artificial Sequence
  Description of Artificial Sequence: Synthetic oligonucleotide
  Sense strand starting at position 63 of SEQ ID NO: 1885396
aguccagcacagugauaaa

SEQ ID NO: 2338979 - RNA, 19 nt, Artificial Sequence
  Description of Artificial Sequence: Synthetic oligonucleotide
  Antisense strand to SEQ ID NO: 2338978
uuuaucacugugcuggacu

SEQ ID NO: 2338980 - RNA, 19 nt, Artificial Sequence
  Description of Artificial Sequence: Synthetic oligonucleotide
  Sense strand starting at position 121 of SEQ ID NO: 1885396
caaccagguugaucuggau

SEQ ID NO: 2338981 - RNA, 19 nt, Artificial Sequence
  Description of Artificial Sequence: Synthetic oligonucleotide
  Antisense strand to SEQ ID NO: 2338980
auccagaucaaccugguug

SEQ ID NO: 2338982 - RNA, 19 nt, Artificial Sequence
  Description of Artificial Sequence: Synthetic oligonucleotide
  Sense strand starting at position 146 of SEQ ID NO: 1885396
cacauuggcuggguaacaa

SEQ ID NO: 2338983 - RNA, 19 nt, Artificial Sequence
  Description of Artificial Sequence: Synthetic oligonucleotide
  Antisense strand to SEQ ID NO: 2338982
uuguuacccagccaaugug

SEQ ID NO: 2338984 - RNA, 19 nt, Artificial Sequence
  Description of Artificial Sequence: Synthetic oligonucleotide
  Sense strand starting at position 154 of SEQ ID NO: 1885396
cuggguaacaagugaacuu

SEQ ID NO: 2338985 - RNA, 19 nt, Artificial Sequence
  Description of Artificial Sequence: Synthetic oligonucleotide
  Antisense strand to SEQ ID NO: 2338984
aaguucacuuguuacccag

SEQ ID NO: 2338986 - RNA, 19 nt, Artificial Sequence
  Description of Artificial Sequence: Synthetic oligonucleotide
  Sense strand starting at position 227 of SEQ ID NO: 1885396
cugagaguucgacaaguca

SEQ ID NO: 2338987 - RNA, 19 nt, Artificial Sequence
  Description of Artificial Sequence: Synthetic oligonucleotide
  Antisense strand to SEQ ID NO: 2338986
ugacuugucgaacucucag

SEQ ID NO: 2338988 - RNA, 19 nt, Artificial Sequence
  Description of Artificial Sequence: Synthetic oligonucleotide
  Sense strand starting at position 247 of SEQ ID NO: 1885396
aguccugggcuggaaagau

SEQ ID NO: 2338989 - RNA, 19 nt, Artificial Sequence
  Description of Artificial Sequence: Synthetic oligonucleotide
  Antisense strand to SEQ ID NO: 2338988
aucuuuccagcccaggacu

SEQ ID NO: 2338990 - RNA, 19 nt, Artificial Sequence
  Description of Artificial Sequence: Synthetic oligonucleotide
  Sense strand starting at position 349 of SEQ ID NO: 1885396
cagacugauuacgucucaa

SEQ ID NO: 2338991 - RNA, 19 nt, Artificial Sequence
  Description of Artificial Sequence: Synthetic oligonucleotide
  Antisense strand to SEQ ID NO: 2338990
uugagacguaaucagucug

SEQ ID NO: 2338992 - RNA, 19 nt, Artificial Sequence
  Description of Artificial Sequence: Synthetic oligonucleotide
  Sense strand starting at position 366 of SEQ ID NO: 1885396
aagugaguguccuuacaac

SEQ ID NO: 2338993 - RNA, 19 nt, Artificial Sequence
  Description of Artificial Sequence: Synthetic oligonucleotide
  Antisense strand to SEQ ID NO: 2338992
guuguaaggacacucacuu

SEQ ID NO: 2338994 - RNA, 19 nt, Artificial Sequence
  Description of Artificial Sequence: Synthetic oligonucleotide
  Sense strand starting at position 440 of SEQ ID NO: 1885396
uugugaaacuuauuacaga

SEQ ID NO: 2338995 - RNA, 19 nt, Artificial Sequence
  Description of Artificial Sequence: Synthetic oligonucleotide
  Antisense strand to SEQ ID NO: 2338994
ucuguaauaaguuucacaa

SEQ ID NO: 2338996 - RNA, 19 nt, Artificial Sequence
  Description of Artificial Sequence: Synthetic oligonucleotide
  Sense strand starting at position 559 of SEQ ID NO: 1885396
gcaagaguagcauauuaua

SEQ ID NO: 2338997 - RNA, 19 nt, Artificial Sequence
  Description of Artificial Sequence: Synthetic oligonucleotide
  Antisense strand to SEQ ID NO: 2338996
uauaauaugcuacucuugc

SEQ ID NO: 2338998 - RNA, 19 nt, Artificial Sequence
  Description of Artificial Sequence: Synthetic oligonucleotide
  Sense strand starting at position 1001 of SEQ ID NO: 1885396
guaaucauuucugugcuau

SEQ ID NO: 2338999 - RNA, 19 nt, Artificial Sequence
  Description of Artificial Sequence: Synthetic oligonucleotide
  Antisense strand to SEQ ID NO: 2338998
auagcacagaaaugauuac

SEQ ID NO: 2339000 - RNA, 19 nt, Artificial Sequence
  Description of Artificial Sequence: Synthetic oligonucleotide
  Sense strand starting at position 1269 of SEQ ID NO: 1885396
agaccaaguccaugucuaa

SEQ ID NO: 2339001 - RNA, 19 nt, Artificial Sequence
  Description of Artificial Sequence: Synthetic oligonucleotide
  Antisense strand to SEQ ID NO: 2339000
uuagacauggacuuggucu

SEQ ID NO: 2339002 - RNA, 19 nt, Artificial Sequence
  Description of Artificial Sequence: Synthetic oligonucleotide
  Sense strand starting at position 1293 of SEQ ID NO: 1885396
cuuuguauccaucauggua

SEQ ID NO: 2339003 - RNA, 19 nt, Artificial Sequence
  Description of Artificial Sequence: Synthetic oligonucleotide
  Antisense strand to SEQ ID NO: 2339002
uaccaugauggauacaaag

SEQ ID NO: 2339004 - RNA, 19 nt, Artificial Sequence
  Description of Artificial Sequence: Synthetic oligonucleotide
  Sense strand starting at position 1524 of SEQ ID NO: 1885396
uuggcagcccuuugaaaga

SEQ ID NO: 2339005 - RNA, 19 nt, Artificial Sequence
  Description of Artificial Sequence: Synthetic oligonucleotide
  Antisense strand to SEQ ID NO: 2339004
ucuuucaaagggcugccaa

SEQ ID NO: 2339006 - RNA, 19 nt, Artificial Sequence
  Description of Artificial Sequence: Synthetic oligonucleotide
  Sense strand starting at position 1692 of SEQ ID NO: 1885396
ugacuacaagacuguguaa

SEQ ID NO: 2339007 - RNA, 19 nt, Artificial Sequence
  Description of Artificial Sequence: Synthetic oligonucleotide
  Antisense strand to SEQ ID NO: 2339006
uuacacagucuuguaguca

SEQ ID NO: 2339008 - RNA, 19 nt, Artificial Sequence
  Description of Artificial Sequence: Synthetic oligonucleotide
  Sense strand starting at position 1694 of SEQ ID NO: 1885396
acuacaagacuguguaacu

SEQ ID NO: 2339009 - RNA, 19 nt, Artificial Sequence
  Description of Artificial Sequence: Synthetic oligonucleotide
  Antisense strand to SEQ ID NO: 2339008
aguuacacagucuuguagu

SEQ ID NO: 2339010 - RNA, 19 nt, Artificial Sequence
  Description of Artificial Sequence: Synthetic oligonucleotide
  Sense strand starting at position 1695 of SEQ ID NO: 1885396
cuacaagacuguguaacua

SEQ ID NO: 2339011 - RNA, 19 nt, Artificial Sequence
  Description of Artificial Sequence: Synthetic oligonucleotide
  Antisense strand to SEQ ID NO: 2339010
uaguuacacagucuuguag

SEQ ID NO: 2339012 - RNA, 19 nt, Artificial Sequence
  Description of Artificial Sequence: Synthetic oligonucleotide
  Sense strand starting at position 1739 of SEQ ID NO: 1885396
agaugucaacucuguacua

SEQ ID NO: 2339013 - RNA, 19 nt, Artificial Sequence
  Description of Artificial Sequence: Synthetic oligonucleotide
  Antisense strand to SEQ ID NO: 2339012
uaguacagaguugacaucu

SEQ ID NO: 2339014 - RNA, 19 nt, Artificial Sequence
  Description of Artificial Sequence: Synthetic oligonucleotide
  Sense strand starting at position 1741 of SEQ ID NO: 1885396
augucaacucuguacuaaa

SEQ ID NO: 2339015 - RNA, 19 nt, Artificial Sequence
  Description of Artificial Sequence: Synthetic oligonucleotide
  Antisense strand to SEQ ID NO: 2339014
uuuaguacagaguugacau

SEQ ID NO: 2339016 - RNA, 19 nt, Artificial Sequence
  Description of Artificial Sequence: Synthetic oligonucleotide
  Sense strand starting at position 1797 of SEQ ID NO: 1885396
ucuguucuugguuaugaac

SEQ ID NO: 2339017 - RNA, 19 nt, Artificial Sequence
  Description of Artificial Sequence: Synthetic oligonucleotide
  Antisense strand to SEQ ID NO: 2339016
guucauaaccaagaacaga

SEQ ID NO: 2339018 - RNA, 19 nt, Artificial Sequence
  Description of Artificial Sequence: Synthetic oligonucleotide
  Sense strand starting at position 2085 of SEQ ID NO: 1885396
guguaugcugaggaguuaa

SEQ ID NO: 2339019 - RNA, 19 nt, Artificial Sequence
  Description of Artificial Sequence: Synthetic oligonucleotide
  Antisense strand to SEQ ID NO: 2339018
uuaacuccucagcauacac

SEQ ID NO: 2339020 - RNA, 19 nt, Artificial Sequence
  Description of Artificial Sequence: Synthetic oligonucleotide
  Sense strand starting at position 2098 of SEQ ID NO: 1885396
aguuaagguugaguaggaa

SEQ ID NO: 2339021 - RNA, 19 nt, Artificial Sequence
  Description of Artificial Sequence: Synthetic oligonucleotide
  Antisense strand to SEQ ID NO: 2339020
uuccuacucaaccuuaacu

SEQ ID NO: 2339022 - RNA, 19 nt, Artificial Sequence
  Description of Artificial Sequence: Synthetic oligonucleotide
  Sense strand starting at position 2106 of SEQ ID NO: 1885396
uugaguaggaaagguuaua

SEQ ID NO: 2339023 - RNA, 19 nt, Artificial Sequence
  Description of Artificial Sequence: Synthetic oligonucleotide
  Antisense strand to SEQ ID NO: 2339022
uauaaccuuuccuacucaa

SEQ ID NO: 2339024 - RNA, 19 nt, Artificial Sequence
  Description of Artificial Sequence: Synthetic oligonucleotide
  Sense strand starting at position 2132 of SEQ ID NO: 1885396
gugugugcccaugaaauaa

SEQ ID NO: 2339025 - RNA, 19 nt, Artificial Sequence
  Description of Artificial Sequence: Synthetic oligonucleotide
  Antisense strand to SEQ ID NO: 2339024
uuauuucaugggcacacac

SEQ ID NO: 2339026 - RNA, 19 nt, Artificial Sequence
  Description of Artificial Sequence: Synthetic oligonucleotide
  Sense strand starting at position 2249 of SEQ ID NO: 1885396
acuuguguacacuagugaa

SEQ ID NO: 2339027 - RNA, 19 nt, Artificial Sequence
  Description of Artificial Sequence: Synthetic oligonucleotide
  Antisense strand to SEQ ID NO: 2339026
uucacuaguguacacaagu

SEQ ID NO: 2339028 - RNA, 19 nt, Artificial Sequence
  Description of Artificial Sequence: Synthetic oligonucleotide
  Sense strand starting at position 2253 of SEQ ID NO: 1885396
guguacacuagugaaauca

SEQ ID NO: 2339029 - RNA, 19 nt, Artificial Sequence
  Description of Artificial Sequence: Synthetic oligonucleotide
  Antisense strand to SEQ ID NO: 2339028
ugauuucacuaguguacac

SEQ ID NO: 2339030 - RNA, 19 nt, Artificial Sequence
  Description of Artificial Sequence: Synthetic oligonucleotide
  Sense strand starting at position 2458 of SEQ ID NO: 1885396
uuuaauauaucugcagaga

SEQ ID NO: 2339031 - RNA, 19 nt, Artificial Sequence
  Description of Artificial Sequence: Synthetic oligonucleotide
  Antisense strand to SEQ ID NO: 2339030
ucucugcagauauauuaaa

SEQ ID NO: 2339032 - RNA, 19 nt, Artificial Sequence
  Description of Artificial Sequence: Synthetic oligonucleotide
  Sense strand starting at position 2461 of SEQ ID NO: 1885396
aauauaucugcagagaugu

SEQ ID NO: 2339033 - RNA, 19 nt, Artificial Sequence
  Description of Artificial Sequence: Synthetic oligonucleotide
  Antisense strand to SEQ ID NO: 2339032
acaucucugcagauauauu

SEQ ID NO: 2339034 - RNA, 19 nt, Artificial Sequence
  Description of Artificial Sequence: Synthetic oligonucleotide
  Sense strand starting at position 2684 of SEQ ID NO: 1885396
gaacuauauucugccagug

SEQ ID NO: 2339035 - RNA, 19 nt, Artificial Sequence
  Description of Artificial Sequence: Synthetic oligonucleotide
  Antisense strand to SEQ ID NO: 2339034
cacuggcagaauauaguuc

SEQ ID NO: 2339036 - RNA, 19 nt, Artificial Sequence
  Description of Artificial Sequence: Synthetic oligonucleotide
  Sense strand starting at position 2870 of SEQ ID NO: 1885396
accguaauuuguuuauccu

SEQ ID NO: 2339037 - RNA, 19 nt, Artificial Sequence
  Description of Artificial Sequence: Synthetic oligonucleotide
  Antisense strand to SEQ ID NO: 2339036
aggauaaacaaauuacggu

SEQ ID NO: 2339038 - RNA, 19 nt, Artificial Sequence
  Description of Artificial Sequence: Synthetic oligonucleotide
  Sense strand starting at position 2871 of SEQ ID NO: 1885396
ccguaauuuguuuauccuu

SEQ ID NO: 2339039 - RNA, 19 nt, Artificial Sequence
  Description of Artificial Sequence: Synthetic oligonucleotide
  Antisense strand to SEQ ID NO: 2339038
aaggauaaacaaauuacgg

SEQ ID NO: 2339040 - RNA, 19 nt, Artificial Sequence
  Description of Artificial Sequence: Synthetic oligonucleotide
  Sense strand starting at position 3099 of SEQ ID NO: 1885396
uuauguauggucuagaacc

SEQ ID NO: 2339041 - RNA, 19 nt, Artificial Sequence
  Description of Artificial Sequence: Synthetic oligonucleotide
  Antisense strand to SEQ ID NO: 2339040
gguucuagaccauacauaa

SEQ ID NO: 2339042 - RNA, 19 nt, Artificial Sequence
  Description of Artificial Sequence: Synthetic oligonucleotide
  Sense strand starting at position 3101 of SEQ ID NO: 1885396
auguauggucuagaaccca

SEQ ID NO: 2339043 - RNA, 19 nt, Artificial Sequence
  Description of Artificial Sequence: Synthetic oligonucleotide
  Antisense strand to SEQ ID NO: 2339042
uggguucuagaccauacau

SEQ ID NO: 2339044 - RNA, 19 nt, Artificial Sequence
  Description of Artificial Sequence: Synthetic oligonucleotide
  Sense strand starting at position 3203 of SEQ ID NO: 1885396
uuaugugcaguguaagaau

SEQ ID NO: 2339045 - RNA, 19 nt, Artificial Sequence
  Description of Artificial Sequence: Synthetic oligonucleotide
  Antisense strand to SEQ ID NO: 2339044
auucuuacacugcacauaa

SEQ ID NO: 2339046 - RNA, 19 nt, Artificial Sequence
  Description of Artificial Sequence: Synthetic oligonucleotide
  Sense strand starting at position 3217 of SEQ ID NO: 1885396
agaauugaggcuuaucuuu

SEQ ID NO: 2339047 - RNA, 19 nt, Artificial Sequence
  Description of Artificial Sequence: Synthetic oligonucleotide
  Antisense strand to SEQ ID NO: 2339046
aaagauaagccucaauucu

SEQ ID NO: 2339048 - RNA, 19 nt, Artificial Sequence
  Description of Artificial Sequence: Synthetic oligonucleotide
  Sense strand starting at position 3272 of SEQ ID NO: 1885396
ugagaagacuaucauuuau

SEQ ID NO: 2339049 - RNA, 19 nt, Artificial Sequence
  Description of Artificial Sequence: Synthetic oligonucleotide
  Antisense strand to SEQ ID NO: 2339048
auaaaugauagucuucuca

SEQ ID NO: 2339050 - RNA, 19 nt, Artificial Sequence
  Description of Artificial Sequence: Synthetic oligonucleotide
  Sense strand starting at position 3568 of SEQ ID NO: 1885396
ucgccaugucaauaauauu

SEQ ID NO: 2339051 - RNA, 19 nt, Artificial Sequence
  Description of Artificial Sequence: Synthetic oligonucleotide
  Antisense strand to SEQ ID NO: 2339050
aauauuauugacauggcga

SEQ ID NO: 2339052 - RNA, 19 nt, Artificial Sequence
  Description of Artificial Sequence: Synthetic oligonucleotide
  Sense strand starting at position 3594 of SEQ ID NO: 1885396
cguaucugugaacaugaua

SEQ ID NO: 2339053 - RNA, 19 nt, Artificial Sequence
  Description of Artificial Sequence: Synthetic oligonucleotide
  Antisense strand to SEQ ID NO: 2339052
uaucauguucacagauacg

SEQ ID NO: 2339054 - RNA, 19 nt, Artificial Sequence
  Description of Artificial Sequence: Synthetic oligonucleotide
  Sense strand starting at position 3597 of SEQ ID NO: 1885396
aucugugaacaugauaugu

SEQ ID NO: 2339055 - RNA, 19 nt, Artificial Sequence
  Description of Artificial Sequence: Synthetic oligonucleotide
  Antisense strand to SEQ ID NO: 2339054
acauaucauguucacagau

SEQ ID NO: 2339056 - RNA, 19 nt, Artificial Sequence
  Description of Artificial Sequence: Synthetic oligonucleotide
  Sense strand starting at position 13 of SEQ ID NO: 1885397
gucuuauacugagcagaag

SEQ ID NO: 2339057 - RNA, 19 nt, Artificial Sequence
  Description of Artificial Sequence: Synthetic oligonucleotide
  Antisense strand to SEQ ID NO: 2339056
cuucugcucaguauaagac

SEQ ID NO: 2339058 - RNA, 19 nt, Artificial Sequence
  Description of Artificial Sequence: Synthetic oligonucleotide
  Sense strand starting at position 34 of SEQ ID NO: 1885397
ggcaauagauucucuacca

SEQ ID NO: 2339059 - RNA, 19 nt, Artificial Sequence
  Description of Artificial Sequence: Synthetic oligonucleotide
  Antisense strand to SEQ ID NO: 2339058
ugguagagaaucuauugcc

SEQ ID NO: 2339060 - RNA, 19 nt, Artificial Sequence
  Description of Artificial Sequence: Synthetic oligonucleotide
  Sense strand starting at position 112 of SEQ ID NO: 1885397
agaaaugauaagugccaga

SEQ ID NO: 2339061 - RNA, 19 nt, Artificial Sequence
  Description of Artificial Sequence: Synthetic oligonucleotide
  Antisense strand to SEQ ID NO: 2339060
ucuggcacuuaucauuucu

SEQ ID NO: 2339062 - RNA, 19 nt, Artificial Sequence
  Description of Artificial Sequence: Synthetic oligonucleotide
  Sense strand starting at position 154 of SEQ ID NO: 1885397
aucaaugagugccacauuu

SEQ ID NO: 2339063 - RNA, 19 nt, Artificial Sequence
  Description of Artificial Sequence: Synthetic oligonucleotide
  Antisense strand to SEQ ID NO: 2339062
aaauguggcacucauugau

SEQ ID NO: 2339064 - RNA, 19 nt, Artificial Sequence
  Description of Artificial Sequence: Synthetic oligonucleotide
  Sense strand starting at position 170 of SEQ ID NO: 1885397
uuuagaaaguggcuugauu

SEQ ID NO: 2339065 - RNA, 19 nt, Artificial Sequence
  Description of Artificial Sequence: Synthetic oligonucleotide
  Antisense strand to SEQ ID NO: 2339064
aaucaagccacuuucuaaa

SEQ ID NO: 2339066 - RNA, 19 nt, Artificial Sequence
  Description of Artificial Sequence: Synthetic oligonucleotide
  Sense strand starting at position 242 of SEQ ID NO: 1885397
gacaaaggcgucugggaau

SEQ ID NO: 2339067 - RNA, 19 nt, Artificial Sequence
  Description of Artificial Sequence: Synthetic oligonucleotide
  Antisense strand to SEQ ID NO: 2339066
auucccagacgccuuuguc

SEQ ID NO: 2339068 - RNA, 19 nt, Artificial Sequence
  Description of Artificial Sequence: Synthetic oligonucleotide
  Sense strand starting at position 248 of SEQ ID NO: 1885397
ggcgucugggaauaacuga

SEQ ID NO: 2339069 - RNA, 19 nt, Artificial Sequence
  Description of Artificial Sequence: Synthetic oligonucleotide
  Antisense strand to SEQ ID NO: 2339068
ucaguuauucccagacgcc

SEQ ID NO: 2339070 - RNA, 19 nt, Artificial Sequence
  Description of Artificial Sequence: Synthetic oligonucleotide
  Sense strand starting at position 255 of SEQ ID NO: 1885397
gggaauaacugaugggaag

SEQ ID NO: 2339071 - RNA, 19 nt, Artificial Sequence
  Description of Artificial Sequence: Synthetic oligonucleotide
  Antisense strand to SEQ ID NO: 2339070
cuucccaucaguuauuccc

SEQ ID NO: 2339072 - RNA, 19 nt, Artificial Sequence
  Description of Artificial Sequence: Synthetic oligonucleotide
  Sense strand starting at position 323 of SEQ ID NO: 1885397
guuuguuuagucuaauuag

SEQ ID NO: 2339073 - RNA, 19 nt, Artificial Sequence
  Description of Artificial Sequence: Synthetic oligonucleotide
  Antisense strand to SEQ ID NO: 2339072
cuaauuagacuaaacaaac

SEQ ID NO: 2339074 - RNA, 19 nt, Artificial Sequence
  Description of Artificial Sequence: Synthetic oligonucleotide
  Sense strand starting at position 326 of SEQ ID NO: 1885397
uguuuagucuaauuagagg

SEQ ID NO: 2339075 - RNA, 19 nt, Artificial Sequence
  Description of Artificial Sequence: Synthetic oligonucleotide
  Antisense strand to SEQ ID NO: 2339074
ccucuaauuagacuaaaca

SEQ ID NO: 2339076 - RNA, 19 nt, Artificial Sequence
  Description of Artificial Sequence: Synthetic oligonucleotide
  Sense strand starting at position 335 of SEQ ID NO: 1885397
uaauuagaggcgugggaga

SEQ ID NO: 2339077 - RNA, 19 nt, Artificial Sequence
  Description of Artificial Sequence: Synthetic oligonucleotide
  Antisense strand to SEQ ID NO: 2339076
ucucccacgccucuaauua

SEQ ID NO: 2339078 - RNA, 19 nt, Artificial Sequence
  Description of Artificial Sequence: Synthetic oligonucleotide
  Sense strand starting at position 626 of SEQ ID NO: 1885397
cauguugaguugcccagau

SEQ ID NO: 2339079 - RNA, 19 nt, Artificial Sequence
  Description of Artificial Sequence: Synthetic oligonucleotide
  Antisense strand to SEQ ID NO: 2339078
aucugggcaacucaacaug

SEQ ID NO: 2339080 - RNA, 19 nt, Artificial Sequence
  Description of Artificial Sequence: Synthetic oligonucleotide
  Sense strand starting at position 628 of SEQ ID NO: 1885397
uguugaguugcccagaugu

SEQ ID NO: 2339081 - RNA, 19 nt, Artificial Sequence
  Description of Artificial Sequence: Synthetic oligonucleotide
  Antisense strand to SEQ ID NO: 2339080
acaucugggcaacucaaca

SEQ ID NO: 2339082 - RNA, 19 nt, Artificial Sequence
  Description of Artificial Sequence: Synthetic oligonucleotide
  Sense strand starting at position 630 of SEQ ID NO: 1885397
uugaguugcccagauguaa

SEQ ID NO: 2339083 - RNA, 19 nt, Artificial Sequence
  Description of Artificial Sequence: Synthetic oligonucleotide
  Antisense strand to SEQ ID NO: 2339082
uuacaucugggcaacucaa

SEQ ID NO: 2339084 - RNA, 19 nt, Artificial Sequence
  Description of Artificial Sequence: Synthetic oligonucleotide
  Sense strand starting at position 667 of SEQ ID NO: 1885397
gggagaaacacguguacau

SEQ ID NO: 2339085 - RNA, 19 nt, Artificial Sequence
  Description of Artificial Sequence: Synthetic oligonucleotide
  Antisense strand to SEQ ID NO: 2339084
auguacacguguuucuccc

SEQ ID NO: 2339086 - RNA, 19 nt, Artificial Sequence
  Description of Artificial Sequence: Synthetic oligonucleotide
  Sense strand starting at position 835 of SEQ ID NO: 1885397
gcaauauguccacagggau

SEQ ID NO: 2339087 - RNA, 19 nt, Artificial Sequence
  Description of Artificial Sequence: Synthetic oligonucleotide
  Antisense strand to SEQ ID NO: 2339086
aucccuguggacauauugc

SEQ ID NO: 2339088 - RNA, 19 nt, Artificial Sequence
  Description of Artificial Sequence: Synthetic oligonucleotide
  Sense strand starting at position 1219 of SEQ ID NO: 1885397
agcgcaugagcagaagaaa

SEQ ID NO: 2339089 - RNA, 19 nt, Artificial Sequence
  Description of Artificial Sequence: Synthetic oligonucleotide
  Antisense strand to SEQ ID NO: 2339088
uuucuucugcucaugcgcu

SEQ ID NO: 2339090 - RNA, 19 nt, Artificial Sequence
  Description of Artificial Sequence: Synthetic oligonucleotide
  Sense strand starting at position 1240 of SEQ ID NO: 1885397
cuuggugagaaauguuaga

SEQ ID NO: 2339091 - RNA, 19 nt, Artificial Sequence
  Description of Artificial Sequence: Synthetic oligonucleotide
  Antisense strand to SEQ ID NO: 2339090
ucuaacauuucucaccaag

SEQ ID NO: 2339092 - RNA, 19 nt, Artificial Sequence
  Description of Artificial Sequence: Synthetic oligonucleotide
  Sense strand starting at position 1296 of SEQ ID NO: 1885397
gauuuaaguuggcagauuu

SEQ ID NO: 2339093 - RNA, 19 nt, Artificial Sequence
  Description of Artificial Sequence: Synthetic oligonucleotide
  Antisense strand to SEQ ID NO: 2339092
aaaucugccaacuuaaauc

SEQ ID NO: 2339094 - RNA, 19 nt, Artificial Sequence
  Description of Artificial Sequence: Synthetic oligonucleotide
  Sense strand starting at position 1362 of SEQ ID NO: 1885397
cucaguaucuucccaagag

SEQ ID NO: 2339095 - RNA, 19 nt, Artificial Sequence
  Description of Artificial Sequence: Synthetic oligonucleotide
  Antisense strand to SEQ ID NO: 2339094
cucuugggaagauacugag

SEQ ID NO: 2339096 - RNA, 19 nt, Artificial Sequence
  Description of Artificial Sequence: Synthetic oligonucleotide
  Sense strand starting at position 1478 of SEQ ID NO: 1885397
acugaugacuggcuuguau

SEQ ID NO: 2339097 - RNA, 19 nt, Artificial Sequence
  Description of Artificial Sequence: Synthetic oligonucleotide
  Antisense strand to SEQ ID NO: 2339096
auacaagccagucaucagu

SEQ ID NO: 2339098 - RNA, 19 nt, Artificial Sequence
  Description of Artificial Sequence: Synthetic oligonucleotide
  Sense strand starting at position 1480 of SEQ ID NO: 1885397
ugaugacuggcuuguauua

SEQ ID NO: 2339099 - RNA, 19 nt, Artificial Sequence
  Description of Artificial Sequence: Synthetic oligonucleotide
  Antisense strand to SEQ ID NO: 2339098
uaauacaagccagucauca

SEQ ID NO: 2339100 - RNA, 19 nt, Artificial Sequence
  Description of Artificial Sequence: Synthetic oligonucleotide
  Sense strand starting at position 1491 of SEQ ID NO: 1885397
uuguauuagugauccauca

SEQ ID NO: 2339101 - RNA, 19 nt, Artificial Sequence
  Description of Artificial Sequence: Synthetic oligonucleotide
  Antisense strand to SEQ ID NO: 2339100
ugauggaucacuaauacaa

SEQ ID NO: 2339102 - RNA, 19 nt, Artificial Sequence
  Description of Artificial Sequence: Synthetic oligonucleotide
  Sense strand starting at position 1499 of SEQ ID NO: 1885397
gugauccaucacugugcaa

SEQ ID NO: 2339103 - RNA, 19 nt, Artificial Sequence
  Description of Artificial Sequence: Synthetic oligonucleotide
  Antisense strand to SEQ ID NO: 2339102
uugcacagugauggaucac

SEQ ID NO: 2339104 - RNA, 19 nt, Artificial Sequence
  Description of Artificial Sequence: Synthetic oligonucleotide
  Sense strand starting at position 1890 of SEQ ID NO: 1885397
acguuugauugagucacua

SEQ ID NO: 2339105 - RNA, 19 nt, Artificial Sequence
  Description of Artificial Sequence: Synthetic oligonucleotide
  Antisense strand to SEQ ID NO: 2339104
uagugacucaaucaaacgu

SEQ ID NO: 2339106 - RNA, 19 nt, Artificial Sequence
  Description of Artificial Sequence: Synthetic oligonucleotide
  Sense strand starting at position 1894 of SEQ ID NO: 1885397
uugauugagucacuaaauc

SEQ ID NO: 2339107 - RNA, 19 nt, Artificial Sequence
  Description of Artificial Sequence: Synthetic oligonucleotide
  Antisense strand to SEQ ID NO: 2339106
gauuuagugacucaaucaa

SEQ ID NO: 2339108 - RNA, 19 nt, Artificial Sequence
  Description of Artificial Sequence: Synthetic oligonucleotide
  Sense strand starting at position 1991 of SEQ ID NO: 1885397
auggaugaagccugcaaua

SEQ ID NO: 2339109 - RNA, 19 nt, Artificial Sequence
  Description of Artificial Sequence: Synthetic oligonucleotide
  Antisense strand to SEQ ID NO: 2339108
uauugcaggcuucauccau

SEQ ID NO: 2339110 - RNA, 19 nt, Artificial Sequence
  Description of Artificial Sequence: Synthetic oligonucleotide
  Sense strand starting at position 2059 of SEQ ID NO: 1885397
aagcauuguguugagguua

SEQ ID NO: 2339111 - RNA, 19 nt, Artificial Sequence
  Description of Artificial Sequence: Synthetic oligonucleotide
  Antisense strand to SEQ ID NO: 2339110
uaaccucaacacaaugcuu

SEQ ID NO: 2339112 - RNA, 19 nt, Artificial Sequence
  Description of Artificial Sequence: Synthetic oligonucleotide
  Sense strand starting at position 2102 of SEQ ID NO: 1885397
ugugauccugcuuauguaa

SEQ ID NO: 2339113 - RNA, 19 nt, Artificial Sequence
  Description of Artificial Sequence: Synthetic oligonucleotide
  Antisense strand to SEQ ID NO: 2339112
uuacauaagcaggaucaca

SEQ ID NO: 2339114 - RNA, 19 nt, Artificial Sequence
  Description of Artificial Sequence: Synthetic oligonucleotide
  Sense strand starting at position 2178 of SEQ ID NO: 1885397
ggcguaauggcaggagaug

SEQ ID NO: 2339115 - RNA, 19 nt, Artificial Sequence
  Description of Artificial Sequence: Synthetic oligonucleotide
  Antisense strand to SEQ ID NO: 2339114
caucuccugccauuacgcc

SEQ ID NO: 2339116 - RNA, 19 nt, Artificial Sequence
  Description of Artificial Sequence: Synthetic oligonucleotide
  Sense strand starting at position 2179 of SEQ ID NO: 1885397
gcguaauggcaggagauga

SEQ ID NO: 2339117 - RNA, 19 nt, Artificial Sequence
  Description of Artificial Sequence: Synthetic oligonucleotide
  Antisense strand to SEQ ID NO: 2339116
ucaucuccugccauuacgc

SEQ ID NO: 2339118 - RNA, 19 nt, Artificial Sequence
  Description of Artificial Sequence: Synthetic oligonucleotide
  Sense strand starting at position 2255 of SEQ ID NO: 1885397
acagauguguaugucuaaa

SEQ ID NO: 2339119 - RNA, 19 nt, Artificial Sequence
  Description of Artificial Sequence: Synthetic oligonucleotide
  Antisense strand to SEQ ID NO: 2339118
uuuagacauacacaucugu

SEQ ID NO: 2339120 - RNA, 19 nt, Artificial Sequence
  Description of Artificial Sequence: Synthetic oligonucleotide
  Sense strand starting at position 2277 of SEQ ID NO: 1885397
ggugaaucucacugucucu

SEQ ID NO: 2339121 - RNA, 19 nt, Artificial Sequence
  Description of Artificial Sequence: Synthetic oligonucleotide
  Antisense strand to SEQ ID NO: 2339120
agagacagugagauucacc

SEQ ID NO: 2339122 - RNA, 19 nt, Artificial Sequence
  Description of Artificial Sequence: Synthetic oligonucleotide
  Sense strand starting at position 2373 of SEQ ID NO: 1885397
cuuuccuagguguaucaua

SEQ ID NO: 2339123 - RNA, 19 nt, Artificial Sequence
  Description of Artificial Sequence: Synthetic oligonucleotide
  Antisense strand to SEQ ID NO: 2339122
uaugauacaccuaggaaag

SEQ ID NO: 2339124 - RNA, 19 nt, Artificial Sequence
  Description of Artificial Sequence: Synthetic oligonucleotide
  Sense strand starting at position 2618 of SEQ ID NO: 1885397
gacucagaaugcuuagaga

SEQ ID NO: 2339125 - RNA, 19 nt, Artificial Sequence
  Description of Artificial Sequence: Synthetic oligonucleotide
  Antisense strand to SEQ ID NO: 2339124
ucucuaagcauucugaguc

SEQ ID NO: 2339126 - RNA, 19 nt, Artificial Sequence
  Description of Artificial Sequence: Synthetic oligonucleotide
  Sense strand starting at position 2868 of SEQ ID NO: 1885397
ggagaaaguucugagacag

SEQ ID NO: 2339127 - RNA, 19 nt, Artificial Sequence
  Description of Artificial Sequence: Synthetic oligonucleotide
  Antisense strand to SEQ ID NO: 2339126
cugucucagaacuuucucc

SEQ ID NO: 2339128 - RNA, 19 nt, Artificial Sequence
  Description of Artificial Sequence: Synthetic oligonucleotide
  Sense strand starting at position 3285 of SEQ ID NO: 1885397
ggugguauaugccuuuaau

SEQ ID NO: 2339129 - RNA, 19 nt, Artificial Sequence
  Description of Artificial Sequence: Synthetic oligonucleotide
  Antisense strand to SEQ ID NO: 2339128
auuaaaggcauauaccacc

SEQ ID NO: 2339130 - RNA, 19 nt, Artificial Sequence
  Description of Artificial Sequence: Synthetic oligonucleotide
  Sense strand starting at position 3941 of SEQ ID NO: 1885397
gaacaaauacgaugagugu

SEQ ID NO: 2339131 - RNA, 19 nt, Artificial Sequence
  Description of Artificial Sequence: Synthetic oligonucleotide
  Antisense strand to SEQ ID NO: 2339130
acacucaucguauuuguuc

SEQ ID NO: 2339132 - RNA, 19 nt, Artificial Sequence
  Description of Artificial Sequence: Synthetic oligonucleotide
  Sense strand starting at position 3944 of SEQ ID NO: 1885397
caaauacgaugaguguuaa

SEQ ID NO: 2339133 - RNA, 19 nt, Artificial Sequence
  Description of Artificial Sequence: Synthetic oligonucleotide
  Antisense strand to SEQ ID NO: 2339132
uuaacacucaucguauuug

SEQ ID NO: 2339134 - RNA, 19 nt, Artificial Sequence
  Description of Artificial Sequence: Synthetic oligonucleotide
  Sense strand starting at position 3945 of SEQ ID NO: 1885397
aaauacgaugaguguuaaa

SEQ ID NO: 2339135 - RNA, 19 nt, Artificial Sequence
  Description of Artificial Sequence: Synthetic oligonucleotide
  Antisense strand to SEQ ID NO: 2339134
uuuaacacucaucguauuu

SEQ ID NO: 2339136 - RNA, 19 nt, Artificial Sequence
  Description of Artificial Sequence: Synthetic oligonucleotide
  Sense strand starting at position 141 of SEQ ID NO: 1885398
cuacuaguacuacagugaa

SEQ ID NO: 2339137 - RNA, 19 nt, Artificial Sequence
  Description of Artificial Sequence: Synthetic oligonucleotide
  Antisense strand to SEQ ID NO: 2339136
uucacuguaguacuaguag

SEQ ID NO: 2339138 - RNA, 19 nt, Artificial Sequence
  Description of Artificial Sequence: Synthetic oligonucleotide
  Sense strand starting at position 144 of SEQ ID NO: 1885398
cuaguacuacagugaaagu

SEQ ID NO: 2339139 - RNA, 19 nt, Artificial Sequence
  Description of Artificial Sequence: Synthetic oligonucleotide
  Antisense strand to SEQ ID NO: 2339138
acuuucacuguaguacuag

SEQ ID NO: 2339140 - RNA, 19 nt, Artificial Sequence
  Description of Artificial Sequence: Synthetic oligonucleotide
  Sense strand starting at position 263 of SEQ ID NO: 1885398
aggacaagcuuaucauauc

SEQ ID NO: 2339141 - RNA, 19 nt, Artificial Sequence
  Description of Artificial Sequence: Synthetic oligonucleotide
  Antisense strand to SEQ ID NO: 2339140
gauaugauaagcuuguccu

SEQ ID NO: 2339142 - RNA, 19 nt, Artificial Sequence
  Description of Artificial Sequence: Synthetic oligonucleotide
  Sense strand starting at position 269 of SEQ ID NO: 1885398
agcuuaucauaucugaaga

SEQ ID NO: 2339143 - RNA, 19 nt, Artificial Sequence
  Description of Artificial Sequence: Synthetic oligonucleotide
  Antisense strand to SEQ ID NO: 2339142
ucuucagauaugauaagcu

SEQ ID NO: 2339144 - RNA, 19 nt, Artificial Sequence
  Description of Artificial Sequence: Synthetic oligonucleotide
  Sense strand starting at position 321 of SEQ ID NO: 1885398
guaaaugcagacugguaua

SEQ ID NO: 2339145 - RNA, 19 nt, Artificial Sequence
  Description of Artificial Sequence: Synthetic oligonucleotide
  Antisense strand to SEQ ID NO: 2339144
uauaccagucugcauuuac

SEQ ID NO: 2339146 - RNA, 19 nt, Artificial Sequence
  Description of Artificial Sequence: Synthetic oligonucleotide
  Sense strand starting at position 334 of SEQ ID NO: 1885398
gguauaagacagggucaga

SEQ ID NO: 2339147 - RNA, 19 nt, Artificial Sequence
  Description of Artificial Sequence: Synthetic oligonucleotide
  Antisense strand to SEQ ID NO: 2339146
ucugacccugucuuauacc

SEQ ID NO: 2339148 - RNA, 19 nt, Artificial Sequence
  Description of Artificial Sequence: Synthetic oligonucleotide
  Sense strand starting at position 356 of SEQ ID NO: 1885398
gcagccaaggacuagauua

SEQ ID NO: 2339149 - RNA, 19 nt, Artificial Sequence
  Description of Artificial Sequence: Synthetic oligonucleotide
  Antisense strand to SEQ ID NO: 2339148
uaaucuaguccuuggcugc

SEQ ID NO: 2339150 - RNA, 19 nt, Artificial Sequence
  Description of Artificial Sequence: Synthetic oligonucleotide
  Sense strand starting at position 479 of SEQ ID NO: 1885398
ggagacuacuauguccaca

SEQ ID NO: 2339151 - RNA, 19 nt, Artificial Sequence
  Description of Artificial Sequence: Synthetic oligonucleotide
  Antisense strand to SEQ ID NO: 2339150
uguggacauaguagucucc

SEQ ID NO: 2339152 - RNA, 19 nt, Artificial Sequence
  Description of Artificial Sequence: Synthetic oligonucleotide
  Sense strand starting at position 744 of SEQ ID NO: 1885398
cguaaauacagaggaauau

SEQ ID NO: 2339153 - RNA, 19 nt, Artificial Sequence
  Description of Artificial Sequence: Synthetic oligonucleotide
  Antisense strand to SEQ ID NO: 2339152
auauuccucuguauuuacg

SEQ ID NO: 2339154 - RNA, 19 nt, Artificial Sequence
  Description of Artificial Sequence: Synthetic oligonucleotide
  Sense strand starting at position 874 of SEQ ID NO: 1885398
cagaaagaaguuuggcuau

SEQ ID NO: 2339155 - RNA, 19 nt, Artificial Sequence
  Description of Artificial Sequence: Synthetic oligonucleotide
  Antisense strand to SEQ ID NO: 2339154
auagccaaacuucuuucug

SEQ ID NO: 2339156 - RNA, 19 nt, Artificial Sequence
  Description of Artificial Sequence: Synthetic oligonucleotide
  Sense strand starting at position 934 of SEQ ID NO: 1885398
acuugaucauguuuaacug

SEQ ID NO: 2339157 - RNA, 19 nt, Artificial Sequence
  Description of Artificial Sequence: Synthetic oligonucleotide
  Antisense strand to SEQ ID NO: 2339156
caguuaaacaugaucaagu

SEQ ID NO: 2339158 - RNA, 19 nt, Artificial Sequence
  Description of Artificial Sequence: Synthetic oligonucleotide
  Sense strand starting at position 938 of SEQ ID NO: 1885398
gaucauguuuaacuguuga

SEQ ID NO: 2339159 - RNA, 19 nt, Artificial Sequence
  Description of Artificial Sequence: Synthetic oligonucleotide
  Antisense strand to SEQ ID NO: 2339158
ucaacaguuaaacaugauc

SEQ ID NO: 2339160 - RNA, 19 nt, Artificial Sequence
  Description of Artificial Sequence: Synthetic oligonucleotide
  Sense strand starting at position 958 of SEQ ID NO: 1885398
gggucagacucagcaaaga

SEQ ID NO: 2339161 - RNA, 19 nt, Artificial Sequence
  Description of Artificial Sequence: Synthetic oligonucleotide
  Antisense strand to SEQ ID NO: 2339160
ucuuugcugagucugaccc

SEQ ID NO: 2339162 - RNA, 19 nt, Artificial Sequence
  Description of Artificial Sequence: Synthetic oligonucleotide
  Sense strand starting at position 983 of SEQ ID NO: 1885398
gguugaaguuagagagaag

SEQ ID NO: 2339163 - RNA, 19 nt, Artificial Sequence
  Description of Artificial Sequence: Synthetic oligonucleotide
  Antisense strand to SEQ ID NO: 2339162
cuucucucuaacuucaacc

SEQ ID NO: 2339164 - RNA, 19 nt, Artificial Sequence
  Description of Artificial Sequence: Synthetic oligonucleotide
  Sense strand starting at position 1387 of SEQ ID NO: 1885398
uuaaguuacacguaggauc

SEQ ID NO: 2339165 - RNA, 19 nt, Artificial Sequence
  Description of Artificial Sequence: Synthetic oligonucleotide
  Antisense strand to SEQ ID NO: 2339164
gauccuacguguaacuuaa

SEQ ID NO: 2339166 - RNA, 19 nt, Artificial Sequence
  Description of Artificial Sequence: Synthetic oligonucleotide
  Sense strand starting at position 1401 of SEQ ID NO: 1885398
ggaucacaguucuuuggga

SEQ ID NO: 2339167 - RNA, 19 nt, Artificial Sequence
  Description of Artificial Sequence: Synthetic oligonucleotide
  Antisense strand to SEQ ID NO: 2339166
ucccaaagaacugugaucc

SEQ ID NO: 2339168 - RNA, 19 nt, Artificial Sequence
  Description of Artificial Sequence: Synthetic oligonucleotide
  Sense strand starting at position 1402 of SEQ ID NO: 1885398
gaucacaguucuuugggaa

SEQ ID NO: 2339169 - RNA, 19 nt, Artificial Sequence
  Description of Artificial Sequence: Synthetic oligonucleotide
  Antisense strand to SEQ ID NO: 2339168
uucccaaagaacugugauc

SEQ ID NO: 2339170 - RNA, 19 nt, Artificial Sequence
  Description of Artificial Sequence: Synthetic oligonucleotide
  Sense strand starting at position 1403 of SEQ ID NO: 1885398
aucacaguucuuugggaaa

SEQ ID NO: 2339171 - RNA, 19 nt, Artificial Sequence
  Description of Artificial Sequence: Synthetic oligonucleotide
  Antisense strand to SEQ ID NO: 2339170
uuucccaaagaacugugau

SEQ ID NO: 2339172 - RNA, 19 nt, Artificial Sequence
  Description of Artificial Sequence: Synthetic oligonucleotide
  Sense strand starting at position 1484 of SEQ ID NO: 1885398
ggaguauucuucucagaca

SEQ ID NO: 2339173 - RNA, 19 nt, Artificial Sequence
  Description of Artificial Sequence: Synthetic oligonucleotide
  Antisense strand to SEQ ID NO: 2339172
ugucugagaagaauacucc

SEQ ID NO: 2339174 - RNA, 19 nt, Artificial Sequence
  Description of Artificial Sequence: Synthetic oligonucleotide
  Sense strand starting at position 1508 of SEQ ID NO: 1885398
gaaauucuucuguaaagug

SEQ ID NO: 2339175 - RNA, 19 nt, Artificial Sequence
  Description of Artificial Sequence: Synthetic oligonucleotide
  Antisense strand to SEQ ID NO: 2339174
cacuuuacagaagaauuuc

SEQ ID NO: 2339176 - RNA, 19 nt, Artificial Sequence
  Description of Artificial Sequence: Synthetic oligonucleotide
  Sense strand starting at position 1581 of SEQ ID NO: 1885398
acuaaucuguauucuagga

SEQ ID NO: 2339177 - RNA, 19 nt, Artificial Sequence
  Description of Artificial Sequence: Synthetic oligonucleotide
  Antisense strand to SEQ ID NO: 2339176
uccuagaauacagauuagu

SEQ ID NO: 2339178 - RNA, 19 nt, Artificial Sequence
  Description of Artificial Sequence: Synthetic oligonucleotide
  Sense strand starting at position 1668 of SEQ ID NO: 1885398
ugauauggcacuggauaca

SEQ ID NO: 2339179 - RNA, 19 nt, Artificial Sequence
  Description of Artificial Sequence: Synthetic oligonucleotide
  Antisense strand to SEQ ID NO: 2339178
uguauccagugccauauca

SEQ ID NO: 2339180 - RNA, 19 nt, Artificial Sequence
  Description of Artificial Sequence: Synthetic oligonucleotide
  Sense strand starting at position 1689 of SEQ ID NO: 1885398
aaguuaaaugggugauccu

SEQ ID NO: 2339181 - RNA, 19 nt, Artificial Sequence
  Description of Artificial Sequence: Synthetic oligonucleotide
  Antisense strand to SEQ ID NO: 2339180
aggaucacccauuuaacuu

SEQ ID NO: 2339182 - RNA, 19 nt, Artificial Sequence
  Description of Artificial Sequence: Synthetic oligonucleotide
  Sense strand starting at position 1690 of SEQ ID NO: 1885398
aguuaaaugggugauccuu

SEQ ID NO: 2339183 - RNA, 19 nt, Artificial Sequence
  Description of Artificial Sequence: Synthetic oligonucleotide
  Antisense strand to SEQ ID NO: 2339182
aaggaucacccauuuaacu

SEQ ID NO: 2339184 - RNA, 19 nt, Artificial Sequence
  Description of Artificial Sequence: Synthetic oligonucleotide
  Sense strand starting at position 1893 of SEQ ID NO: 1885398
cagguuagauaugcucaau

SEQ ID NO: 2339185 - RNA, 19 nt, Artificial Sequence
  Description of Artificial Sequence: Synthetic oligonucleotide
  Antisense strand to SEQ ID NO: 2339184
auugagcauaucuaaccug

SEQ ID NO: 2339186 - RNA, 19 nt, Artificial Sequence
  Description of Artificial Sequence: Synthetic oligonucleotide
  Sense strand starting at position 1896 of SEQ ID NO: 1885398
guuagauaugcucaaucag

SEQ ID NO: 2339187 - RNA, 19 nt, Artificial Sequence
  Description of Artificial Sequence: Synthetic oligonucleotide
  Antisense strand to SEQ ID NO: 2339186
cugauugagcauaucuaac

SEQ ID NO: 2339188 - RNA, 19 nt, Artificial Sequence
  Description of Artificial Sequence: Synthetic oligonucleotide
  Sense strand starting at position 1903 of SEQ ID NO: 1885398
augcucaaucaguagguau

SEQ ID NO: 2339189 - RNA, 19 nt, Artificial Sequence
  Description of Artificial Sequence: Synthetic oligonucleotide
  Antisense strand to SEQ ID NO: 2339188
auaccuacugauugagcau

SEQ ID NO: 2339190 - RNA, 19 nt, Artificial Sequence
  Description of Artificial Sequence: Synthetic oligonucleotide
  Sense strand starting at position 2084 of SEQ ID NO: 1885398
gggagaagacugugccuaa

SEQ ID NO: 2339191 - RNA, 19 nt, Artificial Sequence
  Description of Artificial Sequence: Synthetic oligonucleotide
  Antisense strand to SEQ ID NO: 2339190
uuaggcacagucuucuccc

SEQ ID NO: 2339192 - RNA, 19 nt, Artificial Sequence
  Description of Artificial Sequence: Synthetic oligonucleotide
  Sense strand starting at position 2085 of SEQ ID NO: 1885398
ggagaagacugugccuaau

SEQ ID NO: 2339193 - RNA, 19 nt, Artificial Sequence
  Description of Artificial Sequence: Synthetic oligonucleotide
  Antisense strand to SEQ ID NO: 2339192
auuaggcacagucuucucc

SEQ ID NO: 2339194 - RNA, 19 nt, Artificial Sequence
  Description of Artificial Sequence: Synthetic oligonucleotide
  Sense strand starting at position 2087 of SEQ ID NO: 1885398
agaagacugugccuaauau

SEQ ID NO: 2339195 - RNA, 19 nt, Artificial Sequence
  Description of Artificial Sequence: Synthetic oligonucleotide
  Antisense strand to SEQ ID NO: 2339194
auauuaggcacagucuucu

SEQ ID NO: 2339196 - RNA, 19 nt, Artificial Sequence
  Description of Artificial Sequence: Synthetic oligonucleotide
  Sense strand starting at position 2088 of SEQ ID NO: 1885398
gaagacugugccuaauauc

SEQ ID NO: 2339197 - RNA, 19 nt, Artificial Sequence
  Description of Artificial Sequence: Synthetic oligonucleotide
  Antisense strand to SEQ ID NO: 2339196
gauauuaggcacagucuuc

SEQ ID NO: 2339198 - RNA, 19 nt, Artificial Sequence
  Description of Artificial Sequence: Synthetic oligonucleotide
  Sense strand starting at position 2116 of SEQ ID NO: 1885398
aguuacugauucuuaguaa

SEQ ID NO: 2339199 - RNA, 19 nt, Artificial Sequence
  Description of Artificial Sequence: Synthetic oligonucleotide
  Antisense strand to SEQ ID NO: 2339198
uuacuaagaaucaguaacu

SEQ ID NO: 2339200 - RNA, 19 nt, Artificial Sequence
  Description of Artificial Sequence: Synthetic oligonucleotide
  Sense strand starting at position 2171 of SEQ ID NO: 1885398
auaacaagaucccugguuu

SEQ ID NO: 2339201 - RNA, 19 nt, Artificial Sequence
  Description of Artificial Sequence: Synthetic oligonucleotide
  Antisense strand to SEQ ID NO: 2339200
aaaccagggaucuuguuau

SEQ ID NO: 2339202 - RNA, 19 nt, Artificial Sequence
  Description of Artificial Sequence: Synthetic oligonucleotide
  Sense strand starting at position 2755 of SEQ ID NO: 1885398
uuccaugaugucuacuacu

SEQ ID NO: 2339203 - RNA, 19 nt, Artificial Sequence
  Description of Artificial Sequence: Synthetic oligonucleotide
  Antisense strand to SEQ ID NO: 2339202
aguaguagacaucauggaa

SEQ ID NO: 2339204 - RNA, 19 nt, Artificial Sequence
  Description of Artificial Sequence: Synthetic oligonucleotide
  Sense strand starting at position 2781 of SEQ ID NO: 1885398
uuacguaacaaguggacau

SEQ ID NO: 2339205 - RNA, 19 nt, Artificial Sequence
  Description of Artificial Sequence: Synthetic oligonucleotide
  Antisense strand to SEQ ID NO: 2339204
auguccacuuguuacguaa

SEQ ID NO: 2339206 - RNA, 19 nt, Artificial Sequence
  Description of Artificial Sequence: Synthetic oligonucleotide
  Sense strand starting at position 2982 of SEQ ID NO: 1885398
aguacaacaguauauguaa

SEQ ID NO: 2339207 - RNA, 19 nt, Artificial Sequence
  Description of Artificial Sequence: Synthetic oligonucleotide
  Antisense strand to SEQ ID NO: 2339206
uuacauauacuguuguacu

SEQ ID NO: 2339208 - RNA, 19 nt, Artificial Sequence
  Description of Artificial Sequence: Synthetic oligonucleotide
  Sense strand starting at position 3589 of SEQ ID NO: 1885398
aaagauaacuaugugguua

SEQ ID NO: 2339209 - RNA, 19 nt, Artificial Sequence
  Description of Artificial Sequence: Synthetic oligonucleotide
  Antisense strand to SEQ ID NO: 2339208
uaaccacauaguuaucuuu

SEQ ID NO: 2339210 - RNA, 19 nt, Artificial Sequence
  Description of Artificial Sequence: Synthetic oligonucleotide
  Sense strand starting at position 3631 of SEQ ID NO: 1885398
guagauacaugucuaacau

SEQ ID NO: 2339211 - RNA, 19 nt, Artificial Sequence
  Description of Artificial Sequence: Synthetic oligonucleotide
  Antisense strand to SEQ ID NO: 2339210
auguuagacauguaucuac

SEQ ID NO: 2339212 - RNA, 19 nt, Artificial Sequence
  Description of Artificial Sequence: Synthetic oligonucleotide
  Sense strand starting at position 3728 of SEQ ID NO: 1885398
uucuaaagccauuguagaa

SEQ ID NO: 2339213 - RNA, 19 nt, Artificial Sequence
  Description of Artificial Sequence: Synthetic oligonucleotide
  Antisense strand to SEQ ID NO: 2339212
uucuacaauggcuuuagaa

SEQ ID NO: 2339214 - RNA, 19 nt, Artificial Sequence
  Description of Artificial Sequence: Synthetic oligonucleotide
  Sense strand starting at position 3792 of SEQ ID NO: 1885398
agcacugaugggcauuaaa

SEQ ID NO: 2339215 - RNA, 19 nt, Artificial Sequence
  Description of Artificial Sequence: Synthetic oligonucleotide
  Antisense strand to SEQ ID NO: 2339214
uuuaaugcccaucagugcu

SEQ ID NO: 2339216 - RNA, 19 nt, Artificial Sequence
  Description of Artificial Sequence: Synthetic oligonucleotide
  Sense strand starting at position 23 of SEQ ID NO: 1885399
gcagauggaccauguuuaa

SEQ ID NO: 2339217 - RNA, 19 nt, Artificial Sequence
  Description of Artificial Sequence: Synthetic oligonucleotide
  Antisense strand to SEQ ID NO: 2339216
uuaaacaugguccaucugc

SEQ ID NO: 2339218 - RNA, 19 nt, Artificial Sequence
  Description of Artificial Sequence: Synthetic oligonucleotide
  Sense strand starting at position 26 of SEQ ID NO: 1885399
gauggaccauguuuaaucu

SEQ ID NO: 2339219 - RNA, 19 nt, Artificial Sequence
  Description of Artificial Sequence: Synthetic oligonucleotide
  Antisense strand to SEQ ID NO: 2339218
agauuaaacaugguccauc

SEQ ID NO: 2339220 - RNA, 19 nt, Artificial Sequence
  Description of Artificial Sequence: Synthetic oligonucleotide
  Sense strand starting at position 160 of SEQ ID NO: 1885399
gagcauaggcuauaccaua

SEQ ID NO: 2339221 - RNA, 19 nt, Artificial Sequence
  Description of Artificial Sequence: Synthetic oligonucleotide
  Antisense strand to SEQ ID NO: 2339220
uaugguauagccuaugcuc

SEQ ID NO: 2339222 - RNA, 19 nt, Artificial Sequence
  Description of Artificial Sequence: Synthetic oligonucleotide
  Sense strand starting at position 171 of SEQ ID NO: 1885399
auaccauauguagguauau

SEQ ID NO: 2339223 - RNA, 19 nt, Artificial Sequence
  Description of Artificial Sequence: Synthetic oligonucleotide
  Antisense strand to SEQ ID NO: 2339222
auauaccuacauaugguau

SEQ ID NO: 2339224 - RNA, 19 nt, Artificial Sequence
  Description of Artificial Sequence: Synthetic oligonucleotide
  Sense strand starting at position 192 of SEQ ID NO: 1885399
aggcuauaccauugaaccu

SEQ ID NO: 2339225 - RNA, 19 nt, Artificial Sequence
  Description of Artificial Sequence: Synthetic oligonucleotide
  Antisense strand to SEQ ID NO: 2339224
agguucaaugguauagccu

SEQ ID NO: 2339226 - RNA, 19 nt, Artificial Sequence
  Description of Artificial Sequence: Synthetic oligonucleotide
  Sense strand starting at position 204 of SEQ ID NO: 1885399
ugaaccuaggugugugaua

SEQ ID NO: 2339227 - RNA, 19 nt, Artificial Sequence
  Description of Artificial Sequence: Synthetic oligonucleotide
  Antisense strand to SEQ ID NO: 2339226
uaucacacaccuagguuca

SEQ ID NO: 2339228 - RNA, 19 nt, Artificial Sequence
  Description of Artificial Sequence: Synthetic oligonucleotide
  Sense strand starting at position 255 of SEQ ID NO: 1885399
auguuugcacgugaagaaa

SEQ ID NO: 2339229 - RNA, 19 nt, Artificial Sequence
  Description of Artificial Sequence: Synthetic oligonucleotide
  Antisense strand to SEQ ID NO: 2339228
uuucuucacgugcaaacau

SEQ ID NO: 2339230 - RNA, 19 nt, Artificial Sequence
  Description of Artificial Sequence: Synthetic oligonucleotide
  Sense strand starting at position 263 of SEQ ID NO: 1885399
acgugaagaaauugccuaa

SEQ ID NO: 2339231 - RNA, 19 nt, Artificial Sequence
  Description of Artificial Sequence: Synthetic oligonucleotide
  Antisense strand to SEQ ID NO: 2339230
uuaggcaauuucuucacgu

SEQ ID NO: 2339232 - RNA, 19 nt, Artificial Sequence
  Description of Artificial Sequence: Synthetic oligonucleotide
  Sense strand starting at position 436 of SEQ ID NO: 1885399
uagaaacuguaguuugagu

SEQ ID NO: 2339233 - RNA, 19 nt, Artificial Sequence
  Description of Artificial Sequence: Synthetic oligonucleotide
  Antisense strand to SEQ ID NO: 2339232
acucaaacuacaguuucua

SEQ ID NO: 2339234 - RNA, 19 nt, Artificial Sequence
  Description of Artificial Sequence: Synthetic oligonucleotide
  Sense strand starting at position 489 of SEQ ID NO: 1885399
augagauaguaaguacuuu

SEQ ID NO: 2339235 - RNA, 19 nt, Artificial Sequence
  Description of Artificial Sequence: Synthetic oligonucleotide
  Antisense strand to SEQ ID NO: 2339234
aaaguacuuacuaucucau

SEQ ID NO: 2339236 - RNA, 19 nt, Artificial Sequence
  Description of Artificial Sequence: Synthetic oligonucleotide
  Sense strand starting at position 650 of SEQ ID NO: 1885399
ucaaauuauggugguuuau

SEQ ID NO: 2339237 - RNA, 19 nt, Artificial Sequence
  Description of Artificial Sequence: Synthetic oligonucleotide
  Antisense strand to SEQ ID NO: 2339236
auaaaccaccauaauuuga

SEQ ID NO: 2339238 - RNA, 19 nt, Artificial Sequence
  Description of Artificial Sequence: Synthetic oligonucleotide
  Sense strand starting at position 769 of SEQ ID NO: 1885399
uggagaauugcaugaugca

SEQ ID NO: 2339239 - RNA, 19 nt, Artificial Sequence
  Description of Artificial Sequence: Synthetic oligonucleotide
  Antisense strand to SEQ ID NO: 2339238
ugcaucaugcaauucucca

SEQ ID NO: 2339240 - RNA, 19 nt, Artificial Sequence
  Description of Artificial Sequence: Synthetic oligonucleotide
  Sense strand starting at position 770 of SEQ ID NO: 1885399
ggagaauugcaugaugcau

SEQ ID NO: 2339241 - RNA, 19 nt, Artificial Sequence
  Description of Artificial Sequence: Synthetic oligonucleotide
  Antisense strand to SEQ ID NO: 2339240
augcaucaugcaauucucc

SEQ ID NO: 2339242 - RNA, 19 nt, Artificial Sequence
  Description of Artificial Sequence: Synthetic oligonucleotide
  Sense strand starting at position 776 of SEQ ID NO: 1885399
uugcaugaugcauagaaug

SEQ ID NO: 2339243 - RNA, 19 nt, Artificial Sequence
  Description of Artificial Sequence: Synthetic oligonucleotide
  Antisense strand to SEQ ID NO: 2339242
cauucuaugcaucaugcaa

SEQ ID NO: 2339244 - RNA, 19 nt, Artificial Sequence
  Description of Artificial Sequence: Synthetic oligonucleotide
  Sense strand starting at position 778 of SEQ ID NO: 1885399
gcaugaugcauagaaugcu

SEQ ID NO: 2339245 - RNA, 19 nt, Artificial Sequence
  Description of Artificial Sequence: Synthetic oligonucleotide
  Antisense strand to SEQ ID NO: 2339244
agcauucuaugcaucaugc

SEQ ID NO: 2339246 - RNA, 19 nt, Artificial Sequence
  Description of Artificial Sequence: Synthetic oligonucleotide
  Sense strand starting at position 853 of SEQ ID NO: 1885399
caccgcagcuauuuguuaa

SEQ ID NO: 2339247 - RNA, 19 nt, Artificial Sequence
  Description of Artificial Sequence: Synthetic oligonucleotide
  Antisense strand to SEQ ID NO: 2339246
uuaacaaauagcugcggug

SEQ ID NO: 2339248 - RNA, 19 nt, Artificial Sequence
  Description of Artificial Sequence: Synthetic oligonucleotide
  Sense strand starting at position 889 of SEQ ID NO: 1885399
guccuuacugguugaaaca

SEQ ID NO: 2339249 - RNA, 19 nt, Artificial Sequence
  Description of Artificial Sequence: Synthetic oligonucleotide
  Antisense strand to SEQ ID NO: 2339248
uguuucaaccaguaaggac

SEQ ID NO: 2339250 - RNA, 19 nt, Artificial Sequence
  Description of Artificial Sequence: Synthetic oligonucleotide
  Sense strand starting at position 890 of SEQ ID NO: 1885399
uccuuacugguugaaacau

SEQ ID NO: 2339251 - RNA, 19 nt, Artificial Sequence
  Description of Artificial Sequence: Synthetic oligonucleotide
  Antisense strand to SEQ ID NO: 2339250
auguuucaaccaguaagga

SEQ ID NO: 2339252 - RNA, 19 nt, Artificial Sequence
  Description of Artificial Sequence: Synthetic oligonucleotide
  Sense strand starting at position 1001 of SEQ ID NO: 1885399
agugaccaaucauuaguuu

SEQ ID NO: 2339253 - RNA, 19 nt, Artificial Sequence
  Description of Artificial Sequence: Synthetic oligonucleotide
  Antisense strand to SEQ ID NO: 2339252
aaacuaaugauuggucacu

SEQ ID NO: 2339254 - RNA, 19 nt, Artificial Sequence
  Description of Artificial Sequence: Synthetic oligonucleotide
  Sense strand starting at position 1181 of SEQ ID NO: 1885399
gcaaguacucuaggaaaua

SEQ ID NO: 2339255 - RNA, 19 nt, Artificial Sequence
  Description of Artificial Sequence: Synthetic oligonucleotide
  Antisense strand to SEQ ID NO: 2339254
uauuuccuagaguacuugc

SEQ ID NO: 2339256 - RNA, 19 nt, Artificial Sequence
  Description of Artificial Sequence: Synthetic oligonucleotide
  Sense strand starting at position 1255 of SEQ ID NO: 1885399
agagguauuagcuagaagu

SEQ ID NO: 2339257 - RNA, 19 nt, Artificial Sequence
  Description of Artificial Sequence: Synthetic oligonucleotide
  Antisense strand to SEQ ID NO: 2339256
acuucuagcuaauaccucu

SEQ ID NO: 2339258 - RNA, 19 nt, Artificial Sequence
  Description of Artificial Sequence: Synthetic oligonucleotide
  Sense strand starting at position 1265 of SEQ ID NO: 1885399
gcuagaagugcccaaucaa

SEQ ID NO: 2339259 - RNA, 19 nt, Artificial Sequence
  Description of Artificial Sequence: Synthetic oligonucleotide
  Antisense strand to SEQ ID NO: 2339258
uugauugggcacuucuagc

SEQ ID NO: 2339260 - RNA, 19 nt, Artificial Sequence
  Description of Artificial Sequence: Synthetic oligonucleotide
  Sense strand starting at position 1499 of SEQ ID NO: 1885399
gaggguuagcccuaacaca

SEQ ID NO: 2339261 - RNA, 19 nt, Artificial Sequence
  Description of Artificial Sequence: Synthetic oligonucleotide
  Antisense strand to SEQ ID NO: 2339260
uguguuagggcuaacccuc

SEQ ID NO: 2339262 - RNA, 19 nt, Artificial Sequence
  Description of Artificial Sequence: Synthetic oligonucleotide
  Sense strand starting at position 1757 of SEQ ID NO: 1885399
gcugaaaugagucaguucu

SEQ ID NO: 2339263 - RNA, 19 nt, Artificial Sequence
  Description of Artificial Sequence: Synthetic oligonucleotide
  Antisense strand to SEQ ID NO: 2339262
agaacugacucauuucagc

SEQ ID NO: 2339264 - RNA, 19 nt, Artificial Sequence
  Description of Artificial Sequence: Synthetic oligonucleotide
  Sense strand starting at position 1759 of SEQ ID NO: 1885399
ugaaaugagucaguucuca

SEQ ID NO: 2339265 - RNA, 19 nt, Artificial Sequence
  Description of Artificial Sequence: Synthetic oligonucleotide
  Antisense strand to SEQ ID NO: 2339264
ugagaacugacucauuuca

SEQ ID NO: 2339266 - RNA, 19 nt, Artificial Sequence
  Description of Artificial Sequence: Synthetic oligonucleotide
  Sense strand starting at position 2442 of SEQ ID NO: 1885399
cugacucagcucgauaaag

SEQ ID NO: 2339267 - RNA, 19 nt, Artificial Sequence
  Description of Artificial Sequence: Synthetic oligonucleotide
  Antisense strand to SEQ ID NO: 2339266
cuuuaucgagcugagucag

SEQ ID NO: 2339268 - RNA, 19 nt, Artificial Sequence
  Description of Artificial Sequence: Synthetic oligonucleotide
  Sense strand starting at position 2672 of SEQ ID NO: 1885399
aacauucuggcagguauua

SEQ ID NO: 2339269 - RNA, 19 nt, Artificial Sequence
  Description of Artificial Sequence: Synthetic oligonucleotide
  Antisense strand to SEQ ID NO: 2339268
uaauaccugccagaauguu

SEQ ID NO: 2339270 - RNA, 19 nt, Artificial Sequence
  Description of Artificial Sequence: Synthetic oligonucleotide
  Sense strand starting at position 2733 of SEQ ID NO: 1885399
ugcugugauuaucuaggga

SEQ ID NO: 2339271 - RNA, 19 nt, Artificial Sequence
  Description of Artificial Sequence: Synthetic oligonucleotide
  Antisense strand to SEQ ID NO: 2339270
ucccuagauaaucacagca

SEQ ID NO: 2339272 - RNA, 19 nt, Artificial Sequence
  Description of Artificial Sequence: Synthetic oligonucleotide
  Sense strand starting at position 2868 of SEQ ID NO: 1885399
agaugagugucacuaaaga

SEQ ID NO: 2339273 - RNA, 19 nt, Artificial Sequence
  Description of Artificial Sequence: Synthetic oligonucleotide
  Antisense strand to SEQ ID NO: 2339272
ucuuuagugacacucaucu

SEQ ID NO: 2339274 - RNA, 19 nt, Artificial Sequence
  Description of Artificial Sequence: Synthetic oligonucleotide
  Sense strand starting at position 3100 of SEQ ID NO: 1885399
guuucaucagaggguaaga

SEQ ID NO: 2339275 - RNA, 19 nt, Artificial Sequence
  Description of Artificial Sequence: Synthetic oligonucleotide
  Antisense strand to SEQ ID NO: 2339274
ucuuacccucugaugaaac

SEQ ID NO: 2339276 - RNA, 19 nt, Artificial Sequence
  Description of Artificial Sequence: Synthetic oligonucleotide
  Sense strand starting at position 3182 of SEQ ID NO: 1885399
cugcgaaugcgcccucauu

SEQ ID NO: 2339277 - RNA, 19 nt, Artificial Sequence
  Description of Artificial Sequence: Synthetic oligonucleotide
  Antisense strand to SEQ ID NO: 2339276
aaugagggcgcauucgcag

SEQ ID NO: 2339278 - RNA, 19 nt, Artificial Sequence
  Description of Artificial Sequence: Synthetic oligonucleotide
  Sense strand starting at position 3546 of SEQ ID NO: 1885399
uauggagucugagcaaacu

SEQ ID NO: 2339279 - RNA, 19 nt, Artificial Sequence
  Description of Artificial Sequence: Synthetic oligonucleotide
  Antisense strand to SEQ ID NO: 2339278
aguuugcucagacuccaua

SEQ ID NO: 2339280 - RNA, 19 nt, Artificial Sequence
  Description of Artificial Sequence: Synthetic oligonucleotide
  Sense strand starting at position 3570 of SEQ ID NO: 1885399
ggagaaaguguguggagaa

SEQ ID NO: 2339281 - RNA, 19 nt, Artificial Sequence
  Description of Artificial Sequence: Synthetic oligonucleotide
  Antisense strand to SEQ ID NO: 2339280
uucuccacacacuuucucc

SEQ ID NO: 2339282 - RNA, 19 nt, Artificial Sequence
  Description of Artificial Sequence: Synthetic oligonucleotide
  Sense strand starting at position 3637 of SEQ ID NO: 1885399
gguggcacucaguaaggaa

SEQ ID NO: 2339283 - RNA, 19 nt, Artificial Sequence
  Description of Artificial Sequence: Synthetic oligonucleotide
  Antisense strand to SEQ ID NO: 2339282
uuccuuacugagugccacc

SEQ ID NO: 2339284 - RNA, 19 nt, Artificial Sequence
  Description of Artificial Sequence: Synthetic oligonucleotide
  Sense strand starting at position 3645 of SEQ ID NO: 1885399
ucaguaaggaaguguggau

SEQ ID NO: 2339285 - RNA, 19 nt, Artificial Sequence
  Description of Artificial Sequence: Synthetic oligonucleotide
  Antisense strand to SEQ ID NO: 2339284
auccacacuuccuuacuga

SEQ ID NO: 2339286 - RNA, 19 nt, Artificial Sequence
  Description of Artificial Sequence: Synthetic oligonucleotide
  Sense strand starting at position 3671 of SEQ ID NO: 1885399
cuaggugacacguacauaa

SEQ ID NO: 2339287 - RNA, 19 nt, Artificial Sequence
  Description of Artificial Sequence: Synthetic oligonucleotide
  Antisense strand to SEQ ID NO: 2339286
uuauguacgugucaccuag

SEQ ID NO: 2339288 - RNA, 19 nt, Artificial Sequence
  Description of Artificial Sequence: Synthetic oligonucleotide
  Sense strand starting at position 3702 of SEQ ID NO: 1885399
agacgugugagaggaaaua

SEQ ID NO: 2339289 - RNA, 19 nt, Artificial Sequence
  Description of Artificial Sequence: Synthetic oligonucleotide
  Antisense strand to SEQ ID NO: 2339288
uauuuccucucacacgucu

SEQ ID NO: 2339290 - RNA, 19 nt, Artificial Sequence
  Description of Artificial Sequence: Synthetic oligonucleotide
  Sense strand starting at position 3766 of SEQ ID NO: 1885399
agcucagugccuuacagaa

SEQ ID NO: 2339291 - RNA, 19 nt, Artificial Sequence
  Description of Artificial Sequence: Synthetic oligonucleotide
  Antisense strand to SEQ ID NO: 2339290
uucuguaaggcacugagcu

SEQ ID NO: 2339292 - RNA, 19 nt, Artificial Sequence
  Description of Artificial Sequence: Synthetic oligonucleotide
  Sense strand starting at position 3920 of SEQ ID NO: 1885399
cugagcaucucaucaugga

SEQ ID NO: 2339293 - RNA, 19 nt, Artificial Sequence
  Description of Artificial Sequence: Synthetic oligonucleotide
  Antisense strand to SEQ ID NO: 2339292
uccaugaugagaugcucag

SEQ ID NO: 2339294 - RNA, 19 nt, Artificial Sequence
  Description of Artificial Sequence: Synthetic oligonucleotide
  Sense strand starting at position 3954 of SEQ ID NO: 1885399
augguuugcaaaggaauga

SEQ ID NO: 2339295 - RNA, 19 nt, Artificial Sequence
  Description of Artificial Sequence: Synthetic oligonucleotide
  Antisense strand to SEQ ID NO: 2339294
ucauuccuuugcaaaccau

SEQ ID NO: 2339296 - RNA, 19 nt, Artificial Sequence
  Description of Artificial Sequence: Synthetic oligonucleotide
  Sense strand starting at position 85 of SEQ ID NO: 1885400
cugcauuggguguaagaaa

SEQ ID NO: 2339297 - RNA, 19 nt, Artificial Sequence
  Description of Artificial Sequence: Synthetic oligonucleotide
  Antisense strand to SEQ ID NO: 2339296
uuucuuacacccaaugcag

SEQ ID NO: 2339298 - RNA, 19 nt, Artificial Sequence
  Description of Artificial Sequence: Synthetic oligonucleotide
  Sense strand starting at position 123 of SEQ ID NO: 1885400
ccaucuauuugagaaacag

SEQ ID NO: 2339299 - RNA, 19 nt, Artificial Sequence
  Description of Artificial Sequence: Synthetic oligonucleotide
  Antisense strand to SEQ ID NO: 2339298
cuguuucucaaauagaugg

SEQ ID NO: 2339300 - RNA, 19 nt, Artificial Sequence
  Description of Artificial Sequence: Synthetic oligonucleotide
  Sense strand starting at position 210 of SEQ ID NO: 1885400
ucguaagugauauaaggau

SEQ ID NO: 2339301 - RNA, 19 nt, Artificial Sequence
  Description of Artificial Sequence: Synthetic oligonucleotide
  Antisense strand to SEQ ID NO: 2339300
auccuuauaucacuuacga

SEQ ID NO: 2339302 - RNA, 19 nt, Artificial Sequence
  Description of Artificial Sequence: Synthetic oligonucleotide
  Sense strand starting at position 260 of SEQ ID NO: 1885400
uuuggucaucgagaggcaa

SEQ ID NO: 2339303 - RNA, 19 nt, Artificial Sequence
  Description of Artificial Sequence: Synthetic oligonucleotide
  Antisense strand to SEQ ID NO: 2339302
uugccucucgaugaccaaa

SEQ ID NO: 2339304 - RNA, 19 nt, Artificial Sequence
  Description of Artificial Sequence: Synthetic oligonucleotide
  Sense strand starting at position 342 of SEQ ID NO: 1885400
uguuuauuggcuuagaaac

SEQ ID NO: 2339305 - RNA, 19 nt, Artificial Sequence
  Description of Artificial Sequence: Synthetic oligonucleotide
  Antisense strand to SEQ ID NO: 2339304
guuucuaagccaauaaaca

SEQ ID NO: 2339306 - RNA, 19 nt, Artificial Sequence
  Description of Artificial Sequence: Synthetic oligonucleotide
  Sense strand starting at position 835 of SEQ ID NO: 1885400
uucuacuugcuagagaaau

SEQ ID NO: 2339307 - RNA, 19 nt, Artificial Sequence
  Description of Artificial Sequence: Synthetic oligonucleotide
  Antisense strand to SEQ ID NO: 2339306
auuucucuagcaaguagaa

SEQ ID NO: 2339308 - RNA, 19 nt, Artificial Sequence
  Description of Artificial Sequence: Synthetic oligonucleotide
  Sense strand starting at position 854 of SEQ ID NO: 1885400
augcuuuaugccgugucau

SEQ ID NO: 2339309 - RNA, 19 nt, Artificial Sequence
  Description of Artificial Sequence: Synthetic oligonucleotide
  Antisense strand to SEQ ID NO: 2339308
augacacggcauaaagcau

SEQ ID NO: 2339310 - RNA, 19 nt, Artificial Sequence
  Description of Artificial Sequence: Synthetic oligonucleotide
  Sense strand starting at position 941 of SEQ ID NO: 1885400
uggaauuauugaguauuac

SEQ ID NO: 2339311 - RNA, 19 nt, Artificial Sequence
  Description of Artificial Sequence: Synthetic oligonucleotide
  Antisense strand to SEQ ID NO: 2339310
guaauacucaauaauucca

SEQ ID NO: 2339312 - RNA, 19 nt, Artificial Sequence
  Description of Artificial Sequence: Synthetic oligonucleotide
  Sense strand starting at position 1025 of SEQ ID NO: 1885400
gagaccucuuucuuugaga

SEQ ID NO: 2339313 - RNA, 19 nt, Artificial Sequence
  Description of Artificial Sequence: Synthetic oligonucleotide
  Antisense strand to SEQ ID NO: 2339312
ucucaaagaaagaggucuc

SEQ ID NO: 2339314 - RNA, 19 nt, Artificial Sequence
  Description of Artificial Sequence: Synthetic oligonucleotide
  Sense strand starting at position 1026 of SEQ ID NO: 1885400
agaccucuuucuuugagag

SEQ ID NO: 2339315 - RNA, 19 nt, Artificial Sequence
  Description of Artificial Sequence: Synthetic oligonucleotide
  Antisense strand to SEQ ID NO: 2339314
cucucaaagaaagaggucu

SEQ ID NO: 2339316 - RNA, 19 nt, Artificial Sequence
  Description of Artificial Sequence: Synthetic oligonucleotide
  Sense strand starting at position 1038 of SEQ ID NO: 1885400
uugagaguugucuggagag

SEQ ID NO: 2339317 - RNA, 19 nt, Artificial Sequence
  Description of Artificial Sequence: Synthetic oligonucleotide
  Antisense strand to SEQ ID NO: 2339316
cucuccagacaacucucaa

SEQ ID NO: 2339318 - RNA, 19 nt, Artificial Sequence
  Description of Artificial Sequence: Synthetic oligonucleotide
  Sense strand starting at position 1040 of SEQ ID NO: 1885400
gagaguugucuggagaguc

SEQ ID NO: 2339319 - RNA, 19 nt, Artificial Sequence
  Description of Artificial Sequence: Synthetic oligonucleotide
  Antisense strand to SEQ ID NO: 2339318
gacucuccagacaacucuc

SEQ ID NO: 2339320 - RNA, 19 nt, Artificial Sequence
  Description of Artificial Sequence: Synthetic oligonucleotide
  Sense strand starting at position 1121 of SEQ ID NO: 1885400
gagcuagugccuguagucu

SEQ ID NO: 2339321 - RNA, 19 nt, Artificial Sequence
  Description of Artificial Sequence: Synthetic oligonucleotide
  Antisense strand to SEQ ID NO: 2339320
agacuacaggcacuagcuc

SEQ ID NO: 2339322 - RNA, 19 nt, Artificial Sequence
  Description of Artificial Sequence: Synthetic oligonucleotide
  Sense strand starting at position 1320 of SEQ ID NO: 1885400
guggaaauacucuguagga

SEQ ID NO: 2339323 - RNA, 19 nt, Artificial Sequence
  Description of Artificial Sequence: Synthetic oligonucleotide
  Antisense strand to SEQ ID NO: 2339322
uccuacagaguauuuccac

SEQ ID NO: 2339324 - RNA, 19 nt, Artificial Sequence
  Description of Artificial Sequence: Synthetic oligonucleotide
  Sense strand starting at position 1321 of SEQ ID NO: 1885400
uggaaauacucuguaggau

SEQ ID NO: 2339325 - RNA, 19 nt, Artificial Sequence
  Description of Artificial Sequence: Synthetic oligonucleotide
  Antisense strand to SEQ ID NO: 2339324
auccuacagaguauuucca

SEQ ID NO: 2339326 - RNA, 19 nt, Artificial Sequence
  Description of Artificial Sequence: Synthetic oligonucleotide
  Sense strand starting at position 1374 of SEQ ID NO: 1885400
uucuaacucgaggaguaua

SEQ ID NO: 2339327 - RNA, 19 nt, Artificial Sequence
  Description of Artificial Sequence: Synthetic oligonucleotide
  Antisense strand to SEQ ID NO: 2339326
uauacuccucgaguuagaa

SEQ ID NO: 2339328 - RNA, 19 nt, Artificial Sequence
  Description of Artificial Sequence: Synthetic oligonucleotide
  Sense strand starting at position 1400 of SEQ ID NO: 1885400
cugagugaacccugaggua

SEQ ID NO: 2339329 - RNA, 19 nt, Artificial Sequence
  Description of Artificial Sequence: Synthetic oligonucleotide
  Antisense strand to SEQ ID NO: 2339328
uaccucaggguucacucag

SEQ ID NO: 2339330 - RNA, 19 nt, Artificial Sequence
  Description of Artificial Sequence: Synthetic oligonucleotide
  Sense strand starting at position 1535 of SEQ ID NO: 1885400
guguauaugggauaucucu

SEQ ID NO: 2339331 - RNA, 19 nt, Artificial Sequence
  Description of Artificial Sequence: Synthetic oligonucleotide
  Antisense strand to SEQ ID NO: 2339330
agagauaucccauauacac

SEQ ID NO: 2339332 - RNA, 19 nt, Artificial Sequence
  Description of Artificial Sequence: Synthetic oligonucleotide
  Sense strand starting at position 1541 of SEQ ID NO: 1885400
augggauaucucuguaacu

SEQ ID NO: 2339333 - RNA, 19 nt, Artificial Sequence
  Description of Artificial Sequence: Synthetic oligonucleotide
  Antisense strand to SEQ ID NO: 2339332
aguuacagagauaucccau

SEQ ID NO: 2339334 - RNA, 19 nt, Artificial Sequence
  Description of Artificial Sequence: Synthetic oligonucleotide
  Sense strand starting at position 1542 of SEQ ID NO: 1885400
ugggauaucucuguaacuu

SEQ ID NO: 2339335 - RNA, 19 nt, Artificial Sequence
  Description of Artificial Sequence: Synthetic oligonucleotide
  Antisense strand to SEQ ID NO: 2339334
aaguuacagagauauccca

SEQ ID NO: 2339336 - RNA, 19 nt, Artificial Sequence
  Description of Artificial Sequence: Synthetic oligonucleotide
  Sense strand starting at position 1543 of SEQ ID NO: 1885400
gggauaucucuguaacuuc

SEQ ID NO: 2339337 - RNA, 19 nt, Artificial Sequence
  Description of Artificial Sequence: Synthetic oligonucleotide
  Antisense strand to SEQ ID NO: 2339336
gaaguuacagagauauccc

SEQ ID NO: 2339338 - RNA, 19 nt, Artificial Sequence
  Description of Artificial Sequence: Synthetic oligonucleotide
  Sense strand starting at position 2362 of SEQ ID NO: 1885400
cagguuauucccggaggaa

SEQ ID NO: 2339339 - RNA, 19 nt, Artificial Sequence
  Description of Artificial Sequence: Synthetic oligonucleotide
  Antisense strand to SEQ ID NO: 2339338
uuccuccgggaauaaccug

SEQ ID NO: 2339340 - RNA, 19 nt, Artificial Sequence
  Description of Artificial Sequence: Synthetic oligonucleotide
  Sense strand starting at position 2623 of SEQ ID NO: 1885400
ucagucacuccugagacau

SEQ ID NO: 2339341 - RNA, 19 nt, Artificial Sequence
  Description of Artificial Sequence: Synthetic oligonucleotide
  Antisense strand to SEQ ID NO: 2339340
augucucaggagugacuga

SEQ ID NO: 2339342 - RNA, 19 nt, Artificial Sequence
  Description of Artificial Sequence: Synthetic oligonucleotide
  Sense strand starting at position 2781 of SEQ ID NO: 1885400
uggguuaggaauuguggaa

SEQ ID NO: 2339343 - RNA, 19 nt, Artificial Sequence
  Description of Artificial Sequence: Synthetic oligonucleotide
  Antisense strand to SEQ ID NO: 2339342
uuccacaauuccuaaccca

SEQ ID NO: 2339344 - RNA, 19 nt, Artificial Sequence
  Description of Artificial Sequence: Synthetic oligonucleotide
  Sense strand starting at position 2785 of SEQ ID NO: 1885400
uuaggaauuguggaacugu

SEQ ID NO: 2339345 - RNA, 19 nt, Artificial Sequence
  Description of Artificial Sequence: Synthetic oligonucleotide
  Antisense strand to SEQ ID NO: 2339344
acaguuccacaauuccuaa

SEQ ID NO: 2339346 - RNA, 19 nt, Artificial Sequence
  Description of Artificial Sequence: Synthetic oligonucleotide
  Sense strand starting at position 3068 of SEQ ID NO: 1885400
uuugguaacuauguugaaa

SEQ ID NO: 2339347 - RNA, 19 nt, Artificial Sequence
  Description of Artificial Sequence: Synthetic oligonucleotide
  Antisense strand to SEQ ID NO: 2339346
uuucaacauaguuaccaaa

SEQ ID NO: 2339348 - RNA, 19 nt, Artificial Sequence
  Description of Artificial Sequence: Synthetic oligonucleotide
  Sense strand starting at position 3174 of SEQ ID NO: 1885400
uguuguaaaccuuaguuaa

SEQ ID NO: 2339349 - RNA, 19 nt, Artificial Sequence
  Description of Artificial Sequence: Synthetic oligonucleotide
  Antisense strand to SEQ ID NO: 2339348
uuaacuaagguuuacaaca

SEQ ID NO: 2339350 - RNA, 19 nt, Artificial Sequence
  Description of Artificial Sequence: Synthetic oligonucleotide
  Sense strand starting at position 3176 of SEQ ID NO: 1885400
uuguaaaccuuaguuaaag

SEQ ID NO: 2339351 - RNA, 19 nt, Artificial Sequence
  Description of Artificial Sequence: Synthetic oligonucleotide
  Antisense strand to SEQ ID NO: 2339350
cuuuaacuaagguuuacaa

SEQ ID NO: 2339352 - RNA, 19 nt, Artificial Sequence
  Description of Artificial Sequence: Synthetic oligonucleotide
  Sense strand starting at position 3177 of SEQ ID NO: 1885400
uguaaaccuuaguuaaaga

SEQ ID NO: 2339353 - RNA, 19 nt, Artificial Sequence
  Description of Artificial Sequence: Synthetic oligonucleotide
  Antisense strand to SEQ ID NO: 2339352
ucuuuaacuaagguuuaca

SEQ ID NO: 2339354 - RNA, 19 nt, Artificial Sequence
  Description of Artificial Sequence: Synthetic oligonucleotide
  Sense strand starting at position 3296 of SEQ ID NO: 1885400
aauacauagcacuggugau

SEQ ID NO: 2339355 - RNA, 19 nt, Artificial Sequence
  Description of Artificial Sequence: Synthetic oligonucleotide
  Antisense strand to SEQ ID NO: 2339354
aucaccagugcuauguauu

SEQ ID NO: 2339356 - RNA, 19 nt, Artificial Sequence
  Description of Artificial Sequence: Synthetic oligonucleotide
  Sense strand starting at position 3386 of SEQ ID NO: 1885400
gcacauguaagacagguua

SEQ ID NO: 2339357 - RNA, 19 nt, Artificial Sequence
  Description of Artificial Sequence: Synthetic oligonucleotide
  Antisense strand to SEQ ID NO: 2339356
uaaccugucuuacaugugc

SEQ ID NO: 2339358 - RNA, 19 nt, Artificial Sequence
  Description of Artificial Sequence: Synthetic oligonucleotide
  Sense strand starting at position 3616 of SEQ ID NO: 1885400
uguuucucccaguauggaa

SEQ ID NO: 2339359 - RNA, 19 nt, Artificial Sequence
  Description of Artificial Sequence: Synthetic oligonucleotide
  Antisense strand to SEQ ID NO: 2339358
uuccauacugggagaaaca

SEQ ID NO: 2339360 - RNA, 19 nt, Artificial Sequence
  Description of Artificial Sequence: Synthetic oligonucleotide
  Sense strand starting at position 3678 of SEQ ID NO: 1885400
aaggcauuucuagguuugu

SEQ ID NO: 2339361 - RNA, 19 nt, Artificial Sequence
  Description of Artificial Sequence: Synthetic oligonucleotide
  Antisense strand to SEQ ID NO: 2339360
acaaaccuagaaaugccuu

SEQ ID NO: 2339362 - RNA, 19 nt, Artificial Sequence
  Description of Artificial Sequence: Synthetic oligonucleotide
  Sense strand starting at position 3679 of SEQ ID NO: 1885400
aggcauuucuagguuugua

SEQ ID NO: 2339363 - RNA, 19 nt, Artificial Sequence
  Description of Artificial Sequence: Synthetic oligonucleotide
  Antisense strand to SEQ ID NO: 2339362
uacaaaccuagaaaugccu

SEQ ID NO: 2339364 - RNA, 19 nt, Artificial Sequence
  Description of Artificial Sequence: Synthetic oligonucleotide
  Sense strand starting at position 3729 of SEQ ID NO: 1885400
ugaauaauaucagcaguga

SEQ ID NO: 2339365 - RNA, 19 nt, Artificial Sequence
  Description of Artificial Sequence: Synthetic oligonucleotide
  Antisense strand to SEQ ID NO: 2339364
ucacugcugauauuauuca

SEQ ID NO: 2339366 - RNA, 19 nt, Artificial Sequence
  Description of Artificial Sequence: Synthetic oligonucleotide
  Sense strand starting at position 3910 of SEQ ID NO: 1885400
cuacauagacuuugaaugu

SEQ ID NO: 2339367 - RNA, 19 nt, Artificial Sequence
  Description of Artificial Sequence: Synthetic oligonucleotide
  Antisense strand to SEQ ID NO: 2339366
acauucaaagucuauguag

SEQ ID NO: 2339368 - RNA, 19 nt, Artificial Sequence
  Description of Artificial Sequence: Synthetic oligonucleotide
  Sense strand starting at position 3917 of SEQ ID NO: 1885400
gacuuugaauguuccuuga

SEQ ID NO: 2339369 - RNA, 19 nt, Artificial Sequence
  Description of Artificial Sequence: Synthetic oligonucleotide
  Antisense strand to SEQ ID NO: 2339368
ucaaggaacauucaaaguc

SEQ ID NO: 2339370 - RNA, 19 nt, Artificial Sequence
  Description of Artificial Sequence: Synthetic oligonucleotide
  Sense strand starting at position 3919 of SEQ ID NO: 1885400
cuuugaauguuccuugaga

SEQ ID NO: 2339371 - RNA, 19 nt, Artificial Sequence
  Description of Artificial Sequence: Synthetic oligonucleotide
  Antisense strand to SEQ ID NO: 2339370
ucucaaggaacauucaaag

SEQ ID NO: 2339372 - RNA, 19 nt, Artificial Sequence
  Description of Artificial Sequence: Synthetic oligonucleotide
  Sense strand starting at position 3920 of SEQ ID NO: 1885400
uuugaauguuccuugagaa

SEQ ID NO: 2339373 - RNA, 19 nt, Artificial Sequence
  Description of Artificial Sequence: Synthetic oligonucleotide
  Antisense strand to SEQ ID NO: 2339372
uucucaaggaacauucaaa

SEQ ID NO: 2339374 - RNA, 19 nt, Artificial Sequence
  Description of Artificial Sequence: Synthetic oligonucleotide
  Sense strand starting at position 3921 of SEQ ID NO: 1885400
uugaauguuccuugagaac

SEQ ID NO: 2339375 - RNA, 19 nt, Artificial Sequence
  Description of Artificial Sequence: Synthetic oligonucleotide
  Antisense strand to SEQ ID NO: 2339374
guucucaaggaacauucaa

SEQ ID NO: 2339376 - RNA, 19 nt, Artificial Sequence
  Description of Artificial Sequence: Synthetic oligonucleotide
  Sense strand starting at position 400 of SEQ ID NO: 1885401
cuacuauagugaccuguaa

SEQ ID NO: 2339377 - RNA, 19 nt, Artificial Sequence
  Description of Artificial Sequence: Synthetic oligonucleotide
  Antisense strand to SEQ ID NO: 2339376
uuacaggucacuauaguag

SEQ ID NO: 2339378 - RNA, 19 nt, Artificial Sequence
  Description of Artificial Sequence: Synthetic oligonucleotide
  Sense strand starting at position 429 of SEQ ID NO: 1885401
uuguauuacuguuuaucac

SEQ ID NO: 2339379 - RNA, 19 nt, Artificial Sequence
  Description of Artificial Sequence: Synthetic oligonucleotide
  Antisense strand to SEQ ID NO: 2339378
gugauaaacaguaauacaa

SEQ ID NO: 2339380 - RNA, 19 nt, Artificial Sequence
  Description of Artificial Sequence: Synthetic oligonucleotide
  Sense strand starting at position 501 of SEQ ID NO: 1885401
acacauugucuucgaaaca

SEQ ID NO: 2339381 - RNA, 19 nt, Artificial Sequence
  Description of Artificial Sequence: Synthetic oligonucleotide
  Antisense strand to SEQ ID NO: 2339380
uguuucgaagacaaugugu

SEQ ID NO: 2339382 - RNA, 19 nt, Artificial Sequence
  Description of Artificial Sequence: Synthetic oligonucleotide
  Sense strand starting at position 550 of SEQ ID NO: 1885401
aguguauauagaugugaaa

SEQ ID NO: 2339383 - RNA, 19 nt, Artificial Sequence
  Description of Artificial Sequence: Synthetic oligonucleotide
  Antisense strand to SEQ ID NO: 2339382
uuucacaucuauauacacu

SEQ ID NO: 2339384 - RNA, 19 nt, Artificial Sequence
  Description of Artificial Sequence: Synthetic oligonucleotide
  Sense strand starting at position 552 of SEQ ID NO: 1885401
uguauauagaugugaaaga

SEQ ID NO: 2339385 - RNA, 19 nt, Artificial Sequence
  Description of Artificial Sequence: Synthetic oligonucleotide
  Antisense strand to SEQ ID NO: 2339384
ucuuucacaucuauauaca

SEQ ID NO: 2339386 - RNA, 19 nt, Artificial Sequence
  Description of Artificial Sequence: Synthetic oligonucleotide
  Sense strand starting at position 598 of SEQ ID NO: 1885401
ccugguauuacacgguuua

SEQ ID NO: 2339387 - RNA, 19 nt, Artificial Sequence
  Description of Artificial Sequence: Synthetic oligonucleotide
  Antisense strand to SEQ ID NO: 2339386
uaaaccguguaauaccagg

SEQ ID NO: 2339388 - RNA, 19 nt, Artificial Sequence
  Description of Artificial Sequence: Synthetic oligonucleotide
  Sense strand starting at position 599 of SEQ ID NO: 1885401
cugguauuacacgguuuaa

SEQ ID NO: 2339389 - RNA, 19 nt, Artificial Sequence
  Description of Artificial Sequence: Synthetic oligonucleotide
  Antisense strand to SEQ ID NO: 2339388
uuaaaccguguaauaccag

SEQ ID NO: 2339390 - RNA, 19 nt, Artificial Sequence
  Description of Artificial Sequence: Synthetic oligonucleotide
  Sense strand starting at position 636 of SEQ ID NO: 1885401
ccaugaucuuauucuucgu

SEQ ID NO: 2339391 - RNA, 19 nt, Artificial Sequence
  Description of Artificial Sequence: Synthetic oligonucleotide
  Antisense strand to SEQ ID NO: 2339390
acgaagaauaagaucaugg

SEQ ID NO: 2339392 - RNA, 19 nt, Artificial Sequence
  Description of Artificial Sequence: Synthetic oligonucleotide
  Sense strand starting at position 663 of SEQ ID NO: 1885401
ggcuuuauucuaugcaaug

SEQ ID NO: 2339393 - RNA, 19 nt, Artificial Sequence
  Description of Artificial Sequence: Synthetic oligonucleotide
  Antisense strand to SEQ ID NO: 2339392
cauugcauagaauaaagcc

SEQ ID NO: 2339394 - RNA, 19 nt, Artificial Sequence
  Description of Artificial Sequence: Synthetic oligonucleotide
  Sense strand starting at position 669 of SEQ ID NO: 1885401
auucuaugcaauggagagu

SEQ ID NO: 2339395 - RNA, 19 nt, Artificial Sequence
  Description of Artificial Sequence: Synthetic oligonucleotide
  Antisense strand to SEQ ID NO: 2339394
acucuccauugcauagaau

SEQ ID NO: 2339396 - RNA, 19 nt, Artificial Sequence
  Description of Artificial Sequence: Synthetic oligonucleotide
  Sense strand starting at position 707 of SEQ ID NO: 1885401
ccagacuucuuagcugaaa

SEQ ID NO: 2339397 - RNA, 19 nt, Artificial Sequence
  Description of Artificial Sequence: Synthetic oligonucleotide
  Antisense strand to SEQ ID NO: 2339396
uuucagcuaagaagucugg

SEQ ID NO: 2339398 - RNA, 19 nt, Artificial Sequence
  Description of Artificial Sequence: Synthetic oligonucleotide
  Sense strand starting at position 746 of SEQ ID NO: 1885401
cccacauuugccuguuacu

SEQ ID NO: 2339399 - RNA, 19 nt, Artificial Sequence
  Description of Artificial Sequence: Synthetic oligonucleotide
  Antisense strand to SEQ ID NO: 2339398
aguaacaggcaaauguggg

SEQ ID NO: 2339400 - RNA, 19 nt, Artificial Sequence
  Description of Artificial Sequence: Synthetic oligonucleotide
  Sense strand starting at position 796 of SEQ ID NO: 1885401
cugaauacacucuggacau

SEQ ID NO: 2339401 - RNA, 19 nt, Artificial Sequence
  Description of Artificial Sequence: Synthetic oligonucleotide
  Antisense strand to SEQ ID NO: 2339400
auguccagaguguauucag

SEQ ID NO: 2339402 - RNA, 19 nt, Artificial Sequence
  Description of Artificial Sequence: Synthetic oligonucleotide
  Sense strand starting at position 925 of SEQ ID NO: 1885401
ucagaaaggucccugaaac

SEQ ID NO: 2339403 - RNA, 19 nt, Artificial Sequence
  Description of Artificial Sequence: Synthetic oligonucleotide
  Antisense strand to SEQ ID NO: 2339402
guuucagggaccuuucuga

SEQ ID NO: 2339404 - RNA, 19 nt, Artificial Sequence
  Description of Artificial Sequence: Synthetic oligonucleotide
  Sense strand starting at position 926 of SEQ ID NO: 1885401
cagaaaggucccugaaacc

SEQ ID NO: 2339405 - RNA, 19 nt, Artificial Sequence
  Description of Artificial Sequence: Synthetic oligonucleotide
  Antisense strand to SEQ ID NO: 2339404
gguuucagggaccuuucug

SEQ ID NO: 2339406 - RNA, 19 nt, Artificial Sequence
  Description of Artificial Sequence: Synthetic oligonucleotide
  Sense strand starting at position 957 of SEQ ID NO: 1885401
guauaaguaaugcgagaaa

SEQ ID NO: 2339407 - RNA, 19 nt, Artificial Sequence
  Description of Artificial Sequence: Synthetic oligonucleotide
  Antisense strand to SEQ ID NO: 2339406
uuucucgcauuacuuauac

SEQ ID NO: 2339408 - RNA, 19 nt, Artificial Sequence
  Description of Artificial Sequence: Synthetic oligonucleotide
  Sense strand starting at position 960 of SEQ ID NO: 1885401
uaaguaaugcgagaaaucu

SEQ ID NO: 2339409 - RNA, 19 nt, Artificial Sequence
  Description of Artificial Sequence: Synthetic oligonucleotide
  Antisense strand to SEQ ID NO: 2339408
agauuucucgcauuacuua

SEQ ID NO: 2339410 - RNA, 19 nt, Artificial Sequence
  Description of Artificial Sequence: Synthetic oligonucleotide
  Sense strand starting at position 1338 of SEQ ID NO: 1885401
gguucuuuccgggcagcga

SEQ ID NO: 2339411 - RNA, 19 nt, Artificial Sequence
  Description of Artificial Sequence: Synthetic oligonucleotide
  Antisense strand to SEQ ID NO: 2339410
ucgcugcccggaaagaacc

SEQ ID NO: 2339412 - RNA, 19 nt, Artificial Sequence
  Description of Artificial Sequence: Synthetic oligonucleotide
  Sense strand starting at position 1799 of SEQ ID NO: 1885401
gaggcacuguucuuggagu

SEQ ID NO: 2339413 - RNA, 19 nt, Artificial Sequence
  Description of Artificial Sequence: Synthetic oligonucleotide
  Antisense strand to SEQ ID NO: 2339412
acuccaagaacagugccuc

SEQ ID NO: 2339414 - RNA, 19 nt, Artificial Sequence
  Description of Artificial Sequence: Synthetic oligonucleotide
  Sense strand starting at position 1875 of SEQ ID NO: 1885401
ugcuguuaacauugaggga

SEQ ID NO: 2339415 - RNA, 19 nt, Artificial Sequence
  Description of Artificial Sequence: Synthetic oligonucleotide
  Antisense strand to SEQ ID NO: 2339414
ucccucaauguuaacagca

SEQ ID NO: 2339416 - RNA, 19 nt, Artificial Sequence
  Description of Artificial Sequence: Synthetic oligonucleotide
  Sense strand starting at position 1902 of SEQ ID NO: 1885401
ccgacuaacugaguucugu

SEQ ID NO: 2339417 - RNA, 19 nt, Artificial Sequence
  Description of Artificial Sequence: Synthetic oligonucleotide
  Antisense strand to SEQ ID NO: 2339416
acagaacucaguuagucgg

SEQ ID NO: 2339418 - RNA, 19 nt, Artificial Sequence
  Description of Artificial Sequence: Synthetic oligonucleotide
  Sense strand starting at position 1912 of SEQ ID NO: 1885401
gaguucugucugcagguua

SEQ ID NO: 2339419 - RNA, 19 nt, Artificial Sequence
  Description of Artificial Sequence: Synthetic oligonucleotide
  Antisense strand to SEQ ID NO: 2339418
uaaccugcagacagaacuc

SEQ ID NO: 2339420 - RNA, 19 nt, Artificial Sequence
  Description of Artificial Sequence: Synthetic oligonucleotide
  Sense strand starting at position 1931 of SEQ ID NO: 1885401
agugaaagccuauguagau

SEQ ID NO: 2339421 - RNA, 19 nt, Artificial Sequence
  Description of Artificial Sequence: Synthetic oligonucleotide
  Antisense strand to SEQ ID NO: 2339420
aucuacauaggcuuucacu

SEQ ID NO: 2339422 - RNA, 19 nt, Artificial Sequence
  Description of Artificial Sequence: Synthetic oligonucleotide
  Sense strand starting at position 1932 of SEQ ID NO: 1885401
gugaaagccuauguagaua

SEQ ID NO: 2339423 - RNA, 19 nt, Artificial Sequence
  Description of Artificial Sequence: Synthetic oligonucleotide
  Antisense strand to SEQ ID NO: 2339422
uaucuacauaggcuuucac

SEQ ID NO: 2339424 - RNA, 19 nt, Artificial Sequence
  Description of Artificial Sequence: Synthetic oligonucleotide
  Sense strand starting at position 1971 of SEQ ID NO: 1885401
cagugcuagcuagaacuua

SEQ ID NO: 2339425 - RNA, 19 nt, Artificial Sequence
  Description of Artificial Sequence: Synthetic oligonucleotide
  Antisense strand to SEQ ID NO: 2339424
uaaguucuagcuagcacug

SEQ ID NO: 2339426 - RNA, 19 nt, Artificial Sequence
  Description of Artificial Sequence: Synthetic oligonucleotide
  Sense strand starting at position 2040 of SEQ ID NO: 1885401
ucaggauguccacauccua

SEQ ID NO: 2339427 - RNA, 19 nt, Artificial Sequence
  Description of Artificial Sequence: Synthetic oligonucleotide
  Antisense strand to SEQ ID NO: 2339426
uaggauguggacauccuga

SEQ ID NO: 2339428 - RNA, 19 nt, Artificial Sequence
  Description of Artificial Sequence: Synthetic oligonucleotide
  Sense strand starting at position 2128 of SEQ ID NO: 1885401
ugcuuaucagcggacuuua

SEQ ID NO: 2339429 - RNA, 19 nt, Artificial Sequence
  Description of Artificial Sequence: Synthetic oligonucleotide
  Antisense strand to SEQ ID NO: 2339428
uaaaguccgcugauaagca

SEQ ID NO: 2339430 - RNA, 19 nt, Artificial Sequence
  Description of Artificial Sequence: Synthetic oligonucleotide
  Sense strand starting at position 2172 of SEQ ID NO: 1885401
gugcuuggguaauuacaaa

SEQ ID NO: 2339431 - RNA, 19 nt, Artificial Sequence
  Description of Artificial Sequence: Synthetic oligonucleotide
  Antisense strand to SEQ ID NO: 2339430
uuuguaauuacccaagcac

SEQ ID NO: 2339432 - RNA, 19 nt, Artificial Sequence
  Description of Artificial Sequence: Synthetic oligonucleotide
  Sense strand starting at position 2195 of SEQ ID NO: 1885401
uuacaaggguucucuaaag

SEQ ID NO: 2339433 - RNA, 19 nt, Artificial Sequence
  Description of Artificial Sequence: Synthetic oligonucleotide
  Antisense strand to SEQ ID NO: 2339432
cuuuagagaacccuuguaa

SEQ ID NO: 2339434 - RNA, 19 nt, Artificial Sequence
  Description of Artificial Sequence: Synthetic oligonucleotide
  Sense strand starting at position 2421 of SEQ ID NO: 1885401
agacacucgucucuacgaa

SEQ ID NO: 2339435 - RNA, 19 nt, Artificial Sequence
  Description of Artificial Sequence: Synthetic oligonucleotide
  Antisense strand to SEQ ID NO: 2339434
uucguagagacgagugucu

SEQ ID NO: 2339436 - RNA, 19 nt, Artificial Sequence
  Description of Artificial Sequence: Synthetic oligonucleotide
  Sense strand starting at position 2422 of SEQ ID NO: 1885401
gacacucgucucuacgaaa

SEQ ID NO: 2339437 - RNA, 19 nt, Artificial Sequence
  Description of Artificial Sequence: Synthetic oligonucleotide
  Antisense strand to SEQ ID NO: 2339436
uuucguagagacgaguguc

SEQ ID NO: 2339438 - RNA, 19 nt, Artificial Sequence
  Description of Artificial Sequence: Synthetic oligonucleotide
  Sense strand starting at position 2941 of SEQ ID NO: 1885401
ccacuuagguugucacagu

SEQ ID NO: 2339439 - RNA, 19 nt, Artificial Sequence
  Description of Artificial Sequence: Synthetic oligonucleotide
  Antisense strand to SEQ ID NO: 2339438
acugugacaaccuaagugg

SEQ ID NO: 2339440 - RNA, 19 nt, Artificial Sequence
  Description of Artificial Sequence: Synthetic oligonucleotide
  Sense strand starting at position 2951 of SEQ ID NO: 1885401
ugucacaguuuguuacaga

SEQ ID NO: 2339441 - RNA, 19 nt, Artificial Sequence
  Description of Artificial Sequence: Synthetic oligonucleotide
  Antisense strand to SEQ ID NO: 2339440
ucuguaacaaacugugaca

SEQ ID NO: 2339442 - RNA, 19 nt, Artificial Sequence
  Description of Artificial Sequence: Synthetic oligonucleotide
  Sense strand starting at position 2995 of SEQ ID NO: 1885401
guaacuaaaucccucugua

SEQ ID NO: 2339443 - RNA, 19 nt, Artificial Sequence
  Description of Artificial Sequence: Synthetic oligonucleotide
  Antisense strand to SEQ ID NO: 2339442
uacagagggauuuaguuac

SEQ ID NO: 2339444 - RNA, 19 nt, Artificial Sequence
  Description of Artificial Sequence: Synthetic oligonucleotide
  Sense strand starting at position 3077 of SEQ ID NO: 1885401
agcgcugaacguguucauu

SEQ ID NO: 2339445 - RNA, 19 nt, Artificial Sequence
  Description of Artificial Sequence: Synthetic oligonucleotide
  Antisense strand to SEQ ID NO: 2339444
aaugaacacguucagcgcu

SEQ ID NO: 2339446 - RNA, 19 nt, Artificial Sequence
  Description of Artificial Sequence: Synthetic oligonucleotide
  Sense strand starting at position 3301 of SEQ ID NO: 1885401
aagauaaagcguuaucaug

SEQ ID NO: 2339447 - RNA, 19 nt, Artificial Sequence
  Description of Artificial Sequence: Synthetic oligonucleotide
  Antisense strand to SEQ ID NO: 2339446
caugauaacgcuuuaucuu

SEQ ID NO: 2339448 - RNA, 19 nt, Artificial Sequence
  Description of Artificial Sequence: Synthetic oligonucleotide
  Sense strand starting at position 3303 of SEQ ID NO: 1885401
gauaaagcguuaucaugac

SEQ ID NO: 2339449 - RNA, 19 nt, Artificial Sequence
  Description of Artificial Sequence: Synthetic oligonucleotide
  Antisense strand to SEQ ID NO: 2339448
gucaugauaacgcuuuauc

SEQ ID NO: 2339450 - RNA, 19 nt, Artificial Sequence
  Description of Artificial Sequence: Synthetic oligonucleotide
  Sense strand starting at position 3307 of SEQ ID NO: 1885401
aagcguuaucaugacaguu

SEQ ID NO: 2339451 - RNA, 19 nt, Artificial Sequence
  Description of Artificial Sequence: Synthetic oligonucleotide
  Antisense strand to SEQ ID NO: 2339450
aacugucaugauaacgcuu

SEQ ID NO: 2339452 - RNA, 19 nt, Artificial Sequence
  Description of Artificial Sequence: Synthetic oligonucleotide
  Sense strand starting at position 3960 of SEQ ID NO: 1885401
ccaugccuguacucagaau

SEQ ID NO: 2339453 - RNA, 19 nt, Artificial Sequence
  Description of Artificial Sequence: Synthetic oligonucleotide
  Antisense strand to SEQ ID NO: 2339452
auucugaguacaggcaugg

SEQ ID NO: 2339454 - RNA, 19 nt, Artificial Sequence
  Description of Artificial Sequence: Synthetic oligonucleotide
  Sense strand starting at position 3972 of SEQ ID NO: 1885401
ucagaaugcugcucuugag

SEQ ID NO: 2339455 - RNA, 19 nt, Artificial Sequence
  Description of Artificial Sequence: Synthetic oligonucleotide
  Antisense strand to SEQ ID NO: 2339454
cucaagagcagcauucuga

SEQ ID NO: 2339456 - RNA, 19 nt, Artificial Sequence
  Description of Artificial Sequence: Synthetic oligonucleotide
  Sense strand starting at position 6 of SEQ ID NO: 1885402
guuauuuaaucugagaaga

SEQ ID NO: 2339457 - RNA, 19 nt, Artificial Sequence
  Description of Artificial Sequence: Synthetic oligonucleotide
  Antisense strand to SEQ ID NO: 2339456
ucuucucagauuaaauaac

SEQ ID NO: 2339458 - RNA, 19 nt, Artificial Sequence
  Description of Artificial Sequence: Synthetic oligonucleotide
  Sense strand starting at position 771 of SEQ ID NO: 1885402
uucuuaggaucagcuuaaa

SEQ ID NO: 2339459 - RNA, 19 nt, Artificial Sequence
  Description of Artificial Sequence: Synthetic oligonucleotide
  Antisense strand to SEQ ID NO: 2339458
uuuaagcugauccuaagaa

SEQ ID NO: 2339460 - RNA, 19 nt, Artificial Sequence
  Description of Artificial Sequence: Synthetic oligonucleotide
  Sense strand starting at position 788 of SEQ ID NO: 1885402
aaggaaagguaaucuguau

SEQ ID NO: 2339461 - RNA, 19 nt, Artificial Sequence
  Description of Artificial Sequence: Synthetic oligonucleotide
  Antisense strand to SEQ ID NO: 2339460
auacagauuaccuuuccuu

SEQ ID NO: 2339462 - RNA, 19 nt, Artificial Sequence
  Description of Artificial Sequence: Synthetic oligonucleotide
  Sense strand starting at position 792 of SEQ ID NO: 1885402
aaagguaaucuguaucuug

SEQ ID NO: 2339463 - RNA, 19 nt, Artificial Sequence
  Description of Artificial Sequence: Synthetic oligonucleotide
  Antisense strand to SEQ ID NO: 2339462
caagauacagauuaccuuu

SEQ ID NO: 2339464 - RNA, 19 nt, Artificial Sequence
  Description of Artificial Sequence: Synthetic oligonucleotide
  Sense strand starting at position 801 of SEQ ID NO: 1885402
cuguaucuuggcgaagaaa

SEQ ID NO: 2339465 - RNA, 19 nt, Artificial Sequence
  Description of Artificial Sequence: Synthetic oligonucleotide
  Antisense strand to SEQ ID NO: 2339464
uuucuucgccaagauacag

SEQ ID NO: 2339466 - RNA, 19 nt, Artificial Sequence
  Description of Artificial Sequence: Synthetic oligonucleotide
  Sense strand starting at position 919 of SEQ ID NO: 1885402
gcacaauuagcaugauaua

SEQ ID NO: 2339467 - RNA, 19 nt, Artificial Sequence
  Description of Artificial Sequence: Synthetic oligonucleotide
  Antisense strand to SEQ ID NO: 2339466
uauaucaugcuaauugugc

SEQ ID NO: 2339468 - RNA, 19 nt, Artificial Sequence
  Description of Artificial Sequence: Synthetic oligonucleotide
  Sense strand starting at position 1199 of SEQ ID NO: 1885402
agauuuaguuuaccgucua

SEQ ID NO: 2339469 - RNA, 19 nt, Artificial Sequence
  Description of Artificial Sequence: Synthetic oligonucleotide
  Antisense strand to SEQ ID NO: 2339468
uagacgguaaacuaaaucu

SEQ ID NO: 2339470 - RNA, 19 nt, Artificial Sequence
  Description of Artificial Sequence: Synthetic oligonucleotide
  Sense strand starting at position 1282 of SEQ ID NO: 1885402
acuagaaguuugcuggacu

SEQ ID NO: 2339471 - RNA, 19 nt, Artificial Sequence
  Description of Artificial Sequence: Synthetic oligonucleotide
  Antisense strand to SEQ ID NO: 2339470
aguccagcaaacuucuagu

SEQ ID NO: 2339472 - RNA, 19 nt, Artificial Sequence
  Description of Artificial Sequence: Synthetic oligonucleotide
  Sense strand starting at position 1289 of SEQ ID NO: 1885402
guuugcuggacugaaauaa

SEQ ID NO: 2339473 - RNA, 19 nt, Artificial Sequence
  Description of Artificial Sequence: Synthetic oligonucleotide
  Antisense strand to SEQ ID NO: 2339472
uuauuucaguccagcaaac

SEQ ID NO: 2339474 - RNA, 19 nt, Artificial Sequence
  Description of Artificial Sequence: Synthetic oligonucleotide
  Sense strand starting at position 1320 of SEQ ID NO: 1885402
gagcuuagaugccuaaaga

SEQ ID NO: 2339475 - RNA, 19 nt, Artificial Sequence
  Description of Artificial Sequence: Synthetic oligonucleotide
  Antisense strand to SEQ ID NO: 2339474
ucuuuaggcaucuaagcuc

SEQ ID NO: 2339476 - RNA, 19 nt, Artificial Sequence
  Description of Artificial Sequence: Synthetic oligonucleotide
  Sense strand starting at position 1321 of SEQ ID NO: 1885402
agcuuagaugccuaaagac

SEQ ID NO: 2339477 - RNA, 19 nt, Artificial Sequence
  Description of Artificial Sequence: Synthetic oligonucleotide
  Antisense strand to SEQ ID NO: 2339476
gucuuuaggcaucuaagcu

SEQ ID NO: 2339478 - RNA, 19 nt, Artificial Sequence
  Description of Artificial Sequence: Synthetic oligonucleotide
  Sense strand starting at position 1379 of SEQ ID NO: 1885402
uguaguaagaguugggaaa

SEQ ID NO: 2339479 - RNA, 19 nt, Artificial Sequence
  Description of Artificial Sequence: Synthetic oligonucleotide
  Antisense strand to SEQ ID NO: 2339478
uuucccaacucuuacuaca

SEQ ID NO: 2339480 - RNA, 19 nt, Artificial Sequence
  Description of Artificial Sequence: Synthetic oligonucleotide
  Sense strand starting at position 1380 of SEQ ID NO: 1885402
guaguaagaguugggaaag

SEQ ID NO: 2339481 - RNA, 19 nt, Artificial Sequence
  Description of Artificial Sequence: Synthetic oligonucleotide
  Antisense strand to SEQ ID NO: 2339480
cuuucccaacucuuacuac

SEQ ID NO: 2339482 - RNA, 19 nt, Artificial Sequence
  Description of Artificial Sequence: Synthetic oligonucleotide
  Sense strand starting at position 1998 of SEQ ID NO: 1885402
guaugggcgcccguagaua

SEQ ID NO: 2339483 - RNA, 19 nt, Artificial Sequence
  Description of Artificial Sequence: Synthetic oligonucleotide
  Antisense strand to SEQ ID NO: 2339482
uaucuacgggcgcccauac

SEQ ID NO: 2339484 - RNA, 19 nt, Artificial Sequence
  Description of Artificial Sequence: Synthetic oligonucleotide
  Sense strand starting at position 2017 of SEQ ID NO: 1885402
ugccuuaaucgcucgccau

SEQ ID NO: 2339485 - RNA, 19 nt, Artificial Sequence
  Description of Artificial Sequence: Synthetic oligonucleotide
  Antisense strand to SEQ ID NO: 2339484
auggcgagcgauuaaggca

SEQ ID NO: 2339486 - RNA, 19 nt, Artificial Sequence
  Description of Artificial Sequence: Synthetic oligonucleotide
  Sense strand starting at position 2021 of SEQ ID NO: 1885402
uuaaucgcucgccauuuau

SEQ ID NO: 2339487 - RNA, 19 nt, Artificial Sequence
  Description of Artificial Sequence: Synthetic oligonucleotide
  Antisense strand to SEQ ID NO: 2339486
auaaauggcgagcgauuaa

SEQ ID NO: 2339488 - RNA, 19 nt, Artificial Sequence
  Description of Artificial Sequence: Synthetic oligonucleotide
  Sense strand starting at position 2248 of SEQ ID NO: 1885402
cgcaguguugaguuuacuu

SEQ ID NO: 2339489 - RNA, 19 nt, Artificial Sequence
  Description of Artificial Sequence: Synthetic oligonucleotide
  Antisense strand to SEQ ID NO: 2339488
aaguaaacucaacacugcg

SEQ ID NO: 2339490 - RNA, 19 nt, Artificial Sequence
  Description of Artificial Sequence: Synthetic oligonucleotide
  Sense strand starting at position 2807 of SEQ ID NO: 1885402
cugaaccauugugugaaua

SEQ ID NO: 2339491 - RNA, 19 nt, Artificial Sequence
  Description of Artificial Sequence: Synthetic oligonucleotide
  Antisense strand to SEQ ID NO: 2339490
uauucacacaaugguucag

SEQ ID NO: 2339492 - RNA, 19 nt, Artificial Sequence
  Description of Artificial Sequence: Synthetic oligonucleotide
  Sense strand starting at position 2808 of SEQ ID NO: 1885402
ugaaccauugugugaauaa

SEQ ID NO: 2339493 - RNA, 19 nt, Artificial Sequence
  Description of Artificial Sequence: Synthetic oligonucleotide
  Antisense strand to SEQ ID NO: 2339492
uuauucacacaaugguuca

SEQ ID NO: 2339494 - RNA, 19 nt, Artificial Sequence
  Description of Artificial Sequence: Synthetic oligonucleotide
  Sense strand starting at position 3053 of SEQ ID NO: 1885402
ucgggauaguagucaagau

SEQ ID NO: 2339495 - RNA, 19 nt, Artificial Sequence
  Description of Artificial Sequence: Synthetic oligonucleotide
  Antisense strand to SEQ ID NO: 2339494
aucuugacuacuaucccga

SEQ ID NO: 2339496 - RNA, 19 nt, Artificial Sequence
  Description of Artificial Sequence: Synthetic oligonucleotide
  Sense strand starting at position 3054 of SEQ ID NO: 1885402
cgggauaguagucaagaug

SEQ ID NO: 2339497 - RNA, 19 nt, Artificial Sequence
  Description of Artificial Sequence: Synthetic oligonucleotide
  Antisense strand to SEQ ID NO: 2339496
caucuugacuacuaucccg

SEQ ID NO: 2339498 - RNA, 19 nt, Artificial Sequence
  Description of Artificial Sequence: Synthetic oligonucleotide
  Sense strand starting at position 3087 of SEQ ID NO: 1885402
ugaaauggugcuggaugaa

SEQ ID NO: 2339499 - RNA, 19 nt, Artificial Sequence
  Description of Artificial Sequence: Synthetic oligonucleotide
  Antisense strand to SEQ ID NO: 2339498
uucauccagcaccauuuca

SEQ ID NO: 2339500 - RNA, 19 nt, Artificial Sequence
  Description of Artificial Sequence: Synthetic oligonucleotide
  Sense strand starting at position 3090 of SEQ ID NO: 1885402
aauggugcuggaugaaauu

SEQ ID NO: 2339501 - RNA, 19 nt, Artificial Sequence
  Description of Artificial Sequence: Synthetic oligonucleotide
  Antisense strand to SEQ ID NO: 2339500
aauuucauccagcaccauu

SEQ ID NO: 2339502 - RNA, 19 nt, Artificial Sequence
  Description of Artificial Sequence: Synthetic oligonucleotide
  Sense strand starting at position 3114 of SEQ ID NO: 1885402
gguaauuagaccgauucca

SEQ ID NO: 2339503 - RNA, 19 nt, Artificial Sequence
  Description of Artificial Sequence: Synthetic oligonucleotide
  Antisense strand to SEQ ID NO: 2339502
uggaaucggucuaauuacc

SEQ ID NO: 2339504 - RNA, 19 nt, Artificial Sequence
  Description of Artificial Sequence: Synthetic oligonucleotide
  Sense strand starting at position 3163 of SEQ ID NO: 1885402
uuuagacucucuuugaggu

SEQ ID NO: 2339505 - RNA, 19 nt, Artificial Sequence
  Description of Artificial Sequence: Synthetic oligonucleotide
  Antisense strand to SEQ ID NO: 2339504
accucaaagagagucuaaa

SEQ ID NO: 2339506 - RNA, 19 nt, Artificial Sequence
  Description of Artificial Sequence: Synthetic oligonucleotide
  Sense strand starting at position 3164 of SEQ ID NO: 1885402
uuagacucucuuugaggua

SEQ ID NO: 2339507 - RNA, 19 nt, Artificial Sequence
  Description of Artificial Sequence: Synthetic oligonucleotide
  Antisense strand to SEQ ID NO: 2339506
uaccucaaagagagucuaa

SEQ ID NO: 2339508 - RNA, 19 nt, Artificial Sequence
  Description of Artificial Sequence: Synthetic oligonucleotide
  Sense strand starting at position 3176 of SEQ ID NO: 1885402
ugagguacuguauggagau

SEQ ID NO: 2339509 - RNA, 19 nt, Artificial Sequence
  Description of Artificial Sequence: Synthetic oligonucleotide
  Antisense strand to SEQ ID NO: 2339508
aucuccauacaguaccuca

SEQ ID NO: 2339510 - RNA, 19 nt, Artificial Sequence
  Description of Artificial Sequence: Synthetic oligonucleotide
  Sense strand starting at position 3186 of SEQ ID NO: 1885402
uauggagauugugcagaau

SEQ ID NO: 2339511 - RNA, 19 nt, Artificial Sequence
  Description of Artificial Sequence: Synthetic oligonucleotide
  Antisense strand to SEQ ID NO: 2339510
auucugcacaaucuccaua

SEQ ID NO: 2339512 - RNA, 19 nt, Artificial Sequence
  Description of Artificial Sequence: Synthetic oligonucleotide
  Sense strand starting at position 3207 of SEQ ID NO: 1885402
ggguccuaggauugccaaa

SEQ ID NO: 2339513 - RNA, 19 nt, Artificial Sequence
  Description of Artificial Sequence: Synthetic oligonucleotide
  Antisense strand to SEQ ID NO: 2339512
uuuggcaauccuaggaccc

SEQ ID NO: 2339514 - RNA, 19 nt, Artificial Sequence
  Description of Artificial Sequence: Synthetic oligonucleotide
  Sense strand starting at position 3242 of SEQ ID NO: 1885402
cguguaauggaggaguuua

SEQ ID NO: 2339515 - RNA, 19 nt, Artificial Sequence
  Description of Artificial Sequence: Synthetic oligonucleotide
  Antisense strand to SEQ ID NO: 2339514
uaaacuccuccauuacacg

SEQ ID NO: 2339516 - RNA, 19 nt, Artificial Sequence
  Description of Artificial Sequence: Synthetic oligonucleotide
  Sense strand starting at position 3252 of SEQ ID NO: 1885402
aggaguuuauaucuugaua

SEQ ID NO: 2339517 - RNA, 19 nt, Artificial Sequence
  Description of Artificial Sequence: Synthetic oligonucleotide
  Antisense strand to SEQ ID NO: 2339516
uaucaagauauaaacuccu

SEQ ID NO: 2339518 - RNA, 19 nt, Artificial Sequence
  Description of Artificial Sequence: Synthetic oligonucleotide
  Sense strand starting at position 3255 of SEQ ID NO: 1885402
aguuuauaucuugauacgu

SEQ ID NO: 2339519 - RNA, 19 nt, Artificial Sequence
  Description of Artificial Sequence: Synthetic oligonucleotide
  Antisense strand to SEQ ID NO: 2339518
acguaucaagauauaaacu

SEQ ID NO: 2339520 - RNA, 19 nt, Artificial Sequence
  Description of Artificial Sequence: Synthetic oligonucleotide
  Sense strand starting at position 3268 of SEQ ID NO: 1885402
auacguuuccaguacaaau

SEQ ID NO: 2339521 - RNA, 19 nt, Artificial Sequence
  Description of Artificial Sequence: Synthetic oligonucleotide
  Antisense strand to SEQ ID NO: 2339520
auuuguacuggaaacguau

SEQ ID NO: 2339522 - RNA, 19 nt, Artificial Sequence
  Description of Artificial Sequence: Synthetic oligonucleotide
  Sense strand starting at position 3297 of SEQ ID NO: 1885402
uuacguuaacgccaaauuu

SEQ ID NO: 2339523 - RNA, 19 nt, Artificial Sequence
  Description of Artificial Sequence: Synthetic oligonucleotide
  Antisense strand to SEQ ID NO: 2339522
aaauuuggcguuaacguaa

SEQ ID NO: 2339524 - RNA, 19 nt, Artificial Sequence
  Description of Artificial Sequence: Synthetic oligonucleotide
  Sense strand starting at position 3476 of SEQ ID NO: 1885402
agguaauacgcagaaaguu

SEQ ID NO: 2339525 - RNA, 19 nt, Artificial Sequence
  Description of Artificial Sequence: Synthetic oligonucleotide
  Antisense strand to SEQ ID NO: 2339524
aacuuucugcguauuaccu

SEQ ID NO: 2339526 - RNA, 19 nt, Artificial Sequence
  Description of Artificial Sequence: Synthetic oligonucleotide
  Sense strand starting at position 3609 of SEQ ID NO: 1885402
aaagucacguucuuaggaa

SEQ ID NO: 2339527 - RNA, 19 nt, Artificial Sequence
  Description of Artificial Sequence: Synthetic oligonucleotide
  Antisense strand to SEQ ID NO: 2339526
uuccuaagaacgugacuuu

SEQ ID NO: 2339528 - RNA, 19 nt, Artificial Sequence
  Description of Artificial Sequence: Synthetic oligonucleotide
  Sense strand starting at position 3624 of SEQ ID NO: 1885402
ggaauuggccgucaauaac

SEQ ID NO: 2339529 - RNA, 19 nt, Artificial Sequence
  Description of Artificial Sequence: Synthetic oligonucleotide
  Antisense strand to SEQ ID NO: 2339528
guuauugacggccaauucc

SEQ ID NO: 2339530 - RNA, 19 nt, Artificial Sequence
  Description of Artificial Sequence: Synthetic oligonucleotide
  Sense strand starting at position 3747 of SEQ ID NO: 1885402
gaagguagucuugagccua

SEQ ID NO: 2339531 - RNA, 19 nt, Artificial Sequence
  Description of Artificial Sequence: Synthetic oligonucleotide
  Antisense strand to SEQ ID NO: 2339530
uaggcucaagacuaccuuc

SEQ ID NO: 2339532 - RNA, 19 nt, Artificial Sequence
  Description of Artificial Sequence: Synthetic oligonucleotide
  Sense strand starting at position 3879 of SEQ ID NO: 1885402
uucuuucgucagcugcaua

SEQ ID NO: 2339533 - RNA, 19 nt, Artificial Sequence
  Description of Artificial Sequence: Synthetic oligonucleotide
  Antisense strand to SEQ ID NO: 2339532
uaugcagcugacgaaagaa

SEQ ID NO: 2339534 - RNA, 19 nt, Artificial Sequence
  Description of Artificial Sequence: Synthetic oligonucleotide
  Sense strand starting at position 3935 of SEQ ID NO: 1885402
ccaugugcucuggugcuua

SEQ ID NO: 2339535 - RNA, 19 nt, Artificial Sequence
  Description of Artificial Sequence: Synthetic oligonucleotide
  Antisense strand to SEQ ID NO: 2339534
uaagcaccagagcacaugg

SEQ ID NO: 2339536 - RNA, 19 nt, Artificial Sequence
  Description of Artificial Sequence: Synthetic oligonucleotide
  Sense strand starting at position 570 of SEQ ID NO: 1885403
gcagaaagcaugugagaga

SEQ ID NO: 2339537 - RNA, 19 nt, Artificial Sequence
  Description of Artificial Sequence: Synthetic oligonucleotide
  Antisense strand to SEQ ID NO: 2339536
ucucucacaugcuuucugc

SEQ ID NO: 2339538 - RNA, 19 nt, Artificial Sequence
  Description of Artificial Sequence: Synthetic oligonucleotide
  Sense strand starting at position 1059 of SEQ ID NO: 1885403
cgcggaucccaagaucuuu

SEQ ID NO: 2339539 - RNA, 19 nt, Artificial Sequence
  Description of Artificial Sequence: Synthetic oligonucleotide
  Antisense strand to SEQ ID NO: 2339538
aaagaucuugggauccgcg

SEQ ID NO: 2339540 - RNA, 19 nt, Artificial Sequence
  Description of Artificial Sequence: Synthetic oligonucleotide
  Sense strand starting at position 2041 of SEQ ID NO: 1885403
agagaagacucagaacuac

SEQ ID NO: 2339541 - RNA, 19 nt, Artificial Sequence
  Description of Artificial Sequence: Synthetic oligonucleotide
  Antisense strand to SEQ ID NO: 2339540
guaguucugagucuucucu

SEQ ID NO: 2339542 - RNA, 19 nt, Artificial Sequence
  Description of Artificial Sequence: Synthetic oligonucleotide
  Sense strand starting at position 2100 of SEQ ID NO: 1885403
cuuugaaauucugcaaguu

SEQ ID NO: 2339543 - RNA, 19 nt, Artificial Sequence
  Description of Artificial Sequence: Synthetic oligonucleotide
  Antisense strand to SEQ ID NO: 2339542
aacuugcagaauuucaaag

SEQ ID NO: 2339544 - RNA, 19 nt, Artificial Sequence
  Description of Artificial Sequence: Synthetic oligonucleotide
  Sense strand starting at position 2101 of SEQ ID NO: 1885403
uuugaaauucugcaaguuu

SEQ ID NO: 2339545 - RNA, 19 nt, Artificial Sequence
  Description of Artificial Sequence: Synthetic oligonucleotide
  Antisense strand to SEQ ID NO: 2339544
aaacuugcagaauuucaaa

SEQ ID NO: 2339546 - RNA, 19 nt, Artificial Sequence
  Description of Artificial Sequence: Synthetic oligonucleotide
  Sense strand starting at position 2163 of SEQ ID NO: 1885403
uguuuaaccgucuuagugu

SEQ ID NO: 2339547 - RNA, 19 nt, Artificial Sequence
  Description of Artificial Sequence: Synthetic oligonucleotide
  Antisense strand to SEQ ID NO: 2339546
acacuaagacgguuaaaca

SEQ ID NO: 2339548 - RNA, 19 nt, Artificial Sequence
  Description of Artificial Sequence: Synthetic oligonucleotide
  Sense strand starting at position 2185 of SEQ ID NO: 1885403
auuaguuuaguggaccuau

SEQ ID NO: 2339549 - RNA, 19 nt, Artificial Sequence
  Description of Artificial Sequence: Synthetic oligonucleotide
  Antisense strand to SEQ ID NO: 2339548
auagguccacuaaacuaau

SEQ ID NO: 2339550 - RNA, 19 nt, Artificial Sequence
  Description of Artificial Sequence: Synthetic oligonucleotide
  Sense strand starting at position 2197 of SEQ ID NO: 1885403
gaccuauggcuuugaguca

SEQ ID NO: 2339551 - RNA, 19 nt, Artificial Sequence
  Description of Artificial Sequence: Synthetic oligonucleotide
  Antisense strand to SEQ ID NO: 2339550
ugacucaaagccauagguc

SEQ ID NO: 2339552 - RNA, 19 nt, Artificial Sequence
  Description of Artificial Sequence: Synthetic oligonucleotide
  Sense strand starting at position 2237 of SEQ ID NO: 1885403
agucauuauuaccucaagu

SEQ ID NO: 2339553 - RNA, 19 nt, Artificial Sequence
  Description of Artificial Sequence: Synthetic oligonucleotide
  Antisense strand to SEQ ID NO: 2339552
acuugagguaauaaugacu

SEQ ID NO: 2339554 - RNA, 19 nt, Artificial Sequence
  Description of Artificial Sequence: Synthetic oligonucleotide
  Sense strand starting at position 2385 of SEQ ID NO: 1885403
uuauucucuguuuaucagu

SEQ ID NO: 2339555 - RNA, 19 nt, Artificial Sequence
  Description of Artificial Sequence: Synthetic oligonucleotide
  Antisense strand to SEQ ID NO: 2339554
acugauaaacagagaauaa

SEQ ID NO: 2339556 - RNA, 19 nt, Artificial Sequence
  Description of Artificial Sequence: Synthetic oligonucleotide
  Sense strand starting at position 2393 of SEQ ID NO: 1885403
uguuuaucagucugagaaa

SEQ ID NO: 2339557 - RNA, 19 nt, Artificial Sequence
  Description of Artificial Sequence: Synthetic oligonucleotide
  Antisense strand to SEQ ID NO: 2339556
uuucucagacugauaaaca

SEQ ID NO: 2339558 - RNA, 19 nt, Artificial Sequence
  Description of Artificial Sequence: Synthetic oligonucleotide
  Sense strand starting at position 2459 of SEQ ID NO: 1885403
cccugaugagucugucaaa

SEQ ID NO: 2339559 - RNA, 19 nt, Artificial Sequence
  Description of Artificial Sequence: Synthetic oligonucleotide
  Antisense strand to SEQ ID NO: 2339558
uuugacagacucaucaggg

SEQ ID NO: 2339560 - RNA, 19 nt, Artificial Sequence
  Description of Artificial Sequence: Synthetic oligonucleotide
  Sense strand starting at position 2460 of SEQ ID NO: 1885403
ccugaugagucugucaaag

SEQ ID NO: 2339561 - RNA, 19 nt, Artificial Sequence
  Description of Artificial Sequence: Synthetic oligonucleotide
  Antisense strand to SEQ ID NO: 2339560
cuuugacagacucaucagg

SEQ ID NO: 2339562 - RNA, 19 nt, Artificial Sequence
  Description of Artificial Sequence: Synthetic oligonucleotide
  Sense strand starting at position 2478 of SEQ ID NO: 1885403
ggcauuguuuauuucugau

SEQ ID NO: 2339563 - RNA, 19 nt, Artificial Sequence
  Description of Artificial Sequence: Synthetic oligonucleotide
  Antisense strand to SEQ ID NO: 2339562
aucagaaauaaacaaugcc

SEQ ID NO: 2339564 - RNA, 19 nt, Artificial Sequence
  Description of Artificial Sequence: Synthetic oligonucleotide
  Sense strand starting at position 2568 of SEQ ID NO: 1885403
ccaucuguuccuguguguu

SEQ ID NO: 2339565 - RNA, 19 nt, Artificial Sequence
  Description of Artificial Sequence: Synthetic oligonucleotide
  Antisense strand to SEQ ID NO: 2339564
aacacacaggaacagaugg

SEQ ID NO: 2339566 - RNA, 19 nt, Artificial Sequence
  Description of Artificial Sequence: Synthetic oligonucleotide
  Sense strand starting at position 2662 of SEQ ID NO: 1885403
cuaauuugagucuguuucu

SEQ ID NO: 2339567 - RNA, 19 nt, Artificial Sequence
  Description of Artificial Sequence: Synthetic oligonucleotide
  Antisense strand to SEQ ID NO: 2339566
agaaacagacucaaauuag

SEQ ID NO: 2339568 - RNA, 19 nt, Artificial Sequence
  Description of Artificial Sequence: Synthetic oligonucleotide
  Sense strand starting at position 2734 of SEQ ID NO: 1885403
guaauuugugguugaaagc

SEQ ID NO: 2339569 - RNA, 19 nt, Artificial Sequence
  Description of Artificial Sequence: Synthetic oligonucleotide
  Antisense strand to SEQ ID NO: 2339568
gcuuucaaccacaaauuac

SEQ ID NO: 2339570 - RNA, 19 nt, Artificial Sequence
  Description of Artificial Sequence: Synthetic oligonucleotide
  Sense strand starting at position 2741 of SEQ ID NO: 1885403
gugguugaaagcuaaacau

SEQ ID NO: 2339571 - RNA, 19 nt, Artificial Sequence
  Description of Artificial Sequence: Synthetic oligonucleotide
  Antisense strand to SEQ ID NO: 2339570
auguuuagcuuucaaccac

SEQ ID NO: 2339572 - RNA, 19 nt, Artificial Sequence
  Description of Artificial Sequence: Synthetic oligonucleotide
  Sense strand starting at position 2753 of SEQ ID NO: 1885403
uaaacaugauguguuggua

SEQ ID NO: 2339573 - RNA, 19 nt, Artificial Sequence
  Description of Artificial Sequence: Synthetic oligonucleotide
  Antisense strand to SEQ ID NO: 2339572
uaccaacacaucauguuua

SEQ ID NO: 2339574 - RNA, 19 nt, Artificial Sequence
  Description of Artificial Sequence: Synthetic oligonucleotide
  Sense strand starting at position 2785 of SEQ ID NO: 1885403
caaauagaucuuuagugug

SEQ ID NO: 2339575 - RNA, 19 nt, Artificial Sequence
  Description of Artificial Sequence: Synthetic oligonucleotide
  Antisense strand to SEQ ID NO: 2339574
cacacuaaagaucuauuug

SEQ ID NO: 2339576 - RNA, 19 nt, Artificial Sequence
  Description of Artificial Sequence: Synthetic oligonucleotide
  Sense strand starting at position 2840 of SEQ ID NO: 1885403
cuguuuguuguugcuguaa

SEQ ID NO: 2339577 - RNA, 19 nt, Artificial Sequence
  Description of Artificial Sequence: Synthetic oligonucleotide
  Antisense strand to SEQ ID NO: 2339576
uuacagcaacaacaaacag

SEQ ID NO: 2339578 - RNA, 19 nt, Artificial Sequence
  Description of Artificial Sequence: Synthetic oligonucleotide
  Sense strand starting at position 2858 of SEQ ID NO: 1885403
agugucaaaggcuaacauu

SEQ ID NO: 2339579 - RNA, 19 nt, Artificial Sequence
  Description of Artificial Sequence: Synthetic oligonucleotide
  Antisense strand to SEQ ID NO: 2339578
aauguuagccuuugacacu

SEQ ID NO: 2339580 - RNA, 19 nt, Artificial Sequence
  Description of Artificial Sequence: Synthetic oligonucleotide
  Sense strand starting at position 2902 of SEQ ID NO: 1885403
uccugaaguuucucuagag

SEQ ID NO: 2339581 - RNA, 19 nt, Artificial Sequence
  Description of Artificial Sequence: Synthetic oligonucleotide
  Antisense strand to SEQ ID NO: 2339580
cucuagagaaacuucagga

SEQ ID NO: 2339582 - RNA, 19 nt, Artificial Sequence
  Description of Artificial Sequence: Synthetic oligonucleotide
  Sense strand starting at position 2903 of SEQ ID NO: 1885403
ccugaaguuucucuagaga

SEQ ID NO: 2339583 - RNA, 19 nt, Artificial Sequence
  Description of Artificial Sequence: Synthetic oligonucleotide
  Antisense strand to SEQ ID NO: 2339582
ucucuagagaaacuucagg

SEQ ID NO: 2339584 - RNA, 19 nt, Artificial Sequence
  Description of Artificial Sequence: Synthetic oligonucleotide
  Sense strand starting at position 2974 of SEQ ID NO: 1885403
acagaagucugauuaaugu

SEQ ID NO: 2339585 - RNA, 19 nt, Artificial Sequence
  Description of Artificial Sequence: Synthetic oligonucleotide
  Antisense strand to SEQ ID NO: 2339584
acauuaaucagacuucugu

SEQ ID NO: 2339586 - RNA, 19 nt, Artificial Sequence
  Description of Artificial Sequence: Synthetic oligonucleotide
  Sense strand starting at position 3202 of SEQ ID NO: 1885403
aguagaggcaucuaguaga

SEQ ID NO: 2339587 - RNA, 19 nt, Artificial Sequence
  Description of Artificial Sequence: Synthetic oligonucleotide
  Antisense strand to SEQ ID NO: 2339586
ucuacuagaugccucuacu

SEQ ID NO: 2339588 - RNA, 19 nt, Artificial Sequence
  Description of Artificial Sequence: Synthetic oligonucleotide
  Sense strand starting at position 3239 of SEQ ID NO: 1885403
ugucuugugcugcugcaua

SEQ ID NO: 2339589 - RNA, 19 nt, Artificial Sequence
  Description of Artificial Sequence: Synthetic oligonucleotide
  Antisense strand to SEQ ID NO: 2339588
uaugcagcagcacaagaca

SEQ ID NO: 2339590 - RNA, 19 nt, Artificial Sequence
  Description of Artificial Sequence: Synthetic oligonucleotide
  Sense strand starting at position 3409 of SEQ ID NO: 1885403
ucagaaauugccuaguuua

SEQ ID NO: 2339591 - RNA, 19 nt, Artificial Sequence
  Description of Artificial Sequence: Synthetic oligonucleotide
  Antisense strand to SEQ ID NO: 2339590
uaaacuaggcaauuucuga

SEQ ID NO: 2339592 - RNA, 19 nt, Artificial Sequence
  Description of Artificial Sequence: Synthetic oligonucleotide
  Sense strand starting at position 3417 of SEQ ID NO: 1885403
ugccuaguuuauuuccuau

SEQ ID NO: 2339593 - RNA, 19 nt, Artificial Sequence
  Description of Artificial Sequence: Synthetic oligonucleotide
  Antisense strand to SEQ ID NO: 2339592
auaggaaauaaacuaggca

SEQ ID NO: 2339594 - RNA, 19 nt, Artificial Sequence
  Description of Artificial Sequence: Synthetic oligonucleotide
  Sense strand starting at position 3420 of SEQ ID NO: 1885403
cuaguuuauuuccuauugu

SEQ ID NO: 2339595 - RNA, 19 nt, Artificial Sequence
  Description of Artificial Sequence: Synthetic oligonucleotide
  Antisense strand to SEQ ID NO: 2339594
acaauaggaaauaaacuag

SEQ ID NO: 2339596 - RNA, 19 nt, Artificial Sequence
  Description of Artificial Sequence: Synthetic oligonucleotide
  Sense strand starting at position 3542 of SEQ ID NO: 1885403
acuugauaucuuuaggugu

SEQ ID NO: 2339597 - RNA, 19 nt, Artificial Sequence
  Description of Artificial Sequence: Synthetic oligonucleotide
  Antisense strand to SEQ ID NO: 2339596
acaccuaaagauaucaagu

SEQ ID NO: 2339598 - RNA, 19 nt, Artificial Sequence
  Description of Artificial Sequence: Synthetic oligonucleotide
  Sense strand starting at position 3548 of SEQ ID NO: 1885403
uaucuuuaggugugacauu

SEQ ID NO: 2339599 - RNA, 19 nt, Artificial Sequence
  Description of Artificial Sequence: Synthetic oligonucleotide
  Antisense strand to SEQ ID NO: 2339598
aaugucacaccuaaagaua

SEQ ID NO: 2339600 - RNA, 19 nt, Artificial Sequence
  Description of Artificial Sequence: Synthetic oligonucleotide
  Sense strand starting at position 3587 of SEQ ID NO: 1885403
guaaaugauuuagaaguca

SEQ ID NO: 2339601 - RNA, 19 nt, Artificial Sequence
  Description of Artificial Sequence: Synthetic oligonucleotide
  Antisense strand to SEQ ID NO: 2339600
ugacuucuaaaucauuuac

SEQ ID NO: 2339602 - RNA, 19 nt, Artificial Sequence
  Description of Artificial Sequence: Synthetic oligonucleotide
  Sense strand starting at position 3598 of SEQ ID NO: 1885403
agaagucagucuuuaugug

SEQ ID NO: 2339603 - RNA, 19 nt, Artificial Sequence
  Description of Artificial Sequence: Synthetic oligonucleotide
  Antisense strand to SEQ ID NO: 2339602
cacauaaagacugacuucu

SEQ ID NO: 2339604 - RNA, 19 nt, Artificial Sequence
  Description of Artificial Sequence: Synthetic oligonucleotide
  Sense strand starting at position 3599 of SEQ ID NO: 1885403
gaagucagucuuuauguga

SEQ ID NO: 2339605 - RNA, 19 nt, Artificial Sequence
  Description of Artificial Sequence: Synthetic oligonucleotide
  Antisense strand to SEQ ID NO: 2339604
ucacauaaagacugacuuc

SEQ ID NO: 2339606 - RNA, 19 nt, Artificial Sequence
  Description of Artificial Sequence: Synthetic oligonucleotide
  Sense strand starting at position 3606 of SEQ ID NO: 1885403
gucuuuaugugaguuagaa

SEQ ID NO: 2339607 - RNA, 19 nt, Artificial Sequence
  Description of Artificial Sequence: Synthetic oligonucleotide
  Antisense strand to SEQ ID NO: 2339606
uucuaacucacauaaagac

SEQ ID NO: 2339608 - RNA, 19 nt, Artificial Sequence
  Description of Artificial Sequence: Synthetic oligonucleotide
  Sense strand starting at position 3614 of SEQ ID NO: 1885403
gugaguuagaaaugaguau

SEQ ID NO: 2339609 - RNA, 19 nt, Artificial Sequence
  Description of Artificial Sequence: Synthetic oligonucleotide
  Antisense strand to SEQ ID NO: 2339608
auacucauuucuaacucac

SEQ ID NO: 2339610 - RNA, 19 nt, Artificial Sequence
  Description of Artificial Sequence: Synthetic oligonucleotide
  Sense strand starting at position 3907 of SEQ ID NO: 1885403
ccugaagucuagcuauauu

SEQ ID NO: 2339611 - RNA, 19 nt, Artificial Sequence
  Description of Artificial Sequence: Synthetic oligonucleotide
  Antisense strand to SEQ ID NO: 2339610
aauauagcuagacuucagg

SEQ ID NO: 2339612 - RNA, 19 nt, Artificial Sequence
  Description of Artificial Sequence: Synthetic oligonucleotide
  Sense strand starting at position 3931 of SEQ ID NO: 1885403
auuacucaguccuuagacu

SEQ ID NO: 2339613 - RNA, 19 nt, Artificial Sequence
  Description of Artificial Sequence: Synthetic oligonucleotide
  Antisense strand to SEQ ID NO: 2339612
agucuaaggacugaguaau

SEQ ID NO: 2339614 - RNA, 19 nt, Artificial Sequence
  Description of Artificial Sequence: Synthetic oligonucleotide
  Sense strand starting at position 3932 of SEQ ID NO: 1885403
uuacucaguccuuagacuu

SEQ ID NO: 2339615 - RNA, 19 nt, Artificial Sequence
  Description of Artificial Sequence: Synthetic oligonucleotide
  Antisense strand to SEQ ID NO: 2339614
aagucuaaggacugaguaa

SEQ ID NO: 2339616 - RNA, 19 nt, Artificial Sequence
  Description of Artificial Sequence: Synthetic oligonucleotide
  Sense strand starting at position 267 of SEQ ID NO: 1885404
aaugguacuccugauggca

SEQ ID NO: 2339617 - RNA, 19 nt, Artificial Sequence
  Description of Artificial Sequence: Synthetic oligonucleotide
  Antisense strand to SEQ ID NO: 2339616
ugccaucaggaguaccauu

SEQ ID NO: 2339618 - RNA, 19 nt, Artificial Sequence
  Description of Artificial Sequence: Synthetic oligonucleotide
  Sense strand starting at position 387 of SEQ ID NO: 1885404
gaagauguauaccuuguga

SEQ ID NO: 2339619 - RNA, 19 nt, Artificial Sequence
  Description of Artificial Sequence: Synthetic oligonucleotide
  Antisense strand to SEQ ID NO: 2339618
ucacaagguauacaucuuc

SEQ ID NO: 2339620 - RNA, 19 nt, Artificial Sequence
  Description of Artificial Sequence: Synthetic oligonucleotide
  Sense strand starting at position 389 of SEQ ID NO: 1885404
agauguauaccuugugacg

SEQ ID NO: 2339621 - RNA, 19 nt, Artificial Sequence
  Description of Artificial Sequence: Synthetic oligonucleotide
  Antisense strand to SEQ ID NO: 2339620
cgucacaagguauacaucu

SEQ ID NO: 2339622 - RNA, 19 nt, Artificial Sequence
  Description of Artificial Sequence: Synthetic oligonucleotide
  Sense strand starting at position 401 of SEQ ID NO: 1885404
ugugacgucaucuguaaua

SEQ ID NO: 2339623 - RNA, 19 nt, Artificial Sequence
  Description of Artificial Sequence: Synthetic oligonucleotide
  Antisense strand to SEQ ID NO: 2339622
uauuacagaugacgucaca

SEQ ID NO: 2339624 - RNA, 19 nt, Artificial Sequence
  Description of Artificial Sequence: Synthetic oligonucleotide
  Sense strand starting at position 425 of SEQ ID NO: 1885404
gaaggacguuacuccuaau

SEQ ID NO: 2339625 - RNA, 19 nt, Artificial Sequence
  Description of Artificial Sequence: Synthetic oligonucleotide
  Antisense strand to SEQ ID NO: 2339624
auuaggaguaacguccuuc

SEQ ID NO: 2339626 - RNA, 19 nt, Artificial Sequence
  Description of Artificial Sequence: Synthetic oligonucleotide
  Sense strand starting at position 455 of SEQ ID NO: 1885404
guguauacccuuugauaau

SEQ ID NO: 2339627 - RNA, 19 nt, Artificial Sequence
  Description of Artificial Sequence: Synthetic oligonucleotide
  Antisense strand to SEQ ID NO: 2339626
auuaucaaaggguauacac

SEQ ID NO: 2339628 - RNA, 19 nt, Artificial Sequence
  Description of Artificial Sequence: Synthetic oligonucleotide
  Sense strand starting at position 475 of SEQ ID NO: 1885404
uuuguaaucucauaaagag

SEQ ID NO: 2339629 - RNA, 19 nt, Artificial Sequence
  Description of Artificial Sequence: Synthetic oligonucleotide
  Antisense strand to SEQ ID NO: 2339628
cucuuuaugagauuacaaa

SEQ ID NO: 2339630 - RNA, 19 nt, Artificial Sequence
  Description of Artificial Sequence: Synthetic oligonucleotide
  Sense strand starting at position 703 of SEQ ID NO: 1885404
gggagauauugcuucuacu

SEQ ID NO: 2339631 - RNA, 19 nt, Artificial Sequence
  Description of Artificial Sequence: Synthetic oligonucleotide
  Antisense strand to SEQ ID NO: 2339630
aguagaagcaauaucuccc

SEQ ID NO: 2339632 - RNA, 19 nt, Artificial Sequence
  Description of Artificial Sequence: Synthetic oligonucleotide
  Sense strand starting at position 745 of SEQ ID NO: 1885404
guguauacuccgucacggu

SEQ ID NO: 2339633 - RNA, 19 nt, Artificial Sequence
  Description of Artificial Sequence: Synthetic oligonucleotide
  Antisense strand to SEQ ID NO: 2339632
accgugacggaguauacac

SEQ ID NO: 2339634 - RNA, 19 nt, Artificial Sequence
  Description of Artificial Sequence: Synthetic oligonucleotide
  Sense strand starting at position 746 of SEQ ID NO: 1885404
uguauacuccgucacggua

SEQ ID NO: 2339635 - RNA, 19 nt, Artificial Sequence
  Description of Artificial Sequence: Synthetic oligonucleotide
  Antisense strand to SEQ ID NO: 2339634
uaccgugacggaguauaca
